(19) United States
(12) Patent Application Publication
(10) Pub. No.: US 2011/0252509 A1
(43) Pub. Date: Oct. 13, 2011

(54) Method for Producing a Transgenic Cell with Increased Gamma-Aminobutyric Acid (Gaba) Content

(75) Inventors: Janneke Hendriks, Schwielowsee (DE); Hardy Schön, Berlin (DE); Oliver Thimm, Berlin (DE); Volker Haake, Berlin (DE); Gunnar Plesch, Potsdam (DE); Piotr Puzio, Mariakerke (BE); Astrid Blau, Stahnsdorf (DE); Michael Manfred Herold, Berlin (DE); Birgit Wendel, Berlin (DE); Beate Kamlage, Berlin (DE); Florian Schauwecker, Berlin (DE)

(73) Assignee: BASF Plant Sceince GmbH, Limburgerhof (DE)

(21) Appl. No.: 13/125,338

(22) PCT Filed: Oct. 23, 2009
(86) PCT No.: PCT/EP09/63979

§ 371 Date: Apr. 21, 2011

(30) Foreign Application Priority Data
Oct. 23, 2008 (EP) 08167450.9

(51) Int. Cl. A01H 5/00; C12N 15/63; C12N 5/10; G01N 33/53; C07H 21/04; C12P 21/00; C07K 16/14; C07K 16/16; C07K 16/12; A01H 5/10; A01N 63/00; C12Q 1/68; A01N 37/18; A01N 57/16; C07K 16/40; C07K 14/395; C07K 14/415; C12N 9/16; C12N 9/12; C12N 9/10; C12N 9/14; C12N 9/04; C12N 9/52; C07K 14/245; C12N 9/90; A01P 21/00; C12N 15/82

(52) U.S. Cl. 800/306; 435/468; 435/320.1; 435/419; 435/412; 435/415; 435/416; 435/411; 435/414; 435/417; 435/7.1; 536/23.2; 435/69.1; 536/23.6; 536/23.7; 536/23.74; 530/387.9; 800/298; 800/320.1; 800/320.3; 800/320; 800/320.2; 800/312; 800/322; 800/314; 800/317.1; 800/317; 800/317.2; 800/317.3; 800/317.4; 504/117; 435/6.1; 435/6.18; 504/334; 504/196; 530/371; 530/370; 435/196; 435/194; 435/193; 435/195; 435/190; 435/220; 530/350; 435/233

(57) ABSTRACT

This invention relates generally to a method for producing a transgenic cell with increased gamma-aminobutyric acid (GABA) content as compared to a corresponding non-transformed wild type cell.

[0001] This invention relates generally to a method for producing a transgenic cell with increased gamma-aminobutyric acid (GABA) content as compared to a corresponding non-transformed wild type cell.

[0002] In particular, this invention relates to plant cells and plants with increased gamma-aminobutyric acid (GABA) content as compared to a corresponding non-transformed wild type.

[0003] The invention also deals with methods of producing and screening for and breeding such plant cells or plants.

[0004] Gamma-aminobutyric acid is used to enhance growth of specified plants, prevent development of powdery mildew on grapes, and suppress certain other plant diseases. Humans and animals normally ingest and metabolize gamma-aminobutyric acid in variable amounts. Gamma-aminobutyric acid was registered (licensed for sale) as growth enhancing pesticidal active ingredient in 1998. Gamma-aminobutyric acid is an important signal which helps to regulate mineral availability in plants. Minerals support the biochemical pathways governing growth and reproduction as well as the pathways that direct plant's response to a variety of biotic and abiotic stresses. Mineral needs are especially high during times of stress and at certain stages of plant growth. Gamma-aminobutyric acid levels in plants naturally increase at these times.

[0005] Gamma-Aminobutyric acid (GABA), a nonprotein amino acid, is often accumulated in plants following environmental stimuli that can also cause ethylene production. Exogenous GABA causes up to a 14-fold increase in the ethylene production rate after about 12 h. GABA causes increases in ACC synthase mRNA accumulation, ACC levels, ACC oxidase mRNA levels and in vitro ACC oxidase activity. Possible roles of GABA as a signal transducer are suggested, see Plant Physiol. 115(1):129-35(1997).

[0006] Gamma-aminobutyric acid (GABA), a four-carbon non-protein amino acid, is a significant component of the free amino acid pool in most prokaryotic and eukaryotic organisms. In plants, stress initiates a signal-transduction pathway, in which increased cytosolic Ca²⁺ activates Ca²⁺/calmodulin-dependent glutamate decarboxylase activity and GABA synthesis. Elevated H⁺ and substrate levels can also stimulate glutamate decarboxylase activity. GABA accumulation probably is mediated primarily by glutamate decarboxylase. Experimental evidence supports the involvement of GABA synthesis in pH regulation, nitrogen storage, plant development and defence, as well as a compatible osmolyte and an alternative pathway for glutamate utilization, see Trends Plant Sci. 4(11):446-452 (1999).

[0007] Rapid GABA accumulation in response to wounding may play a role in plant defense against insects (Ramputh and Brown, Plant Physiol. 111(1996): 1349-1352). The development of gamma aminobutyrate (GABA) as a potential control agent in plant—invertebrate pest systems has been reviewed in Shelp et al., Canadien Journal of Botany (2003) 81, 11, 1045-1048. The authors describe that available evidence indicates that GABA accumulation in plants in response to biotic and abiotic stresses is mediated via the activation of glutamate decarboxylase. More applied research, based on the fact that GABA acts as an inhibitory neurotransmitter in invertebrate pests, indicates that ingested GABA disrupts nerve functioning and causes damage to oblique-banded leafroller larvae, and that walking or herbivory by tobacco budworm and oblique-banded leafroller larvae stimulate GABA accumulation in soybean and tobacco, respectively. In addition, elevated levels of endogenous GABA in genetically engineered tobacco deter feeding by tobacco budworm larvae and infestation by the northern root-knot nematode. Therefore the author concluded that genetically engineered crop species having high GABA-producing potential may be an alternative strategy to chemical pesticides for the management of invertebrate pests.

[0008] During angiosperm reproduction, pollen grains form a tube that navigates through female tissues to the micropyle, delivering sperm to the egg. In vitro, GABA stimulates pollen tube growth.

[0009] Much of the recent work on GABA in plants has concentrated on its metabolic role (Fait et al., Trends in Plant Sci., Vol. 13, Nr. 1, pp 14-19, 2007) and on stress/pest-associated and signalling roles (Bouche et al., Trends in Plant Sci., Vol. 9, Nr. 3, pp 110-115, 2004).

[0010] Accumulation of GABA in plant tissues and transport fluids are responses to many abiotic stresses (Allan et al., J Exp Bot, Vol. 59, No. 9, pp. 2555-2564, 2008). Beuve et al. (in PCE, 27, 1035-1046, 2004) found that nitrate influx and GABA were positively correlated in short- and long-term experiments and that exogenous GABA supply to the roots induced a significant increase of BnNrt2 (Nitrate transporter) mRNA expression.

[0011] A further approach was the use of GABA for stimulation of plant growth by applying GABA to plants foliage, stems and/or roots in a 1 to 5000 ppm GABA solution, preferrably together with a readily metabolized carbon source (organic acids, amino acids, simple carbohydrates, and mixtures of organic acids amino acids and simple carbohydrates).

[0012] Even though the role of GABA in the cell is not yet understood and the action mechanisms not yet clarified, due to these physiological roles and agrobio-technological potential of GABA there is a need to identify genes of enzymes and other proteins involved in GABA metabolism.

[0013] Especially there is a need to generate mutants or transgenic plant lines with which to modify the GABA content in plants in order to enhace the plant yield traits.

[0014] Accordingly, in a first embodiment, the invention relates to a method for producing a transgenic cell with increased gamma-aminobutyric acid (GABA) content as compared to a corresponding non-transformed wild type cell by increasing or generating one or more activities selected from the group consisting of: 60S ribosomal protein, ABC transporter permease protein, acetyltransferase, acyl-carrier protein, At4g32480-protein, At5g16650-protein, ATP-binding protein, Autophagy-related protein, auxin response factor, auxin transcription factor, b1003-protein, b1522-protein, b2739-protein, b3646-protein, B4029-protein, Branched-chain amino acid permease, calcium-dependent protein kinase, cytochrome c oxidase subunit VIII, elongation factor Tu, Factor arrest protein, fumarylacetoacetate hydrolase, geranylgeranyl pyrophosphate synthase, glucose dehydrogenase, glycosyl transferase, harpin-induced family protein, homocitrate synthase, hydrolase, isochorismate synthase, MFS-type transporter protein, microsomal beta-keto-reductase, polygalacturonase, protein phosphatase, pyruvate kinase, Sec-independent protein translocase subunit, serine protease, thioredoxin, thioredoxin family protein, transcriptional regulator, ubiquinone biosynthesis monooxygenase, and YHR213W-protein.

[0015] Accordingly, in one embodiment, the method according to the invention relates to a method, which comprises:

providing a non-human cell or organism, a microorganism, a non-human animal, animal tissue or animal cell, preferably a plant cell, a plant tissue a plant; and
increasing or generating one or more activities selected from the group consisting of: 60S ribosomal protein, ABC transporter permease protein, acetyltransferase, acyl-carrier protein, At4g32480-protein, At5g16650-protein, ATP-binding protein, Autophagy-related protein, auxin response factor, auxin transcription factor, b1003-protein, b1522-protein, b2739-protein, b3646-protein, B4029-protein, Branched-chain amino acid permease, calcium-dependent protein kinase, cytochrome c oxidase subunit VIII, elongation factor Tu, Factor arrest protein, fumarylacetoacetate hydrolase, geranylgeranyl pyrophosphate synthase, glucose dehydrogenase, glycosyl transferase, harpin-induced family protein, homocitrate synthase, hydrolase, isochorismate synthase, MFS-type transporter protein, microsomal beta-keto-reductase, polygalacturonase, protein phosphatase, pyruvate kinase, Sec-independent protein translocase subunit, serine protease, thioredoxin, thioredoxin family protein, transcriptional regulator, ubiquinone biosynthesis monooxygenase, and YHR213W-protein., e.g. conferring an increase of GABA in said organism; and
growing said non-human cell or organism, a microorganism, a non-human animal, animal tissue or animal cell, preferably a plant cell, a plant tissue a plant under conditions which permit the production of the increased GABA content
and optionally the GABA synthesized by the organism is recovered or isolated.

[0016] In a further embodiment the invention provides a method for producing a transgenic cell with increased gamma-aminobutyric acid (GABA) content as compared to a corresponding non-transformed wild type cell comprising at least one of the steps selected from the group consisting of:
[0017] (i) increasing or generating the activity of a polypeptide comprising a polypeptide, a consensus sequence or at least one polypeptide motif as depicted in column 5 or 7 of table II or of table IV, respectively;
[0018] (ii) increasing or generating the activity of an expression product of a nucleic acid molecule comprising a polynucleotide as depicted in column 5 or 7 of table I, and
[0019] (iii) increasing or generating the activity of a functional equivalent of (i) or (ii).

[0020] In a further embodiment the invention provides a method for producing a transgenic cell with increased gamma-aminobutyric acid (GABA) content as compared to a corresponding non-transformed wild type cell wherein the expression of at least one nucleic acid molecule comprising a nucleic acid molecule selected from the group consisting of:
[0021] a) a nucleic acid molecule encoding the polypeptide shown in column 5 or 7 of Table II;
[0022] b) a nucleic acid molecule shown in column 5 or 7 of Table I;
[0023] c) a nucleic acid molecule, which, as a result of the degeneracy of the genetic code, can be derived from a polypeptide sequence depicted in column 5 or 7 of Table II and confers an increased GABA content as compared to a corresponding non-transformed wild type plant cell, a plant or a part thereof;
[0024] d) a nucleic acid molecule having at least 30% identity with the nucleic acid molecule sequence of a polynucleotide comprising the nucleic acid molecule shown in column 5 or 7 of Table I and confers an increased GABA content as compared to a corresponding non-transformed wild type plant cell, a plant or a part thereof;
[0025] e) a nucleic acid molecule encoding a polypeptide having at least 30% identity with the amino acid sequence of the polypeptide encoded by the nucleic acid molecule of (a) to (c) and having the activity represented by a nucleic acid molecule comprising a polynucleotide as depicted in column 5 of Table I and confers an increased GABA content as compared to a corresponding non-transformed wild type plant cell, a plant or a part thereof;
[0026] f) nucleic acid molecule which hybridizes with a nucleic acid molecule of (a) to (c) under stringent hybridization conditions and confers an increased GABA content as compared to a corresponding non-transformed wild type plant cell, a plant or a part thereof;
[0027] g) a nucleic acid molecule encoding a polypeptide which can be isolated with the aid of monoclonal or polyclonal antibodies made against a polypeptide encoded by one of the nucleic acid molecules of (a) to (e) and having the activity represented by the nucleic acid molecule comprising a polynucleotide as depicted in column 5 of Table I;
[0028] h) a nucleic acid molecule encoding a polypeptide comprising the consensus sequence or one or more polypeptide motifs as shown in column 7 of Table IV and preferably having the activity represented by a nucleic acid molecule comprising a polynucleotide as depicted in column 5 of Table II or IV;
[0029] i) a nucleic acid molecule encoding a polypeptide having the activity represented by a protein as depicted in column 5 of Table II and confers an increased GABA content as compared to a corresponding non-transformed wild type plant cell, a plant or a part thereof;
[0030] j) nucleic acid molecule which comprises a polynucleotide, which is obtained by amplifying a cDNA library or a genomic library using the primers in column 7 of Table III and preferably having the activity represented by a nucleic acid molecule comprising a polynucleotide as depicted in column 5 of Table II or IV; and
[0031] k) a nucleic acid molecule which is obtainable by screening a suitable nucleic acid library under stringent hybridization conditions with a probe comprising a complementary sequence of a nucleic acid molecule of (a) or (b) or with a fragment thereof, having at least 15 nt, preferably 20 nt, 30 nt, 50 nt, 100 nt, 200 nt or 500 nt of a nucleic acid molecule complementary to a nucleic acid molecule sequence characterized in (a) to (e) and encoding a polypeptide having the activity represented by a protein comprising a polypeptide as depicted in column 5 of Table II;
   is increased or generated.

[0032] In a further embodiment the invention provides a method for producing a transgenic cell with increased gamma-aminobutyric acid (GABA) content as compared to a corresponding non-transformed wild type cell, wherein the transgenic cell is a plant cell, a plant or a part thereof with increased gamma-aminobutyric acid (GABA) content as compared to a corresponding non-transformed wild type.

[0033] In a further embodiment the invention provides a method for producing a transgenic cell with increased gamma-aminobutyric acid (GABA) content as compared to a corresponding non-transformed wild type cell wherein the transgenic plant cell, a plant or a part thereof is derived from a monocotyledonous plant, a dicotyledonous plant or a gymnosperm plant.

[0034] In a further embodiment the invention provides a method for producing a transgenic cell with increased gamma-aminobutyric acid (GABA) content as compared to a corresponding non-transformed wild type cell wherein the transgenic plant is selected from the group consisting of maize, wheat, rye, oat, triticale, rice, barley, soybean, peanut, cotton, oil seed rape, including canola and winter oil seed rape, corn, manihot, pepper, sunflower, flax, borage, safflower, linseed, primrose, rapeseed, turnip rape, tagetes, solanaceous plants, potato, tobacco, eggplant, tomato, Vicia species, pea, alfalfa, coffee, cacao, tea, Salix species, oil palm, coconut, perennial grass, forage crops and Arabidopsis thaliana.

[0035] In a further embodiment the invention provides an isolated nucleic acid molecule comprising a nucleic acid molecule selected from the group consisting of:
[0036] a. a nucleic acid molecule encoding the polypeptide shown in column 5 or 7 of Table II B;
[0037] b. a nucleic acid molecule shown in column 5 or 7 of Table I B;
[0038] c. a nucleic acid molecule, which, as a result of the degeneracy of the genetic code, can be derived from a polypeptide sequence depicted in column 5 or 7 of Table II and confers an increased GABA content as compared to a corresponding non-transformed wild type plant cell, a plant or a part thereof;
[0039] d. a nucleic acid molecule having at least 30% identity with the nucleic acid molecule sequence of a polynucleotide comprising the nucleic acid molecule shown in column 5 or 7 of Table I and confers an increased GABA content as compared to a corresponding non-transformed wild type plant cell, a plant or a part thereof;
[0040] e. a nucleic acid molecule encoding a polypeptide having at least 30% identity with the amino acid sequence of the polypeptide encoded by the nucleic acid molecule of (a) to (c) and having the activity represented by a nucleic acid molecule comprising a polynucleotide as depicted in column 5 of Table I and confers an increased GABA content as compared to a corresponding non-transformed wild type plant cell, a plant or a part thereof;
[0041] f. nucleic acid molecule which hybridizes with a nucleic acid molecule of (a) to (c) under stringent hybridization conditions and confers increased GABA content as compared to a corresponding non-transformed wild type plant cell, a plant or a part thereof;
[0042] g. a nucleic acid molecule encoding a polypeptide which can be isolated with the aid of monoclonal or polyclonal antibodies made against a polypeptide encoded by one of the nucleic acid molecules of (a) to (e) and having the activity represented by the nucleic acid molecule comprising a polynucleotide as depicted in column 5 of Table I;
[0043] h. a nucleic acid molecule encoding a polypeptide comprising the consensus sequence or one or more polypeptide motifs as shown in column 7 of Table IV and preferably having the activity represented by a nucleic acid molecule comprising a polynucleotide as depicted in column 5 of Table II or IV;
[0044] i. a nucleic acid molecule encoding a polypeptide having the activity represented by a protein as depicted in column 5 of Table II and confers an increased GABA content as compared to a corresponding non-transformed wild type plant cell, a plant or a part thereof;
[0045] j. nucleic acid molecule which comprises a polynucleotide, which is obtained by amplifying a cDNA library or a genomic library using the primers in column 7 of Table III which do not start at their 5′-end with the nucleotides ATA and preferably having the activity represented by a nucleic acid molecule comprising a polynucleotide as depicted in column 5 of Table II or IV;
[0046] and
[0047] k. a nucleic acid molecule which is obtainable by screening a suitable nucleic acid library under stringent hybridization conditions with a probe comprising a complementary sequence of a nucleic acid molecule of (a) or (b) or with a fragment thereof, having at least 15 nt, preferably 20 nt, 30 nt, 50 nt, 100 nt, 200 nt or 500 nt of a nucleic acid molecule complementary to a nucleic acid molecule sequence characterized in (a) to (e) and encoding a polypeptide having the activity represented by a protein comprising a polypeptide as depicted in column 5 of Table II.

[0048] In a further embodiment the invention provides a nucleic acid molecule, whereby the nucleic acid molecule according to (a) to (k) is at least in one or more nucleotides different from the sequence depicted in column 5 or 7 of table I A and preferably encodes a protein which differs at least in one or more amino acids from the protein sequences depicted in column 5 or 7 of table II A.

[0049] In a further embodiment the invention provides a nucleic acid construct which confers the expression of the above described nucleic acid molecule, comprising one or more regulatory elements.

[0050] In a further embodiment the invention provides a vector comprising said nucleic acid molecule or said nucleic acid.

[0051] In a further embodiment the invention provides a host cell, which has been transformed stably or transiently with said vector, said nucleic acid molecule or said nucleic acid construct and which shows due to the transformation an increased gamma-aminobutyric acid (GABA) content as compared to a corresponding non-transformed wild type.

[0052] In a further embodiment the invention provides a process for producing a polypeptide, wherein the polypeptide is expressed in said host nucleus or host cell as mentioned above.

[0053] In a further embodiment the invention provides a polypeptide produced by the process as mentioned above or encoded by the nucleic acid molecule as mentioned above whereby the polypeptide distinguishes over the sequence as shown in table II A by one or more amino acids

[0054] In a further embodiment the invention provides an antibody, which binds specifically to the polypeptide produced by the process as mentioned above or encoded by the nucleic acid molecule as mentioned above whereby the polypeptide distinguishes over the sequence as shown in table II A by one or more amino acids.

[0055] In a further embodiment the invention provides a cell nucleus, cell, plant cell nucleus, plant cell plant tissue, propagation material, pollen, progeny, harvested material or a plant comprising the nucleic acid molecule as depicted above or the host nucleus or the host cell as depicted above.

[0056] In a further embodiment the invention provides a transgenic plant cell nucleus, transgenic plant cell, transgenic plant or part thereof as described above derived from a monocotyledonous plant or a dicotyledonous plant.

[0057] In a further embodiment the invention provides the transgenic plant cell nucleus, transgenic plant cell, transgenic plant or part thereof as mentioned above, wherein the corresponding plant is selected from the group consisting of corn (maize), wheat, rye, oat, triticale, rice, barley, soybean, peanut, cotton, oil seed rape, including canola and winter oil seed rape, manihot, pepper, sunflower, flax, borage, safflower, linseed, primrose, rapeseed, turnip rape, tagetes, solanaceous plants comprising potato, tobacco, egg-plant, tomato; Vicia species, pea, alfalfa, coffee, cacao, tea, Salix species, oil palm, coconut, perennial grass, forage crops and Arabidopsis thaliana.

[0058] Preferably the transgenic plant cell nucleus, transgenic plant cell, transgenic plant or part thereof of is selected from the group consisting of corn, soy, oil seed rape (including canola and winter oil seed rape), cotton, wheat and rice.

[0059] In a further embodiment the invention provides a transgenic plant comprising one or more of plant cell nuclei or plant cells, progeny, seed or pollen or produced by a transgenic plant as mentioned above.

[0060] In a further embodiment the invention provides a transgenic plant, transgenic plant cell nucleus, transgenic plant cell, plant comprising one or more of such transgenic plant cell nuclei or plant cells, progeny, seed or pollen derived from or produced by a transgenic plant a described above, wherein said transgenic plant, transgenic plant cell nucleus, transgenic plant cell, plant comprising one or more of such transgenic plant cell nuclei or plant cells, progeny, seed or pollen is genetically homozygous for a transgene conferring increased yield as compared to a corresponding non-transformed wild type plant cell, a transgenic plant or a part thereof.

[0061] In a further embodiment the invention provides a process for the identification of a compound conferring an increased gamma-aminobutyric acid (GABA) content as compared to a corresponding non-transformed wild type, comprising the steps:
[0062] a) culturing a plant cell; a plant or a part thereof maintaining a plant expressing the polypeptide of the invention, conferring an increased yield under condition of stress as compared to a corresponding non-transformed wild type plant cell, a plant or a part thereof; a non-transformed wild type plant or a part thereof and a readout system capable of interacting with the polypeptide under suitable conditions which permit the interaction of the polypeptide with said readout system in the presence of a compound or a sample comprising a plurality of compounds and capable of providing a detectable signal in response to the binding of a compound to said polypeptide under conditions which permit the expression of said readout system and of said polypeptide conferring an increased yield under condition of stress as compared to a corresponding non-transformed wild type plant cell, a plant or a part thereof; a non-transformed wild type plant or a part thereof;
[0063] b) identifying if the compound is an effective agonist by detecting the presence or absence or increase of a signal produced by said readout system.

[0064] In a further embodiment the invention provides a method for the production of an agricultural composition comprising the steps of the method described above and formulating the compound identified above in a form acceptable for an application in agriculture.

[0065] In a further embodiment the invention provides a composition comprising the nucleic acid molecule of the invention, the polypeptide of the invention, said nucleic acid construct, said vector, the compound mentioned above, the antibody of the invention, and optionally an agricultural acceptable carrier.

[0066] In a further embodiment the invention provides an isolated polypeptide as depicted in table II, preferably table II B which is selected from Arabidopsis thaliana, Azotobacter vinelandii, Brassica napus, Escherichia coli, Physcomitrella patens, Saccharomyces cerevisiae, Synechocystis sp., and/or Thermus thermophilus.

[0067] In a further embodiment the invention provides the use of a nucleic acid molecule encoding a polypeptide with the activity selected from the group consisting of 60S ribosomal protein, ABC transporter permease protein, acetyltransferase, acyl-carrier protein, At4g32480-protein, At5g16650-protein, ATP-binding protein, Autophagy-related protein, auxin response factor, auxin transcription factor, b1003-protein, b1522-protein, b2739-protein, b3646-protein, B4029-protein, Branched-chain amino acid permease, calcium-dependent protein kinase, cytochrome c oxidase subunit VIII, elongation factor Tu, Factor arrest protein, fumarylacetoacetate hydrolase, geranylgeranyl pyrophosphate synthase, glucose dehydrogenase, glycosyl transferase, harpin-induced family protein, homocitrate synthase, hydrolase, isochorismate synthase, MFS-type transporter protein, microsomal beta-keto-reductase, polygalacturonase, protein phosphatase, pyruvate kinase, Sec-independent protein translocase subunit, serine protease, thioredoxin, thioredoxin family protein, transcriptional regulator, ubiquinone biosynthesis monooxygenase, and YHR213W-protein for preparing a cell, preferably plant cell with increased gamma-aminobutyric acid (GABA) content as compared to a corresponding non-transformed wild type.

[0068] In a further embodiment the invention provides the use of a nucleic acid molecule encoding a polypeptide with the activity selected from the group consisting of 60S ribosomal protein, ABC transporter permease protein, acetyltransferase, acyl-carrier protein, At4g32480-protein, At5g16650-protein, ATP-binding protein, Autophagy-related protein, auxin response factor, auxin transcription factor, b1003-protein, b1522-protein, b2739-protein, b3646-protein, B4029-protein, Branched-chain amino acid permease, calcium-dependent protein kinase, cytochrome c oxidase subunit VIII, elongation factor Tu, Factor arrest protein, fumarylacetoacetate hydrolase, geranylgeranyl pyrophosphate synthase, glucose dehydrogenase, glycosyl transferase, harpin-induced family protein, homocitrate synthase, hydrolase, isochorismate synthase, MFS-type transporter protein, microsomal beta-keto-reductase, polygalacturonase, protein phosphatase, pyruvate kinase, Sec-independent protein translocase subunit, serine protease, thioredoxin, thioredoxin family protein, transcriptional regulator, ubiquinone biosynthesis monooxygenase, and YHR213W-protein as markers for selection of plants or plant cells with increased gamma-aminobutyric acid (GABA) content as compared to a corresponding non-transformed wild type.

[0069] In a further embodiment the method according to the invention is used to produce a transgenic plant cell, a plant or a part thereof with increased gamma-aminobutyric acid (GABA) content as compared to a corresponding non-transformed wild type which is derived from a monocotyledonous plant, a dicotyledonous plant or a gymnosperm plant.

[0070] The present invention provides methods for producing transgenic plant cells or plants with increased gamma-aminobutyric acid (GABA) content as compared to a corresponding non-transformed wild type and which can show increased tolerance to environmental stress and/or increased yield and/or biomass production as compared to a corresponding (non-transformed) wild type or starting plant cell by increasing or generating one or more of said activities mentioned above.

[0071] The present invention provides methods for producing transgenic plant cells or plants with increased gamma-aminobutyric acid (GABA) content as compared to a corresponding non-transformed wild type and with an increased abiotic stress resistance as compared to a corresponding (non-transformed) wild type or starting plant cell by increasing or generating one or more of said activities mentioned above.

[0072] The present invention provides methods for producing transgenic plant cells or plants with increased gamma-aminobutyric acid (GABA) content as compared to a corresponding non-transformed wild type and with an increased nitrate influx as compared to a corresponding (non-transformed) wild type or starting plant cell by increasing or generating one or more of said activities mentioned above.

[0073] The present invention provides methods for producing transgenic plant cells or plants with increased gamma-aminobutyric acid (GABA) content as compared to a corresponding non-transformed wild type and with an increased plant growth as compared to a corresponding (non-transformed) wild type or starting plant cell by increasing or generating one or more of said activities mentioned above.

[0074] Gamma-aminobutyric acid enhances nutrient uptake by roots and leaves so that plant nutrient levels are higher than those achieved by using nutrients alone. When plants are stressed and nutrient uptake is limited, gamma-aminobutyric acid can facilitates nutrient utilization, thereby enhancing growth during stress and/or under sub-optimal growing and cultering conditions of plants.

[0075] Accordingly, in one embodiment, the present invention provides a method for producing a plant with increased yield as compared to a corresponding wild type plant comprising at least the following step: increasing or generating one or more activities selected from the group consisting of 60S ribosomal protein, ABC transporter permease protein, acetyltransferase, acyl-carrier protein, At4g32480-protein, At5g16650-protein, ATP-binding protein, Autophagy-related protein, auxin response factor, auxin transcription factor, b1003-protein, b1522-protein, b2739-protein, b3646-protein, B4029-protein, Branched-chain amino acid permease, calcium-dependent protein kinase, cytochrome c oxidase subunit VIII, elongation factor Tu, Factor arrest protein, fumarylacetoacetate hydrolase, geranylgeranyl pyrophosphate synthase, glucose dehydrogenase, glycosyl transferase, harpin-induced family protein, homocitrate synthase, hydrolase, isochorismate synthase, MFS-type transporter protein, microsomal beta-keto-reductase, polygalacturonase, protein phosphatase, pyruvate kinase, Sec-independent protein translocase subunit, serine protease, thioredoxin, thioredoxin family protein, transcriptional regulator, ubiquinone biosynthesis monooxygenase, and YHR213W-protein.

[0076] “Yield” as described herein refers in one embodiment to harvestable yield of a plant. The yield of a plant can depend on the specific plant/crop of interest as well as its intended application (such as food production, feed production, processed food production, biofuel, biogas or alcohol production, or the like) of interest in each particular case. Thus, in one embodiment, yield is calculated as harvest index (expressed as a ratio of the weight of the respective harvestable parts divided by the total biomass), harvestable parts weight per area (acre, squaremeter, or the like); and the like.

[0077] Preferably, the preferred enhanced or improved yield characteristics of a plant described herein according to the present invention can be achieved in the absence or presence of stress conditions.

[0078] The meaning of “yield” is, thus, mainly dependent on the crop of interest and the intended application, and it is understood, that the skilled person will understand in each particular case what is meant from the circumstances of the description.

[0079] For the purposes of the description of the present invention, enhanced or increased “yield” refers to one or more yield parameters selected from the group consisting of biomass yield, dry biomass yield, aerial dry biomass yield, underground dry biomass yield, freshweight biomass yield, aerial freshweight biomass yield, underground freshweight biomass yield; enhanced yield of harvestable parts, either dry or freshweight or both, either aerial or underground or both; enhanced yield of crop fruit, either dry or freshweight or both, either aerial or underground or both; and preferably enhanced yield of seeds, either dry or freshweight or both, either aerial or underground or both.

[0080] The term “yield” as used herein generally refers to a measurable product from a plant, particularly a crop.

[0081] Yield and yield increase (in comparison to an origin or wild-type plant) can be measured in a number of ways. It is understood that a skilled person will be able to apply the correct meaning in view of the particular embodiments, the particular crop concerned and the specific purpose or application

[0082] In one embodiment, an increase in yield refers to increased biomass yield and/or an increased seed yield.

[0083] In one embodiment, “yield” refers to biomass yield, e.g. to dry weight biomass yield and/or freshweight biomass yield. Biomass yield refers to the aerial or underground parts of a plant, depending on the specific circumstances (test conditions, specific crop of interest, application of interest, and the like). In one embodiment, biomass yield refers to the aerial and underground parts. Biomass yield may be calculated as freshweight, dry weight or a moisture adjusted basis. Biomass yield may be calculated on a per plant basis or in relation to a specific area (e.g. biomass yield per acre/square meter/or the like).

[0084] In other embodiment, “yield” refers to seed yield which can be measured by one or more of the following parameters: number of seeds or number of filled seeds (per plant or per area (acre/square meter/or the like)); seed filling rate (ratio between number of filled seeds and total number of seeds); number of flowers per plant; seed biomass or total seeds weight (per plant or per area (acre/square meter/or the like); thousand kernel weight (TKW; extrapolated from the number of filled seeds counted and their total weight; an increase in TKW may be caused by an increased seed size, an increased seed weight, an increased embryo size, and/or an increased endosperm). Other parameters allowing to measure seed yield are also known in the art. Seed yield may be determined on a dry weight or on a fresh weight basis, or typically on a moisture adjusted basis, e.g. at 15.5 percent moisture.

[0085] Said increased yield in accordance with the present invention can typically be achieved by enhancing or improving, in comparison to an origin or wild-type plant, one or more yield-related traits of the plant. Such yield-related traits of a plant the improvement of which results in increased yield comprise, without limitation, the increase of the intrinsic yield capacity of a plant, improved nutrient use efficiency, and/or increased stress tolerance.

[0086] Accordingly, in one embodiment, the yield-related trait conferring an increase of the plant's yield is an increase of the intrinsic yield capacity of a plant and can be, for example, manifested by improving the specific (intrinsic) seed yield (e.g. in terms of increased seed/grain size, increased ear number, increased seed number per ear, improvement of seed filling, improvement of seed composition, embryo and/or endosperm improvements, or the like); modification and improvement of inherent growth and development mechanisms of a plant (such as plant height, plant growth rate, pod number, pod position on the plant, number of internodes, incidence of pod shatter, efficiency of nodulation and nitrogen fixation, efficiency of carbon assimilation, improvement of seedling vigour/early vigour, enhanced efficiency of germination (under stressed or non-stressed conditions), improvement in plant architecture, cell cycle modifications, photosynthesis modifications, various signalling pathway modifications, modification of transcriptional regulation, modification of translational regulation, modification of enzyme activities, and the like); and/or the like.

[0087] Accordingly, in one embodiment, the yield-related trait conferring an increase of the plant's yield is an improvement or increase of stress tolerance of a plant and can be for example manifested by improving or increasing a plant's tolerance against stress, particularly abiotic stress. In the present application, abiotic stress refers generally to abiotic environmental conditions a plant is typically confronted with, including conditions which are typically referred to as “abiotic stress” conditions including, but not limited to, drought (tolerance to drought may be achieved as a result of improved water use efficiency), heat, low temperatures and cold conditions (such as freezing and chilling conditions), salinity, osmotic stress, shade, high plant density, mechanical stress, oxidative stress, and the like.

[0088] Accordingly, in one embodiment, said increased yield in accordance with the present invention can typically be achieved by enhancing or improving, in comparison to a non-transformed starting or wild-type plant, one or more yield-related traits of a plant. Such yield-related traits of a plant of which results in increased yield comprise, without limitation, the increase of the intrinsic yield capacity of a plant, improved nutrient use efficiency, and/or increased stress tolerance, for example an increased drought tolerance and/or low temperature tolerance.

[0089] In one embodiment the abiotic stress resistance and/or tolerance refers to water stress resistance, especially under conditions of transient and repetitive abiotic stress, preferably cycling drought.

[0090] Thus, in one embodiment of the present invention, an increased plant yield is mediated by increasing the “nutrient use efficiency of a plant”, e.g. by improving the nutrient use efficiency of nutrients including, but not limited to, phosphorus, potassium, and nitrogen.

[0091] An increased nutrient use efficiency is in one embodiment an enhanced nitrogen uptake, assimilation, accumulation or utilization. These complex processes are associated with absorption, translocation, assimilation, and redistribution of nitrogen in the plant.

[0092] For example, there is a need for plants that are capable to a more efficiently nitrogen uptake so that less nitrogen is required for growth and therefore resulting in the improved level of yield under nitrogen deficiency or nitrogen limiting conditions. Further, higher yields may be obtained with current or standard levels of nitrogen supply or uptake.

[0093] Accordingly, in one embodiment of the present invention, plant yield is increased by increasing nitrogen uptake of a plant or a part thereof. Thus, it is a further object of this invention to provide a plant, which shows an enhanced nitrogen uptake, and/or exhibit, under conditions of limited nitrogen supply, an increased yield, as compared to a corresponding wild type plant.

[0094] Accordingly, in one embodiment, the present invention relates to a method for increasing the yield, comprising the following steps:

(a) measuring the N content in the soil, and
(b) determining, whether the N-content in the soil is optimal or suboptimal for the growth of an origin or wild type plant, e.g. a crop, and
(c1) growing the plant of the invention in said soil, if the N-content is suboptimal for the growth of the origin or wild type plant, or
(c2) growing the plant of the invention in the soil and comparing the yield with the yield of a standard, an origin or a wild type plant and selecting and growing the plant, which shows the highest yield, if the N-content is optimal for the origin or wild type plant.

[0095] In a further embodiment of the present invention, plant yield is increased by increasing the plant's stress tolerance(s).

[0096] Generally, the term “increased tolerance to stress” can be defined as survival of plants, and/or higher yield production, under stress conditions as compared to a non-transformed wild type or starting plant.

[0097] During its life-cycle, a plant is generally confronted with a diversity of environmental conditions. Any such conditions, which may, under certain circumstances, have an impact on plant yield, are herein referred to as “stress” condition. Environmental stresses may generally be divided into biotic and abiotic (environmental) stresses. Unfavourable nutrient conditions are sometimes also referred to as “environmental stress”. The present invention does also contemplate solutions for this kind of environmental stress, e.g. referring to increased nutrient use efficiency.

[0098] In a preferred embodiment of the present invention, plant yield is increased by increasing the abiotic stress tolerance(s) of a plant or a part thereof.

[0099] For the purposes of the description of the present invention, the terms “enhanced tolerance to abiotic stress”, “enhanced resistance to abiotic environmental stress”, “enhanced tolerance to environmental stress”, “improved adaptation to environmental stress” and other variations and expressions similar in its meaning are used interchangeably and refer, without limitation, to an improvement in tolerance to one or more abiotic environmental stress(es) as described herein and as compared to a corresponding origin or wild type plant or a part thereof.

[0100] The term abiotic stress tolerance(s) refers for example low temperature tolerance, drought tolerance, heat tolerance, salt stress tolerance and others.

[0101] Stress tolerance in plants like low temperature, drought, heat and salt stress tolerance can have a common theme important for plant growth, namely the availability of water. Plants are typically exposed during their life cycle to conditions of reduced environmental water content. The protection strategies are similar to those of chilling tolerance.

[0102] Accordingly, in one embodiment of the present invention, said yield-related trait relates to an increased water use efficiency of the plant of the invention and/or an increased tolerance to drought conditions of the plant of the invention.

[0103] In one embodiment of the present invention drought stress means any environmental stress which leads to a lack of water in plants or reduction of water supply to plants, including a secondary stress by low temperature and/or salt, and/or a primary stress during drought or heat, e.g. desiccation etc.

[0104] In accordance with the present invention, in one embodiment, increased tolerance to drought conditions can be determinated and quantified according to the following method:

[0105] Transformed plants are grown individually in pots in a growth chamber (York Industriekälte GmbH, Mannheim, Germany). Germination is induced. In case the plants are Arabidopsis thaliana sown seeds are kept at 4° C., in the dark, for 3 days in order to induce germination. Subsequently conditions are changed for 3 days to 20° C./6° C. day/night temperature with a 16/8 h day-night cycle at 150 μE/m2s. Subsequently the plants are grown under standard growth conditions. In case the plants are Arabidopsis thaliana, the standard growth conditions are: photoperiod of 16 h light and 8 h dark, 20° C., 60% relative humidity, and a photon flux density of 200 μE. Plants are grown and cultured until they develop leaves. In case the plants are Arabidopsis thaliana they are watered daily until they were approximately 3 weeks old. Starting at that time drought was imposed by withholding water. After the non-transformed wild type plants show visual symptoms of injury, the evaluation starts and plants are scored for symptoms of drought symptoms and biomass production comparison to wild type and neighbouring plants for 5-6 days in succession.

[0106] In one embodiment increased drought resistance refers to resistance to drought cycles, meaning alternating periods of drought and re-watering. repetitive stress is applied to plants without leading to desiccation.

[0107] In the present invention, enhanced tolerance to cycling drought may, for example and preferably, be determined according to the following method:

[0108] Transformed plants are grown in pots in a growth chamber (e.g. York, Mannheim, Germany). In case the plants are Arabidopsis thaliana soil is prepared as 1:1 (v/v) mixture of nutrient rich soil (GS90, Tantau, Wansdorf, Germany) and quarz sand. Pots (6 cm diameter) are filled with this mixture and placed into trays. Water is added to the trays to let the soil mixture take up appropriate amount of water for the sowing procedure (day 1) and subsequently seeds of transgenic A. thaliana plants and their wild-type controls are sown in pots. Then the filled tray is covered with a transparent lid and transferred into a precooled (4° C.-5° C.) and darkened growth chamber. Stratification is established for a period of 3 days in the dark at 4° C.-5° C. or, alternatively, for 4 days in the dark at 4° C. Germination of seeds and growth is initiated at a growth condition of 20° C., 60% relative humidity, 16 h photoperiod and illumination with fluorescent light at 200 μmol/m2s. Covers are removed 7-8 days after sowing. BASTA selection can be done at day 10 or day 11 (9 or 10 days after sowing) by spraying pots with plantlets from the top. In the standard experiment, a 0.07% (v/v) solution of BASTA concentrate (183 g/l glufosinate-ammonium) in tap water is sprayed once or, alternatively, a 0.02% (v/v) solution of BASTA is sprayed three times. The wild-type control plants are sprayed with tap water only (instead of spraying with BASTA dissolved in tap water) but are otherwise treated identically. Plants are individualized 13-14 days after sowing by removing the surplus of seedlings and leaving one seedling in soil. Transgenic events and wild-type control plants are evenly distributed over the chamber.

[0109] The water supply throughout the experiment is limited and plants are subjected to cycles of drought and re-watering. Watering is carried out at day 1 (before sowing), day 14 or day 15, day 21 or day 22, and, finally, day 27 or day 28. For measuring biomass production, plant fresh weight is determined one day after the final watering (day 28 or day 29) by cutting shoots and weighing them. Besides weighing, phenotypic information is added in case of plants that differ from the wild type control. Plants are in the stage prior to flowering and prior to growth of inflorescence when harvested. Significance values for the statistical significance of the biomass changes are calculated by applying the ‘student's’ t test (parameters: two-sided, unequal variance).

[0110] Accordingly, in one embodiment of the invention, the increased cold resistance manifests in an biomass increase of the transgenic plant of the invention compared to a wild type control under the stress condition of cycling drought.

[0111] Accordingly, in one embodiment, the present invention relates to a method for increasing the yield, comprising the following steps:

(a) determining, whether the water supply in the area for planting is optimal or sub-optimal for the growth of an origin or wild type plant, e.g. a crop, and/or determining the visual symptoms of injury of plants growing in the area for planting; and
(b1) growing the plant of the invention in said soil, if the water supply is suboptimal for the growth of an origin or wild type plant or visual symptoms for drought can be found at a standard, origin or wild type plant growing in the area; or
(b2) growing the plant of the invention in the soil and comparing the yield with the yield of a standard, an origin or a wild type plant and selecting and growing the plant, which shows the highest yield, if the water supply is optimal for the origin or wild type plant.

[0112] Visual symptoms of injury stating for one or any combination of two, three or more of the following features:

a) wilting
b) leaf browning
c) loss of turgor, which results in drooping of leaves or needles stems, and flowers,
d) drooping and/or shedding of leaves or needles,
e) the leaves are green but leaf angled slightly toward the ground compared with controls,
f) leaf blades begun to fold (curl) inward,
g) premature senescence of leaves or needles,
h) loss of chlorophyll in leaves or needles and/or yellowing.

[0113] In a further embodiment of the present invention, said yield-related trait of the plant of the invention is an increased tolerance to heat conditions of said plant.

[0114] In-another embodiment of the present invention, said yield-related trait of the plant of the invention is an increased low temperature tolerance of said plant, e.g. comprising freezing tolerance and/or chilling tolerance.

[0115] Low temperatures impinge on a plethora of biological processes. They retard or inhibit almost all metabolic and cellular processes. The response of plants to low temperature is an important determinant of their ecological range. The problem of coping with low temperatures is exacerbated by the need to prolong the growing season beyond the short summer found at high latitudes or altitudes.

[0116] Most plants have evolved adaptive strategies to protect themselves against low temperatures. Generally, adaptation to low temperature may be divided into chilling tolerance, and freezing tolerance.

[0117] Chilling tolerance is naturally found in species from temperate or boreal zones and allows survival and an enhanced growth at low but non-freezing temperatures. Species from tropical or subtropical zones are chilling sensitive and often show wilting, chlorosis or necrosis, slowed growth and even death at temperatures around 10° C. during one or more stages of development. Accordingly, improved or enhanced “chilling tolerance” or variations thereof refers herein to improved adaptation to low but non-freezing temperatures around 10° C., preferably temperatures between 1 to 18° C., more preferably 4-14° C., and most preferred 8 to 12° C.; hereinafter called “chilling temperature”.

[0118] Freezing tolerance allows survival at near zero to particularly subzero temperatures. It is believed to be promoted by a process termed cold-acclimation which occurs at low but non-freezing temperatures and provides increased freezing tolerance at subzero temperatures. In addition, most species from temperate regions have life cycles that are adapted to seasonal changes of the temperature. For those plants, low temperatures may also play an important role in plant development through the process of stratification and vernalisation. It becomes obvious that a clear-cut distinction between or definition of chilling tolerance and freezing tolerance is difficult and that the processes may be overlapping or interconnected.

[0119] Improved or enhanced “freezing tolerance” or variations thereof refers herein to improved adaptation to temperatures near or below zero, namely preferably temperatures below 4° C., more preferably below 3 or 2° C., and particularly preferred at or below 0 (zero) ° C. or below −4° C., or even extremely low temperatures down to −10° C. or lower; hereinafter called “freezing temperature.

[0120] “Improved adaptation” to environmental stress like e.g. freezing and/or chilling temperatures refers herein to an improved plant performance resulting in an increased yield, particularly with regard to one or more of the yield related traits as defined in more detail above.

[0121] Accordingly, the plant of the invention may in one embodiment show an early seedling growth after exposure to low temperatures in comparison to an chilling-sensitive wild type or origin, improving in a further embodiment seed germination rates. The process of seed germination strongly depends on environmental temperature and the properties of the seeds determine the level of activity and performance during germination and seedling emergence when being exposed to low temperature. The method of the invention further provides in one embodiment a plant which show under chilling condition an reduced delay of leaf development.

[0122] In one embodiment the method of the invention relates to a production of a tolerant major crop, e.g. corn (maize), bean, rice, soy bean, cotton, tomato, banana, cucumber or potato because most major crops are chilling-sensitive.

[0123] In the present invention, enhanced tolerance to low temperature may, for example and preferably, be determined according to the following method:

[0124] Transformed plants are grown in pots in a growth chamber (e.g. York, Mannheim, Germany). In case the plants are Arabidopsis thaliana seeds thereof are sown in pots containing a 3.5:1 (v:v) mixture of nutrient rich soil (GS90, Tantau, Wansdorf, Germany) and sand. Plants are grown under standard growth conditions. In case the plants are Arabidopsis thaliana, the standard growth conditions are: stratification is established for a period of 3 days in the dark at 4° C.-5° C.; germination of seeds and growth at a photoperiod of 16 h light, optionally fluorescent light at 150-200 μmol/m2s, and 8 h dark, 20° C., 60% relative humidity, and a photon flux density of 200 μmol/m2s. BASTA selection can be done at day 9 after sowing by spraying pots with plantlets from the top. Therefore, a 0.07% (v/v) solution of BASTA concentrate (183 g/l glufosinate-ammonium) in tap water is sprayed. The wild-type control plants are sprayed with tap water only (instead of spraying with BASTA dissolved in tap water) but are otherwise treated identically. Plants are grown and cultured. In case the plants are Arabidopsis thaliana they are watered every second day. After 9 to 10 days or after 12-13 days, the plants are individualized. Cold (e.g. chilling at 11-12° C.) is applied 14 days or 14-16 days after sowing until the end of the experiment. After a total growth period of 29 to 31, or 35-37 days the plants are harvested and rated by the fresh weight of the arial parts of the plants, in the case of Arabidopsis preferably the rossettes.

[0125] Accordingly, in one embodiment, the present invention relates to a method for increasing yield, comprising the following steps:

(a) determining, whether the temperature in the area for planting is optimal or sub-optimal for the growth of an origin or wild type plant, e.g. a crop; and
(b1) growing the plant of the invention in said soil; if the temperature is suboptimal low for the growth of an origin or wild type plant growing in the area; or
(b2) growing the plant of the invention in the soil and comparing the yield with the yield of a standard, an origin or a wild type plant and selecting and growing the plant, which shows the highest yield; if the temperature is optimal for the origin or wild type plant.

[0126] In one embodiment of the invention, the term “abiotic stress” encompass even the absence of substantial abiotic stress. In the present invention, the biomass increase may, for example and preferably, be determined according to the following method:

[0127] Transformed plants are grown in pots in a growth chamber (e.g. York, Mannheim, Germany). In case the plants are Arabidopsis thaliana seeds thereof are sown in pots containing a 3.5:1 (v:v) mixture of nutrient rich soil (GS90, Tantau, Wansdorf, Germany) and optionally quarz sand.

[0128] Plants are grown under standard growth conditions.

[0129] Pots are filled with soil mixture and placed into trays. Water is added to the trays to let the soil mixture take up appropriate amount of water for the sowing procedure. In case the plants are Arabidopsis thaliana the seeds for transgenic A. thaliana plants and their non-trangenic wild-type controls are sown in pots (6 cm diameter). Then the filled tray is covered with a transparent lid and transferred into a precooled (4° C.-5° C.) and darkened growth chamber. Stratification is established for a period of 3-4 days in the dark at 4° C.-5° C. Germination of seeds and growth is initiated at a growth condition of 20° C., 60% relative humidity, 16 h photoperiod and illumination with fluorescent light at approximately 170 μmol/m2s. Covers are removed 7-8 days after sowing. BASTA selection is done at day 10 or day 11 (9 or 10 days after sowing) by spraying pots with plantlets from the top. In the standard experiment, a 0.07% (v/v) solution of BASTA concentrate (183 g/l glufosinate-ammonium) in tap water is sprayed once or, alternatively, a 0.02% (v/v) solution of BASTA is sprayed three times. The wild-type control plants are sprayed with tap water only (instead of spraying with BASTA dissolved in tap water) but are otherwise treated identically. Plants are individualized 13-14 days after sowing by removing the surplus of seedlings and leaving one seedling in soil. Transgenic events and wild-type control plants are evenly distributed over the chamber.

[0130] Watering is carried out every two days after removing the covers in a standard experiment or, alternatively, every day. For measuring biomass performance, plant fresh weight was determined at harvest time (24-29 days after sowing) by cutting shoots and weighing them. Plants are in the stage prior to flowering and prior to growth of inflorescence when harvested. Transgenic plants are compared to the non-transgenic wild-type control plants harvested at the same day. Significance values for the statistical significance of the biomass changes can be calculated by applying the ‘student's’ t test (parameters: two-sided, unequal variance).

[0131] Biomass production can be measured by weighing plant rosettes. Biomass increase can be calculated as ratio of average weight for transgenic plants compared to average weight of wild type control plants from the same experiment.

[0132] In a further embodiment of the present invention, yield-related trait may also be increased salinity tolerance (salt tolerance), tolerance to osmotic stress, increased shade tolerance, increased tolerance to a high plant density, increased tolerance to mechanical stresses, and/or increased tolerance to oxidative stress.

[0133] Accordingly, in one embodiment of the present invention, yield is increased by improving one or more of the yield-related traits as defined herein.

[0134] Thus, the present invention provides a method for producing a transgenic plant showing an increased nutrient use efficiency as compared to a corresponding origin or wild type plant, by increasing or generating one or more activities selected from the group consisting of 60S ribosomal protein, ABC transporter permease protein, acetyltransferase, acyl-carrier protein, At4g32480-protein, At5g16650-protein, ATP-binding protein, Autophagy-related protein, auxin response factor, auxin transcription factor, b1003-protein, b1522-protein, b2739-protein, b3646-protein, B4029-protein, Branched-chain amino acid permease, calcium-dependent protein kinase, cytochrome c oxidase subunit VIII, elongation factor Tu, Factor arrest protein, fumarylacetoacetate hydrolase, geranylgeranyl pyrophosphate synthase, glucose dehydrogenase, glycosyl transferase, harpin-induced family protein, homocitrate synthase, hydrolase, isochorismate synthase, MFS-type transporter protein, microsomal beta-keto-reductase, polygalacturonase, protein phosphatase, pyruvate kinase, Sec-independent protein translocase subunit, serine protease, thioredoxin, thioredoxin family protein, transcriptional regulator, ubiquinone biosynthesis monooxygenase, and YHR213W-protein (“activities”).

[0135] In other embodiments, the present invention provides a method for producing a plant showing an increased stress resistance, particularly abiotic stress resistance, as compared to a corresponding origin or wild type plant, by increasing or generating one or more said activities.

[0136] In another embodiment, the abiotic stress resistance achieved in accordance with the methods of the present invention, and shown by the transgenic plant of the invention; is increased low temperature tolerance, particularly increased tolerance to chilling.

[0137] Thus, in one further embodiment of the present invention, a method is provided for producing a transgenic plant; progenies, seeds, and/or pollen derived from such plant; each showing an increased nitrogen uptake and an increased low temperature tolerance, particularly chilling tolerance, as compared to a corresponding non-transformed wild type plant cell or plant, by increasing or generating one or more of said activities.

[0138] Furthermore, in one embodiment, the present invention provides a transgenic plant showing one or more increased yield-related trait as compared to a corresponding non-transformed origin or wild type plant cell or plant, by increasing or generating one or more activities selected from the above mentioned group of activities.

[0139] Further, the present invention relates to method for producing a plant with increased yield as compared to a corresponding wild type plant comprising at least one of the steps selected from the group consisting of:

(i) increasing or generating the activity of a polypeptide comprising a polypeptide, a consensus sequence or at least one polypeptide motif as depicted in column 5 or 7 of table II or of table IV, respectively;
(ii) increasing or generating the activity of an expression product of a nucleic acid molecule comprising a polynucleotide as depicted in column 5 or 7 of table I, and
(iii) increasing or generating the activity of a functional equivalent of (i) or (ii).

[0140] In one embodiment, the increase or generation of said one or more activities is conferred by one or more nucleic acid sequences comprising a polynucleotide selected from the group as shown in table I, column 5 or 7. Accordingly, the increase or generation of said one or more activities is for example conferred by one or more expression products of said nucleic acid molecule, e.g. proteins. Accordingly, in the present invention described above, the increase or generation of said one or more activities is for example conferred by one or more protein(s) each comprising a polypeptide selected from the group as depicted in table II, column 5 and 7.

[0141] Thus, in one embodiment, the present invention provides a method for producing a plant showing increased yield as compared to a corresponding origin or wild type plant, by increasing or generating one or more activities selected from the group consisting of 60S ribosomal protein, ABC transporter permease protein, acetyltransferase, acyl-carrier protein, At4g32480-protein, At5g16650-protein, ATP-binding protein, Autophagy-related protein, auxin response factor, auxin transcription factor, b1003-protein, b1522-protein, b2739-protein, b3646-protein, B4029-protein, Branched-chain amino acid permease, calcium-dependent protein kinase, cytochrome c oxidase subunit VIII, elongation factor Tu, Factor arrest protein, fumarylacetoacetate hydrolase, geranylgeranyl pyrophosphate synthase, glucose dehydrogenase, glycosyl transferase, harpin-induced family protein, homocitrate synthase, hydrolase, isochorismate synthase, MFS-type transporter protein, microsomal beta-keto-reductase, polygalacturonase, protein phosphatase, pyruvate kinase, Sec-independent protein translocase subunit, serine protease, thioredoxin, thioredoxin family protein, transcriptional regulator, ubiquinone biosynthesis monooxygenase, and YHR213W-protein, which is conferred by one or more nucleic acid sequences comprising a polynucleotide selected from the group as shown in table I, column 5 or 7 or by one or more proteins each comprising a polypeptide encoded by one or more nucleic acid sequences selected from the group as shown in table I, column 5 or 7. or by one or more protein(s) each comprising a polypeptide selected from the group as depicted in table II, column 5 and 7. As mentioned, the increase yield can be mediated by one or more yield-related traits. Thus, the method of the invention relates to the production of a plant showing said one or more yield-related traits.

[0142] Thus, the present invention provides a method for producing a plant showing an increased nutrient use efficiency, e.g. nitrogen uptake, increased stress resistance particularly abiotic stress resistance, increased water use efficiency, and/or an increased stress resistance, particularly abiotic stress resistance, particular low temperature tolerance or draught tolerance or an increased intrinsic yield.

[0143] Further, the present invention relates to a method for producing a plant with increased yield as compared to a corresponding origin or wild type transgenic plant, which comprises

(a) increasing or generating, in a plant cell nucleus, a plant cell, a plant or a part thereof, one or more activities selected from the group consisting of 60S ribosomal protein, ABC transporter permease protein, acetyltransferase, acyl-carrier protein, At4g32480-protein, At5g16650-protein, ATP-binding protein, Autophagy-related protein, auxin response factor, auxin transcription factor, b1003-protein, b1522-protein, b2739-protein, b3646-protein, B4029-protein, Branched-chain amino acid permease, calcium-dependent protein kinase, cytochrome c oxidase subunit VIII, elongation factor Tu, Factor arrest protein, fumarylacetoacetate hydrolase, geranylgeranyl pyrophosphate synthase, glucose dehydrogenase, glycosyl transferase, harpin-induced family protein, homocitrate synthase, hydrolase, isochorismate synthase, MFS-type transporter protein, microsomal beta-keto-reductase, polygalacturonase, protein phosphatase, pyruvate kinase, Sec-independent protein translocase subunit, serine protease, thioredoxin, thioredoxin family protein, transcriptional regulator, ubiquinone biosynthesis monooxygenase, and YHR213W-protein; and
(b) cultivating or growing the plant cell, the plant or the part thereof under conditions which permit the development of the plant cell, the plant or the part thereof; and
(c) recovering a plant showing increased yield as compared to a corresponding non-transformed origin or wild type plant;
(d) and optionally, selecting the plant or a part thereof, showing increased yield as compared to a corresponding non-transformed wild type plant cell, a transgenic plant or a part thereof which shows visual symptoms of deficiency and/or death.

[0144] It was further an object of the present invention to provide a plant cell and/or a plant with enhanced tolerance to abiotic environmental stress and/or showing under conditions of abiotic environmental stress an increased yield, as compared to a corresponding non-transformed wild type or starting plant cell and/or plant.

[0145] It was found that this object is achieved by providing a cell, plant cell and/or plant according to the present invention described herein.

[0146] In one embodiment of the present invention, these traits are achieved by a process for an enhanced tolerance to abiotic environmental stress in a cell, preferably from a photosynthetic active organism, preferably a plant, as compared to a corresponding (non-transformed) wild type or starting photosynthetic active organism.

[0147] In a further embodiment, “enhanced tolerance to abiotic environmental stress” in a photosynthetic active organism means that the photosynthetic active organism, preferably a plant, when confronted with abiotic environmental stress conditions as mentioned above, e.g. like low temperature conditions including chilling and freezing temperatures or drought, exhibits an enhanced yield, e.g. a yield as mentioned above, e.g. a seed yield or biomass yield, as compared to a corresponding (non-transformed) wild type or starting photosynthetic active organism.

[0148] In an embodiment thereof, the term “enhanced tolerance to abiotic environmental stress” in a photosynthetic active organism means that the photosynthetic active organism, preferably a plant, when confronted with abiotic environmental stress conditions like low temperature conditions including chilling and freezing temperatures, exhibits an enhanced dry biomass yield as compared to a corresponding non-transformed wild type photosynthetic active organism.

[0149] In an embodiment thereof, the term “enhanced tolerance to abiotic environmental stress” in a photosynthetic active organism means that the photosynthetic active organism, preferably a plant, when confronted with abiotic environmental stress conditions like low temperature conditions including chilling and freezing temperatures, exhibits an enhanced aerial dry biomass yield as compared to a corresponding non-transformed wild type photosynthetic active organism.

[0150] In an embodiment thereof, the term “enhanced tolerance to abiotic environmental stress” in a photosynthetic active organism means that the photosynthetic active organism, preferably a plant, when confronted with abiotic environmental stress conditions like low temperature conditions including chilling and freezing temperatures, exhibits an enhanced underground dry biomass yield as compared to a corresponding non-transformed wild type photosynthetic active organism.

[0151] In another embodiment thereof, the term “enhanced tolerance to abiotic environmental stress” in a photosynthetic active organism means that the photosynthetic active organism, preferably a plant, when confronted with abiotic environmental stress conditions like low temperature conditions including chilling and freezing temperatures, exhibits an enhanced fresh weight biomass yield as compared to a corresponding non-transformed wild type photosynthetic active organism.

[0152] In an embodiment thereof, the term “enhanced tolerance to abiotic environmental stress” in a photosynthetic active organism means that the photosynthetic active organism, preferably a plant, when confronted with abiotic environmental stress conditions like low temperature conditions including chilling and freezing temperatures, exhibits an enhanced aerial fresh weight biomass yield as compared to a corresponding non-transformed wild type photosynthetic active organism.

[0153] In an embodiment thereof, the term “enhanced tolerance to abiotic environmental stress” in a photosynthetic active organism means that the photosynthetic active organism, preferably a plant, when confronted with abiotic environmental stress conditions like low temperature conditions including chilling and freezing temperatures, exhibits an enhanced underground fresh weight biomass yield as compared to a corresponding non-transformed wild type photosynthetic active organism.

[0154] In another embodiment thereof, the term “enhanced tolerance to abiotic environmental stress” in a photosynthetic active organism means that the photosynthetic active organism, preferably a plant, when confronted with abiotic environmental stress conditions like low temperature conditions including chilling and freezing temperatures, exhibits an enhanced yield of harvestable parts of a plant as compared to a corresponding non-transformed wild type photosynthetic active organism.

[0155] In an embodiment thereof, the term “enhanced tolerance to abiotic environmental stress” in a photosynthetic active organism means that the photosynthetic active organism, preferably a plant, when confronted with abiotic environmental stress conditions like low temperature conditions including chilling and freezing temperatures, exhibits an enhanced yield of dry harvestable parts of a plant as compared to a corresponding non-transformed wild type photosynthetic active organism.

[0156] In an embodiment thereof, the term “enhanced tolerance to abiotic environmental stress” in a photosynthetic active organism means that the photosynthetic active organism, preferably a plant, when confronted with abiotic environmental stress conditions like low temperature conditions including chilling and freezing temperatures, exhibits an enhanced yield of dry aerial harvestable parts of a plant as compared to a corresponding non-transformed wild type photosynthetic active organism.

[0157] In an embodiment thereof, the term “enhanced tolerance to abiotic environmental stress” in a photosynthetic active organism means that the photosynthetic active organism, preferably a plant, when confronted with abiotic environmental stress conditions like low temperature conditions including chilling and freezing temperatures, exhibits an enhanced yield of underground dry harvestable parts of a plant as compared to a corresponding non-transformed wild type photosynthetic active organism.

[0158] In another embodiment thereof, the term “enhanced tolerance to abiotic environmental stress” in a photosynthetic active organism means that the photosynthetic active organism, preferably a plant, when confronted with abiotic environmental stress conditions like low temperature conditions including chilling and freezing temperatures, exhibits an enhanced yield of fresh weight harvestable parts of a plant as compared to a corresponding non-transformed wild type photosynthetic active organism.

[0159] In an embodiment thereof, the term “enhanced tolerance to abiotic environmental stress” in a photosynthetic active organism means that the photosynthetic active organism, preferably a plant, when confronted with abiotic environmental stress conditions like low temperature conditions including chilling and freezing temperatures, exhibits an enhanced yield of aerial fresh weight harvestable parts of a plant as compared to a corresponding non-transformed wild type photosynthetic active organism.

[0160] In an embodiment thereof, the term “enhanced tolerance to abiotic environmental stress” in a photosynthetic active organism means that the photosynthetic active organism, preferably a plant, when confronted with abiotic environmental stress conditions like low temperature conditions including chilling and freezing temperatures, exhibits an enhanced yield of underground fresh weight harvestable parts of a plant as compared to a corresponding non-transformed wild type photosynthetic active organism.

[0161] In a further embodiment, the term “enhanced tolerance to abiotic environmental stress” in a photosynthetic active organism means that the photosynthetic active organism, preferably a plant, when confronted with abiotic environmental stress conditions like low temperature conditions including chilling and freezing temperatures, exhibits an enhanced yield of the crop fruit as compared to a corresponding non-transformed wild type photosynthetic active organism.

[0162] In an embodiment thereof, the term “enhanced tolerance to abiotic environmental stress” in a photosynthetic active organism means that the photosynthetic active organism, preferably a plant, when confronted with abiotic environmental stress conditions like low temperature conditions including chilling and freezing temperatures, exhibits an enhanced yield of the fresh crop fruit as compared to a corresponding non-transformed wild type photosynthetic active organism.

[0163] In an embodiment thereof, the term “enhanced tolerance to abiotic environmental stress” in a photosynthetic active organism means that the photosynthetic active organism, preferably a plant, when confronted with abiotic environmental stress conditions like low temperature conditions including chilling and freezing temperatures, exhibits an enhanced yield of the dry crop fruit as compared to a corresponding non-transformed wild type photosynthetic active organism.

[0164] In an embodiment thereof, the term “enhanced tolerance to abiotic environmental stress” in a photosynthetic active organism means that the photosynthetic active organism, preferably a plant, when confronted with abiotic environmental stress conditions like low temperature conditions including chilling and freezing temperatures, exhibits an enhanced grain dry weight as compared to a corresponding non-transformed wild type photosynthetic active organism.

[0165] In a further embodiment, the term “enhanced tolerance to abiotic environmental stress” in a photosynthetic active organism means that the photosynthetic active organism, preferably a plant, when confronted with abiotic environmental stress conditions like low temperature conditions including chilling and freezing temperatures, exhibits an enhanced yield of seeds as compared to a corresponding non-transformed wild type photosynthetic active organism.

[0166] In an embodiment thereof, the term “enhanced tolerance to abiotic environmental stress” in a photosynthetic active organism means that the photosynthetic active organism, preferably a plant, when confronted with abiotic environmental stress conditions like low temperature conditions including chilling and freezing temperatures, exhibits an enhanced yield of fresh weight seeds as compared to a corresponding non-transformed wild type photosynthetic active organism.

[0167] In an embodiment thereof, the term “enhanced tolerance to abiotic environmental stress” in a photosynthetic active organism means that the photosynthetic active organism, preferably a plant, when confronted with abiotic environmental stress conditions like low temperature conditions including chilling and freezing temperatures, exhibits an enhanced yield of dry seeds as compared to a corresponding non-transformed wild type photosynthetic active organism.

[0168] In another embodiment of the present invention, these traits are achieved by a process for an increased yield under conditions of environmental stress, particularly abiotic environmental stress, in a photosynthetic active organism, preferably a plant, as compared to a corresponding (non-transformed) wild type or starting photosynthetic active organism.

[0169] In one embodiment thereof, the term “increased yield” means that the photosynthetic active organism, especially a plant, exhibits an increased yield, e.g. exhibits an increased growth rate, under conditions of abiotic environmental stress, compared to the corresponding wild-type photosynthetic active organism.

[0170] An increased growth rate may be reflected inter alia by or confers an increased biomass production of the whole plant, or an increased biomass production of the aerial parts of a plant, or by an increased biomass production of the underground parts of a plant, or by an increased biomass production of parts of a plant, like stems, leaves, blossoms, fruits, and/or seeds.

[0171] In an embodiment thereof, increased yield includes higher fruit yields, higher seed yields, higher fresh matter production, and/or higher dry matter production.

[0172] In another embodiment thereof, the term “increased yield” means that the photosynthetic active organism, preferably plant, exhibits an prolonged growth under conditions of abiotic environmental stress, as compared to the corresponding non-transformed wild type photosynthetic active organism. A prolonged growth comprises survival and/or continued growth of the photosynthetic active organism, preferably plant, at the moment when the non-transformed wild type photosynthetic active organism shows visual symptoms of deficiency and/or death.

[0173] In another embodiment thereof, the term “increased yield” means that the photosynthetic active organism, preferably plant, exhibits an increased gamma-aminobutyric acid (GABA) content as compared to a corresponding non-transformed wild type.

[0174] In another preferred embodiment a photosynthetic active organism, especially a plant, shows increased yield under conditions of abiotic environmental stress, e.g. a plant, shows an enhanced tolerance to abiotic environmental stress or another yield-related trait.

[0175] In another embodiment this invention fulfills the need to identify new, unique genes capable of conferring an increased yield, e.g. an enhanced tolerance to abiotic environmental stress or another yield-related trait, to photosynthetic active organism, preferably plants, upon expression or over-expression of endogenous and/or exogenous genes.

[0176] In another embodiment thereof this invention fulfills the need to identify new, unique genes capable of conferring an increased yield, e.g. an enhanced tolerance to abiotic environmental stress or another yield-related trait, to photosynthetic active organism, preferably plants, upon expression or over-expression of endogenous genes.

[0177] In another embodiment thereof this invention fulfills the need to identify new, unique genes capable of conferring an increased yield, e.g. an enhanced tolerance to abiotic environmental stress or another yield-related trait, to photosynthetic active organism, preferably plants, upon expression or over-expression of exogenous genes.

[0178] In another embodiment this invention fulfills the need to identify new, unique genes capable of conferring an enhanced tolerance to abiotic environmental stress in combination with an increase of yield to photosynthetic active organism, preferably plants, upon expression or over-expression of endogenous and/or exogenous genes.

[0179] Accordingly, the present invention relates to a method for producing a for example transgenic photosynthetic active organism or a part thereof, or a plant cell, a plant or a part thereof e.g. for the generation of such a plant, with increased yield, e.g. with an increased yield-related trait, for example, increased nutrient use efficiency, increased intrinsic yield capacity, and/or increased stress tolerance, preferably water stress resistance, especially under conditions of transient and repetitive abiotic stress, preferably cycling drought and/or low temperature tolerance and/or another increased yield-related trait as compared to a corresponding for example non-transformed wild type photosynthetic active organism or a part thereof, or a plant cell, a plant or a part thereof, which comprises

(a) increasing or generating one or more activities selected from the group consisting of 60S ribosomal protein, ABC transporter permease protein, acetyltransferase, acyl-carrier protein, At4g32480-protein, At5g16650-protein, ATP-binding protein, Autophagy-related protein, auxin response factor, auxin transcription factor, b1003-protein, b1522-protein, b2739-protein, b3646-protein, B4029-protein, Branched-chain amino acid permease, calcium-dependent protein kinase, cytochrome c oxidase subunit VIII, elongation factor Tu, Factor arrest protein, fumarylacetoacetate hydrolase, geranylgeranyl pyrophosphate synthase, glucose dehydrogenase, glycosyl transferase, harpin-induced family protein, homocitrate synthase, hydrolase, isochorismate synthase, MFS-type transporter protein, microsomal beta-keto-reductase, polygalacturonase, protein phosphatase, pyruvate kinase, Sec-independent protein translocase subunit, serine protease, thioredoxin, thioredoxin family protein, transcriptional regulator, ubiquinone biosynthesis monooxygenase, and YHR213W-protein in a photosynthetic active organism or a part thereof, e.g. a plant cell, a plant or a part thereof,
and
(b) growing the photosynthetic active organism or a part thereof, e.g. a plant cell, a plant or a part thereof under conditions which permit the development of a photosynthetic active organism or a part thereof, preferably a plant cell, a plant or a part thereof, with increased yield, e.g. with an increased yield-related trait, for example enhanced tolerance to abiotic environmental stress, increased nutrient use efficiency, increased drought tolerance and/or another increased yield-related trait as compared to a corresponding, e.g. non-transformed, wild type photosynthetic active organism or a part thereof, preferably a plant cell, a plant or a part thereof.

[0180] In an embodiment the present invention relates to a method for producing a, e.g. transgenic, photosynthetic active organism or a part thereof, preferably a plant cell, a plant or a part thereof with increased yield, e.g. with an increased yield-related trait, for example enhanced tolerance to abiotic environmental stress, increased nutrient use efficiency, increased drought tolerance and/or another increased yield-related trait as compared to a corresponding e.g. non-transformed wild type photosynthetic active or ganism or a part thereof, preferably a plant cell, a plant or a part thereof, which comprises

(a) increasing or generating one or more activities selected from the group consisting of: 60S ribosomal protein, ABC transporter permease protein, acetyltransferase, acyl-carrier protein, At4g32480-protein, At5g16650-protein, ATP-binding protein, Autophagy-related protein, auxin response factor, auxin transcription factor, b1003-protein, b1522-protein, b2739-protein, b3646-protein, B4029-protein, Branched-chain amino acid permease, calcium-dependent protein kinase, cytochrome c oxidase subunit VIII, elongation factor Tu, Factor arrest protein, fumarylacetoacetate hydrolase, geranylgeranyl pyrophosphate synthase, glucose dehydrogenase, glycosyl transferase, harpin-induced family protein, homocitrate synthase, hydrolase, isochorismate synthase, MFS-type transporter protein, microsomal beta-keto-reductase, polygalacturonase, protein phosphatase, pyruvate kinase, Sec-independent protein translocase subunit, serine protease, thioredoxin, thioredoxin family protein, transcriptional regulator, ubiquinone biosynthesis monooxygenase, and YHR213W-protein in a photosynthetic active organism or a part thereof, preferably a plant cell, a plant or a part thereof,
(b) growing the photosynthetic active organism or a part thereof, preferably a plant cell, a plant or a part thereof together with e.g. non-transformed wildtype photosynthetic active organism or a part thereof, preferably a plant, under conditions of abiotic environmental stress
(c) selecting the photosynthetic active organism or a part thereof, preferably a plant cell, a plant or a part thereof, with increased yield, e.g. with an increased yield-related trait, for example enhanced tolerance to abiotic environmental stress, increased nutrient use efficiency, increased drought tolerance and/or another increased yield-related trait, as compared to a corresponding, e.g non-transformed, wild type photosynthetic active organism or a part thereof, preferably a plant cell, a plant or a part thereof, after the, e.g. non-transformed, wild type photosynthetic active organism or a part thereof, preferably a plant cell, a plant or a part thereof, show visual symptoms of deficiency and/or death.

[0181] Climate and culturing conditions for plants can be classified into mega-environments according to the one used by CIMMYT to guide its breeding programmes in wheat and maize.

[0182] A mega-environment is a broad, not necessarily contiguous geographic area with similar biotic and abiotic stresses and cropping system requirements. In fact a mega-environment is defined by crop production factors (temperature, rainfall, sunlight, latitude, elevation, soil characteristics, and diseases), consumer preferences (the color of the grain and how it would be used), and wheat growth habit.

[0183] For CIMMYT researchers identified six megaenvironments for spring wheats and three each for facultative and winter wheat.

[0184] Such mega-environments are feasible for every plant species including crops.

[0185] In one embodiment the present invention provides a transgenic plant cell, a plant or a part thereof with increased yield under sub-optimal growing conditions as compared to a corresponding non-transformed wild type plant cell, a plant or a part thereof. Such sub-optimal growing conditions can be for example mega-environmentals with low rainfall, as for example the wheat mega-environments ME1, ME4, ME4A, ME4B, ME4C, ME5, ME5B, ME6, ME6B, ME9, ME12 or the respective mega-environment for the specific plant species.

[0186] Such mega-environments are feasible for every sub-optimal growth condition, temperature or nutrient disposability.

[0187] In order to compare the yield of plants of the same species in correlation with environment conditions the parameter of yield potential is significant. Yield potential is defined as the yield of a plant when grown in environments to which it is adapted, with nutrients and water non-limiting and with pests, diseases, weeds, lodging, and other stresses effectively controlled. In this embodiment “Yield” refers to the mass of product at final harvest.

[0188] Under field conditions the yield potential will not be achieved. Nevertheless, it is a parameter which defines the optimal cultivating conditions in an mega-environment because only under optimal conditions the yield potential will be achieved.

[0189] In one embodiment sub-optimal growing condition is any condition which does not correspond to the respective condition where the yield potential can be achieved.

[0190] In one embodiment optimal growth conditions, including nutrient disposability, are conditions selected from the group consisting of:

climatic and environmental conditions, including nutrient disposability as they were predominantly in the last 50 25, 20, 15, 10 or 5 years over a period of 3, 6, 12 month or a cultivation period in the mega-environments known as Wheatbelt Region in Western Australia, corn belt in the U.S.A. (comprising at least one of the states of Iowa, Indiana, Illinois, Ohio, South Dakota, Nebraska, Kansas, Minnesota, Wisconsin, Michigan, Missouri and Kentucky),
climatic and environmental conditions as they were predominantly in the last 50 25, 20, 15, 10 or 5 years over a period of 3, 6, 12 month or a cultivation period in the mega-environments as mentioned for maize and wheat by CIMMYT.

[0191] In one embodiment the invention relates to a method for increasing the yield per acre or per cultivated area comprising the steps:

performing a analysis of environmental conditions to measure the level of nutrients (including water) available in the soil or rainfall per cultivating cycle, comparing the result with the value of the respective condition with the value under optimal growing condition,
cultivating a plant of the respective class/genera according to the invention in case at east one measured condition deviates for 5%, 10%, 15%, 20%, 25%, 30%, 35%, 40%, 45%, 50%, 60%, 70%, 80%, 90%, 100% or more from the value under optimal growing condition.

[0192] In one embodiment the invention relates to a method for increasing the yield per acre in mega environments comprising the steps:

performing a soil analysis to measure the level of nutrients available in the soil, comparing the result with the value necessarily for achieving the yield potential of a class/genera of a plant,
cultivating a plant of the respective class/genera according to the invention in case at east one nutrient is limited.

[0193] In one embodiment of the invention relates to a method for increasing the yield per acre in mega environments comprising the steps:

measuring the precipitation over a time period of at least one plant generation, comparing with the value for achieving the yield potential of a class/genera of a plant, cultivating a plant of the respective class/genera according to the invention in case the precipitation is decreased.

[0194] In one embodiment of the invention relates to a method for increasing the yield per acre in mega environments comprising the steps:

measuring the time periods between the rainfalls over a time period of at least one plant generation,
comparing with the value for achieving the yield potential of a class/genera of a plant and cultivating a plant of the respective class/genera according to the invention in case the dry season is increased.

[0195] Comprises/comprising and grammatical variations thereof when used in this specification are to be taken to specify the presence of stated features, integers, steps or components or groups thereof, but not to preclude the presence or addition of one or more other features, integers, steps, components or groups thereof.

[0196] In accordance with the invention, the term “plant cell” or the term “organism” as understood herein relates always to a plant cell or a organelle thereof, preferably a plastid, more preferably chloroplast.

[0197] As used herein, “plant” is meant to include not only a whole plant but also a part thereof i.e., one or more cells, and tissues, including for example, leaves, stems, shoots, roots, flowers, fruits and seeds.

[0198] Surprisingly it was found, that the transgenic expression of a protein as shown in table II, column 3 in a plant such as Arabidopsis thaliana C24 for example, conferred transgenic a plant cell, a plant or a part thereof with increased GABA content as compared to a corresponding non-transformed wild type plant cell, a plant or a part thereof.

[0199] Accordingly, in one embodiment, in case the activity of the Saccharomyces cerevisiae nucleic acid molecule or a polypeptide comprising the nucleic acid SEQ ID NO.: 42 or polypeptide SEQ ID NO.: 43, respectively is increased or generated, e.g. if the activity of a nucleic acid molecule or a polypeptide comprising the nucleic acid or polypeptide or the consensus sequence or the polypeptide motif, as depicted in Table I, II or IV, column 7 in the respective same line as the nucleic acid molecule SEQ ID NO.: 42 or polypeptide SEQ ID NO.: 43, respectively is increased or generated or if the activity “Factor arrest protein” is increased or generated in an plant cell, plant or part thereof an increased GABA content as compared to a corresponding non-transformed wild type plant cell, a plant or a part thereof is conferred.

[0200] Accordingly, in one embodiment, in case the activity of the Arabidopsis thaliana nucleic acid molecule or a polypeptide comprising the nucleic acid SEQ ID NO.: 654 or polypeptide SEQ ID NO.: 655, respectively is increased or generated, e.g. if the activity of a nucleic acid molecule or a polypeptide comprising the nucleic acid or polypeptide or the consensus sequence or the polypeptide motif, as depicted in Table I, II or IV, column 7 in the respective same line as the nucleic acid molecule SEQ ID NO.: 654 or polypeptide SEQ ID NO.: 655, respectively is increased or generated or if the activity “transcriptional regulator” is increased or generated in an plant cell, plant or part thereof an increased GABA content as compared to a corresponding non-transformed wild type plant cell, a plant or a part thereof is conferred.

[0201] Accordingly, in one embodiment, in case the activity of the Arabidopsis thaliana nucleic acid molecule or a polypeptide comprising the nucleic acid SEQ ID NO.: 706 or polypeptide SEQ ID NO.: 707, respectively is increased or generated, e.g. if the activity of a nucleic acid molecule or a polypeptide comprising the nucleic acid or polypeptide or the consensus sequence or the polypeptide motif, as depicted in Table I, II or IV, column 7 in the respective same line as the nucleic acid molecule SEQ ID NO.: 706 or polypeptide SEQ ID NO.: 707, respectively is increased or generated or if the activity “protein phosphatase” is increased or generated in an plant cell, plant or part thereof an increased GABA content as compared to a corresponding non-transformed wild type plant cell, a plant or a part thereof is conferred.

[0202] Accordingly, in one embodiment, in case the activity of the Arabidopsis thaliana nucleic acid molecule or a polypeptide comprising the nucleic acid SEQ ID NO.: 751 or polypeptide SEQ ID NO.: 752, respectively is increased or generated, e.g. if the activity of a nucleic acid molecule or a polypeptide comprising the nucleic acid or polypeptide or the consensus sequence or the polypeptide motif, as depicted in Table I, II or IV, column 7 in the respective same line as the nucleic acid molecule SEQ ID NO.: 751 or polypeptide SEQ ID NO.: 752, respectively is increased or generated or if the activity “pyruvate kinase” is increased or generated in an plant cell, plant or part thereof an increased GABA content as compared to a corresponding non-transformed wild type plant cell, a plant or a part thereof is conferred.

[0203] Accordingly, in one embodiment, in case the activity of the Arabidopsis thaliana nucleic acid molecule or a polypeptide comprising the nucleic acid SEQ ID NO.: 1156 or polypeptide SEQ ID NO.: 1157, respectively is increased or generated, e.g. if the activity of a nucleic acid molecule or a polypeptide comprising the nucleic acid or polypeptide or the consensus sequence or the polypeptide motif, as depicted in Table I, II or IV, column 7 in the respective same line as the nucleic acid molecule SEQ ID NO.: 1156 or polypeptide SEQ ID NO.: 1157, respectively is increased or generated or if the activity “thioredoxin family protein” is increased or generated in an plant cell, plant or part thereof an increased GABA content as compared to a corresponding non-transformed wild type plant cell, a plant or a part thereof is conferred.

[0204] Accordingly, in one embodiment, in case the activity of the Arabidopsis thaliana nucleic acid molecule or a polypeptide comprising the nucleic acid SEQ ID NO.: 1510 or polypeptide SEQ ID NO.: 1511, respectively is increased or generated, e.g. if the activity of a nucleic acid molecule or a polypeptide comprising the nucleic acid or polypeptide or the consensus sequence or the polypeptide motif, as depicted in Table I, II or IV, column 7 in the respective same line as the nucleic acid molecule SEQ ID NO.: 1510 or polypeptide SEQ ID NO.: 1511, respectively is increased or generated or if the activity “harpin-induced family protein” is increased or generated in an plant cell, plant or part thereof an increased GABA content as compared to a corresponding non-transformed wild type plant cell, a plant or a part thereof is conferred.

[0205] Accordingly, in one embodiment, in case the activity of the Arabidopsis thaliana nucleic acid molecule or a polypeptide comprising the nucleic acid SEQ ID NO.: 1598 or polypeptide SEQ ID NO.: 1599, respectively is increased or generated, e.g. if the activity of a nucleic acid molecule or a polypeptide comprising the nucleic acid or polypeptide or the consensus sequence or the polypeptide motif, as depicted in Table I, II or IV, column 7 in the respective same line as the nucleic acid molecule SEQ ID NO.: 1598 or polypeptide SEQ ID NO.: 1599, respectively is increased or generated or if the activity “glycosyl transferase” is increased or generated in an plant cell, plant or part thereof an increased GABA content as compared to a corresponding non-transformed wild type plant cell, a plant or a part thereof is conferred.

[0206] Accordingly, in one embodiment, in case the activity of the Arabidopsis thaliana nucleic acid molecule or a polypeptide comprising the nucleic acid SEQ ID NO.: 1670 or polypeptide SEQ ID NO.: 1671, respectively is increased or generated, e.g. if the activity of a nucleic acid molecule or a polypeptide comprising the nucleic acid or polypeptide or the consensus sequence or the polypeptide motif, as depicted in Table I, II or IV, column 7 in the respective same line as the nucleic acid molecule SEQ ID NO.: 1670 or polypeptide SEQ ID NO.: 1671, respectively is increased or generated or if the activity “auxin response factor” is increased or generated in an plant cell, plant or part thereof an increased GABA content as compared to a corresponding non-transformed wild type plant cell, a plant or a part thereof is conferred.

[0207] Accordingly, in one embodiment, in case the activity of the Arabidopsis thaliana nucleic acid molecule or a polypeptide comprising the nucleic acid SEQ ID NO.: 1874 or polypeptide SEQ ID NO.: 1875, respectively is increased or generated, e.g. if the activity of a nucleic acid molecule or a polypeptide comprising the nucleic acid or polypeptide or the consensus sequence or the polypeptide motif, as depicted in Table I, II or IV, column 7 in the respective same line as the nucleic acid molecule SEQ ID NO.: 1874 or polypeptide SEQ ID NO.: 1875, respectively is increased or generated or if the activity “At4g32480-protein” is increased or generated in an plant cell, plant or part thereof an increased GABA content as compared to a corresponding non-transformed wild type plant cell, a plant or a part thereof is conferred.

[0208] Accordingly, in one embodiment, in case the activity of the Arabidopsis thaliana nucleic acid molecule or a polypeptide comprising the nucleic acid SEQ ID NO.: 1936 or polypeptide SEQ ID NO.: 1937, respectively is increased or generated, e.g. if the activity of a nucleic acid molecule or a polypeptide comprising the nucleic acid or polypeptide or the consensus sequence or the polypeptide motif, as depicted in Table I, II or IV, column 7 in the respective same line as the nucleic acid molecule SEQ ID NO.: 1936 or polypeptide SEQ ID NO.: 1937, respectively is increased or generated or if the activity “calcium-dependent protein kinase” is increased or generated in an plant cell, plant or part thereof an increased GABA content as compared to a corresponding non-transformed wild type plant cell, a plant or a part thereof is conferred.

[0209] Accordingly, in one embodiment, in case the activity of the Arabidopsis thaliana nucleic acid molecule or a polypeptide comprising the nucleic acid SEQ ID NO.: 2492 or polypeptide SEQ ID NO.: 2493, respectively is increased or generated, e.g. if the activity of a nucleic acid molecule or a polypeptide comprising the nucleic acid or polypeptide or the consensus sequence or the polypeptide motif, as depicted in Table I, II or IV, column 7 in the respective same line as the nucleic acid molecule SEQ ID NO.: 2492 or polypeptide SEQ ID NO.: 2493, respectively is increased or generated or if the activity “At5g16650-protein” is increased or generated in an plant cell, plant or part thereof an increased GABA content as compared to a corresponding non-transformed wild type plant cell, a plant or a part thereof is conferred.

[0210] Accordingly, in one embodiment, in case the activity of the Azotobacter vinelandii nucleic acid molecule or a polypeptide comprising the nucleic acid SEQ ID NO.: 2553 or polypeptide SEQ ID NO.: 2554, respectively is increased or generated, e.g. if the activity of a nucleic acid molecule or a polypeptide comprising the nucleic acid or polypeptide or the consensus sequence or the polypeptide motif, as depicted in Table I, II or IV, column 7 in the respective same line as the nucleic acid molecule SEQ ID NO.: 2553 or polypeptide SEQ ID NO.: 2554, respectively is increased or generated or if the activity “elongation factor Tu” is increased or generated in an plant cell, plant or part thereof an increased GABA content as compared to a corresponding non-transformed wild type plant cell, a plant or a part thereof is conferred.

[0211] Accordingly, in one embodiment, in case the activity of the Azotobacter vinelandii nucleic acid molecule or a polypeptide comprising the nucleic acid SEQ ID NO.: 3408 or polypeptide SEQ ID NO.: 3409, respectively is increased or generated, e.g. if the activity of a nucleic acid molecule or a polypeptide comprising the nucleic acid or polypeptide or the consensus sequence or the polypeptide motif, as depicted in Table I, II or IV, column 7 in the respective same line as the nucleic acid molecule SEQ ID NO.: 3408 or polypeptide SEQ ID NO.: 3409, respectively is increased or generated or if the activity “ABC transporter permease protein” is increased or generated in an plant cell, plant or part thereof an increased GABA content as compared to a corresponding non-transformed wild type plant cell, a plant or a part thereof is conferred.

[0212] Accordingly, in one embodiment, in case the activity of the Azotobacter vinelandii nucleic acid molecule or a polypeptide comprising the nucleic acid SEQ ID NO.: 3564 or polypeptide SEQ ID NO.: 3565, respectively is increased or generated, e.g. if the activity of a nucleic acid molecule or a polypeptide comprising the nucleic acid or polypeptide or the consensus sequence or the polypeptide motif, as depicted in Table I, II or IV, column 7 in the respective same line as the nucleic acid molecule SEQ ID NO.: 3564 or polypeptide SEQ ID NO.: 3565, respectively is increased or generated or if the activity “hydrolase” is increased or generated in an plant cell, plant or part thereof an increased GABA content as compared to a corresponding non-transformed wild type plant cell, a plant or a part thereof is conferred.

[0213] Accordingly, in one embodiment, in case the activity of the Azotobacter vinelandii nucleic acid molecule or a polypeptide comprising the nucleic acid SEQ ID NO.: 3728 or polypeptide SEQ ID NO.: 3729, respectively is increased or generated, e.g. if the activity of a nucleic acid molecule or a polypeptide comprising the nucleic acid or polypeptide or the consensus sequence or the polypeptide motif, as depicted in Table I, II or IV, column 7 in the respective same line as the nucleic acid molecule SEQ ID NO.: 3728 or polypeptide SEQ ID NO.: 3729, respectively is increased or generated or if the activity “fumarylacetoacetate hydrolase” is increased or generated in an plant cell, plant or part thereof an increased GABA content as compared to a corresponding non-transformed wild type plant cell, a plant or a part thereof is conferred.

[0214] Accordingly, in one embodiment, in case the activity of the Escherichia coli nucleic acid molecule or a polypeptide comprising the nucleic acid SEQ ID NO.: 4068 or polypeptide SEQ ID NO.: 4069, respectively is increased or generated, e.g. if the activity of a nucleic acid molecule or a polypeptide comprising the nucleic acid or polypeptide or the consensus sequence or the polypeptide motif, as depicted in Table I, II or IV, column 7 in the respective same line as the nucleic acid molecule SEQ ID NO.: 4068 or polypeptide SEQ ID NO.: 4069, respectively is increased or generated or if the activity “glucose dehydrogenase” is increased or generated in an plant cell, plant or part thereof an increased GABA content as compared to a corresponding non-transformed wild type plant cell, a plant or a part thereof is conferred.

[0215] Accordingly, in one embodiment, in case the activity of the Escherichia coli nucleic acid molecule or a polypeptide comprising the nucleic acid SEQ ID NO.: 4176 or polypeptide SEQ ID NO.: 4177, respectively is increased or generated, e.g. if the activity of a nucleic acid molecule or a polypeptide comprising the nucleic acid or polypeptide or the consensus sequence or the polypeptide motif, as depicted in Table I, II or IV, column 7 in the respective same line as the nucleic acid molecule SEQ ID NO.: 4176 or polypeptide SEQ ID NO.: 4177, respectively is increased or generated or if the activity “serine protease” is increased or generated in an plant cell, plant or part thereof an increased GABA content as compared to a corresponding non-transformed wild type plant cell, a plant or a part thereof is conferred.

[0216] Accordingly, in one embodiment, in case the activity of the Escherichia coli nucleic acid molecule or a polypeptide comprising the nucleic acid SEQ ID NO.: 4364 or polypeptide SEQ ID NO.: 4365, respectively is increased or generated, e.g. if the activity of a nucleic acid molecule or a polypeptide comprising the nucleic acid or polypeptide or the consensus sequence or the polypeptide motif, as depicted in Table I, II or IV, column 7 in the respective same line as the nucleic acid molecule SEQ ID NO.: 4364 or polypeptide SEQ ID NO.: 4365, respectively is increased or generated or if the activity “ATP-binding protein” is increased or generated in an plant cell, plant or part thereof an increased GABA content as compared to a corresponding non-transformed wild type plant cell, a plant or a part thereof is conferred.

[0217] Accordingly, in one embodiment, in case the activity of the Escherichia coli nucleic acid molecule or a polypeptide comprising the nucleic acid SEQ ID NO.: 4717 or polypeptide SEQ ID NO.: 4718, respectively is increased or generated, e.g. if the activity of a nucleic acid molecule or a polypeptide comprising the nucleic acid or polypeptide or the consensus sequence or the polypeptide motif, as depicted in Table I, II or IV, column 7 in the respective same line as the nucleic acid molecule SEQ ID NO.: 4717 or polypeptide SEQ ID NO.: 4718, respectively is increased or generated or if the activity “isochorismate synthase” is increased or generated in an plant cell, plant or part thereof an increased GABA content as compared to a corresponding non-transformed wild type plant cell, a plant or a part thereof is conferred.

[0218] Accordingly, in one embodiment, in case the activity of the Escherichia coli nucleic acid molecule or a polypeptide comprising the nucleic acid SEQ ID NO.: 4864 or polypeptide SEQ ID NO.: 4865, respectively is increased or generated, e.g. if the activity of a nucleic acid molecule or a polypeptide comprising the nucleic acid or polypeptide or the consensus sequence or the polypeptide motif, as depicted in Table I, II or IV, column 7 in the respective same line as the nucleic acid molecule SEQ ID NO.: 4864 or polypeptide SEQ ID NO.: 4865, respectively is increased or generated or if the activity “MFS-type transporter protein” is increased or generated in an plant cell, plant or part thereof an increased GABA content as compared to a corresponding non-transformed wild type plant cell, a plant or a part thereof is conferred.

[0219] Accordingly, in one embodiment, in case the activity of the Escherichia coli nucleic acid molecule or a polypeptide comprising the nucleic acid SEQ ID NO.: 4903 or polypeptide SEQ ID NO.: 4904, respectively is increased or generated, e.g. if the activity of a nucleic acid molecule or a polypeptide comprising the nucleic acid or polypeptide or the consensus sequence or the polypeptide motif, as depicted in Table I, II or IV, column 7 in the respective same line as the nucleic acid molecule SEQ ID NO.: 4903 or polypeptide SEQ ID NO.: 4904, respectively is increased or generated or if the activity “b1003-protein” is increased or generated in an plant cell, plant or part thereof an increased GABA content as compared to a corresponding non-transformed wild type plant cell, a plant or a part thereof is conferred.

[0220] Accordingly, in one embodiment, in case the activity of the Escherichia coli nucleic acid molecule or a polypeptide comprising the nucleic acid SEQ ID NO.: 4909 or polypeptide SEQ ID NO.: 4910, respectively is increased or generated, e.g. if the activity of a nucleic acid molecule or a polypeptide comprising the nucleic acid or polypeptide or the consensus sequence or the polypeptide motif, as depicted in Table I, II or IV, column 7 in the respective same line as the nucleic acid molecule SEQ ID NO.: 4909 or polypeptide SEQ ID NO.: 4910, respectively is increased or generated or if the activity “b1522-protein” is increased or generated in an plant cell, plant or part thereof an increased GABA content as compared to a corresponding non-transformed wild type plant cell, a plant or a part thereof is conferred.

[0221] Accordingly, in one embodiment, in case the activity of the Escherichia coli nucleic acid molecule or a polypeptide comprising the nucleic acid SEQ ID NO.: 4954 or polypeptide SEQ ID NO.: 4955, respectively is increased or generated, e.g. if the activity of a nucleic acid molecule or a polypeptide comprising the nucleic acid or polypeptide or the consensus sequence or the polypeptide motif, as depicted in Table I, II or IV, column 7 in the respective same line as the nucleic acid molecule SEQ ID NO.: 4954 or polypeptide SEQ ID NO.: 4955, respectively is increased or generated or if the activity “b2739-protein” is increased or generated in an plant cell, plant or part thereof an increased GABA content as compared to a corresponding non-transformed wild type plant cell, a plant or a part thereof is conferred.

[0222] Accordingly, in one embodiment, in case the activity of the Escherichia coli nucleic acid molecule or a polypeptide comprising the nucleic acid SEQ ID NO.: 5121 or polypeptide SEQ ID NO.: 5122, respectively is increased or generated, e.g. if the activity of a nucleic acid molecule or a polypeptide comprising the nucleic acid or polypeptide or the consensus sequence or the polypeptide motif, as depicted in Table I, II or IV, column 7 in the respective same line as the nucleic acid molecule SEQ ID NO.: 5121 or polypeptide SEQ ID NO.: 5122, respectively is increased or generated or if the activity “b3646-protein” is increased or generated in an plant cell, plant or part thereof an increased GABA content as compared to a corresponding non-transformed wild type plant cell, a plant or a part thereof is conferred.

[0223] Accordingly, in one embodiment, in case the activity of the Escherichia coli nucleic acid molecule or a polypeptide comprising the nucleic acid SEQ ID NO.: 5319 or polypeptide SEQ ID NO.: 5320, respectively is increased or generated, e.g. if the activity of a nucleic acid molecule or a polypeptide comprising the nucleic acid or polypeptide or the consensus sequence or the polypeptide motif, as depicted in Table I, II or IV, column 7 in the respective same line as the nucleic acid molecule SEQ ID NO.: 5319 or polypeptide SEQ ID NO.: 5320, respectively is increased or generated or if the activity “B4029-protein” is increased or generated in an plant cell, plant or part thereof an increased GABA content as compared to a corresponding non-transformed wild type plant cell, a plant or a part thereof is conferred.

[0224] Accordingly, in one embodiment, in case the activity of the Escherichia coli nucleic acid molecule or a polypeptide comprising the nucleic acid SEQ ID NO.: 5387 or polypeptide SEQ ID NO.: 5388, respectively is increased or generated, e.g. if the activity of a nucleic acid molecule or a polypeptide comprising the nucleic acid or polypeptide or the consensus sequence or the polypeptide motif, as depicted in Table I, II or IV, column 7 in the respective same line as the nucleic acid molecule SEQ ID NO.: 5387 or polypeptide SEQ ID NO.: 5388, respectively is increased or generated or if the activity “acetyltransferase” is increased or generated in an plant cell, plant or part thereof an increased GABA content as compared to a corresponding non-transformed wild type plant cell, a plant or a part thereof is conferred.

[0225] Accordingly, in one embodiment, in case the activity of the Physcomitrella patens nucleic acid molecule or a polypeptide comprising the nucleic acid SEQ ID NO.: 5458 or polypeptide SEQ ID NO.: 5459, respectively is increased or generated, e.g. if the activity of a nucleic acid molecule or a polypeptide comprising the nucleic acid or polypeptide or the consensus sequence or the polypeptide motif, as depicted in Table I, II or IV, column 7 in the respective same line as the nucleic acid molecule SEQ ID NO.: 5458 or polypeptide SEQ ID NO.: 5459, respectively is increased or generated or if the activity “acyl-carrier protein” is increased or generated in an plant cell, plant or part thereof an increased GABA content as compared to a corresponding non-transformed wild type plant cell, a plant or a part thereof is conferred.

[0226] Accordingly, in one embodiment, in case the activity of the Synechocystis sp. nucleic acid molecule or a polypeptide comprising the nucleic acid SEQ ID NO.: 6041 or polypeptide SEQ ID NO.: 6042, respectively is increased or generated, e.g. if the activity of a nucleic acid molecule or a polypeptide comprising the nucleic acid or polypeptide or the consensus sequence or the polypeptide motif, as depicted in Table I, II or IV, column 7 in the respective same line as the nucleic acid molecule SEQ ID NO.: 6041 or polypeptide SEQ ID NO.: 6042, respectively is increased or generated or if the activity “geranylgeranyl pyrophosphate synthase” is increased or generated in an plant cell, plant or part thereof an increased GABA content as compared to a corresponding non-transformed wild type plant cell, a plant or a part thereof is conferred.

[0227] Accordingly, in one embodiment, in case the activity of the Thermus thermophilus nucleic acid molecule or a polypeptide comprising the nucleic acid SEQ ID NO.: 6469 or polypeptide SEQ ID NO.: 6470, respectively is increased or generated, e.g. if the activity of a nucleic acid molecule or a polypeptide comprising the nucleic acid or polypeptide or the consensus sequence or the polypeptide motif, as depicted in Table I, II or IV, column 7 in the respective same line as the nucleic acid molecule SEQ ID NO.: 6469 or polypeptide SEQ ID NO.: 6470, respectively is increased or generated or if the activity “Sec-independent protein translocase subunit” is increased or generated in an plant cell, plant or part thereof an increased GABA content as compared to a corresponding non-transformed wild type plant cell, a plant or a part thereof is conferred.

[0228] Accordingly, in one embodiment, in case the activity of the Thermus thermophilus nucleic acid molecule or a polypeptide comprising the nucleic acid SEQ ID NO.: 6739 or polypeptide SEQ ID NO.: 6740, respectively is increased or generated, e.g. if the activity of a nucleic acid molecule or a polypeptide comprising the nucleic acid or polypeptide or the consensus sequence or the polypeptide motif, as depicted in Table I, II or IV, column 7 in the respective same line as the nucleic acid molecule SEQ ID NO.: 6739 or polypeptide SEQ ID NO.: 6740, respectively is increased or generated or if the activity “homocitrate synthase” is increased or generated in an plant cell, plant or part thereof an increased GABA content as compared to a corresponding non-transformed wild type plant cell, a plant or a part thereof is conferred.

[0229] Accordingly, in one embodiment, in case the activity of the Saccharomyces cerevisiae nucleic acid molecule or a polypeptide comprising the nucleic acid SEQ ID NO.: 7510 or polypeptide SEQ ID NO.: 7511, respectively is increased or generated, e.g. if the activity of a nucleic acid molecule or a polypeptide comprising the nucleic acid or polypeptide or the consensus sequence or the polypeptide motif, as depicted in Table I, II or IV, column 7 in the respective same line as the nucleic acid molecule SEQ ID NO.: 7510 or polypeptide SEQ ID NO.: 7511, respectively is increased or generated or if the activity “polygalacturonase” is increased or generated in an plant cell, plant or part thereof an increased GABA content as compared to a corresponding non-transformed wild type plant cell, a plant or a part thereof is conferred.

[0230] Accordingly, in one embodiment, in case the activity of the Saccharomyces cerevisiae nucleic acid molecule or a polypeptide comprising the nucleic acid SEQ ID NO.: 7633 or polypeptide SEQ ID NO.: 7634, respectively is increased or generated, e.g. if the activity of a nucleic acid molecule or a polypeptide comprising the nucleic acid or polypeptide or the consensus sequence or the polypeptide motif, as depicted in Table I, II or IV, column 7 in the respective same line as the nucleic acid molecule SEQ ID NO.: 7633 or polypeptide SEQ ID NO.: 7634, respectively is increased or generated or if the activity “thioredoxin” is increased or generated in an plant cell, plant or part thereof an increased GABA content as compared to a corresponding non-transformed wild type plant cell, a plant or a part thereof is conferred.

[0231] Accordingly, in one embodiment, in case the activity of the Brassica napus nucleic acid molecule or a polypeptide comprising the nucleic acid SEQ ID NO.: 53 or polypeptide SEQ ID NO.: 54, respectively is increased or generated, e.g. if the activity of a nucleic acid molecule or a polypeptide comprising the nucleic acid or polypeptide or the consensus sequence or the polypeptide motif, as depicted in Table I, II or IV, column 7 in the respective same line as the nucleic acid molecule SEQ ID NO.: 53 or polypeptide SEQ ID NO.: 54, respectively is increased or generated or if the activity “pyruvate kinase” is increased or generated in an plant cell, plant or part thereof an increased GABA content as compared to a corresponding non-transformed wild type plant cell, a plant or a part thereof is conferred.

[0232] Accordingly, in one embodiment, in case the activity of the Saccharomyces cerevisiae nucleic acid molecule or a polypeptide comprising the nucleic acid SEQ ID NO.: 7137 or polypeptide SEQ ID NO.: 7138, respectively is increased or generated, e.g. if the activity of a nucleic acid molecule or a polypeptide comprising the nucleic acid or polypeptide or the consensus sequence or the polypeptide motif, as depicted in Table I, II or IV, column 7 in the respective same line as the nucleic acid molecule SEQ ID NO.: 7137 or polypeptide SEQ ID NO.: 7138, respectively is increased or generated or if the activity “microsomal beta-keto-reductase” is increased or generated in an plant cell, plant or part thereof an increased GABA content as compared to a corresponding non-transformed wild type plant cell, a plant or a part thereof is conferred.

[0233] Accordingly, in one embodiment, in case the activity of the Saccharomyces cerevisiae nucleic acid molecule or a polypeptide comprising the nucleic acid SEQ ID NO.: 7208 or polypeptide SEQ ID NO.: 7209, respectively is increased or generated, e.g. if the activity of a nucleic acid molecule or a polypeptide comprising the nucleic acid or polypeptide or the consensus sequence or the polypeptide motif, as depicted in Table I, II or IV, column 7 in the respective same line as the nucleic acid molecule SEQ ID NO.: 7208 or polypeptide SEQ ID NO.: 7209, respectively is increased or generated or if the activity “Branched-chain amino acid permease” is increased or generated in an plant cell, plant or part thereof an increased GABA content as compared to a corresponding non-transformed wild type plant cell, a plant or a part thereof is conferred. Accordingly, in one embodiment, in case the activity of the Saccharomyces cerevisiae nucleic acid molecule or a polypeptide comprising the nucleic acid SEQ ID NO.: 7274 or polypeptide SEQ ID NO.: 7275, respectively is increased or generated, e.g. if the activity of a nucleic acid molecule or a polypeptide comprising the nucleic acid or polypeptide or the consensus sequence or the polypeptide motif, as depicted in Table I, II or IV, column 7 in the respective same line as the nucleic acid molecule SEQ ID NO.: 7274 or polypeptide SEQ ID NO.: 7275, respectively is increased or generated or if the activity “ubiquinone biosynthesis monooxygenase” is increased or generated in an plant cell, plant or part thereof an increased GABA content as compared to a corresponding non-transformed wild type plant cell, a plant or a part thereof is conferred.

[0234] Accordingly, in one embodiment, in case the activity of the Saccharomyces cerevisiae nucleic acid molecule or a polypeptide comprising the nucleic acid SEQ ID NO.: 7489 or polypeptide SEQ ID NO.: 7490, respectively is increased or generated, e.g. if the activity of a nucleic acid molecule or a polypeptide comprising the nucleic acid or polypeptide or the consensus sequence or the polypeptide motif, as depicted in Table I, II or IV, column 7 in the respective same line as the nucleic acid molecule SEQ ID NO.: 7489 or polypeptide SEQ ID NO.: 7490, respectively is increased or generated or if the activity “YHR213W-protein” is increased or generated in an plant cell, plant or part thereof an increased GABA content as compared to a corresponding non-transformed wild type plant cell, a plant or a part thereof is conferred.

[0235] Accordingly, in one embodiment, in case the activity of the Saccharomyces cerevisiae nucleic acid molecule or a polypeptide comprising the nucleic acid SEQ ID NO.: 8239 or polypeptide SEQ ID NO.: 8240, respectively is increased or generated, e.g. if the activity of a nucleic acid molecule or a polypeptide comprising the nucleic acid or polypeptide or the consensus sequence or the polypeptide motif, as depicted in Table I, II or IV, column 7 in the respective same line as the nucleic acid molecule SEQ ID NO.: 8239 or polypeptide SEQ ID NO.: 8240, respectively is increased or generated or if the activity “60S ribosomal protein” is increased or generated in an plant cell, plant or part thereof an increased GABA content as compared to a corresponding non-transformed wild type plant cell, a plant or a part thereof is conferred.

[0236] Accordingly, in one embodiment, in case the activity of the Saccharomyces cerevisiae nucleic acid molecule or a polypeptide comprising the nucleic acid SEQ ID NO.: 8397 or polypeptide SEQ ID NO.: 8398, respectively is increased or generated, e.g. if the activity of a nucleic acid molecule or a polypeptide comprising the nucleic acid or polypeptide or the consensus sequence or the polypeptide motif, as depicted in Table I, II or IV, column 7 in the respective same line as the nucleic acid molecule SEQ ID NO.: 8397 or polypeptide SEQ ID NO.: 8398, respectively is increased or generated or if the activity “Autophagy-related protein” is increased or generated in an plant cell, plant or part thereof an increased GABA content as compared to a corresponding non-transformed wild type plant cell, a plant or a part thereof is conferred.

[0237] Accordingly, in one embodiment, in case the activity of the Saccharomyces cerevisiae nucleic acid molecule or a polypeptide comprising the nucleic acid SEQ ID NO.: 8227 or polypeptide SEQ ID NO.: 8228, respectively is increased or generated, e.g. if the activity of a nucleic acid molecule or a polypeptide comprising the nucleic acid or polypeptide or the consensus sequence or the polypeptide motif, as depicted in Table I, II or IV, column 7 in the respective same line as the nucleic acid molecule SEQ ID NO.: 8227 or polypeptide SEQ ID NO.: 8228, respectively is increased or generated or if the activity “cytochrome c oxidase subunit VIII” is increased or generated in an plant cell, plant or part thereof an increased GABA content as compared to a corresponding non-transformed wild type plant cell, a plant or a part thereof is conferred.

[0238] Accordingly, in one embodiment, in case the activity of the Saccharomyces cerevisiae nucleic acid molecule or a polypeptide comprising the nucleic acid SEQ ID NO.: 8423 or polypeptide SEQ ID NO.: 8424, respectively is increased or generated, e.g. if the activity of a nucleic acid molecule or a polypeptide comprising the nucleic acid or polypeptide or the consensus sequence or the polypeptide motif, as depicted in Table I, II or IV, column 7 in the respective same line as the nucleic acid molecule SEQ ID NO.: 8423 or polypeptide SEQ ID NO.: 8424, respectively is increased or generated or if the activity “Branched-chain amino acid permease” is increased or generated in an plant cell, plant or part thereof an increased GABA content as compared to a corresponding non-transformed wild type plant cell, a plant or a part thereof is conferred.

[0239] In a further embodiment, an increased tolerance to abiotic environmental stress and/or increased yield related trait, in particular increased low temperature tolerance, compared to a corresponding non-modified, e.g. a non-transformed, wild type plant is conferred if the activity of a polypeptide comprising the polypeptide shown in SEQ ID NO. 2493, or encoded by a nucleic acid molecule comprising the nucleic acid molecule shown in SEQ ID NO. 2492, or a homolog of said nucleic acid molecule or polypeptide, is increased or generated. For example, the activity of a corresponding nucleic acid molecule or a polypeptide derived from Arabidopsis thaliana is increased or generated, preferably comprising the nucleic acid molecule shown in SEQ ID NO. 2492 or polypeptide shown in SEQ ID NO. 2493, respectively, or a homolog thereof. E.g. an increased tolerance to abiotic environmental stress, in particular increased low temperature tolerance, compared to a corresponding non-modified, e.g. a non-transformed, wild type plant is conferred if the activity “At5g16650-protein” or if the activity of a nucleic acid molecule or a polypeptide comprising the nucleic acid or polypeptide or the consensus sequence or the polypeptide motif, depicted in table I, II or IV, column 7, respective same line as SEQ ID NO.: 2492 or SEQ ID NO.: 2493, respectively, is increased or generated in a plant or part thereof. Preferably, the increase occurs cytoplasmic.

[0240] Particularly, an increase of yield from 1.05-fold to 1.075-fold, for example plus at least 100% thereof, under conditions of low temperature is conferred compared to a corresponding non-modified, e.g. non-transformed, wild type plant.

[0241] In a further embodiment, an increased tolerance to abiotic environmental stress and/or increased yield related trait, in particular increased low temperature tolerance, compared to a corresponding non-modified, e.g. a non-transformed, wild type plant is conferred if the activity of a polypeptide comprising the polypeptide shown in SEQ ID NO. 7138, or encoded by a nucleic acid molecule comprising the nucleic acid molecule shown in SEQ ID NO. 7137, or a homolog of said nucleic acid molecule or polypeptide, is increased or generated. For example, the activity of a corresponding nucleic acid molecule or a polypeptide derived from Saccharomyces cerevisiae is increased or generated, preferably comprising the nucleic acid molecule shown in SEQ ID NO. 7137 or polypeptide shown in SEQ ID NO. 7138, respectively, or a homolog thereof. E.g. an increased tolerance to abiotic environmental stress, in particular increased low temperature tolerance, compared to a corresponding non-modified, e.g. a non-transformed, wild type plant is conferred if the activity “microsomal beta-ketoreductase” or if the activity of a nucleic acid molecule or a polypeptide comprising the nucleic acid or polypeptide or the consensus sequence or the polypeptide motif, depicted in table I, II or IV, column 7, respective same line as SEQ ID NO.: 7137 or SEQ ID NO.: 7138, respectively, is increased or generated in a plant or part thereof. Preferably, the increase occurs cytoplasmic.

[0242] Particularly, an increase of yield from 1.05-fold to 1.068-fold, for example plus at least 100% thereof, under conditions of low temperature is conferred compared to a corresponding non-modified, e.g. non-transformed, wild type plant.

[0243] In a further embodiment, an increased tolerance to abiotic environmental stress and/or increased yield related trait, in particular increased low temperature tolerance, compared to a corresponding non-modified, e.g. a non-transformed, wild type plant is conferred if the activity of a polypeptide comprising the polypeptide shown in SEQ ID NO. 7209, or encoded by a nucleic acid molecule comprising the nucleic acid molecule shown in SEQ ID NO. 7208, or a homolog of said nucleic acid molecule or polypeptide, is increased or generated. For example, the activity of a corresponding nucleic acid molecule or a polypeptide derived from Saccharomyces cerevisiae is increased or generated, preferably comprising the nucleic acid molecule shown in SEQ ID NO. 7208 or polypeptide shown in SEQ ID NO. 7209, respectively, or a homolog thereof. E.g. an increased tolerance to abiotic environmental stress, in particular increased low temperature tolerance, compared to a corresponding non-modified, e.g. a non-transformed, wild type plant is conferred if the activity “Branched-chain amino acid permease” or if the activity of a nucleic acid molecule or a polypeptide comprising the nucleic acid or polypeptide or the consensus sequence or the polypeptide motif, depicted in table I, II or IV, column 7, respective same line as SEQ ID NO.: 7208 or SEQ ID NO.: 7209, respectively, is increased or generated in a plant or part thereof. Preferably, the increase occurs cytoplasmic.

[0244] Particularly, an increase of yield from 1.05-fold to 1.206-fold, for example plus at least 100% thereof, under conditions of low temperature is conferred compared to a corresponding non-modified, e.g. non-transformed, wild type plant.

[0245] In a further embodiment, an increased tolerance to abiotic environmental stress and/or increased yield related trait, in particular increased low temperature tolerance, compared to a corresponding non-modified, e.g. a non-transformed, wild type plant is conferred if the activity of a polypeptide comprising the polypeptide shown in SEQ ID NO. 8240, or encoded by a nucleic acid molecule comprising the nucleic acid molecule shown in SEQ ID NO. 8239, or a homolog of said nucleic acid molecule or polypeptide, is increased or generated. For example, the activity of a corresponding nucleic acid molecule or a polypeptide derived from Saccharomyces cerevisiae is increased or generated, preferably comprising the nucleic acid molecule shown in SEQ ID NO. 8239 or polypeptide shown in SEQ ID NO. 8240, respectively, or a homolog thereof. E.g. an increased tolerance to abiotic environmental stress, in particular increased low temperature tolerance, compared to a corresponding non-modified, e.g. a non-transformed, wild type plant is conferred if the activity “60S ribosomal protein” or if the activity of a nucleic acid molecule or a polypeptide comprising the nucleic acid or polypeptide or the consensus sequence or the polypeptide motif, depicted in table I, II or IV, column 7, respective same line as SEQ ID NO.: 8239 or SEQ ID NO.: 8240, respectively, is increased or generated in a plant or part thereof. Preferably, the increase occurs cytoplasmic.

[0246] Particularly, an increase of yield from 1.05-fold to 1.230-fold, for example plus at least 100% thereof, under conditions of low temperature is conferred compared to a corresponding non-modified, e.g. non-transformed, wild type plant.

[0247] In a further embodiment, an increased tolerance to abiotic environmental stress and/or increased yield related trait, in particular increased low temperature tolerance, compared to a corresponding non-modified, e.g. a non-transformed, wild type plant is conferred if the activity of a polypeptide comprising the polypeptide shown in SEQ ID NO. 8424, or encoded by a nucleic acid molecule comprising the nucleic acid molecule shown in SEQ ID NO. 8423, or a homolog of said nucleic acid molecule or polypeptide, is increased or generated. For example, the activity of a corresponding nucleic acid molecule or a polypeptide derived from Saccharomyces cerevisiae is increased or generated, preferably comprising the nucleic acid molecule shown in SEQ ID NO. 8423 or polypeptide shown in SEQ ID NO. 8424, respectively, or a homolog thereof. E.g. an increased tolerance to abiotic environmental stress, in particular increased low temperature tolerance, compared to a corresponding non-modified, e.g. a non-transformed, wild type plant is conferred if the activity “Branched-chain amino acid permease” or if the activity of a nucleic acid molecule or a polypeptide comprising the nucleic acid or polypeptide or the consensus sequence or the polypeptide motif, depicted in table I, II or IV, column 7, respective same line as SEQ ID NO.: 8423 or SEQ ID NO.: 8424, respectively, is increased or generated in a plant or part thereof. Preferably, the increase occurs cytoplasmic.

[0248] Particularly, an increase of yield from 1.05-fold to 1.206-fold, for example plus at least 100% thereof, under conditions of low temperature is conferred compared to a corresponding non-modified, e.g. non-transformed, wild type plant.

[0249] In a further embodiment, an increased tolerance to abiotic environmental stress and/or increased yield related trait, in particular increased intrinsic yield, compared to a corresponding non-modified, e.g. a non-transformed, wild type plant is conferred if the activity of a polypeptide comprising the polypeptide shown in SEQ ID NO. 7209, or encoded by a nucleic acid molecule comprising the nucleic acid molecule shown in SEQ ID NO. 7208, or a homolog of said nucleic acid molecule or polypeptide, is increased or generated. For example, the activity of a corresponding nucleic acid molecule or a polypeptide derived from Saccharomyces cerevisiae is increased or generated, preferably comprising the nucleic acid molecule shown in SEQ ID NO. 7208 or polypeptide shown in SEQ ID NO. 7209, respectively, or a homolog thereof. E.g. an increased tolerance to abiotic environmental stress and/or increased yield related trait, in particular increased intrinsic yield, compared to a corresponding non-modified, e.g. a non-transformed, wild type plant is conferred if the activity “Branched-chain amino acid permease” or if the activity of a nucleic acid molecule or a polypeptide comprising the nucleic acid or polypeptide or the consensus sequence or the polypeptide motif, depicted in table I, II or IV, column 7, respective same line as SEQ ID NO.: 7208 or SEQ ID NO.: 7209, respectively, is increased or generated in a plant or part thereof. Preferably, the increase occurs cytoplasmic. Particularly, an increase of yield from 1.05-fold to 1.522-fold, for example plus at least 100% thereof, under standard conditions, e.g. in the absence of nutrient deficiency and/or stress conditions is conferred compared to a corresponding control, e.g. an non-modified, e.g. non-transformed, wild type plant.

[0250] E.g. an increased tolerance to abiotic environmental stress and/or increased yield related trait, in particular increased intrinsic yield, compared to a corresponding non-modified, e.g. a non-transformed, wild type plant is conferred if the activity “Branched-chain amino acid permease” or if the activity of a nucleic acid molecule or a polypeptide comprising the nucleic acid or polypeptide or the consensus sequence or the polypeptide motif, depicted in table I, II or IV, column 7, respective same line as SEQ ID NO.: 7208 or SEQ ID NO.: 7209, respectively, is increased or generated in a plant or part thereof. Preferably, the increase occurs plastidic. Particularly, an increase of yield from 1.05-fold to 1.232-fold, for example plus at least 100% thereof, under standard conditions, e.g. in the absence of nutrient deficiency and/or stress conditions is conferred compared to a corresponding control, e.g. an non-modified, e.g. non-transformed, wild type plant.

[0251] In a further embodiment, an increased tolerance to abiotic environmental stress and/or increased yield related trait, in particular increased intrinsic yield, compared to a corresponding non-modified, e.g. a non-transformed, wild type plant is conferred if the activity of a polypeptide comprising the polypeptide shown in SEQ ID NO. 8240, or encoded by a nucleic acid molecule comprising the nucleic acid molecule shown in SEQ ID NO. 8239, or a homolog of said nucleic acid molecule or polypeptide, is increased or generated. For example, the activity of a corresponding nucleic acid molecule or a polypeptide derived from Saccharomyces cerevisiae is increased or generated, preferably comprising the nucleic acid molecule shown in SEQ ID NO. 8239 or polypeptide shown in SEQ ID NO. 8240, respectively, or a homolog thereof. E.g. an increased tolerance to abiotic environmental stress and/or increased yield related trait, in particular increased intrinsic yield, compared to a corresponding non-modified, e.g. a non-transformed, wild type plant is conferred if the activity “60S ribosomal protein” or if the activity of a nucleic acid molecule or a polypeptide comprising the nucleic acid or polypeptide or the consensus sequence or the polypeptide motif, depicted in table I, II or IV, column 7, respective same line as SEQ ID NO.: 8239 or SEQ ID NO.: 8240, respectively, is increased or generated in a plant or part thereof. Preferably, the increase occurs cytoplasmic. Particularly, an increase of yield from 1.05-fold to 1.546-fold, for example plus at least 100% thereof, under standard conditions, e.g. in the absence of nutrient deficiency and/or stress conditions is conferred compared to a corresponding control, e.g. an non-modified, e.g. non-transformed, wild type plant.

[0252] In a further embodiment, an increased tolerance to abiotic environmental stress and/or increased yield related trait, in particular increased intrinsic yield, compared to a corresponding non-modified, e.g. a non-transformed, wild type plant is conferred if the activity of a polypeptide comprising the polypeptide shown in SEQ ID NO. 8398, or encoded by a nucleic acid molecule comprising the nucleic acid molecule shown in SEQ ID NO. 8397, or a homolog of said nucleic acid molecule or polypeptide, is increased or generated. For example, the activity of a corresponding nucleic acid molecule or a polypeptide derived from Saccharomyces cerevisiae is increased or generated, preferably comprising the nucleic acid molecule shown in SEQ ID NO. 8397 or polypeptide shown in SEQ ID NO. 8398, respectively, or a homolog thereof. E.g. an increased tolerance to abiotic environmental stress and/or increased yield related trait, in particular increased intrinsic yield, compared to a corresponding non-modified, e.g. a non-transformed, wild type plant is conferred if the activity “Autophagy-related protein” or if the activity of a nucleic acid molecule or a polypeptide comprising the nucleic acid or polypeptide or the consensus sequence or the polypeptide motif, depicted in table I, II or IV, column 7, respective same line as SEQ ID NO.: 8397 or SEQ ID NO.: 8398, respectively, is increased or generated in a plant or part thereof. Preferably, the increase occurs cytoplasmic. Particularly, an increase of yield from 1.05-fold to 1.399-fold, for example plus at least 100% thereof, under standard conditions, e.g. in the absence of nutrient deficiency and/or stress conditions is conferred compared to a corresponding control, e.g. an non-modified, e.g. non-transformed, wild type plant.

[0253] In a further embodiment, an increased tolerance to abiotic environmental stress and/or increased yield related trait, in particular increased intrinsic yield, compared to a corresponding non-modified, e.g. a non-transformed, wild type plant is conferred if the activity of a polypeptide comprising the polypeptide shown in SEQ ID NO. 8424, or encoded by a nucleic acid molecule comprising the nucleic acid molecule shown in SEQ ID NO. 8423, or a homolog of said nucleic acid molecule or polypeptide, is increased or generated. For example, the activity of a corresponding nucleic acid molecule or a polypeptide derived from Saccharomyces cerevisiae is increased or generated, preferably comprising the nucleic acid molecule shown in SEQ ID NO. 8423 or polypeptide shown in SEQ ID NO. 8424, respectively, or a homolog thereof. E.g. an increased tolerance to abiotic environmental stress and/or increased yield related trait, in particular increased intrinsic yield, compared to a corresponding non-modified, e.g. a non-transformed, wild type plant is conferred if the activity “Branched-chain amino acid permease” or if the activity of a nucleic acid molecule or a polypeptide comprising the nucleic acid or polypeptide or the consensus sequence or the polypeptide motif, depicted in table I, II or IV, column 7, respective same line as SEQ ID NO.: 8423 or SEQ ID NO.: 8424, respectively, is increased or generated in a plant or part thereof. Preferably, the increase occurs cytoplasmic. Particularly, an increase of yield from 1.05-fold to 1.522-fold, for example plus at least 100% thereof, under standard conditions, e.g. in the absence of nutrient deficiency and/or stress conditions is conferred compared to a corresponding control, e.g. an non-modified, e.g. non-transformed, wild type plant. E.g. an increased tolerance to abiotic environmental stress and/or increased yield related trait, in particular increased intrinsic yield, compared to a corresponding non-modified, e.g. a non-transformed, wild type plant is conferred if the activity “Branched-chain amino acid permease” or if the activity of a nucleic acid molecule or a polypeptide comprising the nucleic acid or polypeptide or the consensus sequence or the polypeptide motif, depicted in table I, II or IV, column 7, respective same line as SEQ ID NO.: 8423 or SEQ ID NO.: 8424, respectively, is increased or generated in a plant or part thereof. Preferably, the increase occurs plastidic. Particularly, an increase of yield from 1.05-fold to 1.232-fold, for example plus at least 100% thereof, under standard conditions, e.g. in the absence of nutrient deficiency and/or stress conditions is conferred compared to a corresponding control, e.g. an non-modified, e.g. non-transformed, wild type plant.

[0254] In a further embodiment, an increased tolerance to abiotic environmental stress and/or increased yield related trait, in particular increased drought resistance, preferably cycling drought, compared to a corresponding non-modified, e.g. a non-transformed, wild type plant is conferred if the activity of a polypeptide comprising the polypeptide shown in SEQ ID NO. 7209, or encoded by a nucleic acid molecule comprising the nucleic acid molecule shown in SEQ ID NO. 7208, or a homolog of said nucleic acid molecule or polypeptide, is increased or generated. For example, the activity of a corresponding nucleic acid molecule or a polypeptide derived from Saccharomyces cerevisiae is increased or generated, preferably comprising the nucleic acid molecule shown in SEQ ID NO. 7208 or polypeptide shown in SEQ ID NO. 7209, respectively, or a homolog thereof. E.g. an increased tolerance to abiotic environmental stress and/or increased yield related trait, in particular increased resistance to droght, preferably cycling drought, compared to a corresponding non-modified, e.g. a non-transformed, wild type plant is conferred if the activity “Branched-chain amino acid permease” or if the activity of a nucleic acid molecule or a polypeptide comprising the nucleic acid or polypeptide or the consensus sequence or the polypeptide motif, depicted in table I, II or IV, column 7, respective same line as SEQ ID NO.: 7208 or SEQ ID NO.: 7209, respectively, is increased or generated in a plant or part thereof. Preferably, the increase occurs plastidic. Particularly, an increase of yield from 1.05-fold to 1.351-fold, for example plus at least 100% thereof, is conferred compared to a corresponding control, e.g. an non-modified, e.g. non-transformed, wild type plant.

[0255] In a further embodiment, an increased tolerance to abiotic environmental stress and/or increased yield related trait, in particular increased drought resistance, preferably cycling drought, compared to a corresponding non-modified, e.g. a non-transformed, wild type plant is conferred if the activity of a polypeptide comprising the polypeptide shown in SEQ ID NO. 8424, or encoded by a nucleic acid molecule comprising the nucleic acid molecule shown in SEQ ID NO. 8423, or a homolog of said nucleic acid molecule or polypeptide, is increased or generated. For example, the activity of a corresponding nucleic acid molecule or a polypeptide derived from Saccharomyces cerevisiae is increased or generated, preferably comprising the nucleic acid molecule shown in SEQ ID NO. 8423 or polypeptide shown in SEQ ID NO. 8424, respectively, or a homolog thereof. E.g. an increased tolerance to abiotic environmental stress and/or increased yield related trait, in particular increased resistance to drought, preferably cycling drought, compared to a corresponding non-modified, e.g. a non-transformed, wild type plant is conferred if the activity “Branched-chain amino acid permease” or if the activity of a nucleic acid molecule or a polypeptide comprising the nucleic acid or polypeptide or the consensus sequence or the polypeptide motif, depicted in table I, II or IV, column 7, respective same line as SEQ ID NO.: 8423 or SEQ ID NO.: 8424, respectively, is increased or generated in a plant or part thereof. Preferably, the increase occurs plastidic.

[0256] Particularly, an increase of yield from 1.05-fold to 1.351-fold, for example plus at least 100% thereof, is conferred compared to a corresponding control, e.g. an non-modified, e.g. non-transformed, wild type plant.

[0257] For the purposes of the invention, as a rule the plural is intended to encompass the singular and vice versa.

[0258] Unless otherwise specified, the terms “polynucleotides”, “nucleic acid” and “nucleic acid molecule” are interchangeably in the present context. Unless otherwise specified, the terms “peptide”, “polypeptide” and “protein” are interchangeably in the present context. The term “sequence” may relate to polynucleotides, nucleic acids, nucleic acid molecules, peptides, polypeptides and proteins, depending on the context in which the term “sequence” is used. The terms “gene(s)”, “polynucleotide”, “nucleic acid sequence”, “nucleotide sequence”, or “nucleic acid molecule(s)” as used herein refers to a polymeric form of nucleotides of any length, either ribonucleotides or deoxyribonucleotides. The terms refer only to the primary structure of the molecule.

[0259] Thus, the terms “gene(s)”, “polynucleotide”, “nucleic acid sequence”, “nucleotide sequence”, or “nucleic acid molecule(s)” as used herein include double- and single-stranded DNA and/or RNA. They also include known types of modifications, for example, methylation, “caps”, substitutions of one or more of the naturally occurring nucleotides with an analog. Preferably, the DNA or RNA sequence comprises a coding sequence encoding the herein defined polypeptide.

[0260] A “coding sequence” is a nucleotide sequence, which is transcribed into an RNA, e.g. a regulatory RNA, such as a miRNA, a ta-siRNA, cosuppression molecule, an RNAi, a ribozyme, etc. or into a mRNA which is translated into a polypeptide when placed under the control of appropriate regulatory sequences. The boundaries of the coding sequence are determined by a translation start codon at the 5′-terminus and a translation stop codon at the 3′-terminus. A coding sequence can include, but is not limited to mRNA, cDNA, recombinant nucleotide sequences or genomic DNA, while introns may be present as well under certain circumstances.

[0261] As used in the present context a nucleic acid molecule may also encompass the untranslated sequence located at the 3′ and at the 5′ end of the coding gene region, for example at least 500, preferably 200, especially preferably 100, nucleotides of the sequence upstream of the 5′ end of the coding region and at least 100, preferably 50, especially preferably 20, nucleotides of the sequence downstream of the 3′ end of the coding gene region. In the event for example the antisense, RNAi, snRNA, dsRNA, siRNA, miRNA, ta-siRNA, cosuppression molecule, ribozyme etc. technology is used coding regions as well as the 5′- and/or 3′-regions can advantageously be used.

[0262] However, it is often advantageous only to choose the coding region for cloning and expression purposes.

[0263] “Polypeptide” refers to a polymer of amino acid (amino acid sequence) and does not refer to a specific length of the molecule. Thus, peptides and oligopeptides are included within the definition of polypeptide. This term does also refer to or include posttranslational modifications of the polypeptide, for example, glycosylations, acetylations, phosphorylations and the like. Included within the definition are, for example, polypeptides containing one or more analogs of an amino acid (including, for example, unnatural amino acids, etc.), polypeptides with substituted linkages, as well as other modifications known in the art, both naturally occurring and non-naturally occurring.

[0264] The term “Table I” used in this specification is to be taken to specify the content of Table I A and Table I B. The term “Table II” used in this specification is to be taken to specify the content of Table II A and Table II B. The term “Table I A” used in this specification is to be taken to specify the content of Table I A. The term “Table I B” used in this specification is to be taken to specify the content of Table I B. The term “Table II A” used in this specification is to be taken to specify the content of Table II A. The term “Table II B” used in this specification is to be taken to specify the content of Table II B. In one preferred embodiment, the term “Table I” means Table I B. In one preferred embodiment, the term “Table II” means Table II B.

[0265] The terms “comprise” or “comprising” and grammatical variations thereof when used in this specification are to be taken to specify the presence of stated features, integers, steps or components or groups thereof, but not to preclude the presence or addition of one or more other features, integers, steps, components or groups thereof.

[0266] In accordance with the invention, a protein or polypeptide has the “activity of an protein as shown in table II, column 3” if its de novo activity, or its increased expression directly or indirectly leads to and confers an increased GABA content as compared to a corresponding non-transformed wild type and the protein has the above mentioned activities of a protein as shown in table II, column 3. Throughout the specification the activity or preferably the biological activity of such a protein or polypeptide or an nucleic acid molecule or sequence encoding such protein or polypeptide is identical or similar if it still has the biological or enzymatic activity of a protein as shown in table II, column 3, or which has at least 10% of the original enzymatic activity, preferably 20%, particularly preferably 30%, most particularly preferably 40% in comparison to a protein as shown in table II, column 3 or 5.

[0267] The terms “increased”, “rised”, “extended”, “enhanced”, “improved” or “amplified” relate to a corresponding change of a property in a plant, an organism, a part of an organism such as a tissue, seed, root, leave, flower etc. or in a cell and are interchangeable. Preferably, the overall activity in the volume is increased or enhanced in cases if the increase or enhancement is related to the increase or enhancement of an activity of a gene product, independent whether the amount of gene product or the specific activity of the gene product or both is increased or enhanced or whether the amount, stability or translation efficacy of the nucleic acid sequence or gene encoding for the gene product is increased or enhanced.

[0268] The terms “increase” relate to a corresponding change of a property an organism or in a part of a plant, an organism, such as a tissue, seed, root, leave, flower etc. or in a cell. Preferably, the overall activity in the volume is increased in cases the increase relates to the increase of an activity of a gene product, independent whether the amount of gene product or the specific activity of the gene product or both is increased or generated or whether the amount, stability or translation efficacy of the nucleic acid sequence or gene encoding for the gene product is increased.

[0269] Under “change of a property” it is understood that the activity, expression level or amount of a gene product or the metabolite content is changed in a specific volume relative to a corresponding volume of a control, reference or wild type, including the de novo creation of the activity or expression.

[0270] The terms “increase” include the change of said property in only parts of the subject of the present invention, for example, the modification can be found in compartment of a cell, like a organelle, or in a part of a plant, like tissue, seed, root, leave, flower etc. but is not detectable if the overall subject, i.e. complete cell or plant, is tested.

[0271] Accordingly, the term “increase” means that the specific activity of an enzyme as well as the amount of a compound or metabolite, e.g. of a polypeptide, a nucleic acid molecule of the invention or an encoding mRNA or DNA, can be increased in a volume.

[0272] The terms “wild type”, “control” or “reference” are exchangeable and can be a cell or a part of organisms such as an organelle like a chloroplast or a tissue, or an organism, in particular a plant, which was not modified or treated according to the herein described process according to the invention. Accordingly, the cell or a part of organisms such as an organelle like a chloroplast or a tissue, or an organism, in particular a plant used as wild typ, control or reference corresponds to the cell, organism, plant or part thereof as much as possible and is in any other property but in the result of the process of the invention as identical to the subject matter of the invention as possible. Thus, the wild type, control or reference is treated identically or as identical as possible, saying that only conditions or properties might be different which do not influence the quality of the tested property.

[0273] Preferably, any comparison is carried out under analogous conditions. The term “analogous conditions” means that all conditions such as, for example, culture or growing conditions, water content of the soil, temperature, humidity or surrounding air or soil, assay conditions (such as buffer composition, temperature, substrates, pathogen strain, concentrations and the like) are kept identical between the experiments to be compared.

[0274] The “reference”, “control”, or “wild type” is preferably a subject, e.g. an organelle, a cell, a tissue, an organism, in particular a plant, which was not modified or treated according to the herein described process of the invention and is in any other property as similar to the subject matter of the invention as possible. The reference, control or wild type is in its genome, transcriptome, proteome or metabolome as similar as possible to the subject of the present invention. Preferably, the term “reference-” “control-” or “wild type-”-organelle, -cell, -tissue or -organism, in particular plant, relates to an organelle, cell, tissue or organism, in particular plant, which is nearly genetically identical to the organelle, cell, tissue or organism, in particular plant, of the present invention or a part thereof preferably 95%, more preferred are 98%, even more preferred are 99.00%, in particular 99.10%, 99.30%, 99.50%, 99.70%, 99.90%, 99.99%, 99.999% or more. Most preferable the “reference”, “control”, or “wild type” is a subject, e.g. an organelle, a cell, a tissue, an organism, which is genetically identical to the organism, cell or organelle used according to the process of the invention except that the responsible or activity conferring nucleic acid molecules or the gene product encoded by them are amended, manipulated, exchanged or introduced according to the inventive process.

[0275] In case, a control, reference or wild type differing from the subject of the present invention only by not being subject of the process of the invention can not be provided, a control, reference or wild type can be an organism in which the cause for the modulation of an activity conferring the increased GABA content as compared to a corresponding non-transformed wild type or expression of the nucleic acid molecule of the invention as described herein has been switched back or off, e.g. by knocking out the expression of responsible gene product, e.g. by antisense inhibition, by inactivation of an activator or agonist, by activation of an inhibitor or antagonist, by inhibition through adding inhibitory antibodies, by adding active compounds as e.g. hormones, by introducing negative dominant mutants, etc. A gene production can for example be knocked out by introducing inactivating point mutations, which lead to an enzymatic activity inhibition or a destabilization or an inhibition of the ability to bind to co-factors etc.

[0276] Accordingly, preferred reference subject is the starting subject of the present process of the invention. Preferably, the reference and the subject matter of the invention are compared after standardization and normalization, e.g. to the amount of total RNA, DNA, or Protein or activity or expression of reference genes, like housekeeping genes, such as ubiquitin, actin or ribosomal proteins.

[0277] The increase or modulation according to this invention can be constitutive, e.g. due to a stable permanent transgenic expression or to a stable mutation in the corresponding endogenous gene encoding the nucleic acid molecule of the invention or to a modulation of the expression or of the behavior of a gene conferring the expression of the polypeptide of the invention, or transient, e.g. due to an transient transformation or temporary addition of a modulator such as a agonist or antagonist or inducible, e.g. after transformation with a inducible construct carrying the nucleic acid molecule of the invention under control of a inducible promoter and adding the inducer, e.g. tetracycline or as described herein below.

[0278] The increase in activity of the polypeptide amounts in a cell, a tissue, a organelle, an organ or an organism or a part thereof preferably to at least 5%, preferably to at least 20% or at to least 50%, especially preferably to at least 70%, 80%, 90% or more, very especially preferably are to at least 200%, 300% or 400%, most preferably are to at least 500% or more in comparison to the control, reference or wild type.

[0279] In one embodiment the term increase means the increase in amount in relation to the weight of the organism or part thereof (w/w).

[0280] In one embodiments the increase in activity of the polypeptide amounts in an organelle such as a plastid.

[0281] The specific activity of a polypeptide encoded by a nucleic acid molecule of the present invention or of the polypeptide of the present invention can be tested as described in the examples. In particular, the expression of a protein in question in a cell, e.g. a plant cell in comparison to a control is an easy test and can be performed as described in the state of the art.

[0282] The term “increase” includes, that a compound or an activity is introduced into a cell or a subcellular compartment or organelle de novo or that the compound or the activity has not been detectable before, in other words it is “generated”.

[0283] Accordingly, in the following, the term “increasing” also comprises the term “generating” or “stimulating”. The increased activity manifests itself in an increased GABA content as compared to a corresponding non-transformed wild type plant cell, plant or part thereof.

[0284] The sequence of Ymr052w from Saccharomyces cerevisiae, e.g. as shown in column 5 of Table I, [sequences from Saccharomyces cerevisiae has been published in Goffeau et al., Science 274 (5287), 546-547, 1996, sequences from Escherichia coli has been published in Blattner et al., Science 277 (5331), 1453-1474 (1997), and its activity is published described as Factor arrest protein.

[0285] Accordingly, in one embodiment, the process of the present invention comprises increasing or generating the activity of a gene product with the activity of a “Factor arrest protein” from Saccharomyces cerevisiae or its functional equivalent or its homolog, e.g. the increase of
[0286] (a) a gene product of a gene comprising the nucleic acid molecule as shown in column 5 of Table I and being depicted in the same respective line as said Ymr052w or a functional equivalent or a homologue thereof as shown depicted in column 7 of Table I, preferably a homologue or functional equivalent as shown depicted in column 7 of Table I B, and being depicted in the same respective line as said Ymr052w; or
[0287] (b) a polypeptide comprising a polypeptide, a consensus sequence or a polypeptide motif as shown depicted in column 5 of Table II, and being depicted in the same respective line as said Ymr052w or a functional equivalent or a homologue thereof as depicted in column 7 of Table II or IV, preferably a homologue or functional equivalent as depicted in column 7 of Table II B, and being depicted in the same respective line as said Ymr052w,
   as mentioned herein, for the an increased GABA content as compared to a corresponding non-transformed wild type as mentioned.

[0288] Accordingly, in one embodiment, the molecule which activity is to be increased in the process of the invention is the gene product with an activity of described as a “Factor arrest protein”, preferably it is the molecule of section (a) or (b) of this paragraph.

[0289] The sequence of At1g43850 from Arabidopsis thaliana, e.g. as shown in column 5 of Table I, [sequences from Saccharomyces cerevisiae has been published in Goffeau et al., Science 274 (5287), 546-547, 1996, sequences from Escherichia coli has been published in Blattner et al., Science 277 (5331), 1453-1474 (1997), and its activity is published described as transcriptional regulator.

[0290] Accordingly, in one embodiment, the process of the present invention comprises increasing or generating the activity of a gene product with the activity of a “transcriptional regulator” from Arabidopsis thaliana or its functional equivalent or its homolog, e.g. the increase of
[0291] (a) a gene product of a gene comprising the nucleic acid molecule as shown in column 5 of Table I and being depicted in the same respective line as said At1g43850 or a functional equivalent or a homologue thereof as shown depicted in column 7 of Table I, preferably a homologue or functional equivalent as shown depicted in column 7 of Table I B, and being depicted in the same respective line as said At1g43850; or
[0292] (b) a polypeptide comprising a polypeptide, a consensus sequence or a polypeptide motif as shown depicted in column 5 of Table II, and being depicted in the same respective line as said At1g43850 or a functional equivalent or a homologue thereof as depicted in column 7 of Table II or IV, preferably a homologue or functional equivalent as depicted in column 7 of Table II B, and being depicted in the same respective line as said At1g43850,
   as mentioned herein, for the an increased GABA content as compared to a corresponding non-transformed wild type as mentioned.

[0293] Accordingly, in one embodiment, the molecule which activity is to be increased in the process of the invention is the gene product with an activity of described as a “transcriptional regulator”, preferably it is the molecule of section (a) or (b) of this paragraph.

[0294] The sequence of At2g28890 from Arabidopsis thaliana, e.g. as shown in column 5 of Table I, [sequences from Saccharomyces cerevisiae has been published in Goffeau et al., Science 274 (5287), 546-547, 1996, sequences from Escherichia coli has been published in Blattner et al., Science 277 (5331), 1453-1474 (1997), and its activity is published described as protein phosphatase.

[0295] Accordingly, in one embodiment, the process of the present invention comprises increasing or generating the activity of a gene product with the activity of a “protein phosphatase” from Arabidopsis thaliana or its functional equivalent or its homolog, e.g. the increase of
[0296] (a) a gene product of a gene comprising the nucleic acid molecule as shown in column 5 of Table I and being depicted in the same respective line as said At2g28890 or a functional equivalent or a homologue thereof as shown depicted in column 7 of Table I, preferably a homologue or functional equivalent as shown depicted in column 7 of Table I B, and being depicted in the same respective line as said At2g28890; or
[0297] (b) a polypeptide comprising a polypeptide, a consensus sequence or a polypeptide motif as shown depicted in column 5 of Table II, and being depicted in the same respective line as said At2g28890 or a functional equivalent or a homologue thereof as depicted in column 7 of Table II or IV, preferably a homologue or functional equivalent as depicted in column 7 of Table II B, and being depicted in the same respective line as said At2g28890,
   as mentioned herein, for the an increased GABA content as compared to a corresponding non-transformed wild type as mentioned.

[0298] Accordingly, in one embodiment, the molecule which activity is to be increased in the process of the invention is the gene product with an activity of described as a “protein phosphatase”, preferably it is the molecule of section (a) or (b) of this paragraph.

[0299] The sequence of At3g04050 from Arabidopsis thaliana, e.g. as shown in column 5 of Table I, [sequences from Saccharomyces cerevisiae has been published in Goffeau et al., Science 274 (5287), 546-547, 1996, sequences from Escherichia coli has been published in Blattner et al., Science 277 (5331), 1453-1474 (1997), and its activity is published described as pyruvate kinase.

[0300] Accordingly, in one embodiment, the process of the present invention comprises increasing or generating the activity of a gene product with the activity of a “pyruvate kinase” from Arabidopsis thaliana or its functional equivalent or its homolog, e.g. the increase of
[0301] (a) a gene product of a gene comprising the nucleic acid molecule as shown in column 5 of Table I and being depicted in the same respective line as said At3g04050 or a functional equivalent or a homologue thereof as shown depicted in column 7 of Table I, preferably a homologue or functional equivalent as shown depicted in column 7 of Table I B, and being depicted in the same respective line as said At3g04050; or
[0302] (b) a polypeptide comprising a polypeptide, a consensus sequence or a polypeptide motif as shown depicted in column 5 of Table II, and being depicted in the same respective line as said At3g04050 or a functional equivalent or a homologue thereof as depicted in column 7 of Table II or IV, preferably a homologue or functional equivalent as depicted in column 7 of Table II B, and being depicted in the same respective line as said At3g04050,
   as mentioned herein, for the an increased GABA content as compared to a corresponding non-transformed wild type as mentioned.

[0303] Accordingly, in one embodiment, the molecule which activity is to be increased in the process of the invention is the gene product with an activity of described as a “pyruvate kinase”, preferably it is the molecule of section (a) or (b) of this paragraph.

[0304] The sequence of At3g08710 from Arabidopsis thaliana, e.g. as shown in column 5 of Table I, [sequences from Saccharomyces cerevisiae has been published in Goffeau et al., Science 274 (5287), 546-547, 1996, sequences from Escherichia coli has been published in Blattner et al., Science 277 (5331), 1453-1474 (1997), and its activity is published described as thioredoxin family protein.

[0305] Accordingly, in one embodiment, the process of the present invention comprises increasing or generating the activity of a gene product with the activity of a “thioredoxin family protein” from Arabidopsis thaliana or its functional equivalent or its homolog, e.g. the increase of
[0306] (a) a gene product of a gene comprising the nucleic acid molecule as shown in column 5 of Table I and being depicted in the same respective line as said At3g08710 or a functional equivalent or a homologue thereof as shown depicted in column 7 of Table I, preferably a homologue or functional equivalent as shown depicted in column 7 of Table I B, and being depicted in the same respective line as said At3g08710; or
[0307] (b) a polypeptide comprising a polypeptide, a consensus sequence or a polypeptide motif as shown depicted in column 5 of Table II, and being depicted in the same respective line as said At3g08710 or a functional equivalent or a homologue thereof as depicted in column 7 of Table II or IV, preferably a homologue or functional equivalent as depicted in column 7 of Table II B, and being depicted in the same respective line as said At3g08710,
   as mentioned herein, for the an increased GABA content as compared to a corresponding non-transformed wild type as mentioned.

[0308] Accordingly, in one embodiment, the molecule which activity is to be increased in the process of the invention is the gene product with an activity of described as a “thioredoxin family protein”, preferably it is the molecule of section (a) or (b) of this paragraph.

[0309] The sequence of At3g11650 from Arabidopsis thaliana, e.g. as shown in column 5 of Table I, [sequences from Saccharomyces cerevisiae has been published in Goffeau et al., Science 274 (5287), 546-547, 1996, sequences from Escherichia coli has been published in Blattner et al., Science 277 (5331), 1453-1474 (1997), and its activity is published described as harpin-induced family protein.

[0310] Accordingly, in one embodiment, the process of the present invention comprises increasing or generating the activity of a gene product with the activity of a “harpin-induced family protein” from Arabidopsis thaliana or its functional equivalent or its homolog, e.g. the increase of
[0311] (a) a gene product of a gene comprising the nucleic acid molecule as shown in column 5 of Table I and being depicted in the same respective line as said At3g11650 or a functional equivalent or a homologue thereof as shown depicted in column 7 of Table I, preferably a homologue or functional equivalent as shown depicted in column 7 of Table I B, and being depicted in the same respective line as said At3g11650; or
[0312] (b) a polypeptide comprising a polypeptide, a consensus sequence or a polypeptide motif as shown depicted in column 5 of Table II, and being depicted in the same respective line as said At3g11650 or a functional equivalent or a homologue thereof as depicted in column 7 of Table II or IV, preferably a homologue or functional equivalent as depicted in column 7 of Table II B, and being depicted in the same respective line as said At3g11650,
   as mentioned herein, for the an increased GABA content as compared to a corresponding non-transformed wild type as mentioned.

[0313] Accordingly, in one embodiment, the molecule which activity is to be increased in the process of the invention is the gene product with an activity of described as a “harpin-induced family protein”, preferably it is the molecule of section (a) or (b) of this paragraph.

[0314] The sequence of At3g27540 from Arabidopsis thaliana, e.g. as shown in column 5 of Table I, [sequences from Saccharomyces cerevisiae has been published in Goffeau et al., Science 274 (5287), 546-547, 1996, sequences from Escherichia coli has been published in Blattner et al., Science 277 (5331), 1453-1474 (1997), and its activity is published described as glycosyl transferase.

[0315] Accordingly, in one embodiment, the process of the present invention comprises increasing or generating the activity of a gene product with the activity of a “glycosyl transferase” from Arabidopsis thaliana or its functional equivalent or its homolog, e.g. the increase of
[0316] (a) a gene product of a gene comprising the nucleic acid molecule as shown in column 5 of Table I and being depicted in the same respective line as said At3g27540 or a functional equivalent or a homologue thereof as shown depicted in column 7 of Table I, preferably a homologue or functional equivalent as shown depicted in column 7 of Table I B, and being depicted in the same respective line as said At3g27540; or
[0317] (b) a polypeptide comprising a polypeptide, a consensus sequence or a polypeptide motif as shown depicted in column 5 of Table II, and being depicted in the same respective line as said At3g27540 or a functional equivalent or a homologue thereof as depicted in column 7 of Table II or IV, preferably a homologue or functional equivalent as depicted in column 7 of Table II B, and being depicted in the same respective line as said At3g27540,
   as mentioned herein, for the an increased GABA content as compared to a corresponding non-transformed wild type as mentioned.

[0318] Accordingly, in one embodiment, the molecule which activity is to be increased in the process of the invention is the gene product with an activity of described as a “glycosyl transferase”, preferably it is the molecule of section (a) or (b) of this paragraph.

[0319] The sequence of At3g61830 from Arabidopsis thaliana, e.g. as shown in column 5 of Table I, [sequences from Saccharomyces cerevisiae has been published in Goffeau et al., Science 274 (5287), 546-547, 1996, sequences from Escherichia coli has been published in Blattner et al., Science 277 (5331), 1453-1474 (1997), and its activity is published described as auxin response factor.

[0320] Accordingly, in one embodiment, the process of the present invention comprises increasing or generating the activity of a gene product with the activity of a “auxin response factor” from Arabidopsis thaliana or its functional equivalent or its homolog, e.g. the increase of
[0321] (a) a gene product of a gene comprising the nucleic acid molecule as shown in column 5 of Table I and being depicted in the same respective line as said At3g61830 or a functional equivalent or a homologue thereof as shown depicted in column 7 of Table I, preferably a homologue or functional equivalent as shown depicted in column 7 of Table I B, and being depicted in the same respective line as said At3g61830 or preferably a gene product of a gene comprising the nucleic acid molecule as shown in column 5 of Table I, line 42 and coding for a “auxin transcription factor”; or
[0322] (b) a polypeptide comprising a polypeptide, a consensus sequence or a polypeptide motif as shown depicted in column 5 of Table II, and being depicted in the same respective line as said At3g61830 or a functional equivalent or a homologue thereof as depicted in column 7 of Table II or IV, preferably a homologue or functional equivalent as depicted in column 7 of Table II B, and being depicted in the same respective line as said At3g61830 or preferably a polypeptide comprising a polypeptide as shown in column 5 of Table II, line 42 and coding for a “auxin transcription factor”,
   as mentioned herein, for the an increased GABA content as compared to a corresponding non-transformed wild type as mentioned.

[0323] Accordingly, in one embodiment, the molecule which activity is to be increased in the process of the invention is the gene product with an activity of described as a “auxin response factor”, preferably it is the molecule of section (a) or (b) of this paragraph.

[0324] The sequence of At4g32480 from Arabidopsis thaliana, e.g. as shown in column 5 of Table I, [sequences from Saccharomyces cerevisiae has been published in Goffeau et al., Science 274 (5287), 546-547, 1996, sequences from Escherichia coli has been published in Blattner et al., Science 277 (5331), 1453-1474 (1997), and its activity is published described as At4g32480-protein.

[0325] Accordingly, in one embodiment, the process of the present invention comprises increasing or generating the activity of a gene product with the activity of a “At4g32480-protein” from Arabidopsis thaliana or its functional equivalent or its homolog, e.g. the increase of
[0326] (a) a gene product of a gene comprising the nucleic acid molecule as shown in column 5 of Table I and being depicted in the same respective line as said At4g32480 or a functional equivalent or a homologue thereof as shown depicted in column 7 of Table I, preferably a homologue or functional equivalent as shown depicted in column 7 of Table I B, and being depicted in the same respective line as said At4g32480; or
[0327] (b) a polypeptide comprising a polypeptide, a consensus sequence or a polypeptide motif as shown depicted in column 5 of Table II, and being depicted in the same respective line as said At4g32480 or a functional equivalent or a homologue thereof as depicted in column 7 of Table II or IV, preferably a homologue or functional equivalent as depicted in column 7 of Table II B, and being depicted in the same respective line as said At4g32480,
   as mentioned herein, for the an increased GABA content as compared to a corresponding non-transformed wild type as mentioned.

[0328] Accordingly, in one embodiment, the molecule which activity is to be increased in the process of the invention is the gene product with an activity of described as a “At4g32480-protein”, preferably it is the molecule of section (a) or (b) of this paragraph.

[0329] The sequence of At4g35310 from Arabidopsis thaliana, e.g. as shown in column 5 of Table I, [sequences from Saccharomyces cerevisiae has been published in Goffeau et al., Science 274 (5287), 546-547, 1996, sequences from Escherichia coli has been published in Blattner et al., Science 277 (5331), 1453-1474 (1997), and its activity is published described as calcium-dependent protein kinase.

[0330] Accordingly, in one embodiment, the process of the present invention comprises increasing or generating the activity of a gene product with the activity of a “calcium-dependent protein kinase” from Arabidopsis thaliana or its functional equivalent or its homolog, e.g. the increase of
[0331] (a) a gene product of a gene comprising the nucleic acid molecule as shown in column 5 of Table I and being depicted in the same respective line as said At4g35310 or a functional equivalent or a homologue thereof as shown depicted in column 7 of Table I, preferably a homologue or functional equivalent as shown depicted in column 7 of Table I B, and being depicted in the same respective line as said At4g35310; or
[0332] (b) a polypeptide comprising a polypeptide, a consensus sequence or a polypeptide motif as shown depicted in column 5 of Table II, and being depicted in the same respective line as said At4g35310 or a functional equivalent or a homologue thereof as depicted in column 7 of Table II or IV, preferably a homologue or functional equivalent as depicted in column 7 of Table II B, and being depicted in the same respective line as said At4g35310,
   as mentioned herein, for the an increased GABA content as compared to a corresponding non-transformed wild type as mentioned.

[0333] Accordingly, in one embodiment, the molecule which activity is to be increased in the process of the invention is the gene product with an activity of described as a “calcium-dependent protein kinase”, preferably it is the molecule of section (a) or (b) of this paragraph.

[0334] The sequence of At5g16650 from Arabidopsis thaliana, e.g. as shown in column 5 of Table I, [sequences from Saccharomyces cerevisiae has been published in Goffeau et al., Science 274 (5287), 546-547, 1996, sequences from Escherichia coli has been published in Blattner et al., Science 277 (5331), 1453-1474 (1997), and its activity is published described as At5g16650-protein.

[0335] Accordingly, in one embodiment, the process of the present invention comprises increasing or generating the activity of a gene product with the activity of a “At5g16650-protein” from Arabidopsis thaliana or its functional equivalent or its homolog, e.g. the increase of
[0336] (a) a gene product of a gene comprising the nucleic acid molecule as shown in column 5 of Table I and being depicted in the same respective line as said At5g16650 or a functional equivalent or a homologue thereof as shown depicted in column 7 of Table I, preferably a homologue or functional equivalent as shown depicted in column 7 of Table I B, and being depicted in the same respective line as said At5g16650; or
[0337] (b) a polypeptide comprising a polypeptide, a consensus sequence or a polypeptide motif as shown depicted in column 5 of Table II, and being depicted in the same respective line as said At5g16650 or a functional equivalent or a homologue thereof as depicted in column 7 of Table II or IV, preferably a homologue or functional equivalent as depicted in column 7 of Table II B, and being depicted in the same respective line as said At5g16650,
   as mentioned herein, for the an increased GABA content as compared to a corresponding non-transformed wild type as mentioned.

[0338] Accordingly, in one embodiment, the molecule which activity is to be increased in the process of the invention is the gene product with an activity of described as a “At5g16650-protein”, preferably it is the molecule of section (a) or (b) of this paragraph.

[0339] The sequence of AvinDRAFT_{—}2344 from Azotobacter vinelandii, e.g. as shown in column 5 of Table I, [sequences from Saccharomyces cerevisiae has been published in Goffeau et al., Science 274 (5287), 546-547, 1996, sequences from Escherichia coli has been published in Blattner et al., Science 277 (5331), 1453-1474 (1997), and its activity is published described as elongation factor Tu.

[0340] Accordingly, in one embodiment, the process of the present invention comprises increasing or generating the activity of a gene product with the activity of a “elongation factor Tu” from Azotobacter vinelandii or its functional equivalent or its homolog, e.g. the increase of
[0341] (a) a gene product of a gene comprising the nucleic acid molecule as shown in column 5 of Table I and being depicted in the same respective line as said AvinDRAFT_{—}2344 or a functional equivalent or a homologue thereof as shown depicted in column 7 of Table I, preferably a homologue or functional equivalent as shown depicted in column 7 of Table I B, and being depicted in the same respective line as said AvinDRAFT_{—}2344; or
[0342] (b) a polypeptide comprising a polypeptide, a consensus sequence or a polypeptide motif as shown depicted in column 5 of Table II, and being depicted in the same respective line as said AvinDRAFT_{—}2344 or a functional equivalent or a homologue thereof as depicted in column 7 of Table II or IV, preferably a homologue or functional equivalent as depicted in column 7 of Table II B, and being depicted in the same respective line as said AvinDRAFT_{—}2344,
   as mentioned herein, for the an increased GABA content as compared to a corresponding non-transformed wild type as mentioned.

[0343] Accordingly, in one embodiment, the molecule which activity is to be increased in the process of the invention is the gene product with an activity of described as a “elongation factor Tu”, preferably it is the molecule of section (a) or (b) of this paragraph.

[0344] The sequence of AvinDRAFT_{—}2521 from Azotobacter vinelandii, e.g. as shown in column 5 of Table I, [sequences from Saccharomyces cerevisiae has been published in Goffeau et al., Science 274 (5287), 546-547, 1996, sequences from Escherichia coli has been published in Blattner et al., Science 277 (5331), 1453-1474 (1997), and its activity is published described as ABC transporter permease protein.

[0345] Accordingly, in one embodiment, the process of the present invention comprises increasing or generating the activity of a gene product with the activity of a “ABC transporter permease protein” from Azotobacter vinelandii or its functional equivalent or its homolog, e.g. the increase of
[0346] (a) a gene product of a gene comprising the nucleic acid molecule as shown in column 5 of Table I and being depicted in the same respective line as said AvinDRAFT_{—}2521 or a functional equivalent or a homologue thereof as shown depicted in column 7 of Table I, preferably a homologue or functional equivalent as shown depicted in column 7 of Table I B, and being depicted in the same respective line as said AvinDRAFT_{—}2521; or
[0347] (b) a polypeptide comprising a polypeptide, a consensus sequence or a polypeptide motif as shown depicted in column 5 of Table II, and being depicted in the same respective line as said AvinDRAFT_{—}2521 or a functional equivalent or a homologue thereof as depicted in column 7 of Table II or IV, preferably a homologue or functional equivalent as depicted in column 7 of Table II B, and being depicted in the same respective line as said AvinDRAFT_{—}2521,
   as mentioned herein, for the an increased GABA content as compared to a corresponding non-transformed wild type as mentioned.

[0348] Accordingly, in one embodiment, the molecule which activity is to be increased in the process of the invention is the gene product with an activity of described as a “ABC transporter permease protein”, preferably it is the molecule of section (a) or (b) of this paragraph.

[0349] The sequence of AvinDRAFT_{—}5103 from Azotobacter vinelandii, e.g. as shown in column 5 of Table I, [sequences from Saccharomyces cerevisiae has been published in Goffeau et al., Science 274 (5287), 546-547, 1996, sequences from Escherichia coli has been published in Blattner et al., Science 277 (5331), 1453-1474 (1997), and its activity is published described as hydrolase.

[0350] Accordingly, in one embodiment, the process of the present invention comprises increasing or generating the activity of a gene product with the activity of a “hydrolase” from Azotobacter vinelandii or its functional equivalent or its homolog, e.g. the increase of
[0351] (a) a gene product of a gene comprising the nucleic acid molecule as shown in column 5 of Table I and being depicted in the same respective line as said AvinDRAFT_{—}5103 or a functional equivalent or a homologue thereof as shown depicted in column 7 of Table I, preferably a homologue or functional equivalent as shown depicted in column 7 of Table I B, and being depicted in the same respective line as said AvinDRAFT_{—}5103; or
[0352] (b) a polypeptide comprising a polypeptide, a consensus sequence or a polypeptide motif as shown depicted in column 5 of Table II, and being depicted in the same respective line as said AvinDRAFT_{—}5103 or a functional equivalent or a homologue thereof as depicted in column 7 of Table II or IV, preferably a homologue or functional equivalent as depicted in column 7 of Table II B, and being depicted in the same respective line as said AvinDRAFT_{—}5103,
   as mentioned herein, for the an increased GABA content as compared to a corresponding non-transformed wild type as mentioned.

[0353] Accordingly, in one embodiment, the molecule which activity is to be increased in the process of the invention is the gene product with an activity of described as a “hydrolase”, preferably it is the molecule of section (a) or (b) of this paragraph.

[0354] The sequence of AvinDRAFT_{—}5292 from Azotobacter vinelandii, e.g. as shown in column 5 of Table I, [sequences from Saccharomyces cerevisiae has been published in Goffeau et al., Science 274 (5287), 546-547, 1996, sequences from Escherichia coli has been published in Blattner et al., Science 277 (5331), 1453-1474 (1997), and its activity is published described as fumarylacetoacetate hydrolase.

[0355] Accordingly, in one embodiment, the process of the present invention comprises increasing or generating the activity of a gene product with the activity of a “fumarylacetoacetate hydrolase” from Azotobacter vinelandii or its functional equivalent or its homolog, e.g. the increase of
[0356] (a) a gene product of a gene comprising the nucleic acid molecule as shown in column 5 of Table I and being depicted in the same respective line as said AvinDRAFT_{—}5292 or a functional equivalent or a homologue thereof as shown depicted in column 7 of Table I, preferably a homologue or functional equivalent as shown depicted in column 7 of Table I B, and being depicted in the same respective line as said AvinDRAFT_{—}5292; or
[0357] (b) a polypeptide comprising a polypeptide, a consensus sequence or a polypeptide motif as shown depicted in column 5 of Table II, and being depicted in the same respective line as said AvinDRAFT_{—}5292 or a functional equivalent or a homologue thereof as depicted in column 7 of Table II or IV, preferably a homologue or functional equivalent as depicted in column 7 of Table II B, and being depicted in the same respective line as said AvinDRAFT_{—}5292,
   as mentioned herein, for the an increased GABA content as compared to a corresponding non-transformed wild type as mentioned.

[0358] Accordingly, in one embodiment, the molecule which activity is to be increased in the process of the invention is the gene product with an activity of described as a “fumarylacetoacetate hydrolase”, preferably it is the molecule of section (a) or (b) of this paragraph.

[0359] The sequence of B0124 from Escherichia coli, e.g. as shown in column 5 of Table I, [sequences from Saccharomyces cerevisiae has been published in Goffeau et al., Science 274 (5287), 546-547, 1996, sequences from Escherichia coli has been published in Blattner et al., Science 277 (5331), 1453-1474 (1997), and its activity is published described as glucose dehydrogenase.

[0360] Accordingly, in one embodiment, the process of the present invention comprises increasing or generating the activity of a gene product with the activity of a “glucose dehydrogenase” from Escherichia coli or its functional equivalent or its homolog, e.g. the increase of
[0361] (a) a gene product of a gene comprising the nucleic acid molecule as shown in column 5 of Table I and being depicted in the same respective line as said B0124 or a functional equivalent or a homologue thereof as shown depicted in column 7 of Table I, preferably a homologue or functional equivalent as shown depicted in column 7 of Table I B, and being depicted in the same respective line as said B0124; or
[0362] (b) a polypeptide comprising a polypeptide, a consensus sequence or a polypeptide motif as shown depicted in column 5 of Table II, and being depicted in the same respective line as said B0124 or a functional equivalent or a homologue thereof as depicted in column 7 of Table II or IV, preferably a homologue or functional equivalent as depicted in column 7 of Table II B, and being depicted in the same respective line as said B0124,
   as mentioned herein, for the an increased GABA content as compared to a corresponding non-transformed wild type as mentioned.

[0363] Accordingly, in one embodiment, the molecule which activity is to be increased in the process of the invention is the gene product with an activity of described as a “glucose dehydrogenase”, preferably it is the molecule of section (a) or (b) of this paragraph.

[0364] The sequence of B0161 from Escherichia coli, e.g. as shown in column 5 of Table I, [sequences from Saccharomyces cerevisiae has been published in Goffeau et al., Science 274 (5287), 546-547, 1996, sequences from Escherichia coli has been published in Blattner et al., Science 277 (5331), 1453-1474 (1997), and its activity is published described as serine protease.

[0365] Accordingly, in one embodiment, the process of the present invention comprises increasing or generating the activity of a gene product with the activity of a “serine protease” from Escherichia coli or its functional equivalent or its homolog, e.g. the increase of
[0366] (a) a gene product of a gene comprising the nucleic acid molecule as shown in column 5 of Table I and being depicted in the same respective line as said B0161 or a functional equivalent or a homologue thereof as shown depicted in column 7 of Table I, preferably a homologue or functional equivalent as shown depicted in column 7 of Table I B, and being depicted in the same respective line as said B0161; or
[0367] (b) a polypeptide comprising a polypeptide, a consensus sequence or a polypeptide motif as shown depicted in column 5 of Table II, and being depicted in the same respective line as said B0161 or a functional equivalent or a homologue thereof as depicted in column 7 of Table II or IV, preferably a homologue or functional equivalent as depicted in column 7 of Table II B, and being depicted in the same respective line as said B0161,
   as mentioned herein, for the an increased GABA content as compared to a corresponding non-transformed wild type as mentioned.

[0368] Accordingly, in one embodiment, the molecule which activity is to be increased in the process of the invention is the gene product with an activity of described as a “serine protease”, preferably it is the molecule of section (a) or (b) of this paragraph.

[0369] The sequence of B0449 from Escherichia coli, e.g. as shown in column 5 of Table I, [sequences from Saccharomyces cerevisiae has been published in Goffeau et al., Science 274 (5287), 546-547, 1996, sequences from Escherichia coli has been published in Blattner et al., Science 277 (5331), 1453-1474 (1997), and its activity is published described as ATP-binding protein.

[0370] Accordingly, in one embodiment, the process of the present invention comprises increasing or generating the activity of a gene product with the activity of a “ATP-binding protein” from Escherichia coli or its functional equivalent or its homolog, e.g. the increase of
[0371] (a) a gene product of a gene comprising the nucleic acid molecule as shown in column 5 of Table I and being depicted in the same respective line as said B0449 or a functional equivalent or a homologue thereof as shown depicted in column 7 of Table I, preferably a homologue or functional equivalent as shown depicted in column 7 of Table I B, and being depicted in the same respective line as said 80449; or
[0372] (b) a polypeptide comprising a polypeptide, a consensus sequence or a polypeptide motif as shown depicted in column 5 of Table II, and being depicted in the same respective line as said B0449 or a functional equivalent or a homologue thereof as depicted in column 7 of Table II or IV, preferably a homologue or functional equivalent as depicted in column 7 of Table II B, and being depicted in the same respective line as said B0449,
   as mentioned herein, for the an increased GABA content as compared to a corresponding non-transformed wild type as mentioned.

[0373] Accordingly, in one embodiment, the molecule which activity is to be increased in the process of the invention is the gene product with an activity of described as a “ATP-binding protein”, preferably it is the molecule of section (a) or (b) of this paragraph.

[0374] The sequence of B0593 from Escherichia coli, e.g. as shown in column 5 of Table I, [sequences from Saccharomyces cerevisiae has been published in Goffeau et al., Science 274 (5287), 546-547, 1996, sequences from Escherichia coli has been published in Blattner et al., Science 277 (5331), 1453-1474 (1997), and its activity is published described as isochorismate synthase.

[0375] Accordingly, in one embodiment, the process of the present invention comprises increasing or generating the activity of a gene product with the activity of a “isochorismate synthase” from Escherichia coli or its functional equivalent or its homolog, e.g. the increase of
[0376] (a) a gene product of a gene comprising the nucleic acid molecule as shown in column 5 of Table I and being depicted in the same respective line as said B0593 or a functional equivalent or a homologue thereof as shown depicted in column 7 of Table I, preferably a homologue or functional equivalent as shown depicted in column 7 of Table I B, and being depicted in the same respective line as said B0593; or
[0377] (b) a polypeptide comprising a polypeptide, a consensus sequence or a polypeptide motif as shown depicted in column 5 of Table II, and being depicted in the same respective line as said B0593 or a functional equivalent or a homologue thereof as depicted in column 7 of Table II or IV, preferably a homologue or functional equivalent as depicted in column 7 of Table II B, and being depicted in the same respective line as said B0593,
   as mentioned herein, for the an increased GABA content as compared to a corresponding non-transformed wild type as mentioned.

[0378] Accordingly, in one embodiment, the molecule which activity is to be increased in the process of the invention is the gene product with an activity of described as a “isochorismate synthase”, preferably it is the molecule of section (a) or (b) of this paragraph.

[0379] The sequence of B0898 from Escherichia coli, e.g. as shown in column 5 of Table I, [sequences from Saccharomyces cerevisiae has been published in Goffeau et al., Science 274 (5287), 546-547, 1996, sequences from Escherichia coli has been published in Blattner et al., Science 277 (5331), 1453-1474 (1997), and its activity is published described as MFS-type transporter protein.

[0380] Accordingly, in one embodiment, the process of the present invention comprises increasing or generating the activity of a gene product with the activity of a “MFS-type transporter protein” from Escherichia coli or its functional equivalent or its homolog, e.g. the increase of
[0381] (a) a gene product of a gene comprising the nucleic acid molecule as shown in column 5 of Table I and being depicted in the same respective line as said B0898 or a functional equivalent or a homologue thereof as shown depicted in column 7 of Table I, preferably a homologue or functional equivalent as shown depicted in column 7 of Table I B, and being depicted in the same respective line as said B0898; or
[0382] (b) a polypeptide comprising a polypeptide, a consensus sequence or a polypeptide motif as shown depicted in column 5 of Table II, and being depicted in the same respective line as said B0898 or a functional equivalent or a homologue thereof as depicted in column 7 of Table II or IV, preferably a homologue or functional equivalent as depicted in column 7 of Table II B, and being depicted in the same respective line as said B0898,
   as mentioned herein, for the an increased GABA content as compared to a corresponding non-transformed wild type as mentioned.

[0383] Accordingly, in one embodiment, the molecule which activity is to be increased in the process of the invention is the gene product with an activity of described as a “MFS-type transporter protein”, preferably it is the molecule of section (a) or (b) of this paragraph.

[0384] The sequence of B1003 from Escherichia coli, e.g. as shown in column 5 of Table I, [sequences from Saccharomyces cerevisiae has been published in Goffeau et al., Science 274 (5287), 546-547, 1996, sequences from Escherichia coli has been published in Blattner et al., Science 277 (5331), 1453-1474 (1997), and its activity is published described as b1003-protein.

[0385] Accordingly, in one embodiment, the process of the present invention comprises increasing or generating the activity of a gene product with the activity of a “b1003-protein” from Escherichia coli or its functional equivalent or its homolog, e.g. the increase of
[0386] (a) a gene product of a gene comprising the nucleic acid molecule as shown in column 5 of Table I and being depicted in the same respective line as said B1003 or a functional equivalent or a homologue thereof as shown depicted in column 7 of Table I, preferably a homologue or functional equivalent as shown depicted in column 7 of Table I B, and being depicted in the same respective line as said B1003; or
[0387] (b) a polypeptide comprising a polypeptide, a consensus sequence or a polypeptide motif as shown depicted in column 5 of Table II, and being depicted in the same respective line as said B1003 or a functional equivalent or a homologue thereof as depicted in column 7 of Table II or IV, preferably a homologue or functional equivalent as depicted in column 7 of Table II B, and being depicted in the same respective line as said B1003,
   as mentioned herein, for the an increased GABA content as compared to a corresponding non-transformed wild type as mentioned.

[0388] Accordingly, in one embodiment, the molecule which activity is to be increased in the process of the invention is the gene product with an activity of described as a “b1003-protein”, preferably it is the molecule of section (a) or (b) of this paragraph.

[0389] The sequence of B1522 from Escherichia coli, e.g. as shown in column 5 of Table I, [sequences from Saccharomyces cerevisiae has been published in Goffeau et al., Science 274 (5287), 546-547, 1996, sequences from Escherichia coli has been published in Blattner et al., Science 277 (5331), 1453-1474 (1997), and its activity is published described as b1522-protein.

[0390] Accordingly, in one embodiment, the process of the present invention comprises increasing or generating the activity of a gene product with the activity of a “b1522-protein” from Escherichia coli or its functional equivalent or its homolog, e.g. the increase of
[0391] (a) a gene product of a gene comprising the nucleic acid molecule as shown in column 5 of Table I and being depicted in the same respective line as said B1522 or a functional equivalent or a homologue thereof as shown depicted in column 7 of Table I, preferably a homologue or functional equivalent as shown depicted in column 7 of Table I B, and being depicted in the same respective line as said B1522; or
[0392] (b) a polypeptide comprising a polypeptide, a consensus sequence or a polypeptide motif as shown depicted in column 5 of Table II, and being depicted in the same respective line as said B1522 or a functional equivalent or a homologue thereof as depicted in column 7 of Table II or IV, preferably a homologue or functional equivalent as depicted in column 7 of Table II B, and being depicted in the same respective line as said B1522,
   as mentioned herein, for the an increased GABA content as compared to a corresponding non-transformed wild type as mentioned.

[0393] Accordingly, in one embodiment, the molecule which activity is to be increased in the process of the invention is the gene product with an activity of described as a “b1522-protein”, preferably it is the molecule of section (a) or (b) of this paragraph.

[0394] The sequence of B2739 from Escherichia coli, e.g. as shown in column 5 of Table I, [sequences from Saccharomyces cerevisiae has been published in Goffeau et al., Science 274 (5287), 546-547, 1996, sequences from Escherichia coli has been published in Blattner et al., Science 277 (5331), 1453-1474 (1997), and its activity is published described as b2739-protein.

[0395] Accordingly, in one embodiment, the process of the present invention comprises increasing or generating the activity of a gene product with the activity of a “b2739-protein” from Escherichia coli or its functional equivalent or its homolog, e.g. the increase of
[0396] (a) a gene product of a gene comprising the nucleic acid molecule as shown in column 5 of Table I and being depicted in the same respective line as said B2739 or a functional equivalent or a homologue thereof as shown depicted in column 7 of Table I, preferably a homologue or functional equivalent as shown depicted in column 7 of Table I B, and being depicted in the same respective line as said B2739; or
[0397] (b) a polypeptide comprising a polypeptide, a consensus sequence or a polypeptide motif as shown depicted in column 5 of Table II, and being depicted in the same respective line as said B2739 or a functional equivalent or a homologue thereof as depicted in column 7 of Table II or IV, preferably a homologue or functional equivalent as depicted in column 7 of Table II B, and being depicted in the same respective line as said B2739,
   as mentioned herein, for the an increased GABA content as compared to a corresponding non-transformed wild type as mentioned.

[0398] Accordingly, in one embodiment, the molecule which activity is to be increased in the process of the invention is the gene product with an activity of described as a “b2739-protein”, preferably it is the molecule of section (a) or (b) of this paragraph.

[0399] The sequence of B3646 from Escherichia coli, e.g. as shown in column 5 of Table I, [sequences from Saccharomyces cerevisiae has been published in Goffeau et al., Science 274 (5287), 546-547, 1996, sequences from Escherichia coli has been published in Blattner et al., Science 277 (5331), 1453-1474 (1997), and its activity is published described as b3646-protein.

[0400] Accordingly, in one embodiment, the process of the present invention comprises increasing or generating the activity of a gene product with the activity of a “b3646-protein” from Escherichia coli or its functional equivalent or its homolog, e.g. the increase of
[0401] (a) a gene product of a gene comprising the nucleic acid molecule as shown in column 5 of Table I and being depicted in the same respective line as said B3646 or a functional equivalent or a homologue thereof as shown depicted in column 7 of Table I, preferably a homologue or functional equivalent as shown depicted in column 7 of Table I B, and being depicted in the same respective line as said B3646; or
[0402] (b) a polypeptide comprising a polypeptide, a consensus sequence or a polypeptide motif as shown depicted in column 5 of Table II, and being depicted in the same respective line as said B3646 or a functional equivalent or a homologue thereof as depicted in column 7 of Table II or IV, preferably a homologue or functional equivalent as depicted in column 7 of Table II B, and being depicted in the same respective line as said B3646,
   as mentioned herein, for the an increased GABA content as compared to a corresponding non-transformed wild type as mentioned.

[0403] Accordingly, in one embodiment, the molecule which activity is to be increased in the process of the invention is the gene product with an activity of described as a “b3646-protein”, preferably it is the molecule of section (a) or (b) of this paragraph.

[0404] The sequence of B4029 from Escherichia coli, e.g. as shown in column 5 of Table I, [sequences from Saccharomyces cerevisiae has been published in Goffeau et al., Science 274 (5287), 546-547, 1996, sequences from Escherichia coli has been published in Blattner et al., Science 277 (5331), 1453-1474 (1997), and its activity is published described as B4029-protein.

[0405] Accordingly, in one embodiment, the process of the present invention comprises increasing or generating the activity of a gene product with the activity of a “64029-protein” from Escherichia coli or its functional equivalent or its homolog, e.g. the increase of
[0406] (a) a gene product of a gene comprising the nucleic acid molecule as shown in column 5 of Table I and being depicted in the same respective line as said B4029 or a functional equivalent or a homologue thereof as shown depicted in column 7 of Table I, preferably a homologue or functional equivalent as shown depicted in column 7 of Table I B, and being depicted in the same respective line as said B4029; or
[0407] (b) a polypeptide comprising a polypeptide, a consensus sequence or a polypeptide motif as shown depicted in column 5 of Table II, and being depicted in the same respective line as said B4029 or a functional equivalent or a homologue thereof as depicted in column 7 of Table II or IV, preferably a homologue or functional equivalent as depicted in column 7 of Table II B, and being depicted in the same respective line as said B4029,
   as mentioned herein, for the an increased GABA content as compared to a corresponding non-transformed wild type as mentioned.

[0408] Accordingly, in one embodiment, the molecule which activity is to be increased in the process of the invention is the gene product with an activity of described as a “B4029-protein”, preferably it is the molecule of section (a) or (b) of this paragraph.

[0409] The sequence of B4256 from Escherichia coli, e.g. as shown in column 5 of Table I, [sequences from Saccharomyces cerevisiae has been published in Goffeau et al., Science 274 (5287), 546-547, 1996, sequences from Escherichia coli has been published in Blattner et al., Science 277 (5331), 1453-1474 (1997), and its activity is published described as acetyltransferase.

[0410] Accordingly, in one embodiment, the process of the present invention comprises increasing or generating the activity of a gene product with the activity of a “acetyltransferase” from Escherichia coli or its functional equivalent or its homolog, e.g. the increase of
[0411] (a) a gene product of a gene comprising the nucleic acid molecule as shown in column 5 of Table I and being depicted in the same respective line as said B4256 or a functional equivalent or a homologue thereof as shown depicted in column 7 of Table I, preferably a homologue or functional equivalent as shown depicted in column 7 of Table I B, and being depicted in the same respective line as said B4256; or
[0412] (b) a polypeptide comprising a polypeptide, a consensus sequence or a polypeptide motif as shown depicted in column 5 of Table II, and being depicted in the same respective line as said B4256 or a functional equivalent or a homologue thereof as depicted in column 7 of Table II or IV, preferably a homologue or functional equivalent as depicted in column 7 of Table II B, and being depicted in the same respective line as said B4256,
   as mentioned herein, for the an increased GABA content as compared to a corresponding non-transformed wild type as mentioned.

[0413] Accordingly, in one embodiment, the molecule which activity is to be increased in the process of the invention is the gene product with an activity of described as a “acetyltransferase”, preferably it is the molecule of section (a) or (b) of this paragraph.

[0414] The sequence of C_PP034008079R from Physcomitrella patens, e.g. as shown in column 5 of Table I, [sequences from Saccharomyces cerevisiae has been published in Goffeau et al., Science 274 (5287), 546-547, 1996, sequences from Escherichia coli has been published in Blattner et al., Science 277 (5331), 1453-1474 (1997), and its activity is published described as acyl-carrier protein.

[0415] Accordingly, in one embodiment, the process of the present invention comprises increasing or generating the activity of a gene product with the activity of a “acyl-carrier protein” from Physcomitrella patens or its functional equivalent or its homolog, e.g. the increase of
[0416] (a) a gene product of a gene comprising the nucleic acid molecule as shown in column 5 of Table I and being depicted in the same respective line as said C_PP034008079R or a functional equivalent or a homologue thereof as shown depicted in column 7 of Table I, preferably a homologue or functional equivalent as shown depicted in column 7 of Table I B, and being depicted in the same respective line as said C_PP034008079R; or
[0417] (b) a polypeptide comprising a polypeptide, a consensus sequence or a polypeptide motif as shown depicted in column 5 of Table II, and being depicted in the same respective line as said C_PP034008079R or a functional equivalent or a homologue thereof as depicted in column 7 of Table II or IV, preferably a homologue or functional equivalent as depicted in column 7 of Table II B, and being depicted in the same respective line as said C_PP034008079R,
   as mentioned herein, for the an increased GABA content as compared to a corresponding non-transformed wild type as mentioned.

[0418] Accordingly, in one embodiment, the molecule which activity is to be increased in the process of the invention is the gene product with an activity of described as a “acyl-carrier protein”, preferably it is the molecule of section (a) or (b) of this paragraph.

[0419] The sequence of Slr0739 from Synechocystis sp., e.g. as shown in column 5 of Table I, [sequences from Saccharomyces cerevisiae has been published in Goffeau et al., Science 274 (5287), 546-547, 1996, sequences from Escherichia coli has been published in Blattner et al., Science 277 (5331), 1453-1474 (1997), and its activity is published described as geranylgeranyl pyrophosphate synthase.

[0420] Accordingly, in one embodiment, the process of the present invention comprises increasing or generating the activity of a gene product with the activity of a “geranylgeranyl pyrophosphate synthase” from Synechocystis sp. or its functional equivalent or its homolog, e.g. the increase of
[0421] (a) a gene product of a gene comprising the nucleic acid molecule as shown in column 5 of Table I and being depicted in the same respective line as said Slr0739 or a functional equivalent or a homologue thereof as shown depicted in column 7 of Table I, preferably a homologue or functional equivalent as shown depicted in column 7 of Table I B, and being depicted in the same respective line as said Slr0739; or
[0422] (b) a polypeptide comprising a polypeptide, a consensus sequence or a polypeptide motif as shown depicted in column 5 of Table II, and being depicted in the same respective line as said Slr0739 or a functional equivalent or a homologue thereof as depicted in column 7 of Table II or IV, preferably a homologue or functional equivalent as depicted in column 7 of Table II B, and being depicted in the same respective line as said Slr0739,
   as mentioned herein, for the an increased GABA content as compared to a corresponding non-transformed wild type as mentioned.

[0423] Accordingly, in one embodiment, the molecule which activity is to be increased in the process of the invention is the gene product with an activity of described as a “geranylgeranyl pyrophosphate synthase”, preferably it is the molecule of section (a) or (b) of this paragraph.

[0424] The sequence of TTC0019 from Thermus thermophilus, e.g. as shown in column 5 of Table I, [sequences from Saccharomyces cerevisiae has been published in Goffeau et al., Science 274 (5287), 546-547, 1996, sequences from Escherichia coli has been published in Blattner et al., Science 277 (5331), 1453-1474 (1997), and its activity is published described as Sec-independent protein translocase subunit.

[0425] Accordingly, in one embodiment, the process of the present invention comprises increasing or generating the activity of a gene product with the activity of a “Sec-independent protein translocase subunit” from Thermus thermophilus or its functional equivalent or its homolog, e.g. the increase of
[0426] (a) a gene product of a gene comprising the nucleic acid molecule as shown in column 5 of Table I and being depicted in the same respective line as said TTC0019 or a functional equivalent or a homologue thereof as shown depicted in column 7 of Table I, preferably a homologue or functional equivalent as shown depicted in column 7 of Table I B, and being depicted in the same respective line as said TTC0019; or
[0427] (b) a polypeptide comprising a polypeptide, a consensus sequence or a polypeptide motif as shown depicted in column 5 of Table II, and being depicted in the same respective line as said TTC0019 or a functional equivalent or a homologue thereof as depicted in column 7 of Table II or IV, preferably a homologue or functional equivalent as depicted in column 7 of Table II B, and being depicted in the same respective line as said TTC0019,
   as mentioned herein, for the an increased GABA content as compared to a corresponding non-transformed wild type as mentioned.

[0428] Accordingly, in one embodiment, the molecule which activity is to be increased in the process of the invention is the gene product with an activity of described as a “Sec-independent protein translocase subunit”, preferably it is the molecule of section (a) or (b) of this paragraph.

[0429] The sequence of TTC1550 from Thermus thermophilus, e.g. as shown in column 5 of Table I, [sequences from Saccharomyces cerevisiae has been published in Goffeau et al., Science 274 (5287), 546-547, 1996, sequences from Escherichia coli has been published in Blattner et al., Science 277 (5331), 1453-1474 (1997), and its activity is published described as homocitrate synthase.

[0430] Accordingly, in one embodiment, the process of the present invention comprises increasing or generating the activity of a gene product with the activity of a “homocitrate synthase” from Thermus thermophilus or its functional equivalent or its homolog, e.g. the increase of
[0431] (a) a gene product of a gene comprising the nucleic acid molecule as shown in column 5 of Table I and being depicted in the same respective line as said TTC1550 or a functional equivalent or a homologue thereof as shown depicted in column 7 of Table I, preferably a homologue or functional equivalent as shown depicted in column 7 of Table I B, and being depicted in the same respective line as said TTC1550; or
[0432] (b) a polypeptide comprising a polypeptide, a consensus sequence or a polypeptide motif as shown depicted in column 5 of Table II, and being depicted in the same respective line as said TTC1550 or a functional equivalent or a homologue thereof as depicted in column 7 of Table II or IV, preferably a homologue or functional equivalent as depicted in column 7 of Table II B, and being depicted in the same respective line as said TTC1550,
   as mentioned herein, for the an increased GABA content as compared to a corresponding non-transformed wild type as mentioned.

[0433] Accordingly, in one embodiment, the molecule which activity is to be increased in the process of the invention is the gene product with an activity of described as a “homocitrate synthase”, preferably it is the molecule of section (a) or (b) of this paragraph.

[0434] The sequence of Yjr153w from Saccharomyces cerevisiae, e.g. as shown in column 5 of Table I, [sequences from Saccharomyces cerevisiae has been published in Goffeau et al., Science 274 (5287), 546-547, 1996, sequences from Escherichia coli has been published in Blattner et al., Science 277 (5331), 1453-1474 (1997), and its activity is published described as polygalacturonase.

[0435] Accordingly, in one embodiment, the process of the present invention comprises increasing or generating the activity of a gene product with the activity of a “polygalacturonase” from Saccharomyces cerevisiae or its functional equivalent or its homolog, e.g. the increase of
[0436] (a) a gene product of a gene comprising the nucleic acid molecule as shown in column 5 of Table I and being depicted in the same respective line as said Yjr153w or a functional equivalent or a homologue thereof as shown depicted in column 7 of Table I, preferably a homologue or functional equivalent as shown depicted in column 7 of Table I B, and being depicted in the same respective line as said Yjr153w; or
[0437] (b) a polypeptide comprising a polypeptide, a consensus sequence or a polypeptide motif as shown depicted in column 5 of Table II, and being depicted in the same respective line as said Yjr153w or a functional equivalent or a homologue thereof as depicted in column 7 of Table II or IV, preferably a homologue or functional equivalent as depicted in column 7 of Table II B, and being depicted in the same respective line as said Yjr153w,
   as mentioned herein, for the an increased GABA content as compared to a corresponding non-transformed wild type as mentioned.

[0438] Accordingly, in one embodiment, the molecule which activity is to be increased in the process of the invention is the gene product with an activity of described as a “polygalacturonase”, preferably it is the molecule of section (a) or (b) of this paragraph.

[0439] The sequence of Ylr043c from Saccharomyces cerevisiae, e.g. as shown in column 5 of Table I, [sequences from Saccharomyces cerevisiae has been published in Goffeau et al., Science 274 (5287), 546-547, 1996, sequences from Escherichia coli has been published in Blattner et al., Science 277 (5331), 1453-1474 (1997), and its activity is published described as thioredoxin.

[0440] Accordingly, in one embodiment, the process of the present invention comprises increasing or generating the activity of a gene product with the activity of a “thioredoxin” from Saccharomyces cerevisiae or its functional equivalent or its homolog, e.g. the increase of
[0441] (a) a gene product of a gene comprising the nucleic acid molecule as shown in column 5 of Table I and being depicted in the same respective line as said Ylr043c or a functional equivalent or a homologue thereof as shown depicted in column 7 of Table I, preferably a homologue or functional equivalent as shown depicted in column 7 of Table I B, and being depicted in the same respective line as said Ylr043c; or
[0442] (b) a polypeptide comprising a polypeptide, a consensus sequence or a polypeptide motif as shown depicted in column 5 of Table II, and being depicted in the same respective line as said Ylr043c or a functional equivalent or a homologue thereof as depicted in column 7 of Table II or IV, preferably a homologue or functional equivalent as depicted in column 7 of Table II B, and being depicted in the same respective line as said Ylr043c,
   as mentioned herein, for the an increased GABA content as compared to a corresponding non-transformed wild type as mentioned.

[0443] Accordingly, in one embodiment, the molecule which activity is to be increased in the process of the invention is the gene product with an activity of described as a “thioredoxin”, preferably it is the molecule of section (a) or (b) of this paragraph.

[0444] The sequence of 51340801_CANOLA from Brassica napus, e.g. as shown in column 5 of Table I, [sequences from Saccharomyces cerevisiae has been published in Goffeau et al., Science 274 (5287), 546-547, 1996, sequences from Escherichia coli has been published in Blattner et al., Science 277 (5331), 1453-1474 (1997), and its activity is published described as pyruvate kinase.

[0445] Accordingly, in one embodiment, the process of the present invention comprises increasing or generating the activity of a gene product with the activity of a “pyruvate kinase” from Brassica napus or its functional equivalent or its homolog, e.g. the increase of
[0446] (a) a gene product of a gene comprising the nucleic acid molecule as shown in column 5 of Table I and being depicted in the same respective line as said 51340801_CANOLA or a functional equivalent or a homologue thereof as shown depicted in column 7 of Table I, preferably a homologue or functional equivalent as shown depicted in column 7 of Table I B, and being depicted in the same respective line as said 51340801_CANOLA; or
[0447] (b) a polypeptide comprising a polypeptide, a consensus sequence or a polypeptide motif as shown depicted in column 5 of Table II, and being depicted in the same respective line as said 51340801_CANOLA or a functional equivalent or a homologue thereof as depicted in column 7 of Table II or IV, preferably a homologue or functional equivalent as depicted in column 7 of Table II B, and being depicted in the same respective line as said 51340801_CANOLA,
   as mentioned herein, for the an increased GABA content as compared to a corresponding non-transformed wild type as mentioned.

[0448] Accordingly, in one embodiment, the molecule which activity is to be increased in the process of the invention is the gene product with an activity of described as a “pyruvate kinase”, preferably it is the molecule of section (a) or (b) of this paragraph.

[0449] The sequence of Ybr159w from Saccharomyces cerevisiae, e.g. as shown in column 5 of Table I, [sequences from Saccharomyces cerevisiae has been published in Goffeau et al., Science 274 (5287), 546-547, 1996, sequences from Escherichia coli has been published in Blattner et al., Science 277 (5331), 1453-1474 (1997), and its activity is published described as microsomal beta-keto-reductase.

[0450] Accordingly, in one embodiment, the process of the present invention comprises increasing or generating the activity of a gene product with the activity of a “microsomal beta-keto-reductase” from Saccharomyces cerevisiae or its functional equivalent or its homolog, e.g. the increase of
[0451] (a) a gene product of a gene comprising the nucleic acid molecule as shown in column 5 of Table I and being depicted in the same respective line as said Ybr159w or a functional equivalent or a homologue thereof as shown depicted in column 7 of Table I, preferably a homologue or functional equivalent as shown depicted in column 7 of Table I B, and being depicted in the same respective line as said Ybr159w; or
[0452] (b) a polypeptide comprising a polypeptide, a consensus sequence or a polypeptide motif as shown depicted in column 5 of Table II, and being depicted in the same respective line as said Ybr159w or a functional equivalent or a homologue thereof as depicted in column 7 of Table II or IV, preferably a homologue or functional equivalent as depicted in column 7 of Table II B, and being depicted in the same respective line as said Ybr159w,
   as mentioned herein, for the an increased GABA content as compared to a corresponding non-transformed wild type as mentioned.

[0453] Accordingly, in one embodiment, the molecule which activity is to be increased in the process of the invention is the gene product with an activity of described as a “microsomal beta-keto-reductase”, preferably it is the molecule of section (a) or (b) of this paragraph.

[0454] The sequence of YDR046C from Saccharomyces cerevisiae, e.g. as shown in column 5 of Table I, [sequences from Saccharomyces cerevisiae has been published in Goffeau et al., Science 274 (5287), 546-547, 1996, sequences from Escherichia coli has been published in Blattner et al., Science 277 (5331), 1453-1474 (1997), and its activity is published described as Branched-chain amino acid permease.

[0455] Accordingly, in one embodiment, the process of the present invention comprises increasing or generating the activity of a gene product with the activity of a “Branched-chain amino acid permease” from Saccharomyces cerevisiae or its functional equivalent or its homolog, e.g. the increase of
[0456] (a) a gene product of a gene comprising the nucleic acid molecule as shown in column 5 of Table I and being depicted in the same respective line as said YDR046C or a functional equivalent or a homologue thereof as shown depicted in column 7 of Table I, preferably a homologue or functional equivalent as shown depicted in column 7 of Table I B, and being depicted in the same respective line as said YDR046C; or
[0457] (b) a polypeptide comprising a polypeptide, a consensus sequence or a polypeptide motif as shown depicted in column 5 of Table II, and being depicted in the same respective line as said YDR046C or a functional equivalent or a homologue thereof as depicted in column 7 of Table II or IV, preferably a homologue or functional equivalent as depicted in column 7 of Table II B, and being depicted in the same respective line as said YDR046C,
   as mentioned herein, for the an increased GABA content as compared to a corresponding non-transformed wild type as mentioned.

[0458] Accordingly, in one embodiment, the molecule which activity is to be increased in the process of the invention is the gene product with an activity of described as a “Branched-chain amino acid permease”, preferably it is the molecule of section (a) or (b) of this paragraph.

[0459] The sequence of YGR255C from Saccharomyces cerevisiae, e.g. as shown in column 5 of Table I, [sequences from Saccharomyces cerevisiae has been published in Goffeau et al., Science 274 (5287), 546-547, 1996, sequences from Escherichia coli has been published in Blattner et al.; Science 277 (5331), 1453-1474 (1997), and its activity is published described as ubiquinone biosynthesis monooxygenase.

[0460] Accordingly, in one embodiment, the process of the present invention comprises increasing or generating the activity of a gene product with the activity of a “ubiquinone biosynthesis monooxygenase” from Saccharomyces cerevisiae or its functional equivalent or its homolog, e.g. the increase of
[0461] (a) a gene product of a gene comprising the nucleic acid molecule as shown in column 5 of Table I and being depicted in the same respective line as said YGR255C or a functional equivalent or a homologue thereof as shown depicted in column 7 of Table I, preferably a homologue or functional equivalent as shown depicted in column 7 of Table I B, and being depicted in the same respective line as said YGR255C; or
[0462] (b) a polypeptide comprising a polypeptide, a consensus sequence or a polypeptide motif as shown depicted in column 5 of Table II, and being depicted in the same respective line as said YGR255C or a functional equivalent or a homologue thereof as depicted in column 7 of Table II or IV, preferably a homologue or functional equivalent as depicted in column 7 of Table II B, and being depicted in the same respective line as said YGR255C,
   as mentioned herein, for the an increased GABA content as compared to a corresponding non-transformed wild type as mentioned.

[0463] Accordingly, in one embodiment, the molecule which activity is to be increased in the process of the invention is the gene product with an activity of described as a “ubiquinone biosynthesis monooxygenase”, preferably it is the molecule of section (a) or (b) of this paragraph.

[0464] The sequence of YHR213W from Saccharomyces cerevisiae, e.g. as shown in column 5 of Table I, [sequences from Saccharomyces cerevisiae has been published in Goffeau et al., Science 274 (5287), 546-547, 1996, sequences from Escherichia coli has been published in Blattner et al., Science 277 (5331), 1453-1474 (1997), and its activity is published described as YHR213W-protein.

[0465] Accordingly, in one embodiment, the process of the present invention comprises increasing or generating the activity of a gene product with the activity of a “YHR213W-protein” from Saccharomyces cerevisiae or its functional equivalent or its homolog, e.g. the increase of
[0466] (a) a gene product of a gene comprising the nucleic acid molecule as shown in column 5 of Table I and being depicted in the same respective line as said YHR213W or a functional equivalent or a homologue thereof as shown depicted in column 7 of Table I, preferably a homologue or functional equivalent as shown depicted in column 7 of Table I B, and being depicted in the same respective line as said YHR213W; or
[0467] (b) a polypeptide comprising a polypeptide, a consensus sequence or a polypeptide motif as shown depicted in column 5 of Table II, and being depicted in the same respective line as said YHR213W or a functional equivalent or a homologue thereof as depicted in column 7 of Table II or IV, preferably a homologue or functional equivalent as depicted in column 7 of Table II B, and being depicted in the same respective line as said YHR213W,
   as mentioned herein, for the an increased GABA content as compared to a corresponding non-transformed wild type as mentioned.

[0468] Accordingly, in one embodiment, the molecule which activity is to be increased in the process of the invention is the gene product with an activity of described as a “YHR213W-protein”, preferably it is the molecule of section (a) or (b) of this paragraph.

[0469] The sequence of YPL249C-A from Saccharomyces cerevisiae, e.g. as shown in column 5 of Table I, [sequences from Saccharomyces cerevisiae has been published in Goffeau et al., Science 274 (5287), 546-547, 1996, sequences from Escherichia coli has been published in Blattner et al., Science 277 (5331), 1453-1474 (1997), and its activity is published described as 60S ribosomal protein.

[0470] Accordingly, in one embodiment, the process of the present invention comprises increasing or generating the activity of a gene product with the activity of a “60S ribosomal protein” from Saccharomyces cerevisiae or its functional equivalent or its homolog, e.g. the increase of
[0471] (a) a gene product of a gene comprising the nucleic acid molecule as shown in column 5 of Table I and being depicted in the same respective line as said YPL249C-A or a functional equivalent or a homologue thereof as shown depicted in column 7 of Table I, preferably a homologue or functional equivalent as shown depicted in column 7 of Table I B, and being depicted in the same respective line as said YPL249C-A; or
[0472] (b) a polypeptide comprising a polypeptide, a consensus sequence or a polypeptide motif as shown depicted in column 5 of Table II, and being depicted in the same respective line as said YPL249C-A or a functional equivalent or a homologue thereof as depicted in column 7 of Table II or IV, preferably a homologue or functional equivalent as depicted in column 7 of Table II B, and being depicted in the same respective line as said YPL249C-A,
   as mentioned herein, for the an increased GABA content as compared to a corresponding non-transformed wild type as mentioned.

[0473] Accordingly, in one embodiment, the molecule which activity is to be increased in the process of the invention is the gene product with an activity of described as a “60S ribosomal protein”, preferably it is the molecule of section (a) or (b) of this paragraph.

[0474] The sequence of YPR185W from Saccharomyces cerevisiae, e.g. as shown in column 5 of Table I, [sequences from Saccharomyces cerevisiae has been published in Goffeau et al., Science 274 (5287), 546-547, 1996, sequences from Escherichia coli has been published in Blattner et al., Science 277 (5331), 1453-1474 (1997), and its activity is published described as Autophagy-related protein.

[0475] Accordingly, in one embodiment, the process of the present invention comprises increasing or generating the activity of a gene product with the activity of a “Autophagy-related protein” from Saccharomyces cerevisiae or its functional equivalent or its homolog, e.g. the increase of
[0476] (a) a gene product of a gene comprising the nucleic acid molecule as shown in column 5 of Table I and being depicted in the same respective line as said YPR185W or a functional equivalent or a homologue thereof as shown depicted in column 7 of Table I, preferably a homologue or functional equivalent as shown depicted in column 7 of Table I B, and being depicted in the same respective line as said YPR185W; or
[0477] (b) a polypeptide comprising a polypeptide, a consensus sequence or a polypeptide motif as shown depicted in column 5 of Table II, and being depicted in the same respective line as said YPR185W or a functional equivalent or a homologue thereof as depicted in column 7 of Table II or IV, preferably a homologue or functional equivalent as depicted in column 7 of Table II B, and being depicted in the same respective line as said YPR185W,
   as mentioned herein, for the an increased GABA content as compared to a corresponding non-transformed wild type as mentioned.

[0478] Accordingly, in one embodiment, the molecule which activity is to be increased in the process of the invention is the gene product with an activity of described as a “Autophagy-related protein”, preferably it is the molecule of section (a) or (b) of this paragraph.

[0479] The sequence of Ylr395c from Saccharomyces cerevisiae, e.g. as shown in column 5 of Table I, [sequences from Saccharomyces cerevisiae has been published in Goffeau et al., Science 274 (5287), 546-547, 1996, sequences from Escherichia coli has been published in Blattner et al., Science 277 (5331), 1453-1474 (1997), and its activity is published described as cytochrome c oxidase subunit VIII.

[0480] Accordingly, in one embodiment, the process of the present invention comprises increasing or generating the activity of a gene product with the activity of a “cytochrome c oxidase subunit VIII” from Saccharomyces cerevisiae or its functional equivalent or its homolog, e.g. the increase of
[0481] (a) a gene product of a gene comprising the nucleic acid molecule as shown in column 5 of Table I and being depicted in the same respective line as said Ylr395c or a functional equivalent or a homologue thereof as shown depicted in column 7 of Table I, preferably a homologue or functional equivalent as shown depicted in column 7 of Table I B, and being depicted in the same respective line as said Ylr395c; or
[0482] (b) a polypeptide comprising a polypeptide, a consensus sequence or a polypeptide motif as shown depicted in column 5 of Table II, and being depicted in the same respective line as said Ylr395c or a functional equivalent or a homologue thereof as depicted in column 7 of Table II or IV, preferably a homologue or functional equivalent as depicted in column 7 of Table II B, and being depicted in the same respective line as said Ylr395c,
   as mentioned herein, for the an increased GABA content as compared to a corresponding non-transformed wild type as mentioned.

[0483] Accordingly, in one embodiment, the molecule which activity is to be increased in the process of the invention is the gene product with an activity of described as a “cytochrome c oxidase subunit VIII”, preferably it is the molecule of section (a) or (b) of this paragraph.

[0484] The sequence of YDR046C_{—}2 from Saccharomyces cerevisiae, e.g. as shown in column 5 of Table I, [sequences from Saccharomyces cerevisiae has been published in Goffeau et al., Science 274 (5287), 546-547, 1996, sequences from Escherichia coli has been published in Blattner et al., Science 277 (5331), 1453-1474 (1997), and its activity is published described as Branched-chain amino acid permease.

[0485] Accordingly, in one embodiment, the process of the present invention comprises increasing or generating the activity of a gene product with the activity of a “Branched-chain amino acid permease” from Saccharomyces cerevisiae or its functional equivalent or its homolog, e.g. the increase of
[0486] (a) a gene product of a gene comprising the nucleic acid molecule as shown in column 5 of Table I and being depicted in the same respective line as said YDR046C_{—}2 or a functional equivalent or a homologue thereof as shown depicted in column 7 of Table I, preferably a homologue or functional equivalent as shown depicted in column 7 of Table I B, and being depicted in the same respective line as said YDR046C_{—}2; or
[0487] (b) a polypeptide comprising a polypeptide, a consensus sequence or a polypeptide motif as shown depicted in column 5 of Table II, and being depicted in the same respective line as said YDR046C_{—}2 or a functional equivalent or a homologue thereof as depicted in column 7 of Table II or IV, preferably a homologue or functional equivalent as depicted in column 7 of Table II B, and being depicted in the same respective line as said YDR046C_{—}2,
   as mentioned herein, for the an increased GABA content as compared to a corresponding non-transformed wild type as mentioned.

[0488] Accordingly, in one embodiment, the molecule which activity is to be increased in the process of the invention is the gene product with an activity of described as a “Branched-chain amino acid permease”, preferably it is the molecule of section (a) or (b) of this paragraph.

[0489] It was further observed that increasing or generating the activity of a gene shown in Table XIII, e.g. a nucleic acid molecule derived from the nucleic acid molecule shown in Table XIII in A. thaliana conferred increased stress tolerance, e.g. increased low temperature tolerance, compared to the wild type control. Thus, in one embodiment, a nucleic acid molecule indicated in Table XIII or its homolog as indicated in Table I or the expression product is used in the method of the present invention to increase stress tolerance, e.g. increase low temperature, of a plant compared to the wild type control.

[0490] It was further observed that increasing or generating the activity of a gene shown in Table XII, e.g. a nucleic acid molecule derived from the nucleic acid molecule shown in Table XII in A. thaliana conferred increased stress tolerance, e.g. increased cycling drought tolerance, compared to the wild type control. Thus, in one embodiment, a nucleic acid molecule indicated in Table XII or its homolog as indicated in Table I or the expression product is used in the method of the present invention to increase stress tolerance, e.g. increase cycling drought tolerance, of a plant compared to the wild type control.

[0491] It was further observed that increasing or generating the activity of a gene shown in Table XI, e.g. a nucleic acid molecule derived from the nucleic acid molecule shown in Table XI in A. thaliana conferred increase in intrinsic yield, e.g. increased biomass under standard conditions, e.g. increased biomass under non-deficiency or non-stress conditions, compared to the wild type control. Thus, in one embodiment, a nucleic acid molecule indicated in Table XI or its homolog as indicated in Table I or the expression product is used in the method of the present invention to increase intrinsic yield, e.g. to increase yield under standard conditions, e.g. increase biomass under non-deficiency or non-stress conditions, of the plant compared to the wild type control.

[0492] Surprisingly, it was observed that a increasing or generating of at least one gene conferring an activity selected from the group consisting of: 60S ribosomal protein, ABC transporter permease protein, acetyltransferase, acyl-carrier protein, At4g32480-protein, At5g16650-protein, ATP-binding protein, Autophagy-related protein, auxin response factor, auxin transcription factor, b1003-protein, b1522-protein, b2739-protein, b3646-protein, B4029-protein, Branched-chain amino acid permease, calcium-dependent protein kinase, cytochrome c oxidase subunit VIII, elongation factor Tu, Factor arrest protein, fumarylacetoacetate hydrolase, geranylgeranyl pyrophosphate synthase, glucose dehydrogenase, glycosyl transferase, harpin-induced family protein, homocitrate synthase, hydrolase, isochorismate synthase, MFS-type transporter protein, microsomal beta-keto-reductase, polygalacturonase, protein phosphatase, pyruvate kinase, Sec-independent protein translocase subunit, serine protease, thioredoxin, thioredoxin family protein, transcriptional regulator, ubiquinone biosynthesis monooxygenase, and YHR213W-protein or of a gene comprising a nucleic acid sequence described in column 5 of Table I in Arabidopsis thaliana conferred an increased GABA content as compared to a corresponding non-transformed wild type.

[0493] It was observed that increasing or generating the activity of a gene product with the activity of a “Factor arrest protein” encoded by a gene comprising the nucleic acid sequence SEQ ID NO.: 42 in Arabidopsis thaliana conferred an increased yield, preferably an increase GABA content compared with the wild type control between 1.1% and 12.35-fold as shown in the Examples.

[0494] It was observed that increasing or generating the activity of a gene product with the activity of a “transcriptional regulator” encoded by a gene comprising the nucleic acid sequence SEQ ID NO.: 654 in Arabidopsis thaliana conferred an increased yield, preferably an increase GABA content compared with the wild type control between 1.1% and 5.47-fold as shown in the Examples.

[0495] It was observed that increasing or generating the activity of a gene product with the activity of a “protein phosphatase” encoded by a gene comprising the nucleic acid sequence SEQ ID NO.: 706 in Arabidopsis thaliana conferred an increased yield, preferably an increase GABA content compared with the wild type control between 1.1% and 12.21-fold as shown in the Examples.

[0496] It was observed that increasing or generating the activity of a gene product with the activity of a “pyruvate kinase” encoded by a gene comprising the nucleic acid sequence SEQ ID NO.: 751 in Arabidopsis thaliana conferred an increased yield, preferably an increase GABA content compared with the wild type control between 1.1% and 26.89-fold as shown in the Examples.

[0497] It was observed that increasing or generating the activity of a gene product with the activity of a “thioredoxin family protein” encoded by a gene comprising the nucleic acid sequence SEQ ID NO.: 1156 in Arabidopsis thaliana conferred an increased yield, preferably an increase GABA content compared with the wild type control between 1.1% and 3.64-fold as shown in the Examples.

[0498] It was observed that increasing or generating the activity of a gene product with the activity of a “harpin-induced family protein” encoded by a gene comprising the nucleic acid sequence SEQ ID NO.: 1510 in Arabidopsis thaliana conferred an increased yield, preferably an increase GABA content compared with the wild type control between 1.1% and 3.21-fold as shown in the Examples.

[0499] It was observed that increasing or generating the activity of a gene product with the activity of a “glycosyl transferase” encoded by a gene comprising the nucleic acid sequence SEQ ID NO.: 1598 in Arabidopsis thaliana conferred an increased yield, preferably an increase GABA content compared with the wild type control between 1.1% and 4.27-fold as shown in the Examples.

[0500] It was observed that increasing or generating the activity of a gene product with the activity of a “auxin response factor” encoded by a gene comprising the nucleic acid sequence SEQ ID NO.: 1670 in Arabidopsis thaliana conferred an increased yield, preferably an increase GABA content compared with the wild type control between 1.1% and 16.46-fold as shown in the Examples.

[0501] It was observed that increasing or generating the activity of a gene product with the activity of a “At4g32480-protein” encoded by a gene comprising the nucleic acid sequence SEQ ID NO.: 1874 in Arabidopsis thaliana conferred an increased yield, preferably an increase GABA content compared with the wild type control between 1.1% and 7.44-fold as shown in the Examples.

[0502] It was observed that increasing or generating the activity of a gene product with the activity of a “calcium-dependent protein kinase” encoded by a gene comprising the nucleic acid sequence SEQ ID NO.: 1936 in Arabidopsis thaliana conferred an increased yield, preferably an increase GABA content compared with the wild type control between 1.1% and 5.40-fold as shown in the Examples.

[0503] It was observed that increasing or generating the activity of a gene product with the activity of a “At5g16650-protein” encoded by a gene comprising the nucleic acid sequence SEQ ID NO.: 2492 in Arabidopsis thaliana conferred an increased yield, preferably an increase GABA content compared with the wild type control between 1.1% and 3.07-fold as shown in the Examples.

[0504] It was observed that increasing or generating the activity of a gene product with the activity of a “elongation factor Tu” encoded by a gene comprising the nucleic acid sequence SEQ ID NO.: 2553 in Arabidopsis thaliana conferred an increased yield, preferably an increase GABA content compared with the wild type control between 1.1% and 6.42-fold as shown in the Examples.

[0505] It was observed that increasing or generating the activity of a gene product with the activity of a “ABC transporter permease protein” encoded by a gene comprising the nucleic acid sequence SEQ ID NO.: 3408 in Arabidopsis thaliana conferred an increased yield, preferably an increase GABA content compared with the wild type control between 1.1% and 1.99-fold as shown in the Examples.

[0506] It was observed that increasing or generating the activity of a gene product with the activity of a “hydrolase” encoded by a gene comprising the nucleic acid sequence SEQ ID NO.: 3564 in Arabidopsis thaliana conferred an increased yield, preferably an increase GABA content compared with the wild type control between 1.1% and 10.13-fold as shown in the Examples.

[0507] It was observed that increasing or generating the activity of a gene product with the activity of a “fumarylacetoacetate hydrolase” encoded by a gene comprising the nucleic acid sequence SEQ ID NO.: 3728 in Arabidopsis thaliana conferred an increased yield, preferably an increase GABA content compared with the wild type control between 1.1% and 14.56-fold as shown in the Examples.

[0508] It was observed that increasing or generating the activity of a gene product with the activity of a “glucose dehydrogenase” encoded by a gene comprising the nucleic acid sequence SEQ ID NO.: 4068 in Arabidopsis thaliana conferred an increased yield, preferably an increase GABA content compared with the wild type control between 1.1% and 4.07-fold as shown in the Examples.

[0509] It was observed that increasing or generating the activity of a gene product with the activity of a “serine protease” encoded by a gene comprising the nucleic acid sequence SEQ ID NO.: 4176 in Arabidopsis thaliana conferred an increased yield, preferably an increase GABA content compared with the wild type control between 1.1% and 16.31-fold as shown in the Examples.

[0510] It was observed that increasing or generating the activity of a gene product with the activity of a “ATP-binding protein” encoded by a gene comprising the nucleic acid sequence SEQ ID NO.: 4364 in Arabidopsis thaliana conferred an increased yield, preferably an increase GABA content compared with the wild type control between 1.1% and 15.36-fold as shown in the Examples.

[0511] It was observed that increasing or generating the activity of a gene product with the activity of a “isochorismate synthase” encoded by a gene comprising the nucleic acid sequence SEQ ID NO.: 4717 in Arabidopsis thaliana conferred an increased yield, preferably an increase GABA content compared with the wild type control between 1.1% and 3.59-fold as shown in the Examples.

[0512] It was observed that increasing or generating the activity of a gene product with the activity of a “MFS-type transporter protein” encoded by a gene comprising the nucleic acid sequence SEQ ID NO.: 4864 in Arabidopsis thaliana conferred an increased yield, preferably an increase GABA content compared with the wild type control between 1.1% and 175.83-fold as shown in the Examples.

[0513] It was observed that increasing or generating the activity of a gene product with the activity of a “b1003-protein” encoded by a gene comprising the nucleic acid sequence SEQ ID NO.: 4903 in Arabidopsis thaliana conferred an increased yield, preferably an increase GABA content compared with the wild type control between 1.1% and 9.49-fold as shown in the Examples.

[0514] It was observed that increasing or generating the activity of a gene product with the activity of a “b1522-protein” encoded by a gene comprising the nucleic acid sequence SEQ ID NO.: 4909 in Arabidopsis thaliana conferred an increased yield, preferably an increase GABA content compared with the wild type control between 1.1% and 22.61-fold as shown in the Examples.

[0515] It was observed that increasing or generating the activity of a gene product with the activity of a “b2739-protein” encoded by a gene comprising the nucleic acid sequence SEQ ID NO.: 4954 in Arabidopsis thaliana conferred an increased yield, preferably an increase GABA content compared with the wild type control between 1.1% and 14.55-fold as shown in the Examples.

[0516] It was observed that increasing or generating the activity of a gene product with the activity of a “b3646-protein” encoded by a gene comprising the nucleic acid sequence SEQ ID NO.: 5121 in Arabidopsis thaliana conferred an increased yield, preferably an increase GABA content compared with the wild type control between 1.1% and 3.02-fold as shown in the Examples.

[0517] It was observed that increasing or generating the activity of a gene product with the activity of a “B4029-protein” encoded by a gene comprising the nucleic acid sequence SEQ ID NO.: 5319 in Arabidopsis thaliana conferred an increased yield, preferably an increase GABA content compared with the wild type control between 1.1% and 77.37-fold as shown in the Examples.

[0518] It was observed that increasing or generating the activity of a gene product with the activity of a “acetyltransferase” encoded by a gene comprising the nucleic acid sequence SEQ ID NO.: 5387 in Arabidopsis thaliana conferred an increased yield, preferably an increase GABA content compared with the wild type control between 1.1% and 3.19-fold as shown in the Examples.

[0519] It was observed that increasing or generating the activity of a gene product with the activity of a “acyl-carrier protein” encoded by a gene comprising the nucleic acid sequence SEQ ID NO.: 5458 in Arabidopsis thaliana conferred an increased yield, preferably an increase GABA content compared with the wild type control between 1.1% and 3.02-fold as shown in the Examples.

[0520] It was observed that increasing or generating the activity of a gene product with the activity of a “geranylgeranyl pyrophosphate synthase” encoded by a gene comprising the nucleic acid sequence SEQ ID NO.: 6041 in Arabidopsis thaliana conferred an increased yield, preferably an increase GABA content compared with the wild type control between 1.1% and 3.55-fold as shown in the Examples.

[0521] It was observed that increasing or generating the activity of a gene product with the activity of a “Sec-independent protein translocase subunit” encoded by a gene comprising the nucleic acid sequence SEQ ID NO.: 6469 in Arabidopsis thaliana conferred an increased yield, preferably an increase GABA content compared with the wild type control between 1.1% and 7.25-fold as shown in the Examples.

[0522] It was observed that increasing or generating the activity of a gene product with the activity of a “homocitrate synthase” encoded by a gene comprising the nucleic acid sequence SEQ ID NO.: 6739 in Arabidopsis thaliana conferred an increased yield, preferably an increase GABA content compared with the wild type control between 1.1% and 2.93-fold as shown in the Examples.

[0523] It was observed that increasing or generating the activity of a gene product with the activity of a “polygalacturonase” encoded by a gene comprising the nucleic acid sequence SEQ ID NO.: 7510 in Arabidopsis thaliana conferred an increased yield, preferably an increase GABA content compared with the wild type control between 1.1% and 6.77-fold as shown in the Examples.

[0524] It was observed that increasing or generating the activity of a gene product with the activity of a “thioredoxin” encoded by a gene comprising the nucleic acid sequence SEQ ID NO.: 7633 in Arabidopsis thaliana conferred an increased yield, preferably an increase GABA content compared with the wild type control between 1.1% and 2.10-fold as shown in the Examples.

[0525] It was observed that increasing or generating the activity of a gene product with the activity of a “pyruvate kinase” encoded by a gene comprising the nucleic acid sequence SEQ ID NO.: 53 in Arabidopsis thaliana conferred an increased yield, preferably an increase GABA content compared with the wild type control between 1.1% and 3.22-fold as shown in the Examples.

[0526] It was observed that increasing or generating the activity of a gene product with the activity of a “microsomal beta-keto-reductase” encoded by a gene comprising the nucleic acid sequence SEQ ID NO.: 7137 in Arabidopsis thaliana conferred an increased yield, preferably an increase GABA content compared with the wild type control between 1.1% and 2.23-fold as shown in the Examples.

[0527] It was observed that increasing or generating the activity of a gene product with the activity of a “Branched-chain amino acid permease” encoded by a gene comprising the nucleic acid sequence SEQ ID NO.: 7208 in Arabidopsis thaliana conferred an increased yield, preferably an increase GABA content compared with the wild type control between 1.1% and 48.39-fold as shown in the Examples.

[0528] It was observed that increasing or generating the activity of a gene product with the activity of a “ubiquinone biosynthesis monooxygenase” encoded by a gene comprising the nucleic acid sequence SEQ ID NO.: 7274 in Arabidopsis thaliana conferred an increased yield, preferably an increase GABA content compared with the wild type control between 1.1% and 31.94-fold as shown in the Examples.

[0529] It was observed that increasing or generating the activity of a gene product with the activity of a “YHR213W-protein” encoded by a gene comprising the nucleic acid sequence SEQ ID NO.: 7489 in Arabidopsis thaliana conferred an increased yield, preferably an increase GABA content compared with the wild type control between 1.1% and 7.79-fold as shown in the Examples.

[0530] It was observed that increasing or generating the activity of a gene product with the activity of a “60S ribosomal protein” encoded by a gene comprising the nucleic acid sequence SEQ ID NO.: 8239 in Arabidopsis thaliana conferred an increased yield, preferably an increase GABA content compared with the wild type control between 1.1% and 6.64-fold as shown in the Examples.

[0531] It was observed that increasing or generating the activity of a gene product with the activity of a “Autophagy-related protein” encoded by a gene comprising the nucleic acid sequence SEQ ID NO.: 8397 in Arabidopsis thaliana conferred an increased yield, preferably an increase GABA content compared with the wild type control between 1.1% and 47.89-fold as shown in the Examples.

[0532] It was observed that increasing or generating the activity of a gene product with the activity of a “cytochrome c oxidase subunit VIII” encoded by a gene comprising the nucleic acid sequence SEQ ID NO.: 8227 in Arabidopsis thaliana conferred an increased yield, preferably an increase GABA content compared with the wild type control between 1.1% and 131.19-fold as shown in the Examples.

[0533] It was observed that increasing or generating the activity of a gene product with the activity of a “Branched-chain amino acid permease” encoded by a gene comprising the nucleic acid sequence SEQ ID NO.: 8423 in Arabidopsis thaliana conferred an increased yield, preferably an increase GABA content compared with the wild type control between 1.1% and 48.39-fold as shown in the Examples.

[0534] Thus, according to the method of the invention for an increased GABA content in a plant cell, plant or a part thereof compared to a control or wild type can be achieved.

[0535] Accordingly, in one embodiment, in case the activity of a polypeptide according to the polypeptide SEQ ID NO.: 43, or encoded by a nucleic acid molecule comprising the nucleic acid SEQ ID NO.: 42 or a homolog of said nucleic acid molecule or polypeptide, e.g. if the activity of a nucleic acid molecule or a polypeptide comprising the nucleic acid or polypeptide or the consensus sequence or the polypeptide motif, as depicted in Table I, II or IV, column 7 in the respective same line as the nucleic acid molecule SEQ ID NO.: 42 or polypeptide SEQ ID NO.: 43, respectively is increased or generated or if the activity “Factor arrest protein” is increased or generated in an organism, preferably an increased GABA content as compared with the wild type is conferred in said organism.

[0536] Accordingly, in one embodiment, in case the activity of a polypeptide according to the polypeptide SEQ ID NO.: 655, or encoded by a nucleic acid molecule comprising the nucleic acid SEQ ID NO.: 654 or a homolog of said nucleic acid molecule or polypeptide, e.g. if the activity of a nucleic acid molecule or a polypeptide comprising the nucleic acid or polypeptide or the consensus sequence or the polypeptide motif, as depicted in Table I, II or IV, column 7 in the respective same line as the nucleic acid molecule SEQ ID NO.: 654 or polypeptide SEQ ID NO.: 655, respectively is increased or generated or if the activity “transcriptional regulator” is increased or generated in an organism, preferably

an increased GABA content as compared with the wild type is conferred in said organism.

[0537] Accordingly, in one embodiment, in case the activity of a polypeptide according to the polypeptide SEQ ID NO.: 707, or encoded by a nucleic acid molecule comprising the nucleic acid SEQ ID NO.: 706 or a homolog of said nucleic acid molecule or polypeptide, e.g. if the activity of a nucleic acid molecule or a polypeptide comprising the nucleic acid or polypeptide or the consensus sequence or the polypeptide motif, as depicted in Table I, II or IV, column 7 in the respective same line as the nucleic acid molecule SEQ ID NO.: 706 or polypeptide SEQ ID NO.: 707, respectively is increased or generated or if the activity “protein phosphatase” is increased or generated in an organism, preferably

an increased GABA content as compared with the wild type is conferred in said organism.

[0538] Accordingly, in one embodiment, in case the activity of a polypeptide according to the polypeptide SEQ ID NO.: 752, or encoded by a nucleic acid molecule comprising the nucleic acid SEQ ID NO.: 751 or a homolog of said nucleic acid molecule or polypeptide, e.g. if the activity of a nucleic acid molecule or a polypeptide comprising the nucleic acid or polypeptide or the consensus sequence or the polypeptide motif, as depicted in Table I, II or IV, column 7 in the respective same line as the nucleic acid molecule SEQ ID NO.: 751 or polypeptide SEQ ID NO.: 752, respectively is increased or generated or if the activity “pyruvate kinase” is increased or generated in an organism, preferably

an increased GABA content as compared with the wild type is conferred in said organism.

[0539] Accordingly, in one embodiment, in case the activity of a polypeptide according to the polypeptide SEQ ID NO.: 1157, or encoded by a nucleic acid molecule comprising the nucleic acid SEQ ID NO.: 1156 or a homolog of said nucleic acid molecule or polypeptide, e.g. if the activity of a nucleic acid molecule or a polypeptide comprising the nucleic acid or polypeptide or the consensus sequence or the polypeptide motif, as depicted in Table I, II or IV, column 7 in the respective same line as the nucleic acid molecule SEQ ID NO.: 1156 or polypeptide SEQ ID NO.: 1157, respectively is increased or generated or if the activity “thioredoxin family protein” is increased or generated in an organism, preferably

an increased GABA content as compared with the wild type is conferred in said organism.

[0540] Accordingly, in one embodiment, in case the activity of a polypeptide according to the polypeptide SEQ ID NO.: 1511, or encoded by a nucleic acid molecule comprising the nucleic acid SEQ ID NO.: 1510 or a homolog of said nucleic acid molecule or polypeptide, e.g. if the activity of a nucleic acid molecule or a polypeptide comprising the nucleic acid or polypeptide or the consensus sequence or the polypeptide motif, as depicted in Table I, II or IV, column 7 in the respective same line as the nucleic acid molecule SEQ ID NO.: 1510 or polypeptide SEQ ID NO.: 1511, respectively is increased or generated or if the activity “harpin-induced family protein” is increased or generated in an organism, preferably an increased GABA content as compared with the wild type is conferred in said organism.

[0541] Accordingly, in one embodiment, in case the activity of a polypeptide according to the polypeptide SEQ ID NO.: 1599, or encoded by a nucleic acid molecule comprising the nucleic acid SEQ ID NO.: 1598 or a homolog of said nucleic acid molecule or polypeptide, e.g. if the activity of a nucleic acid molecule or a polypeptide comprising the nucleic acid or polypeptide or the consensus sequence or the polypeptide motif, as depicted in Table I, II or IV, column 7 in the respective same line as the nucleic acid molecule SEQ ID NO.: 1598 or polypeptide SEQ ID NO.: 1599, respectively is increased or generated or if the activity “glycosyl transferase” is increased or generated in an organism, preferably

an increased GABA content as compared with the wild type is conferred in said organism.

[0542] Accordingly, in one embodiment, in case the activity of a polypeptide according to the polypeptide SEQ ID NO.: 1671 or preferably SEQ ID NO: 8590, or encoded by a nucleic acid molecule comprising the nucleic acid SEQ ID NO.: 1670 or preferably SEQ ID NO: 8589 or a homolog of said nucleic acid molecule or polypeptide, e.g. if the activity of a nucleic acid molecule or a polypeptide comprising the nucleic acid or polypeptide or the consensus sequence or the polypeptide motif, as depicted in Table I, II or IV, column 7 in the respective same line as the nucleic acid molecule SEQ ID NO.: 1670 or polypeptide SEQ ID NO.: 1671, respectively is increased or generated or if the activity “auxin response factor” or “auxin transcription factor” resp. is increased or generated in an organism, preferably

an increased GABA content as compared with the wild type is conferred in said organism.

[0543] Accordingly, in one embodiment, in case the activity of a polypeptide according to the polypeptide SEQ ID NO.: 1875, or encoded by a nucleic acid molecule comprising the nucleic acid SEQ ID NO.: 1874 or a homolog of said nucleic acid molecule or polypeptide, e.g. if the activity of a nucleic acid molecule or a polypeptide comprising the nucleic acid or polypeptide or the consensus sequence or the polypeptide motif, as depicted in Table I, II or IV, column 7 in the respective same line as the nucleic acid molecule SEQ ID NO.: 1874 or polypeptide SEQ ID NO.: 1875, respectively is increased or generated or if the activity “At4g32480-protein” is increased or generated in an organism, preferably

an increased GABA content as compared with the wild type is conferred in said organism.

[0544] Accordingly, in one embodiment, in case the activity of a polypeptide according to the polypeptide SEQ ID NO.: 1937, or encoded by a nucleic acid molecule comprising the nucleic acid SEQ ID NO.: 1936 or a homolog of said nucleic acid molecule or polypeptide, e.g. if the activity of a nucleic acid molecule or a polypeptide comprising the nucleic acid or polypeptide or the consensus sequence or the polypeptide motif, as depicted in Table I, II or IV, column 7 in the respective same line as the nucleic acid molecule SEQ ID NO.: 1936 or polypeptide SEQ ID NO.: 1937, respectively is increased or generated or if the activity “calcium-dependent protein kinase” is increased or generated in an organism, preferably

an increased GABA content as compared with the wild type is conferred in said organism.

[0545] Accordingly, in one embodiment, in case the activity of a polypeptide according to the polypeptide SEQ ID NO.: 2493, or encoded by a nucleic acid molecule comprising the nucleic acid SEQ ID NO.: 2492 or a homolog of said nucleic acid molecule or polypeptide, e.g. if the activity of a nucleic acid molecule or a polypeptide comprising the nucleic acid or polypeptide or the consensus sequence or the polypeptide motif, as depicted in Table I, II or IV, column 7 in the respective same line as the nucleic acid molecule SEQ ID NO.: 2492 or polypeptide SEQ ID NO.: 2493, respectively is increased or generated or if the activity “At5g16650-protein” is increased or generated in an organism, preferably

an increased GABA content as compared with the wild type is conferred in said organism.

[0546] Accordingly, in one embodiment, in case the activity of a polypeptide according to the polypeptide SEQ ID NO.: 2554, or encoded by a nucleic acid molecule comprising the nucleic acid SEQ ID NO.: 2553 or a homolog of said nucleic acid molecule or polypeptide, e.g. if the activity of a nucleic acid molecule or a polypeptide comprising the nucleic acid or polypeptide or the consensus sequence or the polypeptide motif, as depicted in Table I, II or IV, column 7 in the respective same line as the nucleic acid molecule SEQ ID NO.: 2553 or polypeptide SEQ ID NO.: 2554, respectively is increased or generated or if the activity “elongation factor Tu” is increased or generated in an organism, preferably

an increased GABA content as compared with the wild type is conferred in said organism.

[0547] Accordingly, in one embodiment, in case the activity of a polypeptide according to the polypeptide SEQ ID NO.: 3409, or encoded by a nucleic acid molecule comprising the nucleic acid SEQ ID NO.: 3408 or a homolog of said nucleic acid molecule or polypeptide, e.g. if the activity of a nucleic acid molecule or a polypeptide comprising the nucleic acid or polypeptide or the consensus sequence or the polypeptide motif, as depicted in Table I, II or IV, column 7 in the respective same line as the nucleic acid molecule SEQ ID NO.: 3408 or polypeptide SEQ ID NO.: 3409, respectively is increased or generated or if the activity “ABC transporter permease protein” is increased or generated in an organism, preferably

an increased GABA content as compared with the wild type is conferred in said organism.

[0548] Accordingly, in one embodiment, in case the activity of a polypeptide according to the polypeptide SEQ ID NO.: 3565, or encoded by a nucleic acid molecule comprising the nucleic acid SEQ ID NO.: 3564 or a homolog of said nucleic acid molecule or polypeptide, e.g. if the activity of a nucleic acid molecule or a polypeptide comprising the nucleic acid or polypeptide or the consensus sequence or the polypeptide motif, as depicted in Table I, II or IV, column 7 in the respective same line as the nucleic acid molecule SEQ ID NO.: 3564 or polypeptide SEQ ID NO.: 3565, respectively is increased or generated or if the activity “hydrolase” is increased or generated in an organism, preferably

an increased GABA content as compared with the wild type is conferred in said organism.

[0549] Accordingly, in one embodiment, in case the activity of a polypeptide according to the polypeptide SEQ ID NO.: 3729, or encoded by a nucleic acid molecule comprising the nucleic acid SEQ ID NO.: 3728 or a homolog of said nucleic acid molecule or polypeptide, e.g. if the activity of a nucleic acid molecule or a polypeptide comprising the nucleic acid or polypeptide or the consensus sequence or the polypeptide motif, as depicted in Table I, II or IV, column 7 in the respective same line as the nucleic acid molecule SEQ ID NO.: 3728 or polypeptide SEQ ID NO.: 3729, respectively is increased or generated or if the activity “fumarylacetoacetate hydrolase” is increased or generated in an organism, preferably

an increased GABA content as compared with the wild type is conferred in said organism.

[0550] Accordingly, in one embodiment, in case the activity of a polypeptide according to the polypeptide SEQ ID NO.: 4069, or encoded by a nucleic acid molecule comprising the nucleic acid SEQ ID NO.: 4068 or a homolog of said nucleic acid molecule or polypeptide, e.g. if the activity of a nucleic acid molecule or a polypeptide comprising the nucleic acid or polypeptide or the consensus sequence or the polypeptide motif, as depicted in Table I, II or IV, column 7 in the respective same line as the nucleic acid molecule SEQ ID NO.: 4068 or polypeptide SEQ ID NO.: 4069, respectively is increased or generated or if the activity “glucose dehydrogenase” is increased or generated in an organism, preferably

an increased GABA content as compared with the wild type is conferred in said organism.

[0551] Accordingly, in one embodiment, in case the activity of a polypeptide according to the polypeptide SEQ ID NO.: 4177, or encoded by a nucleic acid molecule comprising the nucleic acid SEQ ID NO.: 4176 or a homolog of said nucleic acid molecule or polypeptide, e.g. if the activity of a nucleic acid molecule or a polypeptide comprising the nucleic acid or polypeptide or the consensus sequence or the polypeptide motif, as depicted in Table I, II or IV, column 7 in the respective same line as the nucleic acid molecule SEQ ID NO.: 4176 or polypeptide SEQ ID NO.: 4177, respectively is increased or generated or if the activity “serine protease” is increased or generated in an organism, preferably

an increased GABA content as compared with the wild type is conferred in said organism.

[0552] Accordingly, in one embodiment, in case the activity of a polypeptide according to the polypeptide SEQ ID NO.: 4365, or encoded by a nucleic acid molecule comprising the nucleic acid SEQ ID NO.: 4364 or a homolog of said nucleic acid molecule or polypeptide, e.g. if the activity of a nucleic acid molecule or a polypeptide comprising the nucleic acid or polypeptide or the consensus sequence or the polypeptide motif, as depicted in Table I, II or IV, column 7 in the respective same line as the nucleic acid molecule SEQ ID NO.: 4364 or polypeptide SEQ ID NO.: 4365, respectively is increased or generated or if the activity “ATP-binding protein” is increased or generated in an organism, preferably

an increased GABA content as compared with the wild type is conferred in said organism.

[0553] Accordingly, in one embodiment, in case the activity of a polypeptide according to the polypeptide SEQ ID NO.: 4718, or encoded by a nucleic acid molecule comprising the nucleic acid SEQ ID NO.: 4717 or a homolog of said nucleic acid molecule or polypeptide, e.g. if the activity of a nucleic acid molecule or a polypeptide comprising the nucleic acid or polypeptide or the consensus sequence or the polypeptide motif, as depicted in Table I, II or IV, column 7 in the respective same line as the nucleic acid molecule SEQ ID NO.: 4717 or polypeptide SEQ ID NO.: 4718, respectively is increased or generated or if the activity “isochorismate synthase” is increased or generated in an organism, preferably

an increased GABA content as compared with the wild type is conferred in said organism.

[0554] Accordingly, in one embodiment, in case the activity of a polypeptide according to the polypeptide SEQ ID NO.: 4865, or encoded by a nucleic acid molecule comprising the nucleic acid SEQ ID NO.: 4864 or a homolog of said nucleic acid molecule or polypeptide, e.g. if the activity of a nucleic acid molecule or a polypeptide comprising the nucleic acid or polypeptide or the consensus sequence or the polypeptide motif, as depicted in Table I, II or IV, column 7 in the respective same line as the nucleic acid molecule SEQ ID NO.: 4864 or polypeptide SEQ ID NO.: 4865, respectively is increased or generated or if the activity “MFS-type transporter protein” is increased or generated in an organism, preferably

an increased GABA content as compared with the wild type is conferred in said organism.

[0555] Accordingly, in one embodiment, in case the activity of a polypeptide according to the polypeptide SEQ ID NO.: 4904, or encoded by a nucleic acid molecule comprising the nucleic acid SEQ ID NO.: 4903 or a homolog of said nucleic acid molecule or polypeptide, e.g. if the activity of a nucleic acid molecule or a polypeptide comprising the nucleic acid or polypeptide or the consensus sequence or the polypeptide motif, as depicted in Table I, II or IV, column 7 in the respective same line as the nucleic acid molecule SEQ ID NO.: 4903 or polypeptide SEQ ID NO.: 4904, respectively is increased or generated or if the activity “b1003-protein” is increased or generated in an organism, preferably

an increased GABA content as compared with the wild type is conferred in said organism.

[0556] Accordingly, in one embodiment, in case the activity of a polypeptide according to the polypeptide SEQ ID NO.: 4910, or encoded by a nucleic acid molecule comprising the nucleic acid SEQ ID NO.: 4909 or a homolog of said nucleic acid molecule or polypeptide, e.g. if the activity of a nucleic acid molecule or a polypeptide comprising the nucleic acid or polypeptide or the consensus sequence or the polypeptide motif, as depicted in Table I, II or IV, column 7 in the respective same line as the nucleic acid molecule SEQ ID NO.: 4909 or polypeptide SEQ ID NO.: 4910, respectively is increased or generated or if the activity “b1522-protein” is increased or generated in an organism, preferably

an increased GABA content as compared with the wild type is conferred in said organism.

[0557] Accordingly, in one embodiment, in case the activity of a polypeptide according to the polypeptide SEQ ID NO.: 4955, or encoded by a nucleic acid molecule comprising the nucleic acid SEQ ID NO.: 4954 or a homolog of said nucleic acid molecule or polypeptide, e.g. if the activity of a nucleic acid molecule or a polypeptide comprising the nucleic acid or polypeptide or the consensus sequence or the polypeptide motif, as depicted in Table I, II or IV, column 7 in the respective same line as the nucleic acid molecule SEQ ID NO.: 4954 or polypeptide SEQ ID NO.: 4955, respectively is increased or generated or if the activity “b2739-protein” is increased or generated in an organism, preferably

an increased GABA content as compared with the wild type is conferred in said organism.

[0558] Accordingly, in one embodiment, in case the activity of a polypeptide according to the polypeptide SEQ ID NO.: 5122, or encoded by a nucleic acid molecule comprising the nucleic acid SEQ ID NO.: 5121 or a homolog of said nucleic acid molecule or polypeptide, e.g. if the activity of a nucleic acid molecule or a polypeptide comprising the nucleic acid or polypeptide or the consensus sequence or the polypeptide motif, as depicted in Table I, II or IV, column 7 in the respective same line as the nucleic acid molecule SEQ ID NO.: 5121 or polypeptide SEQ ID NO.: 5122, respectively is increased or generated or if the activity “b3646-protein” is increased or generated in an organism, preferably

an increased GABA content as compared with the wild type is conferred in said organism.

[0559] Accordingly, in one embodiment, in case the activity of a polypeptide according to the polypeptide SEQ ID NO.: 5320, or encoded by a nucleic acid molecule comprising the nucleic acid SEQ ID NO.: 5319 or a homolog of said nucleic acid molecule or polypeptide, e.g. if the activity of a nucleic acid molecule or a polypeptide comprising the nucleic acid or polypeptide or the consensus sequence or the polypeptide motif, as depicted in Table I, II or IV, column 7 in the respective same line as the nucleic acid molecule SEQ ID NO.: 5319 or polypeptide SEQ ID NO.: 5320, respectively is increased or generated or if the activity “B4029-protein” is increased or generated in an organism, preferably

an increased GABA content as compared with the wild type is conferred in said organism.

[0560] Accordingly, in one embodiment, in case the activity of a polypeptide according to the polypeptide SEQ ID NO.: 5388, or encoded by a nucleic acid molecule comprising the nucleic acid SEQ ID NO.: 5387 or a homolog of said nucleic acid molecule or polypeptide, e.g. if the activity of a nucleic acid molecule or a polypeptide comprising the nucleic acid or polypeptide or the consensus sequence or the polypeptide motif, as depicted in Table I, II or IV, column 7 in the respective same line as the nucleic acid molecule SEQ ID NO.: 5387 or polypeptide SEQ ID NO.: 5388, respectively is increased or generated or if the activity “acetyltransferase” is increased or generated in an organism, preferably

an increased GABA content as compared with the wild type is conferred in said organism.

[0561] Accordingly, in one embodiment, in case the activity of a polypeptide according to the polypeptide SEQ ID NO.: 5459, or encoded by a nucleic acid molecule comprising the nucleic acid SEQ ID NO.: 5458 or a homolog of said nucleic acid molecule or polypeptide, e.g. if the activity of a nucleic acid molecule or a polypeptide comprising the nucleic acid or polypeptide or the consensus sequence or the polypeptide motif, as depicted in Table I, II or IV, column 7 in the respective same line as the nucleic acid molecule SEQ ID NO.: 5458 or polypeptide SEQ ID NO.: 5459, respectively is increased or generated or if the activity “acyl-carrier protein” is increased or generated in an organism, preferably

an increased GABA content as compared with the wild type is conferred in said organism.

[0562] Accordingly, in one embodiment, in case the activity of a polypeptide according to the polypeptide SEQ ID NO.: 6042, or encoded by a nucleic acid molecule comprising the nucleic acid SEQ ID NO.: 6041 or a homolog of said nucleic acid molecule or polypeptide, e.g. if the activity of a nucleic acid molecule or a polypeptide comprising the nucleic acid or polypeptide or the consensus sequence or the polypeptide motif, as depicted in Table I, II or IV, column 7 in the respective same line as the nucleic acid molecule SEQ ID NO.: 6041 or polypeptide SEQ ID NO.: 6042, respectively is increased or generated or if the activity “geranylgeranyl pyrophosphate synthase” is increased or generated in an organism, preferably

an increased GABA content as compared with the wild type is conferred in said organism.

[0563] Accordingly, in one embodiment, in case the activity of a polypeptide according to the polypeptide SEQ ID NO.: 6470, or encoded by a nucleic acid molecule comprising the nucleic acid SEQ ID NO.: 6469 or a homolog of said nucleic acid molecule or polypeptide, e.g. if the activity of a nucleic acid molecule or a polypeptide comprising the nucleic acid or polypeptide or the consensus sequence or the polypeptide motif, as depicted in Table I, II or IV, column 7 in the respective same line as the nucleic acid molecule SEQ ID NO.: 6469 or polypeptide SEQ ID NO.: 6470, respectively is increased or generated or if the activity “Sec-independent protein translocase subunit” is increased or generated in an organism, preferably

an increased GABA content as compared with the wild type is conferred in said organism.

[0564] Accordingly, in one embodiment, in case the activity of a polypeptide according to the polypeptide SEQ ID NO.: 6740, or encoded by a nucleic acid molecule comprising the nucleic acid SEQ ID NO.: 6739 or a homolog of said nucleic acid molecule or polypeptide, e.g. if the activity of a nucleic acid molecule or a polypeptide comprising the nucleic acid or polypeptide or the consensus sequence or the polypeptide motif, as depicted in Table I, II or IV, column 7 in the respective same line as the nucleic acid molecule SEQ ID NO.: 6739 or polypeptide SEQ ID NO.: 6740, respectively is increased or generated or if the activity “homocitrate synthase” is increased or generated in an or ganism, preferably

an increased GABA content as compared with the wild type is conferred in said organism.

[0565] Accordingly, in one embodiment, in case the activity of a polypeptide according to the polypeptide SEQ ID NO.: 7511, or encoded by a nucleic acid molecule comprising the nucleic acid SEQ ID NO.: 7510 or a homolog of said nucleic acid molecule or polypeptide, e.g. if the activity of a nucleic acid molecule or a polypeptide comprising the nucleic acid or polypeptide or the consensus sequence or the polypeptide motif, as depicted in Table I, II or IV, column 7 in the respective same line as the nucleic acid molecule SEQ ID NO.: 7510 or polypeptide SEQ ID NO.: 7511, respectively is increased or generated or if the activity “polygalacturonase” is increased or generated in an organism, preferably

an increased GABA content as compared with the wild type is conferred in said organism.

[0566] Accordingly, in one embodiment, in case the activity of a polypeptide according to the polypeptide SEQ ID NO.: 7634, or encoded by a nucleic acid molecule comprising the nucleic acid SEQ ID NO.: 7633 or a homolog of said nucleic acid molecule or polypeptide, e.g. if the activity of a nucleic acid molecule or a polypeptide comprising the nucleic acid or polypeptide or the consensus sequence or the polypeptide motif, as depicted in Table I, II or IV, column 7 in the respective same line as the nucleic acid molecule SEQ ID NO.: 7633 or polypeptide SEQ ID NO.: 7634, respectively is increased or generated or if the activity “thioredoxin” is increased or generated in an organism, preferably an increased GABA content as compared with the wild type is conferred in said organism.

[0567] Accordingly, in one embodiment, in case the activity of a polypeptide according to the polypeptide SEQ ID NO.: 54, or encoded by a nucleic acid molecule comprising the nucleic acid SEQ ID NO.: 53 or a homolog of said nucleic acid molecule or polypeptide, e.g. if the activity of a nucleic acid molecule or a polypeptide comprising the nucleic acid or polypeptide or the consensus sequence or the polypeptide motif, as depicted in Table I, II or IV, column 7 in the respective same line as the nucleic acid molecule SEQ ID NO.: 53 or polypeptide SEQ ID NO.: 54, respectively is increased or generated or if the activity “pyruvate kinase” is increased or generated in an organism, preferably

an increased GABA content as compared with the wild type is conferred in said organism.

[0568] Accordingly, in one embodiment, in case the activity of a polypeptide according to the polypeptide SEQ ID NO.: 7138, or encoded by a nucleic acid molecule comprising the nucleic acid SEQ ID NO.: 7137 or a homolog of said nucleic acid molecule or polypeptide, e.g. if the activity of a nucleic acid molecule or a polypeptide comprising the nucleic acid or polypeptide or the consensus sequence or the polypeptide motif, as depicted in Table I, II or IV, column 7 in the respective same line as the nucleic acid molecule SEQ ID NO.: 7137 or polypeptide SEQ ID NO.: 7138, respectively is increased or generated or if the activity “microsomal beta-keto-reductase” is increased or generated in an organism, preferably

an increased GABA content as compared with the wild type is conferred in said organism.

[0569] Accordingly, in one embodiment, in case the activity of a polypeptide according to the polypeptide SEQ ID NO.: 7209, or encoded by a nucleic acid molecule comprising the nucleic acid SEQ ID NO.: 7208 or a homolog of said nucleic acid molecule or polypeptide, e.g. if the activity of a nucleic acid molecule or a polypeptide comprising the nucleic acid or polypeptide or the consensus sequence or the polypeptide motif, as depicted in Table I, II or IV, column 7 in the respective same line as the nucleic acid molecule SEQ ID NO.: 7208 or polypeptide SEQ ID NO.: 7209, respectively is increased or generated or if the activity “Branched-chain amino acid permease” is increased or generated in an organism, preferably

an increased GABA content as compared with the wild type is conferred in said organism.

[0570] Accordingly, in one embodiment, in case the activity of a polypeptide according to the polypeptide SEQ ID NO.: 7275, or encoded by a nucleic acid molecule comprising the nucleic acid SEQ ID NO.: 7274 or a homolog of said nucleic acid molecule or polypeptide, e.g. if the activity of a nucleic acid molecule or a polypeptide comprising the nucleic acid or polypeptide or the consensus sequence or the polypeptide motif, as depicted in Table I, II or IV, column 7 in the respective same line as the nucleic acid molecule SEQ ID NO.: 7274 or polypeptide SEQ ID NO.: 7275, respectively is increased or generated or if the activity “ubiquinone biosynthesis monooxygenase” is increased or generated in an organism, preferably

an increased GABA content as compared with the wild type is conferred in said organism.

[0571] Accordingly, in one embodiment, in case the activity of a polypeptide according to the polypeptide SEQ ID NO.: 7490, or encoded by a nucleic acid molecule comprising the nucleic acid SEQ ID NO.: 7489 or a homolog of said nucleic acid molecule or polypeptide, e.g. if the activity of a nucleic acid molecule or a polypeptide comprising the nucleic acid or polypeptide or the consensus sequence or the polypeptide motif, as depicted in Table I, II or IV, column 7 in the respective same line as the nucleic acid molecule SEQ ID NO.: 7489 or polypeptide SEQ ID NO.: 7490, respectively is increased or generated or if the activity “YHR213W-protein” is increased or generated in an organism, preferably

an increased GABA content as compared with the wild type is conferred in said organism.

[0572] Accordingly, in one embodiment, in case the activity of a polypeptide according to the polypeptide SEQ ID NO.: 8240, or encoded by a nucleic acid molecule comprising the nucleic acid SEQ ID NO.: 8239 or a homolog of said nucleic acid molecule or polypeptide, e.g. if the activity of a nucleic acid molecule or a polypeptide comprising the nucleic acid or polypeptide or the consensus sequence or the polypeptide motif, as depicted in Table I, II or IV, column 7 in the respective same line as the nucleic acid molecule SEQ ID NO.: 8239 or polypeptide SEQ ID NO.: 8240, respectively is increased or generated or if the activity “60S ribosomal protein” is increased or generated in an or ganism, preferably

an increased GABA content as compared with the wild type is conferred in said organism.

[0573] Accordingly, in one embodiment, in case the activity of a polypeptide according to the polypeptide SEQ ID NO.: 8398, or encoded by a nucleic acid molecule comprising the nucleic acid SEQ ID NO.: 8397 or a homolog of said nucleic acid molecule or polypeptide, e.g. if the activity of a nucleic acid molecule or a polypeptide comprising the nucleic acid or polypeptide or the consensus sequence or the polypeptide motif, as depicted in Table I, II or IV, column 7 in the respective same line as the nucleic acid molecule SEQ ID NO.: 8397 or polypeptide SEQ ID NO.: 8398, respectively is increased or generated or if the activity “Autophagy-related protein” is increased or generated in an organism, preferably

an increased GABA content as compared with the wild type is conferred in said organism.

[0574] Accordingly, in one embodiment, in case the activity of a polypeptide according to the polypeptide SEQ ID NO.: 8228, or encoded by a nucleic acid molecule comprising the nucleic acid SEQ ID NO.: 8227 or a homolog of said nucleic acid molecule or polypeptide, e.g. if the activity of a nucleic acid molecule or a polypeptide comprising the nucleic acid or polypeptide or the consensus sequence or the polypeptide motif, as depicted in Table I, II or IV, column 7 in the respective same line as the nucleic acid molecule SEQ ID NO.: 8227 or polypeptide SEQ ID NO.: 8228, respectively is increased or generated or if the activity “cytochrome c oxidase subunit VIII” is increased or generated in an organism, preferably

an increased GABA content as compared with the wild type is conferred in said organism.

[0575] Accordingly, in one embodiment, in case the activity of a polypeptide according to the polypeptide SEQ ID NO.: 8424, or encoded by a nucleic acid molecule comprising the nucleic acid SEQ ID NO.: 8423 or a homolog of said nucleic acid molecule or polypeptide, e.g. if the activity of a nucleic acid molecule or a polypeptide comprising the nucleic acid or polypeptide or the consensus sequence or the polypeptide motif, as depicted in Table I, II or IV, column 7 in the respective same line as the nucleic acid molecule SEQ ID NO.: 8423 or polypeptide SEQ ID NO.: 8424, respectively is increased or generated or if the activity “Branched-chain amino acid permease” is increased or generated in an organism, preferably

an increased GABA content as compared with the wild type is conferred in said organism.

[0576] The term “expression” refers to the transcription and/or translation of a codogenic gene segment or gene. As a rule, the resulting product is an mRNA or a protein. However, expression products can also include functional RNAs such as, for example, antisense, nucleic acids, tRNAs, snRNAs, rRNAs, RNAi, siRNA, ribozymes etc. Expression may be systemic, local or temporal, for example limited to certain cell types, tissues organs or organelles or time periods.

[0577] In one embodiment, the process of the present invention comprises one or more of the following steps

a) stabilizing a protein conferring the increased expression of a protein encoded by the nucleic acid molecule of the invention or of the polypeptid of the invention having the herein-mentioned activity selected from the group consisting of 60S ribosomal protein, ABC transporter permease protein, acetyltransferase, acyl-carrier protein, At4g32480-protein, At5g16650-protein, ATP-binding protein, Autophagy-related protein, auxin response factor, auxin transcription factor, b1003-protein, b1522-protein, b2739-protein, b3646-protein, B4029-protein, Branched-chain amino acid permease, calcium-dependent protein kinase, cytochrome c oxidase subunit VIII, elongation factor Tu, Factor arrest protein, fumarylacetoacetate hydrolase, geranylgeranyl pyrophosphate synthase, glucose dehydrogenase, glycosyl transferase, harpin-induced family protein, homocitrate synthase, hydrolase, isochorismate synthase, MFS-type transporter protein, microsomal beta-keto-reductase, polygalacturonase, protein phosphatase, pyruvate kinase, Sec-independent protein translocase subunit, serine protease, thioredoxin, thioredoxin family protein, transcriptional regulator, ubiquinone biosynthesis monooxygenase, and YHR213W-protein and conferring an increased GABA content as compared to a corresponding non-transformed wild type;
b) stabilizing a mRNA conferring the increased expression of a protein encoded by the nucleic acid molecule of the invention or its homologs or of a mRNA encoding the polypeptide of the present invention having the herein-mentioned activity selected from the group consisting of 60S ribosomal protein, ABC transporter permease protein, acetyltransferase, acyl-carrier protein, At4g32480-protein, At5g16650-protein, ATP-binding protein, Autophagy-related protein, auxin response factor, auxin transcription factor, b1003-protein, b1522-protein, b2739-protein, b3646-protein, B4029-protein, Branched-chain amino acid permease, calcium-dependent protein kinase, cytochrome c oxidase subunit VIII, elongation factor Tu, Factor arrest protein, fumarylacetoacetate hydrolase, geranylgeranyl pyrophosphate synthase, glucose dehydrogenase, glycosyl transferase, harpin-induced family protein, homocitrate synthase, hydrolase, isochorismate synthase, MFS-type transporter protein, microsomal beta-keto-reductase, polygalacturonase, protein phosphatase, pyruvate kinase, Sec-independent protein translocase subunit, serine protease, thioredoxin, thioredoxin family protein, transcriptional regulator, ubiquinone biosynthesis monooxygenase, and YHR213W-protein and conferring an increased GABA content as compared to a corresponding non-transformed wild type;
c) increasing the specific activity of a protein conferring the increased expression of a protein encoded by the nucleic acid molecule of the invention or of the polypeptide of the present invention or decreasing the inhibitory regulation of the polypeptide of the invention;
d) generating or increasing the expression of an endogenous or artificial transcription factor mediating the expression of a protein conferring the increased expression of a protein encoded by the nucleic acid molecule of the invention or of the polypeptide of the invention having the herein-mentioned activity selected from the group consisting of 60S ribosomal protein, ABC transporter permease protein, acetyltransferase, acyl-carrier protein, At4g32480-protein, At5g16650-protein, ATP-binding protein, Autophagy-related protein, auxin response factor, auxin transcription factor, b1003-protein, b1522-protein, b2739-protein, b3646-protein, B4029-protein, Branched-chain amino acid permease, calcium-dependent protein kinase, cytochrome c oxidase subunit VIII, elongation factor Tu, Factor arrest protein, fumarylacetoacetate hydrolase, geranylgeranyl pyrophosphate synthase, glucose dehydrogenase, glycosyl transferase, harpin-induced family protein, homocitrate synthase, hydrolase, isochorismate synthase, MFS-type transporter protein, microsomal beta-keto-reductase, polygalacturonase, protein phosphatase, pyruvate kinase, Sec-independent protein translocase subunit, serine protease, thioredoxin, thioredoxin family protein, transcriptional regulator, ubiquinone biosynthesis monooxygenase, and YHR213W-protein and conferring an increased GABA content as compared to a corresponding non-transformed wild type;
e) stimulating activity of a protein conferring the increased expression of a protein encoded by the nucleic acid molecule of the present invention or a polypeptide of the present invention having the herein-mentioned activity selected from the group consisting of 60S ribosomal protein, ABC transporter permease protein, acetyltransferase, acyl-carrier protein, At4g32480-protein, At5g16650-protein, ATP-binding protein, Autophagy-related protein, auxin response factor, auxin transcription factor, b1003-protein, b1522-protein, b2739-protein, b3646-protein, B4029-protein, Branched-chain amino acid permease, calcium-dependent protein kinase, cytochrome c oxidase subunit VIII, elongation factor Tu, Factor arrest protein, fumarylacetoacetate hydrolase, geranylgeranyl pyrophosphate synthase, glucose dehydrogenase, glycosyl transferase, harpin-induced family protein, homocitrate synthase, hydrolase, isochorismate synthase, MFS-type transporter protein, microsomal beta-keto-reductase, polygalacturonase, protein phosphatase, pyruvate kinase, Sec-independent protein translocase subunit, serine protease, thioredoxin, thioredoxin family protein, transcriptional regulator, ubiquinone biosynthesis monooxygenase, and YHR213W-protein and conferring an increased GABA content as compared to a corresponding non-transformed wild type by adding one or more exogenous inducing factors to the organisms or parts thereof;
f) expressing a transgenic gene encoding a protein conferring the increased expression of a polypeptide encoded by the nucleic acid molecule of the present invention or a polypeptide of the present invention, having the herein-mentioned activity selected from the group consisting of 60S ribosomal protein, ABC transporter permease protein, acetyltransferase, acyl-carrier protein, At4g32480-protein, At5g16650-protein, ATP-binding protein, Autophagy-related protein, auxin response factor, auxin transcription factor, b1003-protein, b1522-protein, b2739-protein, b3646-protein, B4029-protein, Branched-chain amino acid permease, calcium-dependent protein kinase, cytochrome c oxidase subunit VIII, elongation factor Tu, Factor arrest protein, fumarylacetoacetate hydrolase, geranylgeranyl pyrophosphate synthase, glucose dehydrogenase, glycosyl transferase, harpin-induced family protein, homocitrate synthase, hydrolase, isochorismate synthase, MFS-type transporter protein, microsomal beta-keto-reductase, polygalacturonase, protein phosphatase, pyruvate kinase, Sec-independent protein translocase subunit, serine protease, thioredoxin, thioredoxin family protein, transcriptional regulator, ubiquinone biosynthesis monooxygenase, and YHR213W-protein and conferring an increased GABA content as compared to a corresponding non-transformed wild type; and/or
g) increasing the copy number of a gene conferring the increased expression of a nucleic acid molecule encoding a polypeptide encoded by the nucleic acid molecule of the invention or the polypeptide of the invention having the herein-mentioned activity selected from the group consisting of 60S ribosomal protein, ABC transporter permease protein, acetyltransferase, acyl-carrier protein, At4g32480-protein, At5g16650-protein, ATP-binding protein, Autophagy-related protein, auxin response factor, auxin transcription factor, b1003-protein, b1522-protein, b2739-protein, b3646-protein, B4029-protein, Branched-chain amino acid permease, calcium-dependent protein kinase, cytochrome c oxidase subunit VIII, elongation factor Tu, Factor arrest protein, fumarylacetoacetate hydrolase, geranylgeranyl pyrophosphate synthase, glucose dehydrogenase, glycosyl transferase, harpin-induced family protein, homocitrate synthase, hydrolase, isochorismate synthase, MFS-type transporter protein, microsomal beta-keto-reductase, polygalacturonase, protein phosphatase, pyruvate kinase, Sec-independent protein translocase subunit, serine protease, thioredoxin, thioredoxin family protein, transcriptional regulator, ubiquinone biosynthesis monooxygenase, and YHR213W-protein and conferring an increased GABA content as compared to a corresponding non-transformed wild type;
h) increasing the expression of the endogenous gene encoding the polypeptide of the invention or its homologs by adding positive expression or removing negative expression elements, e.g. homologous recombination can be used to either introduce positive regulatory elements like for plants the 35S enhancer into the promoter or to remove repressor elements form regulatory regions. Further gene conversion methods can be used to disrupt repressor elements or to enhance to activity of positive elements-positive elements can be randomly introduced in plants by T-DNA or transposon mutagenesis and lines can be identified in which the positive elements have been integrated near to a gene of the invention, the expression of which is thereby enhanced;
and/or
i) modulating growth conditions of the plant in such a manner, that the expression or activity of the gene encoding the protein of the invention or the protein itself is enhanced;
j) selecting of organisms with especially high activity of the proteins of the invention from natural or from mutagenized resources and breeding them into the target organisms, e.g. the elite crops.

[0578] Preferably, said mRNA is the nucleic acid molecule of the present invention and/or the protein conferring the increased expression of a protein encoded by the nucleic acid molecule of the present invention alone or linked to a transit nucleic acid sequence or transit peptide encoding nucleic acid sequence or the polypeptide having the herein mentioned activity, e.g. conferring an increased GABA content as compared to a corresponding non-transformed wild type after increasing the expression or activity of the encoded polypeptide or having the activity of a polypeptide having an activity as the protein as shown in table II column 3 or its homologs.

[0579] In general, the amount of mRNA or polypeptide in a cell or a compartment of an organism correlates with the amount of encoded protein and thus with the overall activity of the encoded protein in said volume. Said correlation is not always linear, the activity in the volume is dependent on the stability of the molecules or the presence of activating or inhibiting co-factors. Further, product and educt inhibitions of enzymes are well known and described in textbooks, e.g. Stryer, Biochemistry.

[0580] In general, the amount of mRNA, polynucleotide or nucleic acid molecule in a cell or a compartment of an organism correlates with the amount of encoded protein and thus with the overall activity of the encoded protein in said volume. Said correlation is not always linear, the activity in the volume is dependent on the stability of the molecules, the degradation of the molecules or the presence of activating or inhibiting co-factors. Further, product and educt inhibitions of enzymes are well known, e.g. Zinser et al. “Enzyminhibitoren”/Enzyme inhibitors”.

[0581] The activity of the abovementioned proteins and/or polypeptides encoded by the nucleic acid molecule of the present invention can be increased in various ways. For example, the activity in an organism or in a part thereof, like a cell, is increased via increasing the gene product number, e.g. by increasing the expression rate, like introducing a stronger promoter, or by increasing the stability of the mRNA expressed, thus increasing the translation rate, and/or increasing the stability of the gene product, thus reducing the proteins decayed. Further, the activity or turnover of enzymes can be influenced in such a way that a reduction or increase of the reaction rate or a modification (reduction or increase) of the affinity to the substrate results, is reached. A mutation in the catalytic center of an polypeptide of the invention, e.g. as enzyme, can modulate the turn over rate of the enzyme, e.g. a knock out of an essential amino acid can lead to a reduced or completely knock out activity of the enzyme, or the deletion or mutation of regulator binding sites can reduce a negative regulation like a feedback inhibition (or a substrate inhibition, if the substrate level is also increased). The specific activity of an enzyme of the present invention can be increased such that the turn over rate is increased or the binding of a co-factor is improved. Improving the stability of the encoding mRNA or the protein can also increase the activity of a gene product. The stimulation of the activity is also under the scope of the term “increased activity”.

[0582] Moreover, the regulation of the abovementioned nucleic acid sequences may be modified so that gene expression is increased. This can be achieved advantageously by means of heterologous regulatory sequences or by modifying, for example mutating, the natural regulatory sequences which are present. The advantageous methods may also be combined with each other.

[0583] In general, an activity of a gene product in an organism or part thereof, in particular in a plant cell or organelle of a plant cell, a plant, or a plant tissue or a part thereof or in a microorganism can be increased by increasing the amount of the specific encoding mRNA or the corresponding protein in said organism or part thereof. “Amount of protein or mRNA” is understood as meaning the molecule number of polypeptides or mRNA molecules in an organism, a tissue, a cell or a cell compartment.

[0584] “Increase” in the amount of a protein means the quantitative increase of the molecule number of said protein in an organism, a tissue, a cell or a cell compartment such as an organelle like a plastid or mitochondria or part thereof—for example by one of the methods described herein below—in comparison to a wild type, control or reference.

[0585] The increase in molecule number amounts preferably to at least 1%, preferably to more than 10%, more preferably to 30% or more, especially preferably to 50%, 70% or more, very especially preferably to 100%, most preferably to 500% or more. However, a de novo expression is also regarded as subject of the present invention.

[0586] A modification, i.e. an increase, can be caused by endogenous or exogenous factors. For example, an increase in activity in an organism or a part thereof can be caused by adding a gene product or a precursor or an activator or an agonist to the media or nutrition or can be caused by introducing said subjects into a organism, transient or stable. Furthermore such an increase can be reached by the introduction of the inventive nucleic acid sequence or the encoded protein in the correct cell compartment for example into the nucleus, or cytoplasm respectively or into plastids either by transformation and/or targeting.

[0587] In one embodiment the increase or decrease in tolerance and/or resistance to environmental stress as compared to a corresponding non-transformed wild type plant cell in the plant or a part thereof, e.g. in a cell, a tissue, a organ, an organelle etc., is achieved by increasing the endogenous level of the polypeptide of the invention. Accordingly, in an embodiment of the present invention, the present invention relates to a process wherein the gene copy number of a gene encoding the polynucleotide or nucleic acid molecule of the invention is increased. Further, the endogenous level of the polypeptide of the invention can for example be increased by modifying the transcriptional or translational regulation of the polypeptide.

[0588] In one embodiment the increased GABA content in the cell can be altered by targeted or random mutagenesis of the endogenous genes of the invention. For example homologous recombination can be used to either introduce positive regulatory elements like for plants the 35S enhancer into the promoter or to remove repressor elements form regulatory regions. In addition gene conversion like methods described by Kochevenko and Willmitzer (Plant Physiol. 2003 May; 132(1):174-84) and citations therein can be used to disrupt repressor elements or to enhance to activity of positive regulatory elements.

[0589] Furthermore positive elements can be randomly introduced in (plant) genomes by T-DNA or transposon mutagenesis and lines can be screened for, in which the positive elements has be integrated near to a gene of the invention, the expression of which is thereby enhanced. The activation of plant genes by random integrations of enhancer elements has been described by Hayashi et al., 1992 (Science 258:1350-1353) or Weigel et al., 2000 (Plant Physiol. 122, 1003-1013) and others citated therein. Reverse genetic strategies to identify insertions (which eventually carrying the activation elements) near in genes of interest have been described for various cases e.g. Krysan et al., 1999 (Plant Cell 1999, 11, 2283-2290); Sessions et al., 2002 (Plant Cell 2002, 14, 2985-2994); Young et al., 2001, (Plant Physiol. 2001, 125, 513-518); Koprek et al., 2000 (Plant J. 2000, 24, 253-263); Jeon et al., 2000 (Plant J. 2000, 22, 561-570); Tissier et al., 1999 (Plant Cell 1999, 11, 1841-1852); Speulmann et al., 1999 (Plant Cell 1999, 11, 1853-1866). Briefly material from all plants of a large T-DNA or transposon mutagenized plant population is harvested and genomic DNA prepared. Then the genomic DNA is pooled following specific architectures as described for example in Krysan et al., 1999 (Plant Cell 1999, 11, 2283-2290). Pools of genomics DNAs are then screened by specific multiplex PCR reactions detecting the combination of the insertional mutagen (eg T-DNA or Transposon) and the gene of interest. Therefore PCR reactions are run on the DNA pools with specific combinations of T-DNA or transposon border primers and gene specific primers. General rules for primer design can again be taken from Krysan et al., 1999 (Plant Cell 1999, 11, 2283-2290) Re-screening of lower levels DNA pools lead to the identification of individual plants in which the gene of interest is activated by the insertional mutagen.

[0590] The enhancement of positive regulatory elements or the disruption or weaking of negative regulatory elements can also be achieved through common mutagenesis techniques: The production of chemically or radiation mutated populations is a common technique and known to the skilled worker. Methods for plants are described by Koorneef et al. 1982 and the citations therein and by Lightner and Caspar in “Methods in Molecular Biology” Vol 82. These techniques usually induce pointmutations that can be identified in any known gene using methods such as TILLING (Colbert et al. 2001).

[0591] Accordingly, the expression level can be increased if the endogenous genes encoding a polypeptide conferring an increased expression of the polypeptide of the present invention, in particular genes comprising the nucleic acid molecule of the present invention, are modified via homologous recombination, Tilling approaches or gene conversion. It also possible to add as mentioned herein targeting sequences to the inventive nucleic acid sequences.

[0592] Regulatory sequences preferably in addition to a target sequence or part thereof can be operatively linked to the coding region of an endogenous protein and control its transcription and translation or the stability or decay of the encoding mRNA or the expressed protein. In order to modify and control the expression, promoter, UTRs, splicing sites, processing signals, polyadenylation sites, terminators, enhancers, repressors, post transcriptional or posttranslational modification sites can be changed, added or amended. For example, the activation of plant genes by random integrations of enhancer elements has been described by Hayashi et al., 1992 (Science 258:1350-1353) or Weigel et al., 2000 (Plant Physiol. 122, 1003-1013) and others citated therein. For example, the expression level of the endogenous protein can be modulated by replacing the endogenous promoter with a stronger transgenic promoter or by replacing the endogenous 3′UTR with a 3′UTR, which provides more stability without amending the coding region. Further, the transcriptional regulation can be modulated by introduction of an artificial transcription factor as described in the examples. Alternative promoters, terminators and UTR are described below.

[0593] The activation of an endogenous polypeptide having above-mentioned activity, e.g. having the activity of a protein as shown in table II, column 3 or of the polypeptide of the invention, e.g. conferring the increased GABA content as compared to a corresponding non-transformed wild type after increase of expression or activity in the cytosol and/or in an organelle like a plastid, can also be increased by introducing a synthetic transcription factor, which binds close to the coding region of the gene encoding the protein as shown in table II, column 3 and activates its transcription. A chimeric zinc finger protein can be constructed, which comprises a specific DNA-binding domain and an activation domain as e.g. the VP16 domain of Herpes Simplex virus. The specific binding domain can bind to the regulatory region of the gene encoding the protein as shown in table II, column 3. The expression of the chimeric transcription factor in a organism, in particular in a plant, leads to a specific expression of the protein as shown in table II, column 3, see e.g. in WO01/52620, Oriz, Proc. Natl. Acad. Sci. USA, 2002, Vol. 99, 13290 or Guan, Proc. Natl. Acad. Sci. USA, 2002, Vol. 99, 13296.

[0594] In one further embodiment of the process according to the invention, organisms are used in which one of the abovementioned genes, or one of the above-mentioned nucleic acids, is mutated in a way that the activity of the encoded gene products is less influenced by cellular factors, or not at all, in comparison with the unmutated proteins. For example, well known regulation mechanism of enzymatic activity are substrate inhibition or feed back regulation mechanisms. Ways and techniques for the introduction of substitution, deletions and additions of one or more bases, nucleotides or amino acids of a corresponding sequence are described herein below in the corresponding paragraphs and the references listed there, e.g. in Sambrook et al., Molecular Cloning, Cold Spring Habour, N.Y., 1989. The person skilled in the art will be able to identify regulation domains and binding sites of regulators by comparing the sequence of the nucleic acid molecule of the present invention or the expression product thereof with the state of the art by computer software means which comprise algorithms for the identifying of binding sites and regulation domains or by introducing into a nucleic acid molecule or in a protein systematically mutations and assaying for those mutations which will lead to an increased specific activity or an increased activity per volume, in particular per cell.

[0595] It can therefore be advantageous to express in an organism a nucleic acid molecule of the invention or a polypeptide of the invention derived from a evolutionary distantly related organism, as e.g. using a prokaryotic gene in a eukaryotic host, as in these cases the regulation mechanism of the host cell may not weaken the activity (cellular or specific) of the gene or its expression product.

[0596] The mutation is introduced in such a way that the increased GABA content is not adversely affected.

[0597] Less influence on the regulation of a gene or its gene product is understood as meaning a reduced regulation of the enzymatic or biological activity leading to an increased specific or cellular activity of the gene or its product. An increase of the enzymatic or biological activity is understood as meaning an enzymatic or biological activity, which is increased by at least 10%, advantageously at least 20, 30 or 40%, especially advantageously by at least 50, 60 or 70% in comparison with the starting organism. This leads to an increased GABA content as compared to a corresponding non-transformed wild type.

[0598] The invention provides that the above methods can be performed such that the stress tolerance is increased. It is also possible to obtain a decrease in stress tolerance.

[0599] The invention is not limited to specific nucleic acids, specific polypeptides, specific cell types, specific host cells, specific conditions or specific methods etc. as such, but may vary and numerous modifications and variations therein will be apparent to those skilled in the art. It is also to be understood that the terminology used herein is for the purpose of describing specific embodiments only and is not intended to be limiting.

[0600] The present invention also relates to isolated nucleic acids comprising a nucleic acid molecule selected from the group consisting of:
[0601] a) a nucleic acid molecule encoding the polypeptide shown in column 7 of Table II B;
[0602] b) a nucleic acid molecule shown in column 7 of Table I B;
[0603] c) a nucleic acid molecule, which, as a result of the degeneracy of the genetic code, can be derived from a polypeptide sequence depicted in column 5 or 7 of Table II and confers an increased GABA content as compared to a corresponding non-transformed wild type;
[0604] d) a nucleic acid molecule having at least 30% identity with the nucleic acid molecule sequence of a polynucleotide comprising the nucleic acid molecule shown in column 5 or 7 of Table I and confers an increased GABA content as compared to a corresponding non-transformed wild type;
[0605] e) a nucleic acid molecule encoding a polypeptide having at least 30% identity with the amino acid sequence of the polypeptide encoded by the nucleic acid molecule of (a) to (c) and having the activity represented by a nucleic acid molecule comprising a polynucleotide as depicted in column 5 of Table I and confers an increased GABA content as compared to a corresponding non-transformed wild type plant cell, a plant or a part thereof;
[0606] f) nucleic acid molecule which hybridizes with a nucleic acid molecule of (a) to (c) under stringent hybridization conditions and confers an increased GABA content as compared to a corresponding non-transformed wild type plant cell, a plant or a part thereof;
[0607] g) a nucleic acid molecule encoding a polypeptide which can be isolated with the aid of monoclonal or polyclonal antibodies made against a polypeptide encoded by one of the nucleic acid molecules of (a) to (e) and having the activity represented by the nucleic acid molecule comprising a polynucleotide as depicted in column 5 of Table I;
[0608] h) a nucleic acid molecule encoding a polypeptide comprising the consensus sequence or one or more polypeptide motifs as shown in column 7 of Table IV and preferably having the activity represented by a nucleic acid molecule comprising a polynucleotide as depicted in column 5 of Table II or IV;
[0609] h) a nucleic acid molecule encoding a polypeptide having the activity represented by a protein as depicted in column 5 of Table II and confers an increased GABA content as compared to a corresponding non-transformed wild type plant cell, a plant or a part thereof;
[0610] i) nucleic acid molecule which comprises a polynucleotide, which is obtained by amplifying a cDNA library or a genomic library using the primers in column 7 of Table III and preferably having the activity represented by a protein comprising a polypeptide as depicted in column 5 of Table II or IV;
[0611] and
[0612] j) a nucleic acid molecule which is obtainable by screening a suitable nucleic acid library under stringent hybridization conditions with a probe comprising a complementary sequence of a nucleic acid molecule of (a) or (b) or with a fragment thereof, having at least 15 nt, preferably 20 nt, 30 nt, 50 nt, 100 nt, 200 nt or 500 nt of a nucleic acid molecule complementary to a nucleic acid molecule sequence characterized in (a) to (e) and encoding a polypeptide having the activity represented by a protein comprising a polypeptide as depicted in column 5 of Table II;
   whereby the nucleic acid molecule according to (a) to (j) is at least in one or more nucleotides different from the sequence depicted in column 5 or 7 of Table I A and preferably which encodes a protein which differs at least in one or more amino acids from the protein sequences depicted in column 5 or 7 of Table II A.

[0613] In one embodiment the invention relates to homologs of the aforementioned sequences, which can be isolated advantageously from yeast, fungi, viruses, algae, bacteria, such as Acetobacter (subgen. Acetobacter) aceti; Acidithiobacillus ferrooxidans; Acinetobacter sp.; Actinobacillus sp; Aeromonas salmonicida; Agrobacterium tumefaciens; Aquifex aeolicus; Arcanobacterium pyogenes; Aster yellows phytoplasma; Bacillus sp.; Bifidobacterium sp.; Borrelia burgdorferi; Brevibacterium linens; Brucella melitensis; Buchnera sp.; Butyrivibrio fibrisolvens; Campylobacter jejuni; Caulobacter crescentus; Chlamydia sp.; Chlamydophila sp.; Chlorobium limicola; Citrobacter rodentium; Clostridium sp.; Comamonas testosteroni; Corynebacterium sp.; Coxiella burnetii; Deinococcus radiodurans; Dichelobacter nodosus; Edwardsiella ictaluri; Enterobacter sp.; Erysipelothrix rhusiopathiae; Escherichia coli; Flavobacterium sp.; Francisella tularensis; Frankia sp. Cpl1; Fusobacterium nucleatum; Geobacillus stearothermophilus; Gluconobacter oxydans; Haemophilus sp.; Helicobacter pylori; Klebsiella pneumoniae; Lactobacillus sp.; Lactococcus lactis; Listeria sp.; Mannheimia haemolytica; Mesorhizobium loti; Methylophaga thalassica; Microcystis aeruginosa; Microscilla sp. PRE1; Moraxella sp. TA144; Mycobacterium sp.; Mycoplasma sp.; Neisseria sp.; Nitrosomonas sp.; Nostoc sp. PCC 7120; Novosphingobium aromaticivorans; Oenococcus oeni; Pantoea citrea; Pasteurella multocida; Pediococcus pentosaceus; Phormidium foveolarum; Phytoplasma sp.; Plectonema boryanum; Prevotella ruminicola; Propionibacterium sp.; Proteus vulgaris; Pseudomonas sp.; Ralstonia sp.; Rhizobium sp.; Rhodococcus equi; Rhodothermus marinus; Rickettsia sp.; Riemerella anatipestifer; Ruminococcus flavefaciens; Salmonella sp.; Selenomonas ruminantium; Serratia entomophila; Shigella sp.; Sinorhizobium meliloti; Staphylococcus sp.; Streptococcus sp.; Streptomyces sp.; Synechococcus sp.; Synechocystis sp. PCC 6803; Thermotoga maritima; Treponema sp.; Ureaplasma urealyticum; Vibrio cholerae; Vibrio parahaemolyticus; Xylella fastidiosa; Yersinia sp.; Zymomonas mobilis, preferably Salmonella sp. or Escherichia coli or plants, preferably from yeasts such as from the genera Saccharomyces, Pichia, Candida, Hansenula, Torulopsis or Schizosaccharomyces or plants such as Arabidopsis thaliana, maize, wheat, rye, oat, triticale, rice, barley, soybean, peanut, cotton, borage, sunflower, linseed, primrose, rapeseed, canola and turnip rape, manihot, pepper, sunflower, tagetes, solanaceous plant such as potato, tobacco, eggplant and tomato, Vicia species, pea, alfalfa, bushy plants such as coffee, cacao, tea, Salix species, trees such as oil palm, coconut, perennial grass, such as ryegrass and fescue, and forage crops, such as alfalfa and clover and from spruce, pine or fir for example. More preferably homologs of aforementioned sequences can be isolated from Saccharomyces cerevisiae, E. coli or plants, preferably Brassica napus, Glycine max, Zea mays, cotton, or Oryza sativa.

[0614] The (GABA related) proteins of the present invention are preferably produced by recombinant DNA techniques. For example, a nucleic acid molecule encoding the protein is cloned into an expression vector, for example in to a binary vector, the expression vector is introduced into a host cell, for example the Arabidopsis thaliana wild type NASC N906 or any other plant cell as described in the examples see below, and the stress related protein is expressed in said host cell. Examples for binary vectors are pBIN19, pBI101, pBinAR, pGPTV, pCAMBIA, pBIB-HYG, pBecks, pGreen or pPZP (Hajukiewicz, P. et al., 1994, Plant Mol. Biol., 25: 989-994 and Hellens et al, Trends in Plant Science (2000) 5, 446-451.).

[0615] In one embodiment the (GABA related) protein of the present invention is preferably produced in an compartment of the cell, more preferably in the plastids. Ways of introducing nucleic acids into plastids and producing proteins in this compartment are know to the person skilled in the art have been also described in this application.

[0616] Advantageously, the nucleic acid sequences according to the invention or the gene construct together with at least one reporter gene are cloned into an expression cassette, which is introduced into the organism via a vector or directly into the genome. This reporter gene should allow easy detection via a growth, fluorescence, chemical, bioluminescence or resistance assay or via a photometric measurement. Examples of reporter genes which may be mentioned are antibiotic- or herbicide-resistance genes, hydrolase genes, fluorescence protein genes, bioluminescence genes, sugar or nucleotide metabolic genes or biosynthesis genes such as the Ura3 gene, the Ilv2 gene, the luciferase gene, the β-galactosidase gene, the gfp gene, the 2-desoxyglucose-6-phosphate phosphatase gene, the β-glucuronidase gene, β-lactamase gene, the neomycin phosphotransferase gene, the hygromycin phosphotransferase gene, a mutated acetohydroxyacid synthase (AHAS) gene, also known as acetolactate synthase (ALS) gene], a gene for a D-amino acid metabolizing enzmye or the BASTA (=gluphosinate-resistance) gene. These genes permit easy measurement and quantification of the transcription activity and hence of the expression of the genes. In this way genome positions may be identified which exhibit differing productivity.

[0617] In a preferred embodiment a nucleic acid construct, for example an expression cassette, comprises upstream, i.e. at the 5′ end of the encoding sequence, a promoter and downstream, i.e. at the 3′ end, a polyadenylation signal and optionally other regulatory elements which are operably linked to the intervening encoding sequence with one of the nucleic acids of SEQ ID NO as depicted in table I, column 5 and 7. By an operable linkage is meant the sequential arrangement of promoter, encoding sequence, terminator and optionally other regulatory elements in such a way that each of the regulatory elements can fulfill its function in the expression of the encoding sequence in due manner. The sequences preferred for operable linkage are targeting sequences for ensuring subcellular localization in plastids. However, targeting sequences for ensuring subcellular localization in the mitochondrium, in the endoplasmic reticulum (=ER), in the nucleus, in oil corpuscles or other compartments may also be employed as well as translation promoters such as the 5′ lead sequence in tobacco mosaic virus (Gallie et al., Nucl. Acids Res. 15 (1987), 8693-8711).

[0618] A nucleic acid construct, for example an expression cassette may, for example, contain a constitutive promoter or a tissue-specific promoter (preferably the USP or napin promoter) the gene to be expressed and the ER retention signal. For the ER retention signal the KDEL amino acid sequence (lysine, aspartic acid, glutamic acid, leucine) or the KKX amino acid sequence (lysine-lysine-X-stop, wherein X means every other known amino acid) is preferably employed.

[0619] For expression in a host organism, for example a plant, the expression cassette is advantageously inserted into a vector such as by way of example a plasmid, a phage or other DNA which allows optimal expression of the genes in the host organism. Examples of suitable plasmids are: in E. coli pLG338, pACYC184, pBR series such as e.g. pBR322, pUC series such as pUC18 or pUC19, M113 mp series, pKC30, pRep4, pHS1, pHS2, pPLc236, pMBL24, pLG200, pUR290, pIN-III¹¹³-B1, λgt11 or pBdCl; in Streptomyces pIJ101, pIJ364, pIJ702 or pIJ361; in Bacillus pUB110, pC194 or pBD214; in Corynebacterium pSA77 or pAJ667; in fungi pALS1, pIL2 or pBB116; other advantageous fungal vectors are described by Romanos, M. A. et al., [(1992) “Foreign gene expression in yeast: a review”, Yeast 8: 423-488] and by van den Hondel, C. A. M. J. J. et al. [(1991) “Heterologous gene expression in filamentous fungi” as well as in More Gene Manipulations in Fungi [J. W. Bennet & L. L. Lasure, eds., pp. 396-428: Academic Press: San Diego] and in “Gene transfer systems and vector development for filamentous fungi” [van den Hondel, C. A. M. J. J. & Punt, P. J. (1991) in: Applied Molecular Genetics of Fungi, Peberdy, J. F. et al., eds., pp. 1-28, Cambridge University Press: Cambridge]. Examples of advantageous yeast promoters are 2 μM, pAG-1, YEp6, YEp13 or pEMBLYe23. Examples of algal or plant promoters are pLGV23, pGHlac⁺, pBIN19, pAK2004, pVKH or pDH51 (see Schmidt, R. and Willmitzer, L., 1988). The vectors identified above or derivatives of the vectors identified above are a small selection of the possible plasmids. Further plasmids are well known to those skilled in the art and may be found, for example, in the book Cloning Vectors (Eds. Pouwels P. H. et al. Elsevier, Amsterdam-New York-Oxford, 1985, ISBN 0 444 904018). Suitable plant vectors are described inter alia in “Methods in Plant Molecular Biology and Biotechnology” (CRC Press), Ch. 6/7, pp. 71-119. Advantageous vectors are known as shuttle vectors or binary vectors which replicate in E. coli and Agrobacterium.

[0620] By vectors is meant with the exception of plasmids all other vectors known to those skilled in the art such as by way of example phages, viruses such as SV40, CMV, baculovirus, adenovirus, transposons, IS elements, phasmids, phagemids, cosmids, linear or circular DNA. These vectors can be replicated autonomously in the host organism or be chromosomally replicated, chromosomal replication being preferred.

[0621] In a further embodiment of the vector the expression cassette according to the invention may also advantageously be introduced into the organisms in the form of a linear DNA and be integrated into the genome of the host organism by way of heterologous or homologous recombination. This linear DNA may be composed of a linearized plasmid or only of the expression cassette as vector or the nucleic acid sequences according to the invention.

[0622] In a further advantageous embodiment the nucleic acid sequence according to the invention can also be introduced into an organism on its own.

[0623] If in addition to the nucleic acid sequence according to the invention further genes are to be introduced into the organism, all together with a reporter gene in a single vector or each single gene with a reporter gene in a vector in each case can be introduced into the organism, whereby the different vectors can be introduced simultaneously or successively.

[0624] The vector advantageously contains at least one copy of the nucleic acid sequences according to the invention and/or the expression cassette (=gene construct) according to the invention.

[0625] The invention further provides an isolated recombinant expression vector comprising a nucleic acid encoding a polypeptide as depicted in table II, column 5 or 7, wherein expression of the vector in a host cell results in increased tolerance to environmental stress as compared to a wild type variety of the host cell. As used herein, the term “vector” refers to a nucleic acid molecule capable of transporting another nucleic acid to which it has been linked. One type of vector is a “plasmid,” which refers to a circular double stranded DNA loop into which additional DNA segments can be ligated. Another type of vector is a viral vector, wherein additional DNA segments can be ligated into the viral genome. Certain vectors are capable of autonomous replication in a host cell into which they are introduced (e.g., bacterial vectors having a bacterial origin of replication and episomal mammalian vectors). Other vectors (e.g., non-episomal mammalian vectors) are integrated into the genome of a host cell or a organelle upon introduction into the host cell, and thereby are replicated along with the host or organelle genome. Moreover, certain vectors are capable of directing the expression of genes to which they are operatively linked. Such vectors are referred to herein as “expression vectors.” In general, expression vectors of utility in recombinant DNA techniques are often in the form of plasmids. In the present specification, “plasmid” and “vector” can be used interchangeably as the plasmid is the most commonly used form of vector. However, the invention is intended to include such other forms of expression vectors, such as viral vectors (e.g., replication defective retroviruses, adenoviruses, and adeno-associated viruses), which serve equivalent functions.

[0626] The recombinant expression vectors of the invention comprise a nucleic acid of the invention in a form suitable for expression of the nucleic acid in a host cell, which means that the recombinant expression vectors include one or more regulatory sequences, selected on the basis of the host cells to be used for expression, which is operatively linked to the nucleic acid sequence to be expressed. As used herein with respect to a recombinant expression vector, “operatively linked” is intended to mean that the nucleotide sequence of interest is linked to the regulatory sequence(s) in a manner which allows for expression of the nucleotide sequence (e.g., in an in vitro transcription/translation system or in a host cell when the vector is introduced into the host cell). The term “regulatory sequence” is intended to include promoters, enhancers, and other expression control elements (e.g., polyadenylation signals). Such regulatory sequences are described, for example, in Goeddel, Gene Expression Technology: Methods in Enzymology 185, Academic Press, San Diego, Calif. (1990) and Gruber and Crosby, in: Methods in Plant Molecular Biology and Biotechnology, eds. Glick and Thompson, Chapter 7, 89-108, CRC Press: Boca Raton, Fla., including the references therein. Regulatory sequences include those that direct constitutive expression of a nucleotide sequence in many types of host cells and those that direct expression of the nucleotide sequence only in certain host cells or under certain conditions. It will be appreciated by those skilled in the art that the design of the expression vector can depend on such factors as the choice of the host cell to be transformed, the level of expression of polypeptide desired, etc. The expression vectors of the invention can be introduced into host cells to thereby produce polypeptides or peptides, including fusion polypeptides or peptides, encoded by nucleic acids as described herein (e.g., GABA-related Proteins, mutant forms of GABA-related Proteins, fusion polypeptides, etc.).

[0627] The recombinant expression vectors of the invention can be designed for expression of the polypeptide of the invention in plant cells. For example, genes coding for GABA-related Proteins can be expressed in plant cells (See Schmidt, R. and Willmitzer, L., 1988, High efficiency Agrobacterium tumefaciens-mediated transformation of Arabidopsis thaliana leaf and cotyledon explants, Plant Cell Rep. 583-586; Plant Molecular Biology and Biotechnology, C Press, Boca Raton, Fla., chapter 6/7, S. 71-119 (1993); F. F. White, B. Jenes et al., Techniques for Gene Transfer, in: Transgenic Plants, Vol. 1, Engineering and Utilization, eds. Kung and R. Wu, 128-43, Academic Press: 1993; Potrykus, 1991, Annu. Rev. Plant Physiol. Plant Molec. Biol. 42:205-225 and references cited therein). Suitable host cells are discussed further in Goeddel, Gene Expression Technology: Methods in Enzymology 185, Academic Press: San Diego, Calif. (1990). Alternatively, the recombinant expression vector can be transcribed and translated in vitro, for example using T7 promoter regulatory sequences and 17 polymerase.

[0628] Expression of polypeptides in prokaryotes is most often carried out with vectors containing constitutive or inducible promoters directing the expression of either fusion or non-fusion polypeptides. Fusion vectors add a number of amino acids to a polypeptide encoded therein, usually to the amino terminus of the recombinant polypeptide but also to the C-terminus or fused within suitable regions in the polypeptides. Such fusion vectors typically serve three purposes: 1) to increase expression of a recombinant polypeptide; 2) to increase the solubility of a recombinant polypeptide; and 3) to aid in the purification of a recombinant polypeptide by acting as a ligand in affinity purification. Often, in fusion expression vectors, a proteolytic cleavage site is introduced at the junction of the fusion moiety and the recombinant polypeptide to enable separation of the recombinant polypeptide from the fusion moiety subsequent to purification of the fusion polypeptide. Such enzymes, and their cognate recognition sequences, include Factor Xa, thrombin, and enterokinase.

[0629] By way of example the plant expression cassette can be installed in the pRT transformation vector ((a) Toepfer et al., 1993, Methods Enzymol., 217: 66-78; (b) Toepfer et al. 1987, Nucl. Acids. Res. 15: 5890 ff.).

[0630] Alternatively, a recombinant vector (=expression vector) can also be transcribed and translated in vitro, e.g. by using the T7 promoter and the T7 RNA polymerase.

[0631] Expression vectors employed in prokaryotes frequently make use of inducible systems with and without fusion proteins or fusion oligopeptides, wherein these fusions can ensue in both N-terminal and C-terminal manner or in other useful domains of a protein. Such fusion vectors usually have the following purposes: i.) to increase the RNA expression rate; ii.) to increase the achievable protein synthesis rate; iii.) to increase the solubility of the protein; iv.) or to simplify purification by means of a binding sequence usable for affinity chromatography. Proteolytic cleavage points are also frequently introduced via fusion proteins, which allow cleavage of a portion of the fusion protein and purification. Such recognition sequences for proteases are recognized, e.g. factor Xa, thrombin and enterokinase.

[0632] Typical advantageous fusion and expression vectors are pGEX [Pharmacia Biotech Inc; Smith, D. B. and Johnson, K. S. (1988) Gene 67: 31-40], pMAL (New England Biolabs, Beverly, Mass.) and pRIT5 (Pharmacia, Piscataway, N.J.) which contains glutathione S-transferase (GST), maltose binding protein or protein A.

[0633] In one embodiment, the coding sequence of the polypeptide of the invention is cloned into a pGEX expression vector to create a vector encoding a fusion polypeptide comprising, from the N-terminus to the C-terminus, GST-thrombin cleavage site-X polypeptide. The fusion polypeptide can be purified by affinity chromatography using glutathione-agarose resin. Recombinant GABA-related Proteins unfused to GST can be recovered by cleavage of the fusion polypeptide with thrombin.

[0634] Other examples of E. coli expression vectors are pTrc [Amann et al., (1988) Gene 69:301-315] and pET vectors [Studier et al., Gene Expression Technology: Methods in Enzymology 185, Academic Press, San Diego, Calif. (1990) 60-89; Stratagene, Amsterdam, The Netherlands].

[0635] Target gene expression from the pTrc vector relies on host RNA polymerase transcription from a hybrid trp-lac fusion promoter. Target gene expression from the pET 11d vector relies on transcription from a T7 gn10-lac fusion promoter mediated by a co-expressed viral RNA polymerase (T7 gn1). This viral polymerase is supplied by host strains BL21(DE3) or HMS174(DE3) from a resident I prophage harboring a T7 gn1 gene under the transcriptional control of the lacUV 5 promoter.

[0636] In a preferred embodiment of the present invention, the proteins of the invention which enhance the GABA content in a cell, meaning the GABA-related Proteins are expressed in plants and plants cells such as unicellular plant cells (e.g. algae) (See Falciatore et al., 1999, Marine Biotechnology 1(3):239-251 and references therein) and plant cells from higher plants (e.g., the spermatophytes, such as crop plants). A nucleic acid molecule coding for GABA-related Proteins as depicted in table II, column 5 or 7 may be “introduced” into a plant cell by any means, including transfection, transformation or transduction, electroporation, particle bombardment, agroinfection, and the like. One transformation method known to those of skill in the art is the dipping of a flowering plant into an Agrobacteria solution, wherein the Agrobacteria contains the nucleic acid of the invention, followed by breeding of the transformed gametes.

[0637] Other suitable methods for transforming or transfecting host cells including plant cells can be found in Sambrook, et al., Molecular Cloning: A Laboratory Manual. 2^{nd}, ed., Cold Spring Harbor Laboratory, Cold Spring Harbor Laboratory Press, Cold Spring Harbor, N.Y., 1989, and other laboratory manuals such as Methods in Molecular Biology, 1995, Vol. 44, Agrobacterium protocols, ed: Gartland and Davey, Humana Press, Totowa, N.J. As biotic and abiotic stress tolerance is a general trait wished to be inherited into a wide variety of plants like maize, wheat, rye, oat, triticale, rice, barley, soybean, peanut, cotton, rapeseed and canola, manihot, pepper, sunflower and tagetes, solanaceous plants like potato, tobacco, eggplant, and tomato, Vicia species, pea, alfalfa, bushy plants (coffee, cacao, tea), Salix species, trees (oil palm, coconut), perennial grasses, and forage crops, these crop plants are also preferred target plants for a genetic engineering as one further embodiment of the present invention. Forage crops include, but are not limited to, Wheatgrass, Canarygrass, Bromegrass, Wildrye Grass, Bluegrass, Orchardgrass, Alfalfa, Salfoin, Birdsfoot Trefoil, Alsike Clover, Red Clover, and Sweet Clover.

[0638] In one embodiment of the present invention, transfection of a nucleic acid molecule coding for GABA-related Proteins as depicted in table II, column 5 or 7 into a plant is achieved by Agrobacterium mediated gene transfer. Agrobacterium mediated plant transformation can be performed using for example the GV3101(pMP90) (Koncz and Schell, 1986, Mol. Gen. Genet. 204:383-396) or LBA4404 (Clontech) Agrobacterium tumefaciens strain. Transformation can be performed by standard transformation and regeneration techniques (Deblaere et al., 1994, Nucl. Acids Res. 13:4777-4788; Gelvin, Stanton B. and Schilperoort, Robert A, Plant Molecular Biology Manual, 2^{nd} Ed.—Dordrecht: Kluwer Academic Publ., 1995.—in Sect., Ringbuc Zentrale Signatur: BT11-P ISBN 0-7923-2731-4; Glick, Bernard R.; Thompson, John E., Methods in Plant Molecular Biology and Biotechnology, Boca Raton: CRC Press, 1993 360 S., ISBN 0-8493-5164-2). For example, rapeseed can be transformed via cotyledon or hypocotyl transformation (Moloney et al., 1989, Plant cell Report 8:238-242; De Block et al., 1989, Plant Physiol. 91:694-701). Use of antibiotics for Agrobacterium and plant selection depends on the binary vector and the Agrobacterium strain used for transformation. Rapeseed selection is normally performed using kanamycin as selectable plant marker. Agrobacterium mediated gene transfer to flax can be performed using, for example, a technique described by Mlynarova et al., 1994, Plant Cell Report 13:282-285. Additionally, transformation of soybean can be performed using for example a technique described in European Patent No. 0424 047, U.S. Pat. No. 5,322,783, European Patent No. 0397 687, U.S. Pat. No. 5,376,543, or U.S. Pat. No. 5,169,770. Transformation of maize can be achieved by particle bombardment, polyethylene glycol mediated DNA uptake or via the silicon carbide fiber technique. (See, for example, Freeling and Walbot “The maize handbook” Springer Verlag: New York (1993) ISBN 3-540-97826-7). A specific example of maize transformation is found in U.S. Pat. No. 5,990,387, and a specific example of wheat transformation can be found in PCT Application No. WO 93/07256.

[0639] According to the present invention, the introduced nucleic acid molecule coding for GABA-related Proteins as depicted in table II, column 5 or 7 may be maintained in the plant cell stably if it is incorporated into a non-chromosomal autonomous replicon or integrated into the plant chromosomes or organelle genome. Alternatively, the introduced gene coding or GABA-related Proteins may be present on an extra-chromosomal non-replicating vector and be transiently expressed or transiently active.

[0640] In one embodiment, a homologous recombinant microorganism can be created wherein the gene coding for GABA-related Proteins is integrated into a chromosome, a vector is prepared which contains at least a portion of a nucleic acid molecule coding for GABA-related Proteins as depicted in table II, column 5 or 7 into which a deletion, addition, or substitution has been introduced to thereby alter, e.g., functionally disrupt, the GABA-related Proteins gene. Preferably, the gene encoding GABA-related Proteins is a yeast or a E. coli. or a Physcomitrella patens, or a Synechocystis or a Thermus thermophilus or a Brassica napus gene, but it can be a homolog from a related organism or plant or even from a mammalian or insect source. The vector can be designed such that, upon homologous recombination, the endogenous nucleic acid molecule coding for GABA-related Proteins as depicted in table II, column 5 or 7 is mutated or otherwise altered but still encodes a functional polypeptide (e.g., the upstream regulatory region can be altered to thereby alter the expression of the endogenous GABA-related Proteins). In a preferred embodiment the biological activity of the protein of the invention is increased upon homologous recombination. To create a point mutation via homologous recombination, DNA-RNA hybrids can be used in a technique known as chimeraplasty (Cole-Strauss et al., 1999, Nucleic Acids Research 27(5):1323-1330 and Kmiec, 1999 Gene therapy American Scientist. 87(3):240-247). Homologous recombination procedures in Physcomitrella patens are also well known in the art and are contemplated for use herein.

[0641] Whereas in the homologous recombination vector, the altered portion of the nucleic acid molecule coding for GABA-related Proteins as depicted in table II, column 5 or 7 is flanked at its 5′ and 3′ ends by an additional nucleic acid molecule of the gene encoding GABA-related Proteins to allow for homologous recombination to occur between the exogenous GABA-related Protein gene carried by the vector and an endogenous gene coding for GABA-related Proteins, in a microorganism or plant. The additional flanking nucleic acid molecule encoding GABA-related Proteins is of sufficient length for successful homologous recombination with the endogenous gene. Typically, several hundreds of base pairs up to kilobases of flanking DNA (both at the 5′ and 3′ ends) are included in the vector. See, e.g., Thomas, K. R., and Capecchi, M. R., 1987, Cell 51:503 for a description of homologous recombination vectors or Strepp et al., 1998, PNAS, 95 (8):4368-4373 for cDNA based recombination in Physcomitrella patens). The vector is introduced into a microorganism or plant cell (e.g., via polyethylene glycol mediated DNA), and cells in which the introduced gene encoding GABA-related Proteins has homologously recombined with the endogenous gene coding for GABA-related Proteins are selected using art-known techniques.

[0642] Whether present in an extra-chromosomal non-replicating vector or a vector that is integrated into a chromosome, the nucleic acid molecule coding for GABA-related Proteins as depicted in table II, column 5 or 7 preferably resides in a plant expression cassette. A plant expression cassette preferably contains regulatory sequences capable of driving gene expression in plant cells that are operatively linked so that each sequence can fulfill its function, for example, termination of transcription by polyadenylation signals. Preferred polyadenylation signals are those originating from Agrobacterium tumefaciens t-DNA such as the gene 3 known as octopine synthase of the Ti-plasmid pTiACH5 (Gielen et al., 1984, EMBO J. 3:835) or functional equivalents thereof but also all other terminators functionally active in plants are suitable. As plant gene expression is very often not limited on transcriptional levels, a plant expression cassette preferably contains other operatively linked sequences like translational enhancers such as the overdrive-sequence containing the 5′-untranslated leader sequence from tobacco mosaic virus enhancing the polypeptide per RNA ratio (Gallie et al., 1987, Nucl. Acids Research 15:8693-8711). Examples of plant expression vectors include those detailed in: Becker, D. et al., 1992, New plant binary vectors with selectable markers located proximal to the left border, Plant Mol. Biol. 20: 1195-1197; and Bevan, M. W., 1984, Binary Agrobacterium vectors for plant transformation, Nucl. Acid. Res. 12:8711-8721; and Vectors for Gene Transfer in Higher Plants; in: Transgenic Plants, Vol. 1, Engineering and Utilization, eds.: Kung and R. Wu, Academic Press, 1993, S. 15-38.

[0643] “Transformation” is defined herein as a process for introducing heterologous DNA into a plant cell, plant tissue, or plant. It may occur under natural or artificial conditions using various methods well known in the art. Transformation may rely on any known method for the insertion of foreign nucleic acid sequences into aprokaryotic or eukaryotic host cell. The method is selected based on the host cell being transformed and may include, but is not limited to, viral infection, electroporation, lipofection, and particle bombardment. Such “transformed” cells include stably transformed cells in which the inserted DNA is capable of replication either as an autonomously replicating plasmid or as part of the host chromosome. They also include cells which transiently express the inserted DNA or RNA for limited periods of time. Transformed plant cells, plant tissue, or plants are understood to encompass not only the end product of a transformation process, but also transgenic progeny thereof.

[0644] The terms “transformed,” “transgenic,” and “recombinant” refer to a host organism such as a bacterium or a plant into which a heterologous nucleic acid molecule has been introduced. The nucleic acid molecule can be stably integrated into the genome of the host or the nucleic acid molecule can also be present as an extrachromosomal molecule. Such an extrachromosomal molecule can be auto-replicating. Transformed cells, tissues, or plants are understood to encompass not only the end product of a transformation process, but also transgenic progeny thereof. A “non-transformed,” “non-transgenic,” or “non-recombinant” host refers to a wild-type organism, e.g., a bacterium or plant, which does not contain the heterologous nucleic acid molecule.

[0645] A “transgenic plant”, as used herein, refers to a plant which contains a foreign nucleotide sequence inserted into either its nuclear genome or organellar genome. It encompasses further the offspring generations i.e. the T1-, T2- and consecutively generations or BC1-, BC2- and consecutively generation as well as crossbreeds thereof with non-transgenic or other transgenic plants.

[0646] The host organism (=transgenic organism) advantageously contains at least one copy of the nucleic acid according to the invention and/or of the nucleic acid construct according to the invention.

[0647] In principle all plants can be used as host organism. Preferred transgenic plants are, for example, selected from the families Aceraceae, Anacardiaceae, Apiaceae, Asteraceae, Brassicaceae, Cactaceae, Cucurbitaceae, Euphorbiaceae, Fabaceae, Malvaceae, Nymphaeaceae, Papaveraceae, Rosaceae, Salicaceae, Solanaceae, Arecaceae, Bromeliaceae, Cyperaceae, lridaceae, Liliaceae, Orchidaceae, Gentianaceae, Labiaceae, Magnoliaceae, Ranunculaceae, Carifolaceae, Rubiaceae, Scrophulariaceae, Caryophyllaceae, Ericaceae, Polygonaceae, Violaceae, Juncaceae or Poaceae and preferably from a plant selected from the group of the families Apiaceae, Asteraceae, Brassicaceae, Cucurbitaceae, Fabaceae, Papaveraceae, Rosaceae, Solanaceae, Liliaceae or Poaceae. Preferred are crop plants such as plants advantageously selected from the group of the genus peanut, oilseed rape, canola, sunflower, safflower, olive, sesame, hazelnut, almond, avocado, bay, pumpkin/squash, linseed, soya, pistachio, borage, maize, wheat, rye, oats, sorghum and millet, triticale, rice, barley, cassava, potato, sugarbeet, egg plant, alfalfa, and perennial grasses and forage plants, oil palm, vegetables (brassicas, root vegetables, tuber vegetables, pod vegetables, fruiting vegetables, onion vegetables, leafy vegetables and stem vegetables), buckwheat, Jerusalem artichoke, broad bean, vetches, lentil, dwarf bean, lupin, clover and Lucerne for mentioning only some of them.

[0648] In one embodiment of the invention transgenic plants are selected from the group comprising corn, soy, oil seed rape (including canola and winter oil seed reap), cotton, wheat and rice.

[0649] In one preferred embodiment, the host plant is selected from the families Aceraceae, Anacardiaceae, Apiaceae, Asteraceae, Brassicaceae, Cactaceae, Cucurbitaceae, Euphorbiaceae, Fabaceae, Malvaceae, Nymphaeaceae, Papaveraceae, Rosaceae, Salicaceae, Solanaceae, Arecaceae, Bromeliaceae, Cyperaceae, Iridaceae, Liliaceae, Orchidaceae, Gentianaceae, Labiaceae, Magnoliaceae, Ranunculaceae, Carifolaceae, Rubiaceae, Scrophulariaceae, Caryophyllaceae, Ericaceae, Polygonaceae, Violaceae, Juncaceae or Poaceae and preferably from a plant selected from the group of the families Apiaceae, Asteraceae, Brassicaceae, Cucurbitaceae, Fabaceae, Papaveraceae, Rosaceae, Solanaceae, Liliaceae or Poaceae. Preferred are crop plants and in particular plants mentioned herein above as host plants such as the families and genera mentioned above for example preferred the species Anacardium occidentale, Calendula officinalis, Carthamus tinctorius, Cichorium intybus, Cynara scolymus, Helianthus annus, Tagetes lucida, Tagetes erecta, Tagetes tenuifolia; Daucus carota; Corylus avellana, Corylus colurna, Borago officinalis; Brassica napus, Brassica rapa ssp., Sinapis arvensis Brassica juncea, Brassica juncea var. juncea, Brassica juncea var. crispifolia, Brassica juncea var. foliosa, Brassica nigra, Brassica sinapioides, Melanosinapis communis, Brassica oleracea, Arabidopsis thaliana, Anana comosus, Ananas ananas, Bromelia comosa, Carica papaya, Cannabis sative, Ipomoea batatus, Ipomoea pandurata, Convolvulus batatas, Convolvulus tiliaceus, Ipomoea fastigiata, Ipomoea tiliacea, Ipomoea triloba, Convolvulus panduratus, Beta vulgaris, Beta vulgaris var. altissima, Beta vulgaris var. vulgaris, Beta maritima, Beta vulgaris var. perennis, Beta vulgaris var. conditiva, Beta vulgaris var. esculenta, Cucurbita maxima, Cucurbita mixta, Cucurbita pepo, Cucurbita moschata, Olea europaea, Manihot utilissima, Janipha manihot, Jatropha manihot., Manihot aipil, Manihot dulcis, Manihot manihot, Manihot melanobasis, Manihot esculenta, Ricinus communis, Pisum sativum, Pisum arvense, Pisum humile, Medicago sativa, Medicago falcata, Medicago varia, Glycine max Dolichos soja, Glycine gracilis, Glycine hispida, Phaseolus max, Sofa hispida, Soja max, Cocos nucifera, Pelargonium grossularioides, Oleum cocoas, Laurus nobilis, Persea americana, Arachis hypogaea, Linum usitatissimum, Linum humile, Linum austriacum, Linum bienne, Linum angustifolium, Linum catharticum, Linum flavum, Linum grandiflorum, Adenolinum grandiflorum, Linum lewisii, Linum narbonense, Linum perenne, Linum perenne var. lewisii, Linum pratense, Linum trigynum, Punica granatum, Gossypium hirsutum, Gossypium arboreum, Gossypium barbadense, Gossypium herbaceum, Gossypium thurberi, Musa nana, Musa acuminata, Musa paradisiaca, Musa spp., Elaeis guineensis, Papaver orientale, Papaver rhoeas, Papaver dubium, Sesamum indicum, Piper aduncum, Piper amalago, Piper angustifolium, Piper auritum, Piper betel, Piper cubeba, Piper longum, Piper nigrum, Piper retrofractum, Artanthe adunca, Artanthe elongata, Peperomia elongate, Piper elongatum, Steffensia elongata, Hordeum vulgare, Hordeum jubatum, Hordeum murinum, Hordeum secalinum, Hordeum distichon Hordeum aegiceras, Hordeum hexastichon., Hordeum hexastichum, Hordeum irregulare, Hordeum sativum, Hordeum secalinum, Avena sativa, Avena fatua, Avena byzantina, Avena fatua var. sativa, Avena hybrida, Sorghum bicolor, Sorghum halepense, Sorghum saccharatum, Sorghum vulgare, Andropogon drummondii, Holcus bicolor, Holcus sorghum, Sorghum aethiopicum, Sorghum arundinaceum, Sorghum caffrorum, Sorghum cernuum, Sorghum dochna, Sorghum drummondii, Sorghum durra, Sorghum guineense, Sorghum lanceolatum, Sorghum nervosum, Sorghum saccharatum, Sorghum subglabrescens, Sorghum verticilliflorum, Sorghum vulgare, Holcus halepensis, Sorghum miliaceum millet, Panicum militaceum, Zea mays, Triticum aestivum, Triticum durum, Triticum turgidum, Triticum hybernum, Triticum macha, Triticum sativum or Triticum vulgare, Cofea spp., Coffea arabica, Coffea canephora, Coffea liberica, Capsicum annuum, Capsicum annuum var. glabriusculum, Capsicum frutescens, Capsicum annuum, Nicotiana tabacum, Solanum tuberosum, Solanum melongena, Lycopersicon esculentum, Lycopersicon lycopersicum, Lycopersicon pyriforme, Solanum integrifolium, Solanum lycopersicum Theobroma cacao or Camellia sinensis.

[0650] Anacardiaceae such as the genera Pistacia, Mangifera, Anacardium e.g. the species Pistacia vera [pistachios, Pistazie], Mangifer indica [Mango] or Anacardium occidentale [Cashew]; Asteraceae such as the genera Calendula, Carthamus, Centaurea, Cichorium, Cynara, Helianthus, Lactuca, Locusta, Tagetes, Valeriana e.g. the species Calendula officinalis [Marigold], Carthamus tinctorius [safflower], Centaurea cyanus [cornflower], Cichorium intybus [blue daisy], Cynara scolymus [Artichoke], Helianthus annus [sunflower], Lactuca sativa, Lactuca crispa, Lactuca esculenta, Lactuca scariola L. ssp. sativa, Lactuca scariola L. var. integrata, Lactuca scariola L. var. integrifolia, Lactuca sativa subsp. romana, Locusta communis, Valeriana locusta [lettuce], Tagetes lucida, Tagetes erecta or Tagetes tenuifolia [Marigold]; Apiaceae such as the genera Daucus e.g. the species Daucus carota [carrot]; Betulaceae such as the genera Corylus e.g. the species Corylus avellana or Corylus colurna [hazelnut]; Boraginaceae such as the genera Borago e.g. the species Borago officinalis [borage]; Brassicaceae such as the genera Brassica, Melanosinapis, Sinapis, Arabadopsis e.g. the species Brassica napus, Brassica rapa ssp. [canola, oilseed rape, turnip rape], Sinapis arvensis Brassica juncea, Brassica juncea var. juncea, Brassica juncea var. crispifolia, Brassica juncea var. foliosa, Brassica nigra, Brassica sinapioides, Melanosinapis communis [mustard], Brassica oleracea [fodder beet] or Arabidopsis thaliana; Bromeliaceae such as the genera Anana, Bromelia e.g. the species Anana comosus, Ananas ananas or Bromelia comosa [pineapple]; Caricaceae such as the genera Carica e.g. the species Carica papaya [papaya]; Cannabaceae such as the genera Cannabis e.g. the species Canna-bis sative [hemp], Convolvulaceae such as the genera Ipomea, Convolvulus e.g. the species Ipomoea batatus, Ipomoea pandurata, Convolvulus batatas, Convolvulus tiliaceus, Ipomoea fastigiata, Ipomoea tiliacea, Ipomoea triloba or Convolvulus panduratus [sweet potato, Man of the Earth, wild potato], Chenopodiaceae such as the genera Beta, i.e. the species Beta vulgaris, Beta vulgaris var. altissima, Beta vulgaris var. Vulgaris, Beta maritima, Beta vulgaris var. perennis, Beta vulgaris var. conditiva or Beta vulgaris var. esculenta [sugar beet]; Cucurbitaceae such as the genera Cucubita e.g. the species Cucurbita maxima, Cucurbita mixta, Cucurbita pepo or Cucurbita moschata [pumpkin, squash]; Elaeagnaceae such as the genera Elaeagnus e.g. the species Olea europaea [olive]; Ericaceae such as the genera Kalmia e.g. the species Kalmia latifolia, Kalmia angustifolia, Kalmia microphylla, Kalmia polifolia, Kalmia occidentalis, Cistus chamaerhodendros or Kalmia lucida [American laurel, broad-leafed laurel, calico bush, spoon wood, sheep laurel, alpine laurel, bog laurel, western bog-laurel, swamp-laurel]; Euphorbiaceae such as the genera Manihot, Janipha, Jatropha, Ricinus e.g. the species Manihot utilissima, Janipha manihot, Jatropha manihot., Manihot aipil, Manihot dulcis, Manihot manihot, Manihot melanobasis, Manihot esculenta [manihot, arrowroot, tapioca, cassava] or Ricinus communis [castor bean, Castor Oil Bush, Castor Oil Plant, Palma Christi, Wonder Tree]; Fabaceae such as the genera Pisum, Albizia, Cathormion, Feuillea, Inga, Pithecolobium, Acacia, Mimosa, Medicajo, Glycine, Dolichos, Phaseolus, Soja e.g. the species Pisum sativum, Pisum arvense, Pisum humile [pea], Albizia berteriana, Albizia julibrissin, Albizia lebbeck, Acacia berteriana, Acacia littoralis, Albizia berteriana, Albizzia berteriana, Cathormion berteriana, Feuillea berteriana, Inga fragrans, Pithecellobium berterianum, Pithecellobium fragrans, Pithecolobium berterianum, Pseudalbizzia berteriana, Acacia julibrissin, Acacia nemu, Albizia nemu, Feuilleea julibrissin, Mimosa julibrissin, Mimosa speciosa, Sericanrda julibrissin, Acacia lebbeck, Acacia macrophylla, Albizia lebbek, Feuilleea lebbeck, Mimosa lebbeck, Mimosa speciosa [bastard logwood, silk tree, East Indian Walnut], Medicago sativa, Medicago falcata, Medicago varia [alfalfa] Glycine max Dolichos soja, Glycine gracilis, Glycine hispida, Phaseolus max, Soja hispida or Soja max [soybean]; Geraniaceae such as the genera Pelargonium, Cocos, Oleum e.g. the species Cocos nucifera, Pelargonium grossularioides or Oleum cocois [coconut]; Gramineae such as the genera Saccharum e.g. the species Saccharum officinarum; Juglandaceae such as the genera Juglans, Wallia e.g. the species Juglans regia, Juglans ailanthifolia, Juglans sieboldiana, Juglans cinerea, Wallia cinerea, Juglans bixbyi, Juglans californica, Juglans hindsii, intermedia, Juglans jamaicensis, Juglans major, Juglans microcarpa, Juglans nigra or Wallia nigra [walnut, black walnut, common walnut, persian walnut, white walnut, butternut, black walnut]; Lauraceae such as the genera Persea, Laurus e.g. the species laurel Laurus nobilis [bay, laurel, bay laurel, sweet bay], Persea americana Persea americana, Persea gratissima or Persea persea [avocado]; Leguminosae such as the genera Arachis e.g. the species Arachis hypogaea [peanut]; Linaceae such as the genera Linum, Adenolinum e.g. the species Linum usitatissimum, Linum humile, Linum austriacum, Linum bienne, Linum angustifolium, Linum catharticum, Linum flavum, Linum grandiflorum, Adenolinum grandiflorum, Linum lewisii, Linum narbonense, Linum perenne, Linum perenne var. lewisii, Linum pratense or Linum trigynum [flax, linseed]; Lythrarieae such as the genera Punica e.g. the species Punica granatum [pomegranate]; Malvaceae such as the genera Gossypium e.g. the species Gossypium hirsutum, Gossypium arboreum, Gossypium barbadense, Gossypium herbaceum or Gossypium thurberi [cotton]; Musaceae such as the genera Musa e.g. the species Musa nana, Musa acuminata, Musa paradisiaca, Musa spp. [banana]; Onagraceae such as the genera Camissonia, Oenothera e.g. the species Oenothera biennis or Camissonia brevipes [primrose, evening primrose]; Palmae such as the genera Elacis e.g. the species Elaeis guineensis [oil plam]; Papaveraceae such as the genera Papaver e.g. the species Papaver orientale, Papaver rhoeas, Papaver dubium [poppy, oriental poppy, corn poppy, field poppy, shirley poppies, field poppy, long-headed poppy, longpod poppy]; Pedaliaceae such as the genera Sesamum e.g. the species Sesamum indicum [sesame]; Piperaceae such as the genera Piper, Artanthe, Peperomia, Steffensia e.g. the species Piper aduncum, Piper amalago, Piper angustifolium, Piper auritum, Piper betel, Piper cubeba, Piper longum, Piper nigrum, Piper retrofractum, Artanthe adunca, Artanthe elongata, Peperomia elongata, Piper elongatum, Steffensia elongata. [Cayenne pepper, wild pepper]; Poaceae such as the genera Hordeum, Secale, Avena, Sorghum, Andropogon, Holcus, Panicum, Oryza, Zea, Triticum e.g. the species Hordeum vulgare, Hordeum jubatum, Hordeum murinum, Hordeum secalinum, Hordeum distichon Hordeum aegiceras, Hordeum hexastichon., Hordeum hexastichum, Hordeum irregulare, Hordeum sativum, Hordeum secalinum [barley, pearl barley, foxtail barley, wall barley, meadow barley], Secale cereale [rye], Avena sativa, Avena fatua, Avena byzantina, Avena fatua var. sativa, Avena hybrida [oat], Sorghum bicolor, Sorghum halepense, Sorghum saccharatum, Sorghum vulgare, Andropogon drummondii, Holcus bicolor, Holcus sorghum, Sorghum aethiopicum, Sorghum arundinaceum, Sorghum caffrorum, Sorghum cernuum, Sorghum dochna, Sorghum drummondii, Sorghum durra, Sorghum guineense, Sorghum lanceolatum, Sorghum nervosum, Sorghum saccharatum, Sorghum subglabrescens, Sorghum verticilliflorum, Sorghum vulgare, Holcus halepensis, Sorghum miliaceum millet, Panicum militaceum [Sorghum, millet], Oryza sativa, Oryza latifolia [rice], Zea mays [corn, maize] Triticum aestivum, Triticum durum, Triticum turgidum, Triticum hybernum, Triticum macha, Triticum sativum or Triticum vulgare [wheat, bread wheat, common wheat], Proteaceae such as the genera Macadamia e.g. the species Macadamia intergrifolia [macadamia]; Rubiaceae such as the genera Coffea e.g. the species Cofea spp., Coffea arabica, Coffea canephora or Coffea liberica [coffee]; Scrophulariaceae such as the genera Verbascum e.g. the species Verbascum blattaria, Verbascum chaixii, Verbascum densiflorum, Verbascum lagurus, Verbascum longifolium, Verbascum lychnitis, Verbascum nigrum, Verbascum olympicum, Verbascum phlomoides, Verbascum phoenicum, Verbascum pulverulentum or Verbascum thapsus [mullein, white moth mullein, nettle-leaved mullein, dense-flowered mullein, silver mullein, long-leaved mullein, white mullein, dark mullein, greek mullein, orange mullein, purple mullein, hoary mullein, great mullein]; Solanaceae such as the genera Capsicum, Nicotiana, Solanum, Lycopersicon e.g. the species Capsicum annuum, Capsicum annuum var. glabriusculum, Capsicum frutescens [pepper], Capsicum annuum [paprika], Nicotiana tabacum, Nicotiana alata, Nicotiana attenuata, Nicotiana glauca, Nicotiana langsdorffii, Nicotiana obtusifolia, Nicotiana quadrivalvis, Nicotiana repanda, Nicotiana rustica, Nicotiana sylvestris [tobacco], Solanum tuberosum [potato], Solanum melongena [egg-plant] (Lycopersicon esculentum, Lycopersicon lycopersicum., Lycopersicon pyriforme, Solanum integrifolium or Solanum lycopersicum [tomato]; Sterculiaceae such as the genera Theobroma e.g. the species Theobroma cacao [cacao]; Theaceae such as the genera Camellia e.g. the species Camellia sinensis) [tea].

[0651] The introduction of the nucleic acids according to the invention, the expression cassette or the vector into organisms, plants for example, can in principle be done by all of the methods known to those skilled in the art. The introduction of the nucleic acid sequences gives rise to recombinant or transgenic organisms.

[0652] Unless otherwise specified, the terms “polynucleotides”, “nucleic acid” and “nucleic acid molecule” as used herein are interchangeably. Unless otherwise specified, the terms “peptide”, “polypeptide” and “protein” are interchangeably in the present context. The term “sequence” may relate to polynucleotides, nucleic acids, nucleic acid molecules, peptides, polypeptides and proteins, depending on the context in which the term “sequence” is used. The terms “gene(s)”, “polynucleotide”, “nucleic acid sequence”, “nucleotide sequence”, or “nucleic acid molecule(s)” as used herein refers to a polymeric form of nucleotides of any length, either ribonucleotides or deoxyribonucleotides. The terms refer only to the primary structure of the molecule.

[0653] Thus, the terms “gene(s)”, “polynucleotide”, “nucleic acid sequence”, “nucleotide sequence”, or “nucleic acid molecule(s)” as used herein include double- and single-stranded DNA and RNA. They also include known types of modifications, for example, methylation, “caps”, substitutions of one or more of the naturally occurring nucleotides with an analog. Preferably, the DNA or RNA sequence of the invention comprises a coding sequence encoding the herein defined polypeptide.

[0654] A “coding sequence” is a nucleotide sequence, which is transcribed into mRNA and/or translated into a polypeptide when placed under the control of appropriate regulatory sequences. The boundaries of the coding sequence are determined by a translation start codon at the 5′-terminus and a translation stop codon at the 3′-terminus. A coding sequence can include, but is not limited to mRNA, cDNA, recombinant nucleotide sequences or genomic DNA, while introns may be present as well under certain circumstances.

[0655] The transfer of foreign genes into the genome of a plant is called transformation. In doing this the methods described for the transformation and regeneration of plants from plant tissues or plant cells are utilized for transient or stable transformation. Suitable methods are protoplast transformation by poly(ethylene glycol)-induced DNA uptake, the “biolistic” method using the gene cannon—referred to as the particle bombardment method, electroporation, the incubation of dry embryos in DNA solution, microinjection and gene transfer mediated by Agrobacterium. Said methods are described by way of example in B. Jenes et al., Techniques for Gene Transfer, in: Transgenic Plants, Vol. 1, Engineering and Utilization, eds. S. D. Kung and R. Wu, Academic Press (1993) 128-143 and in Potrykus Annu. Rev. Plant Physiol. Plant Molec. Biol. 42 (1991) 205-225). The nucleic acids or the construct to be expressed is preferably cloned into a vector which is suitable for transforming Agrobacterium tumefaciens, for example pBin19 (Bevan et al., Nucl. Acids Res. 12 (1984) 8711). Agrobacteria transformed by such a vector can then be used in known manner for the transformation of plants, in particular of crop plants such as by way of example tobacco plants, for example by bathing bruised leaves or chopped leaves in an agrobacterial solution and then culturing them in suitable media. The transformation of plants by means of Agrobacterium tumefaciens is described, for example, by Höfgen and Willmitzer in Nucl. Acid Res. (1988) 16, 9877 or is known inter alia from F. F. White, Vectors for Gene Transfer in Higher Plants; in Transgenic Plants, Vol. 1, Engineering and Utilization, eds. S. D. Kung and R. Wu, Academic Press, 1993, pp. 15-38.

[0656] Agrobacteria transformed by an expression vector according to the invention may likewise be used in known manner for the transformation of plants such as test plants like Arabidopsis or crop plants such as cereal crops, corn, oats, rye, barley, wheat, soybean, rice, cotton, sugar beet, canola, sunflower, flax, hemp, potatoes, tobacco, tomatoes, carrots, paprika, oilseed rape, tapioca, cassava, arrowroot, tagetes, alfalfa, lettuce and the various tree, nut and vine species, in particular of oil-containing crop plants such as soybean, peanut, castor oil plant, sunflower, corn, cotton, flax, oilseed rape, coconut, oil palm, safflower (Carthamus tinctorius) or cocoa bean, e.g. by bathing bruised leaves or chopped leaves in an agrobacterial solution and then culturing them in suitable media.

[0657] The genetically modified plant cells may be regenerated by all of the methods known to those skilled in the art. Appropriate methods can be found in the publications referred to above by S. D. Kung and R. Wu, Potrykus or Höfgen and Willmitzer.

[0658] Accordingly, a further aspect of the invention relates to transgenic organisms transformed by at least one nucleic acid sequence, expression cassette or vector according to the invention as well as cells, cell cultures, tissue, parts—such as, for example, leaves, roots, etc. in the case of plant organisms—or reproductive material derived from such organisms. The terms “host organism”, “host cell”, “recombinant (host) organism” and “transgenic (host) cell” are used here interchangeably. Of course these terms relate not only to the particular host organism or the particular target cell but also to the descendants or potential descendants of these organisms or cells. Since, due to mutation or environmental effects certain modifications may arise in successive generations, these descendants need not necessarily be identical with the parental cell but nevertheless are still encompassed by the term as used here.

[0659] For the purposes of the invention “transgenic” or “recombinant” means with regard for example to a nucleic acid sequence, an expression cassette (=gene construct, nucleic acid construct) or a vector containing the nucleic acid sequence according to the invention or an organism transformed by the nucleic acid sequences, expression cassette or vector according to the invention all those constructions produced by genetic engineering methods in which either

a) the nucleic acid sequence depicted in table I, column 5 or 7 or its derivatives or parts thereof or
b) a genetic control sequence functionally linked to the nucleic acid sequence described under (a), for example a 3′- and/or 5′-genetic control sequence such as a promoter or terminator, or
c) (a) and (b)
are not found in their natural, genetic environment or have been modified by genetic engineering methods, wherein the modification may by way of example be a substitution, addition, deletion, inversion or insertion of one or more nucleotide residues. Natural genetic environment means the natural genomic or chromosomal locus in the or ganism of origin or inside the host organism or presence in a genomic library. In the case of a genomic library the natural genetic environment of the nucleic acid sequence is preferably retained at least in part. The environment borders the nucleic acid sequence at least on one side and has a sequence length of at least 50 bp, preferably at least 500 bp, particularly preferably at least 1,000 bp, most particularly preferably at least 5,000 bp. A naturally occurring expression cassette—for example the naturally occurring combination of the natural promoter of the nucleic acid sequence according to the invention with the corresponding delta-8-desaturase, delta-9-elongase and/or delta-5-desaturase gene—turns into a transgenic expression cassette when the latter is modified by unnatural, synthetic (“artificial”) methods such as by way of example a mutagenation. Appropriate methods are described by way of example in U.S. Pat. No. 5,565,350 or WO 00/15815.

[0660] Suitable organisms or host organisms for the nucleic acid, expression cassette or vector according to the invention are advantageously in principle all organisms, which are suitable for the expression of recombinant genes as described above. Further examples which may be mentioned are plants such as Arabidopsis, Asteraceae such as Calendula or crop plants such as soybean, peanut, castor oil plant, sunflower, flax, corn, cotton, flax, oilseed rape, coconut, oil palm, safflower (Carthamus tinctorius) or cocoa bean.

[0661] In one embodiment of the invention host plants for the nucleic acid, expression cassette or vector according to the invention are selected from the group comprising corn, soy, oil seed rape (including canola and winter oil seed reap), cotton, wheat and rice.

[0662] A further object of the invention relates to the use of a nucleic acid construct, e.g. an expression cassette, containing DNA sequences encoding polypeptides shown in table II or DNA sequences hybridizing therewith for the transformation of plant cells, tissues or parts of plants.

[0663] In doing so, depending on the choice of promoter, the sequences shown in table I can be expressed specifically in the leaves, in the seeds, the nodules, in roots, in the stem or other parts of the plant. Those transgenic plants overproducing sequences as depicted in table I, the reproductive material thereof, together with the plant cells, tissues or parts thereof are a further object of the present invention.

[0664] The expression cassette or the nucleic acid sequences or construct according to the invention containing sequences according to table I can, moreover, also be employed for the transformation of the organisms identified by way of example above such as bacteria, yeasts, filamentous fungi and plants.

[0665] Within the framework of the present invention, increased GABA content means, for example, the artificially acquired trait of increased GABA content, concentration, activity due to functional over expression of polypeptide sequences of table II encoded by the corresponding nucleic acid molecules as depicted in table I, column 5 or 7 and/or homologs in the organisms according to the invention, advantageously in the transgenic plants according to the invention, by comparison with the nongenetically modified initial plants at least for the duration of at least one plant generation.

[0666] A constitutive expression of the polypeptide sequences of the of table II encoded by the corresponding nucleic acid molecule as depicted in table I, column 5 or 7 and/or homologs is, moreover, advantageous. On the other hand, however, an inducible expression may also appear desirable. Expression of the polypeptide sequences of the invention can be either direct to the cytsoplasm or the organelles preferably the plastids of the host cells, preferably the plant cells.

[0667] The efficiency of the expression of the sequences of the of table II encoded by the corresponding nucleic acid molecule as depicted in table I, column 5 or 7 and/or homologs can be determined, for example, in vitro by shoot meristem propagation. In addition, an expression of the sequences of table II encoded by the corresponding nucleic acid molecule as depicted in table I, column 5 or 7 and/or homologs modified in nature and level and its effect on the metabolic pathways performance can be tested on test plants in greenhouse trials.

[0668] An additional object of the invention comprises transgenic organisms such as transgenic plants transformed by an expression cassette containing sequences of as depicted in table I, column 5 or 7 according to the invention or DNA sequences hybridizing therewith, as well as transgenic cells, tissue, parts and reproduction material of such plants. Particular preference is given in this case to transgenic crop plants such as by way of example barley, wheat, rye, oats, corn, soybean, rice, cotton, sugar beet, oilseed rape and canola, sunflower, flax, hemp, thistle, potatoes, tobacco, tomatoes, tapioca, cassava, arrowroot, alfalfa, lettuce and the various tree, nut and vine species.

[0669] In one embodiment of the invention transgenic plants transformed by an expression cassette containing sequences of as depicted in table I, column 5 or 7 according to the invention or DNA sequences hybridizing therewith are selected from the group comprising corn, soy, oil seed rape (including canola and winter oil seed rape), cotton, wheat and rice.

[0670] For the purposes of the invention plants are mono- and dicotyledonous plants, mosses or algae.

[0671] A further refinement according to the invention are transgenic plants as described above which contain a nucleic acid sequence or construct according to the invention or a expression cassette according to the invention.

[0672] However, transgenic also means that the nucleic acids according to the invention are located at their natural position in the genome of an organism, but that the sequence has been modified in comparison with the natural sequence and/or that the regulatory sequences of the natural sequences have been modified. Preferably, transgenic/recombinant is to be understood as meaning the transcription of the nucleic acids of the invention and shown in table I, occurs at a non-natural position in the genome, that is to say the expression of the nucleic acids is homologous or, preferably, heterologous. This expression can be transiently or of a sequence integrated stably into the genome.

[0673] The term “transgenic plants” used in accordance with the invention also refers to the progeny of a transgenic plant, for example the T₁, T₂, T₃ and subsequent plant generations or the BC₁, BC₂, BC₃ and subsequent plant generations. Thus, the transgenic plants according to the invention can be raised and selfed or crossed with other individuals in order to obtain further transgenic plants according to the invention. Transgenic plants may also be obtained by propagating transgenic plant cells vegetatively. The present invention also relates to transgenic plant material, which can be derived from a transgenic plant population according to the invention. Such material includes plant cells and certain tissues, organs and parts of plants in all their manifestations, such as seeds, leaves, anthers, fibers, tubers, roots, root hairs, stems, embryo, calli, cotelydons, petioles, harvested material, plant tissue, reproductive tissue and cell cultures, which are derived from the actual transgenic plant and/or can be used for bringing about the transgenic plant.

[0674] Any transformed plant obtained according to the invention can be used in a conventional breeding scheme or in in vitro plant propagation to produce more transformed plants with the same characteristics and/or can be used to introduce the same characteristic in other varieties of the same or related species. Such plants are also part of the invention. Seeds obtained from the transformed plants genetically also contain the same characteristic and are part of the invention. As mentioned before, the present invention is in principle applicable to any plant and crop that can be transformed with any of the transformation method known to those skilled in the art.

[0675] Advantageous inducible plant promoters are by way of example the PRP1 promoter [Ward et al., Plant. Mol. Biol. 22 (1993), 361-366], a promoter inducible by benzenesulfonamide (EP 388 186), a promoter inducible by tetracycline [Gatz et al., (1992) Plant J. 2, 397-404], a promoter inducible by salicylic acid (WO 95/19443), a promoter inducible by abscisic acid (EP 335 528) and a promoter inducible by ethanol or cyclohexanone (WO93/21334). Other examples of plant promoters which can advantageously be used are the promoter of cytosolic FBPase from potato, the ST-LSI promoter from potato (Stockhaus et al., EMBO J. 8 (1989) 2445-245), the promoter of phosphoribosyl pyrophosphate amidotransferase from Glycine max (see also gene bank accession number U87999) or a nodiene-specific promoter as described in EP 249 676. Particular advantageous are those promoters which ensure expression expression upon the early onset of environmental stress like for example drought or cold.

[0676] In one embodiment seed-specific promoters may be used for monocotylodonous or dicotylodonous plants.

[0677] In principle all natural promoters with their regulation sequences can be used like those named above for the expression cassette according to the invention and the method according to the invention. Over and above this, synthetic promoters may also advantageously be used.

[0678] In the preparation of an expression cassette various DNA fragments can be manipulated in order to obtain a nucleotide sequence, which usefully reads in the correct direction and is equipped with a correct reading frame. To connect the DNA fragments (=nucleic acids according to the invention) to one another regulatory element or adaptors or linkers may be attached to the fragments.

[0679] The promoter and the terminator regions can usefully be provided in the transcription direction with a linker or polylinker containing one or more restriction points for the insertion of this sequence. Generally, the linker has 1 to 10, mostly 1 to 8, preferably 2 to 6, restriction points. In general the size of the linker inside the regulatory region is less than 100 bp, frequently less than 60 bp, but at least 5 bp. The promoter may be both native or homologous as well as foreign or heterologous to the host organism, for example to the host plant. In the 5′-3′ transcription direction the expression cassette contains the promoter, a DNA sequence which shown in table I and a region for transcription termination. Different termination regions can be exchanged for one another in any desired fashion.

[0680] As also used herein, the terms “nucleic acid” and “nucleic acid molecule” are intended to include DNA molecules (e.g., cDNA or genomic DNA) and RNA molecules (e.g., mRNA) and analogs of the DNA or RNA generated using nucleotide analogs. This term also encompasses untranslated sequence located at both the 3′ and 5′ ends of the coding region of the gene: at least about 1000 nucleotides of sequence upstream from the 5′ end of the coding region and at least about 200 nucleotides of sequence downstream from the 3′ end of the coding region of the gene. The nucleic acid molecule can be single-stranded or double-stranded, but preferably is double-stranded DNA.

[0681] An “isolated” nucleic acid molecule is one that is substantially separated from other nucleic acid molecules, which are present in the natural source of the nucleic acid. That means other nucleic acid molecules are present in an amount less than 5% based on weight of the amount of the desired nucleic acid, preferably less than 2% by weight, more preferably less than 1% by weight, most preferably less than 0.5% by weight. Preferably, an “isolated” nucleic acid is free of some of the sequences that naturally flank the nucleic acid (i.e., sequences located at the 5′ and 3′ ends of the nucleic acid) in the genomic DNA of the organism from which the nucleic acid is derived. For example, in various embodiments, the isolated stress related protein encoding nucleic acid molecule can contain less than about 5 kb, 4 kb, 3 kb, 2 kb, 1 kb, 0.5 kb or 0.1 kb of nucleotide sequences which naturally flank the nucleic acid molecule in genomic DNA of the cell from which the nucleic acid is derived. Moreover, an “isolated” nucleic acid molecule, such as a cDNA molecule, can be free from some of the other cellular material with which it is naturally associated, or culture medium when produced by recombinant techniques, or chemical precursors or other chemicals when chemically synthesized.

[0682] A nucleic acid molecule of the present invention, e.g., a nucleic acid molecule encoding an GABA-related Proteins or a portion thereof which confers tolerance and/or resistance to environmental stress and increased biomass production in plants, can be isolated using standard molecular biological techniques and the sequence information provided herein. For example, an Arabidopsis thaliana stress related protein encoding cDNA can be isolated from a A. thaliana c-DNA library or a Synechocystis sp., Brassica napus, Glycine max, Zea mays or Oryza sativa stress related protein encoding cDNA can be isolated from a Synechocystis sp., Brassica napus, Glycine max, Zea mays or Oryza sativa c-DNA library respectively using all or portion of one of the sequences shown in table I. Moreover, a nucleic acid molecule encompassing all or a portion of one of the sequences of table I can be isolated by the polymerase chain reaction using oligonucleotide primers designed based upon this sequence. For example, mRNA can be isolated from plant cells (e.g., by the guanidinium-thiocyanate extraction procedure of Chirgwin et al., 1979 Biochemistry 18:5294-5299) and cDNA can be prepared using reverse transcriptase (e.g., Moloney MLV reverse transcriptase, available from Gibco/BRL, Bethesda, Md.; or AMV reverse transcriptase, available from Seikagaku America, Inc., St. Petersburg, Fla.). Synthetic oligonucleotide primers for polymerase chain reaction amplification can be designed based upon one of the nucleotide sequences shown in table I. A nucleic acid molecule of the invention can be amplified using cDNA or, alternatively, genomic DNA, as a template and appropriate oligonucleotide primers according to standard PCR amplification techniques. The nucleic acid molecule so amplified can be cloned into an appropriate vector and characterized by DNA sequence analysis. Furthermore, oligonucleotides corresponding to GABA-related Proteins encoding nucleotide sequence can be prepared by standard synthetic techniques, e.g., using an automated DNA synthesizer.

[0683] In a preferred embodiment, an isolated nucleic acid molecule of the invention comprises one of the nucleotide sequences shown in table I encoding the GABA-related Proteins (i.e., the “coding region”), as well as 5′ untranslated sequences and 3′ untranslated sequences.

[0684] Moreover, the nucleic acid molecule of the invention can comprise only a portion of the coding region of one of the sequences of the nucleic acid of table I, for example, a fragment which can be used as a probe or primer or a fragment encoding a biologically active portion of a GABA-related Proteins.

[0685] Portions of proteins encoded by the GABA-related Proteins encoding nucleic acid molecules of the invention are preferably biologically active portions described herein. As used herein, the term “biologically active portion of” a GABA-related Proteins is intended to include a portion, e.g., a domain/motif, of GABA-related protein that participates in GABA increase and preferably in enhanced nutrient efficiency use or stress tolerance and/or resistance response in a plant. To determine whether a GABA-related Proteins, or a biologically active portion thereof, results in GABA increase and preferably in increased stress tolerance or nutrient efficiency use in a plant, a metabolite analysis of a plant comprising the GABA-related Proteins may be performed. Such analysis methods are well known to those skilled in the art, as detailed in the Examples. More specifically, nucleic acid fragments encoding biologically active portions of a GABA-related Proteins can be prepared by isolating a portion of one of the sequences of the nucleic acid of table I expressing the encoded portion of the GABA-related Proteins or peptide (e.g., by recombinant expression in vitro) and assessing the activity of the encoded portion of the GABA-related Proteins or peptide.

[0686] Biologically active portions of a GABA-related Protein are encompassed by the present invention and include peptides comprising amino acid sequences derived from the amino acid sequence of a GABA-related Protein encoding gene, or the amino acid sequence of a protein homologous to a GABA-related Protein, which include fewer amino acids than a full length GABA-related Proteinsor the full length protein which is homologous to a GABA-related Protein, and exhibits at least some enzymatic or biological activity of a GABA-related Protein. Typically, biologically active portions (e.g., peptides which are, for example, 5, 10, 15, 20, 30, 35, 36, 37, 38, 39, 40, 50, 100 or more amino acids in length) comprise a domain or motif with at least one activity of a GABA-related Protein. Moreover, other biologically active portions in which other regions of the protein are deleted, can be prepared by recombinant techniques and evaluated for one or more of the activities described herein. Preferably, the biologically active portions of a GABA-related Protein include one or more selected domains/motifs or portions thereof having biological activity.

[0687] The term “biological active portion” or “biological activity” means a polypeptide as depicted in table II, column 3 or a portion of said polypeptide which still has at least 10 or 20%, preferably 20%, 30%, 40% or 50%, especially preferably 60%, 70% or 80% of the enzymatic or biological activity of the natural or starting enzyme or protein.

[0688] In the process according to the invention nucleic acid sequences can be Used, which, if appropriate, contain synthetic, non-natural or modified nucleotide bases, which can be incorporated into DNA or RNA. Said synthetic, non-natural or modified bases can for example increase the stability of the nucleic acid molecule outside or inside a cell. The nucleic acid molecules of the invention can contain the same modifications as aforementioned.

[0689] As used in the present context the term “nucleic acid molecule” may also encompass the untranslated sequence located at the 3′ and at the 5′ end of the coding gene region, for example at least 500, preferably 200, especially preferably 100, nucleotides of the sequence upstream of the 5′ end of the coding region and at least 100, preferably 50, especially preferably 20, nucleotides of the sequence downstream of the 3′ end of the coding gene region. It is often advantageous only to choose the coding region for cloning and expression purposes.

[0690] Preferably, the nucleic acid molecule used in the process according to the invention or the nucleic acid molecule of the invention is an isolated nucleic acid molecule.

[0691] An “isolated” polynucleotide or nucleic acid molecule is separated from other polynucleotides or nucleic acid molecules, which are present in the natural source of the nucleic acid molecule. An isolated nucleic acid molecule may be a chromosomal fragment of several kb, or preferably, a molecule only comprising the coding region of the gene. Accordingly, an isolated nucleic acid molecule of the invention may comprise chromosomal regions, which are adjacent 5′ and 3′ or further adjacent chromosomal regions, but preferably comprises no such sequences which naturally flank the nucleic acid molecule sequence in the genomic or chromosomal context in the or ganism from which the nucleic acid molecule originates (for example sequences which are adjacent to the regions encoding the 5′- and 3′-UTRs of the nucleic acid molecule). In various embodiments, the isolated nucleic acid molecule used in the process according to the invention may, for example comprise less than approximately 5 kb, 4 kb, 3 kb, 2 kb, 1 kb, 0.5 kb or 0.1 kb nucleotide sequences which naturally flank the nucleic acid molecule in the genomic DNA of the cell from which the nucleic acid molecule originates.

[0692] The nucleic acid molecules used in the process, for example the polynucleotide of the invention or of a part thereof can be isolated using molecular-biological standard techniques and the sequence information provided herein. Also, for example a homologous sequence or homologous, conserved sequence regions at the DNA or amino acid level can be identified with the aid of comparison algorithms. The former can be used as hybridization probes under standard hybridization techniques (for example those described in Sambrook et al., Molecular Cloning: A Laboratory Manual. 2nd Ed., Cold Spring Harbor Laboratory, Cold Spring Harbor Laboratory Press, Cold Spring Harbor, N.Y., 1989) for isolating further nucleic acid sequences useful in this process.

[0693] A nucleic acid molecule encompassing a complete sequence of the nucleic acid molecules used in the process, for example the polynucleotide of the invention, or a part thereof may additionally be isolated by polymerase chain reaction, oligonucleotide primers based on this sequence or on parts thereof being used. For example, a nucleic acid molecule comprising the complete sequence or part thereof can be isolated by polymerase chain reaction using oligonucleotide primers which have been generated on the basis of this very sequence. For example, mRNA can be isolated from cells (for example by means of the guanidinium thiocyanate extraction method of Chirgwin et al. (1979) Biochemistry 18:5294-5299) and cDNA can be generated by means of reverse transcriptase (for example Moloney MLV reverse transcriptase, available from Gibco/BRL, Bethesda, Md., or AMV reverse transcriptase, obtainable from Seikagaku America, Inc., St. Petersburg, Fla.).

[0694] Synthetic oligonucleotide primers for the amplification, e.g. as shown in table III, column 7, by means of polymerase chain reaction can be generated on the basis of a sequence shown herein, for example the sequence shown in table I, columns 5 and 7 or the sequences derived from table II, columns 5 and 7.

[0695] Moreover, it is possible to identify conserved protein motif or domain by carrying out protein sequence alignments with the polypeptide encoded by the nucleic acid molecules of the present invention, in particular with the sequences encoded by the nucleic acid molecule shown in, column 5 or 7 of Table I, from which conserved regions, and in turn, degenerate primers can be derived.

[0696] Conserved regions are those, which show a very little variation in the amino acid in one particular position of several homologs from different origin. The consensus sequence and polypeptide motifs shown in column 7 of Table IV are derived from said alignments. Moreover, it is possible to identify conserved regions from various organisms by carrying out protein sequence alignments with the polypeptide encoded by the nucleic acid of the present invention, in particular with the sequences encoding the polypeptide molecule shown in column 5 or 7 of Table II, from which conserved regions, and in turn, degenerate primers can be derived.

[0697] In one advantageous embodiment, in the method of the present invention the activity of a polypeptide is increased comprising or consisting of a consensus sequence or a polypeptide motif shown in table IV column 7 and in one another embodiment, the present invention relates to a polypeptide comprising or consisting of a consensus sequence or a polypeptide motif shown in table IV, column 7 whereby 20 or less, preferably 15 or 10, preferably 9, 8, 7, or 6, more preferred 5 or 4, even more preferred 3, even more preferred 2, even more preferred 1, most preferred 0 of the amino acids positions indicated can be replaced by any amino acid. In one embodiment not more than 15%, preferably 10%, even more preferred 5%, 4%, 3%, or 2%, most preferred 1% or TA of the amino acid position indicated by a letter are/is replaced another amino acid. In one embodiment 20 or less, preferably 15 or 10, preferably 9, 8, 7, or 6, more preferred 5 or 4, even more preferred 3, even more preferred 2, even more preferred 1, most preferred 0 amino acids are inserted into a consensus sequence or protein motif.

[0698] The consensus sequence was derived from a multiple alignment of the sequences as listed in table II. The letters represent the one letter amino acid code and indicate that the amino acids are conserved in at least 80% of the aligned proteins, whereas the letter X stands for amino acids, which are not conserved in at least 80% of the aligned sequences. The consensus sequence starts with the first conserved amino acid in the alignment, and ends with the last conserved amino acid in the alignment of the investigated sequences. The number of given X indicates the distances between conserved amino acid residues, e.g. Y-x(21,23)-F means that conserved tyrosine and phenylalanine residues in the alignment are separated from each other by minimum 21 and maximum 23 amino acid residues in the alignment of all investigated sequences.

[0699] Conserved domains were identified from all sequences and are described using a subset of the standard Prosite notation, e.g the pattern Y-x(21,23)-[FW] means that a conserved tyrosine is separated by minimum 21 and maximum 23 amino acid residues from either a phenylalanine or tryptophane. Patterns had to match at least 80% of the investigated proteins.

[0700] Conserved patterns were identified with the software tool MEME version 3.5.1 or manually. MEME was developed by Timothy L. Bailey and Charles Elkan, Dept. of Computer Science and Engineering, University of California, San Diego, USA and is described by Timothy L. Bailey and Charles Elkan [Fitting a mixture model by expectation maximization to discover motifs in biopolymers, Proceedings of the Second International Conference on Intelligent Systems for Molecular Biology, pp. 28-36, AAAI Press, Menlo Park, Calif., 1994]. The source code for the stand-alone program is public available from the San Diego Supercomputer center (http://meme.sdsc.edu).

[0701] For identifying common motifs in all sequences with the software tool MEME, the following settings were used: −maxsize 500000, −nmotifs 15, −evt 0.001, −maxw 60, distance 1e-3, −minsites number of sequences used for the analysis. Input sequences for MEME were non-aligned sequences in Fasta format. Other parameters were used in the default settings in this software version.

[0702] Prosite patterns for conserved domains were generated with the software tool Pratt version 2.1 or manually. Pratt was developed by Inge Jonassen, Dept. of Informatics, University of Bergen, Norway and is described by Jonassen et al. [I. Jonassen, J. F. Collins and D. G. Higgins, Finding flexible patterns in unaligned protein sequences, Protein Science 4 (1995), pp. 1587-1595; I. Jonassen, Efficient discovery of conserved patterns using a pattern graph, Submitted to CABIOS Febr. 1997]. The source code (ANSI C) for the stand-alone program is public available, e.g. at establisched Bioinformatic centers like EBI (European Bioinformatics Institute).

[0703] For generating patterns with the software tool Pratt, following settings were used: PL (max Pattern Length): 100, PN (max Nr of Pattern Symbols): 100, PX (max Nr of consecutive x's): 30, FN (max Nr of flexible spacers): 5, FL (max Flexibility): 30, FP (max Flex. Product): 10, ON (max number patterns): 50. Input sequences for Pratt were distinct regions of the protein sequences exhibiting high similarity as identified from software tool MEME. The minimum number of sequences, which have to match the generated patterns (CM, min Nr of Seqs to Match) was set to at least 80% of the provided sequences. Parameters not mentioned here were used in their default settings.

[0704] The Prosite patterns of the conserved domains can be used to search for protein sequences matching this pattern. Various establisched Bioinformatic centers provide public internet portals for using those patterns in database searches (e.g. PIR [Protein Information Resource, located at Georgetown University Medical Center] or ExPASy [Expert Protein Analysis System]). Alternatively, stand-alone software is available, like the program Fuzzpro, which is part of the EMBOSS software package. For example, the program Fuzzpro not only allows to search for an exact pattern-protein match but also allows to set various ambiguities in the performed search.

[0705] The alignment was performed with the software ClustalW (version 1.83) and is described by Thompson et al. [Thompson, J. D., Higgins, D. G. and Gibson, T. J. (1994) CLUSTAL W: improving the sensitivity of progressive multiple sequence alignment through sequence weighting, positions-specific gap penalties and weight matrix choice. Nucleic Acids Research, 22:4673-4680]. The source code for the stand-alone program is public available from the European Molecular Biology Laboratory; Heidelberg, Germany. The analysis was performed using the default parameters of ClustalW v1.83 (gap open penalty: 10.0; gap extension penalty: 0.2; protein matrix: Gonnet; pprotein/DNA endgap: −1; protein/DNA gapdist: 4).

[0706] Degenerated primers can then be utilized by PCR for the amplification of fragments of novel proteins having above-mentioned activity, e.g. conferring the increased GABA content as compared to a corresponding non-transformed wild type after increasing the expression or activity or having the activity of a protein as shown in table II, column 3 or further functional homologs of the polypeptide of the invention from other organisms.

[0707] These fragments can then be utilized as hybridization probe for isolating the complete gene sequence. As an alternative, the missing 5′ and 3′ sequences can be isolated by means of RACE-PCR. A nucleic acid molecule according to the invention can be amplified using cDNA or, as an alternative, genomic DNA as template and suitable oligonucleotide primers, following standard PCR amplification techniques. The nucleic acid molecule amplified thus can be cloned into a suitable vector and characterized by means of DNA sequence analysis. Oligonucleotides, which correspond to one of the nucleic acid molecules used in the process can be generated by standard synthesis methods, for example using an automatic DNA synthesizer.

[0708] Nucleic acid molecules which are advantageously for the process according to the invention can be isolated based on their homology to the nucleic acid molecules disclosed herein using the sequences or part thereof as hybridization probe and following standard hybridization techniques under stringent hybridization conditions. In this context, it is possible to use, for example, isolated nucleic acid molecules of at least 15, 20, 25, 30, 35, 40, 50, 60 or more nucleotides, preferably of at least 15, 20 or 25 nucleotides in length which hybridize under stringent conditions with the above-described nucleic acid molecules, in particular with those which encompass a nucleotide sequence of the nucleic acid molecule used in the process of the invention or encoding a protein used in the invention or of the nucleic acid molecule of the invention. Nucleic acid molecules with 30, 50, 100, 250 or more nucleotides may also be used.

[0709] The term “homology” means that the respective nucleic acid molecules or encoded proteins are functionally and/or structurally equivalent. The nucleic acid molecules that are homologous to the nucleic acid molecules described above and that are derivatives of said nucleic acid molecules are, for example, variations of said nucleic acid molecules which represent modifications having the same biological function, in particular encoding proteins with the same or substantially the same biological function. They may be naturally occurring variations, such as sequences from other plant varieties or species, or mutations. These mutations may occur naturally or may be obtained by mutagenesis techniques. The allelic variations may be naturally occurring allelic variants as well as synthetically produced or genetically engineered variants.

[0710] A further example of one such stringent hybridization condition is hybridization at 4×SSC at 65° C., followed by a washing in 0.1×SSC at 65° C. for one hour. Alternatively, an exemplary stringent hybridization condition is in 50% formamide, 4×SSC at 42° C. Further, the conditions during the wash step can be selected from the range of conditions delimited by low-stringency conditions (approximately 2×SSC at 50° C.) and high-stringency conditions (approximately 0.2×SSC at 50° C., preferably at 65° C.) (20×SSC: 0.3M sodium citrate, 3M NaCl, pH 7.0). In addition, the temperature during the wash step can be raised from low-stringency conditions at room temperature, approximately 22° C., to higher-stringency conditions at approximately 65° C. Both of the parameters salt concentration and temperature can be varied simultaneously, or else one of the two parameters can be kept constant while only the other is varied. Denaturants, for example formamide or SDS, may also be employed during the hybridization. In the presence of 50% formamide, hybridization is preferably effected at 42° C. Relevant factors like i) length of treatment, ii) salt conditions, iii) detergent conditions, iv) competitor DNAs, v) temperature and vi) probe selection can be combined case by case so that not all possibilities can be mentioned herein.

[0711] Thus, in a preferred embodiment, Northern blots are prehybridized with Rothi-Hybri-Quick buffer (Roth, Karlsruhe) at 68° C. for 2 h. Hybridzation with radioactive labelled probe is done overnight at 68° C. Subsequent washing steps are performed at 68° C. with 1×SSC.

[0712] For Southern blot assays the membrane is prehybridized with Rothi-Hybri-Quick buffer (Roth, Karlsruhe) at 68° C. for 2 h. The hybridzation with radioactive labelled probe is conducted over night at 68° C. Subsequently the hybridization buffer is discarded and the filter shortly washed using 2×SSC; 0.1% SDS. After discarding the washing buffer new 2×SSC; 0.1% SDS buffer is added and incubated at 68° C. for 15 minutes. This washing step is performed twice followed by an additional washing step using 1×SSC; 0.1% SDS at 68° C. for 10 min.

[0713] Some examples of conditions for DNA hybridization (Southern blot assays) and wash step are shown hereinbelow:
[0714] (1) Hybridization conditions can be selected, for example, from the following conditions:
[0715] a) 4×SSC at 65° C.,
[0716] b) 6×SSC at 45° C.,
[0717] c) 6×SSC, 100 mg/ml denatured fragmented fish sperm DNA at 68° C.,
[0718] d) 6×SSC, 0.5% SDS, 100 mg/ml denatured salmon sperm DNA at 68° C.,
[0719] e) 6×SSC, 0.5% SDS, 100 mg/ml denatured fragmented salmon sperm DNA, 50% formamide at 42° C.,
[0720] f) 50% formamide, 4×SSC at 42° C.,
[0721] g) 50% (vol/vol) formamide, 0.1% bovine serum albumin, 0.1% Ficoll, 0.1% polyvinylpyrrolidone, 50 mM sodium phosphate buffer pH 6.5, 750 mM NaCl, 75 mM sodium citrate at 42° C.,
[0722] h) 2× or 4×SSC at 50° C. (low-stringency condition), or
[0723] i) 30 to 40% formamide, 2× or 4×SSC at 42° C. (low-stringency condition).
[0724] (2) Wash steps can be selected, for example, from the following conditions:
[0725] a) 0.015 M NaCl/0.0015 M sodium citrate/0.1% SDS at 50° C.
[0726] b) 0.1×SSC at 65° C.
[0727] c) 0.1×SSC, 0.5% SDS at 68° C.
[0728] d) 0.1×SSC, 0.5% SDS, 50% formamide at 42° C.
[0729] e) 0.2×SSC, 0.1% SDS at 42° C.
[0730] f) 2×SSC at 65° C. (low-stringency condition).

[0731] Polypeptides having above-mentioned activity, i.e. conferring the increased GABA content as compared to a corresponding non-transformed wild type, derived from other organisms, can be encoded by other DNA sequences which hybridize to the sequences shown in table I, columns 5 and 7 under relaxed hybridization conditions and which code on expression for peptides conferring the increased GABA content as compared to a corresponding non-transformed wild type.

[0732] Further, some applications have to be performed at low stringency hybridisation conditions, without any consequences for the specificity of the hybridisation. For example, a Southern blot analysis of total DNA could be probed with a nucleic acid molecule of the present invention and washed at low stringency (55° C. in 2×SSPE, 0.1% SDS). The hybridisation analysis could reveal a simple pattern of only genes encoding polypeptides of the present invention or used in the process of the invention, e.g. having herein-mentioned activity of increasing the tolerance and/or resistance to environmental stress and the biomass production as compared to a corresponding non-transformed wild type plant cell, plant or part thereof. A further example of such low-stringent hybridization conditions is 4×SSC at 50° C. or hybridization with 30 to 40% formamide at 42° C. Such molecules comprise those which are fragments, analogues or derivatives of the polypeptide of the invention or used in the process of the invention and differ, for example, by way of amino acid and/or nucleotide deletion(s), insertion(s), substitution (s), addition(s) and/or recombination (s) or any other modification(s) known in the art either alone or in combination from the above-described amino acid sequences or their underlying nucleotide sequence(s). However, it is preferred to use high stringency hybridisation conditions.

[0733] Hybridization should advantageously be carried out with fragments of at least 5, 10, 15, 20, 25, 30, 35 or 40 bp, advantageously at least 50, 60, 70 or 80 bp, preferably at least 90, 100 or 110 bp. Most preferably are fragments of at least 15, 20, 25 or 30 bp. Preferably are also hybridizations with at least 100 bp or 200, very especially preferably at least 400 bp in length. In an especially preferred embodiment, the hybridization should be carried out with the entire nucleic acid sequence with conditions described above.

[0734] The terms “fragment”, “fragment of a sequence” or “part of a sequence” mean a truncated sequence of the original sequence referred to. The truncated sequence (nucleic acid or protein sequence) can vary widely in length; the minimum size being a sequence of sufficient size to provide a sequence with at least a comparable function and/or activity of the original sequence referred to or hybidizing with the nucleic acid molecule of the invention or used in the process of the invention under stringend conditions, while the maximum size is not critical. In some applications, the maximum size usually is not substantially greater than that required to provide the desired activity and/or function(s) of the original sequence.

[0735] Typically, the truncated amino acid sequence will range from about 5 to about 310 amino acids in length. More typically, however, the sequence will be a maximum of about 250 amino acids in length, preferably a maximum of about 200 or 100 amino acids. It is usually desirable to select sequences of at least about 10, 12 or 15 amino acids, up to a maximum of about 20 or 25 amino acids.

[0736] The term “epitope” relates to specific immunoreactive sites within an antigen, also known as antigenic determinates. These epitopes can be a linear array of monomers in a polymeric composition—such as amino acids in a protein—or consist of or comprise a more complex secondary or tertiary structure. Those of skill will recognize that immunogens (i.e., substances capable of eliciting an immune response) are antigens; however, some antigen, such as haptens, are not immunogens but may be made immunogenic by coupling to a carrier molecule. The term “antigen” includes references to a substance to which an antibody can be generated and/or to which the antibody is specifically immunoreactive.

[0737] In one embodiment the present invention relates to a epitope of the polypeptide of the present invention or used in the process of the present invention and confers an increased GABA content as compared to a corresponding non-transformed wild type.

[0738] The term “one or several amino acids” relates to at least one amino acid but not more than that number of amino acids, which would result in a homology of below 50% identity. Preferably, the identity is more than 70% or 80%, more preferred are 85%, 90%, 91%, 92%, 93%, 94% or 95%, even more preferred are 96%, 97%, 98%, or 99% identity.

[0739] Further, the nucleic acid molecule of the invention comprises a nucleic acid molecule, which is a complement of one of the nucleotide sequences of above mentioned nucleic acid molecules or a portion thereof. A nucleic acid molecule which is complementary to one of the nucleotide sequences shown in table I, columns 5 and 7 is one which is sufficiently complementary to one of the nucleotide sequences shown in table I, columns 5 and 7 such that it can hybridize to one of the nucleotide sequences shown in table I, columns 5 and 7, thereby forming a stable duplex. Preferably, the hybridisation is performed under stringent hybrization conditions. However, a complement of one of the herein disclosed sequences is preferably a sequence complement thereto according to the base pairing of nucleic acid molecules well known to the skilled person. For example, the bases A and G undergo base pairing with the bases T and U or C, resp. and visa versa. Modifications of the bases can influence the base-pairing partner.

[0740] The nucleic acid molecule of the invention comprises a nucleotide sequence which is at least about 30%, 35%, 40% or 45%, preferably at least about 50%, 55%, 60% or 65%, more preferably at least about 70%, 80%, or 90%, and even more preferably at least about 95%, 97%, 98%, 99% or more homologous to a nucleotide sequence shown in table I, columns 5 and 7, or a portion thereof and preferably has above mentioned activity, in particular having a tolerance and/or resistance to environmental stress and biomass production increasing activity after increasing the activity or an activity of a gene product as shown in table II, column 3 by for example expression either in the cytsol or in an organelle such as a plastid or mitochondria or both, preferably in plastids.

[0741] The nucleic acid molecule of the invention comprises a nucleotide sequence which hybridizes, preferably hybridizes under stringent conditions as defined herein, to one of the nucleotide sequences shown in table I, columns 5 and 7, or a portion thereof and encodes a protein having above-mentioned activity, e.g. conferring an increased GABA content as compared to a corresponding non-transformed wild type by for example expression either in the cytsol or in an organelle such as a plastid or mitochondria or both, preferably in plastids, and optionally, the activity selected from the group consisting of: 60S ribosomal protein, ABC transporter permease protein, acetyltransferase, acyl-carrier protein, At4g32480-protein, At5g16650-protein, ATP-binding protein, Autophagy-related protein, auxin response factor, auxin transcription factor, b1003-protein, b1522-protein, b2739-protein, b3646-protein, B4029-protein, Branched-chain amino acid permease, calcium-dependent protein kinase, cytochrome c oxidase subunit VIII, elongation factor Tu, Factor arrest protein, fumarylacetoacetate hydrolase, geranylgeranyl pyrophosphate synthase, glucose dehydrogenase, glycosyl transferase, harpin-induced family protein, homocitrate synthase, hydrolase, isochorismate synthase, MFS-type transporter protein, microsomal beta-keto-reductase, polygalacturonase, protein phosphatase, pyruvate kinase, Sec-independent protein translocase subunit, serine protease, thioredoxin, thioredoxin family protein, transcriptional regulator, ubiquinone biosynthesis monooxygenase, and YHR213W-protein.

[0742] Throughout the context of this application the expression of the nucleotide sequences comprising the nucleotide sequences shown in table I, columns 5 and 7 or of the nucleotide sequences which encode a protein comprising the polypeptide sequences as shown in table II columns 5 or 7 in plastids is especially preferred if these sequences are shown in table I or II in the same line as an ORF (column 3), for which table I, II, III or IV shown “plastidic” in the column “target”.

[0743] Moreover, the nucleic acid molecule of the invention can comprise only a portion of the coding region of one of the sequences shown in table I, columns 5 and 7, for example a fragment which can be used as a probe or primer or a fragment encoding a biologically active portion of the polypeptide of the present invention or of a polypeptide used in the process of the present invention, i.e. having above-mentioned activity, e.g. conferring an increase of the tolerance and/or resistance to environmental stress and biomass production as compared to a corresponding non-transformed wild type plant cell, plant or part thereof if its activity is increased by for example expression either in the cytsol or in an organelle such as a plastid or mitochondria or both, preferably in plastids. The nucleotide sequences determined from the cloning of the present protein-according-to-the-invention-encoding gene allows for the generation of probes and primers designed for use in identifying and/or cloning its homologues in other cell types and organisms. The probe/primer typically comprises substantially purified oligonucleotide. The oligonucleotide typically comprises a region of nucleotide sequence that hybridizes under stringent conditions to at least about 12, 15 preferably about 20 or 25, more preferably about 40, 50 or 75 consecutive nucleotides of a sense strand of one of the sequences set forth, e.g., in table I, columns 5 and 7, an anti-sense sequence of one of the sequences, e.g., set forth in table I, columns 5 and 7, or naturally occurring mutants thereof. Primers based on a nucleotide of invention can be used in PCR reactions to clone homologues of the polypeptide of the invention or of the polypeptide used in the process of the invention, e.g. as the primers described in the examples of the present invention, e.g. as shown in the examples. A PCR with the primers shown in table III, column 7 will result in a fragment of the gene product as shown in table II, column 3.

[0744] Primer sets are interchangeable. The person skilled in the art knows to combine said primers to result in the desired product, e.g. in a full length clone or a partial sequence. Probes based on the sequences of the nucleic acid molecule of the invention or used in the process of the present invention can be used to detect transcripts or genomic sequences encoding the same or homologous proteins. The probe can further comprise a label group attached thereto, e.g. the label group can be a radioisotope, a fluorescent compound, an enzyme, or an enzyme co-factor. Such probes can be used as a part of a genomic marker test kit for identifying cells which express an polypeptide of the invention or used in the process of the present invention, such as by measuring a level of an encoding nucleic acid molecule in a sample of cells, e.g., detecting mRNA levels or determining, whether a genomic gene comprising the sequence of the polynucleotide of the invention or used in the process of the present invention has been mutated or deleted.

[0745] The nucleic acid molecule of the invention encodes a polypeptide or portion thereof which includes an amino acid sequence which is sufficiently homologous to the amino acid sequence shown in table II, columns 5 and 7 such that the protein or portion thereof maintains the ability to participate in the increase of the GABA content and preferably increase of further yield related trait as compared to a corresponding non-transformed wild type plant cell, plant or part thereof, in particular increasing the activity as mentioned above or as described in the examples in plants is comprised.

[0746] As used herein, the language “sufficiently homologous” refers to proteins or portions thereof which have amino acid sequences which include a minimum number of identical or equivalent amino acid residues (e.g., an amino acid residue which has a similar side chain as an amino acid residue in one of the sequences of the polypeptide of the present invention) to an amino acid sequence shown in table II, columns 5 and 7 such that the protein or portion thereof is able to participate in the increase of GABA content as compared to a corresponding non-transformed wild type. For examples having the activity of a protein as shown in table II, column 3 and as described herein.

[0747] In one embodiment, the nucleic acid molecule of the present invention comprises a nucleic acid that encodes a portion of the protein of the present invention. The protein is at least about 30%, 35%, 40%, 45% or 50%, preferably at least about 55%, 60%, 65% or 70%, and more preferably at least about 75%, 80%, 85%, 90%, 91%, 92%, 93% or 94% and most preferably at least about 95%, 97%, 98%, 99% or more homologous to an entire amino acid sequence of table II, columns 5 and 7 and having above-mentioned activity, e.g. conferring an increased GABA content as compared to a corresponding non-transformed wild type by for example expression either in the cytsol or in an organelle such as a plastid or mitochondria or both, preferably in plastids.

[0748] Portions of proteins encoded by the nucleic acid molecule of the invention are preferably biologically active, preferably having above-mentioned annotated activity, e.g. conferring an increased GABA content as compared to a corresponding non-transformed wild type cell after increase of activity.

[0749] As mentioned herein, the term “biologically active portion” is intended to include a portion, e.g., a domain/motif, that confers increased GABA content as compared to a corresponding non-transformed wild type or has an immunological activity such that it is binds to an antibody binding specifically to the polypeptide of the present invention or a polypeptide used in the process of the present invention for increased GABA content as compared to a corresponding non-transformed wild type.

[0750] The invention further relates to nucleic acid molecules that differ from one of the nucleotide sequences shown in table I A, columns 5 and 7 (and portions thereof) due to degeneracy of the genetic code and thus encode a polypeptide of the present invention, in particular a polypeptide having above mentioned activity, e.g. as that polypeptides depicted by the sequence shown in table II, columns 5 and 7 or the functional homologues. Advantageously, the nucleic acid molecule of the invention comprises, or in an other embodiment has, a nucleotide sequence encoding a protein comprising, or in an other embodiment having, an amino acid sequence shown in table II, columns 5 and 7 or the functional homologues. In a still further embodiment, the nucleic acid molecule of the invention encodes a full length protein which is substantially homologous to an amino acid sequence shown in table II, columns 5 and 7 or the functional homologues. However, in a preferred embodiment, the nucleic acid molecule of the present invention does not consist of the sequence shown in table I, preferably table IA, columns 5 and 7.

[0751] In addition, it will be appreciated by those skilled in the art that DNA sequence polymorphisms that lead to changes in the amino acid sequences may exist within a population. Such genetic polymorphism in the gene encoding the polypeptide of the invention or comprising the nucleic acid molecule of the invention may exist among individuals within a population due to natural variation.

[0752] As used herein, the terms “gene” and “recombinant gene” refer to nucleic acid molecules comprising an open reading frame encoding the polypeptide of the invention or comprising the nucleic acid molecule of the invention or encoding the polypeptide used in the process of the present invention, preferably from a crop plant or from a microorganism useful for the method of the invention. Such natural variations can typically result in 1-5% variance in the nucleotide sequence of the gene. Any and all such nucleotide variations and resulting amino acid polymorphisms in genes encoding a polypeptide of the invention or comprising a the nucleic acid molecule of the invention that are the result of natural variation and that do not alter the functional activity as described are intended to be within the scope of the invention.

[0753] Nucleic acid molecules corresponding to natural variants homologues of a nucleic acid molecule of the invention, which can also be a cDNA, can be isolated based on their homology to the nucleic acid molecules disclosed herein using the nucleic acid molecule of the invention, or a portion thereof, as a hybridization probe according to standard hybridization techniques under stringent hybridization conditions.

[0754] Accordingly, in another embodiment, a nucleic acid molecule of the invention is at least 15, 20, 25 or 30 nucleotides in length. Preferably, it hybridizes under stringent conditions to a nucleic acid molecule comprising a nucleotide sequence of the nucleic acid molecule of the present invention or used in the process of the present invention, e.g. comprising the sequence shown in table I, columns 5 and 7. The nucleic acid molecule is preferably at least 20, 30, 50, 100, 250 or more nucleotides in length.

[0755] The term “hybridizes under stringent conditions” is defined above. In one embodiment, the term “hybridizes under stringent conditions” is intended to describe conditions for hybridization and washing under which nucleotide sequences at least 30%, 40%, 50% or 65% identical to each other typically remain hybridized to each other. Preferably, the conditions are such that sequences at least about 70%, more preferably at least about 75% or 80%, and even more preferably at least about 85%, 90% or 95% or more identical to each other typically remain hybridized to each other.

[0756] Preferably, nucleic acid molecule of the invention that hybridizes under stringent conditions to a sequence shown in table I, columns 5 and 7 corresponds to a naturally-occurring nucleic acid molecule of the invention. As used herein, a “naturally-occurring” nucleic acid molecule refers to an RNA or DNA molecule having a nucleotide sequence that occurs in nature (e.g., encodes a natural protein). Preferably, the nucleic acid molecule encodes a natural protein having above-mentioned activity, e.g. conferring the tolerance and/or resistance to environmental stress and biomass production increase after increasing the expression or activity thereof or the activity of a protein of the invention or used in the process of the invention by for example expression the nucleic acid sequence of the gene product in the cytsol and/or in an organelle such as a plastid or mitochondria, preferably in plastids.

[0757] In addition to naturally-occurring variants of the sequences of the polypeptide or nucleic acid molecule of the invention as well as of the polypeptide or nucleic acid molecule used in the process of the invention that may exist in the population, the skilled artisan will further appreciate that changes can be introduced by mutation into a nucleotide sequence of the nucleic acid molecule encoding the polypeptide of the invention or used in the process of the present invention, thereby leading to changes in the amino acid sequence of the encoded said polypeptide, without altering the functional ability of the polypeptide, preferably not decreasing said activity.

[0758] For example, nucleotide substitutions leading to amino acid substitutions at “non-essential” amino acid residues can be made in a sequence of the nucleic acid molecule of the invention or used in the process of the invention, e.g. shown in table I, columns 5 and 7.

[0759] A “non-essential” amino acid residue is a residue that can be altered from the wild-type sequence of one without altering the activity of said polypeptide, whereas an “essential” amino acid residue is required for an activity as mentioned above, e.g. leading to an increase in the tolerance and/or resistance to environmental stress and biomass production as compared to a corresponding non-transformed wild type plant cell, plant or part thereof in an organism after an increase of activity of the polypeptide. Other amino acid residues, however, (e.g., those that are not conserved or only semi-conserved in the domain having said activity) may not be essential for activity and thus are likely to be amenable to alteration without altering said activity.

[0760] Further, a person skilled in the art knows that the codon usage between organisms can differ. Therefore, he may adapt the codon usage in the nucleic acid molecule of the present invention to the usage of the organism or the cell compartment for example of the plastid or mitochondria in which the polynucleotide or polypeptide is expressed.

[0761] Accordingly, the invention relates to nucleic acid molecules encoding a polypeptide having above-mentioned activity, in an organisms or parts thereof by for example expression either in the cytsol or in an organelle such as a plastid or mitochondria or both, preferably in plastids that contain changes in amino acid residues that are not essential for said activity. Such polypeptides differ in amino acid sequence from a sequence contained in the sequences shown in table II, columns 5 and 7 yet retain said activity described herein. The nucleic acid molecule can comprise a nucleotide sequence encoding a polypeptide, wherein the polypeptide comprises an amino acid sequence at least about 50% identical to an amino acid sequence shown in table II, columns 5 and 7 and is capable of participation in the increased GABA content production as compared to a corresponding non-transformed wild type plant cell, plant or part thereof after increasing its activity, e.g. its expression by for example expression either in the cytsol or in an organelle such as a plastid or mitochondria or both, preferably in plastids. Preferably, the protein encoded by the nucleic acid molecule is at least about 60% identical to the sequence shown in table II, columns 5 and 7, more preferably at least about 70% identical to one of the sequences shown in table II, columns 5 and 7, even more preferably at least about 80%, 90%, 95% homologous to the sequence shown in table II, columns 5 and 7, and most preferably at least about 96%, 97%, 98%, or 99% identical to the sequence shown in table II, columns 5 and 7.

[0762] To determine the percentage homology (=identity, herein used interchangeably) of two amino acid sequences or of two nucleic acid molecules, the sequences are written one underneath the other for an optimal comparison (for example gaps may be inserted into the sequence of a protein or of a nucleic acid in order to generate an optimal alignment with the other protein or the other nucleic acid).

[0763] The amino acid residues or nucleic acid molecules at the corresponding amino acid positions or nucleotide positions are then compared. If a position in one sequence is occupied by the same amino acid residue or the same nucleic acid molecule as the corresponding position in the other sequence, the molecules are homologous at this position (i.e. amino acid or nucleic acid “homology” as used in the present context corresponds to amino acid or nucleic acid “identity”. The percentage homology between the two sequences is a function of the number of identical positions shared by the sequences (i.e. % homology=number of identical positions/total number of positions×100). The terms “homology” and “identity” are thus to be considered as synonyms.

[0764] For the determination of the percentage homology (=identity) of two or more amino acids or of two or more nucleotide sequences several computer software programs have been developed. The homology of two or more sequences can be calculated with for example the software fasta, which presently has been used in the version fasta 3 (W. R. Pearson and D. J. Lipman (1988), Improved Tools for Biological Sequence Comparison. PNAS 85:2444-2448; W. R. Pearson (1990) Rapid and Sensitive Sequence Comparison with FASTP and FASTA, Methods in Enzymology 183:63-98; W. R. Pearson and D. J. Lipman (1988) Improved Tools for Biological Sequence Comparison. PNAS 85:2444-2448; W. R. Pearson (1990); Rapid and Sensitive Sequence Comparison with FASTP and FASTAMethods in Enzymology 183:63-98). Another useful program for the calculation of homologies of different sequences is the standard blast program, which is included in the Biomax pedant software (Biomax, Munich, Federal Republic of Germany). This leads unfortunately sometimes to sub-optimal results since blast does not always include complete sequences of the subject and the query. Nevertheless as this program is very efficient it can be used for the comparison of a huge number of sequences. The following settings are typically used for such a comparisons of sequences: −p Program Name [String]; −d Database [String]; default=nr; −i Query File [File In]; default=stdin; −e Expectation value (E) [Real]; default=10.0; −m alignment view options: 0=pairwise; 1=query-anchored showing identities; 2=query-anchored no identities; 3=flat query-anchored, show identities; 4=flat query-anchored, no identities; 5=query-anchored no identities and blunt ends; 6=flat query-anchored, no identities and blunt ends; 7=XML Blast output; 8=tabular; 9 tabular with comment lines [Integer]; default=0; −o BLAST report Output File [File Out] Optional; default=stdout; −F Filter query sequence (DUST with blastn, SEG with others) [String]; default=T; −G Cost to open a gap (zero invokes default behavior) [Integer]; default=0; −E Cost to extend a gap (zero invokes default behavior) [Integer]; default=0; −X X dropoff value for gapped alignment (in bits) (zero invokes default behavior); blastn 30, megablast 20, tblastx 0, all others 15 [Integer]; default=0; −I Show GI's in defines [T/F]; default=F; −q Penalty for a nucleotide mismatch (blastn only) [Integer]; default=−3; −r Reward for a nucleotide match (blastn only) [Integer]; default=1; −v Number of database sequences to show one-line descriptions for (V) [Integer]; default=500; −b Number of database sequence to show alignments for (B) [Integer]; default=250; −f Threshold for extending hits, default if zero; blastp 11, blastn 0, blastx 12, tblastn 13; tblastx 13, megablast 0 [Integer]; default=0; −g Perform gapped alignment (not available with tblastx) [T/F]; default=T; −Q Query Genetic code to use [Integer]; default=1; −D DB Genetic code (for tblast[nx] only) [Integer]; default=1; −a Number of processors to use [Integer]; default=1; −O SeqAlign file [File Out] Optional; −J Believe the query define [T/F]; default=F; −M Matrix [String]; default=BLOSUM62; −W Word size, default if zero (blastn 11, megablast 28, all others 3) [Integer]; default=0; −z Effective length of the database (use zero for the real size) [Real]; default=0; −K Number of best hits from a region to keep (off by default, if used a value of 100 is recommended) [Integer]; default=0; −P 0 for multiple hit, 1 for single hit [Integer]; default=0; −Y Effective length of the search space (use zero for the real size) [Real]; default=0; −S Query strands to search against database (for blast[nx], and tblastx); 3 is both, 1 is top, 2 is bottom [Integer]; default=3; −T Produce HTML output [T/F]; default=F; −I Restrict search of database to list of GI's [String] Optional; −U Use lower case filtering of FASTA sequence [T/F] Optional; default=F; −y X dropoff value for ungapped extensions in bits (0.0 invokes default behavior); blastn 20, megablast 10, all others 7 [Real]; default=0.0; −Z X dropoff value for final gapped alignment in bits (0.0 invokes default behavior); blastn/megablast 50, tblastx 0, all others 25 [Integer]; default=0; −R PSI-TBLASTN checkpoint file [File In] Optional; −n MegaBlast search [T/F]; default=F; −L Location on query sequence [String] Optional; −A Multiple Hits window size, default if zero (blastn/megablast 0, all others 40 [Integer]; default=0; −w Frame shift penalty (OOF algorithm for blastx) [Integer]; default=0; −t Length of the largest intron allowed in tblastn for linking HSPs (0 disables linking) [Integer]; default=0.

[0765] Results of high quality are reached by using the algorithm of Needleman and Wunsch or Smith and Waterman. Therefore programs based on said algorithms are preferred. Advantageously the comparisons of sequences can be done with the program PileUp (J. Mol. Evolution., 25, 351 (1987), Higgins et al., CABIOS 5, 151 (1989)) or preferably with the programs “Gap” and “Needle”, which are both based on the algorithms of Needleman and Wunsch (J. Mol. Biol. 48; 443 (1970)), and “BestFit”, which is based on the algorithm of Smith and Waterman (Adv. Appl. Math. 2; 482 (1981)). “Gap” and “BestFit” are part of the GCG software-package (Genetics Computer Group, 575 Science Drive, Madison, Wis., USA 53711 (1991); Altschul et al., (Nucleic Acids Res. 25, 3389 (1997)), “Needle” is part of the The European Molecular Biology Open Software Suite (EMBOSS) (Trends in Genetics 16 (6), 276 (2000)). Therefore preferably the calculations to determine the percentages of sequence homology are done with the programs “Gap” or “Needle” over the whole range of the sequences. The following standard adjustments for the comparison of nucleic acid sequences were used for “Needle”: matrix: EDNAFULL, Gap_penalty: 10.0, Extend_penalty: 0.5. The following standard adjustments for the comparison of nucleic acid sequences were used for “Gap”: gap weight: 50, length weight: 3, average match: 10.000, average mismatch: 0.000.

[0766] For example a sequence, which has 80% homology with sequence SEQ ID NO: 42 at the nucleic acid level is understood as meaning a sequence which, upon comparison with the sequence SEQ ID NO: 42 by the above program “Needle” with the above parameter set, has a 80% identity.

[0767] Homology between two polypeptides is understood as meaning the identity of the amino acid sequence over in each case the entire sequence length which is calculated by comparison with the aid of the above program “Needle” using Matrix: EBLOSUM62, Gap_penalty: 8.0, Extend_penalty: 2.0.

[0768] For example a sequence which has a 80% homology with sequence SEQ ID NO: 43 at the protein level is understood as meaning a sequence which, upon comparison with the sequence SEQ ID NO: 43 by the above program “Needle” with the above parameter set, has a 80% identity.

[0769] Functional equivalents derived from one of the polypeptides as shown in table II, columns 5 and 7 according to the invention by substitution, insertion or deletion have at least 30%, 35%, 40%, 45% or 50%, preferably at least 55%, 60%, 65% or 70% by preference at least 80%, especially preferably at least 85% or 90%, 91%, 92%, 93% or 94%, very especially preferably at least 95%, 97%, 98% or 99% homology with one of the polypeptides as shown in table II, columns 5 and 7 according to the invention and are distinguished by essentially the same properties as the polypeptide as shown in table II, columns 5 and 7.

[0770] Functional equivalents derived from the nucleic acid sequence as shown in table I, columns 5 and 7 according to the invention by substitution, insertion or deletion have at least 30%, 35%, 40%, 45% or 50%, preferably at least 55%, 60%, 65% or 70% by preference at least 80%, especially preferably at least 85% or 90%, 91%, 92%, 93% or 94%, very especially preferably at least 95%, 97%, 98% or 99% homology with one of the polypeptides as shown in table II, columns 5 and 7 according to the invention and encode polypeptides having essentially the same properties as the polypeptide as shown in table II, columns 5 and 7.

[0771] “Essentially the same properties” of a functional equivalent is above all understood as meaning that the functional equivalent has above mentioned activity, by for example expression either in the cytsol or in an organelle such as a plastid or mitochondria or both, preferably in plastids while increasing the amount of protein, activity or function of said functional equivalent in an organism, e.g. a microorganism, a plant or plant or animal tissue, plant or animal cells or a part of the same.

[0772] A nucleic acid molecule encoding an homologous sequence to a protein sequence of table II, columns 5 and 7 can be created by introducing one or more nucleotide substitutions, additions or deletions into a nucleotide sequence of the nucleic acid molecule of the present invention, in particular of table I, columns 5 and 7 such that one or more amino acid substitutions, additions or deletions are introduced into the encoded protein. Mutations can be introduced into the encoding sequences of table I, columns 5 and 7 by standard techniques, such as site-directed mutagenesis and PCR-mediated mutagenesis.

[0773] Preferably, conservative amino acid substitutions are made at one or more predicted non-essential amino acid residues. A “conservative amino acid substitution” is one in which the amino acid residue is replaced with an amino acid residue having a similar side chain. Families of amino acid residues having similar side chains have been defined in the art. These families include amino acids with basic side chains (e.g., lysine, arginine, histidine), acidic side chains (e.g., aspartic acid, glutamic acid), uncharged polar side chains (e.g., glycine, asparagine, glutamine, serine, threonine, tyrosine, cysteine), nonpolar side chains (e.g., alanine, valine, leucine, isoleucine, proline, phenylalanine, methionine, tryptophane), beta-branched side chains (e.g., threonine, valine, isoleucine) and aromatic side chains (e.g., tyrosine, phenylalanine, tryptophane, histidine).

[0774] Thus, a predicted nonessential amino acid residue in a polypeptide of the invention or a polypeptide used in the process of the invention is preferably replaced with another amino acid residue from the same family. Alternatively, in another embodiment, mutations can be introduced randomly along all or part of a coding sequence of a nucleic acid molecule of the invention or used in the process of the invention, such as by saturation mutagenesis, and the resultant mutants can be screened for activity described herein to identify mutants that retain or even have increased above mentioned activity, e.g. conferring an increased GABA content as compared to a corresponding non-transformed wild type.

[0775] Following mutagenesis of one of the sequences of shown herein, the encoded protein can be expressed recombinantly and the activity of the protein can be determined using, for example, assays described herein (see Examples).

[0776] A hight homology of the nucleic acid molecule used in the process according to the invention was found for the following database entries by Gap search.

[0777] Homologues of the nucleic acid sequences used, with the sequence shown in table I, columns 5 and 7, comprise also allelic variants with at least approximately 30%, 35%, 40% or 45% homology, by preference at least approximately 50%, 60% or 70%, more preferably at least approximately 90%, 91%, 92%, 93%, 94% or 95% and even more preferably at least approximately 96%, 97%, 98%, 99% or more homology with one of the nucleotide sequences shown or the abovementioned derived nucleic acid sequences or their homologues, derivatives or analogues or parts of these. Allelic variants encompass in particular functional variants which can be obtained by deletion, insertion or substitution of nucleotides from the sequences shown, preferably from table I, columns 5 and 7, or from the derived nucleic acid sequences, the intention being, however, that the enzyme activity or the biological activity of the resulting proteins synthesized is advantageously retained or increased.

[0778] In another embodiment the nucleic acid molecule of the invention or used in the process of the invention comprises the sequences shown in table I column 5 or 7 and in addition the natural 5′ and/or 3′ untranslated sequences or parts thereof.

[0779] In one embodiment of the present invention, the nucleic acid molecule of the invention or used in the process of the invention comprises the sequences shown in any of the table I, columns 5 and 7. It is preferred that the nucleic acid molecule comprises as little as possible other nucleotides not shown in any one of table I, columns 5 and 7. In one embodiment, the nucleic acid molecule comprises less than 500, 400, 300, 200, 100, 90, 80, 70, 60, 50 or 40 further nucleotides. In a further embodiment, the nucleic acid molecule comprises less than 30, 20 or 10 further nucleotides. In one embodiment, the nucleic acid molecule use in the process of the invention is identical to the sequences shown in table I, columns 5 and 7.

[0780] Also preferred is that the nucleic acid molecule used in the process of the invention encodes a polypeptide comprising the sequence shown in table II, columns 5 and 7. In one embodiment, the nucleic acid molecule encodes less than 150, 130, 100, 80, 60, 50, 40 or 30 further amino acids. In a further embodiment, the encoded polypeptide comprises less than 20, 15, 10, 9, 8, 7, 6 or 5 further amino acids. In one embodiment used in the inventive process, the encoded polypeptide is identical to the sequences shown in table II, columns 5 and 7.

[0781] In one embodiment, the nucleic acid molecule of the invention or used in the process encodes a polypeptide comprising the sequence shown in table II, columns 5 and 7 comprises less than 100 further nucleotides. In a further embodiment, said nucleic acid molecule comprises less than 30 further nucleotides. In one embodiment, the nucleic acid molecule used in the process is identical to a coding sequence of the sequences shown in table I, columns 5 and 7.

[0782] Polypeptides (=proteins), which still have the essential biological or enzymatic activity of the polypeptide of the present invention conferring an increased GABA content production as compared to a corresponding non-transformed wild type plant cell, plant or part thereof i.e. whose activity is essentially not reduced, are polypeptides with at least 10% or 20%, by preference 30% or 40%, especially preferably 50% or 60%, very especially preferably 80% or 90 or more of the wild type biological activity or enzyme activity, advantageously, the activity is essentially not reduced in comparison with the activity of a polypeptide shown in table II, columns 5 and 7 expressed under identical conditions.

[0783] Homologues of table I, columns 5 and 7 or of the derived sequences of table II, columns 5 and 7 also mean truncated sequences, cDNA, single-stranded DNA or RNA of the coding and noncoding DNA sequence. Homologues of said sequences are also understood as meaning derivatives, which comprise noncoding regions such as, for example, UTRs, terminators, enhancers or promoter variants. The promoters upstream of the nucleotide sequences stated can be modified by one or more nucleotide substitution(s), insertion(s) and/or deletion(s) without, however, interfering with the functionality or activity either of the promoters, the open reading frame (=ORF) or with the 3′-regulatory region such as terminators or other 3′ regulatory regions, which are far away from the ORF. It is furthermore possible that the activity of the promoters is increased by modification of their sequence, or that they are replaced completely by more active promoters, even promoters from heterologous organisms. Appropriate promoters are known to the person skilled in the art and are mentioned herein below.

[0784] In addition to the nucleic acid molecules encoding the GABA-related Proteins described above, another aspect of the invention pertains to negative regulators of the activity of a nucleic acid molecules selected from the group according to table I, column 5 and/or 7, preferably column 7. Antisense polynucleotides thereto are thought to inhibit the downregulating activity of those negative regulators by specifically binding the target polynucleotide and interfering with transcription, splicing, transport, translation, and/or stability of the target polynucleotide. Methods are described in the prior art for targeting the antisense polynucleotide to the chromosomal DNA, to a primary RNA transcript, or to a processed mRNA. Preferably, the target regions include splice sites, translation initiation codons, translation termination codons, and other sequences within the open reading frame.

[0785] The term “antisense,” for the purposes of the invention, refers to a nucleic acid comprising a polynucleotide that is sufficiently complementary to all or a portion of a gene, primary transcript, or processed mRNA, so as to interfere with expression of the endogenous gene. “Complementary” polynucleotides are those that are capable of base pairing according to the standard Watson-Crick complementarity rules. specifically, purines will base pair with pyrimidines to form a combination of guanine paired with cytosine (G:C) and adenine paired with either thymine (A:T) in the case of DNA, or adenine paired with uracil (A:U) in the case of RNA. It is understood that two polynucleotides may hybridize to each other even if they are not completely complementary to each other, provided that each has at least one region that is substantially complementary to the other. The term “antisense nucleic acid” includes single stranded RNA as well as double-stranded DNA expression cassettes that can be transcribed to produce an antisense RNA. “Active” antisense nucleic acids are antisense RNA molecules that are capable of selectively hybridizing with a negative regulator of the activity of a nucleic acid molecules encoding a polypeptide having at least 80% sequence identity with the polypeptide selected from the group according to table II, column 5 and/or 7, preferably column 7.

[0786] The antisense nucleic acid can be complementary to an entire negative regulator strand, or to only a portion thereof. In an embodiment, the antisense nucleic acid molecule is antisense to a “noncoding region” of the coding strand of a nucleotide sequence encoding a GABA-related Proteins. The term “noncoding region” refers to 5′ and 3′ sequences that flank the coding region that are not translated into amino acids (i.e., also referred to as 5′ and 3′ untranslated regions). The antisense nucleic acid molecule can be complementary to only a portion of the noncoding region of GABA-related Proteins mRNA. For example, the antisense oligonucleotide can be complementary to the region surrounding the translation start site of GABA-related Proteins mRNA. An antisense oligonucleotide can be, for example, about 5, 10, 15, 20, 25, 30, 35, 40, 45 or 50 nucleotides in length. Typically, the antisense molecules of the present invention comprise an RNA having 60-100% sequence identity with at least 14 consecutive nucleotides of a noncoding region of one of the nucleic acid of table I. Preferably, the sequence identity will be at least 70%, more preferably at least 75%, 80%, 85%, 90%, 95%, 98% and most preferably 99%.

[0787] An antisense nucleic acid of the invention can be constructed using chemical synthesis and enzymatic ligation reactions using procedures known in the art. For example, an antisense nucleic acid (e.g., an antisense oligonucleotide) can be chemically synthesized using naturally occurring nucleotides or variously modified nucleotides designed to increase the biological stability of the molecules or to increase the physical stability of the duplex formed between the antisense and sense nucleic acids, e.g., phosphorothioate derivatives and acridine substituted nucleotides can be used. Examples of modified nucleotides which can be used to generate the antisense nucleic acid include 5-fluorouracil, 5-bromouracil, 5-chlorouracil, 5-iodouracil, hypoxanthine, xanthine, 4-acetylcytosine, 5-(carboxyhydroxylmethyl) uracil, 5-carboxymethylaminomethyl-2-thiouridine, 5-carboxymethylaminomethyluracil, dihydrouracil, beta-D-galactosylqueosine, inosine, N6-isopentenyladenine, 1-methylguanine, 1-methylinosine, 2,2-dimethylguanine, 2-methyladenine, 2-methylguanine, 3-methylcytosine, 5-methylcytosine, N6-adenine, 7-methylguanine, 5-methylaminomethyluracil, 5-methoxyaminomethyl-2-thiouracil, beta-D-mannosylqueosine, 5′-methoxycarboxymethyluracil, 5-methoxyuracil, 2-methylthio-N6-isopentenyladenine, uracil-5-oxyacetic acid (v), wybutoxosine, pseudouracil, queosine, 2-thiocytosine, 5-methyl-2-thiouracil, 2-thiouracil, 4-thiouracil, 5-methyluracil, uracil-5-oxyacetic acid methylester, uracil-5-oxyacetic acid (v), 5-methyl-2-thiouracil, 3-(3-amino-3-N-2-carboxypropyl) uracil, (acp3)w, and 2,6-diaminopurine. Alternatively, the antisense nucleic acid can be produced biologically using an expression vector into which a nucleic acid has been subcloned in an antisense orientation (i.e., RNA transcribed from the inserted nucleic acid will be of an antisense orientation to a target nucleic acid of interest, described further in the following subsection).

[0788] In yet another embodiment, the antisense nucleic acid molecule of the invention is an alpha-anomeric nucleic acid molecule. An alpha-anomeric nucleic acid molecule forms specific double-stranded hybrids with complementary RNA in which, contrary to the usual b-units, the strands run parallel to each other (Gaultier et al., 1987, Nucleic Acids. Res. 15:6625-6641). The antisense nucleic acid molecule can also comprise a 2′-o-methylribonucleotide (Inoue et al., 1987, Nucleic Acids Res. 15:6131-6148) or a chimeric RNA-DNA analogue (Inoue et al., 1987, FEBS Lett. 215:327-330).

[0789] The antisense nucleic acid molecules of the invention are typically administered to a cell or generated in situ such that they hybridize with or bind to cellular mRNA and/or genomic DNA. The hybridization can be by conventional nucleotide complementarity to form a stable duplex, or, for example, in the case of an antisense nucleic acid molecule which binds to DNA duplexes, through specific interactions in the major groove of the double helix. The antisense molecule can be modified such that it specifically binds to a receptor or an antigen expressed on a selected cell surface, e.g., by linking the antisense nucleic acid molecule to a peptide or an antibody which binds to a cell surface receptor or antigen. The antisense nucleic acid molecule can also be delivered to cells using the vectors described herein. To achieve sufficient intracellular concentrations of the antisense molecules, vector constructs in which the antisense nucleic acid molecule is placed under the control of a strong prokaryotic, viral, or eukaryotic (including plant) promoter are preferred.

[0790] As an alternative to antisense polynucleotides, ribozymes, sense polynucleotides, or double stranded RNA (dsRNA) can be used to reduce expression of a GABA increasing polypeptide of the invention. By “ribozyme” is meant a catalytic RNA-based enzyme with ribonuclease activity which is capable of cleaving a single-stranded nucleic acid, such as an mRNA, to which it has a complementary region. Ribozymes (e.g., hammerhead ribozymes described in Haselhoff and Gerlach, 1988, Nature 334:585-591) can be used to catalytically cleave GABA increasing polypeptide of the invention mRNA transcripts to thereby inhibit translation of GABA increasing polypeptide of the invention mRNA. A ribozyme having specificity for a nucleic acid encoding a GABA increasing polypeptide of the invention can be designed based upon the nucleotide sequence of a GABA increasing polypeptide of the invention cDNA, as disclosed herein or on the basis of a heterologous sequence to be isolated according to methods taught in this invention. For example, a derivative of a Tetrahymena L-19 IVS RNA can be constructed in which the nucleotide sequence of the active site is complementary to the nucleotide sequence to be cleaved in a GABA-related Proteins encoding mRNA. See, e.g., U.S. Pat. Nos. 4,987,071 and 5,116,742 to Cech et al. Alternatively, GABA increasing polypeptide of the invention mRNA can be used to select a catalytic RNA having a specific ribonuclease activity from a pool of RNA molecules. See, e.g., Bartel, D. and Szostak, J. W., 1993, Science 261:1411-1418. In preferred embodiments, the ribozyme will contain a portion having at least 7, 8, 9, 10, 12, 14, 16, 18 or 20 nucleotides, and more preferably 7 or 8 nucleotides, that have 100% complementarity to a portion of the target RNA. Methods for making ribozymes are known to those skilled in the art. See, e.g., U.S. Pat. Nos. 6,025,167; 5,773,260; and 5,496,698.

[0791] The term “dsRNA,” as used herein, refers to RNA hybrids comprising two strands of RNA. The dsRNAs can be linear or circular in structure. In a preferred embodiment, dsRNA is specific for a polynucleotide encoding either the polypeptide according to table II or a polypeptide having at least 70% sequence identity with a polypeptide according to table II. The hybridizing RNAs may be substantially or completely complementary. By “substantially complementary,” is meant that when the two hybridizing RNAs are optimally aligned using the BLAST program as described above, the hybridizing portions are at least 95% complementary. Preferably, the dsRNA will be at least 100 base pairs in length. Typically, the hybridizing RNAs will be of identical length with no over hanging 5′ or 3′ ends and no gaps. However, dsRNAs having 5′ or 3′ overhangs of up to 100 nucleotides may be used in the methods of the invention.

[0792] The dsRNA may comprise ribonucleotides or ribonucleotide analogs, such as 2′-O-methyl ribosyl residues, or combinations thereof. See, e.g., U.S. Pat. Nos. 4,130,641 and 4,024,222. A dsRNA polyriboinosinic acid:polyribocytidylic acid is described in U.S. Pat. No. 4,283,393. Methods for making and using dsRNA are known in the art. One method comprises the simultaneous transcription of two complementary DNA strands, either in vivo, or in a single in vitro reaction mixture. See, e.g., U.S. Pat. No. 5,795,715. In one embodiment, dsRNA can be introduced into a plant or plant cell directly by standard transformation procedures. Alternatively, dsRNA can be expressed in a plant cell by transcribing two complementary RNAs.

[0793] Other methods for the inhibition of endogenous gene expression, such as triple helix formation (Moser et al., 1987, Science 238:645-650 and Cooney et al., 1988, Science 241:456-459) and cosuppression (Napoli et al., 1990, The Plant Cell 2:279-289) are known in the art. Partial and full-length cDNAs have been used for the cosuppression of endogenous plant genes. See, e.g., U.S. Pat. Nos. 4,801,340, 5,034,323, 5,231,020, and 5,283,184; Van der Kroll et al., 1990, The Plant Cell 2:291-299; Smith et al., 1990, Mol. Gen. Genetics 224:477-481 and Napoli et al., 1990, The Plant Cell 2:279-289.

[0794] For sense suppression, it is believed that introduction of a sense polynucleotide blocks transcription of the corresponding target gene. The sense polynucleotide will have at least 65% sequence identity with the target plant gene or RNA. Preferably, the percent identity is at least 80%, 90%, 95% or more. The introduced sense polynucleotide need not be full length relative to the target gene or transcript. Preferably, the sense polynucleotide will have at least 65% sequence identity with at least 100 consecutive nucleotides of one of the nucleic acids as depicted in Table I. The regions of identity can comprise introns and/or exons and untranslated regions. The introduced sense polynucleotide may be present in the plant cell transiently, or may be stably integrated into a plant chromosome or extrachromosomal replicon.

[0795] Further, object of the invention is an expression vector comprising a nucleic acid molecule comprising a nucleic acid molecule selected from the group consisting of:
[0796] a) a nucleic acid molecule encoding the polypeptide shown in column 5 or 7 of Table II;
[0797] b) a nucleic acid molecule shown in column 5 or 7 of Table I;
[0798] c) a nucleic acid molecule, which, as a result of the degeneracy of the genetic code, can be derived from a polypeptide sequence depicted in column 5 or 7 of Table II and confers an increased GABA content as compared to a corresponding non-transformed wild type;
[0799] d) a nucleic acid molecule having at least 30% identity with the nucleic acid molecule sequence of a polynucleotide comprising the nucleic acid molecule shown in column 5 or 7 of Table I and confers an increased GABA content as compared to a corresponding non-transformed wild type;
[0800] e) a nucleic acid molecule encoding a polypeptide having at least 30% identity with the amino acid sequence of the polypeptide encoded by the nucleic acid molecule of (a) to (c) and having the activity represented by a nucleic acid molecule comprising a polynucleotide as depicted in column 5 of Table I and confers an increased GABA content as compared to a corresponding non-transformed wild type plant cell, a plant or a part thereof;
[0801] f) nucleic acid molecule which hybridizes with a nucleic acid molecule of (a) to (c) under stringent hybridization conditions and confers an increased GABA content as compared to a corresponding non-transformed wild type;
[0802] g) a nucleic acid molecule encoding a polypeptide which can be isolated with the aid of monoclonal or polyclonal antibodies made against a polypeptide encoded by one of the nucleic acid molecules of (a) to (e) and having the activity represented by the nucleic acid molecule comprising a polynucleotide as depicted in column 5 of Table I;
[0803] h) a nucleic acid molecule encoding a polypeptide comprising the consensus sequence or one or more polypeptide motifs as shown in column 7 of Table IV and preferably having the activity represented by a nucleic acid molecule comprising a polynucleotide as depicted in column 5 of Table II or IV;
[0804] h) a nucleic acid molecule encoding a polypeptide having the activity represented by a protein as depicted in column 5 of Table II and confers an increased GABA content as compared to a corresponding non-transformed wild type;
[0805] i) nucleic acid molecule which comprises a polynucleotide, which is obtained by amplifying a cDNA library or a genomic library using the primers in column 7 of Table III and preferably having the activity represented by a protein comprising a polypeptide as depicted in column 5 of Table II or IV;
[0806] and
[0807] j) a nucleic acid molecule which is obtainable by screening a suitable nucleic acid library under stringent hybridization conditions with a probe comprising a complementary sequence of a nucleic acid molecule of (a) or (b) or with a fragment thereof, having at least 15 nt, preferably 20 nt, 30 nt, 50 nt, 100 nt, 200 nt or 500 nt of a nucleic acid molecule complementary to a nucleic acid molecule sequence characterized in (a) to (e) and encoding a polypeptide having the activity represented by a protein comprising a polypeptide as depicted in column 5 of Table II;

[0808] The invention further provides an isolated recombinant expression vector comprising a stress related protein encoding nucleic acid as described above, wherein expression of the vector or stress related protein encoding nucleic acid, respectively in a host cell results in increased GABA content as compared to the corresponding non-transformed wild type of the host cell. As used herein, the term “vector” refers to a nucleic acid molecule capable of transporting another nucleic acid to which it has been linked. One type of vector is a “plasmid”, which refers to a circular double stranded DNA loop into which additional DNA segments can be ligated. Another type of vector is a viral vector, wherein additional DNA segments can be ligated into the viral genome. Further types of vectors can be linearized nucleic acid sequences, such as transposons, which are pieces of DNA which can copy and insert themselves. There have been 2 types of transposons found: simple transposons, known as Insertion Sequences and composite transposons, which can have several genes as well as the genes that are required for transposition.

[0809] Certain vectors are capable of autonomous replication in a host cell into which they are introduced (e.g., bacterial vectors having a bacterial origin of replication and episomal mammalian vectors). Other vectors (e.g., non-episomal mammalian vectors) are integrated into the genome of a host cell upon introduction into the host cell, and thereby are replicated along with the host genome. Moreover, certain vectors are capable of directing the expression of genes to which they are operatively linked. Such vectors are referred to herein as “expression vectors”. In general, expression vectors of utility in recombinant DNA techniques are often in the form of plasmids. In the present specification, “plasmid” and “vector” can be used interchangeably as the plasmid is the most commonly used form of vector. However, the invention is intended to include such other forms of expression vectors, such as viral vectors (e.g., replication defective retroviruses, adenoviruses and adeno-associated viruses), which serve equivalent functions.

[0810] A plant expression cassette preferably contains regulatory sequences capable of driving gene expression in plant cells and operably linked so that each sequence can fulfill its function, for example, termination of transcription by polyadenylation signals. Preferred polyadenylation signals are those originating from Agrobacterium tumefaciens T-DNA such as the gene 3 known as octopine synthase of the Ti-plasmid pTiACH5 (Gielen et al., 1984 EMBO J. 3:835) or functional equivalents thereof but also all other terminators functionally active in plants are suitable.

[0811] As plant gene expression is very often not limited on transcriptional levels, a plant expression cassette preferably contains other operably linked sequences like translational enhancers such as the overdrive-sequence containing the 5″-untranslated leader sequence from tobacco mosaic virus enhancing the protein per RNA ratio (Gallie et al., 1987 Nucl. Acids Research 15:8693-8711).

[0812] Plant gene expression has to be operably linked to an appropriate promoter conferring gene expression in a timely, cell or tissue specific manner. Preferred are promoters driving constitutive expression (Benfey et al., 1989 EMBO J. 8:2195-2202) like those derived from plant viruses like the 35S CaMV (Franck et al., 1980 Cell 21:285-294), the 19S CaMV (see also U.S. Pat. No. 5,352,605 and PCT Application No. WO 8402913) or plant promoters like those from Rubisco small subunit described in U.S. Pat. No. 4,962,028.

[0813] Additional advantageous regulatory sequences are, for example, included in the plant promoters such as CaMV/35S [Franck et al., Cell 21 (1980) 285-294], PRP1 [Ward et al., Plant. Mol. Biol. 22 (1993)], SSU, OCS, lib4, usp, STLS1, B33, LEB4, nos or in the ubiquitin, napin or phaseolin promoter. Also advantageous in this connection are inducible promoters such as the promoters described in EP-A-0 388 186 (benzyl sulfonamide inducible), Plant J. 2, 1992: 397-404 (Gatz et al., Tetracyclin inducible), EP-A-0 335 528 (abscisic acid inducible) or WO 93/21334 (ethanol or cyclohexenol inducible). Additional useful plant promoters are the cytosolic FBPase promoter or ST-LSI promoter of the potato (Stockhaus et al., EMBO J. 8, 1989, 2445), the phosphorybosyl phyrophoshate amido transferase promoter of Glycine max (gene bank accession No. U87999) or the noden specific promoter described in EP-A-0 249 676. Additional particularly advantageous promoters are seed specific promoters which can be used for monokotyledones or dikotyledones and are described in U.S. Pat. No. 5,608,152 (napin promoter from rapeseed), WO 98/45461 (phaseolin promoter from Arabidopsis), U.S. Pat. No. 5,504,200 (phaseolin promoter from Phaseolus vulgaris), WO 91/13980 (Bce4 promoter from Brassica) and Baeumlein et al., Plant J., 2, 2, 1992: 233-239 (LEB4 promoter from leguminosa). Said promoters are useful in dikotyledones. The following promoters are useful for example in monokotyledones lpt-2- or lpt-1-promoter from barley (WO 95/15389 and WO 95/23230) or hordein promoter from barley. Other useful promoters are described in WO 99/16890.

[0814] It is possible in principle to use all natural promoters with their regulatory sequences like those mentioned above for the novel process. It is also possible and advantageous in addition to use synthetic promoters.

[0815] The gene construct may also comprise further genes which are to be inserted into the organisms and which are for example involved in stress resistance and biomass production increase. It is possible and advantageous to insert and express in host organisms regulatory genes such as genes for inducers, repressors or enzymes which intervene by their enzymatic activity in the regulation, or one or more or all genes of a biosynthetic pathway. These genes can be heterologous or homologous in origin. The inserted genes may have their own promoter or else be under the control of same promoter as the sequences of the nucleic acid of table I or their homologs.

[0816] The gene construct advantageously comprises, for expression of the other genes present, additionally 3′ and/or 5′ terminal regulatory sequences to enhance expression, which are selected for optimal expression depending on the selected host organism and gene or genes.

[0817] These regulatory sequences are intended to make specific expression of the genes and protein expression possible as mentioned above. This may mean, depending on the host organism, for example that the gene is expressed or overexpressed only after induction, or that it is immediately expressed and/or overexpressed.

[0818] The regulatory sequences or factors may moreover preferably have a beneficial effect on expression of the introduced genes, and thus increase it. It is possible in this way for the regulatory elements to be enhanced advantageously at the transcription level by using strong transcription signals such as promoters and/or enhancers. However, in addition, it is also possible to enhance translation by, for example, improving the stability of the mRNA.

[0819] Other preferred sequences for use in plant gene expression cassettes are targeting-sequences necessary to direct the gene product in its appropriate cell compartment (for review see Kermode, 1996 Crit. Rev. Plant Sci. 15(4):285-423 and references cited therein) such as the vacuole, the nucleus, all types of plastids like amyloplasts, chloroplasts, chromoplasts, the extracellular space, mitochondria, the endoplasmic reticulum, oil bodies, peroxisomes and other compartments of plant cells.

[0820] Plant gene expression can also be facilitated via an inducible promoter (for review see Gatz, 1997 Annu. Rev. Plant Physiol. Plant Mol. Biol. 48:89-108). Chemically inducible promoters are especially suitable if gene expression is wanted to occur in a time specific manner.

[0821] Table VI lists several examples of promoters that may be used to regulate transcription of the stress related protein nucleic acid coding sequences.

TABLE VI
Examples of tissue-specific and stress-inducible promoters in plants

| Expression | Reference |
|---|---|
| Cor78- Cold, drought, | Ishitani, et al., Plant Cell 9: 1935-1949 |
| salt, ABA, wounding- | (1997). |
| inducible | Yamaguchi-Shinozaki and Shinozaki, Plant Cell |
| | 6: 251-264 (1994). |
| Rci2A - Cold, | Capel et al., Plant Physiol 115: 569-576 |
| dehydration-inducible | (1997) |
| Rd22 - Drought, salt | Yamaguchi-Shinozaki and Shinozaki, Mol Gen |
| | Genet 238: 17-25 (1993). |
| Cor15A - Cold, | Baker et al., Plant Mol. Biol. 24: 701-713 |
| dehydration, ABA | (1994). |
| GH3- Auxin inducible | Liu et al., Plant Cell 6: 645-657 (1994) |
| ARSK1-Root, salt | Hwang and Goodman, Plant J 8: 37-43 (1995). |
| inducible | |
| PtxA - Root, salt | GenBank accession X67427 |
| inducible | |
| SbHRGP3 - Root | Ahn et al., Plant Cell 8: 1477-1490 (1998). |
| specific | |
| KST1 - Guard cell | Plesch et al., Plant Journal. 28(4): 455-64, |
| specific | (2001) |
| KAT1 - Guard cell | Plesch et al., Gene 249: 83-89 (2000) |
| specific | Nakamura et al., Plant Physiol. 109: 371-374 |
| | (1995) |
| salicylic acid | PCT Application No. WO 95/19443 |
| inducible | |
| tetracycline inducible | Gatz et al. Plant J. 2: 397-404 (1992) |
| Ethanol inducible | PCT Application No. WO 93/21334 |
| pathogen inducible | Ward et al., 1993 Plant. Mol. Biol. |
| PRP1 | 22: 361-366 |
| heat inducible hsp80 | U.S. Pat. No. 5,187,267 |
| cold inducible alpha- | PCT Application No. WO 96/12814 |
| amylase | |
| Wound-inducible pinII | European Patent No. 375091 |
| RD29A - salt- | Yamaguchi-Shinozalei et al. (1993) Mol. |
| inducible | Gen. Genet. 236: 331-340 |
| plastid-specific viral | PCT Application No. WO 95/16783 and. WO |
| RNA-polymerase | 97/06250 |

[0822] Other promoters, e.g. Super promotor (Ni et al., Plant Journal 7, 1995: 661-676), Ubiquitin promoter (Callis et al., J. Biol. Chem., 1990, 265: 12486-12493; U.S. Pat. No. 5,510,474; U.S. Pat. No. 6,020,190; Kawalleck et al., Plant. Molecular Biology, 1993, 21: 673-684) or 34S promoter (Gen Bank Accession numbers M59930 and X16673) were similar useful for the present invention and are known to a person skilled in the art.

[0823] Developmental stage-preferred promoters are preferentially expressed at certain stages of development. Tissue and organ preferred promoters include those that are preferentially expressed in certain tissues or organs, such as leaves, roots, seeds, or xylem. Examples of tissue preferred and organ preferred promoters include, but are not limited to fruit-preferred, ovule-preferred, male tissue-preferred, seed-preferred, integument-preferred, tuber-preferred, stalk-preferred, pericarp-preferred, and leaf-preferred, stigma-preferred, pollen-preferred, anther-preferred, a petal-preferred, sepal-preferred, pedicel-preferred, silique-preferred, stem-preferred, root-preferred promoters, and the like. Seed preferred promoters are preferentially expressed during seed development and/or germination. For example, seed preferred promoters can be embryo-preferred, endosperm preferred, and seed coat-preferred. See Thompson et al., 1989, BioEssays 10:108. Examples of seed preferred promoters include, but are not limited to, cellulose synthase (celA), Cim1, gamma-zein, globulin-1, maize 19 kD zein (cZ19B1), and the like.

[0824] Other promoters useful in the expression cassettes of the invention include, but are not limited to, the major chlorophyll a/b binding protein promoter, histone promoters, the Ap3 promoter, the β-conglycin promoter, the napin promoter, the soybean lectin promoter, the maize 15 kD zein promoter, the 22 kD zein promoter, the 27 kD zein promoter, the g-zein promoter, the waxy, shrunken 1, shrunken 2 and bronze promoters, the Zm13 promoter (U.S. Pat. No. 5,086,169), the maize polygalacturonase promoters (PG) (U.S. Pat. Nos. 5,412,085 and 5,545,546), and the SGB6 promoter (U.S. Pat. No. 5,470,359), as well as synthetic or other natural promoters.

[0825] Additional flexibility in controlling heterologous gene expression in plants may be obtained by using DNA binding domains and response elements from heterologous sources (i.e., DNA binding domains from non-plant sources). An example of such a heterologous DNA binding domain is the LexA DNA binding domain (Brent and Ptashne, 1985, Cell 43:729-736).

[0826] The invention further provides a recombinant expression vector comprising a GABA increasing polypeptide of the invention DNA molecule of the invention cloned into the expression vector in an antisense orientation. That is, the DNA molecule is operatively linked to a regulatory sequence in a manner that allows for expression (by transcription of the DNA molecule) of an RNA molecule that is antisense to a GABA increasing polypeptide of the invention mRNA. Regulatory sequences operatively linked to a nucleic acid molecule cloned in the antisense orientation can be chosen which direct the continuous expression of the antisense RNA molecule in a variety of cell types. For instance, viral promoters and/or enhancers, or regulatory sequences can be chosen which direct constitutive, tissue specific, or cell type specific expression of antisense RNA. The antisense expression vector can be in the form of a recombinant plasmid, phagemid, or attenuated virus wherein antisense nucleic acids are produced under the control of a high efficiency regulatory region. The activity of the regulatory region can be determined by the cell type into which the vector is introduced. For a discussion of the regulation of gene expression using antisense genes, see Weintraub, H. et al., 1986, Antisense RNA as a molecular tool for genetic analysis, Reviews—Trends in Genetics, Vol. 1(1), and Mol et al., 1990, FEBS Letters 268:427-430.

[0827] Another aspect of the invention pertains to isolated GABA increasing polypeptide of the invention, and biologically active portions thereof. An “isolated” or “purified” polypeptide or biologically active portion thereof is free of some of the cellular material when produced by recombinant DNA techniques, or chemical precursors or other chemicals when chemically synthesized. The language “substantially free of cellular material” includes preparations of GABA increasing polypeptide of the invention in which the polypeptide is separated from some of the cellular components of the cells in which it is naturally or recombinantly produced. In one embodiment, the language “substantially free of cellular material” includes preparations of a GABA increasing polypeptide of the invention having less than about 30% (by dry weight) of non-GABA increasing polypeptide of the invention material (also referred to herein as a “contaminating polypeptide”), more preferably less than about 20% of non-GABA increasing polypeptide of the invention material, still more preferably less than about 10% of non-GABA increasing polypeptide of the invention material, and most preferably less than about 5% non-GABA increasing polypeptide of the invention material.

[0828] When the GABA increasing polypeptide of the invention or biologically active portion thereof is recombinantly produced, it is also preferably substantially free of culture medium, i.e., culture medium represents less than about 20%, more preferably less than about 10%, and most preferably less than about 5% of the volume of the polypeptide preparation. The language “substantially free of chemical precursors or other chemicals” includes preparations of GABA increasing polypeptide of the invention in which the polypeptide is separated from chemical precursors or other chemicals that are involved in the synthesis of the polypeptide. In one embodiment, the language “substantially free of chemical precursors or other chemicals” includes preparations of a GABA increasing polypeptide of the invention having less than about 30% (by dry weight) of chemical precursors or non-GABA increasing polypeptide of the invention chemicals, more preferably less than about 20% chemical precursors or non-GABA increasing polypeptide of the invention chemicals, still more preferably less than about 10% chemical precursors or non-GABA increasing polypeptide of the invention chemicals, and most preferably less than about 5% chemical precursors or non-GABA increasing polypeptide of the invention chemicals. In preferred embodiments, isolated polypeptides, or biologically active portions thereof, lack contaminating polypeptides from the same organism from which the GABA increasing polypeptide of the invention is derived. Typically, such polypeptides are produced by recombinant expression of, for example, a Saccharomyces cerevisiae, E. coli or Brassica napus, Glycine max, Zea mays or Oryza sativa GABA increasing polypeptide of the invention in plants other than Saccharomyces cerevisiae, E. coli, or microorganisms such as C. glutamicum, ciliates, algae or fungi.

[0829] The nucleic acid molecules, polypeptides, polypeptide homologs, fusion polypeptides, primers, vectors, and host cells described herein can be used in one or more of the following methods: identification of Saccharomyces cerevisiae, E. coli or Brassica napus, Glycine max, Zea mays or Oryza sativa and related organisms; mapping of genomes of organisms related to Saccharomyces cerevisiae, E. coli; identification and localization of Saccharomyces cerevisiae, E. coli or Brassica napus, Glycine max, Zea mays or Oryza sativa sequences of interest; evolutionary studies; determination of regions required for function in the GABA increasing polypeptide of the invention; modulation of a GABA increasing polypeptide activity; modulation of the metabolism of one or more cell functions; modulation of the transmembrane transport of one or more compounds; modulation of stress resistance; and modulation of expression of GABA increasing polypeptide nucleic acids.

[0830] The nucleic acid molecules of the invention are also useful for evolutionary and polypeptide structural studies. The metabolic and transport processes in which the molecules of the invention participate are utilized by a wide variety of prokaryotic and eukaryotic cells; by comparing the sequences of the nucleic acid molecules of the present invention to those encoding similar enzymes from other organisms, the evolutionary relatedness of the organisms can be assessed. Similarly, such a comparison permits an assessment of which regions of the sequence are conserved and which are not, which may aid in determining those regions of the polypeptide that are essential for the functioning of the enzyme. This type of determination is of value for polypeptide engineering studies and may give an indication of what the polypeptide can tolerate in terms of mutagenesis without losing function.

[0831] Manipulation of the nucleic acid molecules of the invention may result in the production of having functional differences from the wild-type. These polypeptides may be improved in efficiency or activity, may be present in greater numbers in the cell than is usual, or may be decreased in efficiency or activity.

[0832] There are a number of mechanisms by which the alteration of a GABA increasing polypeptide of the invention of the invention may directly affect stress response and/or stress tolerance. In the case of plants expressing GABA increasing polypeptide of the invention, increased transport can lead to improved salt and/or solute partitioning within the plant tissue and organs. By either increasing the number or the activity of transporter molecules which export ionic molecules from the cell, it may be possible to affect the salt and cold tolerance of the cell.

[0833] The effect of the genetic modification in plants, on stress tolerance can be assessed by growing the modified plant under less than suitable conditions and then analyzing the growth characteristics and/or metabolism of the plant. Such analysis techniques are well known to one skilled in the art, and include dry weight, wet weight, polypeptide synthesis, carbohydrate synthesis, lipid synthesis, evapotranspiration rates, general plant and/or crop yield, flowering, reproduction, seed setting, root growth, respiration rates, photosynthesis rates, etc. (Applications of HPLC in Biochemistry in: Laboratory Techniques in Biochemistry and Molecular Biology, vol. 17; Rehm et al., 1993 Biotechnology, vol. 3, Chapter III: Product recovery and purification, page 469-714, VCH: Weinheim; Belter, P. A. et al., 1988, Bioseparations: downstream processing for biotechnology, John Wiley and Sons; Kennedy, J. F. and Cabral, J. M. S., 1992, Recovery processes for biological materials, John Wiley and Sons; Shaeiwitz, J. A. and Henry, J. D., 1988, Biochemical separations, in: Ulmann's Encyclopedia of Industrial Chemistry, vol. B3, Chapter 11, page 1-27, VCH: Weinheim; and Dechow, F. J., 1989, Separation and purification techniques in biotechnology, Noyes Publications).

[0834] For example, yeast expression vectors comprising the nucleic acids disclosed herein, or fragments thereof, can be constructed and transformed into Saccharomyces cerevisiae using standard protocols. The resulting transgenic cells can then be assayed for fail or alteration of their tolerance to drought, salt, and cold stress. Similarly, plant expression vectors comprising the nucleic acids disclosed herein, or fragments thereof, can be constructed and transformed into an appropriate plant cell such as Arabidopsis, soy, rape, maize, cotton, rice, wheat, Medicago truncatula, etc., using standard protocols. The resulting transgenic cells and/or plants derived therefrom can then be assayed for fail or alteration of their tolerance to drought, salt, cold stress.

[0835] The engineering of one or more genes according to table I and coding for the GABA increasing polypeptide of the invention of table II of the invention may also result in GABA increasing polypeptide of the invention having altered activities which indirectly impact the stress response and/or stress tolerance of algae, plants, ciliates, or fungi, or other microorganisms like C. glutamicum.

[0836] Additionally, the sequences disclosed herein, or fragments thereof, can be used to generate knockout mutations in the genomes of various organisms, such as bacteria, mammalian cells, yeast cells, and plant cells (Girke, T., 1998, The Plant Journal 15:39-48). The resultant knockout cells can then be evaluated for their ability or capacity to tolerate various stress conditions, their response to various stress conditions, and the effect on the phenotype and/or genotype of the mutation. For other methods of gene inactivation, see U.S. Pat. No. 6,004,804 “Non-Chimeric Mutational Vectors” and Puttaraju et al., 1999, Spliceosome-mediated RNA trans-splicing as a tool for gene therapy, Nature Biotechnology 17:246-252.

[0837] The aforementioned mutagenesis strategies for GABA-related Proteins resulting in increased stress resistance are not meant to be limiting; variations on these strategies will be readily apparent to one skilled in the art. Using such strategies, and incorporating the mechanisms disclosed herein, the nucleic acid and polypeptide molecules of the invention may be utilized to generate algae, ciliates, plants, fungi, or other microorganisms like C. glutamicum expressing mutated GABA-related Proteins nucleic acid and polypeptide molecules such that the stress tolerance is improved.

[0838] The present invention also provides antibodies that specifically bind to a GABA increasing polypeptide of the invention, or a portion thereof, as encoded by a nucleic acid described herein. Antibodies can be made by many well-known methods (See, e.g. Harlow and Lane, “Antibodies; A Laboratory Manual,” Cold Spring Harbor Laboratory, Cold Spring Harbor, N.Y., (1988)). Briefly, purified antigen can be injected into an animal in an amount and in intervals sufficient to elicit an immune response. Antibodies can either be purified directly, or spleen cells can be obtained from the animal. The cells can then fused with an immortal cell line and screened for anti-body secretion. The antibodies can be used to screen nucleic acid clone libraries for cells secreting the antigen. Those positive clones can then be sequenced. See, for example, Kelly et al., 1992, Bio/Technology 10:163-167; Bebbington et al., 1992, Bio/Technology 10:169-175.

[0839] The phrases “selectively binds” and “specifically binds” with the polypeptide refer to a binding reaction that is determinative of the presence of the polypeptide in a heterogeneous population of polypeptides and other biologics. Thus, under designated immunoassay conditions, the specified antibodies bound to a particular polypeptide do not bind in a significant amount to other polypeptides present in the sample. Selective binding of an antibody under such conditions may require an antibody that is selected for its specificity for a particular polypeptide. A variety of immunoassay formats may be used to select antibodies that selectively bind with a particular polypeptide. For example, solid-phase ELISA immunoassays are routinely used to select antibodies selectively immunoreactive with a polypeptide. See Harlow and Lane, “Antibodies, A Laboratory Manual,” Cold Spring Harbor Publications, New York, (1988), for a description of immunoassay formats and conditions that could be used to determine selective binding.

[0840] In some instances, it is desirable to prepare monoclonal antibodies from various hosts. A description of techniques for preparing such monoclonal antibodies may be found in Stites et al., eds., “Basic and Clinical Immunology,” (Lange Medical Publications, Los Altos, Calif., Fourth Edition) and references cited therein, and in Harlow and Lane, “Antibodies, A Laboratory Manual,” Cold Spring Harbor Publications, New York, (1988).

[0841] Gene expression in plants is regulated by the interaction of protein transcription factors with specific nucleotide sequences within the regulatory region of a gene. One example of transcription factors are polypeptides that contain zinc finger (ZF) motifs. Each ZF module is approximately 30 amino acids long folded around a zinc ion. The DNA recognition domain of a ZF protein is a α-helical structure that inserts into the major grove of the DNA double helix. The module contains three amino acids that bind to the DNA with each amino acid contacting a single base pair in the target DNA sequence. ZF motifs are arranged in a modular repeating fashion to form a set of fingers that recognize a contiguous DNA sequence. For example, a three-fingered ZF motif will recognize 9 bp of DNA. Hundreds of proteins have been shown to contain ZF motifs with between 2 and 37 ZF modules in each protein (Isalan M, et al., 1998 Biochemistry 37(35):12026-33; Moore M, et al., 2001 Proc. Natl. Acad. Sci. USA 98(4):1432-1436 and 1437-1441; U.S. Pat. No. 6,007,988 and U.S. Pat. No. 6,013,453).

[0842] The regulatory region of a plant gene contains many short DNA sequences (cis-acting elements) that serve as recognition domains for transcription factors, including ZF proteins. Similar recognition domains in different genes allow the coordinate expression of several genes encoding enzymes in a metabolic pathway by common transcription factors. Variation in the recognition domains among members of a gene family facilitates differences in gene expression within the same gene family, for example, among tissues and stages of development and in response to environmental conditions.

[0843] Typical ZF proteins contain not only a DNA recognition domain but also a functional domain that enables the ZF protein to activate or repress transcription of a specific gene. Experimentally, an activation domain has been used to activate transcription of the target gene (U.S. Pat. No. 5,789,538 and patent application WO9519431), but it is also possible to link a transcription repressor domain to the ZF and thereby inhibit transcription (patent applications WO00/47754 and WO2001002019). It has been reported that an enzymatic function such as nucleic acid cleavage can be linked to the ZF (patent application WO00/20622)

[0844] The invention provides a method that allows one skilled in the art to isolate the regulatory region of one or more stress related protein encoding genes from the genome of a plant cell and to design zinc finger transcription factors linked to a functional domain that will interact with the regulatory region of the gene. The interaction of the zinc finger protein with the plant gene can be designed in such a manner as to alter expression of the gene and preferably thereby to confer increased GABA content.

[0845] In particular, the invention provides a method of producing a transgenic plant with a stress related protein coding nucleic acid, wherein expression of the nucleic acid(s) in the plant results in increased tolerance to environmental stress as compared to a wild type plant comprising: (a) transforming a plant cell with an expression vector comprising a stress related protein encoding nucleic acid, and (b) generating from the plant cell a transgenic plant with an increased GABA content as compared to a wild type plant. For such plant transformation, binary vectors such as pBinAR can be used (Höfgen and Willmitzer, 1990 Plant Science 66:221-230). Moreover suitable binary vectors are for example pBIN19, pBI101, pGPTV or pPZP (Hajukiewicz, P. et al., 1994, Plant Mol. Biol., 25: 989-994).

[0846] Construction of the binary vectors can be performed by ligation of the cDNA into the T-DNA. 5′ to the cDNA a plant promoter activates transcription of the cDNA. A polyadenylation sequence is located 3′ to the cDNA. Tissue-specific expression can be achieved by using a tissue specific promoter as listed above. Also, any other promoter element can be used. For constitutive expression within the whole plant, the CaMV 35S promoter can be used. The expressed protein can be targeted to a cellular compartment using a signal peptide, for example for plastids, mitochondria or endoplasmic reticulum (Kermode, 1996 Crit. Rev. Plant Sci. 4(15):285-423). The signal peptide is cloned 5′ in frame to the cDNA to archive subcellular localization of the fusion protein. Additionally, promoters that are responsive to abiotic stresses can be used with, such as the Arabidopsis promoter RD29A. One skilled in the art will recognize that the promoter used should be operatively linked to the nucleic acid such that the promoter causes transcription of the nucleic acid which results in the synthesis of a mRNA which encodes a polypeptide.

[0847] Alternate methods of transfection include the direct transfer of DNA into developing flowers via electroporation or Agrobacterium mediated gene transfer. Agrobacterium mediated plant transformation can be performed using for example the GV3101(pMP90) (Koncz and Schell, 1986 Mol. Gen. Genet. 204:383-396) or LBA4404 (Ooms et al., Plasmid, 1982, 7: 15-29; Hoekema et al., Nature, 1983, 303: 179-180) Agrobacterium tumefaciens strain. Transformation can be performed by standard transformation and regeneration techniques (Deblaere et al., 1994 Nucl. Acids. Res. 13:4777-4788; Gelvin and Schilperoort, Plant Molecular Biology Manual, 2nd Ed.—Dordrecht: Kluwer Academic Publ., 1995.—in Sect., Ringbuc Zentrale Signatur: BT11-P ISBN 0-7923-2731-4; Glick, B R and Thompson, J E, Methods in Plant Molecular Biology and Biotechnology, Boca Raton: CRC Press, 1993.-360 S., ISBN 0-8493-5164-2). For example, rapeseed can be transformed via cotyledon or hypocotyl transformation (Moloney et al., 1989 Plant Cell Reports 8:238-242; De Block et al., 1989 Plant Physiol. 91:694-701). Use of antibiotics for Agrobacterium and plant selection depends on the binary vector and the Agrobacterium strain used for transformation. Rapeseed selection is normally performed using kanamycin as selectable plant marker. Agrobacterium mediated gene transfer to flax can be performed using, for example, a technique described by Mlynarova et al., 1994 Plant Cell Report 13:282-285. Additionally, transformation of soybean can be performed using for example a technique described in European Patent No. 0424 047, U.S. Pat. No. 5,322,783, European Patent No. 0397 687, U.S. Pat. No. 5,376,543 or U.S. Pat. No. 5,169,770. Transformation of maize can be achieved by particle bombardment, polyethylene glycol mediated DNA uptake or via the silicon carbide fiber technique (see, for example, Freeling and Walbot “The maize handbook” Springer Verlag: New York (1993) ISBN 3-540-97826-7). A specific example of maize transformation is found in U.S. Pat. No. 5,990,387 and a specific example of wheat transformation can be found in PCT Application No. WO 93/07256.

[0848] Growing the modified plants under stress conditions and then screening and analyzing the growth characteristics and/or metabolic activity assess the effect of the genetic modification in plants on increased GABA content. Such analysis techniques are well known to one skilled in the art. They include next to screening (Römpp Lexikon Biotechnologie, Stuttgart/New York: Georg Thieme Verlag 1992, “screening” p. 701) dry weight, wet weight, protein synthesis, carbohydrate synthesis, lipid synthesis, evapotranspiration rates, general plant and/or crop yield, flowering, reproduction, seed setting, root growth, respiration rates, photosynthesis rates, etc. (Applications of HPLC in Biochemistry in: Laboratory Techniques in Biochemistry and Molecular Biology, vol. 17; Rehm et al., 1993 Biotechnology, vol. 3, Chapter III: Product recovery and purification, page 469-714, VCH: Weinheim; Belter, P. A. et al., 1988 Bioseparations: downstream processing for biotechnology, John Wiley and Sons; Kennedy, J. F. and Cabral, J. M. S., 1992 Recovery processes for biological materials, John Wiley and Sons; Shaeiwitz, J. A. and Henry, J. D., 1988 Biochemical separations, in: Ulmann's Encyclopedia of Industrial Chemistry, vol. B3, Chapter 11, page 1-27, VCH: Weinheim; and Dechow, F. J. (1989) Separation and purification techniques in biotechnology, Noyes Publications).

[0849] In one embodiment, the present invention relates to a method for the identification of a gene product conferring increased GABA content as compared to a corresponding non-transformed wild type in a cell of an organism for example plant, comprising the following steps:

a) contacting, e.g. hybridising, some or all nucleic acid molecules of a sample, e.g. cells, tissues, plants or microorganisms or a nucleic acid library, which can contain a candidate gene encoding a gene product conferring increased GABA content, with a nucleic acid molecule as shown in column 5 or 7 of Table I A or B or a functional homologue thereof;
b) identifying the nucleic acid molecules, which hybridize under relaxed stringent conditions with said nucleic acid molecule, in particular to the nucleic acid molecule sequence shown in column 5 or 7 of Table I and, optionally, isolating the full length cDNA clone or complete genomic clone;
c) identifying the candidate nucleic acid molecules or a fragment thereof in host cells, preferably in a plant cell
d) increasing the expressing of the identified nucleic acid molecules in the host cells for which increased GABA content as desired
e) assaying the level of increased GABA content of the host cells; and
f) identifying the nucleic acid molecule and its gene product which increased expression confers increased GABA content in the host cell compared to the wild type.

[0850] Relaxed hybridisation conditions are: After standard hybridisation procedures washing steps can be performed at low to medium stringency conditions usually with washing conditions of 40°-55° C. and salt conditions between 2×SSC and 0.2×SSC with 0.1% SDS in comparison to stringent washing conditions as e.g. 60° to 68° C. with 0.1% SDS. Further examples can be found in the references listed above for the stringend hybridization conditions. Usually washing steps are repeated with increasing stringency and length until a useful signal to noise ratio is detected and depend on many factors as the target, e.g. its purity, GC-content, size etc, the probe, e.g. its length, is it a RNA or a DNA probe, salt conditions, washing or hybridisation temperature, washing or hybridisation time etc.

[0851] In another embodiment, the present invention relates to a method for the identification of a gene product the expression of which confers an increased GABA content in a cell, comprising the following steps:

a) identifying a nucleic acid molecule in an organism, which is at least 20%, preferably 25%, more preferably 30%, even more preferred are 35%. 40% or 50%, even more preferred are 60%, 70% or 80%, most preferred are 90% or 95% or more homolog to the nucleic acid molecule encoding a protein comprising the polypeptide molecule as shown in column 5 or 7 of Table II or comprising a consensus sequence or a polypeptide motif as shown in column 7 of Table IV or being encoded by a nucleic acid molecule comprising a polynucleotide as shown in column 5 or 7 of Table I or a homologue thereof as described herein, for example via homology search in a data bank;
b) enhancing the expression of the identified nucleic acid molecules in the host cells;
c) assaying the level of increased GABA content in the host cells; and
d) identifying the host cell, in which the enhanced expression confers increased GABA content in the host cell compared to a wild type.

[0852] Further, the nucleic acid molecule disclosed herein, in particular the nucleic acid molecule shown column 5 or 7 of Table I A or B, may be sufficiently homologous to the sequences of related species such that these nucleic acid molecules may serve as markers for the construction of a genomic map in related organism or for association mapping. Furthermore natural variation in the genomic regions corresponding to nucleic acids disclosed herein, in particular the nucleic acid molecule shown column 5 or 7 of Table I A or B, or homologous thereof may lead to variation in the activity of the proteins disclosed herein, in particular the proteins comprising polypeptides as shown in column 5 or 7 of Table II A or B or comprising the consensus sequence or the polypeptide motif as shown in column 7 of Table IV, and their homolgous and in consequence in natural variation in GABA content.

[0853] In consequence natural variation eventually also exists in form of more active allelic variants leading already to a relative increase in the GABA content. Different variants of the nucleic acids molecule disclosed herein, in particular the nucleic acid comprising the nucleic acid molecule as shown column 5 or 7 of Table I A or B, which corresponds to different GABA concentration levels can be identified and used for marker assisted breeding for increased GABA content.

[0854] Accordingly, the present invention relates to a method for breeding plants for increased GABA content, comprising

a) selecting a first plant variety with increased GABA content based on increased expression of a nucleic acid of the invention as disclosed herein, in particular of a nucleic acid molecule comprising a nucleic acid molecule as shown in column 5 or 7 of Table I A or B or a polypeptide comprising a polypeptide as shown in column 5 or 7 of Table II A or B or comprising a consensus sequence or a polypeptide motif as shown in column 7 of Table IV, or a homologue thereof as described herein;
b) associating the level of GABA concentration with the expression level or the genomic structure of a gene encoding said polypeptide or said nucleic acid molecule;
c) crossing the first plant variety with a second plant variety, which significantly differs in its level of GABA concentration and
e) identifying, which of the offspring varieties has got increased levels of GABA concentration by the expression level of said polypeptide or nucleic acid molecule or the genomic structure of the genes encoding said polypeptide or nucleic acid molecule of the invention.

[0855] In one embodiment, the expression level of the gene according to step (b) is increased.

[0856] Yet another embodiment of the invention relates to a process for the identification of a compound conferring increased GABA content as compared to a corresponding non-transformed wild type in a plant cell, a plant or a part thereof, a plant or a part thereof, comprising the steps:

a) culturing a plant cell; a plant or a part thereof maintaining a plant expressing the polypeptide as shown in column 5 or 7 of Table II or being encoded by a nucleic acid molecule comprising a polynucleotide as shown in column 5 or 7 of Table I or a homologue thereof as described herein or a polynucleotide encoding said polypeptide and conferring an increased GABA content as compared to a corresponding non-transformed wild type and providing a readout system capable of interacting with the polypeptide under suitable conditions which permit the interaction of the polypeptide with this readout system in the presence of a chemical compound or a sample comprising a plurality of chemical compounds and capable of providing a detectable signal in response to the binding of a chemical compound to said polypeptide under conditions which permit the expression of said readout system and of the protein as shown in column 5 or 7 of Table II or being encoded by a nucleic acid molecule comprising a polynucleotide as shown in column 5 or 7 of Table I or a homologue thereof as described herein; and
b) identifying if the chemical compound is an effective agonist by detecting the presence or absence or decrease or increase of a signal produced by said readout system.

[0857] Said compound may be chemically synthesized or microbiologically produced and/or comprised in, for example, samples, e.g., cell extracts from, e.g., plants, animals or microorganisms, e.g. pathogens. Furthermore, said compound(s) may be known in the art but hitherto not known to be capable of suppressing the polypeptide of the present invention. The reaction mixture may be a cell free extract or may comprise a cell or tissue culture. Suitable set ups for the process for identification of a compound of the invention are known to the person skilled in the art and are, for example, generally described in Alberts et al., Molecular Biology of the Cell, third edition (1994), in particular Chapter 17. The compounds may be, e.g., added to the reaction mixture, culture medium, injected into the cell or sprayed onto the plant.

[0858] If a sample containing a compound is identified in the process, then it is either possible to isolate the compound from the original sample identified as containing the compound capable of activating or increasing yield production under condition of transient and repetitive abiotic stress as compared to a corresponding non-transformed wild type, or one can further subdivide the original sample, for example, if it consists of a plurality of different compounds, so as to reduce the number of different substances per sample and repeat the method with the subdivisions of the original sample. Depending on the complexity of the samples, the steps described above can be performed several times, preferably until the sample identified according to the said process only comprises a limited number of or only one substance(s). Preferably said sample comprises substances of similar chemical and/or physical properties, and most preferably said substances are identical. Preferably, the compound identified according to the described method above or its derivative is further formulated in a form suitable for the application in plant breeding or plant cell and tissue culture.

[0859] The compounds which can be tested and identified according to said process may be expression libraries, e.g., cDNA expression libraries, peptides, proteins, nucleic acids, antibodies, small organic compounds, hormones, peptidomimetics, PNAs or the like (Milner, Nature Medicine 1 (1995), 879-880; Hupp, Cell 83 (1995), 237-245; Gibbs, Cell 79 (1994), 193-198 and references cited supra). Said compounds can also be functional derivatives or analogues of known inhibitors or activators. Methods for the preparation of chemical derivatives and analogues are well known to those skilled in the art and are described in, for example, Beilstein, Handbook of Organic Chemistry, Springer edition New York Inc., 175 Fifth Avenue, New York, N.Y. 10010 U.S.A. and Organic Synthesis, Wiley, New York, USA. Furthermore, said derivatives and analogues can be tested for their effects according to methods known in the art. Furthermore, peptidomimetics and/or computer aided design of appropriate derivatives and analogues can be used, for example, according to the methods described above. The cell or tissue that may be employed in the process preferably is a host cell, plant cell or plant tissue of the invention described in the embodiments hereinbefore.

[0860] Thus, in a further embodiment the invention relates to a compound obtained or identified according to the method for identifying an agonist of the invention said compound being an antagonist of the polypeptide of the present invention.

[0861] Accordingly, in one embodiment, the present invention further relates to a compound identified by the method for identifying a compound of the present invention.

[0862] In one embodiment, the invention relates to an antibody specifically recognizing the compound or agonist of the present invention.

[0863] The invention also relates to a diagnostic composition comprising at least one of the aforementioned nucleic acid molecules, antisense nucleic acid molecule, RNAi, snRNA, dsRNA, siRNA, miRNA, ta-siRNA, cosuppression molecule, ribozyme, vectors, proteins, antibodies or compounds of the invention and optionally suitable means for detection.

[0864] The diagnostic composition of the present invention is suitable for the isolation of mRNA from a cell and contacting the mRNA so obtained with a probe comprising a nucleic acid probe as described above under hybridizing conditions, detecting the presence of mRNA hybridized to the probe, and thereby detecting the expression of the protein in the cell. Further methods of detecting the presence of a protein according to the present invention comprise immunotechniques well known in the art, for example enzyme linked immunoadsorbent assay. Furthermore, it is possible to use the nucleic acid molecules according to the invention as molecular markers or primers in plant breeding. Suitable means for detection are well known to a person skilled in the art, e.g. buffers and solutions for hydridization assays, e.g. the aforementioned solutions and buffers, further and means for Southern-, Western-, Northern- etc.-blots, as e.g. described in Sambrook et al. are known. In one embodiment diagnostic composition contain PCR primers designed to specifically detect the presense or the expression level of the nucleic acid molecule to be reduced in the process of the invention, e.g. of the nucleic acid molecule of the invention, or to descriminate between different variants or alleles of the nucleic acid molecule of the invention or which activity is to be reduced in the process of the invention.

[0865] In another embodiment, the present invention relates to a kit comprising the nucleic acid molecule, the vector, the host cell, the polypeptide, or the antisense, RNAi, snRNA, dsRNA, siRNA, miRNA, ta-siRNA, cosuppression molecule, or ribozyme molecule, or the viral nucleic acid molecule, the antibody, plant cell, the plant or plant tissue, the harvestable part, the propagation material and/or the compound and/or agonist identified according to the method of the invention.

[0866] The compounds of the kit of the present invention may be packaged in containers such as vials, optionally with/in buffers and/or solution. If appropriate, one or more of said components might be packaged in one and the same container. Additionally or alternatively, one or more of said components might be adsorbed to a solid support as, e.g. a nitrocellulose filter, a glass plate, a chip, or a nylon membrane or to the well of a micro titerplate. The kit can be used for any of the herein described methods and embodiments, e.g. for the production of the host cells, transgenic plants, pharmaceutical compositions, detection of homologous sequences, identification of antagonists or agonists, as food or feed or as a supplement thereof or as supplement for the treating of plants, etc.

[0867] Further, the kit can comprise instructions for the use of the kit for any of said embodiments.

[0868] In one embodiment said kit comprises further a nucleic acid molecule encoding one or more of the aforementioned protein, and/or an antibody, a vector, a host cell, an antisense nucleic acid, a plant cell or plant tissue or a plant. In another embodiment said kit comprises PCR primers to detect and discriminate the nucleic acid molecule to be reduced in the process of the invention, e.g. of the nucleic acid molecule of the invention.

[0869] In a further embodiment, the present invention relates to a method for the production of an agricultural composition providing the nucleic acid molecule for the use according to the process of the invention, the nucleic acid molecule of the invention, the vector of the invention, the antisense, RNAi, snRNA, dsRNA, siRNA, miRNA, ta-siRNA, cosuppression molecule, ribozyme, or antibody of the invention, the viral nucleic acid molecule of the invention, or the polypeptide of the invention or comprising the steps of the method according to the invention for the identification of said compound or agonist; and formulating the nucleic acid molecule, the vector or the polypeptide of the invention or the agonist, or compound identified according to the methods or processes of the present invention or with use of the subject matters of the present invention in a form applicable as plant agricultural composition.

[0870] In another embodiment, the present invention relates to a method for the production of the plant culture composition comprising the steps of the method of the present invention; and formulating the compound identified in a form acceptable as agri-cultural composition.

[0871] Under “acceptable as agricultural composition” is understood, that such a composition is in agreement with the laws regulating the content of fungicides, plant nutrients, herbicides, etc. Preferably such a composition is without any harm for the protected plants and the animals (humans included) fed therewith.

[0872] The effect of the genetic modification in the host cell on the production of gamma-aminobutyric acid can be determined by growing the modified microorganisms or the modified plant under suitable conditions (such as those described above) and analyzing the medium and/or the cellular components for the elevated production of gamma-aminobutyric acid. These analytical techniques are known to the skilled worker and comprise spectroscopy, thin-layer chromatography, various types of staining methods, enzymatic and microbiological methods and analytical chromatography such as high-performance liquid chromatography (see, for example, Ullman, Encyclopedia of Industrial Chemistry, Vol. A2, p. 89-90 and p. 443-613, VCH: Weinheim (1985); Fallon, A., et al., (1987) “Applications of HPLC in Biochemistry” in: Laboratory Techniques in Biochemistry and Molecular Biology, Vol. 17; Rehm et al. (1993) Biotechnology, Vol. 3, Chapter III: “Product recovery and purification”, p. 469-714, VCH: Weinheim; Belter, P. A., et al. (1988) Bioseparations: downstream processing for Biotechnology, John Wiley and Sons; Kennedy, J. F., and Cabral, J. M. S. (1992) Recovery processes for biological Materials, John Wiley and Sons; Shaeiwitz, J. A., and Henry, J. D. (1988) Biochemical Separations, in: Ullmann's Encyclopedia of Industrial Chemistry, Vol. B3; Chapter 11, p. 1-27, VCH: Weinheim; and Dechow, F. J. (1989) Separation and purification techniques in biotechnology, Noyes Publications). Gamma-aminobutyric acid can for example be detected advantageously via HPLC, LC or GC separation methods. The unambiguous detection for the presence of gamma-aminobutyric acid containing products can be obtained by analyzing recombinant organisms using analytical standard methods: LC, LC-MS, MS or TLC). The material to be analyzed can be disrupted by sonication, grinding in a glass mill, liquid nitrogen and grinding, cooking, or via other applicable methods.

[0873] The GABA can be isolated and purified.

[0874] The unambiguous detection for the presence of gamma-aminobutyric acid can be obtained by analyzing recombinant organisms using analytical standard methods: LC, LC-MSMS or TLC, as described. The total amount produced in the organism for example in yeasts used in the inventive process can be analysed for example according to the following procedure:

[0875] The material such as yeasts, E. coli or plants to be analyzed can be disrupted by sonication, grinding in a glass mill, liquid nitrogen and grinding or via other applicable methods.

[0876] Plant material is initially homogenized mechanically by comminuting in a pestle and mortar to make it more amenable to extraction.

[0877] A typical sample pretreatment consists of a total lipid extraction using such polar organic solvents as acetone or alcohols as methanol, or ethers, saponification, partition between phases, separation of non-polar epiphase from more polar hypophasic derivatives and chromatography.

[0878] For analysis, solvent delivery and aliquot removal can be accomplished with a robotic system comprising a single injector valve Gilson 232XL and a 402 2S1V diluter [Gilson, Inc. USA, 3000 W. Beltline Highway, Middleton, Wis.]. For saponification, 3 ml of 50% potassium hydroxide hydro-ethanolic solution (4 water-1 ethanol) can be added to each vial, followed by the addition of 3 ml of octanol. The saponification treatment can be conducted at room temperature with vials maintained on an IKA HS 501 horizontal shaker [Labworld-online, Inc., Wilmington, N.C.] for fifteen hours at 250 movements/minute, followed by a stationary phase of approximately one hour.

[0879] Following saponification, the supernatant can be diluted with 0.17 ml of methanol. The addition of methanol can be conducted under pressure to ensure sample homogeneity. Using a 0.25 ml syringe, a 0.1 ml aliquot can be removed and transferred to HPLC vials for analysis.

[0880] For HPLC analysis, a Hewlett Packard 1100 HPLC, complete with a quaternary pump, vacuum degassing system, six-way injection valve, temperature regulated autosampler, column oven and Photodiode Array detector can be used [Agilent Technologies available through Ultra Scientific Inc., 250 Smith Street, North Kingstown, R.I.]. The column can be a Waters YMC30, 5-micron, 4.6×250 mm with a guard column of the same material [Waters, 34 Maple Street, Milford, Mass.]. The solvents for the mobile phase can be 81 methanol: 4 water: 15 tetrahydrofuran (THF) stabilized with 0.2% BHT (2,6-di-tert-butyl-4-methylphenol). Injections were 20 □l. Separation can be isocratic at 30° C. with a flow rate of 1.7 ml/minute. The peak responses can be measured by absorbance at 447 nm.

[0881] If required and desired, further chromatography steps with a suitable resin may follow. Advantageously, the gamma-aminobutyric acid can be further purified with a so-called RTHPLC. As eluent acetonitrile/water or chloroform/acetonitrile mixtures can be used. If necessary, these chromatography steps may be repeated, using identical or other chromatography resins. The skilled worker is familiar with the selection of suitable chromatography resin and the most effective use for a particular molecule to be purified.

[0882] Abbreviations; GC-MS, gas liquid chromatography/mass spectrometry; TLC, thin-layer chromatography.

[0883] The identity and purity of the compound(s) isolated can be determined by prior-art techniques. They encompass high-performance liquid chromatography (HPLC), gas chromatography (GC), spectroscopic methods, mass spectrometry (MS), staining methods, thin-layer chromatography, NIRS, enzyme assays or microbiological assays. These analytical methods are compiled in: Patek et al. (1994) Appl. Environ. Microbiol. 60:133-140; Malakhova et al. (1996) Biotekhnologiya 11 27-32; and Schmidt et al. (1998) Bioprocess Engineer. 19:67-70. Ulmann's Encyclopedia of Industrial Chemistry (1996) Bd. A27, VCH Weinheim, pp. 89-90, pp. 521-540, pp. 540-547, pp. 559-566, 575-581 and pp. 581-587; Michal, G (1999) Biochemical Pathways: An Atlas of Biochemistry and Molecular Biology, John Wiley and Sons; Fallon, A. et al. (1987) Applications of HPLC in Biochemistry in: Laboratory Techniques in Biochemistry and Molecular Biology, vol. 17.

[0884] The gamma-aminobutyric acid obtained in the process are suitable as starting material for the synthesis of further products of value. For example, they can be used in combination with each other or alone for the production of pharmaceuticals, foodstuffs, animal feeds or cosmetics. Accordingly, the present invention relates a method for the production of pharmaceuticals, food stuff, animal feeds, nutrients or cosmetics comprising the steps of the process according to the invention, including the isolation of the gamma-aminobutyric acid composition produced or the GABA produced if desired and formulating the product with a pharmaceutical acceptable carrier or formulating the product in a form acceptable for an application in agriculture. A further embodiment according to the invention is the use of the gamma-aminobutyric acid produced in the process or of the transgenic organisms in animal feeds, foodstuffs, medicines, food supplements, cosmetics or pharmaceuticals or for the production of gamma-aminobutyric acid e.g. after isolation of the GABA or without, e.g. in situ, e.g in the or ganism used for the process for the production of the GABA.

[0885] The plants of the invention, e.g. having an increase GABA content, have an increase nitrogen uptake. Additionally these plants have an increase nitrogen assimilation and utilization, preferably at low nitrogen disposal and/or nitrogen deprivation.

[0886] In one embodiment of the present invention, an enhanced nitrogen uptake leads into an increased nitrogen use efficiency. An increased nitrogen use efficiency is further in one embodiment an enhanced nitrogen uptake, assimilation and utilization.

[0887] In one embodiment of the present invention, an enhanced nitrogen uptake leads into an increased plant yield. So an increased yield is mediated by increasing the “nitrogen use efficiency of a plant”.

[0888] In one embodiment the plants of the invention show an increase GABA content and an increase nitrogen uptake. In one embodiment these plants have additionally an increase nitrogen assimilation and utilization, preferably at low nitrogen disposal and/or nitrogen deprivation.

[0889] In one embodiment of the plants of the invention show an increased GABA content and increased nitrogen use efficiency.

[0890] In one embodiment of the plants of the present invention have an increased GABA content and increased plant yield.

[0891] In a further embodiment, an increased tolerance to abiotic environmental stress and/or increased yield related trait, in particular increased nutrient use efficiency, preferably nitrogen use efficiency, compared to a corresponding non-modified, e.g. a non-transformed, wild type plant is conferred if the activity of a polypeptide comprising the polypeptide shown in SEQ ID NO. 43, or encoded by a nucleic acid molecule comprising the nucleic acid molecule shown in SEQ ID NO. 42, or a homolog of said nucleic acid molecule or polypeptide, is increased or generated. For example, the activity of a corresponding nucleic acid molecule or a polypeptide derived from Saccharomyces cerevisiae is increased or generated, preferably comprising the nucleic acid molecule shown in SEQ ID NO. 42 or polypeptide shown in SEQ ID NO. 43, respectively, or a homolog thereof. E.g. an increased tolerance to abiotic environmental stress and/or increased yield related trait, in particular increased nutrient use efficiency, preferably nitrogen use efficiency, compared to a corresponding non-modified, e.g. a non-transformed, wild type plant is conferred if the activity “Factor arrest protein” or if the activity of a nucleic acid molecule or a polypeptide comprising the nucleic acid or polypeptide or the consensus sequence or the polypeptide motif, depicted in table I, II or IV, column 7, respective same line as SEQ ID NO.: 42 or SEQ ID NO.: 43, respectively, is increased or generated in a plant or part thereof. Preferably, the increase occurs cytoplasmic.

[0892] Particularly, an increase of yield from 1.05-fold to 1.28-fold, for example plus at least 100% thereof, is conferred compared to a corresponding control, e.g. an non-modified, e.g. non-transformed, wild type plant.

[0893] In a further embodiment, an increased tolerance to abiotic environmental stress and/or increased yield related trait, in particular increased nutrient use efficiency, preferably nitrogen use efficiency, compared to a corresponding non-modified, e.g. a non-transformed, wild type plant is conferred if the activity of a polypeptide comprising the polypeptide shown in SEQ ID NO. 7138, or encoded by a nucleic acid molecule comprising the nucleic acid molecule shown in SEQ ID NO. 7137, or a homolog of said nucleic acid molecule or polypeptide, is increased or generated. For example, the activity of a corresponding nucleic acid molecule or a polypeptide derived from Saccharomyces cerevisiae is increased or generated, preferably comprising the nucleic acid molecule shown in SEQ ID NO. 7137 or polypeptide shown in SEQ ID NO. 7138, respectively, or a homolog thereof. E.g. an increased tolerance to abiotic environmental stress and/or increased yield related trait, in particular increased nutrient use efficiency, preferably nitrogen use efficiency, compared to a corresponding non-modified, e.g. a non-transformed, wild type plant is conferred if the activity “microsomal beta-ketoreductase” or if the activity of a nucleic acid molecule or a polypeptide comprising the nucleic acid or polypeptide or the consensus sequence or the polypeptide motif, depicted in table I, II or IV, column 7, respective same line as SEQ ID NO.: 7137 or SEQ ID NO.: 7138, respectively, is increased or generated in a plant or part thereof. Preferably, the increase occurs cytoplasmic. Particularly, an increase of yield from 1.05-fold to 1.38-fold, for example plus at least 100% thereof, is conferred compared to a corresponding control, e.g. an non-modified, e.g. non-transformed, wild type plant.

[0894] In a further embodiment, an increased tolerance to abiotic environmental stress and/or increased yield related trait, in particular increased nutrient use efficiency, preferably nitrogen use efficiency, compared to a corresponding non-modified, e.g. a non-transformed, wild type plant is conferred if the activity of a polypeptide comprising the polypeptide shown in SEQ ID NO. 8240, or encoded by a nucleic acid molecule comprising the nucleic acid molecule shown in SEQ ID NO. 8239, or a homolog of said nucleic acid molecule or polypeptide, is increased or generated. For example, the activity of a corresponding nucleic acid molecule or a polypeptide derived from Saccharomyces cerevisiae is increased or generated, preferably comprising the nucleic acid molecule shown in SEQ ID NO. 8239 or polypeptide shown in SEQ ID NO. 8240, respectively, or a homolog thereof. E.g. an increased tolerance to abiotic environmental stress and/or increased yield related trait, in particular increased nutrient use efficiency, preferably nitrogen use efficiency, compared to a corresponding non-modified, e.g. a non-transformed, wild type plant is conferred if the activity “60S ribosomal protein” or if the activity of a nucleic acid molecule or a polypeptide comprising the nucleic acid or polypeptide or the consensus sequence or the polypeptide motif, depicted in table I, II or IV, column 7, respective same line as SEQ ID NO.: 8239 or SEQ ID NO.: 8240, respectively, is increased or generated in a plant or part thereof. Preferably, the increase occurs cytoplasmic.

[0895] Particularly, an increase of yield from 1.05-fold to 1.223-fold, for example plus at least 100% thereof, is conferred compared to a corresponding control, e.g. an non-modified, e.g. non-transformed, wild type plant.

[0896] In a further embodiment, an increased tolerance to abiotic environmental stress and/or increased yield related trait, in particular increased nutrient use efficiency, preferably nitrogen use efficiency, compared to a corresponding non-modified, e.g. a non-transformed, wild type plant is conferred if the activity of a polypeptide comprising the polypeptide shown in SEQ ID NO. 8228, or encoded by a nucleic acid molecule comprising the nucleic acid molecule shown in SEQ ID NO. 8227, or a homolog of said nucleic acid molecule or polypeptide, is increased or generated. For example, the activity of a corresponding nucleic acid molecule or a polypeptide derived from Saccharomyces cerevisiae is increased or generated, preferably comprising the nucleic acid molecule shown in SEQ ID NO. 8227 or polypeptide shown in SEQ ID NO. 8228, respectively, or a homolog thereof. E.g. an increased tolerance to abiotic environmental stress and/or increased yield related trait, in particular increased nutrient use efficiency, preferably nitrogen use efficiency, compared to a corresponding non-modified, e.g. a non-transformed, wild type plant is conferred if the activity “cytochrome c oxidase subunit VIII” or if the activity of a nucleic acid molecule or a polypeptide comprising the nucleic acid or polypeptide or the consensus sequence or the polypeptide motif, depicted in table I, II or IV, column 7, respective same line as SEQ ID NO.: 8227 or SEQ ID NO.: 8228, respectively, is increased or generated in a plant or part thereof. Preferably, the increase occurs cytoplasmic. Particularly, an increase of yield from 1.05-fold to 1.56-fold, for example plus at least 100% thereof, is conferred compared to a corresponding control, e.g. an non-modified, e.g. non-transformed, wild type plant.

[0897] It was further observed that increasing or generating the activity of a gene shown in Table X, e.g. a nucleic acid molecule derived from the nucleic acid molecule shown in Table X in A. thaliana conferred increased nutrient use efficiency, preferably nitrogen use efficiency, compared to the wild type control. Thus, in one embodiment, a nucleic acid molecule indicated in Table X or its homolog as indicated in Table I or the expression product is used in the method of the present invention to increased nutrient use efficiency, preferably nitrogen use efficiency, of the plant compared to the wild type control.

[0898] In one embodiment of the invention the enhanced NUE is determinated and quantified according to the following methods:

### Procedure 1:

### Biomass Production on Agar Plates:

[0899] For screening of transgenic plants a specific culture facility is used. For high-throughput purposes plants are screened for biomass production on agar plates with limited supply of nitrogen (adapted from Estelle and Somerville, 1987). This screening pipeline consists of two levels. Transgenic lines are subjected to subsequent level if biomass production was significantly improved in comparison to wild type plants. With each level number of replicates and statistical stringency was increased.

[0900] For the sowing, the seeds, which can be stored in the refrigerator (at −20° C.), can be removed from the Eppendorf tubes with the aid of a toothpick and transferred onto the above-mentioned agar plates, with limited supply of nitrogen (0.05 mM KNO₃). In total, approximately 15-30 seeds can be distributed horizontally on each plate (12×12 cm). After the seeds are sown, plates are subjected to stratification for 2-4 days in the dark at 4° C. After the stratification, the test plants are grown for 22 to 25 days at a 16-h-light, 8-h-dark rhythm at 20° C., an atmospheric humidity of 60% and a CO₂ concentration of approximately 400 ppm. The light sources to be used generate a light resembling the solar color spectrum with a light intensity of approximately 100 μE/m²s. After 10 to 11 days the plants are individualized. Improved growth under nitrogen limited conditions is assessed by biomass production of shoots and roots of transgenic plants in comparison to wild type control plants after 20-25 days growth.

[0901] Transgenic lines showing a significant improved biomass production in comparison to wild type plants are subjected to following experiment of the subsequent level:

### Biomass Production on Soil:

[0902] Arabidopsis thaliana seeds are sown in pots containing a 1:1 (v/v) mixture of nutrient depleted soil (“Einheitserde Typ 0”, 30% clay, Tantau, Wansdorf Germany) and sand. Germination is induced by a four day period at 4° C., in the dark. Subsequently the plants are grown under standard growth conditions (photoperiod of 16 h light and 8 h dark, 20° C., 60% relative humidity, and a photon flux density of 200 μE/m²s). The plants are grown and cultured, inter alia they are watered every second day with a N-depleted nutrient solution. The N-depleted nutrient solution e.g. contains beneath water

| mineral nutrient | final concentration | |
|---|---|---|
| KCl | 3.00 | mM |
| MgSO₄ × 7 H₂O | 0.5 | mM |
| CaCl₂ × 6 H₂O | 1.5 | mM |
| K₂SO₄ | 1.5 | mM |
| NaH₂PO₄ | 1.5 | mM |
| Fe-EDTA | 40 | μM |
| H₃BO₃ | 25 | μM |
| MnSO₄ × H₂O | 1 | μM |
| ZnSO₄ × 7 H₂O | 0.5 | μM |
| Cu₂SO₄ × 5 H₂O | 0.3 | μM |
| Na₂MoO₄ × 2 H₂O | 0.05 | μM |

[0903] After 9 to 10 days the plants are individualized. After a total time of 29 to 31 days the plants are harvested and rated by the fresh weight of the aerial parts of the plants. The biomass increase can be measured as ratio of the fresh weight of the aerial parts of the respective transgene plant and the non-transgenic wild type plant.

### Procedure 2:

[0904] Procedure 2 can be performed like procedure 1, however, the screening on agar plates is omitted and a one-level screen on soil is performed.

[0905] Throughout this application, various publications are referenced. The disclosures of all of these publications and those references cited within those publications in their entireties are hereby incorporated by reference into this application in order to more fully describe the state of the art to which this invention pertains.

[0906] It should also be understood that the foregoing relates to preferred embodiments of the present invention and that numerous changes and variations may be made therein without departing from the scope of the invention. The invention is further illustrated by the following examples, which are not to be construed in any way as limiting. On the contrary, it is to be clearly understood that various other embodiments, modifications and equivalents thereof, which, after reading the description herein, may suggest themselves to those skilled in the art without departing from the spirit of the present invention and/or the scope of the claims.

### EXAMPLE 1

[0907] Engineering Arabidopsis plants by expressing genes of the present invention.

### EXAMPLE 1a

[0908] Cloning of the inventive sequences as shown in table I, column 5, for the expression in plants.

[0909] Unless otherwise specified, standard methods as described in Sambrook et al., Molecular Cloning: A laboratory manual, Cold Spring Harbor 1989, Cold Spring Harbor Laboratory Press are used.

[0910] The inventive sequences as shown in table I, column 5, were amplified by PCR as described in the protocol of the Pfu Ultra, Pfu Turbo or Herculase DNA polymerase (Stratagene).

[0911] The composition for the protocol of the Pfu Ultra, Pfu Turbo or Herculase DNA polymerase was as follows: 1×PCR buffer (Stratagene), 0.2 mM of each dNTP, 100 ng genomic DNA of Saccharomyces cerevisiae (strain S288C; Research Genetics, Inc., now Invitrogen), Escherichia coli (strain MG1655; E. coli Genetic Stock Center), Synechocystis sp. (strain PCC6803), Azotobacter vinelandii (strain N. R. Smith, 16), Thermus thermophilus (HB8) or 50 ng cDNA from various tissues and development stages of Arabidopsis thaliana (ecotype Columbia), Physcomitrella patens, Glycine max (variety Resnick), or Zea mays (variety B73, Mol 7, A188), 50 pmol forward primer, 50 pmol reverse primer, with or without 1 M Betaine, 2.5 u Pfu Ultra, Pfu Turbo or Herculase DNA polymerase.

The Amplification Cycles were as Follows:

[0912] 1 cycle of 2-3 minutes at 94-95° C., then 25-36 cycles with 30-60 seconds at 94-95° C., 30-45 seconds at 50-60° C. and 210-480 seconds at 72° C., followed by 1 cycle of 5-10 minutes at 72° C., then 4-16° C.—preferably for Saccharomyces cerevisiae; Escherichia coli, Synechocystis sp., Azotobacter vinelandii, Thermus thermophilus.

[0913] In case of Arabidopsis thaliana, Brassica napus, Glycine max, Oryza sativa, Physcomitrella patens, Zea mays the amplification cycles were as follows:

[0914] 1 cycle with 30 seconds at 94° C., 30 seconds at 61° C., 15 minutes at 72° C.,

then 2 cycles with 30 seconds at 94° C., 30 seconds at 60° C., 15 minutes at 72° C.,
then 3 cycles with 30 seconds at 94° C., 30 seconds at 59° C., 15 minutes at 72° C.,
then 4 cycles with 30 seconds at 94° C., 30 seconds at 58° C., 15 minutes at 72° C.,
then 25 cycles with 30 seconds at 94° C., 30 seconds at 57° C., 15 minutes at 72° C.,
then 1 cycle with 10 minutes at 72° C.,
then finally 4-16° C.

[0915] RNA were generated with the RNeasy Plant Kit according to the standard protocol (Qiagen) and Supersript II Reverse Transkriptase was used to produce double stranded cDNA according to the standard protocol (Invitrogen).

[0916] ORF specific primer pairs for the genes to be expressed are shown in table III, column 7. The following adapter sequences were added to Saccharomyces cerevisiae ORF specific primers for cloning purposes:

| SEQ ID NO: 1 | |
|---|---|
| i) | forward primer: 5′-GGAATTCCAGCTGACCACC-3′ |
| SEQ ID NO: 2 | |
| ii) | reverse primer: 5′-GATCCCCGGGAATTGCCATG-3′ |

[0917] These adaptor sequences allow cloning of the ORF into the various vectors containing the Resgen adaptors, see table column E of table VII.

[0918] The following adapter sequences were added to Saccharomyces cerevisiae, Escherichia coli, Synechocystis sp., Azotobacter vinelandii, Thermus thermophilus, Arabidopsis thaliana, Brassica napus or Physcomitrella patens ORF specific primers for cloning purposes:

| SEQ ID NO: 3 | |
|---|---|
| iii) | forward primer: 5′-TTGCTCTTCC-3′ |
| SEQ ID NO: 4 | |
| iv) | reverse primer: 5′-TTGCTCTTCG-3′ |

[0919] The adaptor sequences allow cloning of the ORF into the various vectors containing the Colic adaptors, see column E of table VII.

[0920] Therefore for amplification and cloning of Saccharomyces cerevisiae SEQ ID NO: 42, a primer consisting of the adaptor sequence i) and the ORF specific sequence SEQ ID NO: 48 and a second primer consisting of the adaptor sequence ii) and the ORF specific sequence SEQ ID NO: 49 or a primer consisting of the adaptor sequence iii) and the ORF specific sequence SEQ ID NO: 48 and a second primer consisting of the adaptor sequence iiii) and the ORF specific sequence SEQ ID NO: 49 were used.

[0921] For amplification and cloning of Echerichia coli SEQ ID NO: 4068, a primer consisting of the adaptor sequence iii) and the ORF specific sequence SEQ ID NO: 4160 and a second primer consisting of the adaptor sequence iiii) and the ORF specific sequence SEQ ID NO: 4161 were used.

[0922] For amplification and cloning of Synechocystis sp. SEQ ID NO: 6041, a primer consisting of the adaptor sequence iii) and the ORF specific sequence SEQ ID NO: 6461 and a second primer consisting of the adaptor sequence iiii) and the ORF specific sequence SEQ ID NO: 6462 were used.

[0923] For amplification and cloning of Azotobacter vinelandii SEQ ID NO: 2553, a primer consisting of the adaptor sequence iii) and the ORF specific sequence SEQ ID NO: 3397 and a second primer consisting of the adaptor sequence iiii) and the ORF specific sequence SEQ ID NO: 3398 were used.

[0924] For amplification and cloning of Thermus thermophilus SEQ ID NO: 6469, a primer consisting of the adaptor sequence iii) and the ORF specific sequence SEQ ID NO: 6735 and a second primer consisting of the adaptor sequence iiii) and the ORF specific sequence SEQ ID NO: 6736 were used.

[0925] For amplification and cloning of Arabidopsis thaliana SEQ ID NO: 654, a primer consisting of the adaptor sequence iii) and the ORF specific sequence SEQ ID NO: 694 and a second primer consisting of the adaptor sequence iiii) and the ORF specific sequence SEQ ID NO: 695 were used.

[0926] For amplification and cloning of Brassica napus SEQ ID NO: 53, a primer consisting of the adaptor sequence iii) and the ORF specific sequence SEQ ID NO: 649 and a second primer consisting of the adaptor sequence iiii) and the ORF specific sequence SEQ ID NO: 650 were used.

[0927] For amplification and cloning of Physcomitrella patens SEQ ID NO: 5458, a primer consisting of the adaptor sequence iii) and the ORF specific sequence SEQ ID NO: 6038 and a second primer consisting of the adaptor sequence iiii) and the ORF specific sequence SEQ ID NO: 6039 were used.

[0928] Following these examples every sequence disclosed in table I, preferably column 5, can be cloned by fusing the adaptor sequences to the respective specific primer sequences as disclosed in table III, column 7 using the respective vectors shown in table VII.

TABLE VII
Overview of the different vectors used for cloning the ORFs listing their SEQ IDs
(column A), their vector names (column B), the promoters they contain for expression
of the ORFs (column C), the additional artificial targeting sequence column D), the
adapter sequence (column E), the expression type conferred by the promoter mentioned
in column C (column F) and the FIGURE number (column G).

| A | B | | D | E | | |
|---|---|---|---|---|---|---|
| Seq | Vector | C | Target | Adapter | F | G |
| ID | Name | Promoter | Seq. | Seq. | Expression Type | FIG. |
| 30 | pMTX155 | Big35S | | Resgen | non targeted constitutive | 5 |
| | | | | | expression preferentially in | |
| | | | | | green tissues | |
| 31 | VC- | Super | FNR | Resgen | plastidic targeted constitutive | 3 |
| | MME354- | | | | expression preferentially | |
| | 1QCZ | | | | in green tissues | |
| 35 | VC- | Super | | Colic | non targeted constitutive | 1 |
| | MME220- | | | | expression preferentially in | |
| | 1qcz | | | | green tissues | |
| 36 | VC- | Super | FNR | Colic | plastidic targeted constitutive | 4 |
| | MME432- | | | | expression preferentially | |
| | 1qcz | | | | in green tissues | |
| 38 | VC- | PcUbi | | Colic | non targeted constitutive | 2 |
| | MME221- | | | | expression preferentially in | |
| | 1qcz | | | | green tissues | |
| 39 | pMTX447 | PcUbi | FNR | Colic | plastidic targeted constitutive | 6 |
| | korr | | | | expression preferentially | |
| | | | | | in green tissues | |
| 41 | VC- | Super | | Resgen | non targeted constitutive | 7 |
| | MME489- | | | | expression preferentially in | |
| | 1QCZ | | | | green tissues | |

### EXAMPLE 1b

### Construction of Binary Vectors for Non-Targeted Expression of Proteins.

[0929] “Non-targeted” expression in this context means, that no additional targeting sequence was added to the ORF to be expressed.

[0930] For non targeted expression in preferentially green tissues the following binary vectors were used for cloning: pMTX155, VC-MME220-1qcz and VC-MME221-1qcz.

[0931] For constitutive expression of ORFs from Saccharomyces cerevisiae in preferentially green tissues the enhanced 35S (Big35S) promoter (Comai et al., Plant Mol Biol 15, 373-383 (1990)) in context of the vector pMTX155 was used.

[0932] For constitutive expression of ORFs from Echerichia coli in preferentially green tissues an artificial promoter A(ocs)3AmasPmas promoter (Super promoter) (Ni et al., Plant Journal 7, 661 (1995), WO 95/14098) in context of the vector VC-MME220-1qcz was used.

[0933] For constitutive expression in preferentially green tissues and seeds the PcUbi promoter from parsley (Kawalleck et al., Plant. Molecular Biology, 21, 673 (1993), WO 2003/102198) was used in context of the vector VC-MME221-1qcz for ORFs from Saccharomyces cerevisiae, Echerichia coli, Synechocystis sp., Azotobacter vinelandii, Thermus thermophilus, Arabidopsis thaliana, Brassica napus, Glycine max, Oryza sativa, Physcomitrella patens, or Zea mays.

### EXAMPLE 1c

### Construction of Binary Vectors for Plastidic-Targeted Expression of Proteins

[0934] Amplification of the Plastid Targeting Sequence of the Gene FNR from Spinacia oleracea and Construction of Vector for Plastid-Targeted Expression in Preferential Green Tissues or Preferential in Seeds.

[0935] In order to amplify the targeting sequence of the FNR gene from S. oleracea, genomic DNA was extracted from leaves of 4 weeks old S. oleracea plants (DNeasy Plant Mini Kit, Qiagen, Hilden). The gDNA was used as the template for a PCR.

[0936] To enable cloning of the transit sequence into the vector VC-MME489-1QCZ, an EcoRI restriction enzyme recognition sequence was added to both the forward and reverse primers, whereas for cloning in the vector VC-MME220-1qcz and VC-MME221-1qcz a PmeI restriction enzyme recognition sequence was added to the forward primer and a NcoI site was added to the reverse primer.

SEQ ID NO: 5
FNR5EcoResgen
ATA gAA TTC gCA TAA ACT TAT CTT CAT AgT TgC C
SEQ ID NO: 6
FNR3EcoResgen
ATA gAA TTC AgA ggC gAT CTg ggC CCT
SEQ ID NO: 7
FNR5PmeColic
ATA gTT TAA ACg CAT AAA CTT ATC TTC ATA gTT gCC
SEQ ID NO: 8
FNR3NcoColic
ATA CCA Tgg AAg AgC AAg Agg CgA TCT ggg CCC T

[0937] The resulting sequence SEQ ID NO: 28 amplified from genomic spinach DNA, comprised a 5″UTR (bp 1-165), and the coding region (bp 166-273 and 351-419). The coding sequence is interrupted by an intronic sequence from by 274 to bp 350:

(SEQ ID NO: 28)
gcataaacttatcttcatagttgccactccaatttgctccttgaatctcc
tccacccaatacataatccactcctccatcacccacttcactactaaatc
aaacttaactctgtttttctctctcctcctttcatttcttattcttccaa
tcatcgtactccgccatgaccaccgctgtcaccgccgctgtttctttccc
ctctaccaaaaccacctctctctccgcccgaagctcctccgtcatttccc
ctgacaaaatcagctacaaaaaggtgattcccaatttcactgtgtattta
ttaataatttgttattttgatgatgagatgattaatttgggtgctgcagg
ttcctttgtactacaggaatgtatctgcaactgggaaaatgggacccatc
agggcccagatcgcctct

[0938] The PCR fragment derived with the primers FNR5EcoResgen and FNR3EcoResgen was digested with EcoRI and ligated in the vector VC-MME489-1 QCZ that had been digested with EcoRI. The correct orientation of the FNR targeting sequence was tested by sequencing. The vector generated in this ligation step was VC-MME354-1QCZ.

[0939] The PCR fragment derived with the primers FNR5PmeColic and FNR3NcoColic was digested with PmeI and NcoI and ligated in the vector VC-MME220-1qcz and VC-MME221-1qcz that had been digested with SmaI and NcoI. The vector generated in this ligation step was VC-MME432-1qcz and pMTX447korrp.

[0940] For plastidic-targeted constitutive expression in preferentially green tissues an artificial promoter A(ocs)₃AmasPmas promoter (Super promotor)) (Ni et al., Plant Journal 7, 661 (1995), WO 95/14098) was used in context of the vector VC-MME354-1QCZ for ORFs from Saccharomyces cerevisiae and in context of the vector VC-MME432-1qcz for ORFs from Escherichia coli, resulting in “in-frame” fusion of the FNR targeting sequence with the ORFs.

[0941] For plastidic-targeted constitutive expression in preferentially green tissues and seeds the PcUbi promoter was use in context of the vector pMTX447korrp for ORFs from Saccharomyces cerevisiae, Echerichia coli, Synechocystis sp., Azotobacter vinelandii, Thermus thermophilus, Arabidopsis thaliana, Brassica napus, Glycine max, Oryza sativa, Physcomitrella patens, or Zea mays, resulting in “in-frame” fusion of the FNR targeting sequence with the ORFs.

### EXAMPLE 1d

### Cloning of Inventive Sequences as Shown in Table I, Column 5 and 7 in the Different Expression Vectors.

[0942] For cloning the ORFs from S. cerevisiae into vectors containing the Resgen adaptor sequence the respective vector DNA was treated with the restriction enzyme NcoI. For cloning of ORFs from Saccharomyces cerevisiae into vectors containing the Colic adaptor sequence, the respective vector DNA was treated with the restriction enzymes PacI and NcoI following the standard protocol (MBI Fermentas). For cloning of ORFs from Escherichia coli, Synechocystis sp., Azotobacter vinelandii, Thermus thermophilus, Arabidopsis thaliana, Brassica napus, Glycine max, Oryza sativa, Physcomitrella patens, or Zea mays the vector DNA was treated with the restriction enzymes PacI and NcoI following the standard protocol (MBI Fermentas). In all cases the reaction was stopped by inactivation at 70° C. for 20 minutes and purified over QIAquick or NucleoSpin Extract II columns following the standard protocol (Qiagen or Macherey-Nagel).

[0943] Then the PCR-product representing the amplified ORF with the respective adapter sequences and the vector DNA were treated with T4 DNA polymerase according to the standard protocol (MBI Fermentas) to produce single stranded overhangs with the parameters 1 unit T4 DNA polymerase at 37° C. for 2-10 minutes for the vector and 1-2 u T4 DNA polymerase at 15-17° C. for 10-60 minutes for the PCR product representing.

[0944] The reaction was stopped by addition of high-salt buffer and purified over QIAquick or NucleoSpin Extract II columns following the standard protocol (Qiagen or Macherey-Nagel). According to this example the skilled person is able to clone all sequences disclosed in table I, preferably column 5.

### EXAMPLE 1e

### Plant Transformation

[0945] Approximately 30-60 ng of prepared vector and a defined amount of prepared amplificate were mixed and hybridized at 65° C. for 15 minutes followed by 37° C. 0.1° C./1 seconds, followed by 37° C. 10 minutes, followed by 0.1° C./1 seconds, then 4-10° C.

[0946] The ligated constructs were transformed in the same reaction vessel by addition of competent E. coli cells (strain DH5alpha) and incubation for 20 minutes at 1° C. followed by a heat shock for 90 seconds at 42° C. and cooling to 1-4° C. Then, complete medium (SOC) was added and the mixture was incubated for 45 minutes at 37° C. The entire mixture was subsequently plated onto an agar plate with 0.05 mg/ml kanamycine and incubated overnight at 37° C.

[0947] The outcome of the cloning step was verified by amplification with the aid of primers which bind upstream and downstream of the integration site, thus allowing the amplification of the insertion. The amplifications were carried out as described in the protocol of Taq DNA polymerase (Gibco-BRL).

The Amplification Cycles were as Follows:

[0948] 1 cycle of 1-5 minutes at 94° C., followed by 35 cycles of in each case 15-60 seconds at 94° C., 15-60 seconds at 50-66° C. and 5-15 minutes at 72° C., followed by 1 cycle of 10 minutes at 72° C., then 4-16° C.

[0949] Several colonies were checked, but only one colony for which a PCR product of the expected size was detected was used in the following steps.

[0950] A portion of this positive colony was transferred into a reaction vessel filled with complete medium (LB) supplemented with kanamycin and incubated overnight at 37° C.

[0951] The plasmid preparation was carried out as specified in the Qiaprep or NucleoSpin Multi-96 Plus standard protocol (Qiagen or Macherey-Nagel).

[0952] Generation of transgenic plants which express SEQ ID NO: 42 or any other sequence disclosed in table I, preferably column 5

[0953] 1-5 ng of the plasmid DNA isolated was transformed by electroporation or transformation into competent cells of Agrobacterium tumefaciens, of strain GV 3101 pMP90 (Koncz and Schell, Mol. Gen. Gent. 204, 383 (1986)). Thereafter, complete medium (YEP) was added and the mixture was transferred into a fresh reaction vessel for 3 hours at 28° C. Thereafter, all of the reaction mixture was plated onto YEP agar plates supplemented with the respective antibiotics, e.g. rifampicine (0.1 mg/ml), gentamycine (0.025 mg/ml and kanamycine (0.05 mg/ml) and incubated for 48 hours at 28° C.

[0954] The agrobacteria that contains the plasmid construct were then used for the transformation of plants.

[0955] A colony was picked from the agar plate with the aid of a pipette tip and taken up in 3 ml of liquid TB medium, which also contained suitable antibiotics as described above. The preculture was grown for 48 hours at 28° C. and 120 rpm.

[0956] 400 ml of LB medium containing the same antibiotics as above were used for the main culture. The preculture was transferred into the main culture. It was grown for 18 hours at 28° C. and 120 rpm. After centrifugation at 4 000 rpm, the pellet was resuspended in infiltration medium (MS medium, 10% sucrose).

[0957] In order to grow the plants for the transformation, dishes (Piki Saat 80, green, provided with a screen bottom, 30×20×4.5 cm, from Wiesauplast, Kunststofftechnik, Germany) were half-filled with a GS 90 substrate (standard soil, Werkverband E.V., Germany).

[0958] The dishes were watered overnight with 0.05% Proplant solution (Chimac-Apriphar, Belgium). Arabidopsis thaliana C24 seeds (Nottingham Arabidopsis Stock Centre, UK; NASC Stock N906) were scattered over the dish, approximately 1 000 seeds per dish. The dishes were covered with a hood and placed in the stratification facility (8 h, 110 μmol/m2s1, 22° C.; 16 h, dark, 6° C.). After 5 days, the dishes were placed into the short-day controlled environment chamber (8 h, 130 μmol/m2s1, 22° C.; 16 h, dark, 20° C.), where they remained for approximately 10 days until the first true leaves had formed.

[0959] The seedlings were transferred into pots containing the same substrate (Teku pots, 7 cm, LC series, manufactured by Poppelmann GmbH & Co, Germany). Five plants were pricked out into each pot. The pots were then returned into the short-day controlled environment chamber for the plant to continue growing.

[0960] After 10 days, the plants were transferred into the greenhouse cabinet (supplementary illumination, 16 h, 340 μE/m2s, 22° C.; 8 h, dark, 20° C.), where they were allowed to grow for further 17 days.

[0961] For the transformation, 6-week-old Arabidopsis plants, which had just started flowering were immersed for 10 seconds into the above-described agrobacterial suspension which had previously been treated with 10 μl Silwett L77 (Crompton S. A., Osi Specialties, Switzerland). The method in question is described by Clough J. C. and Bent A. F. (Plant J. 16, 735 (1998)).

[0962] The plants were subsequently placed for 18 hours into a humid chamber. Thereafter, the pots were returned to the greenhouse for the plants to continue growing. The plants remained in the greenhouse for another 10 weeks until the seeds were ready for harvesting.

[0963] Depending on the resistance marker used for the selection of the transformed plants the harvested seeds were planted in the greenhouse and subjected to a spray selection or else first sterilized and then grown on agar plates supplemented with the respective selection agent. Since the vector contained the bar gene as the resistance marker, plantlets were sprayed four times at an interval of 2 to 3 days with 0.02% BASTA® and transformed plants were allowed to set seeds.

[0964] The seeds of the transgenic A. thaliana plants were stored in the freezer (at −20° C.).

### EXAMPLE 2

### Plant Material for Bioanalytical Analyses

[0965] For the bioanalytical analyses of the transgenic plants, the latter were grown uniformly in a specific culture facility. To this end the GS-90 substrate was introduced into the potting machine (Laible System GmbH, Singen, Germany) and filled into the pots. Thereafter, 35 pots were combined in one dish and treated with Proplant. For the treatment, 15 ml of Proplant were taken up in 10 l of tap water (0.15% solution). This amount was sufficient for the treatment of approximately 280 pots. The pots were placed into the Proplant solution and additionally irrigated overhead. 3 l Proplant solution (0.15%) for 210 pots. They were used within five days.

[0966] For sowing, the seeds, which had been stored in the refrigerator (at −20° C.) were dispersed from the Eppendorf tubes into the pots. In total, approximately 5 to 10 seeds were distributed in the middle of the pot.

[0967] After the seeds had been sown, the dishes with the pots were covered with matching plastic hoods and placed into the stratification chamber for 4 days in the dark at 4° C. The humidity was approximately 90%. After the stratification, the test plants were grown for 22 to 23 days at a 16-h-light, 8-h-dark rhythm at 20° C., an atmospheric humidity of 60% and a CO2 concentration of approximately 400 ppm. The light sources used were Powerstar HQI-T 250 W/D Daylight lamps from Osram, which generate a light resembling the solar color spectrum with a light intensity of approximately 220 E/m2/s-1.

[0968] Selection of transgenic plants was depending on the used resistance marker. In case of the bar gene as the resistance marker plantlets were sprayed three times at days 8-10 after sowing with 0.02% BASTA®, Bayer CropScience, Germany, Leverkusen. The resistance plants were thinned when they had reached the age of 14 days. The plants, which had grown best in the center of the pot were considered the target plants. All the remaining plants were removed carefully with the aid of metal tweezers and discarded.

[0969] During their growth, the plants received overhead irrigation with distilled water and bottom irrigation into the placement grooves. Once the grown plants had reached the age of 23 or 24 days, they were harvested.

### EXAMPLE 3

### Metabolic Analysis of Transformed Plants

[0970] The modifications identified in accordance with the invention, in the content of above-described metabolites, were identified by the following procedure.

### a) Sampling and Storage of the Samples

[0971] Sampling was performed directly in the controlled-environment chamber. The plants were cut using small laboratory scissors, rapidly weighed on laboratory scales, transferred into a pre-cooled extraction thimble and placed into an aluminum rack cooled by liquid nitrogen. If required, the extraction thimble can be stored in the freezer at −80° C. The time elapsing between cutting the plant to freezing it in liquid nitrogen amounted to not more than 10 to 20 seconds.

### b) Lyophilization

[0972] During the experiment, care was taken that the plants either remained in the deep-frozen state (temperatures<−40° C.) or were freed from water by lyophilization until the first contact with solvents.

[0973] The aluminum rack with the plant samples in the extraction thimbles was placed into the pre-cooled (−40° C.) lyophilization facility. The initial temperature during the main drying phase was −35° C. and the pressure was 0.120 mbar. During the drying phase, the parameters were altered following a pressure and temperature program. The final temperature after 12 hours was +30° C. and the final pressure was 0.001 to 0.004 mbar. After the vacuum pump and the refrigerating machine had been switched off, the system was flushed with air (dried via a drying tube) or argon.

### c) Extraction

[0974] Immediately after the lyophilization apparatus had been flushed, the extraction thimbles with the lyophilized plant material were transferred into the 5 ml extraction cartridges of the ASE device (Accelerated Solvent Extractor ASE 200 with Solvent Controller and AutoASE software (DIONEX)).

[0975] The 24 sample positions of an ASE device (Accelerated Solvent Extractor ASE 200 with Solvent Controller and AutoASE software (DIONEX)) were filled with plant samples, including some samples for testing quality control.

[0976] The polar substances were extracted with approximately 10 ml of methanol/water (80/20, v/v) at T=70° C. and p=140 bar, 5 minutes heating-up phase, 1 minute static extraction. The more lipophilic substances were extracted with approximately 10 ml of methanol/dichloromethane (40/60, v/v) at T=70° C. and p=140 bar, 5 minute heating-up phase, 1 minute static extraction. The two solvent mixtures were extracted into the same glass tubes (centrifuge tubes, 50 ml, equipped with screw cap and pierceable septum for the ASE (DIONEX)).

[0977] The solution was treated with commercial available internal standards, such as ribitol, L-glycine-2,2-d2, L-alanine-2,3,3,3-d4, methionine-d3, Arginine_(13C), Tryptophan-d5, and α-methylglucopyranoside and methyl nonadecanoate, methyl undecanoate, methyl tridecanoate, methyl pentadecanoate, methyl nonacosanoate.

[0978] The total extract was treated with 8 ml of water. The solid residue of the plant sample and the extraction sleeve were discarded.

[0979] The extract was shaken and then centrifuged for 5 to 10 minutes at least 1400 g in order to accelerate phase separation. 1 ml of the supernatant methanol/water phase (“polar phase”, colorless) was removed for the further GC analysis, and 1 ml was removed for the LC analysis. The remainder of the methanol/water phase was discarded.

[0980] 0.5 ml of the organic phase (“lipid phase”, dark green) was removed for the further GC analysis and 0.5 ml was removed for the LC analysis. All the portions removed were evaporated to dryness using the IR Dancer infrared vacuum evaporator (Hettich). The maximum temperature during the evaporation process did not exceed 40° C. Pressure in the apparatus was not less than 10 mbar.

### d) Processing the Lipid and Polar Phase for the LC/MS or LC/MS/MS Analysis

[0981] The lipid extract, which had been evaporated to dryness was taken up in mobile phase. The polar extract, which had been evaporated to dryness was taken up in mobile phase.

### e) LC-MS Analysis

[0982] The LC part was carried out on a commercially available LCMS system from Agilent Technologies, USA. For polar extracts 10 μl are injected into the system at a flow rate of 200 μl/min. The separation column (Reversed Phase C18) was maintained at 15° C. during chromatography. For lipid extracts 5 μl are injected into the system at a flow rate of 200 μl/min. The separation column (Reversed Phase C18) was maintained at 30° C. HPLC was performed with gradient elution.

[0983] The mass spectrometric analysis was performed on an Applied Biosystems API 4000 triple quadrupole instrument with turbo ion spray source. For polar extracts the instrument measures in negative ion mode in MRM-mode and fullscan mode from 100-1000 amu. For lipid extracts the instrument measures in positive ion mode in MRM-mode fullscan mode from 100-1000 amu. MS analysis is described in more detail in patent publication number WO 03/073464 (Walk and Dostler).

### f) Derivatization of the Lipid Phase for the GC/MS Analysis

[0984] For the transmethanolysis, a mixture of 140 μl of chloroform, 37 μl of hydrochloric acid (37% by weight HCL in water), 320 μl of methanol and 20 μl of toluene was added to the evaporated extract. The vessel was sealed tightly and heated for 2 hours at 100° C., with shaking. The solution was subsequently evaporated to dryness. The residue was dried completely.

[0985] The methoximation of the carbonyl groups was carried out by reaction with methoxyamine hydrochloride (5 mg/ml in pyridine, 100 μl for 1.5 hours at 60° C.) in a tightly sealed vessel. 20 μl of a solution of odd-numbered, straight-chain fatty acids (solution of each 0.3 mg/mL of fatty acids from 7 to 25 carbon atoms and each 0.6 mg/mL of fatty acids with 27, 29 and 31 carbon atoms in 3/7 (v/v) pyridine/toluene) were added as time standards. Finally, the derivatization with 100 μl of N-methyl-N-(trimethylsilyl)-2,2,2-trifluoroacetamide (MSTFA) was carried out for 30 minutes at 60° C., again in the tightly sealed vessel. The final volume before injection into the GC was 220 μl.

### g) Derivatization of the Polar Phase for the GC/MS Analysis

[0986] The methoximation of the carbonyl groups was carried out by reaction with methoxyamine hydrochloride (5 mg/ml in pyridine, 50 μl for 1.5 hours at 60° C.) in a tightly sealed vessel. 10 μl of a solution of odd-numbered, straight-chain fatty acids (solution of each 0.3 mg/mL of fatty acids from 7 to 25 carbon atoms and each 0.6 mg/ml of fatty acids with 27, 29 and 31 carbon atoms in 3/7 (v/v) pyridine/toluene were added as time standards. Finally, the derivatization with 50 μl of N-methyl-N-(trimethylsilyl)-2,2,2-trifluoroacetamide (MSTFA) was carried out for 30 minutes at 60° C., again in the tightly sealed vessel. The final volume before injection into the GC was 110 μl.

### h) GC-MS Analysis

[0987] The GC-MS systems consist of an Agilent 6890 GC coupled to an Agilent 5973 MSD. The autosamplers are CompiPal or GCPal from CTC. For the analysis usual commercial capillary separation columns (30 m×0.25 mm×0.25 μm) with different polymethyl-siloxane stationary phases containing 0% up to 35% of aromatic moieties, depending on the analysed sample materials and fractions from the phase separation step, are used (for example: DB-1 ms, HP-5 ms, DB-XLB, DB-35 ms, Agilent Technologies). Up to 1 μl of the final volume is injected splitless and the oven temperature program is started at 70° C. and ended at 340° C. with different heating rates depending on the sample material and fraction from the phase separation step in order to achieve a sufficient chromatographic separation and number of scans within each analyte peak. Usual GC-MS standard conditions, for example constant flow with nominal 1 to 1.7 ml/min and helium as the mobile phase gas are used. Ionisation is done by electron impact with 70 eV, scanning within a m/z range from 15 to 600 with scan rates from 2.5 to 3 scans/sec and standard tune conditions.

### EXAMPLE 4

### Data Analysis from Metabolic Analysis of Transformed Plants

[0988] i) The samples were measured in individual series of 20 to 21 plant or seed samples each (also referred to as sequences), each sequence containing at least 5 wild-type plants or seed samples as controls. Seed samples were from individual plants. The peak area of each analyte was divided by the peak area of the respective internal standard. The data were standardized for the fresh weight established for the plant or seed sample, respectively. The values calculated thus were related to the wild-type control group by being divided by the mean of the corresponding data of the wild-type control group of the same sequence. The values obtained were referred to as ratio_by_WT, they are comparable between sequences and indicate how much the analyte concentration in the mutant differs in relation to the wild-type control. Appropriate controls were done before to proof that the vector and transformation procedure itself has no significant influence on the metabolic composition of the plants. Therefore the described changes in comparison with wildtypes were caused by the introduced gene constructs. At least 3-5 independent lines were analyzed in two independent experiments for each construct.

TABLE VIII
GABA increase (ratio_by_WT) in transgenic A. thaliana.

| | | | Min and Max | |
|---|---|---|---|---|
| SeqID | Locus | Target | Ratio by WT | Method |
| 42 | Ymr052w | cytoplasmic | 1.12-12.35 | GC |
| 654 | At1g43850 | cytoplasmic | 1.95-5.47 | GC |
| 706 | At2g28890 | cytoplasmic | 3.31-12.21 | GC |
| 751 | At3g04050 | plastidic | 1.01-26.89 | GC |
| 1156 | At3g08710 | cytoplasmic | 3.02-3.64 | GC |
| 1510 | At3g11650 | cytoplasmic | 1.91-3.21 | GC |
| 1598 | At3g27540 | cytoplasmic | 2.66-4.27 | GC |
| 1670 | At3g61830 | cytoplasmic | 2.06-16.46 | GC |
| 1874 | At4g32480 | cytoplasmic | 2.21-7.44 | GC |
| 1936 | At4g35310 | cytoplasmic | 2.53-5.40 | GC |
| 2492 | At5g16650 | cytoplasmic | 1.82-3.07 | GC |
| 2553 | AvinDRAFT_2344 | cytoplasmic | 2.11-6.42 | GC |
| 3408 | AvinDRAFT_2521 | cytoplasmic | 1.91-1.99 | GC |
| 3564 | AvinDRAFT_5103 | cytoplasmic | 2.04-10.13 | GC |
| 3728 | AvinDRAFT_5292 | cytoplasmic | 5.83-14.56 | GC |
| 4068 | B0124 | cytoplasmic | 1.85-4.07 | GC |
| 4176 | B0161 | cytoplasmic | 3.33-16.31 | GC |
| 4364 | B0449 | cytoplasmic | 3.00-15.36 | GC |
| 4717 | B0593 | plastidic | 2.10-3.59 | GC |
| 4864 | B0898 | cytoplasmic | 4.10-175.83 | GC |
| 4903 | B1003 | cytoplasmic | 4.16-9.49 | GC |
| 4909 | B1522 | cytoplasmic | 2.00-22.61 | GC |
| 4954 | B2739 | cytoplasmic | 3.39-14.55 | GC |
| 5121 | B3646 | cytoplasmic | 2.07-3.02 | GC |
| 5319 | B4029 | cytoplasmic | 2.10-77.37 | GC |
| 5387 | B4256 | cytoplasmic | 1.88-3.19 | GC |
| 5458 | C_PP034008079R | cytoplasmic | 1.39-3.02 | GC |
| 6041 | Slr0739 | plastidic | 1.83-3.55 | GC |
| 6469 | TTC0019 | cytoplasmic | 1.93-7.25 | GC |
| 6739 | TTC1550 | cytoplasmic | 2.01-2.93 | GC |
| 7510 | Yjr153w | cytoplasmic | 1.82-6.77 | GC |
| 7633 | Ylr043c | plastidic | 1.83-2.10 | GC |
| 53 | 51340801_CANOLA | plastidic | 2.10-3.22 | GC |
| 7137 | Ybr159w | cytoplasmic | 1.67-2.23 | GC |
| 7208 | YDR046C | cytoplasmic | 1.03-48.39 | GC |
| 7274 | YGR255C | cytoplasmic | 2.63-31.94 | GC |
| 7489 | YHR213W | cytoplasmic | 3.74-7.79 | GC |
| 8239 | YPL249C-A | cytoplasmic | 1.53-6.64 | GC |
| 8397 | YPR185W | cytoplasmic | 4.13-47.89 | GC |
| 8227 | Ylr395c | cytoplasmic | 1.08-131.19 | GC |
| 8423 | YDR046C_2 | cytoplasmic | 1.03-48.39 | GC |

### EXAMPLE 5

[0989] Engineering alfalfa plants with increased fine chemical production by expressing nucleic acids of the invention from Saccharomyces cerevisiae, E. coli or other organisms.

[0990] A regenerating clone of alfalfa (Medicago sativa) is transformed using the method of (McKersie et al., Plant Physiol 119, 839 (1999)). Regeneration and transformation of alfalfa is genotype dependent and therefore a regenerating plant is required. Methods to obtain regenerating plants have been described. For example, these can be selected from the cultivar Rangelander (Agriculture Canada) or any other commercial alfalfa variety as described by Brown D. C. W. and Atanassov A. (Plant Cell Tissue Organ Culture 4, 111 (1985)). Alternatively, the RA3 variety (University of Wisconsin) is selected for use in tissue culture (Walker et al., Am. J. Bot. 65, 654 (1978)).

[0991] Petiole explants are cocultivated with an overnight culture of Agrobacterium tumefaciens C58C1 pMP90 (McKersie et al., Plant Physiol 119, 839 (1999)) or LBA4404 containing a binary vector. Many different binary vector systems have been described for plant transformation (e.g. An G., in Agrobacterium Protocols, Methods in Molecular Biology, Vol 44, pp 47-62, Gartland K. M. A. and Davey M. R. eds. Humana Press, Totowa, N.J.). Many are based on the vector pBIN19 described by Bevan (Nucleic Acid Research. 12, 8711 (1984)) that includes a plant gene expression cassette flanked by the left and right border sequences from the Ti plasmid of Agrobacterium tumefaciens. A plant gene expression cassette consists of at least two genes—a selection marker gene and a plant promoter regulating the transcription of the cDNA or genomic DNA of the trait gene. Various selection marker genes can be used including the Arabidopsis gene encoding a mutated acetohydroxy acid synthase (AHAS) enzyme (U.S. Pat. Nos. 5,7673,666 and 6,225,105). Similarly, various promoters can be used to regulate the trait gene that provides constitutive, developmental, tissue or environmental regulation of gene transcription. In this example, the 34S promoter (GenBank Accession numbers M59930 and X16673) is used to provide constitutive expression of the trait gene.

[0992] The explants are cocultivated for 3 days in the dark on SH induction medium containing 288 mg/L Pro, 53 mg/L thioproline, 4.35 g/L K2SO4, and 100 μm acetosyringinone. The explants are washed in half-strength Murashige-Skoog medium (Murashige and Skoog, 1962) and plated on the same SH induction medium without acetosyringinone but with a suitable selection agent and suitable antibiotic to inhibit Agrobacterium growth. After several weeks, somatic embryos are transferred to BOi2Y development medium containing no growth regulators, no antibiotics, and 50 g/L sucrose. Somatic embryos are subsequently germinated on half-strength Murashige-Skoog medium. Rooted seedlings are transplanted into pots and grown in a greenhouse.

[0993] T1 or T2 generation seeds plants are produced and subjected to experiments similar as described above to determine their fine chemical content in comparison to respective control material

### EXAMPLE 6

[0994] Engineering ryegrass plants with increased fine chemical production by expressing nucleic acids of the invention from Saccharomyces cerevisiae, E. coli or other organisms.

[0995] Seeds of several different ryegrass varieties may be used as explant sources for transformation, including the commercial variety Gunne available from Svalöf Weibull seed company or the variety Affinity. Seeds are surface-sterilized sequentially with 1% Tween-20 for 1 minute, 100% bleach for 60 minutes, 3 rinses with 5 minutes each with deionized and distilled H2O, and then germinated for 3-4 days on moist, sterile filter paper in the dark. Seedlings are further sterilized for 1 minute with 1% Tween-20, 5 minutes with 75% bleach, and rinsed 3 times with dd H2O, 5 min each.

[0996] Surface-sterilized seeds are placed on the callus induction medium containing Murashige and Skoog basal salts and vitamins, 20 g/L sucrose, 150 mg/L asparagine, 500 mg/L casein hydrolysate, 3 g/L Phytagel, 10 mg/L BAP, and 5 mg/L dicamba. Plates are incubated in the dark at 25° C. for 4 weeks for seed germination and embryogenic callus induction.

[0997] After 4 weeks on the callus induction medium, the shoots and roots of the seedlings are trimmed away, the callus is transferred to fresh media, maintained in culture for another 4 weeks, and then transferred to MSO medium in light for 2 weeks. Several pieces of callus (11-17 weeks old) are either strained through a 10 mesh sieve and put onto callus induction medium, or cultured in 100 ml of liquid ryegrass callus induction media (same medium as for callus induction with agar) in a 250 ml flask. The flask is wrapped in foil and shaken at 175 rpm in the dark at 23° C. for 1 week. Sieving the liquid culture with a 40-mesh sieve collected the cells. The fraction collected on the sieve is plated and cultured on solid ryegrass callus induction medium for 1 week in the dark at 25° C. The callus is then transferred to and cultured on MS medium containing 1% sucrose for 2 weeks.

[0998] Transformation can be accomplished with either Agrobacterium or with particle bombardment methods. An expression vector is created containing a constitutive plant promoter and the cDNA of the gene in a pUC vector. The plasmid DNA is prepared from E. coli cells using Qiagen kit according to manufacturer's instruction. Approximately 2 g of embryogenic callus is spread in the center of a sterile filter paper in a Petri dish. An aliquot of liquid MSO with 10 g/L sucrose is added to the filter paper. Gold particles (1.0 μm in size) are coated with plasmid DNA according to method of Sanford et al., 1993 and delivered to the embryogenic callus with the following parameters: 500 μg particles and 2 μg DNA per shot, 1300 psi and a target distance of 8.5 cm from stopping plate to plate of callus and 1 shot per plate of callus.

[0999] After the bombardment, calli are transferred back to the fresh callus development medium and maintained in the dark at room temperature for a 1-week period. The callus is then transferred to growth conditions in the light at 25° C. to initiate embryo differentiation with the appropriate selection agent, e.g. 250 nM Arsenal, 5 mg/L PPT or 50 mg/L kanamycin. Shoots resistant to the selection agent are appearing and once rotted are transferred to soil.

[1000] Samples of the primary transgenic plants (T0) are analyzed by PCR to confirm the presence of T-DNA. These results are confirmed by Southern hybridization in which DNA is electrophoresed on a 1% agarose gel and transferred to a positively charged nylon membrane (Roche Diagnostics). The PCR DIG Probe Synthesis Kit (Roche Diagnostics) is used to prepare a digoxigenin-labelled probe by PCR, and used as recommended by the manufacturer.

[1001] Transgenic T0 ryegrass plants are propagated vegetatively by excising tillers. The transplanted tillers are maintained in the greenhouse for 2 months until well established. The shoots are defoliated and allowed to grow for 2 weeks.

[1002] T1 or T2 generation seeds plants are produced and subjected to experiments similar as described above to determine their fine chemical content in comparison to respective control material.

### EXAMPLE 7

[1003] Engineering soybean plants with increased fine chemical production by expressing nucleic acids of the invention from Saccharomyces cerevisiae E. coli or other organisms.

[1004] Soybean is transformed according to the following modification of the method described in the Texas A&M U.S. Pat. No. 5,164,310. Several commercial soybean varieties are amenable to transformation by this method. The cultivar Jack (available from the Illinois Seed Foundation) is commonly used for transformation. Seeds are sterilized by immersion in 70% (v/v) ethanol for 6 min and in 25% commercial bleach (NaOCl) supplemented with 0.1% (v/v) Tween for 20 min, followed by rinsing 4 times with sterile double distilled water. Seven-day seedlings are propagated by removing the radicle, hypocotyl and one cotyledon from each seedling. Then, the epicotyl with one cotyledon is transferred to fresh germination media in petri dishes and incubated at 25° C. under a 16-h photoperiod (approx. 100 μE/m2s) for three weeks. Axillary nodes (approx. 4 mm in length) were cut from 3-4 week-old plants. Axillary nodes are excised and incubated in Agrobacterium LBA4404 culture.

[1005] Many different binary vector systems have been described for plant transformation (e.g. An G., in Agrobacterium Protocols. Methods in Molecular Biology Vol. 44, p. 47-62, Gartland K. M. A. and Davey M. R. eds. Humana Press, Totowa, N.J.). Many are based on the vector pBIN19 described by Bevan (Nucleic Acid Research. 12, 8711 (1984)) that includes a plant gene expression cassette flanked by the left and right border sequences from the Ti plasmid of Agrobacterium tumefaciens. A plant gene expression cassette consists of at least two genes—a selection marker gene and a plant promoter regulating the transcription of the cDNA or genomic DNA of the trait gene. Various selection marker genes can be used including the Arabidopsis gene encoding a mutated acetohydroxy acid synthase (AHAS) enzyme (U.S. Pat. Nos. 5,7673,666 and 6,225,105). Similarly, various promoters can be used to regulate the trait gene to provide constitutive, developmental, tissue or environmental regulation of gene transcription. In this example, the 34S promoter (GenBank Accession numbers M59930 and X16673) can be used to provide constitutive expression of the trait gene.

[1006] After the co-cultivation treatment, the explants are washed and transferred to selection media supplemented with 500 mg/L timentin. Shoots are excised and placed on a shoot elongation medium. Shoots longer than 1 cm are placed on rooting medium for two to four weeks prior to transplanting to soil.

[1007] The primary transgenic plants (T0) are analyzed by PCR to confirm the presence of T-DNA. These results are confirmed by Southern hybridization in which DNA is electrophoresed on a 1% agarose gel and transferred to a positively charged nylon membrane (Roche Diagnostics). The PCR DIG Probe Synthesis Kit (Roche Diagnostics) is used to prepare a digoxigenin-labelled probe by PCR, and used as recommended by the manufacturer.

[1008] T1 or T2 generation seeds plants are produced and subjected to experiments similar as described above to determine their fine chemical content in comparison to respective control material.

### EXAMPLE 8

[1009] Engineering Rapeseed/Canola plants with increased fine chemical production by expressing nucleic acids of the invention from Saccharomyces cerevisiae, E. coli or other organisms.

[1010] Cotyledonary petioles and hypocotyls of 5-6 day-old young seedlings are used as explants for tissue culture and transformed according to Babic et al. (Plant Cell Rep 17, 183 (1998)). The commercial cultivar Westar (Agriculture Canada) is the standard variety used for transformation, but other varieties can be used.

[1011] Agrobacterium tumefaciens LBA4404 containing a binary vector can be used for canola transformation. Many different binary vector systems have been described for plant transformation (e.g. An G., in Agrobacterium Protocols. Methods in Molecular Biology Vol. 44, p. 47-62, Gartland K. M. A. and Davey M. R. eds. Humana Press, Totowa, N.J.). Many are based on the vector pBIN19 described by Bevan (Nucleic Acid Research. 12, 8711 (1984)) that includes a plant gene expression cassette flanked by the left and right border sequences from the Ti plasmid of Agrobacterium tumefaciens. A plant gene expression cassette consists of at least two genes—a selection marker gene and a plant promoter regulating the transcription of the cDNA or genomic DNA of the trait gene. Various selection marker genes can be used including the Arabidopsis gene encoding a mutated acetohydroxy acid synthase (AHAS) enzyme (U.S. Pat. Nos. 5,7673,666 and 6,225,105). Similarly, various promoters can be used to regulate the trait gene to provide constitutive, developmental, tissue or environmental regulation of gene transcription. In this example, the 34S promoter (GenBank Accession numbers M59930 and X16673) can be used to provide constitutive expression of the trait gene.

[1012] Canola seeds are surface-sterilized in 70% ethanol for 2 min., and then in 30% Clorox with a drop of Tween-20 for 10 min, followed by three rinses with sterilized distilled water. Seeds are then germinated in vitro 5 days on half strength MS medium without hormones, 1% sucrose, 0.7% Phytagar at 23° C., 16 h light. The cotyledon petiole explants with the cotyledon attached are excised from the in vitro seedlings, and inoculated with Agrobacterium by dipping the cut end of the petiole explant into the bacterial suspension. The explants are then cultured for 2 days on MSBAP-3 medium containing 3 mg/L BAP, 3% sucrose, 0.7% Phytagar at 23° C., 16 h light. After two days of co-cultivation with Agrobacterium, the petiole explants are transferred to MSBAP-3 medium containing 3 mg/L BAP, cefotaxime, carbenicillin, or timentin (300 mg/L) for 7 days, and then cultured on MSBAP-3 medium with cefotaxime, carbenicillin, or timentin and selection agent until shoot regeneration. When the shoots were 5-10 mm in length, they are cut and transferred to shoot elongation medium (MSBAP-0.5, containing 0.5 mg/L BAP). Shoots of about 2 cm in length are transferred to the rooting medium (MSO) for root induction.

[1013] Samples of the primary transgenic plants (T0) are analyzed by PCR to confirm the presence of T-DNA. These results are confirmed by Southern hybridization in which DNA is electrophoresed on a 1% agarose gel and transferred to a positively charged nylon membrane (Roche Diagnostics). The PCR DIG Probe Synthesis Kit (Roche Diagnostics) is used to prepare a digoxigenin-labelled probe by PCR, and used as recommended by the manufacturer.

[1014] T1 or T2 generation seeds plants are produced and subjected to experiments similar as described above to determine their fine chemical content in comparison to respective control material.

### EXAMPLE 9

[1015] Engineering corn plants with increased fine chemical production by expressing nucleic acids of the invention from Saccharomyces cerevisiae, E. coli or other organisms.

[1016] Transformation of maize (Zea Mays L.) is performed with a modification of the method described by Ishida et al. (Nature Biotech 14745 (1996)). Transformation is genotype-dependent in corn and only specific genotypes are amenable to transformation and regeneration. The inbred line A188 (University of Minnesota) or hybrids with A188 as a parent are good sources of donor material for transformation (Fromm et al. Biotech 8, 833 (1990)), but other genotypes can be used successfully as well. Ears are harvested from corn plants at approximately 11 days after pollination (DAP) when the length of immature embryos is about 1 to 1.2 mm. Immature embryos are co-cultivated with Agrobacterium tumefaciens that carry “super binary” vectors and transgenic plants are recovered through organogenesis. The super binary vector system of Japan Tobacco is described in WO patents WO 94/00977 and WO 95/06722. Vectors were constructed as described. Various selection marker genes can be used including the maize gene encoding a mutated acetohydroxy acid synthase (AHAS) enzyme (U.S. Pat. No. 6,025,541). Similarly, various promoters can be used to regulate the trait gene to provide constitutive, developmental, tissue or environmental regulation of gene transcription. In this example, the 34S promoter (GenBank Accession numbers M59930 and X16673) was used to provide constitutive expression of the trait gene.

[1017] Excised embryos are grown on callus induction medium, then maize regeneration medium, containing imidazolinone as a selection agent. The Petri plates are incubated in the light at 25° C. for 2-3 weeks, or until shoots develop. The green shoots are transferred from each embryo to maize rooting medium and incubated at 25° C. for 2-3 weeks, until roots develop. The rooted shoots are transplanted to soil in the greenhouse. T1 seeds are produced from plants that exhibit tolerance to the imidazolinone herbicides and which are PCR positive for the transgenes.

[1018] The T1 transgenic plants are then evaluated for their enhanced NUE and/or increased biomass production according to the method described in Example 3. The T1 generation of single locus insertions of the T-DNA will segregate for the transgene in a 3:1 ratio. Those progeny containing one or two copies of the transgene are tolerant regarding the imidazolinone herbicide, and exhibit an enhancement of NUE and/or increased biomass production than those progeny lacking the transgenes.

[1019] T1 or T2 generation plants are produced and subjected to experiments similar as described in WO 2006092449, Example 15c to determine their fine chemical content in comparison to respective control material.

### EXAMPLE 10

[1020] Engineering wheat plants with increased fine chemical production by expressing nucleic acids of the invention from Saccharomyces cerevisiae, E. coli or other organisms.

[1021] Transformation of wheat is performed with the method described by Ishida et al. (Nature Biotech. 14745 (1996)). The cultivar Bobwhite (available from CYMMIT, Mexico) is commonly used in transformation. Immature embryos are co-cultivated with Agrobacterium tumefaciens that carry “super binary” vectors, and transgenic plants are recovered through organogenesis. The super binary vector system of Japan Tobacco is described in WO patents WO 94/00977 and WO 95/06722. Vectors were constructed as described. Various selection marker genes can be used including the maize gene encoding a mutated acetohydroxy acid synthase (AHAS) enzyme (U.S. Pat. No. 6,025,541). Similarly, various promoters can be used to regulate the trait gene to provide constitutive, developmental, tissue or environmental regulation of gene transcription. In this example, the 34S promoter (GenBank Accession numbers M59930 and X16673) was used to provide constitutive expression of the trait gene.

[1022] After incubation with Agrobacterium, the embryos are grown on callus induction medium, then regeneration medium, containing imidazolinone as a selection agent. The Petri plates are incubated in the light at 25° C. for 2-3 weeks, or until shoots develop. The green shoots are transferred from each embryo to rooting medium and incubated at 25° C. for 2-3 weeks, until roots develop. The rooted shoots are transplanted to soil in the greenhouse. T1 seeds are produced from plants that exhibit tolerance to the imidazolinone herbicides and which are PCR positive for the transgenes.

[1023] T1 or T2 generation seeds plants are produced and subjected to experiments similar as described above to determine their fine chemical content in comparison to respective control material.

### EXAMPLE 11

[1024] Engineering rice plants with increased fine chemical production by expressing nucleic acids of the invention from Saccharomyces cerevisiae, E. coli or other organisms.

### Rice Transformation:

[1025] The two Agrobacterium strains each containing an expression vector, are used independently to transform Oryza sativa plants. Mature dry seeds of the rice japonica cultivar Nipponbare are dehusked. Sterilization is carried out by incubating for one minute in 70% ethanol, followed by 30 minutes in 0.2% HgCl2, followed by a 6 times 15 min wash with sterile distilled water. The sterile seeds are then germinated on a medium containing 2.4-D (callus inducing medium). After incubation in the dark for four weeks, embryonic, scutellum derived calli are excised and propagated on the same medium. After two weeks, the calli are multiplied or propagated by subculture on the same medium for another 2 weeks. Embryonic callus pieces are sub-cultured on fresh medium 3 days before cocultivation.

[1026] Agrobacterium strain LB4404 or other useful Agrobacterium strain, dependent on the expression vector of choice, containing the expression vector is used for co-cultivation. Agrobacterium is inoculated on AB medium (EXPLAIN) with the appropriate antibiotics and cultured for 3 days at 28° C. The bacteria are then collected and suspended in liquid co-cultivation medium at a density OD600) of about 1. The suspension is then transferred to a Petri dish and the calli immersed in the suspension for 15 minutes. The callus tissue were then bolotted dry on a filter paper and transferred to solified, cocultivation medium and incubated for 3 days in the dark at 25° C. Co-cultivation calli are grown on 2.4-D-containing medium for 4 weeks in the dark at 28° C. in the presence of a selection agent, which dependent of the resistance marker of the used vector. During this period, rapidly growing resistant callus develop. After the transfer of this material to a regeneration medium and incubation in the light, the embryonic potential is released and shoots develop in the next four to five weeks. Shoots are excised from the calli and incubated for 2 to 3 weeks on an auxin-containing medium from which they are transferred to soil. Hardened shoots are grown under high humidity and short days in a greenhouse.

[1027] After a quantitative PCR analysis to verify copy number and the T-DNA insert, only single copy transgenic plants that exhibit tolerance to the selection agent are kept to harvest of T1 seed. Seeds are then harvested three to five months after transplanting. Seeds or plants from various independent lines are then used for analysis of the fine chemical content.

### EXAMPLE 12

### Identification of Identical and Heterologous Genes

[1028] Gene sequences can be used to identify identical or heterologous genes from cDNA or genomic libraries. Identical genes (e.g. full-length cDNA clones) can be isolated via nucleic acid hybridization using for example cDNA libraries. Depending on the abundance of the gene of interest, 100,000 up to 1,000,000 recombinant bacteriophages are plated and transferred to nylon membranes. After denaturation with alkali, DNA is immobilized on the membrane by e.g. UV cross linking. Hybridization is carried out at high stringency conditions. In aqueous solution, hybridization and washing is performed at an ionic strength of 1 M NaCl and a temperature of 68° C. Hybridization probes are generated by e.g. radioactive (32P) nick transcription labeling (High Prime, Roche, Mannheim, Germany). Signals are detected by autoradiography.

[1029] Partially identical or heterologous genes that are related but not identical can be identified in a manner analogous to the above-described procedure using low stringency hybridization and washing conditions. For aqueous hybridization, the ionic strength is normally kept at 1 M NaCl while the temperature is progressively lowered from 68° C. to 42° C.

[1030] Isolation of gene sequences with homology (or sequence identity/similarity) only in a distinct domain of (for example 10-20 amino acids) can be carried out by using synthetic radio labeled oligonucleotide probes. Radiolabeled oligonucleotides are prepared by phosphorylation of the 5-prime end of two complementary oligonucleotides with T4 polynucleotide kinase. The complementary oligonucleotides are annealed and ligated to form concatemers. The double stranded concatemers are than radiolabeled by, for example, nick transcription. Hybridization is normally performed at low stringency conditions using high oligonucleotide concentrations.

### Oligonucleotide Hybridization Solution:

### 6×SSC

[1031] 0.01 M sodium phosphate

### 1 mM EDTA (pH 8)

### 0.5% SDS

[1032] 100 μg/ml denatured salmon sperm DNA
0.1% nonfat dried milk

[1033] During hybridization, temperature is lowered stepwise to 5-10° C. below the estimated oligonucleotide Tm or down to room temperature followed by washing steps and autoradiography. Washing is performed with low stringency such as 3 washing steps using 4×SSC. Further details are described by Sambrook J. et al., 1989, “Molecular Cloning: A Laboratory Manual,” Cold Spring Harbor Laboratory Press or Ausubel F. M. et al., 1994, “Current Protocols in Molecular Biology,” John Wiley & Sons.

### EXAMPLE 13

[1034] Identification of Identical Genes by Screening Expression Libraries with Antibodies

[1035] cDNA clones can be used to produce recombinant polypeptide for example in E. coli (e.g. Qiagen QIAexpress pQE system). Recombinant polypeptides are then normally affinity purified via Ni-NTA affinity chromatography (Qiagen). Recombinant polypeptides are then used to produce specific antibodies for example by using standard techniques for rabbit immunization. Antibodies are affinity purified using a Ni-NTA column saturated with the recombinant antigen as described by Gu et al., BioTechniques 17, 257 (1994). The antibody can than be used to screen expression cDNA libraries to identify identical or heterologous genes via an immunological screening (Sambrook, J. et al., 1989, “Molecular Cloning: A Laboratory Manual,” Cold Spring Harbor Laboratory Press or Ausubel, F. M. et al., 1994, “Current Protocols in Molecular Biology”, John Wiley & Sons).

### EXAMPLE 14

### In Vivo Mutagenesis

[1036] In vivo mutagenesis of microorganisms can be performed by passage of plasmid (or other vector) DNA through E. coli or other microorganisms (e.g. Bacillus spp. or yeasts such as Saccharomyces cerevisiae) which are impaired in their capabilities to maintain the integrity of their genetic information. Typical mutator strains have mutations in the genes for the DNA repair system (e.g., mutHLS, mutD, mutT, etc.; for reference, see Rupp W. D., DNA repair mechanisms, in: Escherichia coli and Salmonella, p. 2277-2294, ASM, 1996, Washington.) Such strains are well known to those skilled in the art. The use of such strains is illustrated, for example, in Greener A. and Callahan M., Strategies 7, 32 (1994). Transfer of mutated DNA molecules into plants is preferably done after selection and testing in microorganisms. Transgenic plants are generated according to various examples within the exemplification of this document.

### EXAMPLE 15

### Plant Screening (Arabidopsis) for Growth Under Limited Nitrogen Supply

[1037] Plants with an increased activity of a polypeptide mentioned in Table IX and X under the column SEQ ID NO: or locus were used.

Two Different Procedures were Used for Screening:

### Procedure 1:

### Biomass Production on Agar Plates:

[1038] For screening of transgenic plants a specific culture facility was used. For high-throughput purposes plants were screened for biomass production on agar plates with limited supply of nitrogen (adapted from Estelle and Somerville, 1987). This screening pipeline consists of two levels. Transgenic lines were subjected to subsequent level if biomass production was significantly improved in comparison to wild type plants. With each level number of replicates and statistical stringency was increased.

[1039] For the sowing, the seeds were removed from the Eppendorf tubes with the aid of a toothpick and transferred onto the above-mentioned agar plates, with limited supply of nitrogen (0.05 mM KNO₃). In total, approximately 15-30 seeds were distributed horizontally on each plate (12×12 cm).

[1040] After the seeds had been sown, plates were subjected to stratification for 2-4 days in the dark at 4° C. After the stratification, the test plants were grown for 22 to 25 days at a 16-h-light, 8-h-dark rhythm at 20° C., an atmospheric humidity of 60% and a CO₂ concentration of approximately 400 ppm. The light sources used generate a light resembling the solar color spectrum with a light intensity of approximately 100 μE/m²s. After 10 to 11 days the plants are individualized. Improved growth under nitrogen limited conditions was assessed by biomass production of shoots and roots of transgenic plants in comparison to wild type control plants after 20-25 days growth.

[1041] Transgenic lines showing a significant improved biomass production in comparison to wild type plants were subjected to following experiment of the subsequent level:

[1042] Arabidopsis thaliana seeds were sown in pots containing a 1:1 (v/v) mixture of nutrient depleted soil (“Einheitserde Typ 0”, 30% clay, Tantau, Wansdorf Germany) and sand. Germination was induced by a four day period at 4° C., in the dark. Subsequently the plants were grown under standard growth conditions (photoperiod of 16 h light and 8 h dark, 20° C., 60% relative humidity, and a photon flux density of 200 μE/m²s). The plants were grown and cultured, inter alia they were watered every second day with a N-depleted nutrient solution. The N-depleted nutrient solution e.g. contains beneath water

| mineral nutrient | final concentration | |
|---|---|---|
| KCl | 3.00 | mM |
| MgSO₄ × 7 H₂O | 0.5 | mM |
| CaCl₂ × 6 H₂O | 1.5 | mM |
| K₂SO₄ | 1.5 | mM |
| NaH₂PO₄ | 1.5 | mM |
| Fe-EDTA | 40 | μM |
| H₃BO₃ | 25 | μM |
| MnSO₄ × H₂O | 1 | μM |
| ZnSO₄ × 7 H₂O | 0.5 | μM |
| Cu₂SO₄ × 5 H₂O | 0.3 | μM |
| Na₂MoO₄ × 2 H₂O | 0.05 | μM |

[1043] After 9 to 10 days the plants were individualized. After a total time of 29 to 31 days the plants were harvested and rated by the fresh weight of the aerial parts of the plants. The results thereof are summarized in table IX. The biomass increase has been measured as ratio of the fresh weight of the aerial parts of the respective transgene plant and the non-transgenic wild type plant.

TABLE IX
Biomass production of transgenic Arabidopsis thaliana
grown under limited nitrogen supply (increased NUE):

| seq ID | Target | Locus | Biomass Increase |
|---|---|---|---|
| 42 | cytoplasmic | YMR052W | 1.24 |
| 7137 | cytoplasmic | YBR159W | 1.38 |
| 8227 | cytoplasmic | YLR395C | 1.56 |

### Procedure 2:

[1044] Procedure 2 was performed like procedure 1, however, the screening on agar plates was omitted and a one-level screen on soil was performed. Per transgenic construct 4 independent transgenic lines (=events) were tested (16 plants per construct). The results thereof are summarized in table X.

TABLE X
Biomass production of transgenic Arabidopsis thaliana
grown under limited nitrogen supply (increased NUE).
The biomass increase has been measured as ratio of the
fresh weight of the aerial parts of the respective transgenic
plants and the non-transgenic wild type plants.:

| | | | Min and Max |
|---|---|---|---|
| SeqID | Locus | Target | Ratio by WT |
| 8239 | YPL249C-A | cytoplasmic | 1.223 |

### EXAMPLE 16

### Plant Screening for Yield Increase Under Standardised Growth Conditions

[1045] In this experiment, a plant screening for yield increase (in this case: biomass yield increase) under standardised growth conditions in the absence of substantial abiotic stress has been performed. In a standard experiment soil is prepared as 3.5:1 (v/v) mixture of nutrient rich soil (GS90, Tantau, Wansdorf, Germany) and quarz sand. Alternatively, plants were sown on nutrient rich soil (GS90, Tantau, Germany). Pots were filled with soil mixture and placed into trays. Water was added to the trays to let the soil mixture take up appropriate amount of water for the sowing procedure. The seeds for transgenic A. thaliana plants and their non-trangenic wild-type controls were sown in pots (6 cm diameter). Then the filled tray was covered with a transparent lid and transferred into a precooled (4° C.-5° C.) and darkened growth chamber. Stratification was established for a period of 3-4 days in the dark at 4° C.-5° C. Germination of seeds and growth was initiated at a growth condition of 20° C., approximately 60% relative humidity, 16 h photoperiod and illumination at approximately 200 μmol/m2s. Covers were removed 7-8 days after sowing. BASTA selection was done at day 10 or day 11 (9 or 10 days after sowing) by spraying pots with plantlets from the top. In the standard experiment, a 0.07% (v/v) solution of BASTA concentrate (183 g/l glufosinate-ammonium) in tap water was sprayed once or, alternatively, a 0.02% (v/v) solution of BASTA was sprayed three times. The wild-type control plants were sprayed with tap water only (instead of spraying with BASTA dissolved in tap water) but were otherwise treated identically. Plants were individualized 13-15 days after sowing by removing the surplus of seedlings and leaving one seedling in soil.

[1046] Watering was carried out every two days after removing the covers in a standard experiment or, alternatively, every day. For measuring biomass performance, plant fresh weight was determined at harvest time (24-29 days after sowing; 20-26 days after stratification) by cutting shoots and weighing them. Usually, plants were in the stage prior to flowering and prior to growth of inflorescence when harvested. Transgenic plants were compared to the non-transgenic wild-type control plants of the same age, grown in the same culture facility and harvested at the same day.

TABLE XI
Biomass production of transgenic A. thaliana
grown under standardised growth conditions.

| | | | Min and Max |
|---|---|---|---|
| SeqID | Locus | Target | Ratio by WT |
| 7208 | YDR046C | cytoplasmic | 1.522 |
| 7208 | YDR046C | plastidic | 1.232 |
| 8239 | YPL249C-A | cytoplasmic | 1.546 |
| 8397 | YPR185W | cytoplasmic | 1.399 |
| 8423 | YDR046C_2 | cytoplasmic | 1.522 |
| 8423 | YDR046C_2 | plastidic | 1.232 |

Biomass production was measured by weighing plant rosettes. Biomass increase was calculated as ratio of the average weight of transgenic plants compared to average weight of wild-type control plants from the same experiment. Alternatively, biomass increase was calculated as ratio of the median weight of transgenic plants compared to median weight of wild-type control plants. Transgenic plants containing the indicated SeqIDs showed a biomass increase of 10% or more in comparison to control plants with a p-value of a two-sided T-test below 0.1.

### EXAMPLE 17

### Plant Screening for Growth Under Cycling Drought Conditions

[1047] In the cycling drought assay repetitive stress is applied to plants without leading to desiccation. In a standard experiment soil is prepared as 1:1 (v/v) mixture of nutrient rich soil (GS90, Tantau, Wansdorf, Germany) and quarz sand. Pots (6 cm diameter) were filled with this mixture and placed into trays. Water was added to the trays to let the soil mixture take up appropriate amount of water for the sowing procedure (day 1) and subsequently seeds of transgenic A. thaliana plants and their wild-type controls were sown in pots. Then the filled tray was covered with a transparent lid and transferred into a precooled (4° C.-5° C.) and darkened growth chamber. Stratification was established for a period of 3 days in the dark at 4° C.-5° C. or, alternatively, for 4 days in the dark at 4° C. Germination of seeds and growth was initiated at a growth condition of 20° C., 60% relative humidity, 16 h photoperiod and illumination with fluorescent light at approximately 200 μmol/m2s. Covers were removed 7-8 days after sowing. BASTA selection was done at day 10 or day 11 (9 or 10 days after sowing) by spraying pots with plantlets from the top. In the standard experiment, a 0.07% (v/v) solution of BASTA concentrate (183 g/l glufosinate-ammonium) in tap water was sprayed once or, alternatively, a 0.02% (v/v) solution of BASTA was sprayed three times. The wild-type control plants were sprayed with tap water only (instead of spraying with BASTA dissolved in tap water) but were otherwise treated identically. Plants were individualized 13-14 days after sowing by removing the surplus of seedlings and leaving one seedling in soil. Transgenic events and wild-type control plants were evenly distributed over the chamber.

[1048] The water supply throughout the experiment was limited and plants were subjected to cycles of drought and re-watering. Watering was carried out at day 1 (before sowing), day 14 or day 15, day 21 or day 22, and, finally, day 27 or day 28. For measuring biomass production, plant fresh weight was determined one day after the final watering (day 28 or day 29) by cutting shoots and weighing them. Plants were in the stage prior to flowering and prior to growth of inflorescence when harvested. Significance values for the statistical significance of the biomass changes were calculated by applying the ‘student's’ t test (parameters: two-sided, unequal variance).

[1049] Up to five lines (events) per transgenic construct were tested in successive experimental levels. Transgenic lines showing increased biomass production compared to wild-type plants were subjected to the next experimental level. Usually in the first level five plants per construct were tested and in the subsequent levels 14-40 plants were tested. Biomass performance was evaluated as described above. Data from level 3 are shown in table XII.

TABLE XII
Biomass production of transgenic A. thaliana developed
under cycling drought growth conditions.

| | | | Min and Max |
|---|---|---|---|
| SeqID | Locus | Target | Ratio by WT |
| 7208 | YDR046C | plastidic | 1.351 |
| 8423 | YDR046C_2 | plastidic | 1.351 |

[1050] Biomass production was measured by weighing plant rosettes. Biomass increase was calculated as ratio of average weight for transgenic plants compared to average weight of wild type control plants from the same experiment. The mean biomass increase of transgenic constructs is given (significance value<0.05).

### EXAMPLE 18

### Plant Screening for Growth Under Low Temperature Conditions

[1051] In a standard experiment soil was prepared as 3.5:1 (v/v) mixture of nutrient rich soil (GS90, Tantau, Wansdorf, Germany) and sand. Pots were filled with soil mixture and placed into trays. Water was added to the trays to let the soil mixture take up appropriate amount of water for the sowing procedure. The seeds for transgenic A. thaliana plants were sown in pots (6 cm diameter). Stratification was established for a period of 3 days in the dark at 4° C.-5° C. Germination of seeds and growth was initiated at a growth condition of 20° C., approx. 60% relative humidity, 16 h photoperiod and illumination with fluorescent light at 150-200 μmol/m2s. BASTA selection was done at day 9 after sowing by spraying pots with plantlets from the top. Therefore, a 0.07% (v/v) solution of BASTA concentrate (183 g/l glufosinate-ammonium) in tap water was sprayed. The wild-type control plants were sprayed with tap water only (instead of spraying with BASTA dissolved in tap water) but were otherwise treated identically. Watering was carried out every two days after covers were removed from the trays. Plants were individualized 12-13 days after sowing by removing the surplus of seedlings leaving one seedling in a pot. Cold (chilling to 11° C.-12° C.) was applied 14-16 days after sowing until the end of the experiment. For measuring biomass performance, plant fresh weight was determined at harvest time (35-37 days after sowing) by cutting shoots and weighing them. Plants were in the stage prior to flowering and prior to growth of inflorescence when harvested. Transgenic plants were compared to the non-transgenic wild-type control plants harvested at the same day. Significance values for the statistical significance of the biomass changes were calculated by applying the ‘student's’ t test (parameters: two-sided, unequal variance).

[1052] Up to five lines per transgenic construct were tested in 2 to 3 successive experimental levels. Only constructs that displayed positive performance were subjected to the next experimental level. In the final experimental level 20-28 plants were tested. Biomass performance was evaluated as described above. Data are shown for constructs that displayed increased biomass performance in at least two successive experimental levels.

TABLE XIII
Biomass production of transgenic A. thaliana
after imposition of chilling stress.

| | | | Min and Max |
|---|---|---|---|
| SeqID | Locus | Target | Ratio by WT |
| 2492 | At5g16650 | cytoplasmic | 1.075 |
| 7137 | Ybr159w | cytoplasmic | 1.068 |
| 7208 | YDR046C | cytoplasmic | 1.206 |
| 8239 | YPL249C-A | cytoplasmic | 1.230 |
| 8423 | YDR046C_2 | cytoplasmic | 1.206 |

Biomass production was measured by weighing plant rosettes. Biomass increase was calculated as ratio of average weight of transgenic plants compared to average weight of wild-type control plants from the same experiment. The mean biomass increase of transgenic constructs is given (significance value <0.3 and biomass increase >5% (ratio >1.05)).

### FIGURES

[1053] FIG. 1 Vector VC-MME220-1qcz (SEQ ID NO: 35) used for cloning gene of interest for non-targeted expression.

[1054] FIG. 2 Vector VC-MME221-1qcz (SEQ ID NO: 38) used for cloning gene of interest for non-targeted expression.

[1055] FIG. 3 Vector VC-MME354-1QCZ (SEQ ID NO: 31) used for cloning gene of interest for plastidic targeted expression.

[1056] FIG. 4 Vector VC-MME432-1qcz (SEQ ID NO: 36) used for cloning gene of interest for plastidic targeted expression.

[1057] FIG. 5 Vector pMTX155 (SEQ ID NO: 30) used for used for cloning gene of interest for non-targeted expression.

[1058] FIG. 6 Vector pMTX447korr (SEQ ID NO: 39) used for plastidic targeted expression.

[1059] FIG. 7 Vector VC-MME489-1QCZ (SEQ ID NO: 41) used for cloning gene of interest for non-targeted expression and cloning of a targeting sequence.

TABLE IA
Nucleic acid sequence ID numbers

| | | | | | 5. | |
|---|---|---|---|---|---|---|
| | 1. | 2. | 3. | 4. | Lead | 6. |
| Application | Hit | Project | Locus | Organism | SEQ ID | Target |
| 1 | 1 | GABA | YMR052W | S. cerevisiae | 42 | cytoplasmic |
| 1 | 2 | GABA | AT1G43850 | A. th. | 654 | cytoplasmic |
| 1 | 3 | GABA | AT2G28890 | A. th. | 706 | cytoplasmic |
| 1 | 4 | GABA | AT3G04050 | A. th. | 751 | plastidic |
| 1 | 5 | GABA | AT3G08710 | A. th. | 1156 | cytoplasmic |
| 1 | 6 | GABA | AT3G11650 | A. th. | 1510 | cytoplasmic |
| 1 | 7 | GABA | AT3G27540 | A. th. | 1598 | cytoplasmic |
| 1 | 8 | GABA | AT3G61830 | A. th. | 1670 | cytoplasmic |
| 1 | 9 | GABA | AT4G32480 | A. th. | 1874 | cytoplasmic |
| 1 | 10 | GABA | AT4G35310 | A. th. | 1936 | cytoplasmic |
| 1 | 11 | GABA | AT5G16650 | A. th. | 2492 | cytoplasmic |
| 1 | 12 | GABA | AVINDRAFT_2344 | A. vinelandii | 2553 | cytoplasmic |
| 1 | 13 | GABA | AVINDRAFT_2521 | A. vinelandii | 3408 | cytoplasmic |
| 1 | 14 | GABA | AVINDRAFT_5103 | A. vinelandii | 3564 | cytoplasmic |
| 1 | 15 | GABA | AVINDRAFT_5292 | A. vinelandii | 3728 | cytoplasmic |
| 1 | 16 | GABA | B0124 | E. coli | 4068 | cytoplasmic |
| 1 | 17 | GABA | B0161 | E. coli | 4176 | cytoplasmic |
| 1 | 18 | GABA | B0449 | E. coli | 4364 | cytoplasmic |
| 1 | 19 | GABA | B0593 | E. coli | 4717 | plastidic |
| 1 | 20 | GABA | B0898 | E. coli | 4864 | cytoplasmic |
| 1 | 21 | GABA | B1003 | E. coli | 4903 | cytoplasmic |
| 1 | 22 | GABA | B1522 | E. coli | 4909 | cytoplasmic |
| 1 | 23 | GABA | B2739 | E. coli | 4954 | cytoplasmic |
| 1 | 24 | GABA | B3646 | E. coli | 5121 | cytoplasmic |
| 1 | 25 | GABA | B4029 | E. coli | 5319 | cytoplasmic |
| 1 | 26 | GABA | B4256 | E. coli | 5387 | cytoplasmic |
| 1 | 27 | GABA | C_PP034008079R | P. patens | 5458 | cytoplasmic |
| 1 | 28 | GABA | SLR0739 | Synechocystis | 6041 | plastidic |
| | | | | sp. | | |
| 1 | 29 | GABA | TTC0019 | T. thermophilus | 6469 | cytoplasmic |
| 1 | 30 | GABA | TTC1550 | T. thermophilus | 6739 | cytoplasmic |
| 1 | 31 | GABA | YJR153W | S. cerevisiae | 7510 | cytoplasmic |
| 1 | 32 | GABA | YLR043C | S. cerevisiae | 7633 | plastidic |
| 1 | 33 | GABA | 51340801_CANOLA | B. napus | 53 | plastidic |
| 1 | 34 | GABA | YBR159W | S. cerevisiae | 7137 | cytoplasmic |
| 1 | 35 | GABA | YDR046C | S. cerevisiae | 7208 | cytoplasmic |
| 1 | 36 | GABA | YGR255C | S. cerevisiae | 7274 | cytoplasmic |
| 1 | 37 | GABA | YHR213W | S. cerevisiae | 7489 | cytoplasmic |
| 1 | 38 | GABA | YPL249C-A | S. cerevisiae | 8239 | cytoplasmic |
| 1 | 39 | GABA | YPR185W | S. cerevisiae | 8397 | cytoplasmic |
| 1 | 40 | GABA | YLR395C | S. cerevisiae | 8227 | cytoplasmic |
| 1 | 41 | GABA | YDR046C_2 | S. cerevisiae | 8423 | cytoplasmic |
| 1 | 42 | GABA | | Oryza | 8589 | cytoplasmic |
| | | | | sativa | | |

| | 7. |
|---|---|
| Application | SEQ IDs of Nucleic Acid Homologs |
| 1 | 44, 46 |
| 1 | 656, 658, 660, 662, 664, 666, 668, 670, 672, 674, 676, 678, 680, |
| | 682, 684, 686, 688 |
| 1 | 708, 710, 712, 714, 716, 718, 720, 722, 724, 726, 728, 730, 732, |
| | 734, 736 |
| 1 | 753, 755, 757, 759, 761, 763, 765, 767, 769, 771, 773, 775, 777, |
| | 779, 781, 783, 785, 787, 789, 791, 793, 795, 797, 799, 801, 803, |
| | 805, 807, 809, 811, 813, 815, 817, 819, 821, 823, 825, 827, 829, |
| | 831, 833, 835, 837, 839, 841, 843, 845, 847, 849, 851, 853, 855, |
| | 857, 859, 861, 863, 865, 867, 869, 871, 873, 875, 877, 879, 881, |
| | 883, 885, 887, 889, 891, 893, 895, 897, 899, 901, 903, 905, 907, |
| | 909, 911, 913, 915, 917, 919, 921, 923, 925, 927, 929, 931, 933, |
| | 935, 937, 939, 941, 943, 945, 947, 949, 951, 953, 955, 957, 959, |
| | 961, 963, 965, 967, 969, 971, 973, 975, 977, 979, 981, 983, 985, |
| | 987, 989, 991, 993, 995, 997, 999, 1001, 1003, 1005, 1007, |
| | 1009, 1011, 1013, 1015, 1017, 1019, 1021, 1023, 1025, 1027, |
| | 1029, 1031, 1033, 1035, 1037, 1039, 1041, 1043, 1045, 1047, |
| | 1049, 1051, 1053 |
| 1 | 1158, 1160, 1162, 1164, 1166, 1168, 1170, 1172, 1174, 1176, |
| | 1178, 1180, 1182, 1184, 1186, 1188, 1190, 1192, 1194, 1196, |
| | 1198, 1200, 1202, 1204, 1206, 1208, 1210, 1212, 1214, 1216, |
| | 1218, 1220, 1222, 1224, 1226, 1228, 1230, 1232, 1234, 1236, |
| | 1238, 1240, 1242, 1244, 1246, 1248, 1250, 1252, 1254, 1256, |
| | 1258, 1260, 1262, 1264, 1266, 1268, 1270, 1272, 1274, 1276, |
| | 1278, 1280, 1282, 1284, 1286, 1288, 1290, 1292, 1294, 1296, |
| | 1298, 1300, 1302, 1304, 1306, 1308, 1310, 1312, 1314, 1316, |
| | 1318, 1320, 1322, 1324, 1326, 1328, 1330, 1332, 1334, 1336, |
| | 1338, 1340, 1342, 1344, 1346, 1348, 1350, 1352, 1354, 1356, |
| | 1358, 1360, 1362, 1364, 1366, 1368, 1370, 1372, 1374, 1376, |
| | 1378 |
| 1 | 1512, 1514, 1516, 1518, 1520, 1522, 1524, 1526, 1528, 1530, |
| | 1532, 1534, 1536, 1538, 1540, 1542, 1544, 1546, 1548 |
| 1 | 1600, 1602, 1604, 1606, 1608, 1610, 1612, 1614, 1616, 1618, |
| | 1620, 1622, 1624, 1626, 1628, 1630, 1632, 1634, 1636, 1638, |
| | 1640, 1642, 1644 |
| 1 | 1672, 1674, 1676, 1678, 1680, 1682, 1684, 1686, 1688, 1690, |
| | 1692, 1694, 1696, 1698, 1700, 1702, 1704, 1706, 1708, 1710, |
| | 1712, 1714, 1716, 1718, 1720, 1722, 1724, 1726, 1728, 1730, |
| | 1732, 1734, 1736, 1738, 1740, 1742, 1744, 1746, 1748, 1750, |
| | 1752, 1754, 1756, 1758, 1760, 1762, 1764, 1766, 1768, 1770, |
| | 1772, 1774, 1776, 1778, 1780, 1782, 1784, 1786, 1788, 1790, |
| | 1792, 1794, 1796, 1798, 1800, 1802, 1804, 1806, 1808, 1810, |
| | 1812, 1814, 1816, 1818, 1820, 1822, 1824, 1826, 1828, 1830, |
| | 1832, 1834, 1836, 1838, 1840, 1842 |
| 1 | 1876, 1878, 1880, 1882, 1884, 1886, 1888, 1890, 1892, 1894, |
| | 1896, 1898, 1900, 1902, 1904, 1906, 1908 |
| 1 | 1938, 1940, 1942, 1944, 1946, 1948, 1950, 1952, 1954, 1956, |
| | 1958, 1960, 1962, 1964, 1966, 1968, 1970, 1972, 1974, 1976, |
| | 1978, 1980, 1982, 1984, 1986, 1988, 1990, 1992, 1994, 1996, |
| | 1998, 2000, 2002, 2004, 2006, 2008, 2010, 2012, 2014, 2016, |
| | 2018, 2020, 2022, 2024, 2026, 2028, 2030, 2032, 2034, 2036, |
| | 2038, 2040, 2042, 2044, 2046, 2048, 2050, 2052, 2054, 2056, |
| | 2058, 2060, 2062, 2064, 2066, 2068, 2070, 2072, 2074, 2076, |
| | 2078, 2080, 2082, 2084, 2086, 2088, 2090, 2092, 2094, 2096, |
| | 2098, 2100, 2102, 2104, 2106, 2108, 2110, 2112, 2114, 2116, |
| | 2118, 2120, 2122, 2124, 2126, 2128, 2130, 2132, 2134, 2136, |
| | 2138, 2140, 2142, 2144, 2146, 2148, 2150, 2152, 2154, 2156, |
| | 2158, 2160, 2162, 2164, 2166, 2168, 2170, 2172, 2174, 2176, |
| | 2178, 2180, 2182, 2184, 2186, 2188, 2190, 2192, 2194, 2196, |
| | 2198, 2200, 2202, 2204, 2206, 2208, 2210, 2212, 2214, 2216, |
| | 2218, 2220, 2222, 2224, 2226, 2228, 2230, 2232, 2234, 2236, |
| | 2238, 2240, 2242, 2244, 2246, 2248, 2250, 2252, 2254, 2256, |
| | 2258, 2260, 2262, 2264, 2266, 2268, 2270, 2272, 2274, 2276, |
| | 2278, 2280, 2282, 2284, 2286, 2288, 2290, 2292, 2294, 2296, |
| | 2298, 2300, 2302, 2304, 2306, 2308, 2310, 2312, 2314, 2316, |
| | 2318, 2320, 2322, 2324, 2326, 2328, 2330, 2332, 2334, 2336, |
| | 2338, 2340 |
| 1 | 2494, 2496, 2498, 2500, 2502, 2504, 2506, 2508, 2510, 2512, |
| | 2514, 2516, 2518, 2520, 2522 |
| 1 | 2555, 2557, 2559, 2561, 2563, 2565, 2567, 2569, 2571, 2573, |
| | 2575, 2577, 2579, 2581, 2583, 2585, 2587, 2589, 2591, 2593, |
| | 2595, 2597, 2599, 2601, 2603, 2605, 2607, 2609, 2611, 2613, |
| | 2615, 2617, 2619, 2621, 2623, 2625, 2627, 2629, 2631, 2633, |
| | 2635, 2637, 2639, 2641, 2643, 2645, 2647, 2649, 2651, 2653, |
| | 2655, 2657, 2659, 2661, 2663, 2665, 2667, 2669, 2671, 2673, |
| | 2675, 2677, 2679, 2681, 2683, 2685, 2687, 2689, 2691, 2693, |
| | 2695, 2697, 2699, 2701, 2703, 2705, 2707, 2709, 2711, 2713, |
| | 2715, 2717, 2719, 2721, 2723, 2725, 2727, 2729, 2731, 2733, |
| | 2735, 2737, 2739, 2741, 2743, 2745, 2747, 2749, 2751, 2753, |
| | 2755, 2757, 2759, 2761, 2763, 2765, 2767, 2769, 2771, 2773, |
| | 2775, 2777, 2779, 2781, 2783, 2785, 2787, 2789, 2791, 2793, |
| | 2795, 2797, 2799, 2801, 2803, 2805, 2807, 2809, 2811, 2813, |
| | 2815, 2817, 2819, 2821, 2823, 2825, 2827, 2829, 2831, 2833, |
| | 2835, 2837, 2839, 2841, 2843, 2845, 2847, 2849, 2851, 2853, |
| | 2855, 2857, 2859, 2861, 2863, 2865, 2867, 2869, 2871, 2873, |
| | 2875, 2877, 2879, 2881, 2883, 2885, 2887, 2889, 2891, 2893, |
| | 2895, 2897, 2899, 2901, 2903, 2905, 2907, 2909, 2911, 2913, |
| | 2915, 2917, 2919, 2921, 2923, 2925, 2927, 2929, 2931, 2933, |
| | 2935, 2937, 2939, 2941, 2943, 2945, 2947, 2949, 2951, 2953, |
| | 2955, 2957, 2959, 2961, 2963, 2965, 2967, 2969, 2971, 2973, |
| | 2975, 2977, 2979, 2981, 2983, 2985, 2987, 2989, 2991, 2993, |
| | 2995, 2997, 2999, 3001, 3003, 3005, 3007, 3009, 3011, 3013, |
| | 3015, 3017, 3019, 3021, 3023, 3025, 3027, 3029, 3031, 3033, |
| | 3035, 3037, 3039, 3041, 3043, 3045, 3047, 3049, 3051, 3053, |
| | 3055, 3057, 3059, 3061, 3063, 3065, 3067, 3069, 3071, 3073, |
| | 3075, 3077, 3079, 3081, 3083, 3085, 3087, 3089, 3091, 3093, |
| | 3095, 3097, 3099, 3101, 3103, 3105, 3107, 3109, 3111, 3113, |
| | 3115, 3117, 3119, 3121, 3123, 3125, 3127, 3129, 3131, 3133, |
| | 3135, 3137, 3139, 3141, 3143, 3145, 3147, 3149, 3151, 3153, |
| | 3155, 3157, 3159, 3161, 3163, 3165, 3167, 3169, 3171, 3173, |
| | 3175, 3177, 3179, 3181, 3183, 3185, 3187, 3189, 3191, 3193, |
| | 3195, 3197, 3199, 3201, 3203, 3205, 3207, 3209, 3211, 3213, |
| | 3215, 3217, 3219, 3221, 3223, 3225, 3227, 3229, 3231, 3233, |
| | 3235, 3237, 3239, 3241, 3243, 3245, 3247, 3249, 3251, 3253, |
| | 3255, 3257, 3259, 3261, 3263, 3265, 3267, 3269, 3271, 3273, |
| | 3275, 3277, 3279, 3281, 3283, 3285, 3287, 3289, 3291, 3293, |
| | 3295 |
| 1 | 3410, 3412, 3414, 3416, 3418, 3420, 3422, 3424, 3426, 3428, |
| | 3430, 3432, 3434, 3436, 3438, 3440, 3442, 3444, 3446, 3448, |
| | 3450, 3452, 3454, 3456, 3458, 3460, 3462, 3464, 3466, 3468, |
| | 3470, 3472, 3474, 3476, 3478, 3480, 3482, 3484, 3486, 3488, |
| | 3490, 3492, 3494, 3496, 3498, 3500, 3502, 3504, 3506, 3508, |
| | 3510, 3512, 3514, 3516, 3518, 3520, 3522, 3524, 3526, 3528, |
| | 3530, 3532, 3534, 3536, 3538, 3540, 3542, 3544, 3546, 3548, |
| | 3550, 3552, 3554, 3556, 3558 |
| 1 | 3566, 3568, 3570, 3572, 3574, 3576, 3578, 3580, 3582, 3584, |
| | 3586, 3588, 3590, 3592, 3594, 3596, 3598, 3600, 3602, 3604, |
| | 3606, 3608, 3610, 3612, 3614, 3616, 3618, 3620, 3622, 3624, |
| | 3626, 3628, 3630, 3632, 3634, 3636, 3638, 3640, 3642, 3644, |
| | 3646, 3648, 3650, 3652, 3654, 3656, 3658, 3660, 3662, 3664, |
| | 3666, 3668, 3670, 3672, 3674, 3676, 3678, 3680, 3682, 3684, |
| | 3686, 3688, 3690, 3692, 3694, 3696, 3698, 3700, 3702, 3704, |
| | 3706, 3708, 3710, 3712, 3714, 3716, 3718, 3720, 3722 |
| 1 | 3730, 3732, 3734, 3736, 3738, 3740, 3742, 3744, 3746, 3748, |
| | 3750, 3752, 3754, 3756, 3758, 3760, 3762, 3764, 3766, 3768, |
| | 3770, 3772, 3774, 3776, 3778, 3780, 3782, 3784, 3786, 3788, |
| | 3790, 3792, 3794, 3796, 3798, 3800, 3802, 3804, 3806, 3808, |
| | 3810, 3812, 3814, 3816, 3818, 3820, 3822, 3824, 3826, 3828, |
| | 3830, 3832, 3834, 3836, 3838, 3840, 3842, 3844, 3846, 3848, |
| | 3850, 3852, 3854, 3856, 3858, 3860, 3862, 3864, 3866, 3868, |
| | 3870, 3872, 3874, 3876, 3878, 3880, 3882, 3884, 3886, 3888, |
| | 3890, 3892, 3894, 3896, 3898, 3900, 3902, 3904, 3906, 3908, |
| | 3910, 3912, 3914, 3916, 3918, 3920, 3922, 3924, 3926, 3928, |
| | 3930, 3932, 3934, 3936, 3938, 3940, 3942, 3944, 3946, 3948, |
| | 3950, 3952, 3954, 3956, 3958, 3960, 3962, 3964, 3966, 3968, |
| | 3970, 3972, 3974, 3976, 3978, 3980, 3982, 3984, 3986, 3988, |
| | 3990, 3992, 3994, 3996, 3998, 4000, 4002, 4004, 4006, 4008, |
| | 4010, 4012, 4014, 4016, 4018, 4020, 4022, 4024, 4026, 4028, |
| | 4030, 4032, 4034, 4036, 4038, 4040 |
| 1 | 4070, 4072, 4074, 4076, 4078, 4080, 4082, 4084, 4086, 4088, |
| | 4090, 4092, 4094, 4096, 4098, 4100, 4102, 4104, 4106, 4108, |
| | 4110, 4112, 4114, 4116, 4118, 4120, 4122, 4124, 4126, 4128, |
| | 4130, 4132, 4134, 4136, 4138, 4140, 4142, 4144, 4146, 4148, |
| | 4150, 4152, 4154, 4156, 4158 |
| 1 | 4178, 4180, 4182, 4184, 4186, 4188, 4190, 4192, 4194, 4196, |
| | 4198, 4200, 4202, 4204, 4206, 4208, 4210, 4212, 4214, 4216, |
| | 4218, 4220, 4222, 4224, 4226, 4228, 4230, 4232, 4234, 4236, |
| | 4238, 4240, 4242, 4244, 4246, 4248, 4250, 4252, 4254, 4256, |
| | 4258, 4260, 4262, 4264, 4266, 4268, 4270, 4272, 4274, 4276, |
| | 4278, 4280, 4282, 4284, 4286, 4288, 4290, 4292, 4294, 4296, |
| | 4298, 4300, 4302, 4304, 4306, 4308, 4310, 4312, 4314, 4316, |
| | 4318, 4320, 4322, 4324, 4326, 4328, 4330, 4332, 4334, 4336, |
| | 4338, 4340, 4342, 4344, 4346, 4348, 4350, 4352, 4354 |
| 1 | 4366, 4368, 4370, 4372, 4374, 4376, 4378, 4380, 4382, 4384, |
| | 4386, 4388, 4390, 4392, 4394, 4396, 4398, 4400, 4402, 4404, |
| | 4406, 4408, 4410, 4412, 4414, 4416, 4418, 4420, 4422, 4424, |
| | 4426, 4428, 4430, 4432, 4434, 4436, 4438, 4440, 4442, 4444, |
| | 4446, 4448, 4450, 4452, 4454, 4456, 4458, 4460, 4462, 4464, |
| | 4466, 4468, 4470, 4472, 4474, 4476, 4478, 4480, 4482, 4484, |
| | 4486, 4488, 4490, 4492, 4494, 4496, 4498, 4500, 4502, 4504, |
| | 4506, 4508, 4510, 4512, 4514, 4516, 4518, 4520, 4522, 4524, |
| | 4526, 4528, 4530, 4532, 4534, 4536, 4538, 4540, 4542, 4544, |
| | 4546, 4548, 4550, 4552, 4554, 4556, 4558, 4560, 4562, 4564, |
| | 4566, 4568, 4570, 4572, 4574, 4576, 4578, 4580, 4582, 4584, |
| | 4586, 4588, 4590, 4592, 4594, 4596, 4598, 4600, 4602, 4604, |
| | 4606, 4608, 4610, 4612, 4614, 4616, 4618, 4620, 4622, 4624, |
| | 4626, 4628, 4630, 4632, 4634, 4636, 4638, 4640, 4642, 4644, |
| | 4646, 4648, 4650, 4652, 4654, 4656, 4658, 4660, 4662, 4664, |
| | 4666, 4668, 4670, 4672, 4674, 4676, 4678, 4680, 4682, 4684, |
| | 4686, 4688, 4690, 4692, 4694 |
| 1 | 4719, 4721, 4723, 4725, 4727, 4729, 4731, 4733, 4735, 4737, |
| | 4739, 4741, 4743, 4745, 4747, 4749, 4751, 4753, 4755, 4757, |
| | 4759, 4761, 4763, 4765, 4767, 4769, 4771, 4773, 4775, 4777, |
| | 4779, 4781, 4783, 4785, 4787, 4789, 4791, 4793, 4795, 4797, |
| | 4799, 4801, 4803, 4805, 4807, 4809, 4811, 4813, 4815, 4817, |
| | 4819, 4821, 4823, 4825, 4827, 4829, 4831, 4833, 4835, 4837, |
| | 4839, 4841, 4843, 4845, 4847, 4849, 4851, 4853 |
| 1 | 4866, 4868, 4870, 4872, 4874, 4876, 4878, 4880, 4882, 4884, |
| | 4886, 4888, 4890 |
| 1 | 4905 |
| 1 | 4911, 4913, 4915, 4917, 4919, 4921, 4923, 4925, 4927, 4929, |
| | 4931, 4933, 4935, 4937, 4939, 4941, 4943, 4945, 4947 |
| 1 | 4956, 4958, 4960, 4962, 4964, 4966, 4968, 4970, 4972, 4974, |
| | 4976, 4978, 4980, 4982, 4984, 4986, 4988, 4990, 4992, 4994, |
| | 4996, 4998, 5000, 5002, 5004, 5006, 5008, 5010, 5012, 5014, |
| | 5016, 5018, 5020, 5022, 5024, 5026, 5028, 5030, 5032, 5034, |
| | 5036, 5038, 5040, 5042, 5044, 5046, 5048, 5050, 5052, 5054, |
| | 5056, 5058, 5060, 5062, 5064, 5066, 5068, 5070, 5072, 5074, |
| | 5076, 5078, 5080, 5082, 5084, 5086, 5088, 5090, 5092, 5094, |
| | 5096, 5098, 5100, 5102, 5104, 5106, 5108, 5110, 5112, 5114 |
| 1 | 5123, 5125, 5127, 5129, 5131, 5133, 5135, 5137, 5139, 5141, |
| | 5143, 5145, 5147, 5149, 5151, 5153, 5155, 5157, 5159, 5161, |
| | 5163, 5165, 5167, 5169, 5171, 5173, 5175, 5177, 5179, 5181, |
| | 5183, 5185, 5187, 5189, 5191, 5193, 5195, 5197, 5199, 5201, |
| | 5203, 5205, 5207, 5209, 5211, 5213, 5215, 5217, 5219, 5221, |
| | 5223, 5225, 5227, 5229, 5231, 5233, 5235, 5237, 5239, 5241, |
| | 5243, 5245, 5247, 5249, 5251, 5253, 5255, 5257, 5259, 5261, |
| | 5263, 5265, 5267, 5269, 5271, 5273, 5275, 5277, 5279, 5281, |
| | 5283, 5285, 5287, 5289, 5291, 5293, 5295, 5297, 5299, 5301, |
| | 5303, 5305, 5307, 5309, 5311 |
| 1 | 5321, 5323, 5325, 5327, 5329, 5331, 5333, 5335, 5337, 5339, |
| | 5341, 5343, 5345, 5347, 5349, 5351, 5353, 5355, 5357, 5359, |
| | 5361, 5363, 5365, 5367, 5369, 5371 |
| 1 | 5389, 5391, 5393, 5395, 5397, 5399, 5401, 5403, 5405, 5407, |
| | 5409, 5411, 5413, 5415, 5417, 5419, 5421, 5423, 5425, 5427, |
| | 5429, 5431, 5433, 5435, 5437, 5439, 5441, 5443, 5445, 5447, |
| | 5449, 5451 |
| 1 | 5460, 5462, 5464, 5466, 5468, 5470, 5472, 5474, 5476, 5478, |
| | 5480, 5482, 5484, 5486, 5488, 5490, 5492, 5494, 5496, 5498, |
| | 5500, 5502, 5504, 5506, 5508, 5510, 5512, 5514, 5516, 5518, |
| | 5520, 5522, 5524, 5526, 5528, 5530, 5532, 5534, 5536, 5538, |
| | 5540, 5542, 5544, 5546, 5548, 5550, 5552, 5554, 5556, 5558, |
| | 5560, 5562, 5564, 5566, 5568, 5570, 5572, 5574, 5576, 5578, |
| | 5580, 5582, 5584, 5586, 5588, 5590, 5592, 5594, 5596, 5598, |
| | 5600, 5602, 5604, 5606, 5608, 5610, 5612, 5614, 5616, 5618, |
| | 5620, 5622, 5624, 5626, 5628, 5630, 5632, 5634, 5636, 5638, |
| | 5640, 5642, 5644, 5646, 5648, 5650, 5652, 5654, 5656, 5658, |
| | 5660, 5662, 5664, 5666, 5668, 5670, 5672, 5674, 5676, 5678, |
| | 5680, 5682, 5684, 5686, 5688, 5690, 5692, 5694, 5696, 5698, |
| | 5700, 5702, 5704, 5706, 5708, 5710, 5712, 5714, 5716, 5718, |
| | 5720, 5722, 5724, 5726, 5728, 5730, 5732, 5734, 5736, 5738, |
| | 5740, 5742, 5744, 5746, 5748, 5750, 5752, 5754, 5756, 5758, |
| | 5760, 5762, 5764, 5766, 5768, 5770, 5772, 5774, 5776, 5778, |
| | 5780, 5782, 5784, 5786, 5788, 5790, 5792, 5794, 5796, 5798, |
| | 5800, 5802, 5804, 5806, 5808, 5810, 5812, 5814, 5816, 5818, |
| | 5820, 5822, 5824, 5826, 5828, 5830, 5832, 5834, 5836, 5838, |
| | 5840, 5842, 5844, 5846, 5848, 5850, 5852, 5854, 5856, 5858, |
| | 5860, 5862, 5864, 5866, 5868, 5870, 5872, 5874, 5876, 5878, |
| | 5880, 5882, 5884, 5886, 5888, 5890, 5892, 5894, 5896, 5898, |
| | 5900, 5902, 5904, 5906, 5908, 5910, 5912, 5914, 5916, 5918, |
| | 5920, 5922, 5924, 5926, 5928, 5930, 5932, 5934, 5936, 5938, |
| | 5940, 5942, 5944, 5946, 5948, 5950, 5952, 5954, 5956, 5958, |
| | 5960, 5962, 5964, 5966, 5968, 5970, 5972, 5974, 5976, 5978, |
| | 5980, 5982, 5984, 5986, 5988, 5990, 5992, 5994, 5996, 5998, |
| | 6000, 6002, 6004 |
| 1 | 6043, 6045, 6047, 6049, 6051, 6053, 6055, 6057, 6059, 6061, |
| | 6063, 6065, 6067, 6069, 6071, 6073, 6075, 6077, 6079, 6081, |
| | 6083, 6085, 6087, 6089, 6091, 6093, 6095, 6097, 6099, 6101, |
| | 6103, 6105, 6107, 6109, 6111, 6113, 6115, 6117, 6119, 6121, |
| | 6123, 6125, 6127, 6129, 6131, 6133, 6135, 6137, 6139, 6141, |
| | 6143, 6145, 6147, 6149, 6151, 6153, 6155, 6157, 6159, 6161, |
| | 6163, 6165, 6167, 6169, 6171, 6173, 6175, 6177, 6179, 6181, |
| | 6183, 6185, 6187, 6189, 6191, 6193, 6195, 6197, 6199, 6201, |
| | 6203, 6205, 6207, 6209, 6211, 6213, 6215, 6217, 6219, 6221, |
| | 6223, 6225, 6227, 6229, 6231, 6233, 6235, 6237, 6239, 6241, |
| | 6243, 6245, 6247, 6249, 6251, 6253, 6255, 6257, 6259, 6261, |
| | 6263, 6265, 6267, 6269, 6271, 6273, 6275, 6277, 6279, 6281, |
| | 6283, 6285, 6287, 6289, 6291, 6293, 6295, 6297, 6299, 6301, |
| | 6303, 6305, 6307, 6309, 6311, 6313, 6315, 6317, 6319, 6321, |
| | 6323, 6325, 6327, 6329, 6331, 6333, 6335, 6337, 6339, 6341, |
| | 6343, 6345, 6347, 6349, 6351, 6353, 6355, 6357, 6359, 6361, |
| | 6363, 6365, 6367, 6369, 6371, 6373, 6375, 6377, 6379, 6381, |
| | 6383, 6385, 6387, 6389, 6391, 6393, 6395, 6397, 6399, 6401, |
| | 6403, 6405, 6407, 6409, 6411, 6413, 6415, 6417, 6419, 6421, |
| | 6423, 6425, 6427, 6429, 6431, 6433, 6435, 6437, 6439, 6441, |
| | 6443, 6445 |
| 1 | 6471, 6473, 6475, 6477, 6479, 6481, 6483, 6485, 6487, 6489, |
| | 6491, 6493, 6495, 6497, 6499, 6501, 6503, 6505, 6507, 6509, |
| | 6511, 6513, 6515, 6517, 6519, 6521, 6523, 6525, 6527, 6529, |
| | 6531, 6533, 6535, 6537, 6539, 6541, 6543, 6545, 6547, 6549, |
| | 6551, 6553, 6555, 6557, 6559, 6561, 6563, 6565, 6567, 6569, |
| | 6571, 6573, 6575, 6577, 6579, 6581, 6583, 6585, 6587, 6589, |
| | 6591, 6593, 6595, 6597, 6599, 6601, 6603, 6605, 6607, 6609, |
| | 6611, 6613, 6615, 6617, 6619, 6621, 6623, 6625, 6627, 6629, |
| | 6631, 6633, 6635, 6637, 6639, 6641, 6643, 6645, 6647, 6649, |
| | 6651, 6653, 6655, 6657, 6659, 6661, 6663, 6665, 6667, 6669, |
| | 6671, 6673, 6675, 6677, 6679, 6681, 6683, 6685, 6687, 6689, |
| | 6691, 6693, 6695, 6697, 6699, 6701, 6703, 6705, 6707, 6709, |
| | 6711, 6713, 6715, 6717, 6719, 6721, 6723, 6725, 6727 |
| 1 | 6741, 6743, 6745, 6747, 6749, 6751, 6753, 6755, 6757, 6759, |
| | 6761, 6763, 6765, 6767, 6769, 6771, 6773, 6775, 6777, 6779, |
| | 6781, 6783, 6785, 6787, 6789, 6791, 6793, 6795, 6797, 6799, |
| | 6801, 6803, 6805, 6807, 6809, 6811, 6813, 6815, 6817, 6819, |
| | 6821, 6823, 6825, 6827, 6829, 6831, 6833, 6835, 6837, 6839, |
| | 6841, 6843, 6845, 6847, 6849, 6851, 6853, 6855, 6857, 6859, |
| | 6861, 6863, 6865, 6867, 6869, 6871, 6873, 6875, 6877, 6879, |
| | 6881, 6883, 6885, 6887, 6889, 6891, 6893, 6895, 6897, 6899, |
| | 6901, 6903, 6905, 6907, 6909, 6911, 6913, 6915, 6917, 6919, |
| | 6921, 6923, 6925, 6927, 6929, 6931, 6933, 6935, 6937, 6939, |
| | 6941, 6943, 6945, 6947, 6949, 6951, 6953, 6955, 6957, 6959, |
| | 6961, 6963, 6965, 6967, 6969, 6971, 6973, 6975, 6977, 6979, |
| | 6981, 6983, 6985, 6987, 6989, 6991, 6993, 6995, 6997, 6999, |
| | 7001, 7003, 7005, 7007, 7009, 7011, 7013, 7015, 7017, 7019, |
| | 7021, 7023, 7025, 7027, 7029, 7031, 7033, 7035, 7037, 7039, |
| | 7041, 7043, 7045, 7047, 7049, 7051, 7053, 7055, 7057, 7059, |
| | 7061, 7063, 7065, 7067, 7069, 7071, 7073, 7075, 7077, 7079, |
| | 7081, 7083, 7085, 7087, 7089, 7091, 7093, 7095, 7097, 7099, |
| | 7101, 7103, 7105, 7107, 7109 |
| 1 | 7512, 7514, 7516, 7518, 7520, 7522, 7524, 7526, 7528, 7530, |
| | 7532, 7534, 7536, 7538, 7540, 7542, 7544, 7546, 7548, 7550, |
| | 7552, 7554, 7556, 7558, 7560, 7562, 7564, 7566, 7568, 7570, |
| | 7572, 7574, 7576, 7578, 7580, 7582, 7584, 7586, 7588, 7590, |
| | 7592, 7594, 7596, 7598, 7600, 7602, 7604, 7606, 7608 |
| 1 | 7635, 7637, 7639, 7641, 7643, 7645, 7647, 7649, 7651, 7653, |
| | 7655, 7657, 7659, 7661, 7663, 7665, 7667, 7669, 7671, 7673, |
| | 7675, 7677, 7679, 7681, 7683, 7685, 7687, 7689, 7691, 7693, |
| | 7695, 7697, 7699, 7701, 7703, 7705, 7707, 7709, 7711, 7713, |
| | 7715, 7717, 7719, 7721, 7723, 7725, 7727, 7729, 7731, 7733, |
| | 7735, 7737, 7739, 7741, 7743, 7745, 7747, 7749, 7751, 7753, |
| | 7755, 7757, 7759, 7761, 7763, 7765, 7767, 7769, 7771, 7773, |
| | 7775, 7777, 7779, 7781, 7783, 7785, 7787, 7789, 7791, 7793, |
| | 7795, 7797, 7799, 7801, 7803, 7805, 7807, 7809, 7811, 7813, |
| | 7815, 7817, 7819, 7821, 7823, 7825, 7827, 7829, 7831, 7833, |
| | 7835, 7837, 7839, 7841, 7843, 7845, 7847, 7849, 7851, 7853, |
| | 7855, 7857, 7859, 7861, 7863, 7865, 7867, 7869, 7871, 7873, |
| | 7875, 7877, 7879, 7881, 7883, 7885, 7887, 7889, 7891, 7893, |
| | 7895, 7897, 7899, 7901, 7903, 7905, 7907, 7909, 7911, 7913, |
| | 7915, 7917, 7919, 7921, 7923, 7925, 7927, 7929, 7931, 7933, |
| | 7935, 7937, 7939, 7941, 7943, 7945, 7947, 7949, 7951, 7953, |
| | 7955, 7957, 7959, 7961, 7963, 7965, 7967, 7969, 7971, 7973, |
| | 7975, 7977, 7979, 7981, 7983 |
| 1 | 55, 57, 59, 61, 63, 65, 67, 69, 71, 73, 75, 77, 79, 81, 83, 85, 87, |
| | 89, 91, 93, 95, 97, 99, 101, 103, 105, 107, 109, 111, 113, 115, |
| | 117, 119, 121, 123, 125, 127, 129, 131, 133, 135, 137, 139, 141, |
| | 143, 145, 147, 149, 151, 153, 155, 157, 159, 161, 163, 165, 167, |
| | 169, 171, 173, 175, 177, 179, 181, 183, 185, 187, 189, 191, 193, |
| | 195, 197, 199, 201, 203, 205, 207, 209, 211, 213, 215, 217, 219, |
| | 221, 223, 225, 227, 229, 231, 233, 235, 237, 239, 241, 243, 245, |
| | 247, 249, 251, 253, 255, 257, 259, 261, 263, 265, 267, 269, 271, |
| | 273, 275, 277, 279, 281, 283, 285, 287, 289, 291, 293, 295, 297, |
| | 299, 301, 303, 305, 307, 309, 311, 313, 315, 317, 319, 321, 323, |
| | 325, 327, 329, 331, 333, 335, 337, 339, 341, 343, 345, 347, 349, |
| | 351, 353, 355, 357, 359, 361, 363, 365, 367, 369, 371, 373, 375, |
| | 377, 379, 381, 383, 385, 387, 389, 391, 393, 395, 397, 399, 401, |
| | 403, 405, 407, 409, 411, 413, 415, 417, 419, 421, 423, 425, 427, |
| | 429, 431, 433, 435, 437, 439, 441, 443, 445, 447, 449, 451, 453, |
| | 455, 457, 459, 461, 463, 465, 467, 469, 471, 473, 475, 477, 479, |
| | 481, 483, 485, 487, 489, 491, 493, 495, 497, 499, 501, 503, 505, |
| | 507, 509, 511, 513, 515, 517, 519, 521, 523, 525, 527, 529, 531, |
| | 533, 535, 537, 539, 541, 543, 545, 547, 549, 551, 553, 555, 557, |
| | 559, 561, 563, 565 |
| 1 | 7139, 7141, 7143, 7145, 7147, 7149, 7151, 7153, 7155, 7157, |
| | 7159, 7161, 7163, 7165, 7167, 7169, 7171, 7173, 7175, 7177, |
| | 7179, 7181, 7183, 7185 |
| 1 | 7210, 7212, 7214, 7216, 7218, 7220, 7222, 7224, 7226, 7228, |
| | 7230, 7232, 7234, 7236, 7238, 7240, 7242, 7244, 7246, 7248, |
| | 7250, 7252, 7254, 7256, 7258, 7260, 7262 |
| 1 | 7276, 7278, 7280, 7282, 7284, 7286, 7288, 7290, 7292, 7294, |
| | 7296, 7298, 7300, 7302, 7304, 7306, 7308, 7310, 7312, 7314, |
| | 7316, 7318, 7320, 7322, 7324, 7326, 7328, 7330, 7332, 7334, |
| | 7336, 7338, 7340, 7342, 7344, 7346, 7348, 7350, 7352, 7354, |
| | 7356, 7358, 7360, 7362, 7364, 7366, 7368, 7370, 7372, 7374, |
| | 7376, 7378, 7380, 7382, 7384, 7386, 7388, 7390, 7392, 7394, |
| | 7396, 7398, 7400, 7402, 7404, 7406, 7408, 7410, 7412, 7414, |
| | 7416, 7418, 7420, 7422, 7424, 7426, 7428, 7430, 7432, 7434, |
| | 7436, 7438, 7440, 7442, 7444, 7446, 7448, 7450, 7452, 7454, |
| | 7456, 7458, 7460, 7462, 7464, 7466, 7468, 7470, 7472, 7474, |
| | 7476, 7478 |
| 1 | 7491, 7493, 7495, 7497, 7499, 7501, 7503 |
| 1 | 8241, 8243, 8245, 8247, 8249, 8251, 8253, 8255, 8257, 8259, |
| | 8261, 8263, 8265, 8267, 8269, 8271, 8273, 8275, 8277, 8279, |
| | 8281, 8283, 8285, 8287, 8289, 8291, 8293, 8295, 8297, 8299, |
| | 8301, 8303, 8305, 8307, 8309, 8311, 8313, 8315, 8317, 8319, |
| | 8321, 8323, 8325, 8327, 8329, 8331, 8333, 8335, 8337, 8339, |
| | 8341, 8343, 8345, 8347, 8349, 8351, 8353, 8355, 8357, 8359 |
| 1 | 8399, 8401, 8403, 8405, 8407, 8409 |
| 1 | 8229, 8231, 8233 |
| 1 | 8425, 8427, 8429, 8431, 8433, 8435, 8437, 8439, 8441, 8443, |
| | 8445, 8447, 8449, 8451, 8453, 8455, 8457, 8459, 8461, 8463, |
| | 8465, 8467, 8469, 8471, 8473, 8475, 8477 |
| 1 | 1672, 1674, 1676, 1678, 1680, 1682, 1684, 1686, 1688, 1690, |
| | 1692, 1694, 1696, 1698, 1700, 1702, 1704, 1706, 1708, 1710, |
| | 1712, 1714, 1716, 1718, 1720, 1722, 1724, 1726, 1728, 1730, |
| | 1732, 1734, 1736, 1738, 1740, 1742, 1744, 1746, 1748, 1750, |
| | 1752, 1754, 1756, 1758, 1760, 1762, 1764, 1766, 1768, 1770, |
| | 1772, 1774, 1776, 1778, 1780, 1782, 1784, 1786, 1788, 1790, |
| | 1792, 1794, 1796, 1798, 1800, 1802, 1804, 1806, 1808, 1810, |
| | 1812, 1814, 1816, 1818, 1820, 1822, 1824, 1826, 1828, 1830, |
| | 1832, 1834, 1836, 1838, 1840, 1842 |

TABLE IB
Nucleic acid sequence ID numbers

| | | | | | 5. | |
|---|---|---|---|---|---|---|
| | 1. | 2. | 3. | 4. | Lead | 6. |
| Application | Hit | Project | Locus | Organism | SEQ ID | Target |
| 1 | 1 | GABA | YMR052W | S. cerevisiae | 42 | cytoplasmic |
| 1 | 2 | GABA | AT1G43850 | A. th. | 654 | cytoplasmic |
| 1 | 3 | GABA | AT2G28890 | A. th. | 706 | cytoplasmic |
| 1 | 4 | GABA | AT3G04050 | A. th. | 751 | plastidic |
| 1 | 5 | GABA | AT3G08710 | A. th. | 1156 | cytoplasmic |
| 1 | 6 | GABA | AT3G11650 | A. th. | 1510 | cytoplasmic |
| 1 | 7 | GABA | AT3G27540 | A. th. | 1598 | cytoplasmic |
| 1 | 8 | GABA | AT3G61830 | A. th. | 1670 | cytoplasmic |
| 1 | 9 | GABA | AT4G32480 | A. th. | 1874 | cytoplasmic |
| 1 | 10 | GABA | AT4G35310 | A. th. | 1936 | cytoplasmic |
| 1 | 11 | GABA | AT5G16650 | A. th. | 2492 | cytoplasmic |
| 1 | 12 | GABA | AVINDRAFT_2344 | A. vinelandii | 2553 | cytoplasmic |
| 1 | 13 | GABA | AVINDRAFT_2521 | A. vinelandii | 3408 | cytoplasmic |
| 1 | 14 | GABA | AVINDRAFT_5103 | A. vinelandii | 3564 | cytoplasmic |
| 1 | 15 | GABA | AVINDRAFT_5292 | A. vinelandii | 3728 | cytoplasmic |
| 1 | 16 | GABA | B0124 | E. coli | 4068 | cytoplasmic |
| 1 | 17 | GABA | B0161 | E. coli | 4176 | cytoplasmic |
| 1 | 18 | GABA | B0449 | E. coli | 4364 | cytoplasmic |
| 1 | 19 | GABA | B0593 | E. coli | 4717 | plastidic |
| 1 | 20 | GABA | B0898 | E. coli | 4864 | cytoplasmic |
| 1 | 21 | GABA | B1003 | E. coli | 4903 | cytoplasmic |
| 1 | 22 | GABA | B1522 | E. coli | 4909 | cytoplasmic |
| 1 | 23 | GABA | B2739 | E. coli | 4954 | cytoplasmic |
| 1 | 24 | GABA | B3646 | E. coli | 5121 | cytoplasmic |
| 1 | 25 | GABA | B4029 | E. coli | 5319 | cytoplasmic |
| 1 | 26 | GABA | B4256 | E. coli | 5387 | cytoplasmic |
| 1 | 27 | GABA | C_PP034008079R | P. patens | 5458 | cytoplasmic |
| 1 | 28 | GABA | SLR0739 | Synechocystis | 6041 | plastidic |
| | | | | sp. | | |
| 1 | 29 | GABA | TTC0019 | T. thermophilus | 6469 | cytoplasmic |
| 1 | 30 | GABA | TTC1550 | T. thermophilus | 6739 | cytoplasmic |
| 1 | 31 | GABA | YJR153W | S. cerevisiae | 7510 | cytoplasmic |
| 1 | 32 | GABA | YLR043C | S. cerevisiae | 7633 | plastidic |
| 1 | 33 | GABA | 51340801_CANOLA | B. napus | 53 | plastidic |
| 1 | 34 | GABA | YBR159W | S. cerevisiae | 7137 | cytoplasmic |
| 1 | 35 | GABA | YDR046C | S. cerevisiae | 7208 | cytoplasmic |
| 1 | 36 | GABA | YGR255C | S. cerevisiae | 7274 | cytoplasmic |
| 1 | 37 | GABA | YHR213W | S. cerevisiae | 7489 | cytoplasmic |
| 1 | 38 | GABA | YPL249C-A | S. cerevisiae | 8239 | cytoplasmic |
| 1 | 39 | GABA | YPR185W | S. cerevisiae | 8397 | cytoplasmic |
| 1 | 40 | GABA | YLR395C | S. cerevisiae | 8227 | cytoplasmic |
| 1 | 41 | GABA | YDR046C_2 | S. cerevisiae | 8423 | cytoplasmic |
| 1 | 42 | GABA | | Oryza | 8589 | cytoplasmic |
| | | | | sativa | | |

| | 7. |
|---|---|
| Application | SEQ IDs of Nucleic Acid Homologs |
| 1 | — |
| 1 | 690, 692 |
| 1 | — |
| 1 | 1055, 1057, 1059, 1061, 1063, 1065, 1067, 1069, 1071, 1073, |
| | 1075, 1077, 1079, 1081, 1083, 1085, 1087, 1089, 1091, 1093, |
| | 1095, 1097, 1099, 1101, 1103, 1105, 1107, 1109, 1111, 1113, |
| | 1115, 1117, 1119, 1121, 1123, 1125, 1127, 1129, 1131, 1133, |
| | 1135, 1137, 1139, 1141, 1143, 1145, 8499, 8501, 8503 |
| 1 | 1380, 1382, 1384, 1386, 1388, 1390, 1392, 1394, 1396, 1398, |
| | 1400, 1402, 1404, 1406, 1408, 1410, 1412, 1414, 1416, 1418, |
| | 1420, 1422, 1424, 1426, 1428, 1430, 1432, 1434, 1436, 1438, |
| | 1440, 1442, 1444, 1446, 1448, 1450, 1452, 1454, 1456, 1458, |
| | 1460, 1462, 1464, 1466, 1468, 1470, 1472, 1474, 1476, 1478, |
| | 1480, 1482, 1484, 1486, 1488, 1490, 1492, 1494, 1496, 1498, |
| | 1500, 1502, 1504, 8507, 8509, 8511, 8513 |
| 1 | 1550, 1552, 1554, 1556, 1558, 1560, 1562, 1564, 1566, 1568, |
| | 1570, 1572, 1574, 1576, 1578, 1580, 1582, 1584, 1586, 1588, |
| | 1590, 8517, 8519, 8521, 8523 |
| 1 | 1646, 1648, 1650, 1652, 1654, 1656, 1658, 8527, 8529, 8531 |
| 1 | 1844, 1846, 1848, 1850, 1852, 1854, 1856, 1858, 1860 |
| 1 | 1910, 1912, 1914, 1916, 1918, 1920, 1922, 1924, 1926, 1928 |
| 1 | 2342, 2344, 2346, 2348, 2350, 2352, 2354, 2356, 2358, 2360, |
| | 2362, 2364, 2366, 2368, 2370, 2372, 2374, 2376, 2378, 2380, |
| | 2382, 2384, 2386, 2388, 2390, 2392, 2394, 2396, 2398, 2400, |
| | 2402, 2404, 2406, 2408, 2410, 2412, 2414, 2416, 2418, 2420, |
| | 2422, 2424, 2426, 2428, 2430, 2432, 2434, 2436, 2438, 2440, |
| | 2442, 2444, 2446, 2448, 2450, 2452, 2454, 2456, 2458, 2460, |
| | 2462, 2464, 2466, 2468, 2470, 2472, 2474, 2476, 2478, 8535 |
| 1 | 2524, 2526, 2528, 2530, 2532, 2534, 2536, 2538, 2540, 2542, |
| | 2544, 2546, 8539 |
| 1 | 3297, 3299, 3301, 3303, 3305, 3307, 3309, 3311, 3313, 3315, |
| | 3317, 3319, 3321, 3323, 3325, 3327, 3329, 3331, 3333, 3335, |
| | 3337, 3339, 3341, 3343, 3345, 3347, 3349, 3351, 3353, 3355, |
| | 3357, 3359, 3361, 3363, 3365, 3367, 3369, 3371, 3373, 3375, |
| | 3377, 3379, 3381, 3383, 3385, 3387, 3389, 3391, 3393, 3395 |
| 1 | — |
| 1 | — |
| 1 | 4042, 4044, 4046, 4048, 4050, 4052, 4054, 4056, 4058, 4060, |
| | 4062 |
| 1 | — |
| 1 | — |
| 1 | 4696, 4698, 4700, 4702, 4704, 4706, 4708 |
| 1 | — |
| 1 | — |
| 1 | — |
| 1 | — |
| 1 | — |
| 1 | — |
| 1 | — |
| 1 | — |
| 1 | 6006, 6008, 6010, 6012, 6014, 6016, 6018, 6020, 6022, 6024, |
| | 6026, 6028, 6030, 6032, 6034, 6036 |
| 1 | 6447, 6449, 6451, 6453, 6455, 6457, 6459, 8543 |
| 1 | 6729, 6731, 6733 |
| 1 | 7111, 7113, 7115, 7117, 7119, 7121, 7123, 7125, 7127, 7129, |
| | 7131 |
| 1 | 7610, 7612, 7614, 7616, 7618, 7620, 7622, 7624, 7626 |
| 1 | 7985, 7987, 7989, 7991, 7993, 7995, 7997, 7999, 8001, 8003, |
| | 8005, 8007, 8009, 8011, 8013, 8015, 8017, 8019, 8021, 8023, |
| | 8025, 8027, 8029, 8031, 8033, 8035, 8037, 8039, 8041, 8043, |
| | 8045, 8047, 8049, 8051, 8053, 8055, 8057, 8059, 8061, 8063, |
| | 8065, 8067, 8069, 8071, 8073, 8075, 8077, 8079, 8081, 8083, |
| | 8085, 8087, 8089, 8091, 8093, 8095, 8097, 8099, 8101, 8103, |
| | 8105, 8107, 8109, 8111, 8113, 8115, 8117, 8119, 8121, 8123, |
| | 8125, 8127, 8129, 8131, 8133, 8135, 8137, 8139, 8141, 8143, |
| | 8145, 8147, 8149, 8151, 8153, 8155, 8157, 8159, 8161, 8163, |
| | 8165, 8167, 8169, 8171, 8173, 8175, 8177, 8179, 8181, 8183, |
| | 8185, 8187, 8189, 8191, 8193, 8195, 8197, 8199, 8201, 8203, |
| | 8205, 8207, 8209, 8211, 8213, 8215, 8217, 8219, 8221, 8547, |
| | 8549, 8551, 8553, 8555, 8557, 8559, 8561 |
| 1 | 567, 569, 571, 573, 575, 577, 579, 581, 583, 585, 587, 589, 591, |
| | 593, 595, 597, 599, 601, 603, 605, 607, 609, 611, 613, 615, 617, |
| | 619, 621, 623, 625, 627, 629, 631, 633, 635, 637, 639, 641, 643, |
| | 645, 647, 8491, 8493, 8495 |
| 1 | 7187, 7189, 7191, 7193, 7195, 7197, 7199 |
| 1 | — |
| 1 | 7480, 7482 |
| 1 | — |
| 1 | 8361, 8363, 8365, 8367, 8369, 8371, 8373, 8375, 8377, 8379, |
| | 8381, 8383, 8385, 8387, 8389, 8391, 8565, 8567, 8569, 8571, |
| | 8573, 8575, 8577, 8579, 8581, 8583, 8585, 8587 |
| 1 | — |
| 1 | — |
| 1 | — |
| 1 | 1844, 1846, 1848, 1850, 1852, 1854, 1856, 1858, 1860 |

TABLE IIA
Amino acid sequence ID numbers

| | | | | | 5. | | |
|---|---|---|---|---|---|---|---|
| Appli- | 1. | 2. | 3. | 4. | Lead | 6. | 7. |
| cation | Hit | Project | Locus | Organism | SEQ ID | Target | SEQ IDs of Polypeptide Homologs |
| 1 | 1 | GABA | YMR052W | S. cerevisiae | 43 | cyto- | 45, 47 |
| | | | | | | plasmic | |
| 1 | 2 | GABA | AT1G43850 | A. th. | 655 | cyto- | 657, 659, 661, 663, 665, 667, 669, 671, 673, 675, 677, 679, 681, |
| | | | | | | plasmic | 683, 685, 687, 689 |
| 1 | 3 | GABA | AT2G28890 | A. th. | 707 | cyto- | 709, 711, 713, 715, 717, 719, 721, 723, 725, 727, 729, 731, 733, |
| | | | | | | plasmic | 735, 737 |
| 1 | 4 | GABA | AT3G04050 | A. th. | 752 | plastidic | 754, 756, 758, 760, 762, 764, 766, 768, 770, 772, 774, 776, 778, |
| | | | | | | | 780, 782, 784, 786, 788, 790, 792, 794, 796, 798, 800, 802, 804, |
| | | | | | | | 806, 808, 810, 812, 814, 816, 818, 820, 822, 824, 826, 828, 830, |
| | | | | | | | 832, 834, 836, 838, 840, 842, 844, 846, 848, 850, 852, 854, 856, |
| | | | | | | | 858, 860, 862, 864, 866, 868, 870, 872, 874, 876, 878, 880, 882, |
| | | | | | | | 884, 886, 888, 890, 892, 894, 896, 898, 900, 902, 904, 906, 908, |
| | | | | | | | 910, 912, 914, 916, 918, 920, 922, 924, 926, 928, 930, 932, 934, |
| | | | | | | | 936, 938, 940, 942, 944, 946, 948, 950, 952, 954, 956, 958, 960, |
| | | | | | | | 962, 964, 966, 968, 970, 972, 974, 976, 978, 980, 982, 984, 986, |
| | | | | | | | 988, 990, 992, 994, 996, 998, 1000, 1002, 1004, 1006, 1008, |
| | | | | | | | 1010, 1012, 1014, 1016, 1018, 1020, 1022, 1024, 1026, 1028, |
| | | | | | | | 1030, 1032, 1034, 1036, 1038, 1040, 1042, 1044, 1046, 1048, |
| | | | | | | | 1050, 1052, 1054 |
| 1 | 5 | GABA | AT3G08710 | A. th. | 1157 | cyto- | 1159, 1161, 1163, 1165, 1167, 1169, 1171, 1173, 1175, 1177, |
| | | | | | | plasmic | 1179, 1181, 1183, 1185, 1187, 1189, 1191, 1193, 1195, 1197, |
| | | | | | | | 1199, 1201, 1203, 1205, 1207, 1209, 1211, 1213, 1215, 1217, |
| | | | | | | | 1219, 1221, 1223, 1225, 1227, 1229, 1231, 1233, 1235, 1237, |
| | | | | | | | 1239, 1241, 1243, 1245, 1247, 1249, 1251, 1253, 1255, 1257, |
| | | | | | | | 1259, 1261, 1263, 1265, 1267, 1269, 1271, 1273, 1275, 1277, |
| | | | | | | | 1279, 1281, 1283, 1285, 1287, 1289, 1291, 1293, 1295, 1297, |
| | | | | | | | 1299, 1301, 1303, 1305, 1307, 1309, 1311, 1313, 1315, 1317, |
| | | | | | | | 1319, 1321, 1323, 1325, 1327, 1329, 1331, 1333, 1335, 1337, |
| | | | | | | | 1339, 1341, 1343, 1345, 1347, 1349, 1351, 1353, 1355, 1357, |
| | | | | | | | 1359, 1361, 1363, 1365, 1367, 1369, 1371, 1373, 1375, 1377, |
| | | | | | | | 1379 |
| 1 | 6 | GABA | AT3G11650 | A. th. | 1511 | cyto- | 1513, 1515, 1517, 1519, 1521, 1523, 1525, 1527, 1529, 1531, |
| | | | | | | plasmic | 1533, 1535, 1537, 1539, 1541, 1543, 1545, 1547, 1549 |
| 1 | 7 | GABA | AT3G27540 | A. th. | 1599 | cyto- | 1601, 1603, 1605, 1607, 1609, 1611, 1613, 1615, 1617, 1619, |
| | | | | | | plasmic | 1621, 1623, 1625, 1627, 1629, 1631, 1633, 1635, 1637, 1639, |
| | | | | | | | 1641, 1643, 1645 |
| 1 | 8 | GABA | AT3G61830 | A. th. | 1671 | cyto- | 1673, 1675, 1677, 1679, 1681, 1683, 1685, 1687, 1689, 1691, |
| | | | | | | plasmic | 1693, 1695, 1697, 1699, 1701, 1703, 1705, 1707, 1709, 1711, |
| | | | | | | | 1713, 1715, 1717, 1719, 1721, 1723, 1725, 1727, 1729, 1731, |
| | | | | | | | 1733, 1735, 1737, 1739, 1741, 1743, 1745, 1747, 1749, 1751, |
| | | | | | | | 1753, 1755, 1757, 1759, 1761, 1763, 1765, 1767, 1769, 1771, |
| | | | | | | | 1773, 1775, 1777, 1779, 1781, 1783, 1785, 1787, 1789, 1791, |
| | | | | | | | 1793, 1795, 1797, 1799, 1801, 1803, 1805, 1807, 1809, 1811, |
| | | | | | | | 1813, 1815, 1817, 1819, 1821, 1823, 1825, 1827, 1829, 1831, |
| | | | | | | | 1833, 1835, 1837, 1839, 1841, 1843 |
| 1 | 9 | GABA | AT4G32480 | A. th. | 1875 | cyto- | 1877, 1879, 1881, 1883, 1885, 1887, 1889, 1891, 1893, 1895, |
| | | | | | | plasmic | 1897, 1899, 1901, 1903, 1905, 1907, 1909 |
| 1 | 10 | GABA | AT4G35310 | A. th. | 1937 | cyto- | 1939, 1941, 1943, 1945, 1947, 1949, 1951, 1953, 1955, 1957, |
| | | | | | | plasmic | 1959, 1961, 1963, 1965, 1967, 1969, 1971, 1973, 1975, 1977, |
| | | | | | | | 1979, 1981, 1983, 1985, 1987, 1989, 1991, 1993, 1995, 1997, |
| | | | | | | | 1999, 2001, 2003, 2005, 2007, 2009, 2011, 2013, 2015, 2017, |
| | | | | | | | 2019, 2021, 2023, 2025, 2027, 2029, 2031, 2033, 2035, 2037, |
| | | | | | | | 2039, 2041, 2043, 2045, 2047, 2049, 2051, 2053, 2055, 2057, |
| | | | | | | | 2059, 2061, 2063, 2065, 2067, 2069, 2071, 2073, 2075, 2077, |
| | | | | | | | 2079, 2081, 2083, 2085, 2087, 2089, 2091, 2093, 2095, 2097, |
| | | | | | | | 2099, 2101, 2103, 2105, 2107, 2109, 2111, 2113, 2115, 2117, |
| | | | | | | | 2119, 2121, 2123, 2125, 2127, 2129, 2131, 2133, 2135, 2137, |
| | | | | | | | 2139, 2141, 2143, 2145, 2147, 2149, 2151, 2153, 2155, 2157, |
| | | | | | | | 2159, 2161, 2163, 2165, 2167, 2169, 2171, 2173, 2175, 2177, |
| | | | | | | | 2179, 2181, 2183, 2185, 2187, 2189, 2191, 2193, 2195, 2197, |
| | | | | | | | 2199, 2201, 2203, 2205, 2207, 2209, 2211, 2213, 2215, 2217, |
| | | | | | | | 2219, 2221, 2223, 2225, 2227, 2229, 2231, 2233, 2235, 2237, |
| | | | | | | | 2239, 2241, 2243, 2245, 2247, 2249, 2251, 2253, 2255, 2257, |
| | | | | | | | 2259, 2261, 2263, 2265, 2267, 2269, 2271, 2273, 2275, 2277, |
| | | | | | | | 2279, 2281, 2283, 2285, 2287, 2289, 2291, 2293, 2295, 2297, |
| | | | | | | | 2299, 2301, 2303, 2305, 2307, 2309, 2311, 2313, 2315, 2317, |
| | | | | | | | 2319, 2321, 2323, 2325, 2327, 2329, 2331, 2333, 2335, 2337, |
| | | | | | | | 2339, 2341 |
| 1 | 11 | GABA | AT5G16650 | A. th. | 2493 | cyto- | 2495, 2497, 2499, 2501, 2503, 2505, 2507, 2509, 2511, 2513, |
| | | | | | | plasmic | 2515, 2517, 2519, 2521, 2523 |
| 1 | 12 | GABA | AVINDRAFT_2344 | A. vinelandii | 2554 | cyto- | 2556, 2558, 2560, 2562, 2564, 2566, 2568, 2570, 2572, 2574, |
| | | | | | | plasmic | 2576, 2578, 2580, 2582, 2584, 2586, 2588, 2590, 2592, 2594, |
| | | | | | | | 2596, 2598, 2600, 2602, 2604, 2606, 2608, 2610, 2612, 2614, |
| | | | | | | | 2616, 2618, 2620, 2622, 2624, 2626, 2628, 2630, 2632, 2634, |
| | | | | | | | 2636, 2638, 2640, 2642, 2644, 2646, 2648, 2650, 2652, 2654, |
| | | | | | | | 2656, 2658, 2660, 2662, 2664, 2666, 2668, 2670, 2672, 2674, |
| | | | | | | | 2676, 2678, 2680, 2682, 2684, 2686, 2688, 2690, 2692, 2694, |
| | | | | | | | 2696, 2698, 2700, 2702, 2704, 2706, 2708, 2710, 2712, 2714, |
| | | | | | | | 2716, 2718, 2720, 2722, 2724, 2726, 2728, 2730, 2732, 2734, |
| | | | | | | | 2736, 2738, 2740, 2742, 2744, 2746, 2748, 2750, 2752, 2754, |
| | | | | | | | 2756, 2758, 2760, 2762, 2764, 2766, 2768, 2770, 2772, 2774, |
| | | | | | | | 2776, 2778, 2780, 2782, 2784, 2786, 2788, 2790, 2792, 2794, |
| | | | | | | | 2796, 2798, 2800, 2802, 2804, 2806, 2808, 2810, 2812, 2814, |
| | | | | | | | 2816, 2818, 2820, 2822, 2824, 2826, 2828, 2830, 2832, 2834, |
| | | | | | | | 2836, 2838, 2840, 2842, 2844, 2846, 2848, 2850, 2852, 2854, |
| | | | | | | | 2856, 2858, 2860, 2862, 2864, 2866, 2868, 2870, 2872, 2874, |
| | | | | | | | 2876, 2878, 2880, 2882, 2884, 2886, 2888, 2890, 2892, 2894, |
| | | | | | | | 2896, 2898, 2900, 2902, 2904, 2906, 2908, 2910, 2912, 2914, |
| | | | | | | | 2916, 2918, 2920, 2922, 2924, 2926, 2928, 2930, 2932, 2934, |
| | | | | | | | 2936, 2938, 2940, 2942, 2944, 2946, 2948, 2950, 2952, 2954, |
| | | | | | | | 2956, 2958, 2960, 2962, 2964, 2966, 2968, 2970, 2972, 2974, |
| | | | | | | | 2976, 2978, 2980, 2982, 2984, 2986, 2988, 2990, 2992, 2994, |
| | | | | | | | 2996, 2998, 3000, 3002, 3004, 3006, 3008, 3010, 3012, 3014, |
| | | | | | | | 3016, 3018, 3020, 3022, 3024, 3026, 3028, 3030, 3032, 3034, |
| | | | | | | | 3036, 3038, 3040, 3042, 3044, 3046, 3048, 3050, 3052, 3054, |
| | | | | | | | 3056, 3058, 3060, 3062, 3064, 3066, 3068, 3070, 3072, 3074, |
| | | | | | | | 3076, 3078, 3080, 3082, 3084, 3086, 3088, 3090, 3092, 3094, |
| | | | | | | | 3096, 3098, 3100, 3102, 3104, 3106, 3108, 3110, 3112, 3114, |
| | | | | | | | 3116, 3118, 3120, 3122, 3124, 3126, 3128, 3130, 3132, 3134, |
| | | | | | | | 3136, 3138, 3140, 3142, 3144, 3146, 3148, 3150, 3152, 3154, |
| | | | | | | | 3156, 3158, 3160, 3162, 3164, 3166, 3168, 3170, 3172, 3174, |
| | | | | | | | 3176, 3178, 3180, 3182, 3184, 3186, 3188, 3190, 3192, 3194, |
| | | | | | | | 3196, 3198, 3200, 3202, 3204, 3206, 3208, 3210, 3212, 3214, |
| | | | | | | | 3216, 3218, 3220, 3222, 3224, 3226, 3228, 3230, 3232, 3234, |
| | | | | | | | 3236, 3238, 3240, 3242, 3244, 3246, 3248, 3250, 3252, 3254, |
| | | | | | | | 3256, 3258, 3260, 3262, 3264, 3266, 3268, 3270, 3272, 3274, |
| | | | | | | | 3276, 3278, 3280, 3282, 3284, 3286, 3288, 3290, 3292, 3294, |
| | | | | | | | 3296 |
| 1 | 13 | GABA | AVINDRAFT_2521 | A. vinelandii | 3409 | cyto- | 3411, 3413, 3415, 3417, 3419, 3421, 3423, 3425, 3427, 3429, |
| | | | | | | plasmic | 3431, 3433, 3435, 3437, 3439, 3441, 3443, 3445, 3447, 3449, |
| | | | | | | | 3451, 3453, 3455, 3457, 3459, 3461, 3463, 3465, 3467, 3469, |
| | | | | | | | 3471, 3473, 3475, 3477, 3479, 3481, 3483, 3485, 3487, 3489, |
| | | | | | | | 3491, 3493, 3495, 3497, 3499, 3501, 3503, 3505, 3507, 3509, |
| | | | | | | | 3511, 3513, 3515, 3517, 3519, 3521, 3523, 3525, 3527, 3529, |
| | | | | | | | 3531, 3533, 3535, 3537, 3539, 3541, 3543, 3545, 3547, 3549, |
| | | | | | | | 3551, 3553, 3555, 3557, 3559 |
| 1 | 14 | GABA | AVINDRAFT_5103 | A. vinelandii | 3565 | cyto- | 3567, 3569, 3571, 3573, 3575, 3577, 3579, 3581, 3583, 3585, |
| | | | | | | plasmic | 3587, 3589, 3591, 3593, 3595, 3597, 3599, 3601, 3603, 3605, |
| | | | | | | | 3607, 3609, 3611, 3613, 3615, 3617, 3619, 3621, 3623, 3625, |
| | | | | | | | 3627, 3629, 3631, 3633, 3635, 3637, 3639, 3641, 3643, 3645, |
| | | | | | | | 3647, 3649, 3651, 3653, 3655, 3657, 3659, 3661, 3663, 3665, |
| | | | | | | | 3667, 3669, 3671, 3673, 3675, 3677, 3679, 3681, 3683, 3685, |
| | | | | | | | 3687, 3689, 3691, 3693, 3695, 3697, 3699, 3701, 3703, 3705, |
| | | | | | | | 3707, 3709, 3711, 3713, 3715, 3717, 3719, 3721, 3723 |
| 1 | 15 | GABA | AVINDRAFT_5292 | A. vinelandii | 3729 | cyto- | 3731, 3733, 3735, 3737, 3739, 3741, 3743, 3745, 3747, 3749, |
| | | | | | | plasmic | 3751, 3753, 3755, 3757, 3759, 3761, 3763, 3765, 3767, 3769, |
| | | | | | | | 3771, 3773, 3775, 3777, 3779, 3781, 3783, 3785, 3787, 3789, |
| | | | | | | | 3791, 3793, 3795, 3797, 3799, 3801, 3803, 3805, 3807, 3809, |
| | | | | | | | 3811, 3813, 3815, 3817, 3819, 3821, 3823, 3825, 3827, 3829, |
| | | | | | | | 3831, 3833, 3835, 3837, 3839, 3841, 3843, 3845, 3847, 3849, |
| | | | | | | | 3851, 3853, 3855, 3857, 3859, 3861, 3863, 3865, 3867, 3869, |
| | | | | | | | 3871, 3873, 3875, 3877, 3879, 3881, 3883, 3885, 3887, 3889, |
| | | | | | | | 3891, 3893, 3895, 3897, 3899, 3901, 3903, 3905, 3907, 3909, |
| | | | | | | | 3911, 3913, 3915, 3917, 3919, 3921, 3923, 3925, 3927, 3929, |
| | | | | | | | 3931, 3933, 3935, 3937, 3939, 3941, 3943, 3945, 3947, 3949, |
| | | | | | | | 3951, 3953, 3955, 3957, 3959, 3961, 3963, 3965, 3967, 3969, |
| | | | | | | | 3971, 3973, 3975, 3977, 3979, 3981, 3983, 3985, 3987, 3989, |
| | | | | | | | 3991, 3993, 3995, 3997, 3999, 4001, 4003, 4005, 4007, 4009, |
| | | | | | | | 4011, 4013, 4015, 4017, 4019, 4021, 4023, 4025, 4027, 4029, |
| | | | | | | | 4031, 4033, 4035, 4037, 4039, 4041 |
| 1 | 16 | GABA | B0124 | E. coli | 4069 | cyto- | 4071, 4073, 4075, 4077, 4079, 4081, 4083, 4085, 4087, 4089, |
| | | | | | | plasmic | 4091, 4093, 4095, 4097, 4099, 4101, 4103, 4105, 4107, 4109, |
| | | | | | | | 4111, 4113, 4115, 4117, 4119, 4121, 4123, 4125, 4127, 4129, |
| | | | | | | | 4131, 4133, 4135, 4137, 4139, 4141, 4143, 4145, 4147, 4149, |
| | | | | | | | 4151, 4153, 4155, 4157, 4159 |
| 1 | 17 | GABA | B0161 | E. coli | 4177 | cyto- | 4179, 4181, 4183, 4185, 4187, 4189, 4191, 4193, 4195, 4197, |
| | | | | | | plasmic | 4199, 4201, 4203, 4205, 4207, 4209, 4211, 4213, 4215, 4217, |
| | | | | | | | 4219, 4221, 4223, 4225, 4227, 4229, 4231, 4233, 4235, 4237, |
| | | | | | | | 4239, 4241, 4243, 4245, 4247, 4249, 4251, 4253, 4255, 4257, |
| | | | | | | | 4259, 4261, 4263, 4265, 4267, 4269, 4271, 4273, 4275, 4277, |
| | | | | | | | 4279, 4281, 4283, 4285, 4287, 4289, 4291, 4293, 4295, 4297, |
| | | | | | | | 4299, 4301, 4303, 4305, 4307, 4309, 4311, 4313, 4315, 4317, |
| | | | | | | | 4319, 4321, 4323, 4325, 4327, 4329, 4331, 4333, 4335, 4337, |
| | | | | | | | 4339, 4341, 4343, 4345, 4347, 4349, 4351, 4353, 4355 |
| 1 | 18 | GABA | B0449 | E. coli | 4365 | cyto- | 4367, 4369, 4371, 4373, 4375, 4377, 4379, 4381, 4383, 4385, |
| | | | | | | plasmic | 4387, 4389, 4391, 4393, 4395, 4397, 4399, 4401, 4403, 4405, |
| | | | | | | | 4407, 4409, 4411, 4413, 4415, 4417, 4419, 4421, 4423, 4425, |
| | | | | | | | 4427, 4429, 4431, 4433, 4435, 4437, 4439, 4441, 4443, 4445, |
| | | | | | | | 4447, 4449, 4451, 4453, 4455, 4457, 4459, 4461, 4463, 4465, |
| | | | | | | | 4467, 4469, 4471, 4473, 4475, 4477, 4479, 4481, 4483, 4485, |
| | | | | | | | 4487, 4489, 4491, 4493, 4495, 4497, 4499, 4501, 4503, 4505, |
| | | | | | | | 4507, 4509, 4511, 4513, 4515, 4517, 4519, 4521, 4523, 4525, |
| | | | | | | | 4527, 4529, 4531, 4533, 4535, 4537, 4539, 4541, 4543, 4545, |
| | | | | | | | 4547, 4549, 4551, 4553, 4555, 4557, 4559, 4561, 4563, 4565, |
| | | | | | | | 4567, 4569, 4571, 4573, 4575, 4577, 4579, 4581, 4583, 4585, |
| | | | | | | | 4587, 4589, 4591, 4593, 4595, 4597, 4599, 4601, 4603, 4605, |
| | | | | | | | 4607, 4609, 4611, 4613, 4615, 4617, 4619, 4621, 4623, 4625, |
| | | | | | | | 4627, 4629, 4631, 4633, 4635, 4637, 4639, 4641, 4643, 4645, |
| | | | | | | | 4647, 4649, 4651, 4653, 4655, 4657, 4659, 4661, 4663, 4665, |
| | | | | | | | 4667, 4669, 4671, 4673, 4675, 4677, 4679, 4681, 4683, 4685, |
| | | | | | | | 4687, 4689, 4691, 4693, 4695 |
| 1 | 19 | GABA | B0593 | E. coli | 4718 | plastidic | 4720, 4722, 4724, 4726, 4728, 4730, 4732, 4734, 4736, 4738, |
| | | | | | | | 4740, 4742, 4744, 4746, 4748, 4750, 4752, 4754, 4756, 4758, |
| | | | | | | | 4760, 4762, 4764, 4766, 4768, 4770, 4772, 4774, 4776, 4778, |
| | | | | | | | 4780, 4782, 4784, 4786, 4788, 4790, 4792, 4794, 4796, 4798, |
| | | | | | | | 4800, 4802, 4804, 4806, 4808, 4810, 4812, 4814, 4816, 4818, |
| | | | | | | | 4820, 4822, 4824, 4826, 4828, 4830, 4832, 4834, 4836, 4838, |
| | | | | | | | 4840, 4842, 4844, 4846, 4848, 4850, 4852, 4854 |
| 1 | 20 | GABA | B0898 | E. coli | 4865 | cyto- | 4867, 4869, 4871, 4873, 4875, 4877, 4879, 4881, 4883, 4885, |
| | | | | | | plasmic | 4887, 4889, 4891 |
| 1 | 21 | GABA | B1003 | E. coli | 4904 | cyto- | 4906 |
| | | | | | | plasmic | |
| 1 | 22 | GABA | B1522 | E. coli | 4910 | cyto- | 4912, 4914, 4916, 4918, 4920, 4922, 4924, 4926, 4928, 4930, |
| | | | | | | plasmic | 4932, 4934, 4936, 4938, 4940, 4942, 4944, 4946, 4948 |
| 1 | 23 | GABA | B2739 | E. coli | 4955 | cyto- | 4957, 4959, 4961, 4963, 4965, 4967, 4969, 4971, 4973, 4975, |
| | | | | | | plasmic | 4977, 4979, 4981, 4983, 4985, 4987, 4989, 4991, 4993, 4995, |
| | | | | | | | 4997, 4999, 5001, 5003, 5005, 5007, 5009, 5011, 5013, 5015, |
| | | | | | | | 5017, 5019, 5021, 5023, 5025, 5027, 5029, 5031, 5033, 5035, |
| | | | | | | | 5037, 5039, 5041, 5043, 5045, 5047, 5049, 5051, 5053, 5055, |
| | | | | | | | 5057, 5059, 5061, 5063, 5065, 5067, 5069, 5071, 5073, 5075, |
| | | | | | | | 5077, 5079, 5081, 5083, 5085, 5087, 5089, 5091, 5093, 5095, |
| | | | | | | | 5097, 5099, 5101, 5103, 5105, 5107, 5109, 5111, 5113, 5115 |
| 1 | 24 | GABA | B3646 | E. coli | 5122 | cyto- | 5124, 5126, 5128, 5130, 5132, 5134, 5136, 5138, 5140, 5142, |
| | | | | | | plasmic | 5144, 5146, 5148, 5150, 5152, 5154, 5156, 5158, 5160, 5162, |
| | | | | | | | 5164, 5166, 5168, 5170, 5172, 5174, 5176, 5178, 5180, 5182, |
| | | | | | | | 5184, 5186, 5188, 5190, 5192, 5194, 5196, 5198, 5200, 5202, |
| | | | | | | | 5204, 5206, 5208, 5210, 5212, 5214, 5216, 5218, 5220, 5222, |
| | | | | | | | 5224, 5226, 5228, 5230, 5232, 5234, 5236, 5238, 5240, 5242, |
| | | | | | | | 5244, 5246, 5248, 5250, 5252, 5254, 5256, 5258, 5260, 5262, |
| | | | | | | | 5264, 5266, 5268, 5270, 5272, 5274, 5276, 5278, 5280, 5282, |
| | | | | | | | 5284, 5286, 5288, 5290, 5292, 5294, 5296, 5298, 5300, 5302, |
| | | | | | | | 5304, 5306, 5308, 5310, 5312 |
| 1 | 25 | GABA | B4029 | E. coli | 5320 | cyto- | 5322, 5324, 5326, 5328, 5330, 5332, 5334, 5336, 5338, 5340, |
| | | | | | | plasmic | 5342, 5344, 5346, 5348, 5350, 5352, 5354, 5356, 5358, 5360, |
| | | | | | | | 5362, 5364, 5366, 5368, 5370, 5372 |
| 1 | 26 | GABA | B4256 | E. coli | 5388 | cyto- | 5390, 5392, 5394, 5396, 5398, 5400, 5402, 5404, 5406, 5408, |
| | | | | | | plasmic | 5410, 5412, 5414, 5416, 5418, 5420, 5422, 5424, 5426, 5428, |
| | | | | | | | 5430, 5432, 5434, 5436, 5438, 5440, 5442, 5444, 5446, 5448, |
| | | | | | | | 5450, 5452 |
| 1 | 27 | GABA | C_PP034008079R | P. patens | 5459 | cyto- | 5461, 5463, 5465, 5467, 5469, 5471, 5473, 5475, 5477, 5479, |
| | | | | | | plasmic | 5481, 5483, 5485, 5487, 5489, 5491, 5493, 5495, 5497, 5499, |
| | | | | | | | 5501, 5503, 5505, 5507, 5509, 5511, 5513, 5515, 5517, 5519, |
| | | | | | | | 5521, 5523, 5525, 5527, 5529, 5531, 5533, 5535, 5537, 5539, |
| | | | | | | | 5541, 5543, 5545, 5547, 5549, 5551, 5553, 5555, 5557, 5559, |
| | | | | | | | 5561, 5563, 5565, 5567, 5569, 5571, 5573, 5575, 5577, 5579, |
| | | | | | | | 5581, 5583, 5585, 5587, 5589, 5591, 5593, 5595, 5597, 5599, |
| | | | | | | | 5601, 5603, 5605, 5607, 5609, 5611, 5613, 5615, 5617, 5619, |
| | | | | | | | 5621, 5623, 5625, 5627, 5629, 5631, 5633, 5635, 5637, 5639, |
| | | | | | | | 5641, 5643, 5645, 5647, 5649, 5651, 5653, 5655, 5657, 5659, |
| | | | | | | | 5661, 5663, 5665, 5667, 5669, 5671, 5673, 5675, 5677, 5679, |
| | | | | | | | 5681, 5683, 5685, 5687, 5689, 5691, 5693, 5695, 5697, 5699, |
| | | | | | | | 5701, 5703, 5705, 5707, 5709, 5711, 5713, 5715, 5717, 5719, |
| | | | | | | | 5721, 5723, 5725, 5727, 5729, 5731, 5733, 5735, 5737, 5739, |
| | | | | | | | 5741, 5743, 5745, 5747, 5749, 5751, 5753, 5755, 5757, 5759, |
| | | | | | | | 5761, 5763, 5765, 5767, 5769, 5771, 5773, 5775, 5777, 5779, |
| | | | | | | | 5781, 5783, 5785, 5787, 5789, 5791, 5793, 5795, 5797, 5799, |
| | | | | | | | 5801, 5803, 5805, 5807, 5809, 5811, 5813, 5815, 5817, 5819, |
| | | | | | | | 5821, 5823, 5825, 5827, 5829, 5831, 5833, 5835, 5837, 5839, |
| | | | | | | | 5841, 5843, 5845, 5847, 5849, 5851, 5853, 5855, 5857, 5859, |
| | | | | | | | 5861, 5863, 5865, 5867, 5869, 5871, 5873, 5875, 5877, 5879, |
| | | | | | | | 5881, 5883, 5885, 5887, 5889, 5891, 5893, 5895, 5897, 5899, |
| | | | | | | | 5901, 5903, 5905, 5907, 5909, 5911, 5913, 5915, 5917, 5919, |
| | | | | | | | 5921, 5923, 5925, 5927, 5929, 5931, 5933, 5935, 5937, 5939, |
| | | | | | | | 5941, 5943, 5945, 5947, 5949, 5951, 5953, 5955, 5957, 5959, |
| | | | | | | | 5961, 5963, 5965, 5967, 5969, 5971, 5973, 5975, 5977, 5979, |
| | | | | | | | 5981, 5983, 5985, 5987, 5989, 5991, 5993, 5995, 5997, 5999, |
| | | | | | | | 6001, 6003, 6005 |
| 1 | 28 | GABA | SLR0739 | Synechocystis | 6042 | plastidic | 6044, 6046, 6048, 6050, 6052, 6054, 6056, 6058, 6060, 6062, |
| | | | | sp. | | | 6064, 6066, 6068, 6070, 6072, 6074, 6076, 6078, 6080, 6082, |
| | | | | | | | 6084, 6086, 6088, 6090, 6092, 6094, 6096, 6098, 6100, 6102, |
| | | | | | | | 6104, 6106, 6108, 6110, 6112, 6114, 6116, 6118, 6120, 6122, |
| | | | | | | | 6124, 6126, 6128, 6130, 6132, 6134, 6136, 6138, 6140, 6142, |
| | | | | | | | 6144, 6146, 6148, 6150, 6152, 6154, 6156, 6158, 6160, 6162, |
| | | | | | | | 6164, 6166, 6168, 6170, 6172, 6174, 6176, 6178, 6180, 6182, |
| | | | | | | | 6184, 6186, 6188, 6190, 6192, 6194, 6196, 6198, 6200, 6202, |
| | | | | | | | 6204, 6206, 6208, 6210, 6212, 6214, 6216, 6218, 6220, 6222, |
| | | | | | | | 6224, 6226, 6228, 6230, 6232, 6234, 6236, 6238, 6240, 6242, |
| | | | | | | | 6244, 6246, 6248, 6250, 6252, 6254, 6256, 6258, 6260, 6262, |
| | | | | | | | 6264, 6266, 6268, 6270, 6272, 6274, 6276, 6278, 6280, 6282, |
| | | | | | | | 6284, 6286, 6288, 6290, 6292, 6294, 6296, 6298, 6300, 6302, |
| | | | | | | | 6304, 6306, 6308, 6310, 6312, 6314, 6316, 6318, 6320, 6322, |
| | | | | | | | 6324, 6326, 6328, 6330, 6332, 6334, 6336, 6338, 6340, 6342, |
| | | | | | | | 6344, 6346, 6348, 6350, 6352, 6354, 6356, 6358, 6360, 6362, |
| | | | | | | | 6364, 6366, 6368, 6370, 6372, 6374, 6376, 6378, 6380, 6382, |
| | | | | | | | 6384, 6386, 6388, 6390, 6392, 6394, 6396, 6398, 6400, 6402, |
| | | | | | | | 6404, 6406, 6408, 6410, 6412, 6414, 6416, 6418, 6420, 6422, |
| | | | | | | | 6424, 6426, 6428, 6430, 6432, 6434, 6436, 6438, 6440, 6442, |
| | | | | | | | 6444, 6446 |
| 1 | 29 | GABA | TTC0019 | T. | 6470 | cyto- | 6472, 6474, 6476, 6478, 6480, 6482, 6484, 6486, 6488, 6490, |
| | | | | thermophilus | | plasmic | 6492, 6494, 6496, 6498, 6500, 6502, 6504, 6506, 6508, 6510, |
| | | | | | | | 6512, 6514, 6516, 6518, 6520, 6522, 6524, 6526, 6528, 6530, |
| | | | | | | | 6532, 6534, 6536, 6538, 6540, 6542, 6544, 6546, 6548, 6550, |
| | | | | | | | 6552, 6554, 6556, 6558, 6560, 6562, 6564, 6566, 6568, 6570, |
| | | | | | | | 6572, 6574, 6576, 6578, 6580, 6582, 6584, 6586, 6588, 6590, |
| | | | | | | | 6592, 6594, 6596, 6598, 6600, 6602, 6604, 6606, 6608, 6610, |
| | | | | | | | 6612, 6614, 6616, 6618, 6620, 6622, 6624, 6626, 6628, 6630, |
| | | | | | | | 6632, 6634, 6636, 6638, 6640, 6642, 6644, 6646, 6648, 6650, |
| | | | | | | | 6652, 6654, 6656, 6658, 6660, 6662, 6664, 6666, 6668, 6670, |
| | | | | | | | 6672, 6674, 6676, 6678, 6680, 6682, 6684, 6686, 6688, 6690, |
| | | | | | | | 6692, 6694, 6696, 6698, 6700, 6702, 6704, 6706, 6708, 6710, |
| | | | | | | | 6712, 6714, 6716, 6718, 6720, 6722, 6724, 6726, 6728 |
| 1 | 30 | GABA | TTC1550 | T. | 6740 | cyto- | 6742, 6744, 6746, 6748, 6750, 6752, 6754, 6756, 6758, 6760, |
| | | | | thermophilus | | plasmic | 6762, 6764, 6766, 6768, 6770, 6772, 6774, 6776, 6778, 6780, |
| | | | | | | | 6782, 6784, 6786, 6788, 6790, 6792, 6794, 6796, 6798, 6800, |
| | | | | | | | 6802, 6804, 6806, 6808, 6810, 6812, 6814, 6816, 6818, 6820, |
| | | | | | | | 6822, 6824, 6826, 6828, 6830, 6832, 6834, 6836, 6838, 6840, |
| | | | | | | | 6842, 6844, 6846, 6848, 6850, 6852, 6854, 6856, 6858, 6860, |
| | | | | | | | 6862, 6864, 6866, 6868, 6870, 6872, 6874, 6876, 6878, 6880, |
| | | | | | | | 6882, 6884, 6886, 6888, 6890, 6892, 6894, 6896, 6898, 6900, |
| | | | | | | | 6902, 6904, 6906, 6908, 6910, 6912, 6914, 6916, 6918, 6920, |
| | | | | | | | 6922, 6924, 6926, 6928, 6930, 6932, 6934, 6936, 6938, 6940, |
| | | | | | | | 6942, 6944, 6946, 6948, 6950, 6952, 6954, 6956, 6958, 6960, |
| | | | | | | | 6962, 6964, 6966, 6968, 6970, 6972, 6974, 6976, 6978, 6980, |
| | | | | | | | 6982, 6984, 6986, 6988, 6990, 6992, 6994, 6996, 6998, 7000, |
| | | | | | | | 7002, 7004, 7006, 7008, 7010, 7012, 7014, 7016, 7018, 7020, |
| | | | | | | | 7022, 7024, 7026, 7028, 7030, 7032, 7034, 7036, 7038, 7040, |
| | | | | | | | 7042, 7044, 7046, 7048, 7050, 7052, 7054, 7056, 7058, 7060, |
| | | | | | | | 7062, 7064, 7066, 7068, 7070, 7072, 7074, 7076, 7078, 7080, |
| | | | | | | | 7082, 7084, 7086, 7088, 7090, 7092, 7094, 7096, 7098, 7100, |
| | | | | | | | 7102, 7104, 7106, 7108, 7110 |
| 1 | 31 | GABA | YJR153W | S. cerevisiae | 7511 | cyto- | 7513, 7515, 7517, 7519, 7521, 7523, 7525, 7527, 7529, 7531, |
| | | | | | | plasmic | 7533, 7535, 7537, 7539, 7541, 7543, 7545, 7547, 7549, 7551, |
| | | | | | | | 7553, 7555, 7557, 7559, 7561, 7563, 7565, 7567, 7569, 7571, |
| | | | | | | | 7573, 7575, 7577, 7579, 7581, 7583, 7585, 7587, 7589, 7591, |
| | | | | | | | 7593, 7595, 7597, 7599, 7601, 7603, 7605, 7607, 7609 |
| 1 | 32 | GABA | YLR043C | S. cerevisiae | 7634 | plastidic | 7636, 7638, 7640, 7642, 7644, 7646, 7648, 7650, 7652, 7654, |
| | | | | | | | 7656, 7658, 7660, 7662, 7664, 7666, 7668, 7670, 7672, 7674, |
| | | | | | | | 7676, 7678, 7680, 7682, 7684, 7686, 7688, 7690, 7692, 7694, |
| | | | | | | | 7696, 7698, 7700, 7702, 7704, 7706, 7708, 7710, 7712, 7714, |
| | | | | | | | 7716, 7718, 7720, 7722, 7724, 7726, 7728, 7730, 7732, 7734, |
| | | | | | | | 7736, 7738, 7740, 7742, 7744, 7746, 7748, 7750, 7752, 7754, |
| | | | | | | | 7756, 7758, 7760, 7762, 7764, 7766, 7768, 7770, 7772, 7774, |
| | | | | | | | 7776, 7778, 7780, 7782, 7784, 7786, 7788, 7790, 7792, 7794, |
| | | | | | | | 7796, 7798, 7800, 7802, 7804, 7806, 7808, 7810, 7812, 7814, |
| | | | | | | | 7816, 7818, 7820, 7822, 7824, 7826, 7828, 7830, 7832, 7834, |
| | | | | | | | 7836, 7838, 7840, 7842, 7844, 7846, 7848, 7850, 7852, 7854, |
| | | | | | | | 7856, 7858, 7860, 7862, 7864, 7866, 7868, 7870, 7872, 7874, |
| | | | | | | | 7876, 7878, 7880, 7882, 7884, 7886, 7888, 7890, 7892, 7894, |
| | | | | | | | 7896, 7898, 7900, 7902, 7904, 7906, 7908, 7910, 7912, 7914, |
| | | | | | | | 7916, 7918, 7920, 7922, 7924, 7926, 7928, 7930, 7932, 7934, |
| | | | | | | | 7936, 7938, 7940, 7942, 7944, 7946, 7948, 7950, 7952, 7954, |
| | | | | | | | 7956, 7958, 7960, 7962, 7964, 7966, 7968, 7970, 7972, 7974, |
| | | | | | | | 7976, 7978, 7980, 7982, 7984 |
| 1 | 33 | GABA | 51340801_CANOLA | B. napus | 54 | plastidic | 56, 58, 60, 62, 64, 66, 68, 70, 72, 74, 76, 78, 80, 82, 84, 86, 88, |
| | | | | | | | 90, 92, 94, 96, 98, 100, 102, 104, 106, 108, 110, 112, 114, 116, |
| | | | | | | | 118, 120, 122, 124, 126, 128, 130, 132, 134, 136, 138, 140, 142, |
| | | | | | | | 144, 146, 148, 150, 152, 154, 156, 158, 160, 162, 164, 166, 168, |
| | | | | | | | 170, 172, 174, 176, 178, 180, 182, 184, 186, 188, 190, 192, 194, |
| | | | | | | | 196, 198, 200, 202, 204, 206, 208, 210, 212, 214, 216, 218, 220, |
| | | | | | | | 222, 224, 226, 228, 230, 232, 234, 236, 238, 240, 242, 244, 246, |
| | | | | | | | 248, 250, 252, 254, 256, 258, 260, 262, 264, 266, 268, 270, 272, |
| | | | | | | | 274, 276, 278, 280, 282, 284, 286, 288, 290, 292, 294, 296, 298, |
| | | | | | | | 300, 302, 304, 306, 308, 310, 312, 314, 316, 318, 320, 322, 324, |
| | | | | | | | 326, 328, 330, 332, 334, 336, 338, 340, 342, 344, 346, 348, 350, |
| | | | | | | | 352, 354, 356, 358, 360, 362, 364, 366, 368, 370, 372, 374, 376, |
| | | | | | | | 378, 380, 382, 384, 386, 388, 390, 392, 394, 396, 398, 400, 402, |
| | | | | | | | 404, 406, 408, 410, 412, 414, 416, 418, 420, 422, 424, 426, 428, |
| | | | | | | | 430, 432, 434, 436, 438, 440, 442, 444, 446, 448, 450, 452, 454, |
| | | | | | | | 456, 458, 460, 462, 464, 466, 468, 470, 472, 474, 476, 478, 480, |
| | | | | | | | 482, 484, 486, 488, 490, 492, 494, 496, 498, 500, 502, 504, 506, |
| | | | | | | | 508, 510, 512, 514, 516, 518, 520, 522, 524, 526, 528, 530, 532, |
| | | | | | | | 534, 536, 538, 540, 542, 544, 546, 548, 550, 552, 554, 556, 558, |
| | | | | | | | 560, 562, 564, 566 |
| 1 | 34 | GABA | YBR159W | S. cerevisiae | 7138 | cyto- | 7140, 7142, 7144, 7146, 7148, 7150, 7152, 7154, 7156, 7158, |
| | | | | | | plasmic | 7160, 7162, 7164, 7166, 7168, 7170, 7172, 7174, 7176, 7178, |
| | | | | | | | 7180, 7182, 7184, 7186 |
| 1 | 35 | GABA | YDR046C | S. cerevisiae | 7209 | cyto- | 7211, 7213, 7215, 7217, 7219, 7221, 7223, 7225, 7227, 7229, |
| | | | | | | plasmic | 7231, 7233, 7235, 7237, 7239, 7241, 7243, 7245, 7247, 7249, |
| | | | | | | | 7251, 7253, 7255, 7257, 7259, 7261, 7263 |
| 1 | 36 | GABA | YGR255C | S. cerevisiae | 7275 | cyto- | 7277, 7279, 7281, 7283, 7285, 7287, 7289, 7291, 7293, 7295, |
| | | | | | | plasmic | 7297, 7299, 7301, 7303, 7305, 7307, 7309, 7311, 7313, 7315, |
| | | | | | | | 7317, 7319, 7321, 7323, 7325, 7327, 7329, 7331, 7333, 7335, |
| | | | | | | | 7337, 7339, 7341, 7343, 7345, 7347, 7349, 7351, 7353, 7355, |
| | | | | | | | 7357, 7359, 7361, 7363, 7365, 7367, 7369, 7371, 7373, 7375, |
| | | | | | | | 7377, 7379, 7381, 7383, 7385, 7387, 7389, 7391, 7393, 7395, |
| | | | | | | | 7397, 7399, 7401, 7403, 7405, 7407, 7409, 7411, 7413, 7415, |
| | | | | | | | 7417, 7419, 7421, 7423, 7425, 7427, 7429, 7431, 7433, 7435, |
| | | | | | | | 7437, 7439, 7441, 7443, 7445, 7447, 7449, 7451, 7453, 7455, |
| | | | | | | | 7457, 7459, 7461, 7463, 7465, 7467, 7469, 7471, 7473, 7475, |
| | | | | | | | 7477, 7479 |
| 1 | 37 | GABA | YHR213W | S. cerevisiae | 7490 | cyto- | 7492, 7494, 7496, 7498, 7500, 7502, 7504 |
| | | | | | | plasmic | |
| 1 | 38 | GABA | YPL249C-A | S. cerevisiae | 8240 | cyto- | 8242, 8244, 8246, 8248, 8250, 8252, 8254, 8256, 8258, 8260, |
| | | | | | | plasmic | 8262, 8264, 8266, 8268, 8270, 8272, 8274, 8276, 8278, 8280, |
| | | | | | | | 8282, 8284, 8286, 8288, 8290, 8292, 8294, 8296, 8298, 8300, |
| | | | | | | | 8302, 8304, 8306, 8308, 8310, 8312, 8314, 8316, 8318, 8320, |
| | | | | | | | 8322, 8324, 8326, 8328, 8330, 8332, 8334, 8336, 8338, 8340, |
| | | | | | | | 8342, 8344, 8346, 8348, 8350, 8352, 8354, 8356, 8358, 8360 |
| 1 | 39 | GABA | YPR185W | S. cerevisiae | 8398 | cyto- | 8400, 8402, 8404, 8406, 8408, 8410 |
| | | | | | | plasmic | |
| 1 | 40 | GABA | YLR395C | S. cerevisiae | 8228 | cyto- | 8230, 8232, 8234 |
| | | | | | | plasmic | |
| 1 | 41 | GABA | YDR046C_2 | S. cerevisiae | 8424 | cyto- | 8426, 8428, 8430, 8432, 8434, 8436, 8438, 8440, 8442, 8444, |
| | | | | | | plasmic | 8446, 8448, 8450, 8452, 8454, 8456, 8458, 8460, 8462, 8464, |
| | | | | | | | 8466, 8468, 8470, 8472, 8474, 8476, 8478 |
| 1 | 42 | GABA | | Oryza | 8590 | cyto- | 1673, 1675, 1677, 1679, 1681, 1683, 1685, 1687, 1689, 1691, |
| | | | | sativa | | plasmic | 1693, 1695, 1697, 1699, 1701, 1703, 1705, 1707, 1709, 1711, |
| | | | | | | | 1713, 1715, 1717, 1719, 1721, 1723, 1725, 1727, 1729, 1731, |
| | | | | | | | 1733, 1735, 1737, 1739, 1741, 1743, 1745, 1747, 1749, 1751, |
| | | | | | | | 1753, 1755, 1757, 1759, 1761, 1763, 1765, 1767, 1769, 1771, |
| | | | | | | | 1773, 1775, 1777, 1779, 1781, 1783, 1785, 1787, 1789, 1791, |
| | | | | | | | 1793, 1795, 1797, 1799, 1801, 1803, 1805, 1807, 1809, 1811, |
| | | | | | | | 1813, 1815, 1817, 1819, 1821, 1823, 1825, 1827, 1829, 1831, |
| | | | | | | | 1833, 1835, 1837, 1839, 1841, 1843 |

TABLE IIB
Amino acid sequence ID numbers

| | | | | | 5. | | |
|---|---|---|---|---|---|---|---|
| Appli- | 1. | 2. | 3. | 4. | Lead | 6. | 7. |
| cation | Hit | Project | Locus | Organism | SEQ ID | Target | SEQ IDs of Polypeptide Homologs |
| 1 | 1 | GABA | YMR052W | S. cerevisiae | 43 | cytoplasmic | — |
| 1 | 2 | GABA | AT1G43850 | A. th. | 655 | cytoplasmic | 691, 693 |
| 1 | 3 | GABA | AT2G28890 | A. th. | 707 | cytoplasmic | — |
| 1 | 4 | GABA | AT3G04050 | A. th. | 752 | plastidic | 1056, 1058, 1060, 1062, 1064, 1066, 1068, 1070, 1072, 1074, |
| | | | | | | | 1076, 1078, 1080, 1082, 1084, 1086, 1088, 1090, 1092, 1094, |
| | | | | | | | 1096, 1098, 1100, 1102, 1104, 1106, 1108, 1110, 1112, 1114, |
| | | | | | | | 1116, 1118, 1120, 1122, 1124, 1126, 1128, 1130, 1132, 1134, |
| | | | | | | | 1136, 1138, 1140, 1142, 1144, 1146, 8500, 8502, 8504 |
| 1 | 5 | GABA | AT3G08710 | A. th. | 1157 | cytoplasmic | 1381, 1383, 1385, 1387, 1389, 1391, 1393, 1395, 1397, 1399, |
| | | | | | | | 1401, 1403, 1405, 1407, 1409, 1411, 1413, 1415, 1417, 1419, |
| | | | | | | | 1421, 1423, 1425, 1427, 1429, 1431, 1433, 1435, 1437, 1439, |
| | | | | | | | 1441, 1443, 1445, 1447, 1449, 1451, 1453, 1455, 1457, 1459, |
| | | | | | | | 1461, 1463, 1465, 1467, 1469, 1471, 1473, 1475, 1477, 1479, |
| | | | | | | | 1481, 1483, 1485, 1487, 1489, 1491, 1493, 1495, 1497, 1499, |
| | | | | | | | 1501, 1503, 1505, 8508, 8510, 8512, 8514 |
| 1 | 6 | GABA | AT3G11650 | A. th. | 1511 | cytoplasmic | 1551, 1553, 1555, 1557, 1559, 1561, 1563, 1565, 1567, 1569, |
| | | | | | | | 1571, 1573, 1575, 1577, 1579, 1581, 1583, 1585, 1587, 1589, |
| | | | | | | | 1591, 8518, 8520, 8522, 8524 |
| 1 | 7 | GABA | AT3G27540 | A. th. | 1599 | cytoplasmic | 1647, 1649, 1651, 1653, 1655, 1657, 1659, 8528, 8530, 8532 |
| 1 | 8 | GABA | AT3G61830 | A. th. | 1671 | cytoplasmic | 1845, 1847, 1849, 1851, 1853, 1855, 1857, 1859, 1861 |
| 1 | 9 | GABA | AT4G32480 | A. th. | 1875 | cytoplasmic | 1911, 1913, 1915, 1917, 1919, 1921, 1923, 1925, 1927, 1929 |
| 1 | 10 | GABA | AT4G35310 | A. th. | 1937 | cytoplasmic | 2343, 2345, 2347, 2349, 2351, 2353, 2355, 2357, 2359, 2361, |
| | | | | | | | 2363, 2365, 2367, 2369, 2371, 2373, 2375, 2377, 2379, 2381, |
| | | | | | | | 2383, 2385, 2387, 2389, 2391, 2393, 2395, 2397, 2399, 2401, |
| | | | | | | | 2403, 2405, 2407, 2409, 2411, 2413, 2415, 2417, 2419, 2421, |
| | | | | | | | 2423, 2425, 2427, 2429, 2431, 2433, 2435, 2437, 2439, 2441, |
| | | | | | | | 2443, 2445, 2447, 2449, 2451, 2453, 2455, 2457, 2459, 2461, |
| | | | | | | | 2463, 2465, 2467, 2469, 2471, 2473, 2475, 2477, 2479, 8536 |
| 1 | 11 | GABA | AT5G16650 | A. th. | 2493 | cytoplasmic | 2525, 2527, 2529, 2531, 2533, 2535, 2537, 2539, 2541, 2543, |
| | | | | | | | 2545, 2547, 8540 |
| 1 | 12 | GABA | AVINDRAFT_2344 | A. vinelandii | 2554 | cytoplasmic | 3298, 3300, 3302, 3304, 3306, 3308, 3310, 3312, 3314, 3316, |
| | | | | | | | 3318, 3320, 3322, 3324, 3326, 3328, 3330, 3332, 3334, 3336, |
| | | | | | | | 3338, 3340, 3342, 3344, 3346, 3348, 3350, 3352, 3354, 3356, |
| | | | | | | | 3358, 3360, 3362, 3364, 3366, 3368, 3370, 3372, 3374, 3376, |
| | | | | | | | 3378, 3380, 3382, 3384, 3386, 3388, 3390, 3392, 3394, 3396 |
| 1 | 13 | GABA | AVINDRAFT_2521 | A. vinelandii | 3409 | cytoplasmic | — |
| 1 | 14 | GABA | AVINDRAFT_5103 | A. vinelandii | 3565 | cytoplasmic | — |
| 1 | 15 | GABA | AVINDRAFT_5292 | A. vinelandii | 3729 | cytoplasmic | 4043, 4045, 4047, 4049, 4051, 4053, 4055, 4057, 4059, 4061, |
| | | | | | | | 4063 |
| 1 | 16 | GABA | B0124 | E. coli | 4069 | cytoplasmic | — |
| 1 | 17 | GABA | B0161 | E. coli | 4177 | cytoplasmic | — |
| 1 | 18 | GABA | B0449 | E. coli | 4365 | cytoplasmic | 4697, 4699, 4701, 4703, 4705, 4707, 4709 |
| 1 | 19 | GABA | B0593 | E. coli | 4718 | plastidic | — |
| 1 | 20 | GABA | B0898 | E. coli | 4865 | cytoplasmic | — |
| 1 | 21 | GABA | B1003 | E. coli | 4904 | cytoplasmic | — |
| 1 | 22 | GABA | B1522 | E. coli | 4910 | cytoplasmic | — |
| 1 | 23 | GABA | B2739 | E. coli | 4955 | cytoplasmic | — |
| 1 | 24 | GABA | B3646 | E. coli | 5122 | cytoplasmic | — |
| 1 | 25 | GABA | B4029 | E. coli | 5320 | cytoplasmic | — |
| 1 | 26 | GABA | B4256 | E. coli | 5388 | cytoplasmic | — |
| 1 | 27 | GABA | C_PP034008079R | P. patens | 5459 | cytoplasmic | 6007, 6009, 6011, 6013, 6015, 6017, 6019, 6021, 6023, 6025, |
| | | | | | | | 6027, 6029, 6031, 6033, 6035, 6037 |
| 1 | 28 | GABA | SLR0739 | Synechocystis | 6042 | plastidic | 6448, 6450, 6452, 6454, 6456, 6458, 6460, 8544 |
| | | | | sp. | | | |
| 1 | 29 | GABA | TTC0019 | T. | 6470 | cytoplasmic | 6730, 6732, 6734 |
| | | | | thermophilus | | | |
| 1 | 30 | GABA | TTC1550 | T. | 6740 | cytoplasmic | 7112, 7114, 7116, 7118, 7120, 7122, 7124, 7126, 7128, 7130, |
| | | | | thermophilus | | | 7132 |
| 1 | 31 | GABA | YJR153W | S. cerevisiae | 7511 | cytoplasmic | 7611, 7613, 7615, 7617, 7619, 7621, 7623, 7625, 7627 |
| 1 | 32 | GABA | YLR043C | S. cerevisiae | 7634 | plastidic | 7986, 7988, 7990, 7992, 7994, 7996, 7998, 8000, 8002, 8004, |
| | | | | | | | 8006, 8008, 8010, 8012, 8014, 8016, 8018, 8020, 8022, 8024, |
| | | | | | | | 8026, 8028, 8030, 8032, 8034, 8036, 8038, 8040, 8042, 8044, |
| | | | | | | | 8046, 8048, 8050, 8052, 8054, 8056, 8058, 8060, 8062, 8064, |
| | | | | | | | 8066, 8068, 8070, 8072, 8074, 8076, 8078, 8080, 8082, 8084, |
| | | | | | | | 8086, 8088, 8090, 8092, 8094, 8096, 8098, 8100, 8102, 8104, |
| | | | | | | | 8106, 8108, 8110, 8112, 8114, 8116, 8118, 8120, 8122, 8124, |
| | | | | | | | 8126, 8128, 8130, 8132, 8134, 8136, 8138, 8140, 8142, 8144, |
| | | | | | | | 8146, 8148, 8150, 8152, 8154, 8156, 8158, 8160, 8162, 8164, |
| | | | | | | | 8166, 8168, 8170, 8172, 8174, 8176, 8178, 8180, 8182, 8184, |
| | | | | | | | 8186, 8188, 8190, 8192, 8194, 8196, 8198, 8200, 8202, 8204, |
| | | | | | | | 8206, 8208, 8210, 8212, 8214, 8216, 8218, 8220, 8222, 8548, |
| | | | | | | | 8550, 8552, 8554, 8556, 8558, 8560, 8562 |
| 1 | 33 | GABA | 51340801_CANOLA | B. napus | 54 | plastidic | 568, 570, 572, 574, 576, 578, 580, 582, 584, 586, 588, 590, |
| | | | | | | | 592, 594, 596, 598, 600, 602, 604, 606, 608, 610, 612, 614, |
| | | | | | | | 616, 618, 620, 622, 624, 626, 628, 630, 632, 634, 636, 638, |
| | | | | | | | 640, 642, 644, 646, 648, 8492, 8494, 8496 |
| 1 | 34 | GABA | YBR159W | S. cerevisiae | 7138 | cytoplasmic | 7188, 7190, 7192, 7194, 7196, 7198, 7200 |
| 1 | 35 | GABA | YDR046C | S. cerevisiae | 7209 | cytoplasmic | — |
| 1 | 36 | GABA | YGR255C | S. cerevisiae | 7275 | cytoplasmic | 7481, 7483 |
| 1 | 37 | GABA | YHR213W | S. cerevisiae | 7490 | cytoplasmic | — |
| 1 | 38 | GABA | YPL249C-A | S. cerevisiae | 8240 | cytoplasmic | 8362, 8364, 8366, 8368, 8370, 8372, 8374, 8376, 8378, 8380, |
| | | | | | | | 8382, 8384, 8386, 8388, 8390, 8392, 8566, 8568, 8570, 8572, |
| | | | | | | | 8574, 8576, 8578, 8580, 8582, 8584, 8586, 8588 |
| 1 | 39 | GABA | YPR185W | S. cerevisiae | 8398 | cytoplasmic | — |
| 1 | 40 | GABA | YLR395C | S. cerevisiae | 8228 | cytoplasmic | — |
| 1 | 41 | GABA | YDR046C_2 | S. cerevisiae | 8424 | cytoplasmic | — |
| 1 | 42 | GABA | | Oryza | 8590 | cytoplasmic | 1845, 1847, 1849, 1851, 1853, 1855, 1857, 1859, 1861 |
| | | | | sativa | | | |

TABLE III
Primer nucleic acid sequence ID numbers

| | | | | | 5. | | |
|---|---|---|---|---|---|---|---|
| | 1. | 2. | 3. | 4. | Lead | 6. | 7. |
| Application | Hit | Project | Locus | Organism | SEQ ID | Target | SEQ IDs of Primers |
| 1 | 1 | GABA | YMR052W | S. cerevisiae | 42 | cytoplasmic | 48, 49 |
| 1 | 2 | GABA | AT1G43850 | A. th. | 654 | cytoplasmic | 694, 695 |
| 1 | 3 | GABA | AT2G28890 | A. th. | 706 | cytoplasmic | 738, 739 |
| 1 | 4 | GABA | AT3G04050 | A. th. | 751 | plastidic | 1147, 1148 |
| 1 | 5 | GABA | AT3G08710 | A. th. | 1156 | cytoplasmic | 1506, 1507 |
| 1 | 6 | GABA | AT3G11650 | A. th. | 1510 | cytoplasmic | 1592, 1593 |
| 1 | 7 | GABA | AT3G27540 | A. th. | 1598 | cytoplasmic | 1660, 1661 |
| 1 | 8 | GABA | AT3G61830 | A. th. | 1670 | cytoplasmic | 1862, 1863 |
| 1 | 9 | GABA | AT4G32480 | A. th. | 1874 | cytoplasmic | 1930, 1931 |
| 1 | 10 | GABA | AT4G35310 | A. th. | 1936 | cytoplasmic | 2480, 2481 |
| 1 | 11 | GABA | AT5G16650 | A. th. | 2492 | cytoplasmic | 2548, 2549 |
| 1 | 12 | GABA | AVINDRAFT_2344 | A. vinelandii | 2553 | cytoplasmic | 3397, 3398 |
| 1 | 13 | GABA | AVINDRAFT_2521 | A. vinelandii | 3408 | cytoplasmic | 3560, 3561 |
| 1 | 14 | GABA | AVINDRAFT_5103 | A. vinelandii | 3564 | cytoplasmic | 3724, 3725 |
| 1 | 15 | GABA | AVINDRAFT_5292 | A. vinelandii | 3728 | cytoplasmic | 4064, 4065 |
| 1 | 16 | GABA | B0124 | E. coli | 4068 | cytoplasmic | 4160, 4161 |
| 1 | 17 | GABA | B0161 | E. coli | 4176 | cytoplasmic | 4356, 4357 |
| 1 | 18 | GABA | B0449 | E. coli | 4364 | cytoplasmic | 4710, 4711 |
| 1 | 19 | GABA | B0593 | E. coli | 4717 | plastidic | 4855, 4856 |
| 1 | 20 | GABA | B0898 | E. coli | 4864 | cytoplasmic | 4892, 4893 |
| 1 | 21 | GABA | B1003 | E. coli | 4903 | cytoplasmic | 4907, 4908 |
| 1 | 22 | GABA | B1522 | E. coli | 4909 | cytoplasmic | 4949, 4950 |
| 1 | 23 | GABA | B2739 | E. coli | 4954 | cytoplasmic | 5116, 5117 |
| 1 | 24 | GABA | B3646 | E. coli | 5121 | cytoplasmic | 5313, 5314 |
| 1 | 25 | GABA | B4029 | E. coli | 5319 | cytoplasmic | 5373, 5374 |
| 1 | 26 | GABA | B4256 | E. coli | 5387 | cytoplasmic | 5453, 5454 |
| 1 | 27 | GABA | C_PP034008079R | P. patens | 5458 | cytoplasmic | 6038, 6039 |
| 1 | 28 | GABA | SLR0739 | Synechocystis | 6041 | plastidic | 6461, 6462 |
| | | | | sp. | | | |
| 1 | 29 | GABA | TTC0019 | T. thermophilus | 6469 | cytoplasmic | 6735, 6736 |
| 1 | 30 | GABA | TTC1550 | T. thermophilus | 6739 | cytoplasmic | 7133, 7134 |
| 1 | 31 | GABA | YJR153W | S. cerevisiae | 7510 | cytoplasmic | 7628, 7629 |
| 1 | 32 | GABA | YLR043C | S. cerevisiae | 7633 | plastidic | 8223, 8224 |
| 1 | 33 | GABA | 51340801_CANOLA | B. napus | 53 | plastidic | 649, 650 |
| 1 | 34 | GABA | YBR159W | S. cerevisiae | 7137 | cytoplasmic | 7201, 7202 |
| 1 | 35 | GABA | YDR046C | S. cerevisiae | 7208 | cytoplasmic | 7264, 7265 |
| 1 | 36 | GABA | YGR255C | S. cerevisiae | 7274 | cytoplasmic | 7484, 7485 |
| 1 | 37 | GABA | YHR213W | S. cerevisiae | 7489 | cytoplasmic | 7505, 7506 |
| 1 | 38 | GABA | YPL249C-A | S. cerevisiae | 8239 | cytoplasmic | 8393, 8394 |
| 1 | 39 | GABA | YPR185W | S. cerevisiae | 8397 | cytoplasmic | 8411, 8412 |
| 1 | 40 | GABA | YLR395C | S. cerevisiae | 8227 | cytoplasmic | 8235, 8236 |
| 1 | 41 | GABA | YDR046C_2 | S. cerevisiae | 8423 | cytoplasmic | 8479, 8480 |
| 1 | 42 | GABA | | Oryza | 8589 | cytoplasmic | 1862, 1863 |
| | | | | sativa | | | |

TABLE IV
Consensus amino acid sequence ID numbers

| | | | | | 5. | | |
|---|---|---|---|---|---|---|---|
| | | | | | Lead | | |
| Appli- | 1. | 2. | 3. | 4. | SEQ | 6. | 7. |
| cation | Hit | Project | Locus | Organism | ID | Target | SEQ IDs of Consensus/Pattern Sequences |
| 1 | 1 | GABA | YMR052W | S. cerevisiae | 43 | cytoplasmic | 50, 51, 52 |
| 1 | 2 | GABA | AT1G43850 | A. th. | 655 | cytoplasmic | 696, 697, 698, 699, 700, 701, 702, 703, 704, 705 |
| 1 | 3 | GABA | AT2G28890 | A. th. | 707 | cytoplasmic | 740, 741, 742, 743, 744, 745, 746, 747, 748, 749, 750 |
| 1 | 4 | GABA | AT3G04050 | A. th. | 752 | plastidic | 1149, 1150, 1151, 1152, 1153, 1154, 1155 |
| 1 | 5 | GABA | AT3G08710 | A. th. | 1157 | cytoplasmic | 1508, 1509 |
| 1 | 6 | GABA | AT3G11650 | A. th. | 1511 | cytoplasmic | 1594, 1595, 1596, 1597 |
| 1 | 7 | GABA | AT3G27540 | A. th. | 1599 | cytoplasmic | 1662, 1663, 1664, 1665, 1666, 1667, 1668, 1669 |
| 1 | 8 | GABA | AT3G61830 | A. th. | 1671 | cytoplasmic | 1864, 1865, 1866, 1867, 1868, 1869, 1870, 1871, 1872, 1873 |
| 1 | 9 | GABA | AT4G32480 | A. th. | 1875 | cytoplasmic | 1932, 1933, 1934, 1935 |
| 1 | 10 | GABA | AT4G35310 | A. th. | 1937 | cytoplasmic | 2482, 2483, 2484, 2485, 2486, 2487, 2488, 2489, 2490, 2491 |
| 1 | 11 | GABA | AT5G16650 | A. th. | 2493 | cytoplasmic | 2550, 2551, 2552 |
| 1 | 12 | GABA | AVINDRAFT_2344 | A. vinelandii | 2554 | cytoplasmic | 3399, 3400, 3401, 3402, 3403, 3404, 3405, 3406, 3407 |
| 1 | 13 | GABA | AVINDRAFT_2521 | A. vinelandii | 3409 | cytoplasmic | 3562, 3563 |
| 1 | 14 | GABA | AVINDRAFT_5103 | A. vinelandii | 3565 | cytoplasmic | 3726, 3727 |
| 1 | 15 | GABA | AVINDRAFT_5292 | A. vinelandii | 3729 | cytoplasmic | 4066, 4067 |
| 1 | 16 | GABA | B0124 | E. coli | 4069 | cytoplasmic | 4162, 4163, 4164, 4165, 4166, 4167, 4168, 4169, 4170, 4171, |
| | | | | | | | 4172, 4173, 4174, 4175 |
| 1 | 17 | GABA | B0161 | E. coli | 4177 | cytoplasmic | 4358, 4359, 4360, 4361, 4362, 4363 |
| 1 | 18 | GABA | B0449 | E. coli | 4365 | cytoplasmic | 4712, 4713, 4714, 4715, 4716 |
| 1 | 19 | GABA | B0593 | E. coli | 4718 | plastidic | 4857, 4858, 4859, 4860, 4861, 4862, 4863 |
| 1 | 20 | GABA | B0898 | E. coli | 4865 | cytoplasmic | 4894, 4895, 4896, 4897, 4898, 4899, 4900, 4901, 4902 |
| 1 | 21 | GABA | B1003 | E. coli | 4904 | cytoplasmic | — |
| 1 | 22 | GABA | B1522 | E. coli | 4910 | cytoplasmic | 4951, 4952, 4953 |
| 1 | 23 | GABA | B2739 | E. coli | 4955 | cytoplasmic | 5118, 5119, 5120 |
| 1 | 24 | GABA | B3646 | E. coli | 5122 | cytoplasmic | 5315, 5316, 5317, 5318 |
| 1 | 25 | GABA | B4029 | E. coli | 5320 | cytoplasmic | 5375, 5376, 5377, 5378, 5379, 5380, 5381, 5382, 5383, 5384, |
| | | | | | | | 5385, 5386 |
| 1 | 26 | GABA | B4256 | E. coli | 5388 | cytoplasmic | 5455, 5456, 5457 |
| 1 | 27 | GABA | C_PP034008079R | P. patens | 5459 | cytoplasmic | 6040 |
| 1 | 28 | GABA | SLR0739 | Synechocystis | 6042 | plastidic | 6463, 6464, 6465, 6466, 6467, 6468 |
| | | | | sp. | | | |
| 1 | 29 | GABA | TTC0019 | T. thermophilus | 6470 | cytoplasmic | 6737, 6738 |
| 1 | 30 | GABA | TTC1550 | T. thermophilus | 6740 | cytoplasmic | 7135, 7136 |
| 1 | 31 | GABA | YJR153W | S. cerevisiae | 7511 | cytoplasmic | 7630, 7631, 7632 |
| 1 | 32 | GABA | YLR043C | S. cerevisiae | 7634 | plastidic | 8225, 8226 |
| 1 | 33 | GABA | 51340801_CANOLA | B. napus | 54 | plastidic | 651, 652, 653 |
| 1 | 34 | GABA | YBR159W | S. cerevisiae | 7138 | cytoplasmic | 7203, 7204, 7205, 7206, 7207 |
| 1 | 35 | GABA | YDR046C | S. cerevisiae | 7209 | cytoplasmic | 7266, 7267, 7268, 7269, 7270, 7271, 7272, 7273 |
| 1 | 36 | GABA | YGR255C | S. cerevisiae | 7275 | cytoplasmic | 7486, 7487, 7488 |
| 1 | 37 | GABA | YHR213W | S. cerevisiae | 7490 | cytoplasmic | 7507, 7508, 7509 |
| 1 | 38 | GABA | YPL249C-A | S. cerevisiae | 8240 | cytoplasmic | 8395, 8396 |
| 1 | 39 | GABA | YPR185W | S. cerevisiae | 8398 | cytoplasmic | 8413, 8414, 8415, 8416, 8417, 8418, 8419, 8420, 8421, 8422 |
| 1 | 40 | GABA | YLR395C | S. cerevisiae | 8228 | cytoplasmic | 8237, 8238 |
| 1 | 41 | GABA | YDR046C_2 | S. cerevisiae | 8424 | cytoplasmic | 8481, 8482, 8483, 8484, 8485, 8486, 8487, 8488 |
| 1 | 42 | GABA | | Oryza | 8589 | cytoplasmic | 1864, 1865, 1866, 1867, 1868, 1869, 1870, 1871, 1872, 1873 |
| | | | | sativa | | | |

The application's sequence listing, which the Patent Office published only in electronic form, follows.

SEQUENCE LISTING (8590 sequences)

SEQ ID NO: 1 - DNA, 19 bp, Artificial
  adapter sequence added to gene specific primers for cloning purposes
ggaattccagctgaccacc

SEQ ID NO: 2 - DNA, 20 bp, Artificial
  adapter sequence added to gene specific primers for cloning purposes
gatccccgggaattgccatg

SEQ ID NO: 3 - DNA, 10 bp, Artificial
  adapter sequence added to gene specific primers for cloning purposes
ttgctcttcc

SEQ ID NO: 4 - DNA, 10 bp, Artificial
  adapter sequence added to gene specific primers for cloning purposes
ttgctcttcg

SEQ ID NO: 5 - DNA, 34 bp, Artificial
  Amplification of the targeting sequence of the gene FNR from Spinacia oleracea to generate the S.cerevisiae plastidic targeting vector VC-MME354-1
atagaattcgcataaacttatcttcatagttgcc

SEQ ID NO: 6 - DNA, 27 bp, Artificial
  Amplification of the targeting sequence of the gene FNR from Spinacia oleracea to generate the S.cerevisiae plastidic targeting vector VC-MME354-1
atagaattcagaggcgatctgggccct

SEQ ID NO: 7 - DNA, 36 bp, Artificial
  Amplification of the targeting sequence of the gene FNR from Spinacia oleracea to generate the E.coli plastidic targeting vector VC-MME432-1
atagtttaaacgcataaacttatcttcatagttgcc

SEQ ID NO: 8 - DNA, 34 bp, Artificial
  Amplification of the targeting sequence of the gene FNR from Spinacia oleracea to generate the E.coli plastidic targeting vector VC-MME432-1
ataccatggaagagcaagaggcgatctgggccct

SEQ ID NO: 9 - protein, 62 aa, Acetabularia mediterranea
MASIMMNKSVVLSKECAKPLATPKVTLNKRGFATTIATKNREMMVWQPFNNKMFETFSFLPP

SEQ ID NO: 10 - protein, 90 aa, Arabidopsis thaliana
MAASLQSTATFLQSAKIATAPSRGSSHLRSTQAVGKSFGLETSSARLTCSFQSDFKDFTGKCSDAVKIAGFALATSALVVSGASAEGAPK

SEQ ID NO: 11 - protein, 96 aa, Arabidopsis thaliana
MAQVSRICNGVQNPSLICNLSKSSQRKSPLSVSLKTQQHPRAYPISSSWGLKKSGMTLIGSELRPLKVMSSVSTAEKASEIVLQPIREISGLIKLP

SEQ ID NO: 12 - protein, 100 aa, Arabidopsis thaliana
MAAATTTTTTSSSISFSTKPSPSSSKSPLPISRFSLPFSLNPNKSSSSSRRRGIKSSSPSSISAVLNTTTNVTTTPSPTKPTKPETFISRFAPDQPRKGA

SEQ ID NO: 13 - protein, 46 aa, Arabidopsis thaliana
MITSSLTCSLQALKLSSPFAHGSTPLSSLSKPNSFPNHRMPALVPV

SEQ ID NO: 14 - protein, 93 aa, Arabidopsis thaliana
MASLLGTSSSAIWASPSLSSPSSKPSSSPICFRPGKLFGSKLNAGIQIRPKKNRSRYHVSVMNVATEINSTEQVVGKFDSKKSARPVYPFAAI

SEQ ID NO: 15 - protein, 52 aa, Arabidopsis thaliana
MASTALSSAIVGTSFIRRSPAPISLRSLPSANTQSLFGLKSGTARGGRVVAM

SEQ ID NO: 16 - protein, 39 aa, Arabidopsis thaliana
MAASTMALSSPAFAGKAVNLSPAASEVLGSGRVTNRKTV

SEQ ID NO: 17 - protein, 92 aa, Arabidopsis thaliana
MAAITSATVTIPSFTGLKLAVSSKPKTLSTISRSSSATRAPPKLALKSSLKDFGVIAVATAASIVLAGNAMAMEVLLGSDDGSLAFVPSEFT

SEQ ID NO: 18 - protein, 85 aa, Arabidopsis thaliana
MAAAVSTVGAINRAPLSLNGSGSGAVSAPASTFLGKKVVTVSRFAQSNKKSNGSFKVLAVKEDKQTDGDRWRGLAYDTSDDQIDI

SEQ ID NO: 19 - protein, 54 aa, Arabidopsis thaliana
MKSSMLSSTAWTSPAQATMVAPFTGLKSSASFPVTRKANNDITSITSNGGRVSC

SEQ ID NO: 20 - protein, 91 aa, Arabidopsis thaliana
MAASGTSATFRASVSSAPSSSSQLTHLKSPFKAVKYTPLPSSRSKSSSFSVSCTIAKDPPVLMAAGSDPALWQRPDSFGRFGKFGGKYVPE

SEQ ID NO: 21 - protein, 80 aa, Brassica campestris
MSTTFCSSVCMQATSLAATTRISFQKPALVSTTNLSFNLRRSIPTRFSISCAAKPETVEKVSKIVKKQLSLKDDQKVVAE

SEQ ID NO: 22 - protein, 51 aa, Brassica napus
MATTFSASVSMQATSLATTTRISFQKPVLVSNHGRTNLSFNLSRTRLSISC

SEQ ID NO: 23 - protein, 44 aa, Chlamydomonas reinhardtii
MQALSSRVNIAAKPQRAQRLVVRAEEVKAAPKKEVGPKRGSLVK

SEQ ID NO: 24 - protein, 51 aa, Cucurbita moschata
MAELIQDKESAQSAATAAAASSGYERRNEPAHSRKFLEVRSEEELLSCIKK

SEQ ID NO: 25 - protein, 62 aa, Spinacea oleracea
MSTINGCLTSISPSRTQLKNTSTLRPTFIANSRVNPSSSVPPSLIRNQPVFAAPAPIITPTL

SEQ ID NO: 26 - protein, 75 aa, Spinacea oleracea
MTTAVTAAVSFPSTKTTSLSARCSSVISPDKISYKKVPLYYRNVSATGKMGPIRAQIASDVEAPPPAPAKVEKMS

SEQ ID NO: 27 - protein, 55 aa, Spinacea oleracea
MTTAVTAAVSFPSTKTTSLSARSSSVISPDKISYKKVPLYYRNVSATGKMGPIRA

SEQ ID NO: 28 - DNA, 419 bp, Spinacia oleracea
  5'UTR (1)..(168)
  CDS (166)..(273)
  CDS (351)..(419)
gcataaacttatcttcatagttgccactccaatttgctccttgaatctcctccacccaatacataatccactcctccatcacccacttcactactaaatcaaacttaactctgtttttctctctcctcctttcatttcttattcttccaatcatcgtactccgccatgaccaccgctgtcaccgccgctgtttctttcccctctaccaaaaccacctctctctccgcccgaagctcctccgtcatttcccctgacaaaatcagctacaaaaaggtgattcccaatttcactgtgttttttattaataatttgttattttgatgatgagatgattaatttgggtgctgcaggttcctttgtactacaggaatgtatctgcaactgggaaaatgggacccatcagggcccagatcgcctct

SEQ ID NO: 29 - protein, 59 aa, Spinacia oleracea
MTTAVTAAVSFPSTKTTSLSARSSSVISPDKISYKKVPLYYRNVSATGKMGPIRAQIAS

SEQ ID NO: 30 - DNA, 8659 bp, Artificial
  plasmid pMTX155
agcttggacaatcagtaaattgaacggagaatattattcataaaaatacgatagtaacgggtgatatattcattagaatgaaccgaaaccggcggtaaggatctgagctacacatgctcaggttttttacaacgtgcacaacagaattgaaagcaaatatcatgcgatcataggcgtctcgcatatctcattaaagcagggcatgccggtcgagtcaaatctcggtgacgggcaggaccggacggggcggtaccggcaggctgaagtccagctgccagaaacccacgtcatgccagttcccgtgcttgaagccggccgcccgcagcatgccgcggggggcatatccgagcgcctcgtgcatgcgcacgctcgggtcgttgggcagcccgatgacagcgaccacgctcttgaagccctgtgcctccagggacttcagcaggtgggtgtagagcgtggagcccagtcccgtccgctggtggcggggggagacgtacacggtcgactcggccgtccagtcgtaggcgttgcgtgccttccaggggcccgcgtaggcgatgccggcgacctcgccgtccacctcggcgacgagccagggatagcgctcccgcagacggacgaggtcgtccgtccactcctgcggttcctgcggctcggtacggaagttgaccgtgcttgtctcgatgtagtggttgacgatggtgcagaccgccggcatgtccgcctcggtggcacggcggatgtcggccgggcgtcgttctgggctcatggtagactcgacggatccacgtgtggaagatatgaatttttttgagaaactagataagattaatgaatatcggtgttttggttttttcttgtggccgtctttgtttatattgagatttttcaaatcagtgcgcaagacgtgacgtaagtatccgagtcagtttttatttttctactaatttggtcgaagctttgggcggatcctctagagcagcttgccaacatggtggagcacgacactctcgtctactccaagaatatcaaagatacagtctcagaagaccaaagggctattgagacttttcaacaaagggtaatatcgggaaacctcctcggattccattgcccagctatctgtcacttcatcaaaaggacagtagaaaaggaaggtggcacctacaaatgccatcattgcgataaaggaaaggctatcgttcaagatgcctctgccgacagtggtcccaaagatggacccccacccacgaggagcatcgtggaaaaagaagacgttccaaccacgtcttcaaagcaagtggattgatgtgaacatggtggagcacgacactctcgtctactccaagaatatcaaagatacagtctcagaagaccaaagggctattgagacttttcaacaaagggtaatatcgggaaacctcctcggattccattgcccagctatctgtcacttcatcaaaaggacagtagaaaaggaaggtggcacctacaaatgccatcattgcgataaaggaaaggctatcgttcaagatgcctctgccgacagtggtcccaaagatggacccccacccacgaggagcatcgtggaaaaagaagacgttccaaccacgtcttcaaagcaagtggattgatgtgatatctccactgacgtaagggatgacgcacaatcccactatccttcgcaagacccttcctctatataaggaagttcatttcatttggagaggacagggtaccctggaattccagctgaccaccatggcaattcccggggatcagctcgaatttccccgatcgttcaaacatttggcaataaagtttcttaagattgaatcctgttgccggtcttgcgatgattatcatataatttctgttgaattacgttaagcatgtaataattaacatgtaatgcatgacgttatttatgagatgggtttttatgattagagtcccgcaattatacatttaatacgcgatagaaaacaaaatatagcgcgcaaactaggataaattatcgcgcgcggtgtcatctatgttactagatcgggaattggcatgcaagcttggcactggccgtcgttttacaacgtcgtgactgggaaaaccctggcgttacccaacttaatcgccttgcagcacatccccctttcgccagctggcgtaatagcgaagaggcccgcaccgatcgcccttcccaacagttgcgcagcctgaatggcgaatgctagagcagcttgagcttggatcagattgtcgtttcccgccttcagtttaaactatcagtgtttgacaggatatattggcgggtaaacctaagagaaaagagcgtttattagaataacggatatttaaaagggcgtgaaaaggtttatccgttcgtccatttgtatgtgcatgccaaccacagggttcccctcgggatcaaagtactttgatccaacccctccgctgctatagtgcagtcggcttctgacgttcagtgcagccgtcttctgaaaacgacatgtcgcacaagtcctaagttacgcgacaggctgccgccctgcccttttcctggcgttttcttgtcgcgtgttttagtcgcataaagtagaatacttgcgactagaaccggagacattacgccatgaacaagagcgccgccgctggcctgctgggctatgcccgcgtcagcaccgacgaccaggacttgaccaaccaacgggccgaactgcacgcggccggctgcaccaagctgttttccgagaagatcaccggcaccaggcgcgaccgcccggagctggccaggatgcttgaccacctacgccctggcgacgttgtgacagtgaccaggctagaccgcctggcccgcagcacccgcgacctactggacattgccgagcgcatccaggaggccggcgcgggcctgcgtagcctggcagagccgtgggccgacaccaccacgccggccggccgcatggtgttgaccgtgttcgccggcattgccgagttcgagcgttccctaatcatcgaccgcacccggagcgggcgcgaggccgccaaggcccgaggcgtgaagtttggcccccgccctaccctcaccccggcacagatcgcgcacgcccgcgagctgatcgaccaggaaggccgcaccgtgaaagaggcggctgcactgcttggcgtgcatcgctcgaccctgtaccgcgcacttgagcgcagcgaggaagtgacgcccaccgaggccaggcggcgcggtgccttccgtgaggacgcattgaccgaggccgacgccctggcggccgccgagaatgaacgccaagaggaacaagcatgaaaccgcaccaggacggccaggacgaaccgtttttcattaccgaagagatcgaggcggagatgatcgcggccgggtacgtgttcgagccgcccgcgcacgtctcaaccgtgcggctgcatgaaatcctggccggtttgtctgatgccaagctggcggcctggccggccagcttggccgctgaagaaaccgagcgccgccgtctaaaaaggtgatgtgtatttgagtaaaacagcttgcgtcatgcggtcgctgcgtatatgatgcgatgagtaaataaacaaatacgcaaggggaacgcatgaaggttatcgctgtacttaaccagaaaggcgggtcaggcaagacgaccatcgcaacccatctagcccgcgccctgcaactcgccggggccgatgttctgttagtcgattccgatccccagggcagtgcccgcgattgggcggccgtgcgggaagatcaaccgctaaccgttgtcggcatcgaccgcccgacgattgaccgcgacgtgaaggccatcggccggcgcgacttcgtagtgatcgacggagcgccccaggcggcggacttggctgtgtccgcgatcaaggcagccgacttcgtgctgattccggtgcagccaagcccttacgacatatgggccaccgccgacctggtggagctggttaagcagcgcattgaggtcacggatggaaggctacaagcggcctttgtcgtgtcgcgggcgatcaaaggcacgcgcatcggcggtgaggttgccgaggcgctggccgggtacgagctgcccattcttgagtcccgtatcacgcagcgcgtgagctacccaggcactgccgccgccggcacaaccgttcttgaatcagaacccgagggcgacgctgcccgcgaggtccaggcgctggccgctgaaattaaatcaaaactcatttgagttaatgaggtaaagagaaaatgagcaaaagcacaaacacgctaagtgccggccgtccgagcgcacgcagcagcaaggctgcaacgttggccagcctggcagacacgccagccatgaagcgggtcaactttcagttgccggcggaggatcacaccaagctgaagatgtacgcggtacgccaaggcaagaccattaccgagctgctatctgaatacatcgcgcagctaccagagtaaatgagcaaatgaataaatgagtagatgaattttagcggctaaaggaggcggcatggaaaatcaagaacaaccaggcaccgacgccgtggaatgccccatgtgtggaggaacgggcggttggccaggcgtaagcggctgggttgtctgccggccctgcaatggcactggaacccccaagcccgaggaatcggcgtgacggtcgcaaaccatccggcccggtacaaatcggcgcggcgctgggtgatgacctggtggagaagttgaaggccgcgcaggccgcccagcggcaacgcatcgaggcagaagcacgccccggtgaatcgtggcaagcggccgctgatcgaatccgcaaagaatcccggcaaccgccggcagccggtgcgccgtcgattaggaagccgcccaagggcgacgagcaaccagattttttcgttccgatgctctatgacgtgggcacccgcgatagtcgcagcatcatggacgtggccgttttccgtctgtcgaagcgtgaccgacgagctggcgaggtgatccgctacgagcttccagacgggcacgtagaggtttccgcagggccggccggcatggccagtgtgtgggattacgacctggtactgatggcggtttcccatctaaccgaatccatgaaccgataccgggaagggaagggagacaagcccggccgcgtgttccgtccacacgttgcggacgtactcaagttctgccggcgagccgatggcggaaagcagaaagacgacctggtagaaacctgcattcggttaaacaccacgcacgttgccatgcagcgtacgaagaaggccaagaacggccgcctggtgacggtatccgagggtgaagccttgattagccgctacaagatcgtaaagagcgaaaccgggcggccggagtacatcgagatcgagctagctgattggatgtaccgcgagatcacagaaggcaagaacccggacgtgctgacggttcaccccgattactttttgatcgatcccggcatcggccgttttctctaccgcctggcacgccgcgccgcaggcaaggcagaagccagatggttgttcaagacgatctacgaacgcagtggcagcgccggagagttcaagaagttctgtttcaccgtgcgcaagctgatcgggtcaaatgacctgccggagtacgatttgaaggaggaggcggggcaggctggcccgatcctagtcatgcgctaccgcaacctgatcgagggcgaagcatccgccggttcctaatgtacggagcagatgctagggcaaattgccctagcaggggaaaaaggtcgaaaaggtctctttcctgtggatagcacgtacattgggaacccaaagccgtacattgggaaccggaacccgtacattgggaacccaaagccgtacattgggaaccggtcacacatgtaagtgactgatataaaagagaaaaaaggcgatttttccgcctaaaactctttaaaacttattaaaactcttaaaacccgcctggcctgtgcataactgtctggccagcgcacagccgaagagctgcaaaaagcgcctacccttcggtcgctgcgctccctacgccccgccgcttcgcgtcggcctatcgcggccgctggccgctcaaaaatggctggcctacggccaggcaatctaccagggcgcggacaagccgcgccgtcgccactcgaccgccggcgcccacatcaaggcaccctgcctcgcgcgtttcggtgatgacggtgaaaacctctgacacatgcagctcccggagacggtcacagcttgtctgtaagcggatgccgggagcagacaagcccgtcagggcgcgtcagcgggtgttggcgggtgtcggggcgcagccatgacccagtcacgtagcgatagcggagtgtatactggcttaactatgcggcatcagagcagattgtactgagagtgcaccatatgcggtgtgaaataccgcacagatgcgtaaggagaaaataccgcatcaggcgctcttccgcttcctcgctcactgactcgctgcgctcggtcgttcggctgcggcgagcggtatcagctcactcaaaggcggtaatacggttatccacagaatcaggggataacgcaggaaagaacatgtgagcaaaaggccagcaaaaggccaggaaccgtaaaaaggccgcgttgctggcgtttttccataggctccgcccccctgacgagcatcacaaaaatcgacgctcaagtcagaggtggcgaaacccgacaggactataaagataccaggcgtttccccctggaagctccctcgtgcgctctcctgttccgaccctgccgcttaccggatacctgtccgcctttctcccttcgggaagcgtggcgctttctcatagctcacgctgtaggtatctcagttcggtgtaggtcgttcgctccaagctgggctgtgtgcacgaaccccccgttcagcccgaccgctgcgccttatccggtaactatcgtcttgagtccaacccggtaagacacgacttatcgccactggcagcagccactggtaacaggattagcagagcgaggtatgtaggcggtgctacagagttcttgaagtggtggcctaactacggctacactagaaggacagtatttggtatctgcgctctgctgaagccagttaccttcggaaaaagagttggtagctcttgatccggcaaacaaaccaccgctggtagcggtggtttttttgtttgcaagcagcagattacgcgcagaaaaaaaggatctcaagaagatcctttgatcttttctacggggtctgacgctcagtggaacgaaaactcacgttaagggattttggtcatgcattctaggtactaaaacaattcatccagtaaaatataatattttattttctcccaatcaggcttgatccccagtaagtcaaaaaatagctcgacatactgttcttccccgatatcctccctgatcgaccggacgcagaaggcaatgtcataccacttgtccgccctgccgcttctcccaagatcaataaagccacttactttgccatctttcacaaagatgttgctgtctcccaggtcgccgtgggaaaagacaagttcctcttcgggcttttccgtctttaaaaaatcatacagctcgcgcggatctttaaatggagtgtcttcttcccagttttcgcaatccacatcggccagatcgttattcagtaagtaatccaattcggctaagcggctgtctaagctattcgtatagggacaatccgatatgtcgatggagtgaaagagcctgatgcactccgcatacagctcgataatcttttcagggctttgttcatcttcatactcttccgagcaaaggacgccatcggcctcactcatgagcagattgctccagccatcatgccgttcaaagtgcaggacctttggaacaggcagctttccttccagccatagcatcatgtccttttcccgttccacatcataggtggtccctttataccggctgtccgtcatttttaaatataggttttcattttctcccaccagcttatataccttagcaggagacattccttccgtatcttttacgcagcggtatttttcgatcagttttttcaattccggtgatattctcattttagccatttattatttccttcctcttttctacagtatttaaagataccccaagaagctaattataacaagacgaactccaattcactgttccttgcattctaaaaccttaaataccagaaaacagctttttcaaagttgttttcaaagttggcgtataacatagtatcgacggagccgattttgaaaccgcggtgatcacaggcagcaacgctctgtcatcgttacaatcaacatgctaccctccgcgagatcatccgtgtttcaaacccggcagcttagttgccgttcttccgaatagcatcggtaacatgagcaaagtctgccgccttacaacggctctcccgctgacgccgtcccggactgatgggctgcctgtatcgagtggtgattttgtgccgagctgccggtcggggagctgttggctggctggtggcaggatatattgtggtgtaaacaaattgacgcttagacaacttaataacacattgcggacgtttttaatgtactgaattaacgccgaatta

SEQ ID NO: 31 - DNA, 9469 bp, Artificial
  plasmid VC-MME354-1QCZ
  5'UTR (2130)..(2294)
  transit_peptide (2295)..(2402)
  CDS (2295)..(2402)
  transit_peptide (2480)..(2548)
  CDS (2480)..(2548)
  CDS (2549)..(2566): adapter
agctttgggcggatcctctagaggacaatcagtaaattgaacggagaatattattcataaaaatacgatagtaacgggtgatatattcattagaatgaaccgaaaccggcggtaaggatctgagctacacatgctcaggttttttacaacgtgcacaacagaattgaaagcaaatatcatgcgatcataggcgtctcgcatatctcattaaagcagggcatgccggtcgagtcaaatctcggtgacgggcaggaccggacggggcggtaccggcaggctgaagtccagctgccagaaacccacgtcatgccagttcccgtgcttgaagccggccgcccgcagcatgccgcggggggcatatccgagcgcctcgtgcatgcgcacgctcgggtcgttgggcagcccgatgacagcgaccacgctcttgaagccctgtgcctccagggacttcagcaggtgggtgtagagcgtggagcccagtcccgtccgctggtggcggggggagacgtacacggtcgactcggccgtccagtcgtaggcgttgcgtgccttccaggggcccgcgtaggcgatgccggcgacctcgccgtccacctcggcgacgagccagggatagcgctcccgcagacggacgaggtcgtccgtccactcctgcggttcctgcggctcggtacggaagttgaccgtgcttgtctcgatgtagtggttgacgatggtgcagaccgccggcatgtccgcctcggtggcacggcggatgtcggccgggcgtcgttctgggctcatggtagactcgacggatccacgtgtggaagatatgaatttttttgagaaactagataagattaatgaatatcggtgttttggttttttcttgtggccgtctttgtttatattgagatttttcaaatcagtgcgcaagacgtgacgtaagtatccgagtcagtttttatttttctactaatttggtcgaatctagattcgacggtatcgataagctcgcggatccctgaaagcgacgttggatgttaacatctacaaattgccttttcttatcgaccatgtacgtaagcgcttacgtttttggtggacccttgaggaaactggtagctgttgtgggcctgtggtctcaagatggatcattaatttccaccttcacctacgatggggggcatcgcaccggtgagtaatattgtacggctaagagcgaatttggcctgtaggatccctgaaagcgacgttggatgttaacatctacaaattgccttttcttatcgaccatgtacgtaagcgcttacgtttttggtggacccttgaggaaactggtagctgttgtgggcctgtggtctcaagatggatcattaatttccaccttcacctacgatggggggcatcgcaccggtgagtaatattgtacggctaagagcgaatttggcctgtaggatccctgaaagcgacgttggatgttaacatctacaaattgccttttcttatcgaccatgtacgtaagcgcttacgtttttggtggacccttgaggaaactggtagctgttgtgggcctgtggtctcaagatggatcattaatttccaccttcacctacgatggggggcatcgcaccggtgagtaatattgtacggctaagagcgaatttggcctgtaggatccgcgagctggtcaatcccattgcttttgaagcagctcaacattgatctctttctcgatcgagggagatttttcaaatcagtgcgcaagacgtgacgtaagtatccgagtcagtttttatttttctactaatttggtcgtttatttcggcgtgtaggacatggcaaccgggcctgaatttcgcgggtattctgtttctattccaactttttcttgatccgcagccattaacgacttttgaatagatacgctgacacgccaagcctcgctagtcaaaagtgtaccaaacaacgctttacagcaagaacggaatgcgcgtgacgctcgcggtgacgccatttcgccttttcagaaatggataaatagccttgcttcctattatatcttcccaaattaccaatacattacactagcatctgaatttcataaccaatctcgatacaccaaatcgaagatctccctggaattcgcataaacttatcttcatagttgccactccaatttgctccttgaatctcctccacccaatacataatccactcctccatcacccacttcactactaaatcaaacttaactctgtttttctctctcctcctttcatttcttattcttccaatcatcgtactccgccatgaccaccgctgtcaccgccgctgtttctttcccctctaccaaaaccacctctctctccgcccgaagctcctccgtcatttcccctgacaaaatcagctacaaaaaggtgattcccaatttcactgtgttttttattaataatttgttattttgatgatgagatgattaatttgggtgctgcaggttcctttgtactacaggaatgtatctgcaactgggaaaatgggacccatcagggcccagatcgcctctgaattccagctgaccaccatggcaattcccggggatcagctcgaatttccccgatcgttcaaacatttggcaataaagtttcttaagattgaatcctgttgccggtcttgcgatgattatcatataatttctgttgaattacgttaagcatgtaataattaacatgtaatgcatgacgttatttatgagatgggtttttatgattagagtcccgcaattatacatttaatacgcgatagaaaacaaaatatagcgcgcaaactaggataaattatcgcgcgcggtgtcatctatgttactagatcgggaattggcatgcaagcttggcactggccgtcgttttacaacgtcgtgactgggaaaaccctggcgttacccaacttaatcgccttgcagcacatccccctttcgccagctggcgtaatagcgaagaggcccgcaccgatcgcccttcccaacagttgcgcagcctgaatggcgaatgctagagcagcttgagcttggatcagattgtcgtttcccgccttcagtttaaactatcagtgtttgacaggatatattggcgggtaaacctaagagaaaagagcgtttattagaataatcggatatttaaaagggcgtgaaaaggtttatccgttcgtccatttgtatgtgcatgccaaccacagggttcccctcgggatcaaagtactttgatccaacccctccgctgctatagtgcagtcggcttctgacgttcagtgcagccgtcttctgaaaacgacatgtcgcacaagtcctaagttacgcgacaggctgccgccctgcccttttcctggcgttttcttgtcgcgtgttttagtcgcataaagtagaatacttgcgactagaaccggagacattacgccatgaacaagagcgccgccgctggcctgctgggctatgcccgcgtcagcaccgacgaccaggacttgaccaaccaacgggccgaactgcacgcggccggctgcaccaagctgttttccgagaagatcaccggcaccaggcgcgaccgcccggagctggccaggatgcttgaccacctacgccctggcgacgttgtgacagtgaccaggctagaccgcctggcccgcagcacccgcgacctactggacattgccgagcgcatccaggaggccggcgcgggcctgcgtagcctggcagagccgtgggccgacaccaccacgccggccggccgcatggtgttgaccgtgttcgccggcattgccgagttcgagcgttccctaatcatcgaccgcacccggagcgggcgcgaggccgccaaggcccgaggcgtgaagtttggcccccgccctaccctcaccccggcacagatcgcgcacgcccgcgagctgatcgaccaggaaggccgcaccgtgaaagaggcggctgcactgcttggcgtgcatcgctcgaccctgtaccgcgcacttgagcgcagcgaggaagtgacgcccaccgaggccaggcggcgcggtgccttccgtgaggacgcattgaccgaggccgacgccctggcggccgccgagaatgaacgccaagaggaacaagcatgaaaccgcaccaggacggccaggacgaaccgtttttcattaccgaagagatcgaggcggagatgatcgcggccgggtacgtgttcgagccgcccgcgcacgtctcaaccgtgcggctgcatgaaatcctggccggtttgtctgatgccaagctggcggcctggccggccagcttggccgctgaagaaaccgagcgccgccgtctaaaaaggtgatgtgtatttgagtaaaacagcttgcgtcatgcggtcgctgcgtatatgatgcgatgagtaaataaacaaatacgcaaggggaacgcatgaaggttatcgctgtacttaaccagaaaggcgggtcaggcaagacgaccatcgcaacccatctagcccgcgccctgcaactcgccggggccgatgttctgttagtcgattccgatccccagggcagtgcccgcgattgggcggccgtgcgggaagatcaaccgctaaccgttgtcggcatcgaccgcccgacgattgaccgcgacgtgaaggccatcggccggcgcgacttcgtagtgatcgacggagcgccccaggcggcggacttggctgtgtccgcgatcaaggcagccgacttcgtgctgattccggtgcagccaagcccttacgacatatgggccaccgccgacctggtggagctggttaagcagcgcattgaggtcacggatggaaggctacaagcggcctttgtcgtgtcgcgggcgatcaaaggcacgcgcatcggcggtgaggttgccgaggcgctggccgggtacgagctgcccattcttgagtcccgtatcacgcagcgcgtgagctacccaggcactgccgccgccggcacaaccgttcttgaatcagaacccgagggcgacgctgcccgcgaggtccaggcgctggccgctgaaattaaatcaaaactcatttgagttaatgaggtaaagagaaaatgagcaaaagcacaaacacgctaagtgccggccgtccgagcgcacgcagcagcaaggctgcaacgttggccagcctggcagacacgccagccatgaagcgggtcaactttcagttgccggcggaggatcacaccaagctgaagatgtacgcggtacgccaaggcaagaccattaccgagctgctatctgaatacatcgcgcagctaccagagtaaatgagcaaatgaataaatgagtagatgaattttagcggctaaaggaggcggcatggaaaatcaagaacaaccaggcaccgacgccgtggaatgccccatgtgtggaggaacgggcggttggccaggcgtaagcggctgggttgcctgccggccctgcaatggcactggaacccccaagcccgaggaatcggcgtgagcggtcgcaaaccatccggcccggtacaaatcggcgcggcgctgggtgatgacctggtggagaagttgaaggccgcgcaggccgcccagcggcaacgcatcgaggcagaagcacgccccggtgaatcgtggcaagcggccgctgatcgaatccgcaaagaatcccggcaaccgccggcagccggtgcgccgtcgattaggaagccgcccaagggcgacgagcaaccagattttttcgttccgatgctctatgacgtgggcacccgcgatagtcgcagcatcatggacgtggccgttttccgtctgtcgaagcgtgaccgacgagctggcgaggtgatccgctacgagcttccagacgggcacgtagaggtttccgcagggccggccggcatggccagtgtgtgggattacgacctggtactgatggcggtttcccatctaaccgaatccatgaaccgataccgggaagggaagggagacaagcccggccgcgtgttccgtccacacgttgcggacgtactcaagttctgccggcgagccgatggcggaaagcagaaagacgacctggtagaaacctgcattcggttaaacaccacgcacgttgccatgcagcgtacgaagaaggccaagaacggccgcctggtgacggtatccgagggtgaagccttgattagccgctacaagatcgtaaagagcgaaaccgggcggccggagtacatcgagatcgagctagctgattggatgtaccgcgagatcacagaaggcaagaacccggacgtgctgacggttcaccccgattactttttgatcgatcccggcatcggccgttttctctaccgcctggcacgccgcgccgcaggcaaggcagaagccagatggttgttcaagacgatctacgaacgcagtggcagcgccggagagttcaagaagttctgtttcaccgtgcgcaagctgatcgggtcaaatgacctgccggagtacgatttgaaggaggaggcggggcaggctggcccgatcctagtcatgcgctaccgcaacctgatcgagggcgaagcatccgccggttcctaatgtacggagcagatgctagggcaaattgccctagcaggggaaaaaggtcgaaaaggtctctttcctgtggatagcacgtacattgggaacccaaagccgtacattgggaaccggaacccgtacattgggaacccaaagccgtacattgggaaccggtcacacatgtaagtgactgatataaaagagaaaaaaggcgatttttccgcctaaaactctttaaaacttattaaaactcttaaaacccgcctggcctgtgcataactgtctggccagcgcacagccgaagagctgcaaaaagcgcctacccttcggtcgctgcgctccctacgccccgccgcttcgcgtcggcctatcgcggccgctggccgctcaaaaatggctggcctacggccaggcaatctaccagggcgcggacaagccgcgccgtcgccactcgaccgccggcgcccacatcaaggcaccctgcctcgcgcgtttcggtgatgacggtgaaaacctctgacacatgcagctcccggagacggtcacagcttgtctgtaagcggatgccgggagcagacaagcccgtcagggcgcgtcagcgggtgttggcgggtgtcggggcgcagccatgacccagtcacgtagcgatagcggagtgtatactggcttaactatgcggcatcagagcagattgtactgagagtgcaccatatgcggtgtgaaataccgcacagatgcgtaaggagaaaataccgcatcaggcgctcttccgcttcctcgctcactgactcgctgcgctcggtcgttcggctgcggcgagcggtatcagctcactcaaaggcggtaatacggttatccacagaatcaggggataacgcaggaaagaacatgtgagcaaaaggccagcaaaaggccaggaaccgtaaaaaggccgcgttgctggcgtttttccataggctccgcccccctgacgagcatcacaaaaatcgacgctcaagtcagaggtggcgaaacccgacaggactataaagataccaggcgtttccccctggaagctccctcgtgcgctctcctgttccgaccctgccgcttaccggatacctgtccgcctttctcccttcgggaagcgtggcgctttctcatagctcacgctgtaggtatctcagttcggtgtaggtcgttcgctccaagctgggctgtgtgcacgaaccccccgttcagcccgaccgctgcgccttatccggtaactatcgtcttgagtccaacccggtaagacacgacttatcgccactggcagcagccactggtaacaggattagcagagcgaggtatgtaggcggtgctacagagttcttgaagtggtggcctaactacggctacactagaaggacagtatttggtatctgcgctctgctgaagccagttaccttcggaaaaagagttggtagctcttgatccggcaaacaaaccaccgctggtagcggtggtttttttgtttgcaagcagcagattacgcgcagaaaaaaaggatctcaagaagatcctttgatcttttctacggggtctgacgctcagtggaacgaaaactcacgttaagggattttggtcatgcattctaggtactaaaacaattcatccagtaaaatataatattttattttctcccaatcaggcttgatccccagtaagtcaaaaaatagctcgacatactgttcttccccgatatcctccctgatcgaccggacgcagaaggcaatgtcataccacttgtccgccctgccgcttctcccaagatcaataaagccacttactttgccatctttcacaaagatgttgctgtctcccaggtcgccgtgggaaaagacaagttcctcttcgggcttttccgtctttaaaaaatcatacagctcgcgcggatctttaaatggagtgtcttcttcccagttttcgcaatccacatcggccagatcgttattcagtaagtaatccaattcggctaagcggctgtctaagctattcgtatagggacaatccgatatgtcgatggagtgaaagagcctgatgcactccgcatacagctcgataatcttttcagggctttgttcatcttcatactcttccgagcaaaggacgccatcggcctcactcatgagcagattgctccagccatcatgccgttcaaagtgcaggacctttggaacaggcagctttccttccagccatagcatcatgtccttttcccgttccacatcataggtggtccctttataccggctgtccgtcatttttaaatataggttttcattttctcccaccagcttatataccttagcaggagacattccttccgtatcttttacgcagcggtatttttcgatcagttttttcaattccggtgatattctcattttagccatttattatttccttcctcttttctacagtatttaaagataccccaagaagctaattataacaagacgaactccaattcactgttccttgcattctaaaaccttaaataccagaaaacagctttttcaaagttgttttcaaagttggcgtataacatagtatcgacggagccgattttgaaaccgcggtgatcacaggcagcaacgctctgtcatcgttacaatcaacatgctaccctccgcgagatcatccgtgtttcaaacccggcagcttagttgccgttcttccgaatagcatcggtaacatgagcaaagtctgccgccttacaacggctctcccgctgacgccgtcccggactgatgggctgcctgtatcgagtggtgattttgtgccgagctgccggtcggggagctgttggctggctggtggcaggatatattgtggtgtaaacaaattgacgcttagacaacttaataacacattgcggacgtttttaatgtactgaattaacgccgaatta

SEQ ID NO: 32 - protein, 65 aa, Artificial
  Synthetic Construct
MTTAVTAAVSFPSTKTTSLSARSSSVISPDKISYKKVPLYYRNVSATGKMGPIRAQIASEFQLTT

SEQ ID NO: 33 - DNA, 9129 bp, Artificial
  plasmid VC-MME356-1QCZ
  transit_peptide (2128)..(2208)
  CDS (2128)..(2208)
  CDS (2209)..(2226): adapter
agcttggacaatcagtaaattgaacggagaatattattcataaaaatacgatagtaacgggtgatatattcattagaatgaaccgaaaccggcggtaaggatctgagctacacatgctcaggttttttacaacgtgcacaacagaattgaaagcaaatatcatgcgatcataggcgtctcgcatatctcattaaagcagggcatgccggtcgagtcaaatctcggtgacgggcaggaccggacggggcggtaccggcaggctgaagtccagctgccagaaacccacgtcatgccagttcccgtgcttgaagccggccgcccgcagcatgccgcggggggcatatccgagcgcctcgtgcatgcgcacgctcgggtcgttgggcagcccgatgacagcgaccacgctcttgaagccctgtgcctccagggacttcagcaggtgggtgtagagcgtggagcccagtcccgtccgctggtggcggggggagacgtacacggtcgactcggccgtccagtcgtaggcgttgcgtgccttccaggggcccgcgtaggcgatgccggcgacctcgccgtccacctcggcgacgagccagggatagcgctcccgcagacggacgaggtcgtccgtccactcctgcggttcctgcggctcggtacggaagttgaccgtgcttgtctcgatgtagtggttgacgatggtgcagaccgccggcatgtccgcctcggtggcacggcggatgtcggccgggcgtcgttctgggctcatggtagactcgacggatccacgtgtggaagatatgaatttttttgagaaactagataagattaatgaatatcggtgttttggttttttcttgtggccgtctttgtttatattgagatttttcaaatcagtgcgcaagacgtgacgtaagtatccgagtcagtttttatttttctactaatttggtcgaagctttgggcggatcctctagattcgacggtatcgataagctcgcggatccctgaaagcgacgttggatgttaacatctacaaattgccttttcttatcgaccatgtacgtaagcgcttacgtttttggtggacccttgaggaaactggtagctgttgtgggcctgtggtctcaagatggatcattaatttccaccttcacctacgatggggggcatcgcaccggtgagtaatattgtacggctaagagcgaatttggcctgtaggatccctgaaagcgacgttggatgttaacatctacaaattgccttttcttatcgaccatgtacgtaagcgcttacgtttttggtggacccttgaggaaactggtagctgttgtgggcctgtggtctcaagatggatcattaatttccaccttcacctacgatggggggcatcgcaccggtgagtaatattgtacggctaagagcgaatttggcctgtaggatccctgaaagcgacgttggatgttaacatctacaaattgccttttcttatcgaccatgtacgtaagcgcttacgtttttggtggacccttgaggaaactggtagctgttgtgggcctgtggtctcaagatggatcattaatttccaccttcacctacgatggggggcatcgcaccggtgagtaatattgtacggctaagagcgaatttggcctgtaggatccgcgagctggtcaatcccattgcttttgaagcagctcaacattgatctctttctcgatcgagggagatttttcaaatcagtgcgcaagacgtgacgtaagtatccgagtcagtttttatttttctactaatttggtcgtttatttcggcgtgtaggacatggcaaccgggcctgaatttcgcgggtattctgtttctattccaactttttcttgatccgcagccattaacgacttttgaatagatacgctgacacgccaagcctcgctagtcaaaagtgtaccaaacaacgctttacagcaagaacggaatgcgcgtgacgctcgcggtgacgccatttcgccttttcagaaatggataaatagccttgcttcctattatatcttcccaaattaccaatacattacactagcatctgaatttcataaccaatctcgatacaccaaatcgaagatctccctggaattcatgcagaggtttttctccgccagatcgattctcggttacgccgtcaagacgcggaggaggtctttctcttctcgttcttcggaattccagctgaccaccatggcaattcccggggatcagctcgaatttccccgatcgttcaaacatttggcaataaagtttcttaagattgaatcctgttgccggtcttgcgatgattatcatataatttctgttgaattacgttaagcatgtaataattaacatgtaatgcatgacgttatttatgagatgggtttttatgattagagtcccgcaattatacatttaatacgcgatagaaaacaaaatatagcgcgcaaactaggataaattatcgcgcgcggtgtcatctatgttactagatcgggaattggcatgcaagcttggcactggccgtcgttttacaacgtcgtgactgggaaaaccctggcgttacccaacttaatcgccttgcagcacatccccctttcgccagctggcgtaatagcgaagaggcccgcaccgatcgcccttcccaacagttgcgcagcctgaatggcgaatgctagagcagcttgagcttggatcagattgtcgtttcccgccttcagtttaaactatcagtgtttgacaggatatattggcgggtaaacctaagagaaaagagcgtttattagaataatcggatatttaaaagggcgtgaaaaggtttatccgttcgtccatttgtatgtgcatgccaaccacagggttcccctcgggatcaaagtactttgatccaacccctccgctgctatagtgcagtcggcttctgacgttcagtgcagccgtcttctgaaaacgacatgtcgcacaagtcctaagttacgcgacaggctgccgccctgcccttttcctggcgttttcttgtcgcgtgttttagtcgcataaagtagaatacttgcgactagaaccggagacattacgccatgaacaagagcgccgccgctggcctgctgggctatgcccgcgtcagcaccgacgaccaggacttgaccaaccaacgggccgaactgcacgcggccggctgcaccaagctgttttccgagaagatcaccggcaccaggcgcgaccgcccggagctggccaggatgcttgaccacctacgccctggcgacgttgtgacagtgaccaggctagaccgcctggcccgcagcacccgcgacctactggacattgccgagcgcatccaggaggccggcgcgggcctgcgtagcctggcagagccgtgggccgacaccaccacgccggccggccgcatggtgttgaccgtgttcgccggcattgccgagttcgagcgttccctaatcatcgaccgcacccggagcgggcgcgaggccgccaaggcccgaggcgtgaagtttggcccccgccctaccctcaccccggcacagatcgcgcacgcccgcgagctgatcgaccaggaaggccgcaccgtgaaagaggcggctgcactgcttggcgtgcatcgctcgaccctgtaccgcgcacttgagcgcagcgaggaagtgacgcccaccgaggccaggcggcgcggtgccttccgtgaggacgcattgaccgaggccgacgccctggcggccgccgagaatgaacgccaagaggaacaagcatgaaaccgcaccaggacggccaggacgaaccgtttttcattaccgaagagatcgaggcggagatgatcgcggccgggtacgtgttcgagccgcccgcgcacgtctcaaccgtgcggctgcatgaaatcctggccggtttgtctgatgccaagctggcggcctggccggccagcttggccgctgaagaaaccgagcgccgccgtctaaaaaggtgatgtgtatttgagtaaaacagcttgcgtcatgcggtcgctgcgtatatgatgcgatgagtaaataaacaaatacgcaaggggaacgcatgaaggttatcgctgtacttaaccagaaaggcgggtcaggcaagacgaccatcgcaacccatctagcccgcgccctgcaactcgccggggccgatgttctgttagtcgattccgatccccagggcagtgcccgcgattgggcggccgtgcgggaagatcaaccgctaaccgttgtcggcatcgaccgcccgacgattgaccgcgacgtgaaggccatcggccggcgcgacttcgtagtgatcgacggagcgccccaggcggcggacttggctgtgtccgcgatcaaggcagccgacttcgtgctgattccggtgcagccaagcccttacgacatatgggccaccgccgacctggtggagctggttaagcagcgcattgaggtcacggatggaaggctacaagcggcctttgtcgtgtcgcgggcgatcaaaggcacgcgcatcggcggtgaggttgccgaggcgctggccgggtacgagctgcccattcttgagtcccgtatcacgcagcgcgtgagctacccaggcactgccgccgccggcacaaccgttcttgaatcagaacccgagggcgacgctgcccgcgaggtccaggcgctggccgctgaaattaaatcaaaactcatttgagttaatgaggtaaagagaaaatgagcaaaagcacaaacacgctaagtgccggccgtccgagcgcacgcagcagcaaggctgcaacgttggccagcctggcagacacgccagccatgaagcgggtcaactttcagttgccggcggaggatcacaccaagctgaagatgtacgcggtacgccaaggcaagaccattaccgagctgctatctgaatacatcgcgcagctaccagagtaaatgagcaaatgaataaatgagtagatgaattttagcggctaaaggaggcggcatggaaaatcaagaacaaccaggcaccgacgccgtggaatgccccatgtgtggaggaacgggcggttggccaggcgtaagcggctgggttgcctgccggccctgcaatggcactggaacccccaagcccgaggaatcggcgtgagcggtcgcaaaccatccggcccggtacaaatcggcgcggcgctgggtgatgacctggtggagaagttgaaggccgcgcaggccgcccagcggcaacgcatcgaggcagaagcacgccccggtgaatcgtggcaagcggccgctgatcgaatccgcaaagaatcccggcaaccgccggcagccggtgcgccgtcgattaggaagccgcccaagggcgacgagcaaccagattttttcgttccgatgctctatgacgtgggcacccgcgatagtcgcagcatcatggacgtggccgttttccgtctgtcgaagcgtgaccgacgagctggcgaggtgatccgctacgagcttccagacgggcacgtagaggtttccgcagggccggccggcatggccagtgtgtgggattacgacctggtactgatggcggtttcccatctaaccgaatccatgaaccgataccgggaagggaagggagacaagcccggccgcgtgttccgtccacacgttgcggacgtactcaagttctgccggcgagccgatggcggaaagcagaaagacgacctggtagaaacctgcattcggttaaacaccacgcacgttgccatgcagcgtacgaagaaggccaagaacggccgcctggtgacggtatccgagggtgaagccttgattagccgctacaagatcgtaaagagcgaaaccgggcggccggagtacatcgagatcgagctagctgattggatgtaccgcgagatcacagaaggcaagaacccggacgtgctgacggttcaccccgattactttttgatcgatcccggcatcggccgttttctctaccgcctggcacgccgcgccgcaggcaaggcagaagccagatggttgttcaagacgatctacgaacgcagtggcagcgccggagagttcaagaagttctgtttcaccgtgcgcaagctgatcgggtcaaatgacctgccggagtacgatttgaaggaggaggcggggcaggctggcccgatcctagtcatgcgctaccgcaacctgatcgagggcgaagcatccgccggttcctaatgtacggagcagatgctagggcaaattgccctagcaggggaaaaaggtcgaaaaggtctctttcctgtggatagcacgtacattgggaacccaaagccgtacattgggaaccggaacccgtacattgggaacccaaagccgtacattgggaaccggtcacacatgtaagtgactgatataaaagagaaaaaaggcgatttttccgcctaaaactctttaaaacttattaaaactcttaaaacccgcctggcctgtgcataactgtctggccagcgcacagccgaagagctgcaaaaagcgcctacccttcggtcgctgcgctccctacgccccgccgcttcgcgtcggcctatcgcggccgctggccgctcaaaaatggctggcctacggccaggcaatctaccagggcgcggacaagccgcgccgtcgccactcgaccgccggcgcccacatcaaggcaccctgcctcgcgcgtttcggtgatgacggtgaaaacctctgacacatgcagctcccggagacggtcacagcttgtctgtaagcggatgccgggagcagacaagcccgtcagggcgcgtcagcgggtgttggcgggtgtcggggcgcagccatgacccagtcacgtagcgatagcggagtgtatactggcttaactatgcggcatcagagcagattgtactgagagtgcaccatatgcggtgtgaaataccgcacagatgcgtaaggagaaaataccgcatcaggcgctcttccgcttcctcgctcactgactcgctgcgctcggtcgttcggctgcggcgagcggtatcagctcactcaaaggcggtaatacggttatccacagaatcaggggataacgcaggaaagaacatgtgagcaaaaggccagcaaaaggccaggaaccgtaaaaaggccgcgttgctggcgtttttccataggctccgcccccctgacgagcatcacaaaaatcgacgctcaagtcagaggtggcgaaacccgacaggactataaagataccaggcgtttccccctggaagctccctcgtgcgctctcctgttccgaccctgccgcttaccggatacctgtccgcctttctcccttcgggaagcgtggcgctttctcatagctcacgctgtaggtatctcagttcggtgtaggtcgttcgctccaagctgggctgtgtgcacgaaccccccgttcagcccgaccgctgcgccttatccggtaactatcgtcttgagtccaacccggtaagacacgacttatcgccactggcagcagccactggtaacaggattagcagagcgaggtatgtaggcggtgctacagagttcttgaagtggtggcctaactacggctacactagaaggacagtatttggtatctgcgctctgctgaagccagttaccttcggaaaaagagttggtagctcttgatccggcaaacaaaccaccgctggtagcggtggtttttttgtttgcaagcagcagattacgcgcagaaaaaaaggatctcaagaagatcctttgatcttttctacggggtctgacgctcagtggaacgaaaactcacgttaagggattttggtcatgcattctaggtactaaaacaattcatccagtaaaatataatattttattttctcccaatcaggcttgatccccagtaagtcaaaaaatagctcgacatactgttcttccccgatatcctccctgatcgaccggacgcagaaggcaatgtcataccacttgtccgccctgccgcttctcccaagatcaataaagccacttactttgccatctttcacaaagatgttgctgtctcccaggtcgccgtgggaaaagacaagttcctcttcgggcttttccgtctttaaaaaatcatacagctcgcgcggatctttaaatggagtgtcttcttcccagttttcgcaatccacatcggccagatcgttattcagtaagtaatccaattcggctaagcggctgtctaagctattcgtatagggacaatccgatatgtcgatggagtgaaagagcctgatgcactccgcatacagctcgataatcttttcagggctttgttcatcttcatactcttccgagcaaaggacgccatcggcctcactcatgagcagattgctccagccatcatgccgttcaaagtgcaggacctttggaacaggcagctttccttccagccatagcatcatgtccttttcccgttccacatcataggtggtccctttataccggctgtccgtcatttttaaatataggttttcattttctcccaccagcttatataccttagcaggagacattccttccgtatcttttacgcagcggtatttttcgatcagttttttcaattccggtgatattctcattttagccatttattatttccttcctcttttctacagtatttaaagataccccaagaagctaattataacaagacgaactccaattcactgttccttgcattctaaaaccttaaataccagaaaacagctttttcaaagttgttttcaaagttggcgtataacatagtatcgacggagccgattttgaaaccgcggtgatcacaggcagcaacgctctgtcatcgttacaatcaacatgctaccctccgcgagatcatccgtgtttcaaacccggcagcttagttgccgttcttccgaatagcatcggtaacatgagcaaagtctgccgccttacaacggctctcccgctgacgccgtcccggactgatgggctgcctgtatcgagtggtgattttgtgccgagctgccggtcggggagctgttggctggctggtggcaggatatattgtggtgtaaacaaattgacgcttagacaacttaataacacattgcggacgtttttaatgtactgaattaacgccgaatta

SEQ ID NO: 34 - protein, 33 aa, Artificial
  Synthetic Construct
MQRFFSARSILGYAVKTRRRSFSSRSSEFQLTT

SEQ ID NO: 35 - DNA, 9045 bp, Artificial
  plasmid VC-MME220-1qcz
agcttggacaatcagtaaattgaacggagaatattattcataaaaatacgatagtaacgggtgatatattcattagaatgaaccgaaaccggcggtaaggatctgagctacacatgctcaggttttttacaacgtgcacaacagaattgaaagcaaatatcatgcgatcataggcgtctcgcatatctcattaaagcagggcatgccggtcgagtcaaatctcggtgacgggcaggaccggacggggcggtaccggcaggctgaagtccagctgccagaaacccacgtcatgccagttcccgtgcttgaagccggccgcccgcagcatgccgcggggggcatatccgagcgcctcgtgcatgcgcacgctcgggtcgttgggcagcccgatgacagcgaccacgctcttgaagccctgtgcctccagggacttcagcaggtgggtgtagagcgtggagcccagtcccgtccgctggtggcggggggagacgtacacggtcgactcggccgtccagtcgtaggcgttgcgtgccttccaggggcccgcgtaggcgatgccggcgacctcgccgtccacctcggcgacgagccagggatagcgctcccgcagacggacgaggtcgtccgtccactcctgcggttcctgcggctcggtacggaagttgaccgtgcttgtctcgatgtagtggttgacgatggtgcagaccgccggcatgtccgcctcggtggcacggcggatgtcggccgggcgtcgttctgggctcatggtagactcgacggatccacgtgtggaagatatgaatttttttgagaaactagataagattaatgaatatcggtgttttggttttttcttgtggccgtctttgtttatattgagatttttcaaatcagtgcgcaagacgtgacgtaagtatccgagtcagtttttatttttctactaatttggtcgaagctttgggcggatcctctagattcgacggtatcgataagctcgcggatccctgaaagcgacgttggatgttaacatctacaaattgccttttcttatcgaccatgtacgtaagcgcttacgtttttggtggacccttgaggaaactggtagctgttgtgggcctgtggtctcaagatggatcattaatttccaccttcacctacgatggggggcatcgcaccggtgagtaatattgtacggctaagagcgaatttggcctgtaggatccctgaaagcgacgttggatgttaacatctacaaattgccttttcttatcgaccatgtacgtaagcgcttacgtttttggtggacccttgaggaaactggtagctgttgtgggcctgtggtctcaagatggatcattaatttccaccttcacctacgatggggggcatcgcaccggtgagtaatattgtacggctaagagcgaatttggcctgtaggatccctgaaagcgacgttggatgttaacatctacaaattgccttttcttatcgaccatgtacgtaagcgcttacgtttttggtggacccttgaggaaactggtagctgttgtgggcctgtggtctcaagatggatcattaatttccaccttcacctacgatggggggcatcgcaccggtgagtaatattgtacggctaagagcgaatttggcctgtaggatccgcgagctggtcaatcccattgcttttgaagcagctcaacattgatctctttctcgatcgagggagatttttcaaatcagtgcgcaagacgtgacgtaagtatccgagtcagtttttatttttctactaatttggtcgtttatttcggcgtgtaggacatggcaaccgggcctgaatttcgcgggtattctgtttctattccaactttttcttgatccgcagccattaacgacttttgaatagatacgctgacacgccaagcctcgctagtcaaaagtgtaccaaacaacgctttacagcaagaacggaatgcgcgtgacgctcgcggtgacgccatttcgccttttcagaaatggataaatagccttgcttcctattatatcttcccaaattaccaatacattacactagcatctgaatttcataaccaatctcgatacaccaaatcgaagatctcccgggttgctcttccatggcaatgattaattaacgaagagcaagagctcgaatttccccgatcgttcaaacatttggcaataaagtttcttaagattgaatcctgttgccggtcttgcgatgattatcatataatttctgttgaattacgttaagcatgtaataattaacatgtaatgcatgacgttatttatgagatgggtttttatgattagagtcccgcaattatacatttaatacgcgatagaaaacaaaatatagcgcgcaaactaggataaattatcgcgcgcggtgtcatctatgttactagatcgggaattggcatgcaagcttggcactggccgtcgttttacaacgtcgtgactgggaaaaccctggcgttacccaacttaatcgccttgcagcacatccccctttcgccagctggcgtaatagcgaagaggcccgcaccgatcgcccttcccaacagttgcgcagcctgaatggcgaatgctagagcagcttgagcttggatcagattgtcgtttcccgccttcagtttaaactatcagtgtttgacaggatatattggcgggtaaacctaagagaaaagagcgtttattagaataatcggatatttaaaagggcgtgaaaaggtttatccgttcgtccatttgtatgtgcatgccaaccacagggttcccctcgggatcaaagtactttgatccaacccctccgctgctatagtgcagtcggcttctgacgttcagtgcagccgtcttctgaaaacgacatgtcgcacaagtcctaagttacgcgacaggctgccgccctgcccttttcctggcgttttcttgtcgcgtgttttagtcgcataaagtagaatacttgcgactagaaccggagacattacgccatgaacaagagcgccgccgctggcctgctgggctatgcccgcgtcagcaccgacgaccaggacttgaccaaccaacgggccgaactgcacgcggccggctgcaccaagctgttttccgagaagatcaccggcaccaggcgcgaccgcccggagctggccaggatgcttgaccacctacgccctggcgacgttgtgacagtgaccaggctagaccgcctggcccgcagcacccgcgacctactggacattgccgagcgcatccaggaggccggcgcgggcctgcgtagcctggcagagccgtgggccgacaccaccacgccggccggccgcatggtgttgaccgtgttcgccggcattgccgagttcgagcgttccctaatcatcgaccgcacccggagcgggcgcgaggccgccaaggcccgaggcgtgaagtttggcccccgccctaccctcaccccggcacagatcgcgcacgcccgcgagctgatcgaccaggaaggccgcaccgtgaaagaggcggctgcactgcttggcgtgcatcgctcgaccctgtaccgcgcacttgagcgcagcgaggaagtgacgcccaccgaggccaggcggcgcggtgccttccgtgaggacgcattgaccgaggccgacgccctggcggccgccgagaatgaacgccaagaggaacaagcatgaaaccgcaccaggacggccaggacgaaccgtttttcattaccgaagagatcgaggcggagatgatcgcggccgggtacgtgttcgagccgcccgcgcacgtctcaaccgtgcggctgcatgaaatcctggccggtttgtctgatgccaagctggcggcctggccggccagcttggccgctgaagaaaccgagcgccgccgtctaaaaaggtgatgtgtatttgagtaaaacagcttgcgtcatgcggtcgctgcgtatatgatgcgatgagtaaataaacaaatacgcaaggggaacgcatgaaggttatcgctgtacttaaccagaaaggcgggtcaggcaagacgaccatcgcaacccatctagcccgcgccctgcaactcgccggggccgatgttctgttagtcgattccgatccccagggcagtgcccgcgattgggcggccgtgcgggaagatcaaccgctaaccgttgtcggcatcgaccgcccgacgattgaccgcgacgtgaaggccatcggccggcgcgacttcgtagtgatcgacggagcgccccaggcggcggacttggctgtgtccgcgatcaaggcagccgacttcgtgctgattccggtgcagccaagcccttacgacatatgggccaccgccgacctggtggagctggttaagcagcgcattgaggtcacggatggaaggctacaagcggcctttgtcgtgtcgcgggcgatcaaaggcacgcgcatcggcggtgaggttgccgaggcgctggccgggtacgagctgcccattcttgagtcccgtatcacgcagcgcgtgagctacccaggcactgccgccgccggcacaaccgttcttgaatcagaacccgagggcgacgctgcccgcgaggtccaggcgctggccgctgaaattaaatcaaaactcatttgagttaatgaggtaaagagaaaatgagcaaaagcacaaacacgctaagtgccggccgtccgagcgcacgcagcagcaaggctgcaacgttggccagcctggcagacacgccagccatgaagcgggtcaactttcagttgccggcggaggatcacaccaagctgaagatgtacgcggtacgccaaggcaagaccattaccgagctgctatctgaatacatcgcgcagctaccagagtaaatgagcaaatgaataaatgagtagatgaattttagcggctaaaggaggcggcatggaaaatcaagaacaaccaggcaccgacgccgtggaatgccccatgtgtggaggaacgggcggttggccaggcgtaagcggctgggttgcctgccggccctgcaatggcactggaacccccaagcccgaggaatcggcgtgagcggtcgcaaaccatccggcccggtacaaatcggcgcggcgctgggtgatgacctggtggagaagttgaaggccgcgcaggccgcccagcggcaacgcatcgaggcagaagcacgccccggtgaatcgtggcaagcggccgctgatcgaatccgcaaagaatcccggcaaccgccggcagccggtgcgccgtcgattaggaagccgcccaagggcgacgagcaaccagattttttcgttccgatgctctatgacgtgggcacccgcgatagtcgcagcatcatggacgtggccgttttccgtctgtcgaagcgtgaccgacgagctggcgaggtgatccgctacgagcttccagacgggcacgtagaggtttccgcagggccggccggcatggccagtgtgtgggattacgacctggtactgatggcggtttcccatctaaccgaatccatgaaccgataccgggaagggaagggagacaagcccggccgcgtgttccgtccacacgttgcggacgtactcaagttctgccggcgagccgatggcggaaagcagaaagacgacctggtagaaacctgcattcggttaaacaccacgcacgttgccatgcagcgtacgaagaaggccaagaacggccgcctggtgacggtatccgagggtgaagccttgattagccgctacaagatcgtaaagagcgaaaccgggcggccggagtacatcgagatcgagctagctgattggatgtaccgcgagatcacagaaggcaagaacccggacgtgctgacggttcaccccgattactttttgatcgatcccggcatcggccgttttctctaccgcctggcacgccgcgccgcaggcaaggcagaagccagatggttgttcaagacgatctacgaacgcagtggcagcgccggagagttcaagaagttctgtttcaccgtgcgcaagctgatcgggtcaaatgacctgccggagtacgatttgaaggaggaggcggggcaggctggcccgatcctagtcatgcgctaccgcaacctgatcgagggcgaagcatccgccggttcctaatgtacggagcagatgctagggcaaattgccctagcaggggaaaaaggtcgaaaaggtctctttcctgtggatagcacgtacattgggaacccaaagccgtacattgggaaccggaacccgtacattgggaacccaaagccgtacattgggaaccggtcacacatgtaagtgactgatataaaagagaaaaaaggcgatttttccgcctaaaactctttaaaacttattaaaactcttaaaacccgcctggcctgtgcataactgtctggccagcgcacagccgaagagctgcaaaaagcgcctacccttcggtcgctgcgctccctacgccccgccgcttcgcgtcggcctatcgcggccgctggccgctcaaaaatggctggcctacggccaggcaatctaccagggcgcggacaagccgcgccgtcgccactcgaccgccggcgcccacatcaaggcaccctgcctcgcgcgtttcggtgatgacggtgaaaacctctgacacatgcagctcccggagacggtcacagcttgtctgtaagcggatgccgggagcagacaagcccgtcagggcgcgtcagcgggtgttggcgggtgtcggggcgcagccatgacccagtcacgtagcgatagcggagtgtatactggcttaactatgcggcatcagagcagattgtactgagagtgcaccatatgcggtgtgaaataccgcacagatgcgtaaggagaaaataccgcatcaggcgctcttccgcttcctcgctcactgactcgctgcgctcggtcgttcggctgcggcgagcggtatcagctcactcaaaggcggtaatacggttatccacagaatcaggggataacgcaggaaagaacatgtgagcaaaaggccagcaaaaggccaggaaccgtaaaaaggccgcgttgctggcgtttttccataggctccgcccccctgacgagcatcacaaaaatcgacgctcaagtcagaggtggcgaaacccgacaggactataaagataccaggcgtttccccctggaagctccctcgtgcgctctcctgttccgaccctgccgcttaccggatacctgtccgcctttctcccttcgggaagcgtggcgctttctcatagctcacgctgtaggtatctcagttcggtgtaggtcgttcgctccaagctgggctgtgtgcacgaaccccccgttcagcccgaccgctgcgccttatccggtaactatcgtcttgagtccaacccggtaagacacgacttatcgccactggcagcagccactggtaacaggattagcagagcgaggtatgtaggcggtgctacagagttcttgaagtggtggcctaactacggctacactagaaggacagtatttggtatctgcgctctgctgaagccagttaccttcggaaaaagagttggtagctcttgatccggcaaacaaaccaccgctggtagcggtggtttttttgtttgcaagcagcagattacgcgcagaaaaaaaggatctcaagaagatcctttgatcttttctacggggtctgacgctcagtggaacgaaaactcacgttaagggattttggtcatgcattctaggtactaaaacaattcatccagtaaaatataatattttattttctcccaatcaggcttgatccccagtaagtcaaaaaatagctcgacatactgttcttccccgatatcctccctgatcgaccggacgcagaaggcaatgtcataccacttgtccgccctgccgcttctcccaagatcaataaagccacttactttgccatctttcacaaagatgttgctgtctcccaggtcgccgtgggaaaagacaagttcctcttcgggcttttccgtctttaaaaaatcatacagctcgcgcggatctttaaatggagtgtcttcttcccagttttcgcaatccacatcggccagatcgttattcagtaagtaatccaattcggctaagcggctgtctaagctattcgtatagggacaatccgatatgtcgatggagtgaaagagcctgatgcactccgcatacagctcgataatcttttcagggctttgttcatcttcatactcttccgagcaaaggacgccatcggcctcactcatgagcagattgctccagccatcatgccgttcaaagtgcaggacctttggaacaggcagctttccttccagccatagcatcatgtccttttcccgttccacatcataggtggtccctttataccggctgtccgtcatttttaaatataggttttcattttctcccaccagcttatataccttagcaggagacattccttccgtatcttttacgcagcggtatttttcgatcagttttttcaattccggtgatattctcattttagccatttattatttccttcctcttttctacagtatttaaagataccccaagaagctaattataacaagacgaactccaattcactgttccttgcattctaaaaccttaaataccagaaaacagctttttcaaagttgttttcaaagttggcgtataacatagtatcgacggagccgattttgaaaccgcggtgatcacaggcagcaacgctctgtcatcgttacaatcaacatgctaccctccgcgagatcatccgtgtttcaaacccggcagcttagttgccgttcttccgaatagcatcggtaacatgagcaaagtctgccgccttacaacggctctcccgctgacgccgtcccggactgatgggctgcctgtatcgagtggtgattttgtgccgagctgccggtcggggagctgttggctggctggtggcaggatatattgtggtgtaaacaaattgacgcttagacaacttaataacacattgcggacgtttttaatgtactgaattaacgccgaatta

SEQ ID NO: 36 - DNA, 9466 bp, Artificial
  plasmid VC-MME432-1qcz
  5'UTR (2125)..(2289)
  transit_peptide (2290)..(2397)
  CDS (2290)..(2397)
  transit_peptide (2475)..(2543)
  CDS (2475)..(2543)
  CDS (2544)..(2552): adapter
gctttgggcggatcctctagaggacaatcagtaaattgaacggagaatattattcataaaaatacgatagtaacgggtgatatattcattagaatgaaccgaaaccggcggtaaggatctgagctacacatgctcaggttttttacaacgtgcacaacagaattgaaagcaaatatcatgcgatcataggcgtctcgcatatctcattaaagcagggcatgccggtcgagtcaaatctcggtgacgggcaggaccggacggggcggtaccggcaggctgaagtccagctgccagaaacccacgtcatgccagttcccgtgcttgaagccggccgcccgcagcatgccgcggggggcatatccgagcgcctcgtgcatgcgcacgctcgggtcgttgggcagcccgatgacagcgaccacgctcttgaagccctgtgcctccagggacttcagcaggtgggtgtagagcgtggagcccagtcccgtccgctggtggcggggggagacgtacacggtcgactcggccgtccagtcgtaggcgttgcgtgccttccaggggcccgcgtaggcgatgccggcgacctcgccgtccacctcggcgacgagccagggatagcgctcccgcagacggacgaggtcgtccgtccactcctgcggttcctgcggctcggtacggaagttgaccgtgcttgtctcgatgtagtggttgacgatggtgcagaccgccggcatgtccgcctcggtggcacggcggatgtcggccgggcgtcgttctgggctcatggtagactcgacggatccacgtgtggaagatatgaatttttttgagaaactagataagattaatgaatatcggtgttttggttttttcttgtggccgtctttgtttatattgagatttttcaaatcagtgcgcaagacgtgacgtaagtatccgagtcagtttttatttttctactaatttggtcgaatctagattcgacggtatcgataagctcgcggatccctgaaagcgacgttggatgttaacatctacaaattgccttttcttatcgaccatgtacgtaagcgcttacgtttttggtggacccttgaggaaactggtagctgttgtgggcctgtggtctcaagatggatcattaatttccaccttcacctacgatggggggcatcgcaccggtgagtaatattgtacggctaagagcgaatttggcctgtaggatccctgaaagcgacgttggatgttaacatctacaaattgccttttcttatcgaccatgtacgtaagcgcttacgtttttggtggacccttgaggaaactggtagctgttgtgggcctgtggtctcaagatggatcattaatttccaccttcacctacgatggggggcatcgcaccggtgagtaatattgtacggctaagagcgaatttggcctgtaggatccctgaaagcgacgttggatgttaacatctacaaattgccttttcttatcgaccatgtacgtaagcgcttacgtttttggtggacccttgaggaaactggtagctgttgtgggcctgtggtctcaagatggatcattaatttccaccttcacctacgatggggggcatcgcaccggtgagtaatattgtacggctaagagcgaatttggcctgtaggatccgcgagctggtcaatcccattgcttttgaagcagctcaacattgatctctttctcgatcgagggagatttttcaaatcagtgcgcaagacgtgacgtaagtatccgagtcagtttttatttttctactaatttggtcgtttatttcggcgtgtaggacatggcaaccgggcctgaatttcgcgggtattctgtttctattccaactttttcttgatccgcagccattaacgacttttgaatagatacgctgacacgccaagcctcgctagtcaaaagtgtaccaaacaacgctttacagcaagaacggaatgcgcgtgacgctcgcggtgacgccatttcgccttttcagaaatggataaatagccttgcttcctattatatcttcccaaattaccaatacattacactagcatctgaatttcataaccaatctcgatacaccaaatcgaagatctcccaaacgcataaacttatcttcatagttgccactccaatttgctccttgaatctcctccacccaatacataatccactcctccatcacccacttcactactaaatcaaacttaactctgtttttctctctcctcctttcatttcttattcttccaatcatcgtactccgccatgaccaccgctgtcaccgccgctgtttctttcccctctaccaaaaccacctctctctccgcccgaagctcctccgtcatttcccctgacaaaatcagctacaaaaaggtgattcccaatttcactgtgttttttattaataatttgttattttgatgatgagatgattaatttgggtgctgcaggttcctttgtactacaggaatgtatctgcaactgggaaaatgggacccatcagggcccagatcgcctcttgctcttccatggcaatgattaattaacgaagagcaagagctcgaatttccccgatcgttcaaacatttggcaataaagtttcttaagattgaatcctgttgccggtcttgcgatgattatcatataatttctgttgaattacgttaagcatgtaataattaacatgtaatgcatgacgttatttatgagatgggtttttatgattagagtcccgcaattatacatttaatacgcgatagaaaacaaaatatagcgcgcaaactaggataaattatcgcgcgcggtgtcatctatgttactagatcgggaattggcatgcaagcttggcactggccgtcgttttacaacgtcgtgactgggaaaaccctggcgttacccaacttaatcgccttgcagcacatccccctttcgccagctggcgtaatagcgaagaggcccgcaccgatcgcccttcccaacagttgcgcagcctgaatggcgaatgctagagcagcttgagcttggatcagattgtcgtttcccgccttcagtttaaactatcagtgtttgacaggatatattggcgggtaaacctaagagaaaagagcgtttattagaataatcggatatttaaaagggcgtgaaaaggtttatccgttcgtccatttgtatgtgcatgccaaccacagggttcccctcgggatcaaagtactttgatccaacccctccgctgctatagtgcagtcggcttctgacgttcagtgcagccgtcttctgaaaacgacatgtcgcacaagtcctaagttacgcgacaggctgccgccctgcccttttcctggcgttttcttgtcgcgtgttttagtcgcataaagtagaatacttgcgactagaaccggagacattacgccatgaacaagagcgccgccgctggcctgctgggctatgcccgcgtcagcaccgacgaccaggacttgaccaaccaacgggccgaactgcacgcggccggctgcaccaagctgttttccgagaagatcaccggcaccaggcgcgaccgcccggagctggccaggatgcttgaccacctacgccctggcgacgttgtgacagtgaccaggctagaccgcctggcccgcagcacccgcgacctactggacattgccgagcgcatccaggaggccggcgcgggcctgcgtagcctggcagagccgtgggccgacaccaccacgccggccggccgcatggtgttgaccgtgttcgccggcattgccgagttcgagcgttccctaatcatcgaccgcacccggagcgggcgcgaggccgccaaggcccgaggcgtgaagtttggcccccgccctaccctcaccccggcacagatcgcgcacgcccgcgagctgatcgaccaggaaggccgcaccgtgaaagaggcggctgcactgcttggcgtgcatcgctcgaccctgtaccgcgcacttgagcgcagcgaggaagtgacgcccaccgaggccaggcggcgcggtgccttccgtgaggacgcattgaccgaggccgacgccctggcggccgccgagaatgaacgccaagaggaacaagcatgaaaccgcaccaggacggccaggacgaaccgtttttcattaccgaagagatcgaggcggagatgatcgcggccgggtacgtgttcgagccgcccgcgcacgtctcaaccgtgcggctgcatgaaatcctggccggtttgtctgatgccaagctggcggcctggccggccagcttggccgctgaagaaaccgagcgccgccgtctaaaaaggtgatgtgtatttgagtaaaacagcttgcgtcatgcggtcgctgcgtatatgatgcgatgagtaaataaacaaatacgcaaggggaacgcatgaaggttatcgctgtacttaaccagaaaggcgggtcaggcaagacgaccatcgcaacccatctagcccgcgccctgcaactcgccggggccgatgttctgttagtcgattccgatccccagggcagtgcccgcgattgggcggccgtgcgggaagatcaaccgctaaccgttgtcggcatcgaccgcccgacgattgaccgcgacgtgaaggccatcggccggcgcgacttcgtagtgatcgacggagcgccccaggcggcggacttggctgtgtccgcgatcaaggcagccgacttcgtgctgattccggtgcagccaagcccttacgacatatgggccaccgccgacctggtggagctggttaagcagcgcattgaggtcacggatggaaggctacaagcggcctttgtcgtgtcgcgggcgatcaaaggcacgcgcatcggcggtgaggttgccgaggcgctggccgggtacgagctgcccattcttgagtcccgtatcacgcagcgcgtgagctacccaggcactgccgccgccggcacaaccgttcttgaatcagaacccgagggcgacgctgcccgcgaggtccaggcgctggccgctgaaattaaatcaaaactcatttgagttaatgaggtaaagagaaaatgagcaaaagcacaaacacgctaagtgccggccgtccgagcgcacgcagcagcaaggctgcaacgttggccagcctggcagacacgccagccatgaagcgggtcaactttcagttgccggcggaggatcacaccaagctgaagatgtacgcggtacgccaaggcaagaccattaccgagctgctatctgaatacatcgcgcagctaccagagtaaatgagcaaatgaataaatgagtagatgaattttagcggctaaaggaggcggcatggaaaatcaagaacaaccaggcaccgacgccgtggaatgccccatgtgtggaggaacgggcggttggccaggcgtaagcggctgggttgcctgccggccctgcaatggcactggaacccccaagcccgaggaatcggcgtgagcggtcgcaaaccatccggcccggtacaaatcggcgcggcgctgggtgatgacctggtggagaagttgaaggccgcgcaggccgcccagcggcaacgcatcgaggcagaagcacgccccggtgaatcgtggcaagcggccgctgatcgaatccgcaaagaatcccggcaaccgccggcagccggtgcgccgtcgattaggaagccgcccaagggcgacgagcaaccagattttttcgttccgatgctctatgacgtgggcacccgcgatagtcgcagcatcatggacgtggccgttttccgtctgtcgaagcgtgaccgacgagctggcgaggtgatccgctacgagcttccagacgggcacgtagaggtttccgcagggccggccggcatggccagtgtgtgggattacgacctggtactgatggcggtttcccatctaaccgaatccatgaaccgataccgggaagggaagggagacaagcccggccgcgtgttccgtccacacgttgcggacgtactcaagttctgccggcgagccgatggcggaaagcagaaagacgacctggtagaaacctgcattcggttaaacaccacgcacgttgccatgcagcgtacgaagaaggccaagaacggccgcctggtgacggtatccgagggtgaagccttgattagccgctacaagatcgtaaagagcgaaaccgggcggccggagtacatcgagatcgagctagctgattggatgtaccgcgagatcacagaaggcaagaacccggacgtgctgacggttcaccccgattactttttgatcgatcccggcatcggccgttttctctaccgcctggcacgccgcgccgcaggcaaggcagaagccagatggttgttcaagacgatctacgaacgcagtggcagcgccggagagttcaagaagttctgtttcaccgtgcgcaagctgatcgggtcaaatgacctgccggagtacgatttgaaggaggaggcggggcaggctggcccgatcctagtcatgcgctaccgcaacctgatcgagggcgaagcatccgccggttcctaatgtacggagcagatgctagggcaaattgccctagcaggggaaaaaggtcgaaaaggtctctttcctgtggatagcacgtacattgggaacccaaagccgtacattgggaaccggaacccgtacattgggaacccaaagccgtacattgggaaccggtcacacatgtaagtgactgatataaaagagaaaaaaggcgatttttccgcctaaaactctttaaaacttattaaaactcttaaaacccgcctggcctgtgcataactgtctggccagcgcacagccgaagagctgcaaaaagcgcctacccttcggtcgctgcgctccctacgccccgccgcttcgcgtcggcctatcgcggccgctggccgctcaaaaatggctggcctacggccaggcaatctaccagggcgcggacaagccgcgccgtcgccactcgaccgccggcgcccacatcaaggcaccctgcctcgcgcgtttcggtgatgacggtgaaaacctctgacacatgcagctcccggagacggtcacagcttgtctgtaagcggatgccgggagcagacaagcccgtcagggcgcgtcagcgggtgttggcgggtgtcggggcgcagccatgacccagtcacgtagcgatagcggagtgtatactggcttaactatgcggcatcagagcagattgtactgagagtgcaccatatgcggtgtgaaataccgcacagatgcgtaaggagaaaataccgcatcaggcgctcttccgcttcctcgctcactgactcgctgcgctcggtcgttcggctgcggcgagcggtatcagctcactcaaaggcggtaatacggttatccacagaatcaggggataacgcaggaaagaacatgtgagcaaaaggccagcaaaaggccaggaaccgtaaaaaggccgcgttgctggcgtttttccataggctccgcccccctgacgagcatcacaaaaatcgacgctcaagtcagaggtggcgaaacccgacaggactataaagataccaggcgtttccccctggaagctccctcgtgcgctctcctgttccgaccctgccgcttaccggatacctgtccgcctttctcccttcgggaagcgtggcgctttctcatagctcacgctgtaggtatctcagttcggtgtaggtcgttcgctccaagctgggctgtgtgcacgaaccccccgttcagcccgaccgctgcgccttatccggtaactatcgtcttgagtccaacccggtaagacacgacttatcgccactggcagcagccactggtaacaggattagcagagcgaggtatgtaggcggtgctacagagttcttgaagtggtggcctaactacggctacactagaaggacagtatttggtatctgcgctctgctgaagccagttaccttcggaaaaagagttggtagctcttgatccggcaaacaaaccaccgctggtagcggtggtttttttgtttgcaagcagcagattacgcgcagaaaaaaaggatctcaagaagatcctttgatcttttctacggggtctgacgctcagtggaacgaaaactcacgttaagggattttggtcatgcattctaggtactaaaacaattcatccagtaaaatataatattttattttctcccaatcaggcttgatccccagtaagtcaaaaaatagctcgacatactgttcttccccgatatcctccctgatcgaccggacgcagaaggcaatgtcataccacttgtccgccctgccgcttctcccaagatcaataaagccacttactttgccatctttcacaaagatgttgctgtctcccaggtcgccgtgggaaaagacaagttcctcttcgggcttttccgtctttaaaaaatcatacagctcgcgcggatctttaaatggagtgtcttcttcccagttttcgcaatccacatcggccagatcgttattcagtaagtaatccaattcggctaagcggctgtctaagctattcgtatagggacaatccgatatgtcgatggagtgaaagagcctgatgcactccgcatacagctcgataatcttttcagggctttgttcatcttcatactcttccgagcaaaggacgccatcggcctcactcatgagcagattgctccagccatcatgccgttcaaagtgcaggacctttggaacaggcagctttccttccagccatagcatcatgtccttttcccgttccacatcataggtggtccctttataccggctgtccgtcatttttaaatataggttttcattttctcccaccagcttatataccttagcaggagacattccttccgtatcttttacgcagcggtatttttcgatcagttttttcaattccggtgatattctcattttagccatttattatttccttcctcttttctacagtatttaaagataccccaagaagctaattataacaagacgaactccaattcactgttccttgcattctaaaaccttaaataccagaaaacagctttttcaaagttgttttcaaagttggcgtataacatagtatcgacggagccgattttgaaaccgcggtgatcacaggcagcaacgctctgtcatcgttacaatcaacatgctaccctccgcgagatcatccgtgtttcaaacccggcagcttagttgccgttcttccgaatagcatcggtaacatgagcaaagtctgccgccttacaacggctctcccgctgacgccgtcccggactgatgggctgcctgtatcgagtggtgattttgtgccgagctgccggtcggggagctgttggctggctggtggcaggatatattgtggtgtaaacaaattgacgcttagacaacttaataacacattgcggacgtttttaatgtactgaattaacgccgaattaa

SEQ ID NO: 37 - protein, 62 aa, Artificial
  Synthetic Construct
MTTAVTAAVSFPSTKTTSLSARSSSVISPDKISYKKVPLYYRNVSATGKMGPIRAQIASCSS

SEQ ID NO: 38 - DNA, 8885 bp, Artificial
  plasmid VC-MME221-1qcz
agcttggacaatcagtaaattgaacggagaatattattcataaaaatacgatagtaacgggtgatatattcattagaatgaaccgaaaccggcggtaaggatctgagctacacatgctcaggttttttacaacgtgcacaacagaattgaaagcaaatatcatgcgatcataggcgtctcgcatatctcattaaagcagggcatgccggtcgagtcaaatctcggtgacgggcaggaccggacggggcggtaccggcaggctgaagtccagctgccagaaacccacgtcatgccagttcccgtgcttgaagccggccgcccgcagcatgccgcggggggcatatccgagcgcctcgtgcatgcgcacgctcgggtcgttgggcagcccgatgacagcgaccacgctcttgaagccctgtgcctccagggacttcagcaggtgggtgtagagcgtggagcccagtcccgtccgctggtggcggggggagacgtacacggtcgactcggccgtccagtcgtaggcgttgcgtgccttccaggggcccgcgtaggcgatgccggcgacctcgccgtccacctcggcgacgagccagggatagcgctcccgcagacggacgaggtcgtccgtccactcctgcggttcctgcggctcggtacggaagttgaccgtgcttgtctcgatgtagtggttgacgatggtgcagaccgccggcatgtccgcctcggtggcacggcggatgtcggccgggcgtcgttctgggctcatggtagactcgacggatccacgtgtggaagatatgaatttttttgagaaactagataagattaatgaatatcggtgttttggttttttcttgtggccgtctttgtttatattgagatttttcaaatcagtgcgcaagacgtgacgtaagtatccgagtcagtttttatttttctactaatttggtcgaagctttgggcggatcctctagaattcgaatccaaaaattacggatatgaatataggcatatccgtatccgaattatccgtttgacagctagcaacgattgtacaattgcttctttaaaaaaggaagaaagaaagaaagaaaagaatcaacatcagcgttaacaaacggccccgttacggcccaaacggtcatatagagtaacggcgttaagcgttgaaagactcctatcgaaatacgtaaccgcaaacgtgtcatagtcagatcccctcttccttcaccgcctcaaacacaaaaataatcttctacagcctatatatacaacccccccttctatctctcctttctcacaattcatcatctttctttctctacccccaattttaagaaatcctctcttctcctcttcattttcaaggtaaatctctctctctctctctctctctgttattccttgttttaattaggtatgtattattgctagtttgttaatctgcttatcttatgtatgccttatgtgaatatctttatcttgttcatctcatccgtttagaagctataaatttgttgatttgactgtgtatctacacgtggttatgtttatatctaatcagatatgaatttcttcatattgttgcgtttgtgtgtaccaatccgaaatcgttgatttttttcatttaatcgtgtagctaattgtacgtatacatatggatctacgtatcaattgttcatctgtttgtgtttgtatgtatacagatctgaaaacatcacttctctcatctgattgtgttgttacatacatagatatagatctgttatatcattttttttattaattgtgtatatatatatgtgcatagatctggattacatgattgtgattatttacatgattttgttatttacgtatgtatatatgtagatctggactttttggagttgttgacttgattgtatttgtgtgtgtatatgtgtgttctgatcttgatatgttatgtatgtgcagcccgggttgctcttccatggcaatgattaattaacgaagagcaagagctcgaatttccccgatcgttcaaacatttggcaataaagtttcttaagattgaatcctgttgccggtcttgcgatgattatcatataatttctgttgaattacgttaagcatgtaataattaacatgtaatgcatgacgttatttatgagatgggtttttatgattagagtcccgcaattatacatttaatacgcgatagaaaacaaaatatagcgcgcaaactaggataaattatcgcgcgcggtgtcatctatgttactagatcgggaattggcatgcaagcttggcactggccgtcgttttacaacgtcgtgactgggaaaaccctggcgttacccaacttaatcgccttgcagcacatccccctttcgccagctggcgtaatagcgaagaggcccgcaccgatcgcccttcccaacagttgcgcagcctgaatggcgaatgctagagcagcttgagcttggatcagattgtcgtttcccgccttcagtttaaactatcagtgtttgacaggatatattggcgggtaaacctaagagaaaagagcgtttattagaataatcggatatttaaaagggcgtgaaaaggtttatccgttcgtccatttgtatgtgcatgccaaccacagggttcccctcgggatcaaagtactttgatccaacccctccgctgctatagtgcagtcggcttctgacgttcagtgcagccgtcttctgaaaacgacatgtcgcacaagtcctaagttacgcgacaggctgccgccctgcccttttcctggcgttttcttgtcgcgtgttttagtcgcataaagtagaatacttgcgactagaaccggagacattacgccatgaacaagagcgccgccgctggcctgctgggctatgcccgcgtcagcaccgacgaccaggacttgaccaaccaacgggccgaactgcacgcggccggctgcaccaagctgttttccgagaagatcaccggcaccaggcgcgaccgcccggagctggccaggatgcttgaccacctacgccctggcgacgttgtgacagtgaccaggctagaccgcctggcccgcagcacccgcgacctactggacattgccgagcgcatccaggaggccggcgcgggcctgcgtagcctggcagagccgtgggccgacaccaccacgccggccggccgcatggtgttgaccgtgttcgccggcattgccgagttcgagcgttccctaatcatcgaccgcacccggagcgggcgcgaggccgccaaggcccgaggcgtgaagtttggcccccgccctaccctcaccccggcacagatcgcgcacgcccgcgagctgatcgaccaggaaggccgcaccgtgaaagaggcggctgcactgcttggcgtgcatcgctcgaccctgtaccgcgcacttgagcgcagcgaggaagtgacgcccaccgaggccaggcggcgcggtgccttccgtgaggacgcattgaccgaggccgacgccctggcggccgccgagaatgaacgccaagaggaacaagcatgaaaccgcaccaggacggccaggacgaaccgtttttcattaccgaagagatcgaggcggagatgatcgcggccgggtacgtgttcgagccgcccgcgcacgtctcaaccgtgcggctgcatgaaatcctggccggtttgtctgatgccaagctggcggcctggccggccagcttggccgctgaagaaaccgagcgccgccgtctaaaaaggtgatgtgtatttgagtaaaacagcttgcgtcatgcggtcgctgcgtatatgatgcgatgagtaaataaacaaatacgcaaggggaacgcatgaaggttatcgctgtacttaaccagaaaggcgggtcaggcaagacgaccatcgcaacccatctagcccgcgccctgcaactcgccggggccgatgttctgttagtcgattccgatccccagggcagtgcccgcgattgggcggccgtgcgggaagatcaaccgctaaccgttgtcggcatcgaccgcccgacgattgaccgcgacgtgaaggccatcggccggcgcgacttcgtagtgatcgacggagcgccccaggcggcggacttggctgtgtccgcgatcaaggcagccgacttcgtgctgattccggtgcagccaagcccttacgacatatgggccaccgccgacctggtggagctggttaagcagcgcattgaggtcacggatggaaggctacaagcggcctttgtcgtgtcgcgggcgatcaaaggcacgcgcatcggcggtgaggttgccgaggcgctggccgggtacgagctgcccattcttgagtcccgtatcacgcagcgcgtgagctacccaggcactgccgccgccggcacaaccgttcttgaatcagaacccgagggcgacgctgcccgcgaggtccaggcgctggccgctgaaattaaatcaaaactcatttgagttaatgaggtaaagagaaaatgagcaaaagcacaaacacgctaagtgccggccgtccgagcgcacgcagcagcaaggctgcaacgttggccagcctggcagacacgccagccatgaagcgggtcaactttcagttgccggcggaggatcacaccaagctgaagatgtacgcggtacgccaaggcaagaccattaccgagctgctatctgaatacatcgcgcagctaccagagtaaatgagcaaatgaataaatgagtagatgaattttagcggctaaaggaggcggcatggaaaatcaagaacaaccaggcaccgacgccgtggaatgccccatgtgtggaggaacgggcggttggccaggcgtaagcggctgggttgcctgccggccctgcaatggcactggaacccccaagcccgaggaatcggcgtgagcggtcgcaaaccatccggcccggtacaaatcggcgcggcgctgggtgatgacctggtggagaagttgaaggccgcgcaggccgcccagcggcaacgcatcgaggcagaagcacgccccggtgaatcgtggcaagcggccgctgatcgaatccgcaaagaatcccggcaaccgccggcagccggtgcgccgtcgattaggaagccgcccaagggcgacgagcaaccagattttttcgttccgatgctctatgacgtgggcacccgcgatagtcgcagcatcatggacgtggccgttttccgtctgtcgaagcgtgaccgacgagctggcgaggtgatccgctacgagcttccagacgggcacgtagaggtttccgcagggccggccggcatggccagtgtgtgggattacgacctggtactgatggcggtttcccatctaaccgaatccatgaaccgataccgggaagggaagggagacaagcccggccgcgtgttccgtccacacgttgcggacgtactcaagttctgccggcgagccgatggcggaaagcagaaagacgacctggtagaaacctgcattcggttaaacaccacgcacgttgccatgcagcgtacgaagaaggccaagaacggccgcctggtgacggtatccgagggtgaagccttgattagccgctacaagatcgtaaagagcgaaaccgggcggccggagtacatcgagatcgagctagctgattggatgtaccgcgagatcacagaaggcaagaacccggacgtgctgacggttcaccccgattactttttgatcgatcccggcatcggccgttttctctaccgcctggcacgccgcgccgcaggcaaggcagaagccagatggttgttcaagacgatctacgaacgcagtggcagcgccggagagttcaagaagttctgtttcaccgtgcgcaagctgatcgggtcaaatgacctgccggagtacgatttgaaggaggaggcggggcaggctggcccgatcctagtcatgcgctaccgcaacctgatcgagggcgaagcatccgccggttcctaatgtacggagcagatgctagggcaaattgccctagcaggggaaaaaggtcgaaaaggtctctttcctgtggatagcacgtacattgggaacccaaagccgtacattgggaaccggaacccgtacattgggaacccaaagccgtacattgggaaccggtcacacatgtaagtgactgatataaaagagaaaaaaggcgatttttccgcctaaaactctttaaaacttattaaaactcttaaaacccgcctggcctgtgcataactgtctggccagcgcacagccgaagagctgcaaaaagcgcctacccttcggtcgctgcgctccctacgccccgccgcttcgcgtcggcctatcgcggccgctggccgctcaaaaatggctggcctacggccaggcaatctaccagggcgcggacaagccgcgccgtcgccactcgaccgccggcgcccacatcaaggcaccctgcctcgcgcgtttcggtgatgacggtgaaaacctctgacacatgcagctcccggagacggtcacagcttgtctgtaagcggatgccgggagcagacaagcccgtcagggcgcgtcagcgggtgttggcgggtgtcggggcgcagccatgacccagtcacgtagcgatagcggagtgtatactggcttaactatgcggcatcagagcagattgtactgagagtgcaccatatgcggtgtgaaataccgcacagatgcgtaaggagaaaataccgcatcaggcgctcttccgcttcctcgctcactgactcgctgcgctcggtcgttcggctgcggcgagcggtatcagctcactcaaaggcggtaatacggttatccacagaatcaggggataacgcaggaaagaacatgtgagcaaaaggccagcaaaaggccaggaaccgtaaaaaggccgcgttgctggcgtttttccataggctccgcccccctgacgagcatcacaaaaatcgacgctcaagtcagaggtggcgaaacccgacaggactataaagataccaggcgtttccccctggaagctccctcgtgcgctctcctgttccgaccctgccgcttaccggatacctgtccgcctttctcccttcgggaagcgtggcgctttctcatagctcacgctgtaggtatctcagttcggtgtaggtcgttcgctccaagctgggctgtgtgcacgaaccccccgttcagcccgaccgctgcgccttatccggtaactatcgtcttgagtccaacccggtaagacacgacttatcgccactggcagcagccactggtaacaggattagcagagcgaggtatgtaggcggtgctacagagttcttgaagtggtggcctaactacggctacactagaaggacagtatttggtatctgcgctctgctgaagccagttaccttcggaaaaagagttggtagctcttgatccggcaaacaaaccaccgctggtagcggtggtttttttgtttgcaagcagcagattacgcgcagaaaaaaaggatctcaagaagatcctttgatcttttctacggggtctgacgctcagtggaacgaaaactcacgttaagggattttggtcatgcattctaggtactaaaacaattcatccagtaaaatataatattttattttctcccaatcaggcttgatccccagtaagtcaaaaaatagctcgacatactgttcttccccgatatcctccctgatcgaccggacgcagaaggcaatgtcataccacttgtccgccctgccgcttctcccaagatcaataaagccacttactttgccatctttcacaaagatgttgctgtctcccaggtcgccgtgggaaaagacaagttcctcttcgggcttttccgtctttaaaaaatcatacagctcgcgcggatctttaaatggagtgtcttcttcccagttttcgcaatccacatcggccagatcgttattcagtaagtaatccaattcggctaagcggctgtctaagctattcgtatagggacaatccgatatgtcgatggagtgaaagagcctgatgcactccgcatacagctcgataatcttttcagggctttgttcatcttcatactcttccgagcaaaggacgccatcggcctcactcatgagcagattgctccagccatcatgccgttcaaagtgcaggacctttggaacaggcagctttccttccagccatagcatcatgtccttttcccgttccacatcataggtggtccctttataccggctgtccgtcatttttaaatataggttttcattttctcccaccagcttatataccttagcaggagacattccttccgtatcttttacgcagcggtatttttcgatcagttttttcaattccggtgatattctcattttagccatttattatttccttcctcttttctacagtatttaaagataccccaagaagctaattataacaagacgaactccaattcactgttccttgcattctaaaaccttaaataccagaaaacagctttttcaaagttgttttcaaagttggcgtataacatagtatcgacggagccgattttgaaaccgcggtgatcacaggcagcaacgctctgtcatcgttacaatcaacatgctaccctccgcgagatcatccgtgtttcaaacccggcagcttagttgccgttcttccgaatagcatcggtaacatgagcaaagtctgccgccttacaacggctctcccgctgacgccgtcccggactgatgggctgcctgtatcgagtggtgattttgtgccgagctgccggtcggggagctgttggctggctggtggcaggatatattgtggtgtaaacaaattgacgcttagacaacttaataacacattgcggacgtttttaatgtactgaattaacgccgaatta

SEQ ID NO: 39 - DNA, 9303 bp, Artificial
  plasmid pMTX447korr
  5'UTR (1964)..(2128)
  transit_peptide (2129)..(2236)
  CDS (2129)..(2236)
  transit_peptide (2314)..(2382)
  CDS (2314)..(2382)
  CDS (2383)..(2391): adapter
agcttggacaatcagtaaattgaacggagaatattattcataaaaatacgatagtaacgggtgatatattcattagaatgaaccgaaaccggcggtaaggatctgagctacacatgctcaggttttttacaacgtgcacaacagaattgaaagcaaatatcatgcgatcataggcgtctcgcatatctcattaaagcagggcatgccggtcgagtcaaatctcggtgacgggcaggaccggacggggcggtaccggcaggctgaagtccagctgccagaaacccacgtcatgccagttcccgtgcttgaagccggccgcccgcagcatgccgcggggggcatatccgagcgcctcgtgcatgcgcacgctcgggtcgttgggcagcccgatgacagcgaccacgctcttgaagccctgtgcctccagggacttcagcaggtgggtgtagagcgtggagcccagtcccgtccgctggtggcggggggagacgtacacggtcgactcggccgtccagtcgtaggcgttgcgtgccttccaggggcccgcgtaggcgatgccggcgacctcgccgtccacctcggcgacgagccagggatagcgctcccgcagacggacgaggtcgtccgtccactcctgcggttcctgcggctcggtacggaagttgaccgtgcttgtctcgatgtagtggttgacgatggtgcagaccgccggcatgtccgcctcggtggcacggcggatgtcggccgggcgtcgttctgggctcatggtagactcgacggatccacgtgtggaagatatgaatttttttgagaaactagataagattaatgaatatcggtgttttggttttttcttgtggccgtctttgtttatattgagatttttcaaatcagtgcgcaagacgtgacgtaagtatccgagtcagtttttatttttctactaatttggtcgaagctttgggcggatcctctagaattcgaatccaaaaattacggatatgaatataggcatatccgtatccgaattatccgtttgacagctagcaacgattgtacaattgcttctttaaaaaaggaagaaagaaagaaagaaaagaatcaacatcagcgttaacaaacggccccgttacggcccaaacggtcatatagagtaacggcgttaagcgttgaaagactcctatcgaaatacgtaaccgcaaacgtgtcatagtcagatcccctcttccttcaccgcctcaaacacaaaaataatcttctacagcctatatatacaacccccccttctatctctcctttctcacaattcatcatctttctttctctacccccaattttaagaaatcctctcttctcctcttcattttcaaggtaaatctctctctctctctctctctctgttattccttgttttaattaggtatgtattattgctagtttgttaatctgcttatcttatgtatgccttatgtgaatatctttatcttgttcatctcatccgtttagaagctataaatttgttgatttgactgtgtatctacacgtggttatgtttatatctaatcagatatgaatttcttcatattgttgcgtttgtgtgtaccaatccgaaatcgttgatttttttcatttaatcgtgtagctaattgtacgtatacatatggatctacgtatcaattgttcatctgtttgtgtttgtatgtatacagatctgaaaacatcacttctctcatctgattgtgttgttacatacatagatatagatctgttatatcattttttttattaattgtgtatatatatatgtgcatagatctggattacatgattgtgattatttacatgattttgttatttacgtatgtatatatgtagatctggactttttggagttgttgacttgattgtatttgtgtgtgtatatgtgtgttctgatcttgatatgttatgtatgtgcagcccaaacgcataaacttatcttcatagttgccactccaatttgctccttgaatctcctccacccaatacataatccactcctccatcacccacttcactactaaatcaaacttaactctgtttttctctctcctcctttcatttcttattcttccaatcatcgtactccgccatgaccaccgctgtcaccgccgctgtttctttcccctctaccaaaaccacctctctctccgcccgaagctcctccgtcatttcccctgacaaaatcagctacaaaaaggtgattcccaatttcactgtgttttttattaataatttgttattttgatgatgagatgattaatttgggtgctgcaggttcctttgtactacaggaatgtatctgcaactgggaaaatgggacccatcagggcccagatcgcctcttgctcttccatggcaatgattaattaacgaagagcaagagctcgaatttccccgatcgttcaaacatttggcaataaagtttcttaagattgaatcctgttgccggtcttgcgatgattatcatataatttctgttgaattacgttaagcatgtaataattaacatgtaatgcatgacgttatttatgagatgggtttttatgattagagtcccgcaattatacatttaatacgcgatagaaaacaaaatatagcgcgcaaactaggataaattatcgcgcgcggtgtcatctatgttactagatcgggaattggcatgcaagcttggcactggccgtcgttttacaacgtcgtgactgggaaaaccctggcgttacccaacttaatcgccttgcagcacatccccctttcgccagctggcgtaatagcgaagaggcccgcaccgatcgcccttcccaacagttgcgcagcctgaatggcgaatgctagagcagcttgagcttggatcagattgtcgtttcccgccttcagtttaaactatcagtgtttgacaggatatattggcgggtaaacctaagagaaaagagcgtttattagaataatcggatatttaaaagggcgtgaaaaggtttatccgttcgtccatttgtatgtgcatgccaaccacagggttcccctcgggatcaaagtactttgatccaacccctccgctgctatagtgcagtcggcttctgacgttcagtgcagccgtcttctgaaaacgacatgtcgcacaagtcctaagttacgcgacaggctgccgccctgcccttttcctggcgttttcttgtcgcgtgttttagtcgcataaagtagaatacttgcgactagaaccggagacattacgccatgaacaagagcgccgccgctggcctgctgggctatgcccgcgtcagcaccgacgaccaggacttgaccaaccaacgggccgaactgcacgcggccggctgcaccaagctgttttccgagaagatcaccggcaccaggcgcgaccgcccggagctggccaggatgcttgaccacctacgccctggcgacgttgtgacagtgaccaggctagaccgcctggcccgcagcacccgcgacctactggacattgccgagcgcatccaggaggccggcgcgggcctgcgtagcctggcagagccgtgggccgacaccaccacgccggccggccgcatggtgttgaccgtgttcgccggcattgccgagttcgagcgttccctaatcatcgaccgcacccggagcgggcgcgaggccgccaaggcccgaggcgtgaagtttggcccccgccctaccctcaccccggcacagatcgcgcacgcccgcgagctgatcgaccaggaaggccgcaccgtgaaagaggcggctgcactgcttggcgtgcatcgctcgaccctgtaccgcgcacttgagcgcagcgaggaagtgacgcccaccgaggccaggcggcgcggtgccttccgtgaggacgcattgaccgaggccgacgccctggcggccgccgagaatgaacgccaagaggaacaagcatgaaaccgcaccaggacggccaggacgaaccgtttttcattaccgaagagatcgaggcggagatgatcgcggccgggtacgtgttcgagccgcccgcgcacgtctcaaccgtgcggctgcatgaaatcctggccggtttgtctgatgccaagctggcggcctggccggccagcttggccgctgaagaaaccgagcgccgccgtctaaaaaggtgatgtgtatttgagtaaaacagcttgcgtcatgcggtcgctgcgtatatgatgcgatgagtaaataaacaaatacgcaaggggaacgcatgaaggttatcgctgtacttaaccagaaaggcgggtcaggcaagacgaccatcgcaacccatctagcccgcgccctgcaactcgccggggccgatgttctgttagtcgattccgatccccagggcagtgcccgcgattgggcggccgtgcgggaagatcaaccgctaaccgttgtcggcatcgaccgcccgacgattgaccgcgacgtgaaggccatcggccggcgcgacttcgtagtgatcgacggagcgccccaggcggcggacttggctgtgtccgcgatcaaggcagccgacttcgtgctgattccggtgcagccaagcccttacgacatatgggccaccgccgacctggtggagctggttaagcagcgcattgaggtcacggatggaaggctacaagcggcctttgtcgtgtcgcgggcgatcaaaggcacgcgcatcggcggtgaggttgccgaggcgctggccgggtacgagctgcccattcttgagtcccgtatcacgcagcgcgtgagctacccaggcactgccgccgccggcacaaccgttcttgaatcagaacccgagggcgacgctgcccgcgaggtccaggcgctggccgctgaaattaaatcaaaactcatttgagttaatgaggtaaagagaaaatgagcaaaagcacaaacacgctaagtgccggccgtccgagcgcacgcagcagcaaggctgcaacgttggccagcctggcagacacgccagccatgaagcgggtcaactttcagttgccggcggaggatcacaccaagctgaagatgtacgcggtacgccaaggcaagaccattaccgagctgctatctgaatacatcgcgcagctaccagagtaaatgagcaaatgaataaatgagtagatgaattttagcggctaaaggaggcggcatggaaaatcaagaacaaccaggcaccgacgccgtggaatgccccatgtgtggaggaacgggcggttggccaggcgtaagcggctgggttgtctgccggccctgcaatggcactggaacccccaagcccgaggaatcggcgtgacggtcgcaaaccatccggcccggtacaaatcggcgcggcgctgggtgatgacctggtggagaagttgaaggccgcgcaggccgcccagcggcaacgcatcgaggcagaagcacgccccggtgaatcgtggcaagcggccgctgatcgaatccgcaaagaatcccggcaaccgccggcagccggtgcgccgtcgattaggaagccgcccaagggcgacgagcaaccagattttttcgttccgatgctctatgacgtgggcacccgcgatagtcgcagcatcatggacgtggccgttttccgtctgtcgaagcgtgaccgacgagctggcgaggtgatccgctacgagcttccagacgggcacgtagaggtttccgcagggccggccggcatggccagtgtgtgggattacgacctggtactgatggcggtttcccatctaaccgaatccatgaaccgataccgggaagggaagggagacaagcccggccgcgtgttccgtccacacgttgcggacgtactcaagttctgccggcgagccgatggcggaaagcagaaagacgacctggtagaaacctgcattcggttaaacaccacgcacgttgccatgcagcgtacgaagaaggccaagaacggccgcctggtgacggtatccgagggtgaagccttgattagccgctacaagatcgtaaagagcgaaaccgggcggccggagtacatcgagatcgagctagctgattggatgtaccgcgagatcacagaaggcaagaacccggacgtgctgacggttcaccccgattactttttgatcgatcccggcatcggccgttttctctaccgcctggcacgccgcgccgcaggcaaggcagaagccagatggttgttcaagacgatctacgaacgcagtggcagcgccggagagttcaagaagttctgtttcaccgtgcgcaagctgatcgggtcaaatgacctgccggagtacgatttgaaggaggaggcggggcaggctggcccgatcctagtcatgcgctaccgcaacctgatcgagggcgaagcatccgccggttcctaatgtacggagcagatgctagggcaaattgccctagcaggggaaaaaggtcgaaaaggtctctttcctgtggatagcacgtacattgggaacccaaagccgtacattgggaaccggaacccgtacattgggaacccaaagccgtacattgggaaccggtcacacatgtaagtgactgatataaaagagaaaaaaggcgatttttccgcctaaaactctttaaaacttattaaaactcttaaaacccgcctggcctgtgcataactgtctggccagcgcacagccgaagagctgcaaaaagcgcctacccttcggtcgctgcgctccctacgccccgccgcttcgcgtcggcctatcgcggccgctggccgctcaaaaatggctggcctacggccaggcaatctaccagggcgcggacaagccgcgccgtcgccactcgaccgccggcgcccacatcaaggcaccctgcctcgcgcgtttcggtgatgacggtgaaaacctctgacacatgcagctcccggagacggtcacagcttgtctgtaagcggatgccgggagcagacaagcccgtcagggcgcgtcagcgggtgttggcgggtgtcggggcgcagccatgacccagtcacgtagcgatagcggagtgtatactggcttaactatgcggcatcagagcagattgtactgagagtgcaccatatgcggtgtgaaataccgcacagatgcgtaaggagaaaataccgcatcaggcgctcttccgcttcctcgctcactgactcgctgcgctcggtcgttcggctgcggcgagcggtatcagctcactcaaaggcggtaatacggttatccacagaatcaggggataacgcaggaaagaacatgtgagcaaaaggccagcaaaaggccaggaaccgtaaaaaggccgcgttgctggcgtttttccataggctccgcccccctgacgagcatcacaaaaatcgacgctcaagtcagaggtggcgaaacccgacaggactataaagataccaggcgtttccccctggaagctccctcgtgcgctctcctgttccgaccctgccgcttaccggatacctgtccgcctttctcccttcgggaagcgtggcgctttctcatagctcacgctgtaggtatctcagttcggtgtaggtcgttcgctccaagctgggctgtgtgcacgaaccccccgttcagcccgaccgctgcgccttatccggtaactatcgtcttgagtccaacccggtaagacacgacttatcgccactggcagcagccactggtaacaggattagcagagcgaggtatgtaggcggtgctacagagttcttgaagtggtggcctaactacggctacactagaaggacagtatttggtatctgcgctctgctgaagccagttaccttcggaaaaagagttggtagctcttgatccggcaaacaaaccaccgctggtagcggtggtttttttgtttgcaagcagcagattacgcgcagaaaaaaaggatctcaagaagatcctttgatcttttctacggggtctgacgctcagtggaacgaaaactcacgttaagggattttggtcatgcattctaggtactaaaacaattcatccagtaaaatataatattttattttctcccaatcaggcttgatccccagtaagtcaaaaaatagctcgacatactgttcttccccgatatcctccctgatcgaccggacgcagaaggcaatgtcataccacttgtccgccctgccgcttctcccaagatcaataaagccacttactttgccatctttcacaaagatgttgctgtctcccaggtcgccgtgggaaaagacaagttcctcttcgggcttttccgtctttaaaaaatcatacagctcgcgcggatctttaaatggagtgtcttcttcccagttttcgcaatccacatcggccagatcgttattcagtaagtaatccaattcggctaagcggctgtctaagctattcgtatagggacaatccgatatgtcgatggagtgaaagagcctgatgcactccgcatacagctcgataatcttttcagggctttgttcatcttcatactcttccgagcaaaggacgccatcggcctcactcatgagcagattgctccagccatcatgccgttcaaagtgcaggacctttggaacaggcagctttccttccagccatagcatcatgtccttttcccgttccacatcataggtggtccctttataccggctgtccgtcatttttaaatataggttttcattttctcccaccagcttatataccttagcaggagacattccttccgtatcttttacgcagcggtatttttcgatcagttttttcaattccggtgatattctcattttagccatttattatttccttcctcttttctacagtatttaaagataccccaagaagctaattataacaagacgaactccaattcactgttccttgcattctaaaaccttaaataccagaaaacagctttttcaaagttgttttcaaagttggcgtataacatagtatcgacggagccgattttgaaaccgcggtgatcacaggcagcaacgctctgtcatcgttacaatcaacatgctaccctccgcgagatcatccgtgtttcaaacccggcagcttagttgccgttcttccgaatagcatcggtaacatgagcaaagtctgccgccttacaacggctctcccgctgacgccgtcccggactgatgggctgcctgtatcgagtggtgattttgtgccgagctgccggtcggggagctgttggctggctggtggcaggatatattgtggtgtaaacaaattgacgcttagacaacttaataacacattgcggacgtttttaatgtactgaattaacgccgaatta

SEQ ID NO: 40 - protein, 62 aa, Artificial; identical to SEQ ID NO: 37
  Synthetic Construct

SEQ ID NO: 41 - DNA, 9043 bp, Artificial
  plasmid VC-MME489-1QCZ
agctttgggcggatcctctagaggacaatcagtaaattgaacggagaatattattcataaaaatacgatagtaacgggtgatatattcattagaatgaaccgaaaccggcggtaaggatctgagctacacatgctcaggttttttacaacgtgcacaacagaattgaaagcaaatatcatgcgatcataggcgtctcgcatatctcattaaagcagggcatgccggtcgagtcaaatctcggtgacgggcaggaccggacggggcggtaccggcaggctgaagtccagctgccagaaacccacgtcatgccagttcccgtgcttgaagccggccgcccgcagcatgccgcggggggcatatccgagcgcctcgtgcatgcgcacgctcgggtcgttgggcagcccgatgacagcgaccacgctcttgaagccctgtgcctccagggacttcagcaggtgggtgtagagcgtggagcccagtcccgtccgctggtggcggggggagacgtacacggtcgactcggccgtccagtcgtaggcgttgcgtgccttccaggggcccgcgtaggcgatgccggcgacctcgccgtccacctcggcgacgagccagggatagcgctcccgcagacggacgaggtcgtccgtccactcctgcggttcctgcggctcggtacggaagttgaccgtgcttgtctcgatgtagtggttgacgatggtgcagaccgccggcatgtccgcctcggtggcacggcggatgtcggccgggcgtcgttctgggctcatggtagactcgacggatccacgtgtggaagatatgaatttttttgagaaactagataagattaatgaatatcggtgttttggttttttcttgtggccgtctttgtttatattgagatttttcaaatcagtgcgcaagacgtgacgtaagtatccgagtcagtttttatttttctactaatttggtcgaatctagattcgacggtatcgataagctcgcggatccctgaaagcgacgttggatgttaacatctacaaattgccttttcttatcgaccatgtacgtaagcgcttacgtttttggtggacccttgaggaaactggtagctgttgtgggcctgtggtctcaagatggatcattaatttccaccttcacctacgatggggggcatcgcaccggtgagtaatattgtacggctaagagcgaatttggcctgtaggatccctgaaagcgacgttggatgttaacatctacaaattgccttttcttatcgaccatgtacgtaagcgcttacgtttttggtggacccttgaggaaactggtagctgttgtgggcctgtggtctcaagatggatcattaatttccaccttcacctacgatggggggcatcgcaccggtgagtaatattgtacggctaagagcgaatttggcctgtaggatccctgaaagcgacgttggatgttaacatctacaaattgccttttcttatcgaccatgtacgtaagcgcttacgtttttggtggacccttgaggaaactggtagctgttgtgggcctgtggtctcaagatggatcattaatttccaccttcacctacgatggggggcatcgcaccggtgagtaatattgtacggctaagagcgaatttggcctgtaggatccgcgagctggtcaatcccattgcttttgaagcagctcaacattgatctctttctcgatcgagggagatttttcaaatcagtgcgcaagacgtgacgtaagtatccgagtcagtttttatttttctactaatttggtcgtttatttcggcgtgtaggacatggcaaccgggcctgaatttcgcgggtattctgtttctattccaactttttcttgatccgcagccattaacgacttttgaatagatacgctgacacgccaagcctcgctagtcaaaagtgtaccaaacaacgctttacagcaagaacggaatgcgcgtgacgctcgcggtgacgccatttcgccttttcagaaatggataaatagccttgcttcctattatatcttcccaaattaccaatacattacactagcatctgaatttcataaccaatctcgatacaccaaatcgaagatctccctggaattccagctgaccaccatggcaattcccggggatcagctcgaatttccccgatcgttcaaacatttggcaataaagtttcttaagattgaatcctgttgccggtcttgcgatgattatcatataatttctgttgaattacgttaagcatgtaataattaacatgtaatgcatgacgttatttatgagatgggtttttatgattagagtcccgcaattatacatttaatacgcgatagaaaacaaaatatagcgcgcaaactaggataaattatcgcgcgcggtgtcatctatgttactagatcgggaattggcatgcaagcttggcactggccgtcgttttacaacgtcgtgactgggaaaaccctggcgttacccaacttaatcgccttgcagcacatccccctttcgccagctggcgtaatagcgaagaggcccgcaccgatcgcccttcccaacagttgcgcagcctgaatggcgaatgctagagcagcttgagcttggatcagattgtcgtttcccgccttcagtttaaactatcagtgtttgacaggatatattggcgggtaaacctaagagaaaagagcgtttattagaataatcggatatttaaaagggcgtgaaaaggtttatccgttcgtccatttgtatgtgcatgccaaccacagggttcccctcgggatcaaagtactttgatccaacccctccgctgctatagtgcagtcggcttctgacgttcagtgcagccgtcttctgaaaacgacatgtcgcacaagtcctaagttacgcgacaggctgccgccctgcccttttcctggcgttttcttgtcgcgtgttttagtcgcataaagtagaatacttgcgactagaaccggagacattacgccatgaacaagagcgccgccgctggcctgctgggctatgcccgcgtcagcaccgacgaccaggacttgaccaaccaacgggccgaactgcacgcggccggctgcaccaagctgttttccgagaagatcaccggcaccaggcgcgaccgcccggagctggccaggatgcttgaccacctacgccctggcgacgttgtgacagtgaccaggctagaccgcctggcccgcagcacccgcgacctactggacattgccgagcgcatccaggaggccggcgcgggcctgcgtagcctggcagagccgtgggccgacaccaccacgccggccggccgcatggtgttgaccgtgttcgccggcattgccgagttcgagcgttccctaatcatcgaccgcacccggagcgggcgcgaggccgccaaggcccgaggcgtgaagtttggcccccgccctaccctcaccccggcacagatcgcgcacgcccgcgagctgatcgaccaggaaggccgcaccgtgaaagaggcggctgcactgcttggcgtgcatcgctcgaccctgtaccgcgcacttgagcgcagcgaggaagtgacgcccaccgaggccaggcggcgcggtgccttccgtgaggacgcattgaccgaggccgacgccctggcggccgccgagaatgaacgccaagaggaacaagcatgaaaccgcaccaggacggccaggacgaaccgtttttcattaccgaagagatcgaggcggagatgatcgcggccgggtacgtgttcgagccgcccgcgcacgtctcaaccgtgcggctgcatgaaatcctggccggtttgtctgatgccaagctggcggcctggccggccagcttggccgctgaagaaaccgagcgccgccgtctaaaaaggtgatgtgtatttgagtaaaacagcttgcgtcatgcggtcgctgcgtatatgatgcgatgagtaaataaacaaatacgcaaggggaacgcatgaaggttatcgctgtacttaaccagaaaggcgggtcaggcaagacgaccatcgcaacccatctagcccgcgccctgcaactcgccggggccgatgttctgttagtcgattccgatccccagggcagtgcccgcgattgggcggccgtgcgggaagatcaaccgctaaccgttgtcggcatcgaccgcccgacgattgaccgcgacgtgaaggccatcggccggcgcgacttcgtagtgatcgacggagcgccccaggcggcggacttggctgtgtccgcgatcaaggcagccgacttcgtgctgattccggtgcagccaagcccttacgacatatgggccaccgccgacctggtggagctggttaagcagcgcattgaggtcacggatggaaggctacaagcggcctttgtcgtgtcgcgggcgatcaaaggcacgcgcatcggcggtgaggttgccgaggcgctggccgggtacgagctgcccattcttgagtcccgtatcacgcagcgcgtgagctacccaggcactgccgccgccggcacaaccgttcttgaatcagaacccgagggcgacgctgcccgcgaggtccaggcgctggccgctgaaattaaatcaaaactcatttgagttaatgaggtaaagagaaaatgagcaaaagcacaaacacgctaagtgccggccgtccgagcgcacgcagcagcaaggctgcaacgttggccagcctggcagacacgccagccatgaagcgggtcaactttcagttgccggcggaggatcacaccaagctgaagatgtacgcggtacgccaaggcaagaccattaccgagctgctatctgaatacatcgcgcagctaccagagtaaatgagcaaatgaataaatgagtagatgaattttagcggctaaaggaggcggcatggaaaatcaagaacaaccaggcaccgacgccgtggaatgccccatgtgtggaggaacgggcggttggccaggcgtaagcggctgggttgtctgccggccctgcaatggcactggaacccccaagcccgaggaatcggcgtgacggtcgcaaaccatccggcccggtacaaatcggcgcggcgctgggtgatgacctggtggagaagttgaaggccgcgcaggccgcccagcggcaacgcatcgaggcagaagcacgccccggtgaatcgtggcaagcggccgctgatcgaatccgcaaagaatcccggcaaccgccggcagccggtgcgccgtcgattaggaagccgcccaagggcgacgagcaaccagattttttcgttccgatgctctatgacgtgggcacccgcgatagtcgcagcatcatggacgtggccgttttccgtctgtcgaagcgtgaccgacgagctggcgaggtgatccgctacgagcttccagacgggcacgtagaggtttccgcagggccggccggcatggccagtgtgtgggattacgacctggtactgatggcggtttcccatctaaccgaatccatgaaccgataccgggaagggaagggagacaagcccggccgcgtgttccgtccacacgttgcggacgtactcaagttctgccggcgagccgatggcggaaagcagaaagacgacctggtagaaacctgcattcggttaaacaccacgcacgttgccatgcagcgtacgaagaaggccaagaacggccgcctggtgacggtatccgagggtgaagccttgattagccgctacaagatcgtaaagagcgaaaccgggcggccggagtacatcgagatcgagctagctgattggatgtaccgcgagatcacagaaggcaagaacccggacgtgctgacggttcaccccgattactttttgatcgatcccggcatcggccgttttctctaccgcctggcacgccgcgccgcaggcaaggcagaagccagatggttgttcaagacgatctacgaacgcagtggcagcgccggagagttcaagaagttctgtttcaccgtgcgcaagctgatcgggtcaaatgacctgccggagtacgatttgaaggaggaggcggggcaggctggcccgatcctagtcatgcgctaccgcaacctgatcgagggcgaagcatccgccggttcctaatgtacggagcagatgctagggcaaattgccctagcaggggaaaaaggtcgaaaaggtctctttcctgtggatagcacgtacattgggaacccaaagccgtacattgggaaccggaacccgtacattgggaacccaaagccgtacattgggaaccggtcacacatgtaagtgactgatataaaagagaaaaaaggcgatttttccgcctaaaactctttaaaacttattaaaactcttaaaacccgcctggcctgtgcataactgtctggccagcgcacagccgaagagctgcaaaaagcgcctacccttcggtcgctgcgctccctacgccccgccgcttcgcgtcggcctatcgcggccgctggccgctcaaaaatggctggcctacggccaggcaatctaccagggcgcggacaagccgcgccgtcgccactcgaccgccggcgcccacatcaaggcaccctgcctcgcgcgtttcggtgatgacggtgaaaacctctgacacatgcagctcccggagacggtcacagcttgtctgtaagcggatgccgggagcagacaagcccgtcagggcgcgtcagcgggtgttggcgggtgtcggggcgcagccatgacccagtcacgtagcgatagcggagtgtatactggcttaactatgcggcatcagagcagattgtactgagagtgcaccatatgcggtgtgaaataccgcacagatgcgtaaggagaaaataccgcatcaggcgctcttccgcttcctcgctcactgactcgctgcgctcggtcgttcggctgcggcgagcggtatcagctcactcaaaggcggtaatacggttatccacagaatcaggggataacgcaggaaagaacatgtgagcaaaaggccagcaaaaggccaggaaccgtaaaaaggccgcgttgctggcgtttttccataggctccgcccccctgacgagcatcacaaaaatcgacgctcaagtcagaggtggcgaaacccgacaggactataaagataccaggcgtttccccctggaagctccctcgtgcgctctcctgttccgaccctgccgcttaccggatacctgtccgcctttctcccttcgggaagcgtggcgctttctcatagctcacgctgtaggtatctcagttcggtgtaggtcgttcgctccaagctgggctgtgtgcacgaaccccccgttcagcccgaccgctgcgccttatccggtaactatcgtcttgagtccaacccggtaagacacgacttatcgccactggcagcagccactggtaacaggattagcagagcgaggtatgtaggcggtgctacagagttcttgaagtggtggcctaactacggctacactagaaggacagtatttggtatctgcgctctgctgaagccagttaccttcggaaaaagagttggtagctcttgatccggcaaacaaaccaccgctggtagcggtggtttttttgtttgcaagcagcagattacgcgcagaaaaaaaggatctcaagaagatcctttgatcttttctacggggtctgacgctcagtggaacgaaaactcacgttaagggattttggtcatgcattctaggtactaaaacaattcatccagtaaaatataatattttattttctcccaatcaggcttgatccccagtaagtcaaaaaatagctcgacatactgttcttccccgatatcctccctgatcgaccggacgcagaaggcaatgtcataccacttgtccgccctgccgcttctcccaagatcaataaagccacttactttgccatctttcacaaagatgttgctgtctcccaggtcgccgtgggaaaagacaagttcctcttcgggcttttccgtctttaaaaaatcatacagctcgcgcggatctttaaatggagtgtcttcttcccagttttcgcaatccacatcggccagatcgttattcagtaagtaatccaattcggctaagcggctgtctaagctattcgtatagggacaatccgatatgtcgatggagtgaaagagcctgatgcactccgcatacagctcgataatcttttcagggctttgttcatcttcatactcttccgagcaaaggacgccatcggcctcactcatgagcagattgctccagccatcatgccgttcaaagtgcaggacctttggaacaggcagctttccttccagccatagcatcatgtccttttcccgttccacatcataggtggtccctttataccggctgtccgtcatttttaaatataggttttcattttctcccaccagcttatataccttagcaggagacattccttccgtatcttttacgcagcggtatttttcgatcagttttttcaattccggtgatattctcattttagccatttattatttccttcctcttttctacagtatttaaagataccccaagaagctaattataacaagacgaactccaattcactgttccttgcattctaaaaccttaaataccagaaaacagctttttcaaagttgttttcaaagttggcgtataacatagtatcgacggagccgattttgaaaccgcggtgatcacaggcagcaacgctctgtcatcgttacaatcaacatgctaccctccgcgagatcatccgtgtttcaaacccggcagcttagttgccgttcttccgaatagcatcggtaacatgagcaaagtctgccgccttacaacggctctcccgctgacgccgtcccggactgatgggctgcctgtatcgagtggtgattttgtgccgagctgccggtcggggagctgttggctggctggtggcaggatatattgtggtgtaaacaaattgacgcttagacaacttaataacacattgcggacgtttttaatgtactgaattaacgccgaatta

SEQ ID NO: 42 - DNA, 615 bp, Saccharomyces cerevisiae
  CDS (1)..(615)
atgaatagcggtggtagtgatagtttcgattatcttcttcaattaacaaaagctttaagtgcagagtgtcgggctaacagacaagagaccgatcgaatagaactattgttaaagcgccttgccaaacagtcaggaatatcttatgataatttgagcaaaaacataattccagattcatggaaagataatgcatctcaaaaagcatctccccccactgaggcacagaagcttatcagcgaaaattttaaactcatatacgagattgaaaaacaagagtacttcaatacaaaggctgttgcgctaattaacaacataaatgagcatttctcatatattaaaaattttatcgacgaacagaatgcaataagagaacgaaatattgccacattttcatcagagaagcttgatgaaaggaacaaaagtcttcaacaaaattacgagtcattgaagacagaaaatgaagaaacaaaaaaaaaattgcattcaattatcaaacagtttgaaaaacttttgaaggaagtggattgggatcgtatatctaaagattccagagattacagccgctttaaaaaacagttggaatacctgcaagacacgtaccaggtactgaaatag

SEQ ID NO: 43 - protein, 204 aa, Saccharomyces cerevisiae
MNSGGSDSFDYLLQLTKALSAECRANRQETDRIELLLKRLAKQSGISYDNLSKNIIPDSWKDNASQKASPPTEAQKLISENFKLIYEIEKQEYFNTKAVALINNINEHFSYIKNFIDEQNAIRERNIATFSSEKLDERNKSLQQNYESLKTENEETKKKLHSIIKQFEKLLKEVDWDRISKDSRDYSRFKKQLEYLQDTYQVLK

SEQ ID NO: 44 - DNA, 609 bp, Candida glabrata CBS 138
  CDS (1)..(609)
atgaacgaaggaagctatgataacttcgaatacttgaacttgctggcgaagaacctgagcgttggttgccgagatagcaggaaagagacagataaaatagaactgttattgaaacggttatctaaacaatctgtagtttcatatgaagagttcagccaaagacctagtgaagagaccctagatgcgtataaaaaattatcagaacccaccacaacagagcagttgataagagagaattaccaattgatgtatgaaattgagcaacaggagtacatcaataagagaatcatcgctcttgtaaatagcataaatgagcatctaatatccatcagaaacttcatcatagagcagaaactggctagagatcaaaataacgagatatacatgcatgagaacttcacagtacgagaaaacctactcaagaatagtacagaactactgaaagctagggaacaatgctctcgaaccaatacagaggtggtggtggagaaattcaaaaagctatatgctgagatagattgggatacactacctagtaatctacctgatatcatacaggtgaaggagaaaatcaaacatatcaaggaaacgtataaacttgatttatag

SEQ ID NO: 45 - protein, 202 aa, Candida glabrata CBS 138
MNEGSYDNFEYLNLLAKNLSVGCRDSRKETDKIELLLKRLSKQSVVSYEEFSQRPSEETLDAYKKLSEPTTTEQLIRENYQLMYEIEQQEYINKRIIALVNSINEHLISIRNFIIEQKLARDQNNEIYMHENFTVRENLLKNSTELLKAREQCSRTNTEVVVEKFKKLYAEIDWDTLPSNLPDIIQVKEKIKHIKETYKLDL

SEQ ID NO: 46 - DNA, 630 bp, Kluyveromyces lactis NRRL Y-1140
  CDS (1)..(630)
atggagggatctggagacagttttgagtaccttcttcagttgatgaagactttgagctctcaggcttgggcaacgagacaacagacagaaaaagtggagcagtcattgaagaggctagcgaagcagaatcagataagttacaacgaatattcgaaatctcctaatgatgaaacgctaggacaagtcaatactttaaagcaaaaaactaaggaagaagaactggtcgaagaaaactatcggttaatgtaccagatcgaacatcaagaatacattcactcgaagatatatctgcttatccaacaaatagacgagatgatagtatcaatgcgtaactttatcgtagaatataaaacatcagcgccacagaaacaacaagaattcataacaaaaagtgttacagcaccaatgtcacgactcaagtatagcgagaaacaactaaatgatggccacattaatgccgaaaagcaattaaaaatattgatgggagaattgacggatctattcaatagagtaccatggcataaggtaccgaatgataacctaaactatctacggcttaaaaatgtgatcggagattttgaagataaatatcaaacaaagattgttccggaatcaattgcattgaaatga

SEQ ID NO: 47 - protein, 209 aa, Kluyveromyces lactis NRRL Y-1140
MEGSGDSFEYLLQLMKTLSSQAWATRQQTEKVEQSLKRLAKQNQISYNEYSKSPNDETLGQVNTLKQKTKEEELVEENYRLMYQIEHQEYIHSKIYLLIQQIDEMIVSMRNFIVEYKTSAPQKQQEFITKSVTAPMSRLKYSEKQLNDGHINAEKQLKILMGELTDLFNRVPWHKVPNDNLNYLRLKNVIGDFEDKYQTKIVPESIALK

SEQ ID NO: 48 - DNA, 25 bp, Artificial sequence
  primer
atgaatagcggtggtagtgatagtt

SEQ ID NO: 49 - DNA, 24 bp, Artificial sequence
  primer
ctatttcagtacctggtacgtgtc

SEQ ID NO: 50 - protein, 197 aa, Artificial sequence
  consensus sequence
  Variant (2)..(3): Xaa in position 2 to 3 is any amino acid
  Variant (5)..(5): Xaa in position 5 is any amino acid
  Variant (7)..(7): Xaa in position 7 is any amino acid
  Variant (10)..(11): Xaa in position 10 to 11 is any amino acid
  Variant (13)..(13): Xaa in position 13 is any amino acid
  Variant (15)..(15): Xaa in position 15 is any amino acid
  Variant (18)..(23): Xaa in position 18 to 23 is any amino acid
  Variant (25)..(26): Xaa in position 25 to 26 is any amino acid
  Variant (28)..(30): Xaa in position 28 to 30 is any amino acid
  Variant (32)..(33): Xaa in position 32 to 33 is any amino acid
  Variant (38)..(38): Xaa in position 38 is any amino acid
  Variant (41)..(43): Xaa in position 41 to 43 is any amino acid
  Variant (46)..(48): Xaa in position 46 to 48 is any amino acid
  Variant (50)..(51): Xaa in position 50 to 51 is any amino acid
  Variant (52)..(53): Xaa in position 52 to 53 is any or no amino acid
  Variant (55)..(68): Xaa in position 55 to 68 is any amino acid
  Variant (70)..(73): Xaa in position 70 to 73 is any amino acid
  Variant (75)..(76): Xaa in position 75 to 76 is any amino acid
  Variant (79)..(80): Xaa in position 79 to 80 is any amino acid
  Variant (82)..(82): Xaa in position 82 is any amino acid
  Variant (84)..(84): Xaa in position 84 is any amino acid
  Variant (87)..(87): Xaa in position 87 is any amino acid
  Variant (91)..(97): Xaa in position 91 to 97 is any amino acid
  Variant (99)..(101): Xaa in position 99 to 101 is any amino acid
  Variant (103)..(103): Xaa in position 103 is any amino acid
  Variant (105)..(110): Xaa in position 105 to 110 is any amino acid
  Variant (114)..(114): Xaa in position 114 is any amino acid
  Variant (116)..(138): Xaa in position 116 to 138 is any amino acid
  Variant (140)..(145): Xaa in position 140 to 145 is any amino acid
  Variant (147)..(166): Xaa in position 147 to 166 is any amino acid
  Variant (168)..(172): Xaa in position 168 to 172 is any amino acid
  Variant (174)..(186): Xaa in position 174 to 186 is any amino acid
  Variant (188)..(196): Xaa in position 188 to 196 is any amino acid
GXXDXFXYLXXLXKXLSXXXXXXRXXTXXXEXXLKRLXKQXXXSYXXXSXXXXPXXXXXXXXXXXXXXTXXXXLXXENXXLXYXIEXQEYXXXXXXXLXXXIXEXXXXXXNFIXEXXXXXXXXXXXXXXXXXXXXXXXLXXXXXXLXXXXXXXXXXXXXXXXXXXXLXXXXXWXXXXXXXXXXXXXKXXXXXXXXXY

SEQ ID NO: 51 - protein, 46 aa, Artificial sequence
  protein pattern
  Variant (3)..(3): Xaa in position 3 is any or no amino acid
  Variant (5)..(5): Xaa in position 5 is Asn or Ser
  Variant (7)..(7): Xaa in position 7 is Asp or Glu
  Variant (10)..(10): Xaa in position 10 is any or no amino acid
  Variant (12)..(12): Xaa in position 12 is any or no amino acid
  Variant (14)..(14): Xaa in position 14 is any amino acid
  Variant (16)..(16): Xaa in position 16 is Ala, Asn or Thr
  Variant (19)..(19): Xaa in position 19 is Ala, Ser or Val
  Variant (20)..(20): Xaa in position 20 is Glu, Gly or Gln
  Variant (21)..(21): Xaa in position 21 is Ala or Cys
  Variant (22)..(22): Xaa in position 22 is any amino acid
  Variant (23)..(23): Xaa in position 23 is Ala or Asp
  Variant (24)..(24): Xaa in position 24 is Asn, Ser or Thr
  Variant (26)..(26): Xaa in position 26 is any amino acid
  Variant (27)..(27): Xaa in position 27 is Glu or Gln
  Variant (29)..(29): Xaa in position 29 is Asp or Glu
  Variant (30)..(30): Xaa in position 30 is Lys or Arg
  Variant (31)..(31): Xaa in position 31 is Ile or Val
  Variant (33)..(34): Xaa in position 33 to 34 is any amino acid
  Variant (39)..(39): Xaa in position 39 is Ala or Ser
  Variant (42)..(42): Xaa in position 42 is Asn or Ser
  Variant (43)..(43): Xaa in position 43 is any amino acid
  Variant (44)..(44): Xaa in position 44 is Ile or Val
GSXDXFXYLXLXLXKXLSXXXXXXRXXTXXXEXXLKRLXKQXXXSY

SEQ ID NO: 52 - protein, 46 aa, Artificial sequence
  protein pattern
  Variant (2)..(2): Xaa in position 2 is any or no amino acid
  Variant (4)..(4): Xaa in position 4 is any amino acid
  Variant (5)..(6): Xaa in position 5 to 6 is any or no amino acid
  Variant (8)..(8): Xaa in position 8 is Ile or Val
  Variant (9)..(9): Xaa in position 9 is Glu, Arg or Ser
  Variant (12)..(12): Xaa in position 12 is Phe or Tyr
  Variant (13)..(13): Xaa in position 13 is any amino acid
  Variant (15)..(15): Xaa in position 15 is Ile or Met
  Variant (17)..(17): Xaa in position 17 is Glu or Gln
  Variant (20)..(20): Xaa in position 20 is any amino acid
  Variant (24)..(24): Xaa in position 24 is Phe or Ile
  Variant (25)..(26): Xaa in position 25 to 26 is any amino acid
  Variant (27)..(27): Xaa in position 27 is Lys or Arg
  Variant (28)..(28): Xaa in position 28 is Ala or Ile
  Variant (29)..(29): Xaa in position 29 is any amino acid
  Variant (30)..(30): Xaa in position 30 is Ala or Leu
  Variant (32)..(32): Xaa in position 32 is Ile or Val
  Variant (33)..(33): Xaa in position 33 is Asn or Gln
  Variant (34)..(34): Xaa in position 34 is Asn, Gln or Ser
  Variant (36)..(36): Xaa in position 36 is Asp or Asn
  Variant (38)..(38): Xaa in position 38 is any amino acid
  Variant (39)..(39): Xaa in position 39 is Phe, Ile or Leu
  Variant (40)..(41): Xaa in position 40 to 41 is any amino acid
  Variant (42)..(42): Xaa in position 42 is Ile or Met
  Variant (43)..(43): Xaa in position 43 is Lys or Arg
TXEXXXLXXENXXLXYXIEXQEYXXXXXXXLXXXIXEXXXXXXNFI

SEQ ID NO: 53 - DNA, 1497 bp, Brassica napus
  CDS (1)..(1497)
atggcgatgatagagcaaaggccgaagacgaagatcgtgtgtaccgttggtcccgcttccagatccgttgagatggtcgagaagcttctcagggctggcatgaacgtcgctaggtttaacttctctcacggatctcatgagtaccaccaggagactctcgataatctccgtcaagctatgctcaacactggtatcctctgcgccgtcatgctcgataccaagggtccagagatccgaaccggattcttgaaagatgggaaaccaatccagttgaaacaaggccaagagatcaccatctccactgactacgacttgcagggagacgaggaaacaatctgcatgagctacaagaagttggctgaggatgtgaacccagggatggttatcctctgtgctgacggtacaatctcgttactggtcctctcctgtgacacagagaacggcacagtccgttgccgctgcgagaactctgccatgcttggtgagaggaagaacgttaatctcccaggtgttgttgtggacctcccaactctaactgagaaagacaaagaagacatcatgaagtggggagtcccgaatcagatcgatatgatcactttgtcttttgtcagaaaaggttcggacttggttcaggtcaggaaactgttaggagatcatgccaagaacattcttctcatgtcaaaggttgagaaccaagaaggtgtggcgaacttcgatgacattcttgtcaactccgacgcgtttatgattgcaagaggagatctcggcatggagatcccaatcgagaagatcttcctagctcagaaagtgatgatctacaaatgcaacatccagggaaaaccagtggtcacagcgactcagatgctcgagtccatgatcaaatcccctcgacccacaagagctgaagccactgacgtagcaaacgcagtcctcgacggcaccgactgtgtcatgctcagcggagaaaccgcagctggagcttaccctgagctagctgtacgcacgatggccaagatctgcgttgaagccgagagcacgcttgactacggagacgtcttcaagaggatcatgcagtactctccggttccaatgtccccgctggagtcactggcctcctctgcagtcagaacagctaactcggctagagccacgctcatcatggtcctaaccaggggaggaagcacggcgaggcttgtggctaaatacagaccagggatgcctattttgtcagtcgttgttcccgagatgaaaacagacttctttgactggtcttgcagcgacgaatcgccggcgaggcacagtctcatcttccgtgggttgattccggtgctgtacgcagggtctgctagagcctcgcatgatgagtccacagaagaagctattgagtttgcgactcagcatgggaaagagaagcagctgtgtaagactggagactctgttgttgctctgctccgagttggtaatgcttctctaatcaagatcttgaccgtcaagtga

SEQ ID NO: 54 - protein, 498 aa, Brassica napus
MAMIEQRPKTKIVCTVGPASRSVEMVEKLLRAGMNVARFNFSHGSHEYHQETLDNLRQAMLNTGILCAVMLDTKGPEIRTGFLKDGKPIQLKQGQEITISTDYDLQGDEETICMSYKKLAEDVNPGMVILCADGTISLLVLSCDTENGTVRCRCENSAMLGERKNVNLPGVVVDLPTLTEKDKEDIMKWGVPNQIDMITLSFVRKGSDLVQVRKLLGDHAKNILLMSKVENQEGVANFDDILVNSDAFMIARGDLGMEIPIEKIFLAQKVMIYKCNIQGKPVVTATQMLESMIKSPRPTRAEATDVANAVLDGTDCVMLSGETAAGAYPELAVRTMAKICVEAESTLDYGDVFKRIMQYSPVPMSPLESLASSAVRTANSARATLIMVLTRGGSTARLVAKYRPGMPILSVVVPEMKTDFFDWSCSDESPARHSLIFRGLIPVLYAGSARASHDESTEEAIEFATQHGKEKQLCKTGDSVVALLRVGNASLIKILTVK

SEQ ID NO: 55 - DNA, 2347 bp, Oryza sativa
  CDS (116)..(1648)
gggagaccaagaagaagaaagaggaaaccacacccacctccatctccgcctccgccgccgccgccgccgaccaagtcgagggggagatccagcgagagcgaggaggaggaggaggatggcggtgatggaggagcagcaggagggagccgcgggggtgatgcggcggaggcccaagacgaagatcgtgcgcacgctggggccggcgtcgaggtcggtggagatgatcgggcggctgctccgcgccgggatgtgcgtcgcgcgcttcaacttctcccacggatcccacgagtaccaccaggagacgctcgacaacctccgcgccgccatggagagcaccggcatcctctgcgccgtcatgctcgacaccaaggggccagagatccgaactggatttctgaaagatggaaaacccgtacagttgaagaagggtcaagaaatcacagtttcaactgattatagcataaagggtgatgacaacatgatatcaatgagctacaagaagctagcggtggatctgaagccaggcagtgtaatattatgtgctgatggcaccatcactcttactgtccttcactgtgataaagagcaaggcttggttcgctgccgttgtgagaacactgctatgcttggtgagaggaagaatgttaaccttccaggagttattgttgatctcccgacacttactgagaaggacaaggaggatattcttaaatggggtgtcccaaacaagattgacatgattgctctgtcttttgttcgtaaaggctcagaccttgtagaggtcaggaaggtgcttgggaagcatgcaaagtcaataatgctgatgtcaaaggttgagaatcaagagggagtggctaactttgatgatatcctggcacaatctgatgcttttatggttgcaaggggtgatttgggaatggaaattccgatagagaagatcttttatgcacagaaggtgatgattttcaagtgcaatattcagggcaagccagttgtgactgcaacccagatgttggaatctatgatcaagtctccccgccctactagagcagaagcgactgatgttgccaatgcagttcttgatggcactgactgtgtcatgctcagtggtgagacagctgctggggcttacccggaactggctgtacggaccatggccaagatctgcctgcaagcggagtcatgcgtcgaccatgccgctgttttcaagtccattaccgcatcagctccaattcccatgagcccattggagagccttgcatcatcagctgtgcgtacagcgaactctgccaaggcggcgctcatcttggtcctgactaggggaggaacaactgctaggctggtggccaagtacaggccatccatgccgattctgtccgtcgtggttcctgagctgaaacagaccgactccttcgactggacctgcagcgacgaagctcctgcgcggcacagcctcatcgtcaggggagtgatcccgatgctgagtgtagccactgccaaggccttcgacaacgaagccactgaagaagctctcgggttcgccatcagcaacgccaaggcgatggggctctgcaactccggtgagtccgtcgtcgccctccaccggatcggaactgcatctgtcatcaagctcctgacagcgaactagtggcagacggcagttaatccacaccattttgctcggaggaaaatttttgctgggggatttttacttaccacgcatatctatagcttttgttgccatgatagtggcatttgcattcaggtgcaccttcggtgtttgctgttcatgggttaaccattgaaacagttaaattcgttattgctaccgcagcttatttcgctgcctctgctgctactagtattaaacttgacagccgttacgtaatttgttagttctattctgttctgttttcttggctgaaatgcatttcttgaattcgtttcgttatgatgaatatggttcggggttctgcgtaactggttactgctagggatatgaaatggagttgatagtttccgtccactacttgtagggatataaaatggagtggatagtttcatccgttcggagtagaaactgctccaaatggattgaacaatgttatttggatatctgttgaaggcgtgaaacatctcattttttacatgttggacttaattaggcattgtttataatttatgatcaaacttttttatataaaacaagcttattttgtgtttatgtgatggtatttgtttctattagaagtttaggtggttttcatgttttgagaaatttttgttttgatatttgtgtacgataaaaacgaatatggtataaacattatccatctgtattcatcct

SEQ ID NO: 56 - protein, 510 aa, Oryza sativa
MAVMEEQQEGAAGVMRRRPKTKIVRTLGPASRSVEMIGRLLRAGMCVARFNFSHGSHEYHQETLDNLRAAMESTGILCAVMLDTKGPEIRTGFLKDGKPVQLKKGQEITVSTDYSIKGDDNMISMSYKKLAVDLKPGSVILCADGTITLTVLHCDKEQGLVRCRCENTAMLGERKNVNLPGVIVDLPTLTEKDKEDILKWGVPNKIDMIALSFVRKGSDLVEVRKVLGKHAKSIMLMSKVENQEGVANFDDILAQSDAFMVARGDLGMEIPIEKIFYAQKVMIFKCNIQGKPVVTATQMLESMIKSPRPTRAEATDVANAVLDGTDCVMLSGETAAGAYPELAVRTMAKICLQAESCVDHAAVFKSITASAPIPMSPLESLASSAVRTANSAKAALILVLTRGGTTARLVAKYRPSMPILSVVVPELKQTDSFDWTCSDEAPARHSLIVRGVIPMLSVATAKAFDNEATEEALGFAISNAKAMGLCNSGESVVALHRIGTASVIKLLTAN

SEQ ID NO: 57 - DNA, 1712 bp, Glycine max
  CDS (25)..(1533)
agcacattgatatctaaggaaggaatggaaaagatgttagggagaaattgtgggaagttgaagaccaagattgtgtgcactttgggaccatcaagtaggtcagtggagatgctggagaagcttctgaaggcagggatgaacgtggctcgcttcaacttctctcatggcactcactcttaccaccaagagacccttgataatctcagaactgcaatgaacaacaccggcattctctgtgctgtcatgttggacaccaagggtccagagatcagaactgggtttttgaatgaagggaagccaatacaaatccataggggacaagaaatcacaatcacaactgattacagcataaagggtgatgagaacatgatcagcatgagctacaagaagttggcacaccatttgagtccagggagtaatattctgtgtgctgatgggacaattagtttcactgtgctagaatgtgacaaagagaatggcttggttcgatgtcattgcgaaaattctgcagttctgggggagaggaagaatgttaaccttcctggagtggttgttgatcttccaaccttgacagagaaggacaaggaggacattttggagtggggggttcctaataagattgatatcattgctctctcttttgttagaaaaggttcagaccttgtggaggtcagaaatctacttggaaagcatgcaaaaagcatacttctcatgtccaaggttgaaaatcaagagggtgttgcaaattttgatgaaatactggaaaattcagatgcattcatggtggcaagaggtgacctgggaatggaaattccaattgagaagatctttctagctcagaaagttatgatacacaagtcaaacattaaaggcaagcctgtggtgacagccacccagatgttagagtccatgatcaaatctcctcggcctacacgagccgaggccaccgatgttgccaatgcagtccttgatggcacagactgtgttatgcttagcggggaaactgctgcaggagcctatccagacattgctgtccaaaccatggccagaatctgttcagaggcagagagtttcatagactatggtgacctattcaagagagtgatggaaacagctccaactccaatgagtcctttggagagcatggcttcagcggcagttaggactgcaaattgcatcaatgctgcactcatcttagttctaactagaggaggaaccacttcaaaacttgtggcaaagtatagacccagcatgcctattctgtcactggtggttcctgagataacaacagattcttttgaatggttctgcagtcaggaagcccctgcaaggcatagccttatctaccggggactaatacctgttttgggcacaggttcttttggagattccatgactgaatcaacagaagaaaccatacagcttgctctttcatatgcaaagaaaaatgacttgtgcaagcctggagactctgttgtagcacttcaccgtcttgagtctggtactgtcatcaagatattggatgtttgttaactgaagtcgcaagtcaaggactaggactaatcccttgttttgttcagttttccactttttacttgtaggcttgttttcttgttctggttttcagaaaatagttctttgttctctttctgatttgattgacgatggtatctaatgtgagaattaaagaataatatactgaattattcctg

SEQ ID NO: 58 - protein, 502 aa, Glycine max
MEKMLGRNCGKLKTKIVCTLGPSSRSVEMLEKLLKAGMNVARFNFSHGTHSYHQETLDNLRTAMNNTGILCAVMLDTKGPEIRTGFLNEGKPIQIHRGQEITITTDYSIKGDENMISMSYKKLAHHLSPGSNILCADGTISFTVLECDKENGLVRCHCENSAVLGERKNVNLPGVVVDLPTLTEKDKEDILEWGVPNKIDIIALSFVRKGSDLVEVRNLLGKHAKSILLMSKVENQEGVANFDEILENSDAFMVARGDLGMEIPIEKIFLAQKVMIHKSNIKGKPVVTATQMLESMIKSPRPTRAEATDVANAVLDGTDCVMLSGETAAGAYPDIAVQTMARICSEAESFIDYGDLFKRVMETAPTPMSPLESMASAAVRTANCINAALILVLTRGGTTSKLVAKYRPSMPILSLVVPEITTDSFEWFCSQEAPARHSLIYRGLIPVLGTGSFGDSMTESTEETIQLALSYAKKNDLCKPGDSVVALHRLESGTVIKILDVC

SEQ ID NO: 59 - DNA, 1984 bp, Sorghum bicolor
  CDS (202)..(1710)
gtcctcgtcgcccacggaatcgcaattccacaccttcctagcagtctcctcaaagcgcccccattcattcttagcagatctcgctgctttccgccgctcgacgccgacgccgacgccgacgcagacgccaccaccgcttccccccattcccccgtcccggaccgcggagcagagagggagagagatccggagcggcgcgcgatggcgaacatcgacatggcgaagatcctggcggacctggaccgcggcgccggcgacgcgcgggtgcccaagaccaagctcgtctgcacgctcggcccggcctcccgcaccgtgcctatgctcgagaagctgcttcgcgccggcatgaacgtcgcgcgcttcaacttctcccacggcacccacgagtaccaccaggagacgctcgacaacctccgacaggccatgcacaacaccggcatcctctgcgccgtcatgctcgacaccaagggtcctgagattcgtacagggtttttgaaggatggtaaaccaattaagctaaccaagggtcaagaaatcactgtcaccactgattatgatatcaagggtgatgaaaatatgattgctatgagttacaagaaactgcctgttgacgtgaagcctggaaatgtcatactctgcgcagatggtactatctctctggccgttctgtcttgcgatcctgatgctggaactgtgaggtggaggtgtgtgaaccctccagggcttggtgtgggtctccccacactcacagacaaggacaaggaggacatccttaagtggggtgttccaaacaagattgacatgattgccttgtcatttgttcggaagggttcggatcttgtggaggttaggaaggtacttggcgagcatgccaagtccataatgctgatgtcaaaggttgagaatcaagagggagtagctaactttgatgatatcctggcaaactctgatgcttttatggtggcaagaggtgatttagggatggaaattcctatagagaagattttctttgcacagaaggtgatgattttcaagtgcaatattcaaggcaagcctgttgtgactgcaacccagatgttggaatctatgatcaagtctcctcgccctactcgggcagaagcaaccgatgttgcaaacgcagttcttgatggcacgggtcctgtcatgcttagtggcgagactgctgctggggcttatccagagctggcggtgcagactatggccaagatctgcctacaagcagagtcttgtgtagaccatgcttctgttttcaaatcaatcatggcttcagctccaattccaatgagcccattggagagccttgcatcatcagctgtccgcacagcaaactctgccaaggcagcacttatcttagtcctgaccaggggaggaacaactgctaggcttgtggccaagtataggccatccatgccgattctgtccgttgtggttcctgagctgaagacagactcgttcgactggacctgcagtgacgaggggccggcaaggcacagcctcattgtgaggggtgttatcccaatgctgagtgctggcactgccaaggcctttgacaatgaagccactgaagaagctcttggttttgccattgaaaatgcaaaggcgatggggctatgcaacaccggtgagtccgttgtggcccttcaccgcatcgggactgcatccgtcatcaagctcctgactgtgaactagggtctagccgaagggggagccacaccactttgtttggtggaatttttgtgaggctgcttacgcatatcagcgaatctgcagcttttttgttgccaaagatacagactttgggttctggtacaccttggtgtcacaaggttgtgggaatttgtcatttagatgttagtgatttaaacagttatcaactgctatagctaattaatttgcactgtgttgcaactgctatcgtactgaaaactttatggttgcttcaccatgtttgctggttgatttt

SEQ ID NO: 60 - protein, 502 aa, Sorghum bicolor
MANIDMAKILADLDRGAGDARVPKTKLVCTLGPASRTVPMLEKLLRAGMNVARFNFSHGTHEYHQETLDNLRQAMHNTGILCAVMLDTKGPEIRTGFLKDGKPIKLTKGQEITVTTDYDIKGDENMIAMSYKKLPVDVKPGNVILCADGTISLAVLSCDPDAGTVRWRCVNPPGLGVGLPTLTDKDKEDILKWGVPNKIDMIALSFVRKGSDLVEVRKVLGEHAKSIMLMSKVENQEGVANFDDILANSDAFMVARGDLGMEIPIEKIFFAQKVMIFKCNIQGKPVVTATQMLESMIKSPRPTRAEATDVANAVLDGTGPVMLSGETAAGAYPELAVQTMAKICLQAESCVDHASVFKSIMASAPIPMSPLESLASSAVRTANSAKAALILVLTRGGTTARLVAKYRPSMPILSVVVPELKTDSFDWTCSDEGPARHSLIVRGVIPMLSAGTAKAFDNEATEEALGFAIENAKAMGLCNTGESVVALHRIGTASVIKLLTVN

SEQ ID NO: 61 - DNA, 1866 bp, Glycine max
  CDS (48)..(1628)
ggtgatcggtgatcggtgatcagtggtttggtgttgttgatagaaaaatgcattccagccctttgcttcttgaggaacccattaggatggcatccattcttgagccatccaagcctactttctttccagctatgacaaaaattgttggcacacttggtctaaagtcacgatcagttgatacaatttcccgttgccttgatgcaggaatgtctgtggcaaggtttgacttctcatggggtgatccagaataccatcaagagacattggaaaatttgagagttgctatcaaaagtaccaagaaactctgtgcggttatgctagatactgtgggtcctgaattacagattgagaataagacagatcacccaatcacccttgaagcagacacattagttgtcttaactccagatcaaaccaaagaagctggttcaaatctcttaccagtaaattttaacggactatcaaaggctgtgaagaagggtgatactatttttatcggaaaatacctgtttactggaagtgaaacagcttccttatggctggaggtcagtgaggtgaaaggtgaggatgtcacctgtctggtaaaaaacactgctacactgtctggatcattgtttactgcacatgtctctcagatccacatcgatcttcctactcttgctgataaagataaggaggtaataagcacatggggtgttcgaaacaatattgacttcctttcattatatacccggcacgttgaagatattcgtcatgcgcgtgaatttctttctaaattgggtgaccttaagcagacacatatttatgcaaagattgaaaatatagagggactgaagcattttgatgaaatattgagagaagcagatggcatcatcctcgctcgtggaaatttagggatagaactcccacctgagaaggttttcttattccaaaaggctgctatttacaagtgcaacatggttggaaagccagttgttgttacacgtgttgtagactctatgactgataatctaagacctactcgtgctgaagcaacagatgttgccaatgcagtgctggatggaagtgatgcaattctccttggagcagagaccctgcggggacaataccctgtagagaccatttctatagttggaaaaatatgtgctgaggcagagaaagttcataatcaagatttgtattttaagaaggctgtcaaatatgtgggagagccaatgagccatttggaatcaattgcttcctctgcggttcgagcagctatcaaggttaaagcctctgttattatttgcttcacttcatctggaagagctgcaagattgattgctaagtacagaccaattatgcctgtcatatccgttgtcattcctcaactgaagacaaatcaactccgatggacattcaccggtgcttttgaggctaggcaatctcttattgtgaggggtctttttcctatgctggcagatccacgacacccggctgagtctaaaagtggaacaaatgaatcaattttgaaggttgctttagatcatggcaaggcttttggcatcataaagccacatgaccgagttgttgtctgccagaaagtagctgactcgtcagttgtgaagattcttgagctcgaagattgattggttcaatacaacttatgtgtcatttgatgcatcataataaaacttcttctcaaccttttcattctagcgtttgtgtttcattgaagtacaataacaaacacataacattgagatacatattgtagagtgggaaagagacttttttgtttgattgtttttttaataggcaatcacagttttgagctataaataatggtattggtatggaaataaaaaaaaatgatgttatatcagc

SEQ ID NO: 62 - protein, 526 aa, Glycine max
MHSSPLLLEEPIRMASILEPSKPTFFPAMTKIVGTLGLKSRSVDTISRCLDAGMSVARFDFSWGDPEYHQETLENLRVAIKSTKKLCAVMLDTVGPELQIENKTDHPITLEADTLVVLTPDQTKEAGSNLLPVNFNGLSKAVKKGDTIFIGKYLFTGSETASLWLEVSEVKGEDVTCLVKNTATLSGSLFTAHVSQIHIDLPTLADKDKEVISTWGVRNNIDFLSLYTRHVEDIRHAREFLSKLGDLKQTHIYAKIENIEGLKHFDEILREADGIILARGNLGIELPPEKVFLFQKAAIYKCNMVGKPVVVTRVVDSMTDNLRPTRAEATDVANAVLDGSDAILLGAETLRGQYPVETISIVGKICAEAEKVHNQDLYFKKAVKYVGEPMSHLESIASSAVRAAIKVKASVIICFTSSGRAARLIAKYRPIMPVISVVIPQLKTNQLRWTFTGAFEARQSLIVRGLFPMLADPRHPAESKSGTNESILKVALDHGKAFGIIKPHDRVVVCQKVADSSVVKILELED

SEQ ID NO: 63 - DNA, 1958 bp, Triticum aestivum
  CDS (135)..(1718)
atcccgcatcgcatcgcactaggtctcggacattcctctttctctcccttgcttggggaagaagaagaagaagaagagagggctcccgacgccgtcgcccctcgccgccgatctgatctcaggagccagcgaagatgcattccaccaatctgctcctcgaggagcccatccggatggtctccatcctcgagccatccaagccgaacttcttcccggcgatgacgaagatcgtggggacgctgggtcccaagtcccggtccgttgaggccatctccgcctgtctaaaggccggcatgtctgtggcccgtttcgatttctcgtggggggatgccgcgtaccaccaggagacactcgagaacctcaagctcgccatcaaggccaccaagaagctatgtgctgttatgctcgacactgttggccctgagttgcaagtggtgaacaagagtgaagtcacaatctcgcttgaagagaacgagtctgttgttctcacccctcacaagggccaggaggcctcttccaagttgctccctatcaacttcgctggactcgccaaggctgtgaagcccggagccacaatattcgttgggcaatatttgttcacgggcagtgagactacatcagtttggctggaggtttctgaagttcaaggggatgacgtggtttgcgtgatcaagaactcagctaccctggctgggtcactcttcacattgcactgctcccagatccatatcgacatgcccacgctgtctgatgaggataaagatgttatgaaaaaatggggtgctccaaacaagattgacttcctctctctttcttatacaaggcacgcagaagatgtgcggcaagcacgggagttcctctctaagttaggtgatcttagccaaactctgatttttgccaaaattgagaatgtggagggcttgaaccattttgatgagatcctggaggaagcggatggtatcattctgtcaagagggaaccttggaattgatcttccacctgaaaaggtgttcttatttcagaagtctgctctgcacaagtgcaacatggctggaaagcctgctgttgttactcgtgttgtggacagtatgacggacaacctaaggcctactcgtgcggaggcaactgatgtggcaaatgcggtgctggatggtagtgatgccattctccttggtgccgagactctccgtgggttgtatccagttgagactatttcaacagtgggcagaatttgtgctgaggctgagaaggttttcaaccaagatttgtacttcaagcgaactgtgaaatatgtgggagaacccatgacccacttggagtctattgcttcctctgcagtgcgggctgctattaaagttaaggcttcggtcatcatttgcttcacctcatctggacgggctgcaaggctaattgccaagtacaggcccaccatgcctgtcctctctgttgtcattcctcgtctgaaaacaaatcaattgaagtggagcttcacaggtgcatttgaggcaagacaatcactcatagttagaggcctctttcccatgcttgccgatccacgtcatccggctgaatctactagcactacaaatgaatcagtgttgaaggttgctcttgaccacggcaaagcatccggtgtgatcaagtcgcatgaccgcgttgtcgtgtgccagaaagtgggagattcctctgtcgtgaagatcattgagctggacgactaggcaaaattagtctttgctcagggcttgccagatttttgactaggccaaaacgttgcttggtggctatgtataattctatctatagttttgcaaaacgagcagtttttcctatggtgtcatcataggatccgcggttaccattcgaaaacctacgctagttattatggatatgtcctcagattttactgcagtgtagcgagtaaatgatctgatggaataatgatatcaaaactttgtgac

SEQ ID NO: 64 - protein, 527 aa, Triticum aestivum
MHSTNLLLEEPIRMVSILEPSKPNFFPAMTKIVGTLGPKSRSVEAISACLKAGMSVARFDFSWGDAAYHQETLENLKLAIKATKKLCAVMLDTVGPELQVVNKSEVTISLEENESVVLTPHKGQEASSKLLPINFAGLAKAVKPGATIFVGQYLFTGSETTSVWLEVSEVQGDDVVCVIKNSATLAGSLFTLHCSQIHIDMPTLSDEDKDVMKKWGAPNKIDFLSLSYTRHAEDVRQAREFLSKLGDLSQTLIFAKIENVEGLNHFDEILEEADGIILSRGNLGIDLPPEKVFLFQKSALHKCNMAGKPAVVTRVVDSMTDNLRPTRAEATDVANAVLDGSDAILLGAETLRGLYPVETISTVGRICAEAEKVFNQDLYFKRTVKYVGEPMTHLESIASSAVRAAIKVKASVIICFTSSGRAARLIAKYRPTMPVLSVVIPRLKTNQLKWSFTGAFEARQSLIVRGLFPMLADPRHPAESTSTTNESVLKVALDHGKASGVIKSHDRVVVCQKVGDSSVVKIIELDD

SEQ ID NO: 65 - DNA, 1524 bp, Oryza sativa
  CDS (1)..(1524)
atggaggagcagcaggagggagccgcgggggtgatgcggcggaggcccaagacgaagatcgtgtgcacgctggggccggcgtcgaggtcggtggagatgatcgggcggctgctccgcgccgggatgtgcgtcgcgcgcttcaacttctcccacggatcccacgagtaccaccaggagacgctcgacaacctccgcgccgccatggagagcaccggcatcctctgcgccgtcatgctcgacaccaaggggccagagatccgaactggatttctgaaagatggaaaacccgtacagttgaagaagggtcaagaaatcacagtttcaactgattatagcataaagggtgatgacaacatgatatcaatgagctacaagaagctagcggtggatctgaagccaggcagtgtaatattatgtgctgatggcaccatcactcttactgtccttcactgtgataaagagcaaggcttggttcgctgccgttgtgagaacactgctatgcttggtgagaggaagaatgttaaccttccaggagttattgttgatctcccgacacttactgagaaggacaaggaggatattcttaaatggggtgtcccaaacaagattgacatgattgctctgtcttttgttcgtaaaggctcagaccttgtagaggtcaggaaggtgcttgggaagcatgcaaagtcaataatgctgatgtcaaaggttgagaatcaagagggagtggctaactttgatgatatcctggcacaatctgatgcttttatggttgcaaggggtgatttgggaatggaaattccgatagagaagatcttttatgcacagaaggtgatgattttcaagtgcaatattcagggcaagccagttgtgactgcaacccagatgttggaatctatgatcaagtctccccgccctactagagcagaagcgactgatgttgccaatgcagttcttgatggcactgactgtgtcatgctcagtggtgagacagctgctggggcttacccggaactggctgtacggaccatggccaagatctgcctgcaagcggagtcatgcgtcgaccatgccgctgttttcaagtccattaccgcatcagctccaattcccatgagcccattggagagccttgcatcatcagctgtgcgtacagcgaactctgccaaggcggcgctcatcttggtcctgactaggggaggaacaactgctaggctggtggccaagtacaggccatccatgccgattctgtccgtcgtggttcctgagctgaaacagaccgactccttcgactggacctgcagcgacgaagctcctgcgcggcacagcctcatcgtcaggggagtgatcccgatgctgagtgcagccactgccaaggccttcgacaacgaagccactgaagaagctctcgggttcgccatcagcaacgccaaggcgatggggctctgcaactccggtgagtccgtcgtcgccctccaccggatcggaactgcatctgtcatcaagctcctgacagcgaactag

SEQ ID NO: 66 - protein, 507 aa, Oryza sativa
MEEQQEGAAGVMRRRPKTKIVCTLGPASRSVEMIGRLLRAGMCVARFNFSHGSHEYHQETLDNLRAAMESTGILCAVMLDTKGPEIRTGFLKDGKPVQLKKGQEITVSTDYSIKGDDNMISMSYKKLAVDLKPGSVILCADGTITLTVLHCDKEQGLVRCRCENTAMLGERKNVNLPGVIVDLPTLTEKDKEDILKWGVPNKIDMIALSFVRKGSDLVEVRKVLGKHAKSIMLMSKVENQEGVANFDDILAQSDAFMVARGDLGMEIPIEKIFYAQKVMIFKCNIQGKPVVTATQMLESMIKSPRPTRAEATDVANAVLDGTDCVMLSGETAAGAYPELAVRTMAKICLQAESCVDHAAVFKSITASAPIPMSPLESLASSAVRTANSAKAALILVLTRGGTTARLVAKYRPSMPILSVVVPELKQTDSFDWTCSDEAPARHSLIVRGVIPMLSAATAKAFDNEATEEALGFAISNAKAMGLCNSGESVVALHRIGTASVIKLLTAN

SEQ ID NO: 67 - DNA, 1883 bp, Brassica napus
  CDS (119)..(1651)
caacccgaaaaaacaagaggttgttcttgttccgacacgacaacacatccagtatcggagctaataagagggaagaaagaagaaatagttgactgtgtttaagggtttctgttgaaaaatgtcgaacatagacattgaagggatattgaaggagctacctaacgatgggaggatcccaaaaaccaagatcgtttgcactctaggaccagcttctcgcactgttcctatgatcgaaaagcttctcagagccggtatgaacgtcgctcgcttcaacttctcacatggcagccatgagtatcaccaaggcacactcgacaacctccgcaccgctatgcagaacacaggcattctcgccgccgtcatgcttgacacaaagggacctgagattcgtactggtttcttgaaagatgggaaccctatacaactcaaggaaggccaagagatcactatcaccactgactacgaaactttaggagatgagacgacgatctccatgagctataagaagcttcccttagatgtgaagcccggaaacaccatactctgtgcagatggaagcataagtctagctgtcttgtcatgtgatccagagtctggaactgttaggtgcaggtgcgaaaacacggcgatgcttggcgagagaaagaacgtgaatctccccggtgtcgttgttgatctccccactctgacagacaaggatattgaagatattatgggttggggtgttcctaacagcatcgatatgattgcgctttcttttgtccgtaaaggctcagatcttgttaatgtcaggagggttcttggttctcatgctaaaagcattatgctgatgtcaaaggttgagaaccaggaaggagtggtgaactttgatgagatactgcgcgaaacagatgcattcatggtcgctcgtggtgatctcgggatggagattcccatagagaagatcttcttagctcagaagctgatgatctacaagtgcaaccttgcaggcaaaccagtggtgacagccactcagatgcttgagtcaatgatcaagtcaccaaggccaacacgtgctgaagccacggacgttgccaacgccgtccttgacggcacagactgcgtgatgctcagcggagagagcgcagcaggagcttatccggagatagccgtgaaagtcatggccaagatctgcattgaagcggagagctctcttgactacaacacgatctttaaagagaggatcagagcaactccggttccaatgagcccgttagagagtcttgcatcgtcagctgtgagggctgcgaacaaagcgcatgcgaagctcatcattgtgttgactcgtggaggctcaacagctaagcttgtagctaagtacagaccctctgttccgattctttcggtggttgtaccagttatgaccacggattcctttgactggacttgtagtgacgagtcgcctgcaaggcatagtttgatatacagaggtttgatccctatgttggctgaaggatctgcaaaggcgacagatagtgagtccacagaggttatcattgaatccgctttgaagtcagctgtgcagagaggactgtgcaaccatggtgatgctgttgtggcgctgcaccgtattggagtcgcctcggttattaagatctgtgtggttaagtaaagaaataaagaatagctcttggctccttatgattgttggcaatcgtaactgagttgacttcgttacttgaaataaagatgtactgttggagacatctctctctctctctctctctctctctctctctgtcttttcagttttcaagattatgaatcttaaatctgctttgtatgaatcactatgtataacactgtttctcttcataagctttgcttacaaaaaaaaaaaaaaa

SEQ ID NO: 68 - protein, 510 aa, Brassica napus
MSNIDIEGILKELPNDGRIPKTKIVCTLGPASRTVPMIEKLLRAGMNVARFNFSHGSHEYHQGTLDNLRTAMQNTGILAAVMLDTKGPEIRTGFLKDGNPIQLKEGQEITITTDYETLGDETTISMSYKKLPLDVKPGNTILCADGSISLAVLSCDPESGTVRCRCENTAMLGERKNVNLPGVVVDLPTLTDKDIEDIMGWGVPNSIDMIALSFVRKGSDLVNVRRVLGSHAKSIMLMSKVENQEGVVNFDEILRETDAFMVARGDLGMEIPIEKIFLAQKLMIYKCNLAGKPVVTATQMLESMIKSPRPTRAEATDVANAVLDGTDCVMLSGESAAGAYPEIAVKVMAKICIEAESSLDYNTIFKERIRATPVPMSPLESLASSAVRAANKAHAKLIIVLTRGGSTAKLVAKYRPSVPILSVVVPVMTTDSFDWTCSDESPARHSLIYRGLIPMLAEGSAKATDSESTEVIIESALKSAVQRGLCNHGDAVVALHRIGVASVIKICVVK

SEQ ID NO: 69 - DNA, 1911 bp, Brassica napus
  CDS (85)..(1668)
ccaaacctcacacacacacagacacacaccttccatctctccgctcgccgtcgatcatctgagatctctctcccctcaccaaagatgcattcgagccatctccttctcgaggagccgatcaggatggcttctatcctcgagccatccaaatccagcttctttccggcgttaactaagatcgtcgggactctcggtcccaaatccagatccgttgagacactctccggctgtctcaaatccggcatgtctgtggctagattcgatttctcttggggagacgctgagtatcaccaagagacgcttgataatctgaagattgctgttaagagcaccaagaagctttgtgctgttatgcttgatacagtgggacctgagcttcaagtgatcaacaagtctgagaaagctattactcttaaagctgatggacttgttactttgactcctaatcaagaccgagaagcctcttctgaagtccttcccattaactttgatggccttgccaaggcggtgaagaaaggagacactatctttgttgggcagtacctattcactggtagtgaaacaacttcagtttggctcgaggttgatgaagttaaaggagatgatgtcatttgcctttcaaggaatgctgctactctcgctggttctatgttcaccttgcacgcctctcaagttcacatcgatatgccaactcttactgagaaagataaagaggttataagcacatggggagttcaaaacaaaatcgactttctctcgttgtcctattgtcgccatgcagaggatgttcgccagacccgtgagatgcttaaaaagttgggtgacctctctcaaacacaaatatttgccaagattgagaacgttgagggactaaaccactttgatgagattctacaagaagctgatggaattattctttctcgtgggaacttgggtattgatctacccccggagaaggtgtttttgtttcaaaaggcggctctttacaagtgcaacatggcaggaaagccagccgttcttactcgtgttgttgatagtatgactgacaacttgcgaccaactcgtgcagaggcaacagatgttgctaatgctgttttagatggaagtgatgcaattcttctcggtgctgagactcttcgcggtctgtaccctgtggagactatatcaactgtcggaaggatctgtgctgaggcagagaaggttttcaatcaagatttgtacttcaagaagactgtcaagtatgttggagagccgatgtctcacctcgaatccattgcttcttcagctgtaagggcagcaatcaaggttaaggcatccgtcattatatgctttacctcttctggaagagcagccaggttgattgctaaatacaggccaacaatgccggttatttctgtagtcattccacgggttaagacaaatcagctaaaatggagcttcagtggagcctttgaggctaggcagtcacttattgtcaggggcctcttccccatgcttgctgaccctcgtcaccctgcggaatcaacaagtgcgacgaacgagtcagtcctgaaggttgcgttagaccacgggaagcaagcaggagtgatcaagtcgcacgacagagtagtggtgtgtcagaaagttggtgatgcatctgtggtcaagatcatcgagcttgaggattgataatatgggaggaaaacaattgctacaatctttttacttcgatccagtgctctgcagtgagtattcaggagatttgatgtctctgatgtttcccatttttcttggctattacatttggctggcctcagatttaaactacggtaaaaaaagtatacaatgtctagcaattattcaataatcttgtaacatcccactatgtttttctatgttacaaaaatattacgactcaaaaaaaaaaaaaaa

SEQ ID NO: 70 - protein, 527 aa, Brassica napus
MHSSHLLLEEPIRMASILEPSKSSFFPALTKIVGTLGPKSRSVETLSGCLKSGMSVARFDFSWGDAEYHQETLDNLKIAVKSTKKLCAVMLDTVGPELQVINKSEKAITLKADGLVTLTPNQDREASSEVLPINFDGLAKAVKKGDTIFVGQYLFTGSETTSVWLEVDEVKGDDVICLSRNAATLAGSMFTLHASQVHIDMPTLTEKDKEVISTWGVQNKIDFLSLSYCRHAEDVRQTREMLKKLGDLSQTQIFAKIENVEGLNHFDEILQEADGIILSRGNLGIDLPPEKVFLFQKAALYKCNMAGKPAVLTRVVDSMTDNLRPTRAEATDVANAVLDGSDAILLGAETLRGLYPVETISTVGRICAEAEKVFNQDLYFKKTVKYVGEPMSHLESIASSAVRAAIKVKASVIICFTSSGRAARLIAKYRPTMPVISVVIPRVKTNQLKWSFSGAFEARQSLIVRGLFPMLADPRHPAESTSATNESVLKVALDHGKQAGVIKSHDRVVVCQKVGDASVVKIIELED

SEQ ID NO: 71 - DNA, 1930 bp, Brassica napus
  CDS (109)..(1692)
cggtcaaatcccattcgcataaaaagcatctcctctccgatcgaattctctcactctgttcgccgccgaagatctgagatctctcctctctcctctctcacctcaaagatgcattcgagtcatctccttctcgaggaaccgatcaggatggcatcaatcctcgagccatccaaatctagcttcttcccagcattgactaagatcgtcgggactctcggtcccaaatcccgatccgtcgagactctctccggttgcctcaaatccgggatgtccgtggctcgatttgatttctcttggggagatgctgagtatcaccaggagacgctggataatctgaaaattgctgtgaagagcactaagaagctttgtgctgttatgcttgatactgtgggacctgagctgcaagttatcaacaagtctgggaaagctattactcttaaagccgatggacttgttactttgacacccagtcaagatcgagaagcgtcttctgaagtccttccgattaactttaatgggcttgccaaggcagtgaagaagggagacactatctttgttgggcaatacctattcactggtagtgaaacaacttcagtttggctcgaggttgatgaagttaaaggagatgatgtcatttgcctgtcaaggaatgctgctactcttgctggttctctcttcactctgcacgcctctcaagttcacatcgatctgccaactcttacggagaaagataaggaggttataagcacatggggagttcagaataaaatcgattttctctctttgtcttattgtcgtcatgcggaggatgttcgccagacccgcgaaatgcttaagaagttgggtgacctctctcaaacacaaatatttgccaagattgagaatgtagagggacttaaccactttgatgagattctacaagaagctgatggaattattctttctcgtgggaatttgggtattgatctacccccggaaaaggtgtttttgtttcaaaaggcggctctttacaagtgcaacatggctggaaaaccagccgttcttacccgtgtcgttgatagtatgactgacaacttgcgaccaactcgtgcagaggcaacagatgttgctaatgctgttctagatggaagtgatgcaattcttcttggtgctgagacccttcgcggtttataccctgttgagacaatatccactgtcggtagaatctgtgctgaggcagaaaaggttttcaatcaggacttgtacttcaagaagactgtcaagtatgtaggagaaccgatgtctcacttggaatccattgcttcttcagctgtacgggcagcaatcaaggttaaggcatctgtcattatatgcttcacctcttctggaagagcagcaaggttaattgccaaatacaggccaacaatgcccgttatttctgttgtcattccccgggttaagacaaatcagctgaaatggagctttagtggagcctttgaggcgaggcagtcacttattgtcagaggccttttccccatgctcgctgatcctcgtcacccagcggaatcaacaagtgcgacgaacgagtcagtcctcaaggttgcactagaccatggaaagcaagcaggagtgatcaaatcgcatgacagagtagtggtgtgtcagaaagttggtgatgcttctgtggtgaagatcatcgagctagaggattaacacaaaaatggaagaagaaaacaattgctatatttttcttacttcgagactgtgccggagtgagtatatttttatctacgggacttttggtttttgagatttgatgtctctaaatgattcccttctttttcctttcggtatacatttgggttgccttcagatttaaagccatgtttaaagagtatacaatgtctagcaaattattcaataaactgtaacatccaaaaaaaaaaaaaaa

SEQ ID NO: 72 - protein, 527 aa, Brassica napus
MHSSHLLLEEPIRMASILEPSKSSFFPALTKIVGTLGPKSRSVETLSGCLKSGMSVARFDFSWGDAEYHQETLDNLKIAVKSTKKLCAVMLDTVGPELQVINKSGKAITLKADGLVTLTPSQDREASSEVLPINFNGLAKAVKKGDTIFVGQYLFTGSETTSVWLEVDEVKGDDVICLSRNAATLAGSLFTLHASQVHIDLPTLTEKDKEVISTWGVQNKIDFLSLSYCRHAEDVRQTREMLKKLGDLSQTQIFAKIENVEGLNHFDEILQEADGIILSRGNLGIDLPPEKVFLFQKAALYKCNMAGKPAVLTRVVDSMTDNLRPTRAEATDVANAVLDGSDAILLGAETLRGLYPVETISTVGRICAEAEKVFNQDLYFKKTVKYVGEPMSHLESIASSAVRAAIKVKASVIICFTSSGRAARLIAKYRPTMPVISVVIPRVKTNQLKWSFSGAFEARQSLIVRGLFPMLADPRHPAESTSATNESVLKVALDHGKQAGVIKSHDRVVVCQKVGDASVVKIIELED

SEQ ID NO: 73 - DNA, 2063 bp, Glycine max
  CDS (192)..(1700)
ttgcataataacaagagtcgcatcgcatcacaaatcttttttgtctctctctacttttttgctttctttcttcttctgtttatcgcatcgcgtattggttggtcgaaaaacaaagagtgtgtgttgtgtggtttggtttggtttttcacttttcttcatctttttgcgagaagacacacacacagagagagatggctacgacgaggattgaggcagagaagaagccgaagacgaagatcgtgtgcactctgggccccgcatcacggtcggtcccaatgatcgagaagcttctgcgagcaggcatgaacgtggcgcgcttcaacttctcccatgggtcccacgagtaccaccaggaaaccctcgacaacctccgcgccgccatggagaacaccggtattctctgcgccgtcatgctcgacaccaaggggcctgagattcgaactggttttctcaaggacggtaagcctatccaactgatacaaggtaatgaaataaccatttccactgactatgacctaaagggagatgagaagacgatttgtatgagctacaaaaagctgcctgaggatgtgaagcccgggatggtcatactctgtgcggatggcaccatatcatttacagttttatcatgtgacaaacaagcaggcttggttcaatgccgatgtgagaactctgccactcttggcgagaggaagaatgttaatttgcctggagtgatagtggatctcccaactttgacagacaaggacaaggaagatatcttggcctggggaattccgaataaaattgacatgattgctctttcttttgttcgaaaaggttctgacctggtggaagtcaggaaagttctgggaaaacatgctaagaacattatgctcatgtctaaggttgaaaaccaagaaggggttgcaaattttgatgaaatccttgcaaattcagatgcatttatggtggcacgtggtgaccttggaatggaaattccaatagagaagatatttctcgcacagaaagtgatgatttacaagtgcaacatccaaggaaaaccagttgtcactgcaacccagatgttggagtcaatgatcaaatctcccaggccaaccagggccgaagctactgatgttgccaatgcagttctggatggcacagactgtgtgatgcttagtggtgaaaccgctgctggagcctatccagaccttgctgttcaaacaatggctaaaatatgcattgaagcagagagcacccttgactatggtgatgtgttcaaaaggattatggagcactcaccggtacccatgagcccattagagagtctagcttcttctgctgttagaacagccaactcggctagagcggctcttatcttggttttaactagaggagggagtactgcaaaattggtggcgaaatacaggccagggatgccaattctttccgtggttgttcccgagctcaagactgatagctttgattgggcatgcagtgatgaggcccctgcgagacatagccttatattccgcgggttggttcccgtgttgagtgcagcttctgctagagcttctcatgctgaaacaacagaagaagcaatagaattcgccatgcaacatgccaagtccaagggtctctgccacaacggggattcagtggtggcactgcatcgtgtgggcactgcatctatcatcaagatcttgactgtgaaatgatcacccccattacaaggaattcttctgctgtttatggcaaattttttggatggtgcaaaagaggtctcgatatacctcttcatatctacattggatgcaaacttcaattaaaagcatttattaggatcggttacctgtttttcacatatcatatattactttttttttttttttttgttacatttgccttatcattgtggcgagtagccacttgttttcatttgttaagattttgtacgaggcttttggtgaaccaaaaaactagccacttctggattttgaattttgcggtctaaagttgttttaacttttaattgagcagtcagcagtgtatgttttttgagaccgacacgcagcggccgc

SEQ ID NO: 74 - protein, 502 aa, Glycine max
MATTRIEAEKKPKTKIVCTLGPASRSVPMIEKLLRAGMNVARFNFSHGSHEYHQETLDNLRAAMENTGILCAVMLDTKGPEIRTGFLKDGKPIQLIQGNEITISTDYDLKGDEKTICMSYKKLPEDVKPGMVILCADGTISFTVLSCDKQAGLVQCRCENSATLGERKNVNLPGVIVDLPTLTDKDKEDILAWGIPNKIDMIALSFVRKGSDLVEVRKVLGKHAKNIMLMSKVENQEGVANFDEILANSDAFMVARGDLGMEIPIEKIFLAQKVMIYKCNIQGKPVVTATQMLESMIKSPRPTRAEATDVANAVLDGTDCVMLSGETAAGAYPDLAVQTMAKICIEAESTLDYGDVFKRIMEHSPVPMSPLESLASSAVRTANSARAALILVLTRGGSTAKLVAKYRPGMPILSVVVPELKTDSFDWACSDEAPARHSLIFRGLVPVLSAASARASHAETTEEAIEFAMQHAKSKGLCHNGDSVVALHRVGTASIIKILTVK

SEQ ID NO: 75 - DNA, 1976 bp, Glycine max
  CDS (116)..(1696)
cgtacaacactttctatatttatcgtccattctctctcactccataattgcttcttgctttggtcgatccattcggtgatcactgaccagtggtttggtgttgttgatagagaaaatgcattccagccctttgcttcttgaggaacccattaggatggcatccatccttgagccatccaagcctactttttttccggctatgacgaaaattgttggcacacttggtccaaagtcacgatcagttgatataatttcccattgccttgatgcaggaatgtctgtggcaaggtttgacttttcatggggtgatccagaataccatcaagagacattggaaaatttgagagttgctatcaaaagtaccaagaaactctgtgcggttatgctagatactgtgggtccagaattacagattgagaataagactgatcacccaatcacccttgaagcagacacattagttgtcttaactccagatcaaaataaagaagctagttcaaatctcttaccattaaattttaccgggctatcaaaggctgtgaagaagggtgatactatttttattggaaaatacttgtttactggaagtgaaacagcttctgtatggctggaggtcagtgaggtggaaggtgaggatgtcacctgtctggtaaaaaacactgccacactctctggatcattgtttactgtacatgtctctcagattcacatcgatcttcctactcttgctgataaagataaggaggtaataagcacatggggtgttcaaaacaatattgacttcctttcattatatacccggcacgttgaagatattcgtcatgcacgtgaatttctctctaaattgggtgacctgaagcagacacatatttatgcaaagattgaaaatatagagggaatgaaacattttgatgaaatattgagagaagcagatggtatcatcctcgctcgtggaaatttagggatagaactcccacctgagaaggttttcttattccaaaaggctgctatttacaagtgtaacatggttggaaagccagttgttgttacacgtgttgtggactctatgactgataatctaagacctactcgtgctgaagcaacagatgttgccaatgcagtgttggatggaagtgacgcaattctccttggagcagagaccctgcggggacaataccctgtagagaccatttctatagttggaaaaatatgtgctgaggcagagaaagttcataatcaagatttgtattttaagaaggctgtaaaatatgtgggagagccaatgagccatttggaatcaattgcttcctctgcggttcgggcagctatcaaggttaaggcctctgttattatttgcttcacttcatctggaagagctgcaagattgattgctaagtacagaccaaccatgcctgtgatatctgttgtcattcctcaattgaagacaaatcaactccgatggacgttcaccggtgcttttgaggctaggcaatctcttattgtgagaggtctttttcctatgctggcagatccacgacacccagctgagtccagaagtggaacaaatgaatcaattttgaaggttgctttagaccatggcaaggcttttggcatcataaagccacatgaccgagttgttgtctgccagaaagtagctgactcgtcagttgtgaagattcttgagctcgaagattgaatgattacaacttatgcgttatttgatgcataataataaagattcttgggcttgtgtttgataatcggagcgatatccagttttgaaatcaagcatggtgtgctgatctttcggctacttatgttgtttaatagtaaaccatccgaattcgaaaacgaaattgattatcttctaatgaattttatgctgaaaagaaaagtatgaattataagacaacttgtaaacactgagtgtgccagataaacttgtgagattattttagcttaaaaaaaaaaaaaaa

SEQ ID NO: 76 - protein, 526 aa, Glycine max
MHSSPLLLEEPIRMASILEPSKPTFFPAMTKIVGTLGPKSRSVDIISHCLDAGMSVARFDFSWGDPEYHQETLENLRVAIKSTKKLCAVMLDTVGPELQIENKTDHPITLEADTLVVLTPDQNKEASSNLLPLNFTGLSKAVKKGDTIFIGKYLFTGSETASVWLEVSEVEGEDVTCLVKNTATLSGSLFTVHVSQIHIDLPTLADKDKEVISTWGVQNNIDFLSLYTRHVEDIRHAREFLSKLGDLKQTHIYAKIENIEGMKHFDEILREADGIILARGNLGIELPPEKVFLFQKAAIYKCNMVGKPVVVTRVVDSMTDNLRPTRAEATDVANAVLDGSDAILLGAETLRGQYPVETISIVGKICAEAEKVHNQDLYFKKAVKYVGEPMSHLESIASSAVRAAIKVKASVIICFTSSGRAARLIAKYRPTMPVISVVIPQLKTNQLRWTFTGAFEARQSLIVRGLFPMLADPRHPAESRSGTNESILKVALDHGKAFGIIKPHDRVVVCQKVADSSVVKILELED

SEQ ID NO: 77 - DNA, 2067 bp, Triticum aestivum
  CDS (115)..(1659)
gaattcccgggtcgacttcgctgtcgacgatttcgtatccgccccaaatccaaatctcatcgccttcccactctccccaccccaccctcgtctcccccggatcggtagcgcgcgatggccaacatcgacatggcggcggtgctggcggacctggagcgggacgcggcggcggacgcccgcaccccgcggaccaagctggtgtgcacgctcggcccggcctcccgctccgtgcccatgctcgagaagctgctccgcgccggcatgaacgtcgcgcgcttcaacttctcccacggcacccacgagtaccacaaggagaccctcgacgccctccgccaggccatgcacaacaccggcatcctctgcgccgtcatgctcgacaccaagggacctgagattcgtactggatttttgaaggatggtaaaccaatcaaactgacaaagggtcaagaaatcactgtttccaccgactatgatatcaagggcgacacgaacacgatctccatgagttacaagaaacttcctcaggatgtgaagcctgggcatgtcatactatgtgctgatggtaccatctccttggctgttctctcttgcgacccagcagctggaactgtcagatgtaggtgtgagaacactgcaatgcttggagagaggaagaattgtaatctgccaggaattgtcgtggaccttcctacactaacggagaaggataaggaggacattttggaatggggtgtgcctaatgacattgacatgattgctttgtcgtttgtccgcaaaggatcagatttggtgaccgtcaggcagcttcttggacagcatgcaaagcgcatcaagttaatgtcaaaggttgaaaaccaggagggcattgtgaactttgatgacattctgagggaaaccgatgcctttatggttgccagaggtgatcttggaatggagattccagttgagaagatattcctggcccaaaaaatgatgatttacaagtgcaaccttgctggcaagcctgttgtcacagcgacccagatgcttgagtcaatgatcaagtccccgaggccaacccgtgccgaggctactgacgtcgcaaatgcggtgcttgatggaaccgactgtgtcatgctcagtggtgaaagcgctgctggagcataccctgaggtggctgtgaagatcatggctcgcatctgcgtggaggcagagtcttccctggacaacgacgccgtcttcaaggagatgatcaaggccgcgcccctcccgatgagcccgctggagtcccttgcgtcttccgccgtgcggaccgccaacaaggccagggccactctgatcgtcgtcctgacccgtggcggcaccactgcgaagctggtggccaagtaccgccccagggtcccgatcctctcggtggttgtcccagtgctgacaaccgactcgttcgactggaccgtcagctccgagggcccggccaggcacagcctgatctacaggggcctgatcccgctcctcgccgagggctccgccaaggccaccgactcggagtcgacggaggagatcctccaggcggcgctcaagtcggccgtgaagaagcagctctgcaaggccggcgacgccgtagtcgtcctgcaccgcatcggcatggcctccgtcatcaagatctgcaccgtcaagtgaccgccattgccgggcatggtgacccgagcgccgccccggtccttgctgccgtggcgagacccgggtctcccttgttcctctctggtctttctcctggagacgaactgattaatcgccgtaccgtcagtattgcagtttgttgcatagatccgatccgagctggtaaattaggagggagaggactccgttatatagagctcttttattacctgtagtatggtgtttggcaggtgtcatgcctgcacaaatttttctctaattattattagttgctgctgctgcttgttgtactctgaactctcaagtactggtttggtagtgatgtcgatacatgtggtgataataagattttggcatcgtcgagtcggaagctcaaaagagagagagagaccgacacgcagcggccgc

SEQ ID NO: 78 - protein, 514 aa, Triticum aestivum
MANIDMAAVLADLERDAAADARTPRTKLVCTLGPASRSVPMLEKLLRAGMNVARFNFSHGTHEYHKETLDALRQAMHNTGILCAVMLDTKGPEIRTGFLKDGKPIKLTKGQEITVSTDYDIKGDTNTISMSYKKLPQDVKPGHVILCADGTISLAVLSCDPAAGTVRCRCENTAMLGERKNCNLPGIVVDLPTLTEKDKEDILEWGVPNDIDMIALSFVRKGSDLVTVRQLLGQHAKRIKLMSKVENQEGIVNFDDILRETDAFMVARGDLGMEIPVEKIFLAQKMMIYKCNLAGKPVVTATQMLESMIKSPRPTRAEATDVANAVLDGTDCVMLSGESAAGAYPEVAVKIMARICVEAESSLDNDAVFKEMIKAAPLPMSPLESLASSAVRTANKARATLIVVLTRGGTTAKLVAKYRPRVPILSVVVPVLTTDSFDWTVSSEGPARHSLIYRGLIPLLAEGSAKATDSESTEEILQAALKSAVKKQLCKAGDAVVVLHRIGMASVIKICTVK

SEQ ID NO: 79 - DNA, 2002 bp, Triticum aestivum
  CDS (128)..(1711)
cgaacattcctctttctctcccttgcttggggaagaagaagaagaagaagaagaagagagggcgagcgcccccgcctcccgacgccgtcgcccctcgccgccgatctgatctcaggagccagcgaagatgcattccaccaatctgctcctcgaggagcccatccggatggtctccatcctcgagccatccaagccgaacttcttcccggcgatgacgaagattgtggggacgctgggtccgaagtcccggtccgttgaggccatctccgcctgtctaaaggccggcatgtctgtggcccgtttcgatttctcgtggggggatgccgcgtaccaccaggagacactcgagaacctcaagctcgccatcaaggccaccaagaagctatgtgctgttatgctcgacactgttggccctgagttgcaagtggtgaacaagagtgaagtcacaatctcgcttgaagagaacgagtctgttgttctcacccctcaccagggccaggaggcctcttccaagttgctccctatcaacttcgctggactcgccaaggctgtgaagcccggagccacaatattcgttgggcaatatttgttcacgggcagtgagactacatcagtttggctggaggtttctgaagttcaaggggatgacgtggtttgcgtgatcaagaactcagctaccctggctgggtcactcttcacattgcactgctcccagatccatatcgacatgcccacgctgtctgatgaggataaagatgttatgaaaaaatggggtgctccaaacaagattgacttcctctctctttcttatacaaggcatgcagaagatgtgcggcaagcacgggagttcctctctaagttaggtgatcttagccaaactctgatttttgccaaaattgagaatgtggagggcttgaaccattttgatgagatcctggaggaagcggatggtatcattctgtcaagagggaaccttggaattgatcttccacctgaaaaggtgttcttatttcagaagtctgctctgcacaagtgcaacatggctggaaagcctgctgttgttactcgtgttgtggacagtatgacggacaacctaaggcctactcgtgcggaggcaactgatgtggcaaatgcggtgctggacggtagtgatgccattctccttggtgctgagactctccgtgggttgtatccagtcgagactatttcaacagtgggcagaatttgtgctgaggctgagaaggtcttcaaccaagatttgtatttcaagcgaaccgtgaaatatgtgggagaacccatgacccacttggagtctattgcttcctctgcagtgcgggctgctattaaagttaaggcttcggtcatcatttgcttcacttcatctggacgggctgcaaggctaattgccaagtacaggcccaccatgcctgtcctgtccgttgtcattcctcgtctgaaaacaaatcaattgaagtggagcttcacaggtgcatttgaggcaagacaatcactcatagttagaggcctctttcccatgcttgctgatccacgtcatccggctgattctactagcactacaaatgaatcagtgttgaaggttgctcttgaccacggcaaagcatctggtgtgatcaagtcgcatgaccgtgtcgtcgtgtgccagaaagtgggagattcctctgtcgtgaagatcattgagctagacgactaggcaaaattagcctttgctcagggcttgccagatttttgactaggccaaaacgttgcttggtggctatgtataattctatctatagttttgcaaaacgagcagtttttcctatggtgtcatcataggatccgcggttatcattctgaaacctacgctagttattatggatatgtcctcagattttactgcagtgtagcgagtaaatgatctgatggaataatgatatcaaaactttgtgacccttattgttgtcgctaagcctatgttcccatttgcaaaaaaaaaaaaaaa

SEQ ID NO: 80 - protein, 527 aa, Triticum aestivum
MHSTNLLLEEPIRMVSILEPSKPNFFPAMTKIVGTLGPKSRSVEAISACLKAGMSVARFDFSWGDAAYHQETLENLKLAIKATKKLCAVMLDTVGPELQVVNKSEVTISLEENESVVLTPHQGQEASSKLLPINFAGLAKAVKPGATIFVGQYLFTGSETTSVWLEVSEVQGDDVVCVIKNSATLAGSLFTLHCSQIHIDMPTLSDEDKDVMKKWGAPNKIDFLSLSYTRHAEDVRQAREFLSKLGDLSQTLIFAKIENVEGLNHFDEILEEADGIILSRGNLGIDLPPEKVFLFQKSALHKCNMAGKPAVVTRVVDSMTDNLRPTRAEATDVANAVLDGSDAILLGAETLRGLYPVETISTVGRICAEAEKVFNQDLYFKRTVKYVGEPMTHLESIASSAVRAAIKVKASVIICFTSSGRAARLIAKYRPTMPVLSVVIPRLKTNQLKWSFTGAFEARQSLIVRGLFPMLADPRHPADSTSTTNESVLKVALDHGKASGVIKSHDRVVVCQKVGDSSVVKIIELDD

SEQ ID NO: 81 - DNA, 1825 bp, Helianthus annuus
  CDS (128)..(1624)
ataacaaaccaacccacccatttttattctcatttcacacatcaccgccgcccaatattcaatacattctcatcattttcaattctgtttctcaatttgattccattattccttcacaatcacactgatggatcaccagatgaagaggccgaagacgaagatcgtctgcacgttaggacctgcatctagatcagttccaatggtggagaagctcttaaaagcaggtatgaacgttgctcgcttcaatttctctcacggatcctatgaatatcatcaggaaacgcttgataatctccgcactgctatggataacaccggtatactctgtgcggttatgctcgacaccaagggtccagagattcgaaccgggtttttaaaagatggcaagccagttcagcttaaacagggtcaagaaatcacaatctctatcgattacaccatcaaaggcgatgaaaacatgatctgcatgagctacaagaagctagctcacgatgttaaaccacaaagtgtgattctctgtgcagacggcaccatttcgtttactgttctgtcttgtgacattgaaaacgggctagttcgttgtcgttgtgagaacactgcggttcttggtgaacgaaaaaacgttaatctacctggtgtgattgtggatctaccaacgctgactgagaaagacaaagaagatatcatgaaatggggtgttcctaataagattgatatgattgctttgtcgtttgtccgaaagggttcagaccttgtggaggttcgtaagctgttgggagtacatgctaaaaacattctgcttatgtctaaggttgaaaatcaagaaggggttgccaactttgatgatatcctagcgaactcagacgcgtttatggtggcgcgtggtgatctcgggatggaaattccgattgagaaaatatttctagctcagaaagtaatgatatacaagtgcaacctacaaggaaagccggttgtaaccgccactcaaatgctggagtcaatgatcaagtctccaaggcccactcgagccgaagccacagacgttgctaacgcggtcctcgatggaaccgactgcgtcatgcttagtggagaaaccgcagccggggcttacccagagctcgcagttcaaaccatggctaaaatctgcatggaagccgaaagcacaatagactataaagacgttttcaaaaggatcactgccaatgcaccggtccccatgagcccacttgaaagcttagcctcttctgcggttcgaaccgcgatctcatcaaaagcgagtctgatattggttctaaccagaggtggaagcactgcgaaactagtggctaagtaccgccccgggatgcctatactgtctgttgtggttccagaaatcaagaccgattcttttgactggtcttgtagtgatgagtcaccggctagacatagtctaatctttaggggtttggtcccggttttgattgcggggtctgctagagcttctcatgatgagtccactgaagaagctattgaatttgctttgcaacatgctaaagataaaggactatgcaagaatggtgattcggttgtggctctacatcgtgttggaaccgcgtctataatcaagatcgtgacagttaagtgattcttatgctatattgatattgtcgatttttgccctttcgatggcacacattgttacactggtaaactaaagttgattttggtatcgatgaactggatttgttatgagaaactacgtaacgagtaatgcatttttgtcgcgagtttgaataattgacattacttcgtgttttttggaaaaaaaaagaaaaaaaaaaaaaaa

SEQ ID NO: 82 - protein, 498 aa, Helianthus annuus
MDHQMKRPKTKIVCTLGPASRSVPMVEKLLKAGMNVARFNFSHGSYEYHQETLDNLRTAMDNTGILCAVMLDTKGPEIRTGFLKDGKPVQLKQGQEITISIDYTIKGDENMICMSYKKLAHDVKPQSVILCADGTISFTVLSCDIENGLVRCRCENTAVLGERKNVNLPGVIVDLPTLTEKDKEDIMKWGVPNKIDMIALSFVRKGSDLVEVRKLLGVHAKNILLMSKVENQEGVANFDDILANSDAFMVARGDLGMEIPIEKIFLAQKVMIYKCNLQGKPVVTATQMLESMIKSPRPTRAEATDVANAVLDGTDCVMLSGETAAGAYPELAVQTMAKICMEAESTIDYKDVFKRITANAPVPMSPLESLASSAVRTAISSKASLILVLTRGGSTAKLVAKYRPGMPILSVVVPEIKTDSFDWSCSDESPARHSLIFRGLVPVLIAGSARASHDESTEEAIEFALQHAKDKGLCKNGDSVVALHRVGTASIIKIVTVK

SEQ ID NO: 83 - DNA, 2075 bp, Zea mays
  CDS (198)..(1739)
gcgcccacggaatcgcaattccccactcccaccccccttctcctttctataaagggaaacttcgccaccaaatctcgaatcccatctcgctgctctccgccgctcgacgccgacgccgacgccgacacctctccctcccccattccccgtgccccggaccgcggagcagacagaggcgagatccggagcgccgcgcgatggcgaacatcgacatggcgaagatcctggcggacctggaccgcggcgccggcgacgcgcggctgcccaagaccaagctcgtctgcacgcttggcccggcctcccgctccgtgcccatgctcgagaagctgctccgcgccggcatgaacgtcgcgcgcttcaacttctcccacggcacccaccagtaccaccaggagacgctcgacagcctccgccaggccatgcacaacaccggcatcctctgcgccgtcatgctcgacaccaagggtcctgagattcgtacagggtttttgaaggatggtaaaccaattaagctaaccaagggtcaagagatcactgttaccactgattatgatatcaagggtgacgaaaaaatgatcgctatgagttacaagaaactgcctgttgacgtgaagcctggaaatgtcatactctgcgcagatggtactatctctctggccgttctgtcttgcgatcctgatgctggaactgtgcgttgtaggtgtgagaacactgcaatgcttggtgagagaaagaactgcaatttgccaggaattgttgtggatcttcctacattgactgagaaagataaagaagatattttgggctggggtgttccaaatgacattgacatgattgctctatcctttgtccgtaaaggatcagatttggtgactgtcagacaggttcttgggcagcatgccaagcgcattaagttgatgtcaaaggttgagaaccaagagggtgttgtaaactttgatgagatcttgagggagactgatgcttttatggttgctagaggtgatctgggaatggagattccagtcgagaagattttccttgcgcagaagatgatgatctacaagtgcaacattgctggcaaacctgttgttactgctacccagatgctcgagtcgatgatcaaatctcctcggccgacacgtgctgaggccactgacgttgcaaatgccgttcttgatggaactgactgtgtcatgctcagcggagagagtgccgctggagcctaccccgaggtggctgtgaagatcatggctcgtatttgcatcgaggcagaatcttccctggaccacgaggcagttttcaaggccatgatcaggtccgcgcctcttccaatgagccctctggagtcccttgcatcatctgctgtgaggactgccaacaaggccaaggctgcactgattgtcgtcctgactcgcggtggcaccacggccaaactggtcgccaagtaccgccccagggtccccatcctctccgttgtcgtacccgtgcttacgaccgactctttcgactggaccatcagctccgagggcccagctaggcacagcctgatctacagaggcctcattcccctcctcgccgagggctccgcgaaggctacggattcagagtcgacggaggtgatccttgaggccgcgttgaagtcggccgtgcagaagcagctctgcaagcctggtgatgccatcgtggctcttcatcgtattggcgtcgcctccgtcatcaagatctgcatcgtgaagtgatcaccacgacctggttctcactgctgggattccatgaaacagcttttctgcctcctttttactgcatttttttccggagacagatatttatgttgtaagcctgcgtctgttgtttgcagttgcggaatgttttttgttcacgtagttatttagctggtaaatggggagggagaggactccattgatgttagtggtaataagatttgtgtctatggagttgagttgaaagggttttttcatgctaagccccgagacactaggagatggagatcgaggttgagatgagataagcaataagtgaaaaaaatgttgatttgcaaaaaaaaaaaaaaaaaa

SEQ ID NO: 84 - protein, 513 aa, Zea mays
MANIDMAKILADLDRGAGDARLPKTKLVCTLGPASRSVPMLEKLLRAGMNVARFNFSHGTHQYHQETLDSLRQAMHNTGILCAVMLDTKGPEIRTGFLKDGKPIKLTKGQEITVTTDYDIKGDEKMIAMSYKKLPVDVKPGNVILCADGTISLAVLSCDPDAGTVRCRCENTAMLGERKNCNLPGIVVDLPTLTEKDKEDILGWGVPNDIDMIALSFVRKGSDLVTVRQVLGQHAKRIKLMSKVENQEGVVNFDEILRETDAFMVARGDLGMEIPVEKIFLAQKMMIYKCNIAGKPVVTATQMLESMIKSPRPTRAEATDVANAVLDGTDCVMLSGESAAGAYPEVAVKIMARICIEAESSLDHEAVFKAMIRSAPLPMSPLESLASSAVRTANKAKAALIVVLTRGGTTAKLVAKYRPRVPILSVVVPVLTTDSFDWTISSEGPARHSLIYRGLIPLLAEGSAKATDSESTEVILEAALKSAVQKQLCKPGDAIVALHRIGVASVIKICIVK

SEQ ID NO: 85 - DNA, 1590 bp, Aedes aegypti
  CDS (1)..(1590)
atgatggtctgggtgtccgattacgactgcgaccctaagggtcgcaagatgaatcccgaatcggtttcccacctggagcacatgtgctcgctggacattgactcgcagacggcgttcgtgcgtctgtccggcatcatctgtaccatcggaccggcctccgttgcaccggagatgctggagaagatgatggccaccgggatgaacattgcccggttgaacttctcgcacggttcgcacgaataccacgccaacacgatcaagaacatccgcgaggccgtcgataactactcgaagaagcagggcaagccgttcccgctggccatcgctctggacaccaagggtccggaaatccgtactgggctgatcgagggcagcggcaccggcgaggttgagctgaagaagggcgaacagatccagctgacgaccgacaaggatcatctggagaagggaagcaaggacaagatcttcgtcgactacgttaacatcgtcaaggttgtcaagaagggcgatcgggtgttcgtcgacgatggtctgatctcgctggtggttgacagtattagcggagacactctgacctgtacggttgagaacggtggtttgctgggatcgcgtaagggcgttaacctgcccggagtcccagttgatctgccggccgtctccgaaaaggataagtccgatctgcagttcggcgttgaacagggtgttgatgtgattttcgcttccttcatccgtaatgccgcggcattgaaggaaatccgtaccattctcggagagaagggtaagaacatcaagatcatctcgaagatcgagaaccagcagggtatgcagaacttggatgctatcatcgctgcctcggacggtattatggttgcccgtggtgatctgggtatcgaaatcccagcggagaaggtcttcctggcccagaagtcgatgatcgctcggtgcaaccgtgccggcaagcccgtcatctgcgccacccaaatgttggagtccatgatcaagaagccacgcccaacccgcgccgaaatttccgatgttgccaacgccatcattgacggtgctgactgcgtaatgctgtccggtgaaactgccaagggcgagtacccattggagtgtgtgctgaccatggccaagacctgcaaggaagccgaagctgccctctggcatcgcaacctgttcaacgatctggtcaacacgacccccactcctctggacacggccagctcgattgcgatcgctgcctcggaagcggctgccaagagccgcgctgctgccgtcattgtcattacgacctcgggccgttcggctcatctcatctccaagtaccggccacgctgcccgatcattgccgttactcggtttgcgcaaaccgctcgccagtgccatctgtaccgaggcatcctgcccgtgatctatgaacaacaagccctggaagactggctgaaggatgtcgatgctcgcgtccagtacggcatggatttcggcaaggaacgcggcttcctgaagccgggcaacccagtggtcgtcgtcaccggctggaagcagggctccggcttcaccaacaccattcgcattgtgaatgtcgaataa

SEQ ID NO: 86 - protein, 529 aa, Aedes aegypti
MMVWVSDYDCDPKGRKMNPESVSHLEHMCSLDIDSQTAFVRLSGIICTIGPASVAPEMLEKMMATGMNIARLNFSHGSHEYHANTIKNIREAVDNYSKKQGKPFPLAIALDTKGPEIRTGLIEGSGTGEVELKKGEQIQLTTDKDHLEKGSKDKIFVDYVNIVKVVKKGDRVFVDDGLISLVVDSISGDTLTCTVENGGLLGSRKGVNLPGVPVDLPAVSEKDKSDLQFGVEQGVDVIFASFIRNAAALKEIRTILGEKGKNIKIISKIENQQGMQNLDAIIAASDGIMVARGDLGIEIPAEKVFLAQKSMIARCNRAGKPVICATQMLESMIKKPRPTRAEISDVANAIIDGADCVMLSGETAKGEYPLECVLTMAKTCKEAEAALWHRNLFNDLVNTTPTPLDTASSIAIAASEAAAKSRAAAVIVITTSGRSAHLISKYRPRCPIIAVTRFAQTARQCHLYRGILPVIYEQQALEDWLKDVDARVQYGMDFGKERGFLKPGNPVVVVTGWKQGSGFTNTIRIVNVE

SEQ ID NO: 87 - DNA, 1560 bp, Aedes aegypti
  CDS (1)..(1560)
atggcagagggtcgcaagatgaatcccgaatcggtttcccacctggagcacatgtgctcgctggacattgactcgcagacggcgttcgtgcgtctgtccggcatcatctgtaccatcggaccggcctccgttgcaccggagatgctggagaagatgatggccaccgggatgaacattgcccggttgaacttctcgcacggttcgcacgaataccacgccaacacgatcaagaacatccgcgaggccgtcgataactactcgaagaagcagggcaagccgttcccgctggccatcgctctggacaccaagggtccggaaatccgtactgggctgatcgagggcagcggcaccggcgaggttgagctgaagaagggcgaacagatccagctgacgaccgacaaggatcatctggagaagggaagcaaggacaagatcttcgtcgactacgttaacatcgtcaaggttgtcaagaagggcgatcgggtgttcgtcgacgatggtctgatctcgctggtggttgacagtattagcggagacactctgacctgtacggttgagaacggtggtttgctgggatcgcgtaagggcgttaacctgcccggagtcccagttgatctgccggccgtctccgaaaaggacaagtccgatctgcagttcggcgttgaacagggtgttgatgtgattttcgcttccttcatccgtaatgccgcggcattgaaggaaatccgtaccattctcggagagaagggtaagaacatcaagatcatctcgaagatcgagaaccagcagggtatgcagaacttggatgccatcattgctgcctcggacggtattatggttgcccgtggtgatctgggtatcgaaatcccagcggagaaggtcttcctggcccagaagtcgatgatcgctcggtgcaaccgtgccggcaagcccgtcatctgcgccacccaaatgttggagtccatgatcaagaagccacgcccaacccgcgccgaaatttccgatgttgccaacgccatcatcgacggtgctgactgcgtaatgctgtccggtgaaactgccaagggcgagtacccattggagtgtgtgttgaccatggccaagacctgcaaggaagccgaagctgccctctggcatcgcaacctgttcaacgatctggtcaacacgacccccactccgctggacacggccagttcgattgcgatcgctgcctcggaagcggctgccaagagccgcgctgctgccgtcattgtcattacgacctcaggccgttcggctcatctcatctccaagtaccggccccgctgcccgatcattgccgttacccggttcgcgcaaaccgctcgccagtgccatctgtaccgaggcatcctgcccgtgatctatgaacaacaagccctggaagactggctgaaggatgtcgatgctcgcgtccagtacggcatggatttcggcaaggaacgcggcttcctgaagccgggcaacccagtggtcgtcgtcaccggctggaagcagggctccggcttcaccaacaccattcgcattgtgaatgtcgaataa

SEQ ID NO: 88 - protein, 519 aa, Aedes aegypti
MAEGRKMNPESVSHLEHMCSLDIDSQTAFVRLSGIICTIGPASVAPEMLEKMMATGMNIARLNFSHGSHEYHANTIKNIREAVDNYSKKQGKPFPLAIALDTKGPEIRTGLIEGSGTGEVELKKGEQIQLTTDKDHLEKGSKDKIFVDYVNIVKVVKKGDRVFVDDGLISLVVDSISGDTLTCTVENGGLLGSRKGVNLPGVPVDLPAVSEKDKSDLQFGVEQGVDVIFASFIRNAAALKEIRTILGEKGKNIKIISKIENQQGMQNLDAIIAASDGIMVARGDLGIEIPAEKVFLAQKSMIARCNRAGKPVICATQMLESMIKKPRPTRAEISDVANAIIDGADCVMLSGETAKGEYPLECVLTMAKTCKEAEAALWHRNLFNDLVNTTPTPLDTASSIAIAASEAAAKSRAAAVIVITTSGRSAHLISKYRPRCPIIAVTRFAQTARQCHLYRGILPVIYEQQALEDWLKDVDARVQYGMDFGKERGFLKPGNPVVVVTGWKQGSGFTNTIRIVNVE

SEQ ID NO: 89 - DNA, 1542 bp, Aedes aegypti
  CDS (1)..(1542)
atgaatcccgaatcggtttcccacctggagcacatgtgctcgctggacattgactcgcagacggcgttcgtgcgtctgtccggcatcatctgtaccatcggaccggcctccgttgcaccggagatgctggagaagatgatggccaccgggatgaacattgcccggttgaacttctcgcacggttcgcacgaataccacgccaacacgatcaagaacatccgcgaggccgtcgataactactcgaagaagcagggcaagccgttcccgctggccatcgctctggacaccaagggtccggaaatccgtactgggctgatcgagggcagcggcaccggcgaggttgagctgaagaagggcgaacagatccagctgacgaccgacaaggatcatctggagaagggaagcaaggacaagatcttcgtcgactacgttaacatcgtcaaggttgtcaagaagggcgatcgggtgttcgtcgacgatggtctgatctcgctggtggttgacagtattagcggagacactctgacctgtacggttgagaacggtggtttgctgggatcgcgtaagggcgttaacctgcccggagtcccagttgatctgccggccgtctccgaaaaggacaagtccgatctgcagttcggcgttgaacagggtgttgatgtgattttcgcttccttcatccgtaatgccgcggcattgaaggaaatccgtaccattctcggagagaagggtaagaacatcaagatcatctcgaagatcgagaaccagcagggtatgcagaacttggatgccatcattgctgcctcggacggtattatggttgcccgtggtgatctgggtatcgaaatcccagcggagaaggtcttcctggcccagaagtcgatgatcgctcggtgcaaccgtgccggcaagcccgtcatctgcgccacccaaatgttggagtccatgatcaagaagccacgcccaacccgcgccgaaatttccgatgttgccaacgccatcatcgacggtgctgactgcgtaatgctgtccggtgaaactgccaagggcgagtacccattggagtgtgtgttgaccatggccaagacctgcaaggaagccgaagctgccctctggcatcgcaacctgttcaacgatctggtcaacacgacccccactccgctggacacggccagttcgattgcgatcgctgcctcggaagcggctgccaagagccgcgctgctgccgtcattgtcattacgacctcaggccgttcggctcatctcatctccaagtaccggccccgctgcccgatcattgccgttacccggttcgcgcaaaccgctcgccagtgccatctgtaccgaggcatcctgcccgtgatctatgaacaacaagccctggaagactggctgaaggatgtcgatgctcgcgtccagtacggcatggatttcggcaaggaacgcggcttcctgaagccgggcaacccagtggtcgtcgtcaccggctggaagcagggctccggcttcaccaacaccattcgcattgtgaatgtcgaataa

SEQ ID NO: 90 - protein, 513 aa, Aedes aegypti
MNPESVSHLEHMCSLDIDSQTAFVRLSGIICTIGPASVAPEMLEKMMATGMNIARLNFSHGSHEYHANTIKNIREAVDNYSKKQGKPFPLAIALDTKGPEIRTGLIEGSGTGEVELKKGEQIQLTTDKDHLEKGSKDKIFVDYVNIVKVVKKGDRVFVDDGLISLVVDSISGDTLTCTVENGGLLGSRKGVNLPGVPVDLPAVSEKDKSDLQFGVEQGVDVIFASFIRNAAALKEIRTILGEKGKNIKIISKIENQQGMQNLDAIIAASDGIMVARGDLGIEIPAEKVFLAQKSMIARCNRAGKPVICATQMLESMIKKPRPTRAEISDVANAIIDGADCVMLSGETAKGEYPLECVLTMAKTCKEAEAALWHRNLFNDLVNTTPTPLDTASSIAIAASEAAAKSRAAAVIVITTSGRSAHLISKYRPRCPIIAVTRFAQTARQCHLYRGILPVIYEQQALEDWLKDVDARVQYGMDFGKERGFLKPGNPVVVVTGWKQGSGFTNTIRIVNVE

SEQ ID NO: 91 - DNA, 1413 bp, Klebsiella pneumoniae subsp. pneumoniae MGH 78578
  CDS (1)..(1413): transl_table=11
atgaaaaagaccaaaattgtttgcaccatcggtccgaaaaccgaatctgaagagatgctgaccaaaatgctggaagccggcatgaatgtgatgcgtctgaacttctcccacggtgactatgcggaacacggtcagcgcatccagaacctgcgcaatgtgatgagcaaaaccggtaagaaagccgctattctgctggacaccaaagggccggaaattcgtaccatcaagctggaaggcggcaacgacgtctccctgaaagcaggccagaccttcaccttcactaccgataaatccgtcatcggcaacaacgaaatcgttgcggtaacctatgaaggcttcacctctgacctcgccgtcggcaacaccgtcctggtggacgatggcctgatcggcatggaagtcacggctatcgaaggcaacaaagttatctgtaaagtgctgaacaatggcgacctcggcgagaacaaaggcgttaacctgccgggcgtctccatcgccctgccggcgctggctgagaaagacaaacaggatctgatcttcggttgcgaacagggcgtggacttcgtcgcggcctccttcatccgtaaacgttccgacgtcgtcgagatccgtgagcacctgaaagcccacggcggcgaaaacatccagatcatctccaaaatcgaaaaccaggaaggcctgaacaacttcgacgaaatcctcgaagcgtctgacggcatcatggttgcgcgtggcgacatgggcgtggagatcccggttgaagaagttatcttcgcccagaaaatgatcatcgaaaaatgtatccgcgcgcgtaaagtggttatcaccgccacccagatgctggactccatgatcaagaacccgcgtccgacccgcgctgaagccggcgacgtggctaacgccatcctcgacggcaccgatgcggtgatgctgtccggcgaatccgcgaaaggtaaatacccgctggaagcggtcaccatcatggcgaccatttgcgaacgtaccgaccgcgtgatgaccagccgtctggacttcaacaacgacaaccgtaaactgcgcatcaccgaagcggtgtgccgcggcgcggtagaaaccgctgagaaactggaagcgccgctgatcgtggtcgccacccagggcggtaaatccgcacgcgctgtgcgcaaatacttcccggatgccaccatcctggcgctgaccaccaacgaaaccaccgctcgtcagctggtgctgagcaaaggcgtggtaccgcagctggtggaagagattgcctctaccgatgatttctatcatctgggcaaagacctggcgctgaagagcggcctcgcgcgtaaaggcgacgtagtggtgatggtttccggcgcattagtgccgagcggcacgactaataccgcttccgtacacgtgctgtaa

SEQ ID NO: 92 - protein, 470 aa, Klebsiella pneumoniae subsp. pneumoniae MGH 78578
MKKTKIVCTIGPKTESEEMLTKMLEAGMNVMRLNFSHGDYAEHGQRIQNLRNVMSKTGKKAAILLDTKGPEIRTIKLEGGNDVSLKAGQTFTFTTDKSVIGNNEIVAVTYEGFTSDLAVGNTVLVDDGLIGMEVTAIEGNKVICKVLNNGDLGENKGVNLPGVSIALPALAEKDKQDLIFGCEQGVDFVAASFIRKRSDVVEIREHLKAHGGENIQIISKIENQEGLNNFDEILEASDGIMVARGDMGVEIPVEEVIFAQKMIIEKCIRARKVVITATQMLDSMIKNPRPTRAEAGDVANAILDGTDAVMLSGESAKGKYPLEAVTIMATICERTDRVMTSRLDFNNDNRKLRITEAVCRGAVETAEKLEAPLIVVATQGGKSARAVRKYFPDATILALTTNETTARQLVLSKGVVPQLVEEIASTDDFYHLGKDLALKSGLARKGDVVVMVSGALVPSGTTNTASVHVL

SEQ ID NO: 93 - DNA, 1557 bp, Xanthobacter autotrophicus Py2
  CDS (1)..(1557): transl_table=11
atgcccacgaagcgccagcagcccctgaagcgccagcgtgccaccaagatcgtcgccaccgtcggccccgcatccaacagcgaggagaagctgaaggcgctgttcctcgccggcgtggacgtgttccggctcaacttctcccatggcacgcaggaaaaccatggcgaggtgctggcccgcatccgccggctggaaaaggagatgaaccggcccatcggcgtcatcgccgacatgcagggccccaagctgcgcatcggccgcttcaaggacggcgccattgccatcaaggctggcgacatcctgcatttcgatgccgacgtggaccggccgggcgacgagacccgcgtgccgatcccgcaccccgatatcctcgccgcgctgaacgtgggctccaccgtgctgtgcgacgacggcaaggtgcgcctgaaggtggtcaagaagggcgagggcttcctggaggcccaggtggtggcaggcacccgtctgtccaacaacaagggcttcaacatccccgacgtggtgctgccgctgtcgccgctcaccgacaaggatcgcctggacctggagtttgcctgcgaggcgggggtggagtggatcgccctctccttcgtgcagcggccggaggacatccacgaggcccgcgcgctcatcaaggaccgcgcggcggtgatgctgaagatggagaagccgtcggcggtggactatctcaccgagctggtggagctgtccgattccatcatggtggcgcgcggtgacctcggcgtggaaatctcgctggccgaggtgccggcgctgcagaagcgcatgatcgccgaggcccgcaagttcggccgtccggtcatcgtcgccacccaaatgctggaatccatgatcaccgccccggtgcccacccgtgccgaggtgtcggacgtggccaccgccgtctatgagggtgccgactgcgtgatgctttccgcggagacggcggccggccagttcccggtggaggccgtcaccttcatggacgacatcatccgccacgtggagtgcgatcccggctaccgacaggcgctggacgccacccaggcggaatggggcaagaccatcggcgacgcggtcaccaaggccacctaccaggccgccatcgcggtggatgcctcggcgctggtggccttcaccctctcgggcaccacgggcctgcgggccgcgcgcgagcgcccggccatcccgatcctcggcctcaccccgaagatggagacggcgcgtcgtctcgcgttgtcctatggcgtgcacgccgtgcacatgaaggaggacatccactccttcggcgacatggtggacacggcggtgcgcaccgccgtggagcacggcctgggcaagcccggggaccgcctggccatcaccgccggcgtgcccttcgccaagcccggcaccaccaacatcatgcgcatcaccaccatcggcgccgacagcccgccctcccgccacgacgccgacacgcccgcggtgcgctcgaccaaggctcatgagagcaaggggcaggagaagaaggcgcacggcagcaaggtgcacgcctga

SEQ ID NO: 94 - protein, 518 aa, Xanthobacter autotrophicus Py2
MPTKRQQPLKRQRATKIVATVGPASNSEEKLKALFLAGVDVFRLNFSHGTQENHGEVLARIRRLEKEMNRPIGVIADMQGPKLRIGRFKDGAIAIKAGDILHFDADVDRPGDETRVPIPHPDILAALNVGSTVLCDDGKVRLKVVKKGEGFLEAQVVAGTRLSNNKGFNIPDVVLPLSPLTDKDRLDLEFACEAGVEWIALSFVQRPEDIHEARALIKDRAAVMLKMEKPSAVDYLTELVELSDSIMVARGDLGVEISLAEVPALQKRMIAEARKFGRPVIVATQMLESMITAPVPTRAEVSDVATAVYEGADCVMLSAETAAGQFPVEAVTFMDDIIRHVECDPGYRQALDATQAEWGKTIGDAVTKATYQAAIAVDASALVAFTLSGTTGLRAARERPAIPILGLTPKMETARRLALSYGVHAVHMKEDIHSFGDMVDTAVRTAVEHGLGKPGDRLAITAGVPFAKPGTTNIMRITTIGADSPPSRHDADTPAVRSTKAHESKGQEKKAHGSKVHA

SEQ ID NO: 95 - DNA, 1533 bp, Arabidopsis thaliana
  CDS (1)..(1533)
atggagaagttacttgctggacaaacaaacaatggatccctcaagtcaaagacgaagatcgtctgtactctcggaccggcttcgagatcggttgagatggttgagaagcttctcaaagccggtatgaacgtagcccggttcaacttctcccatggttctcactcataccatcaagaaactcttgacaatctcagaaccgccatggagaacacttgtattccctgtgccgtcatgctcgacaccaagggtcctgagatccgaaccgggtttctcaaagaaggcaaaccggttgagctaattcaaggtcaagagattacaatctcaactgattacaccatggaaggagattcaaacacaatctcaatgagttacaagaaacttgctgaagatctcaagtccggtgacgtgattctctgttccgacggtacaatctctcttaccgtcttgtcttgtgacaagaatctcggtcttgttcgtgcccgttgcgagaactctgcagttcttggagaaagaaagaacgtgaacctccctggaatcgtagttgatcttccaacactcacagagaaggatcaagaggatattctccaatggggagttccgaataagatcgatatcatcgctctttcctttgttcgtaaaggatctgatctggtcgaggtcaggaagttgcttggagagaacgcaaagagtatcatgctcatgtcaaaggtggagaatcaagaaggagtgatgaattttgacaagattctggaatattctgatgcattcatggtggctagaggtgatttaggaatggagattccgattgaaaagatgtttcttgctcagaagatgatgattcagaaggctaatgctcttgggaagccaatcgtcacagccacacagatgcttgagtcaatgaccaaatctcctcgtccaactagagcagaagccaccgatgtagctaacgctgtccttgacggcactgattgcgtcatgctcagtggagaaaccgccgccggagctcaccctgaaaccgccgtgctaacaatgtcaagaatctgtaaggaagcagaggatttcatcgattacgacacaatgcacaagaagattcaagatatcgtttcgttgcctttatctcctattgagagcttggccgcttcagccgtttcgacggcgaggagtctttgtgcggctgcgattgtcgttctaaccaagggaggttacacggtggagcttgtggccaagtacaggcctagtgttccgattctgtccgtaattgtgccggagattactcgtacggatgatttcgagtggtcgtgctctgaatctgcggctcatgtggcaagacgtggtttgatctaccgtggaattgttcctgtgatggcgacgggagcatccgctaggtcttcgaacaaggactcgacggaggagacgattcaattcgccattgaattcgcgaagaagaagggaatatgtaagacaggagactcgattgtggcgttgcacaagatcgatggctcctctgttgtcaagattttgaacgtggagtag

SEQ ID NO: 96 - protein, 510 aa, Arabidopsis thaliana
MEKLLAGQTNNGSLKSKTKIVCTLGPASRSVEMVEKLLKAGMNVARFNFSHGSHSYHQETLDNLRTAMENTCIPCAVMLDTKGPEIRTGFLKEGKPVELIQGQEITISTDYTMEGDSNTISMSYKKLAEDLKSGDVILCSDGTISLTVLSCDKNLGLVRARCENSAVLGERKNVNLPGIVVDLPTLTEKDQEDILQWGVPNKIDIIALSFVRKGSDLVEVRKLLGENAKSIMLMSKVENQEGVMNFDKILEYSDAFMVARGDLGMEIPIEKMFLAQKMMIQKANALGKPIVTATQMLESMTKSPRPTRAEATDVANAVLDGTDCVMLSGETAAGAHPETAVLTMSRICKEAEDFIDYDTMHKKIQDIVSLPLSPIESLAASAVSTARSLCAAAIVVLTKGGYTVELVAKYRPSVPILSVIVPEITRTDDFEWSCSESAAHVARRGLIYRGIVPVMATGASARSSNKDSTEETIQFAIEFAKKKGICKTGDSIVALHKIDGSSVVKILNVE

SEQ ID NO: 97 - DNA, 1494 bp, Arabidopsis thaliana
  CDS (1)..(1494)
atggagatgttacttggtggacaagcaaccaatggagctcttcgttcaaagacgaagatagtttgtactcttggaccagcttcaagatcggtggagatgattgagaagcttctcaaggctggtatgaacgtagcccggttcaatttctcccatggttctcactcttaccatcaagaaactctcgataatctcagaaccgccatggacaacactggtatcctctgcgccgtcatgctcgacacaaagagtcctgtgatacgaaccgggtttctcaaagaaggcaaaccgatacagctaaagcaaggtcaagagatcaccatctcaattgattacaagatacaaggagattccaacactatctccatgagctacaagaaacttgcagaggatctcaaacctggtgacgtgatcctttgttcagacggaacaatctctctaaatgtcttgtcctgtgacaagtatctcggtcttgttcgttgccgatgcgagaactctgctcttcttggagaaagaaaaaacgttaatcttcctggaattgtagttgatctcccaacactcactgagaaagataaagaagatattatgcaatggggagttccgaacaaaatcgacattatcgctctctcttttgttcgtaaaggatctgacctaatccaagtaaggaaattacttggagagcactcaaagagcatcatgcttatgtcaaaggtggagaatcaagaaggagtaatgaatttcgataagatcctggagaattctgatgctttcatggtggctagaggagatcttgggatggagataccaatcgaaaagatgtttcttgctcagaaaacaatgatcaacaaggctaatgctcatgggaaaccagtggtcacagccacacagatgcttgaatccatgacagtctctcctcgcccgactagagctgaagctaccgacgtagcaaacgcggttcttgacgggacagattgcgttatgcttagcggagaaactgctgctggagctcaccctgagactgccgtgttaacaatgtcaaggatctgcaaagaagcagaggatttcatagattacgacattctccacaagaaaaccctaggaatggtttcgttaccgttatctccaatcgagagcttagctgcttcagctgtttcgactgcgcggagtgttttcgcgtccgcgatcgttgttctcactagaggcggttacacggcggagcttgtggctaaatacaggccaagcgttccgattctgtcggtgattatgccagagattgctgaatgctcggactcggtagctcatgtggcgagacgtggtttgatttaccgtgggattattccggtggtgggatgttcagctagagattcaacggaggagatgattagattagctataggatttgccaagacgaagggaatttgtaagactggagattccattgtggctttgcacaagattgatggttcatctattgtcaggatagtgagcgtcgagtaa

SEQ ID NO: 98 - protein, 497 aa, Arabidopsis thaliana
MEMLLGGQATNGALRSKTKIVCTLGPASRSVEMIEKLLKAGMNVARFNFSHGSHSYHQETLDNLRTAMDNTGILCAVMLDTKSPVIRTGFLKEGKPIQLKQGQEITISIDYKIQGDSNTISMSYKKLAEDLKPGDVILCSDGTISLNVLSCDKYLGLVRCRCENSALLGERKNVNLPGIVVDLPTLTEKDKEDIMQWGVPNKIDIIALSFVRKGSDLIQVRKLLGEHSKSIMLMSKVENQEGVMNFDKILENSDAFMVARGDLGMEIPIEKMFLAQKTMINKANAHGKPVVTATQMLESMTVSPRPTRAEATDVANAVLDGTDCVMLSGETAAGAHPETAVLTMSRICKEAEDFIDYDILHKKTLGMVSLPLSPIESLAASAVSTARSVFASAIVVLTRGGYTAELVAKYRPSVPILSVIMPEIAECSDSVAHVARRGLIYRGIIPVVGCSARDSTEEMIRLAIGFAKTKGICKTGDSIVALHKIDGSSIVRIVSVE

SEQ ID NO: 99 - DNA, 1533 bp, Arabidopsis thaliana
  CDS (1)..(1533)
atggagatgttacttggtggacaagcaaccaatggagctcttcgttcaaagacgaagataatttgtactcttggaccggtttcaagatcggtggagatgattgagaagcttctcaaggctggtatgaacgtagcccggttcaatttctctcatggttctcactcttaccatcaagaaactctcgataatctccgaaccgccatggacaacactggtattctctccgccgtcatgctcgacacaaagggtcctgagatacgaaccgggtttctcaaagaaggcaaaccgatacagctaaaccaaggtcaagagatcaccatctcaattgattacatgatagaaggagattcaaacgttatctccatgagctacaagaaacttgcagaagacgtcaaacctggtgatgtgattctctgttcagacggcacaatctctttaactgtcttgtcctgtgacaagtctttcggtcttgttcgttgccgttgcgagaactctgcaattctaggagaaagaaaaaacgttaatcttcctggaattgtagttgatctcccaacacttactgagaaagataaagaagatatcatccaatggggagttccgaacaaaatcgacatcatcgctctttcttttgttcgtaaaggatctgacctaactgaagttaggaggttacttggagaacactcaaagaacatcatgctcatgtcaaaggtggagaatcaagaaggggtcatgaattgtgaaaagattctggagaattctgatgctttcatggtggctagaggagatcttggaatggagattccgatcgaaaagatgttccttgctcagaaaacaatgatcaagatggctaatgctcttgggaaaccagttgtcacagccacacagatgcttgaatccatgacagtatctcctcgtccgactagagctgaagccactgacgttgcaaacgctgttcttgacgggacagactgcgttatgcttagtggagaaaccgctgctggagctcaccctgaggctgccgtgctaacaatgtcaaggatctgtaaagaagcagaggatttcatcgattacgacattctccacaagaaaaccctaggaatggtttcgttaccgttatctccgatcgagagcttagctgcttcagttgtttcgacggcacagagtgtttttgcgtcggcgatcgttgttctcaccaaaggcggttacacggcggagcttgtggctaaatacaggccgagcgttccgattttgtcagtgattgtgccagagattgctcaagggaatgatatggagatgtcgtgctcagactcggtggctcatgcggcgagacgtggtttgatttaccgtaggattattccggtggtggcgacgggatcttcggctagggattcaaacaaagatgcaacggaggagatgattaatttggctatcggattcgcgaagacgaagggaatttgcaagaatggagattcgattgtggcgttgcacaagattgatggttcctctgttgttaagatagtgaccgtggagtaa

SEQ ID NO: 100 - protein, 510 aa, Arabidopsis thaliana
MEMLLGGQATNGALRSKTKIICTLGPVSRSVEMIEKLLKAGMNVARFNFSHGSHSYHQETLDNLRTAMDNTGILSAVMLDTKGPEIRTGFLKEGKPIQLNQGQEITISIDYMIEGDSNVISMSYKKLAEDVKPGDVILCSDGTISLTVLSCDKSFGLVRCRCENSAILGERKNVNLPGIVVDLPTLTEKDKEDIIQWGVPNKIDIIALSFVRKGSDLTEVRRLLGEHSKNIMLMSKVENQEGVMNCEKILENSDAFMVARGDLGMEIPIEKMFLAQKTMIKMANALGKPVVTATQMLESMTVSPRPTRAEATDVANAVLDGTDCVMLSGETAAGAHPEAAVLTMSRICKEAEDFIDYDILHKKTLGMVSLPLSPIESLAASVVSTAQSVFASAIVVLTKGGYTAELVAKYRPSVPILSVIVPEIAQGNDMEMSCSDSVAHAARRGLIYRRIIPVVATGSSARDSNKDATEEMINLAIGFAKTKGICKNGDSIVALHKIDGSSVVKIVTVE

SEQ ID NO: 101 - DNA, 1533 bp, Arabidopsis thaliana
  CDS (1)..(1533)
atgtcgaacatagacatagaagggatcttgaaggagctacctaatgatgggaggatcccaaagacgaagatagtttgcacattaggaccagcttctcgcactgtttccatgatcgaaaagcttttgaaagccggtatgaatgtggctcgcttcaacttctcacatggaagccatgaataccatcaagagacactcgacaacctccgctctgctatgcataataccggcattctcgctgctgtcatgcttgatactaaggggcctgagattcgtactggtttcttgaaagatgggaaccctatacaactgaaggaaggtcaagagattactataaccactgattatgacattcaaggagacgaatcaacgatatccatgagctataaaaagctgcctttggatgtgaagcccggaaacaccatactctgtgcagatggaagcataagtctagctgtcttgtcatgtgatcctgagtctggaactgttaggtgccggtgtgaaaactcggcgatgcttggtgaaagaaagaatgtgaatcttcctggcgttgttgttgatcttcccactttgacagataaggatattgaagatattctcggttggggtgttccgaacagcattgatatgattgctctttcgtttgtccgtaaaggttcggatcttgttaatgtccgcaaggttcttggatctcatgctaaaagcataatgctcatgtcaaaggttgagaaccaggaaggtgtgattaactttgatgagatcttgcgtgaaacagatgcgttcatggttgcccgtggtgatctcgggatggagattccgatagagaagatcttcttggctcaaaagttgatgatctacaagtgtaaccttgcgggtaaaccggtggtcacagccactcagatgctggagtcaatgatcaaatcacctcggccaacccgagctgaagccacagatgttgcaaatgctgttcttgatggtactgactgtgtgatgcttagcggtgagagtgcagcaggagcttatccggaaatagctgtgaaagtcatggctaagatctgcattgaagccgaatcctcgcttgattacaacacaatctttaaagagatgatccgagcaactccacttccaatgagcccactcgagagtcttgcatcatccgctgtacggactgctaacaaagcgagggcaaaactcatcattgtgttgacacgtggaggttcaactgctaatctcgtggctaaatacagaccggctgttccgattctgtcagtggttgtcccggttatgaccactgattcctttgactggtcttgtagtgacgagtcacctgcaaggcatagtctgatatacagaggtctaatccctatgttggctgaaggatctgcaaaggcaacagatagtgaagccaccgaagttatcattgaagctgctctgaagtcggctactcagagaggactgtgcaaccgtggtgatgcaatcgtggcgctgcaccgtattggagctgcctcagttattaagatctgtgtggttaagtga

SEQ ID NO: 102 - protein, 510 aa, Arabidopsis thaliana
MSNIDIEGILKELPNDGRIPKTKIVCTLGPASRTVSMIEKLLKAGMNVARFNFSHGSHEYHQETLDNLRSAMHNTGILAAVMLDTKGPEIRTGFLKDGNPIQLKEGQEITITTDYDIQGDESTISMSYKKLPLDVKPGNTILCADGSISLAVLSCDPESGTVRCRCENSAMLGERKNVNLPGVVVDLPTLTDKDIEDILGWGVPNSIDMIALSFVRKGSDLVNVRKVLGSHAKSIMLMSKVENQEGVINFDEILRETDAFMVARGDLGMEIPIEKIFLAQKLMIYKCNLAGKPVVTATQMLESMIKSPRPTRAEATDVANAVLDGTDCVMLSGESAAGAYPEIAVKVMAKICIEAESSLDYNTIFKEMIRATPLPMSPLESLASSAVRTANKARAKLIIVLTRGGSTANLVAKYRPAVPILSVVVPVMTTDSFDWSCSDESPARHSLIYRGLIPMLAEGSAKATDSEATEVIIEAALKSATQRGLCNRGDAIVALHRIGAASVIKICVVK

SEQ ID NO: 103 - DNA, 1740 bp, Arabidopsis thaliana
  CDS (1)..(1740)
atggctcaagtggttgctaccaggtcaattcaaggctcgatgttatctcccaacggtggatctgtgtctacaagatccgagaagctattgaaaccagcgagttttgcagtgaaggttcttggcaacgaagcaaagagaagtggaagagtctctgtaagaagcagaagagtggttgatactactgtgagatccgctcgtgttgagactgaagtcattcctgtttctcctgaagatgtgcctaacagagaggagcagcttgagaggttgttggaaatgcagcagtttggtgatacatcggtagggatgtggtcgaagccgacagtgaggaggaagacaaagattgtttgcaccgttggtccgtcgaccaacacacgagaaatgatatggaaattggctgaagctgggatgaatgttgctaggatgaatatgtctcatggagatcatgcttcacataagaaggttattgatttggttaaagaatacaatgcacaaactaaagacaacactattgctatcatgcttgacaccaagggtccggaagttaggagtggagatttacctcagccaattatgttagatcctggtcaagagtttacctttacaattgagagaggagtcagcacaccaagttgtgtcagtgttaactatgatgatttcgttaatgacgtggaagcgggtgacatgcttcttgttgatggtggtatgatgtcgtttatggtgaagtcaaagaccaaagactctgtcaaatgtgaagttgttgatggtggagaacttaagtcaaggagacacctgaatgtccgaggaaagagtgcaactttaccttcaatcactgagaaggactgggaggatattaaatttggagtggagaacaaagttgacttttatgcagtttcctttgtcaaagatgctcaagttgtacacgagttgaagaaataccttcaaaatagtggtgctgatatacacgtgatagtgaaaattgagagtgcagactccatacctaacttgcactccattatcacagcatcagatggggcaatggttgcaagaggtgatcttggtgcagagcttccaattgaagaagtccccattcttcaggaggagatcattaacctgtgccgtagtatgggaaaagctgttattgttgcgactaacatgcttgagagtatgatagttcatccaactccaacccgggcagaggtctcagacattgctatcgctgttagagaaggtgctgatgcggtaatgctttcaggagaaactgctcacggaaagttcccattgaaagctgctggagtgatgcacactgttgcattgcgaacagaagcaaccattactagcggtgaaatgccacctaatcttggtcaagccttcaagaaccatatgagtgagatgtttgcataccatgcaaccatgatgtcaaacacacttggaacttcaactgttgtcttcaccagaaccggtttcatggccatattgttaagtcactatcgtccttccggcacaatctatgccttcacaaatgagaaaaaaatacaacaaagattagctttgtatcaaggtgtatgccccatatatatggagttcacagatgatgcagaagaaacttttgctaatgctttggctacattactgaaacaaggaatggtgaagaagggagaggaaatagcaatcgtacagagcggtacacagccaatctggcgatctcaatcgacacataacatccaagtccgcaaggtttaa

SEQ ID NO: 104 - protein, 579 aa, Arabidopsis thaliana
MAQVVATRSIQGSMLSPNGGSVSTRSEKLLKPASFAVKVLGNEAKRSGRVSVRSRRVVDTTVRSARVETEVIPVSPEDVPNREEQLERLLEMQQFGDTSVGMWSKPTVRRKTKIVCTVGPSTNTREMIWKLAEAGMNVARMNMSHGDHASHKKVIDLVKEYNAQTKDNTIAIMLDTKGPEVRSGDLPQPIMLDPGQEFTFTIERGVSTPSCVSVNYDDFVNDVEAGDMLLVDGGMMSFMVKSKTKDSVKCEVVDGGELKSRRHLNVRGKSATLPSITEKDWEDIKFGVENKVDFYAVSFVKDAQVVHELKKYLQNSGADIHVIVKIESADSIPNLHSIITASDGAMVARGDLGAELPIEEVPILQEEIINLCRSMGKAVIVATNMLESMIVHPTPTRAEVSDIAIAVREGADAVMLSGETAHGKFPLKAAGVMHTVALRTEATITSGEMPPNLGQAFKNHMSEMFAYHATMMSNTLGTSTVVFTRTGFMAILLSHYRPSGTIYAFTNEKKIQQRLALYQGVCPIYMEFTDDAEETFANALATLLKQGMVKKGEEIAIVQSGTQPIWRSQSTHNIQVRKV

SEQ ID NO: 105 - DNA, 1497 bp, Arabidopsis thaliana
  CDS (1)..(1497)
atggcgatgatagagcaaaggccgaagacgaagatcgtttgtactctaggtccagcttccagatctgttccgatggtcgagaagcttcttagggctggtatgaacgttgctcgtttcaatttctctcatggatctcatgaataccatcaagagactctcgataatcttcatcaagctatgcttaacactgggattctctgtgccgtcatgctcgacaccaagggtccagaaatccgaaccgggttcttgaaagatgggaaaccaatccagctgaaacaaggacaagagatcactatttcgactgactatgacttgaagggtgacgagaacacgatttgcatgagctacaaaaagttggctgttgatgtgaacccaggaatggtcattctttgtgctgatggtacaatctccttactggttctctcttgtgacaaagagaacggtacagtccgttgccggtgtgagaactctgcgatgctcggtgagagaaagaacgttaatctcccaggtgttgttgtggatctcccaactctaactgagaaagacaaagaagacatcatgcaatggggagtcccgaatcaaatcgacatgattgctctgtcttttgtcaggaaaggttcagacttggttcaagtccggaaacttctaggaaagcacgccaaaaacattcttctcatgtctaaggtcgagaaccaagaaggtgtggcaaattttgatgacattttggtcaattcagacgctttcatgattgctagaggagatctgggcatggaaatcccgattgagaagatcttcttagctcagaaggtgatgatctacaaatgcaacatccagggaaaacctgtggtcacagcaactcagatgctcgagtccatgatcaaatctcctagacccacaagagccgaagctacggatgtagcaaacgcagtccttgatggtacagactgtgtcatgctcagtggtgaaactgcagctggagcataccctgaactagccgtccgtacaatggctaagatctgcgtggaagccgagagcacccttgactacggtgatgtcttcaagaggatcatgctgtactctccagttccaatgagtccactcgagtcacttgcatcttcagctgtcagaactgctaactcagctagagccactctcatcatggtcctaaccagaggaggaagcacagcaagacttgtggctaagtacagaccaggaatgcctattctatccgtcgttgttcctgagatcaaaaccgacttctttgactggtcttgcagcgatgaatcccccgcgagacacagccttatcttccgtggtctgatcccagtgctctacgctggatccgcaagagcctcacacgatgaatcaacagaagaagctatcgagtttgctactcagtacgggaaagagaaagagctatgcaagactggagattccgttgttgctctactccgagtcggtaatgcttccgtgatcaagatcttgaccgtcaagtga

SEQ ID NO: 106 - protein, 498 aa, Arabidopsis thaliana
MAMIEQRPKTKIVCTLGPASRSVPMVEKLLRAGMNVARFNFSHGSHEYHQETLDNLHQAMLNTGILCAVMLDTKGPEIRTGFLKDGKPIQLKQGQEITISTDYDLKGDENTICMSYKKLAVDVNPGMVILCADGTISLLVLSCDKENGTVRCRCENSAMLGERKNVNLPGVVVDLPTLTEKDKEDIMQWGVPNQIDMIALSFVRKGSDLVQVRKLLGKHAKNILLMSKVENQEGVANFDDILVNSDAFMIARGDLGMEIPIEKIFLAQKVMIYKCNIQGKPVVTATQMLESMIKSPRPTRAEATDVANAVLDGTDCVMLSGETAAGAYPELAVRTMAKICVEAESTLDYGDVFKRIMLYSPVPMSPLESLASSAVRTANSARATLIMVLTRGGSTARLVAKYRPGMPILSVVVPEIKTDFFDWSCSDESPARHSLIFRGLIPVLYAGSARASHDESTEEAIEFATQYGKEKELCKTGDSVVALLRVGNASVIKILTVK

SEQ ID NO: 107 - DNA, 1533 bp, Arabidopsis thaliana
  CDS (1)..(1533)
atgtcgaacatagacatagaaggaatattgaaggagctacctaatgatgggaggactcctaagactaagatcgtttgtacattaggtcctgcgtctaggtctgtgacaatgattgagaagcttcttaaagcaggcatgaatgtagctcgattcaatttctctcacggaagccatgagtaccatcaggagactcttgacaatctccgcaccgctatgcagaataccggcattctcgctgctgttatgcttgatacaaaggggcctgagattcgtaccggtttcttgaaagatgggaaccctatacaactaaaggaaggccaagagatcacaattaccactgattatgacatcaagggcgatgagaaaacgatttccatgagctacaaaaagctcccagtggatgtgaagcccggaaataccatactatgtgcagatggaagcataagtcttgctgtcgtgtcatgtgatccaaacgctgggactgttatatgtcgatgtgaaaatacagccatgctaggtgaaagaaaaaatgtgaatctcccaggtgttgttgttgatctccccacattgactgacaaggatgtagaagatattcttaaatggggtgttccaaacaacatcgatatgattgctctttcatttgttcgcaaaggttcagatcttgttaatgtccggaaagtccttggatcacattccaagagtataatgttgatgtcgaaggttgagaaccaagaaggagtcctgaatttcgatgagattttgcgtgaaactgatgcattcatggttgctcgtggtgatcttgggatggagattccgatagagaagatcttcttggctcagaagatgatgatctacaagtgtaaccttgcaggtaaaccggtggtcacagccactcaaatgctcgagtcgatgatcaaatcaccacggccaacacgagcagaagccacagatgtagcaaacgcagttctcgatggcactgactgtgtgatgcttagcggagaaagtgctgcaggagcttaccctgaaatagcagtgaaaacaatggctaaaatctgcatcgaggcggaatcatcgcttgactacaacacaatcttcaaggagatgattagagcaactccacttccaatgagcactcttgagagtcttgcatcatcagctgtacgaacggcaaacaaagccaaagccaaactcatcatcgtgttgaccagaggaggtacaacagctaaactggtggccaagtatagaccggctgttccaattctatcggtggttgttccggtcttcaccagcgatacgtttaactggagttgcagcgatgagtcaccggcgaggcatagtttgatatatagaggtctgataccggttttgggtgaaggatctgcaaaagcaactgatagtgaatccacagaggagattattgaatctgctttgaagtcagcgacagagaaaggactgtgtaaccatggtgatgctgtggtggctctgcaccgtattggagctgcttcggttatcaagatctgtgtggtgaagtga

SEQ ID NO: 108 - protein, 510 aa, Arabidopsis thaliana
MSNIDIEGILKELPNDGRTPKTKIVCTLGPASRSVTMIEKLLKAGMNVARFNFSHGSHEYHQETLDNLRTAMQNTGILAAVMLDTKGPEIRTGFLKDGNPIQLKEGQEITITTDYDIKGDEKTISMSYKKLPVDVKPGNTILCADGSISLAVVSCDPNAGTVICRCENTAMLGERKNVNLPGVVVDLPTLTDKDVEDILKWGVPNNIDMIALSFVRKGSDLVNVRKVLGSHSKSIMLMSKVENQEGVLNFDEILRETDAFMVARGDLGMEIPIEKIFLAQKMMIYKCNLAGKPVVTATQMLESMIKSPRPTRAEATDVANAVLDGTDCVMLSGESAAGAYPEIAVKTMAKICIEAESSLDYNTIFKEMIRATPLPMSTLESLASSAVRTANKAKAKLIIVLTRGGTTAKLVAKYRPAVPILSVVVPVFTSDTFNWSCSDESPARHSLIYRGLIPVLGEGSAKATDSESTEEIIESALKSATEKGLCNHGDAVVALHRIGAASVIKICVVK

SEQ ID NO: 109 - DNA, 1413 bp, Vibrio cholerae O1 biovar eltor str. N16961
  CDS (1)..(1413): transl_table=11
atgaaaaagaccaaaatcgtatgtacgattggcccaaaaactgagtctgtagagaaactgactgagcttgtaaacgctggcatgaatgttatgcgtctcaacttctctcacggtgactacgttgaacacggcactcgtatcactaacttccgtaaagtgatggaagtgaccggtaaacaactggcgatcctactggatactaaaggtccagagatccgtactatcaagctggaaaacggtgacgatgtggatctggtcgctggccaagagttcactttcacaactgacacgaaagttgttggtaacaaagagcgcgtagcagtcacttactctggttttgcaaaagacctgaacgtgggcaaccgtattctggttgacgacggtcttatagagatggaagtactggcgaccactgacactgaagtgaagtgtaaagttctgaacaacggcgctctgggtgaaaacaaaggtgttaacctgccaggcgtttctgtcaatctgccagcgctgtctgaaaaagacaaaaacgacctgaaatttggttgtgagcaaggcgttgatttcgttgctgcctctttcatccgtaaaggttctgacgtgaaagaaatccgtgaagtattagcttctcacggcggtcaaaacattcaaatcatctctaaaatcgaaaaccaagaaggcttggacaacttcgatgagatccttgagctgtctgacggcatcatggttgcacgtggcgacctaggtgtagaaatcccagcagaagaagttatcttcgctcaaaagatgatgatcgagaaatgtaaccgtgcacgtaaagtggttatcacggcgacgcaaatgctggattcaatgatcaagaacccacgtccaactcgcgcagaagcgggcgacgttgcgaacgcgatcatggatggtactgatgctgtaatgctttctggcgaaacagcaaaaggtaagtacccagttgaagcggtgaagatcatggcgcaaattgctgagcgtactgaccctgtactgaaagcagaactgggttcacgcctagacagcccacgtctacgtatcactgaagccgtatgtaaaggtgcagtagacaccgcagagaaactggcagcgccactgatcatcgtagcaactgaagcgggtaaatctgctcgttcagttcgtaagtacttcccaacggctaacattattgcagtcaccaccaacaagaaaacagcagctcagttagtgctttctaaaggtgtaacgccagttgtggttgacgcgattgacaacactgacgctttctaccacctaggtaaagagattgcgctgcaatctggccttggcaagaaaggcgacatcgtagtgatggtttcaggcgcactggttgcttctggcacaacgaacactgcatcagtacacgtactgtaa

SEQ ID NO: 110 - protein, 470 aa, Vibrio cholerae O1 biovar eltor str. N16961
MKKTKIVCTIGPKTESVEKLTELVNAGMNVMRLNFSHGDYVEHGTRITNFRKVMEVTGKQLAILLDTKGPEIRTIKLENGDDVDLVAGQEFTFTTDTKVVGNKERVAVTYSGFAKDLNVGNRILVDDGLIEMEVLATTDTEVKCKVLNNGALGENKGVNLPGVSVNLPALSEKDKNDLKFGCEQGVDFVAASFIRKGSDVKEIREVLASHGGQNIQIISKIENQEGLDNFDEILELSDGIMVARGDLGVEIPAEEVIFAQKMMIEKCNRARKVVITATQMLDSMIKNPRPTRAEAGDVANAIMDGTDAVMLSGETAKGKYPVEAVKIMAQIAERTDPVLKAELGSRLDSPRLRITEAVCKGAVDTAEKLAAPLIIVATEAGKSARSVRKYFPTANIIAVTTNKKTAAQLVLSKGVTPVVVDAIDNTDAFYHLGKEIALQSGLGKKGDIVVMVSGALVASGTTNTASVHVL

SEQ ID NO: 111 - DNA, 1755 bp, Bacillus halodurans C-125
  CDS (1)..(1755): transl_table=11
atgcgaaagacaaaaatcgtttgtacgatcggtccggcgagtgaaagtgtagaaaagttagaacaattaatggaagcaggcatgaatgttgcgcggttaaatttttcccatggggactttgaagagcacggtgcacgaatcaaaaacattcgagaagcagcgaaacgtatcggaaaaacagttgcaattttacttgatacaaaaggaccggaaattcgtacccaaacccttgaagggggcgtggccgaattaaaggcagggcaagagcttgtcatctctatgaaggaggttgtaggtacgagtgagcgtatttctgtcacatatccgggcctagttcatgatgttgtaccaggtgcaaaaattttattagatgatgggttaattgggctagaagtcgttgaggttcgcgatcaagagattttgacaaaagtcttgaacagcggcacattgaaaaataaaaaaggtgtcaatgtcccgaacgtaagcgtcaacctgcctggaatcacagaaaaagacgcagcggatatcaagtttgggatagagcaaggcgtcgatttcattgcagcttcattcgttcgcagagcgcaagatgtactagaaattcgcgaattgcttgagcagcacggggcagagcatattaaaatcatccctaagatcgagaatcaagaaggcgttgataacatcgaggaaattcttgaagtatcagacggtttgatggtggcccgcggagatctaggggtagagattcctgctgaggaagttccacttgtgcaaaagtcgcttattaagaaatgcaaccttgtagctaaacctgttattacagcgacacagatgcttgactcgatgcagcgtaacccacgtccaactcgagccgaagctagtgatgtagcgaatgcgatttttgatggaacggatgcgatcatgctttccggtgaaaccgcagctggggattatccagtcgaggcggttcagacgatgagccgaattgcagagcgtgcagagcaagccctaaactatcaagaaatcttgtccaagcatacaaaagaagcgagaacgacgattacgagtgctattagtcaatcggttggccacacagcattcaacttgaatgcaagtgcaatcttgacggcgactgaaagcggccatacagctcgcgtagtagcgaaataccgcccgaaatcaccaattgtagcagttacaagtaacgaaacagttgttcgtcaactcgctctcgtttggggagtgtattcaatccttggagaagaggcagagacgacggatgatatgcttcaagtgaccgttgagacagcgttaaagtcccaattggtgaaacaaggggatcttgtcgtcatcacggcaggtgttccagtgggagagacaggaacgacgaacattatgaaagttcacgtcattggtgaagtggtcgcgaaaggtcaaggcattggacgcgacacggtgaacggcaaagtcgtcattgctgctaatgcagaggaagcaaatgcaaaggttgaagaagggtcgattttagttactttcagcacggataaggatatgatgccagcctttgaaaaagcagccgccgtcattaccgaagaaggtgggattacatcccatgccgcagttgttggtctaagtcttaatacacctgtgatcgtcggtgtacaaaatgcgtctgcgctctttaaagatggggaagaaataacggtcgatacgagccgcggtgacatttacagagggcaagcaagtgtactataa

SEQ ID NO: 112 - protein, 584 aa, Bacillus halodurans C-125
MRKTKIVCTIGPASESVEKLEQLMEAGMNVARLNFSHGDFEEHGARIKNIREAAKRIGKTVAILLDTKGPEIRTQTLEGGVAELKAGQELVISMKEVVGTSERISVTYPGLVHDVVPGAKILLDDGLIGLEVVEVRDQEILTKVLNSGTLKNKKGVNVPNVSVNLPGITEKDAADIKFGIEQGVDFIAASFVRRAQDVLEIRELLEQHGAEHIKIIPKIENQEGVDNIEEILEVSDGLMVARGDLGVEIPAEEVPLVQKSLIKKCNLVAKPVITATQMLDSMQRNPRPTRAEASDVANAIFDGTDAIMLSGETAAGDYPVEAVQTMSRIAERAEQALNYQEILSKHTKEARTTITSAISQSVGHTAFNLNASAILTATESGHTARVVAKYRPKSPIVAVTSNETVVRQLALVWGVYSILGEEAETTDDMLQVTVETALKSQLVKQGDLVVITAGVPVGETGTTNIMKVHVIGEVVAKGQGIGRDTVNGKVVIAANAEEANAKVEEGSILVTFSTDKDMMPAFEKAAAVITEEGGITSHAAVVGLSLNTPVIVGVQNASALFKDGEEITVDTSRGDIYRGQASVL

SEQ ID NO: 113 - DNA, 1440 bp, Pasteurella multocida subsp. multocida str. Pm70
  CDS (1)..(1440): transl_table=11
atgtctagaagactaagaagaacgaagattgtatgtacaatgggaccgtcaacagagcgtgggaataatcttgaaaaaattatcatggctggcgcgaatgttgttcgtatgaacttttctcatggcacaccagaagatcatatcggtcgcgcggagaaagtacgtgaagtggcaaaaaaacttggaaaaaccgttgctattttaggtgatttacaaggccctaaaatccgtgtctcaactttcaaagatggtaaaattttcttaaatattggtgataaatttgtgcttgatgccgatttaccaaaaggtgaaggtacgcaagaaggtgttggtttagactacaaaacattaccacaagacgttgtgccaggcgatattttattgttagatgatggtcgtgttcaattaaaagtcttatctacagaaggtaataaagtttttactgaagtcactgttggtggtccattatcgaacaataaaggtattaacaagttaggcggaggtttatctgctgatgcattaactgaaaaagataaaaatgatattttattggcagcaaaaatcggtgtagattatttagcggtttctttccctcgttcaagtgcagatttaaactatgcgcgtgagttagctgaagctgcaggcttaaaagcaaaaatcgtggcaaaagtagaacgtgcagaaactgttgcaaccactgaagcaatggatgatattattttagcatcagatgtcatcatggtagcacgtggtgacttaggggttgaaattggtgaccctgaattagtgggtgtacagaaaaaattaatccgtcgcgcacgccaattaaaccgtgttgttattacagcaacacaaatgatggaatctatgattagcaatccaatgccgactcgtgcggaagtgatggacgtagcgaatgccgtattagatggtacagacgccgtgatgctttctgcagaaacagcggcagggcaatatccagcagaaacagtggctaccatggcaaaagtgtgtttaggtgctgaaaaaatgccaagcatcaatgtttctcgtcaccgtatggatatcacttttgattctatcgaagaatccgttgcaatgtctgcaatgtatgctgcaaaccacatgaaaggtgttgctgcaattattgcaatgacacatactggacgtaccgcgttattaatgtcacgtattagttctggtttaccgatttttgccttatctcgtaaccaagatgcattaaatctttgtgcattataccgtggtgttacacctgttcattttgatgaagtcagccgtaattcaaaaggtgcagctgcagcgattcgtttgttaaaagagaaaggtttcttagtatcgggtgatttagttcttttaactcaaggtgatgaattgttagcaagtggtacaaatacttgccgtacactagttgtagaataa

SEQ ID NO: 114 - protein, 479 aa, Pasteurella multocida subsp. multocida str. Pm70
MSRRLRRTKIVCTMGPSTERGNNLEKIIMAGANVVRMNFSHGTPEDHIGRAEKVREVAKKLGKTVAILGDLQGPKIRVSTFKDGKIFLNIGDKFVLDADLPKGEGTQEGVGLDYKTLPQDVVPGDILLLDDGRVQLKVLSTEGNKVFTEVTVGGPLSNNKGINKLGGGLSADALTEKDKNDILLAAKIGVDYLAVSFPRSSADLNYARELAEAAGLKAKIVAKVERAETVATTEAMDDIILASDVIMVARGDLGVEIGDPELVGVQKKLIRRARQLNRVVITATQMMESMISNPMPTRAEVMDVANAVLDGTDAVMLSAETAAGQYPAETVATMAKVCLGAEKMPSINVSRHRMDITFDSIEESVAMSAMYAANHMKGVAAIIAMTHTGRTALLMSRISSGLPIFALSRNQDALNLCALYRGVTPVHFDEVSRNSKGAAAAIRLLKEKGFLVSGDLVLLTQGDELLASGTNTCRTLVVE

SEQ ID NO: 115 - DNA, 1434 bp, Pseudomonas aeruginosa PAO1
  CDS (1)..(1434): transl_table=11
atgacagccgacaagaaagccaagatcctcgccaccctcggcccggccacccgcagccgcgacgatatccgtgccctggtggaggccggcgccaacctgctccgcctgaacttcagccacggcgactatgccgatcacgcgcagcgcttcgcctgggtgcgcgaggtggaagcggagctgaactacccgatcggcgtgctcatggacctgcagggtccgaagctgcgggtcggccgcttcgccgccggtgccgtgcaattgcagcgtgggcagaccttcaccctcgacctcagcgacgcccccggcgacgagcggcgggtcaacctgccgcatccggagatcatccatgccctggaaccgggcatgagcctgctgctggacgacggcaagatccgcctggaagtggtcaactgccacagcgacgccatcgagacccgcgtggcggtgggtggcgagctgtccgatcgcaagggcgtcaacgtgccggaagcggtgctgcaactcagcccgctgaccgacaaggaccgccgcgatctggccttcggcctggaactgggggtcgactgggtggcgctgtccttcgtgcaacgcccggaggacatcgacgaggcccgtgggctgatcggcgacaaggccttcctcatggccaagatcgagaagcccagcgcggtgagcgccatcgaggcgatcgccgagcgcgccgacgcgatcatggtggcgcgcggcgacctcggcgtagaggtgccggcggagagcgtgccaggcatccagaaacgcatcgtccaggtctgccgccagctcggcaagccggtggtggtggccacccagatgctcgagtcgatgcgcttctcccccgccccgacccgcgccgaggtgaccgacgtagccaccgcggtgggcgccggcgccgacgcggtgatgctctcggcggaaaccgcttccggacaataccctcgcgaggcggtagagatgatggcgaagatcgtccgccaggtggaggccgagccggactaccacgtccagctcgaggtcaaccgtccgcagcccgacgctaccgtctccgatgcgatcagctgcgcgatccgccgggtcagccggatcctcccggtggcggtgctggtgaactacaccgagtcgggcaactcgaccctgcgcgccgcccgcgagcggcccaaggcgccgatcctcagcctgaccccgaacctgcgtaccgcgcggcgactgaccgtggcctggggcgtgtattcggtggtcaacgagcaactggcgcacgtcgacgagatctgctcgaccgccctcgacatcgccctggcccagcgcatggcgcgccgcggcgacaccgtggtggtcaccgccggcgtaccgttcggtcgccccggctcgaccaacatgctgcgcatcgagaccgtggcgccgccgctgggagatctctga

SEQ ID NO: 116 - protein, 477 aa, Pseudomonas aeruginosa PAO1
MTADKKAKILATLGPATRSRDDIRALVEAGANLLRLNFSHGDYADHAQRFAWVREVEAELNYPIGVLMDLQGPKLRVGRFAAGAVQLQRGQTFTLDLSDAPGDERRVNLPHPEIIHALEPGMSLLLDDGKIRLEVVNCHSDAIETRVAVGGELSDRKGVNVPEAVLQLSPLTDKDRRDLAFGLELGVDWVALSFVQRPEDIDEARGLIGDKAFLMAKIEKPSAVSAIEAIAERADAIMVARGDLGVEVPAESVPGIQKRIVQVCRQLGKPVVVATQMLESMRFSPAPTRAEVTDVATAVGAGADAVMLSAETASGQYPREAVEMMAKIVRQVEAEPDYHVQLEVNRPQPDATVSDAISCAIRRVSRILPVAVLVNYTESGNSTLRAARERPKAPILSLTPNLRTARRLTVAWGVYSVVNEQLAHVDEICSTALDIALAQRMARRGDTVVVTAGVPFGRPGSTNMLRIETVAPPLGDL

SEQ ID NO: 117 - DNA, 1740 bp, Halobacterium sp. NRC-1
  CDS (1)..(1740): transl_table=11
atgagaaacgcgaagatcgtctgtacgctcggccccgcgaccaacgacgacgcgtcggtgcgggcgctcgcggacgccggcatgacggtagcacggatcaacgccagccacggcgacgcggccgcgcgccgggagctcatcgagaccacgcgggccgtcgacgcccagaccgacaagccgcttgcggtgatgctcgacacccaaggcccggaggtcaggaccgcaccgatcgacgacgacggcaccatccacatcgaaaccggcagcgacgtggcgttcgtcgagggcgacaccgcgacccccgatcggatcgggatctccaccagcatcgcggccgccgaacccggtgacacggtgttgctcgacgacggccgcatcgaggccgacgtcgaccgcgtcgccggcgacacggtgcacgccaccgtggtgtccggcgggagcctcggcagccggaagggcgtcaacgtgccgggcgtcgagctggacgtggacgtcgtcaccgagaaggaccgccgcgatctggcgttggccgccgagctggacgtcgattacgtggcggcgagcttcgtccgggacgccgacgacgtgttggccgtcaaccgcgtcctggagtcccacggtgccgacatccccatcgtggcgaagatcgagcgggcgggtgccgtggagaacctggacggcatcatcgacgccgcccagggcgtgatggtggcgcgcggcgatctcggcgtggagtgtccgatggaggacgtgccgatgatccaaaagcgcatcatcgcgcagtgccgggacgcgggggtgccggtgatcaccgcgaccgagatgctggactcgatggtgcacgcccggcgtccgacgcgcgcggaggccagcgacgtggccaacgcggtcctggacggcaccgacggcgtgatgttgtccgcggagaccgcggtgggggacaaccccacgcgggttgtcgagacgatggaccgcatcgtgcgggaggtcgaaggcagcgcggagtacagcgagcgccaggagcaggcggtgccgacggccgacgggacggcgaagacggacgcgctggcgcggtcggcgcggtatctggcccgcgacatcgacgccagcgcggtggtggtggcctccgagtcggggtacaccgcccggaaggccgcgaagttccggcccagcgtcccggtggtctgtgcgacgccgtcccacgacgtgcgccggcagctcgcgctcaactggggggtccacgccaactacgcggcggtcgcggagggcgacgcgacgacggtcgtcgagcgcgcggtgcaggcggccgtcgactccggcgtggtggcgagcggcgacaccgtggtggtgctcgtgggcatgatgacggagcttgagggcgcatcgacgacgaacacgctgaaagtgcacgtggccgcggagacgctctcgaccgggcgggcggtcgtcgacgggcggacgaccggccggacgtaccgtgccgacagcggggatctcagcgacgccccggagaacgcggtggtgctgttggcgcacgggttcgacggcgagttcgacggcgatctctcgaagatcggggcgatcgtgagcgcggacgccgggctgaccgggtatccggcggtgatcgcgcgcgaactcgacgtgccgatggtcggcgatgtcgacgtggacgcggtgccggctggcgatctggtgaccgtggacggcgagcgcggcgtcgtctacgaggccgatcagtga

SEQ ID NO: 118 - protein, 579 aa, Halobacterium sp. NRC-1
MRNAKIVCTLGPATNDDASVRALADAGMTVARINASHGDAAARRELIETTRAVDAQTDKPLAVMLDTQGPEVRTAPIDDDGTIHIETGSDVAFVEGDTATPDRIGISTSIAAAEPGDTVLLDDGRIEADVDRVAGDTVHATVVSGGSLGSRKGVNVPGVELDVDVVTEKDRRDLALAAELDVDYVAASFVRDADDVLAVNRVLESHGADIPIVAKIERAGAVENLDGIIDAAQGVMVARGDLGVECPMEDVPMIQKRIIAQCRDAGVPVITATEMLDSMVHARRPTRAEASDVANAVLDGTDGVMLSAETAVGDNPTRVVETMDRIVREVEGSAEYSERQEQAVPTADGTAKTDALARSARYLARDIDASAVVVASESGYTARKAAKFRPSVPVVCATPSHDVRRQLALNWGVHANYAAVAEGDATTVVERAVQAAVDSGVVASGDTVVVLVGMMTELEGASTTNTLKVHVAAETLSTGRAVVDGRTTGRTYRADSGDLSDAPENAVVLLAHGFDGEFDGDLSKIGAIVSADAGLTGYPAVIARELDVPMVGDVDVDAVPAGDLVTVDGERGVVYEADQ

SEQ ID NO: 119 - DNA, 1473 bp, Neisseria meningitidis Z2491
  CDS (1)..(1473): transl_table=11
atgaaccagacaagccgcgatctgacccgcatcagccacaacactaaaatcgtcgccacccttgggccgggcagcaacaacgtcgaactgttggaagacatgatccgcgtcggcggtctgaacgtcgtccgcttcaacttcagccacggcacgcccgaattccatcaggaaaacgcccgcatcgtgcgcgaggcggcaaaacgcaccggacaggaaatcgccatcattgccgacctgcagggcccgaaaatccgcgtgggcaaaatcgccggcggcggcatcgaattgaacaaaggcgaaacgctgggactggatgccgcgctcgaaggcgaaggcacgcgcgaggcggtcggtttggactaccgcgacctgcccgacgacgttgccgcaggcgatgtcttgtggctggacgacggcctgctgaccctgaccgtggaatccgtcgaaggcagcaggattatcacaagggtggaaaacagccacgtcctgaaaagcaacaagggcatcaacaaacgcggcggcggtctgtccgcaggcgcgttgaccgaaaaagacttccgcgacctgaaaaccgcgattgccatcggttgcgactatctcgccatcagctttgtgaaatccgccgaagatttgcacatcgcgcgcgccaaagtcgaagaagaaatgaaaggcagtacggccgtgcgccccggtttggtttccaaaatcgaacgcgtagaagcgattgaaaaccttgatgaaatcatcctcgccggcgacggcattatggttgcacgcggcgacttggcggtcgaagtcggacacgccgccgtccccgccctgcaaaaacggatgatccgccgcgcccgcgagttgcgccgcttcagcattacggcgacgcaaatgatggaatcgatgattaccaaccccgtgccgacccgcgcggaagtcagcgatgtggcaaacgcggtattggacggcaccgatgcggtgatgtgttccgccgaaaccgccgtcggcgcgtatccgtttgaaaccgtcagccaaatggcgattatctgcgcggctgcggaaaaagagcaggattcgctcaacggcgttgccgaacaggtcgagtatcccgaagcggtcagcaccaacctggcggttgccggcggtgcggtcagcgtggcgcgcgcggttcacgccaaagccatcgtcgccctgaccgaaagcggttcgaccgcctttgaaatcagccgccacaacatcaccctgccgattttcgcgctgaccccgagcgtttccgcccaacgccgtatggcgatgtaccggggcgtgcgcccgctgattttggcaaccagcaccgaccacgacacggcgttaaacgaagtcgaaaccatgctggtggaacacaacatcctgcattccggcgaccaatacatcattaccagcggctcgcaaatgcgcgaatccggttcgaccaatacgctggaagtgctgcgcgtcaaataa

SEQ ID NO: 120 - protein, 490 aa, Neisseria meningitidis Z2491
MNQTSRDLTRISHNTKIVATLGPGSNNVELLEDMIRVGGLNVVRFNFSHGTPEFHQENARIVREAAKRTGQEIAIIADLQGPKIRVGKIAGGGIELNKGETLGLDAALEGEGTREAVGLDYRDLPDDVAAGDVLWLDDGLLTLTVESVEGSRIITRVENSHVLKSNKGINKRGGGLSAGALTEKDFRDLKTAIAIGCDYLAISFVKSAEDLHIARAKVEEEMKGSTAVRPGLVSKIERVEAIENLDEIILAGDGIMVARGDLAVEVGHAAVPALQKRMIRRARELRRFSITATQMMESMITNPVPTRAEVSDVANAVLDGTDAVMCSAETAVGAYPFETVSQMAIICAAAEKEQDSLNGVAEQVEYPEAVSTNLAVAGGAVSVARAVHAKAIVALTESGSTAFEISRHNITLPIFALTPSVSAQRRMAMYRGVRPLILATSTDHDTALNEVETMLVEHNILHSGDQYIITSGSQMRESGSTNTLEVLRVK

SEQ ID NO: 121 - DNA, 1443 bp, Escherichia coli O157:H7 EDL933
  CDS (1)..(1443): transl_table=11
  misc_feature (850)..(850): r is g or a
atgtccagaaggcttcgcagaacaaaaatcgttaccacgttaggcccagcaacagatcgcgataataatcttgaaaaagttatcgcggcgggtgccaacgttgtacgtatgaacttttctcacggctcgcctgaagatcacaaaatgcgcgcggataaagttcgtgagattgccgcaaaactggggcgtcatgtggctattctgggtgacctccaggggcccaaaatccgtgtatccacctttaaagaaggcaaagttttcctcaatattggggataaattcctgctcgacgccaacctgggtaaaggtgaaggcgacaaagaaaaagtcggtatcaactacaaaggcctgcctgctgacgtcgtgcctggtgacatcctgctgctggacgatggtcgcgtccagttaaaagtactggaagttcagggcatgaaagtgttcaccgaagtcaccgtcggtggtcccctctccaacaataaaggtatcaacaaacttggcggcggtttgtcggctgaagcgctgaccgaaaaagacaaagcagacattaagactgcggcgttgattggcgtagattacctggctgtctccttcccacgctgtggcgaagatctgaactatgcccgtcgcctggcacgcgatgcaggatgtgatgcgaaaattgttgccaaggttgaacgtgcggaagccgtttgcagccaggatgcaatggatgacatcatcctcgcctctgacgtggtaatggttgcacgtggcgacctcggtgtggaaattggcgacccggaactggtcggcattcagaaagcgttgatccgtcgtgcgcgtcagctaaaccgagcggtaatcacggcgrcccagatgatggagtcaatgattactaacccgatgccgacgcgtgcagaagtcatggacgtagcaaacgccgttctggatggtactgacgctgtgatgctgtctgcagaaactgccgctgggcagtatccgtcagaaactgttgcagccatggcgcgcgtttgcctgggtgcggaaaaaatcccgagcatcaacgtttctaaacaccgtctggacgttcagttcgacaatgtggaagaagctattgccatgtcagcaatgtacgcagctaaccacctgaaaggcgttacggcgatcattaccatgaccgaatcgggtcgtaccgcgctgatgacctcccgtatcagctctggtctaccaattttcgccatgtcgcgccatgaacgtacgctgaacctgactgctctctatcgtggcgttacgccggtgcactttgatagcgctaatgacggcgtagcagctgccagcgaagcggttaatctgctgcgcgataaaggttacttgatgtctggtgacctggtgattgtcacccagggcgacgtgatgagtaccgtgggttctactaataccacgcgtattttaacggtagagtaa

SEQ ID NO: 122 - protein, 480 aa, Escherichia coli O157:H7 EDL933
  misc_feature (284)..(284): The Xaa at location 284 stands for Ala, or Thr.
MSRRLRRTKIVTTLGPATDRDNNLEKVIAAGANVVRMNFSHGSPEDHKMRADKVREIAAKLGRHVAILGDLQGPKIRVSTFKEGKVFLNIGDKFLLDANLGKGEGDKEKVGINYKGLPADVVPGDILLLDDGRVQLKVLEVQGMKVFTEVTVGGPLSNNKGINKLGGGLSAEALTEKDKADIKTAALIGVDYLAVSFPRCGEDLNYARRLARDAGCDAKIVAKVERAEAVCSQDAMDDIILASDVVMVARGDLGVEIGDPELVGIQKALIRRARQLNRAVITAXQMMESMITNPMPTRAEVMDVANAVLDGTDAVMLSAETAAGQYPSETVAAMARVCLGAEKIPSINVSKHRLDVQFDNVEEAIAMSAMYAANHLKGVTAIITMTESGRTALMTSRISSGLPIFAMSRHERTLNLTALYRGVTPVHFDSANDGVAAASEAVNLLRDKGYLMSGDLVIVTQGDVMSTVGSTNTTRILTVE

SEQ ID NO: 123 - DNA, 1449 bp, Deinococcus radiodurans R1
  CDS (1)..(1449): transl_table=11
atgaaacactttgaccgtgccaccaaaatcgtggcgactgtcggccccgccagccgcagcaccgaagttctcgggcgcatgatcgacgttggcctgaacgtggtccgcctcaacttcagccacggcgacctcgaagaccaccgtcagacggtgcagatggtgcgtgacctcgccgtgagcaagggcgtgaccatcggtatcctgcaagacctgcaaggccccaagattcgggtgggccgctttgccgaaggttcggtgaccctgaatcccgggcagaagttcgtcatcacgatggacgaggtggagggcaatgccgagcgcgtgggcagcacctacaagggcctcgccggtgacgtgacccccggcatgacgctgctgctcgacgacggcaacatgagcctgcgggtggaccacgtgcgcggcaacgacattcagacgactgtcctgatcggcggcacgttgaaaaacaacaagggcatcaacgtgcccgaagccgacctgaccgtgcccgcactgtcggaaaaagatgtgcaggacatggaatttggcgcgagcctcggcgtggactgggtggccttgagcttcgtgcgctcgcgcgatgacctgctgctcgcccggcattacctcgcccgcttcggcagccgcgccaagctgatggccaaaatcgagaagccgcaggcggtggaccgcttcgccgacatcctcaaggaagtggacggcgtgatggtggcgcgcggcgacctcggtgtggaaatgcgccccgagcaggtgccgaccatccagaaacgcatcatccgcatgtgccgtgaggcgggcaagccggtcattacggccacccagatgctcgaaagcatgatcaacctgccgcgccccacccgcgccgaggcgtcggacgtggcgaacgctatttatgacggcaccgacgcggtgatgctttccgccgaatcggcggcgggccagtacccggtcgagtcggtcgctatgatggaccgtattgcccgcgaggccgaagcgagcgagctttaccagttgatgcagcgtcaggtcgtgatggacaccgagcaggcgcaggacgccattgcgctcgccgcctgcaacatcggggctaagctcgaagcgcccgccatcgtgacctttaccagcacgggcggggcggccacccgcatttccaagaaccgtccgccgctcgccatcgtcgcgctgacccccaacgagatcacccgcaaccagctcgcgctttcctggggcgtctaccccatgctcagcgaagaccccgaggacaccgatgacatggtacgcatcgccaacgacgagctgaaaaagagcggcctggccgacgtgggcgaccgctacgtgattacggcgggcgtgcccttcggcgtgcgcggcaccaccaatatgctgcgcgtggaaaagttgaaggccgaggacttgtcggaccgcgtttaa

SEQ ID NO: 124 - protein, 482 aa, Deinococcus radiodurans R1
MKHFDRATKIVATVGPASRSTEVLGRMIDVGLNVVRLNFSHGDLEDHRQTVQMVRDLAVSKGVTIGILQDLQGPKIRVGRFAEGSVTLNPGQKFVITMDEVEGNAERVGSTYKGLAGDVTPGMTLLLDDGNMSLRVDHVRGNDIQTTVLIGGTLKNNKGINVPEADLTVPALSEKDVQDMEFGASLGVDWVALSFVRSRDDLLLARHYLARFGSRAKLMAKIEKPQAVDRFADILKEVDGVMVARGDLGVEMRPEQVPTIQKRIIRMCREAGKPVITATQMLESMINLPRPTRAEASDVANAIYDGTDAVMLSAESAAGQYPVESVAMMDRIAREAEASELYQLMQRQVVMDTEQAQDAIALAACNIGAKLEAPAIVTFTSTGGAATRISKNRPPLAIVALTPNEITRNQLALSWGVYPMLSEDPEDTDDMVRIANDELKKSGLADVGDRYVITAGVPFGVRGTTNMLRVEKLKAEDLSDRV

SEQ ID NO: 125 - DNA, 1419 bp, Mycobacterium leprae TN
  CDS (1)..(1419): transl_table=11
gtgacgagacgcgggaagatcgtctgtacccttggccctgcaacacaatcggacgagttaatccgggcgctggttgaagccggaatggacgttgcccgcatgaacttcagtcacggcgattactccgatcacaaggctgtttacgatcgggtgcgcgtcgcatctgatgcaaccggacgcgcggtcggcgtgctcgctgacctgcagggcccaaagatcaggctgggacgctttgccacggggtccacctactgggctgacggtgaaacggtaaggatcactgtggccgactgccacggtagccacgaccgggtatcaaccacctacaagaatttggccagggatgcggtggtcggtgaccgggttctggtcgacgacggcaaggtcggactggtggtctcggccatcgatggcgacgacgtggtctgtactgtcactgaaggcggcccggttagcaacaacaagggcatgtcgttgcccgggatgcacgtgtctgctccggctttgtcggacaaggacatcgaggacctcacgttcgcgctgaatctcggcgccgatctggtcgcgctgtcgtttgtgcgctcgccgtctgacgttgagctggtccacaaggcgatggatcgcgtcgggcggcgtgtaccggtgatcgccaagctggagaagccagaagccgtcgataacctcgaagctattgtgttggcattcgatgccatcatggtggctcgcggcgacctgggtgtcgagctgccacttgaagaggtcccactggtgcagaagcgggcaatccagatggcaagggagaatgcgaaacccgtcatcgtggctacccagatgctagactcgatgatcgaaaactcccggccgacccgagctgaggcctccgacgtcgctaatgcggtgctcgacggcgccgacgcgctcatgttgtctgaggaaacgtcggtggggaagtacccattggcagccgtgaagacgatgtcgcgcattgtgtgtgcggttgaggagaattccacggccgcgccgccgttgacacacgtacctcgcacgaagcggggggtgatctcgtacgctgcccgcgatatcggtgaaagactcgacgctaaggccttggttgcgttcactcaatccggtgacacggtgcggcgactggcgcgtctacataccccgctgccgctgcttgccttcaccgcgtggccagaggtgcgcagccaactcgctatgacttggggcaccgagacatttctcgtaccaaagatgctgtccactgacggtatgatacgccaggtggacaagtcactgctcgaacttggtcgctacaagcgtggtgacttggtggtgatcgtcgctggcacgccacctggcacagtaggatcgaccaacttgatccatgtgcaccggattggggaggacgacgtatag

SEQ ID NO: 126 - protein, 472 aa, Mycobacterium leprae TN
MTRRGKIVCTLGPATQSDELIRALVEAGMDVARMNFSHGDYSDHKAVYDRVRVASDATGRAVGVLADLQGPKIRLGRFATGSTYWADGETVRITVADCHGSHDRVSTTYKNLARDAVVGDRVLVDDGKVGLVVSAIDGDDVVCTVTEGGPVSNNKGMSLPGMHVSAPALSDKDIEDLTFALNLGADLVALSFVRSPSDVELVHKAMDRVGRRVPVIAKLEKPEAVDNLEAIVLAFDAIMVARGDLGVELPLEEVPLVQKRAIQMARENAKPVIVATQMLDSMIENSRPTRAEASDVANAVLDGADALMLSEETSVGKYPLAAVKTMSRIVCAVEENSTAAPPLTHVPRTKRGVISYAARDIGERLDAKALVAFTQSGDTVRRLARLHTPLPLLAFTAWPEVRSQLAMTWGTETFLVPKMLSTDGMIRQVDKSLLELGRYKRGDLVVIVAGTPPGTVGSTNLIHVHRIGEDDV

SEQ ID NO: 127 - DNA, 1359 bp, Sulfolobus solfataricus P2
  CDS (1)..(1359): transl_table=11
atgagaaagactaaaatagttgctactttaggtccttcctcagaggaaaaagtaaaagaactggcagaatacgttgatgtttttagaataaattttgcacatggagacgaaacatctcataggaagtattttgatcttattagaacatatgcaccggaatctagtattatagtagatttgccagggcctaagttgagactaggagaactcaaagaaccaatagaggtgaagaaaggagataagatagttttctctcaaaaagatggaattccagttgatgatgagttattttattcggctgtaaaagaaaactcggatatcttaattgcagacggaacaatacgtgtgagggttaagtcaaaagctaaggatagagtagagggaaccgtaatagagggtggaattttattatcgagaaaaggaataaatattcctaatgtcaatctaaaatctgggataacggacaacgatttaaaacttttaaaaagagctttagatctgggagcagattatataggactctcttttgtaataagtgagaatgatgtaaagaaggtaaaggaatttgtaggtgatgaagcttgggttatcgcgaagatagaaaaaagtgaggcattaaagaacttaaccaatatcgttaatgaatcggatggaataatggtagccagaggcgatttgggggttgagactggcttagaaaatctgcctttaattcaaaggagaatagtaaggacttcaagagtatttggcaaacccgtcattttagcaactcaagtattaacttcgatgataaacagccctatacctaccagagctgagattatagatatttctaactcgattatgcagggagtggactctataatgttaagcgatgaaacagccataggcaattatccagttgaaagcgtaagaactcttcataatatcataagtaatgtagaaaagagtgtaaaacatagaccaatcggaccactaaatagtgagagtgatgcgatagctctagctgctgtaaatgcaagtaaagtatctaaggcagatgtaatagtagtgtatagtagatcaggtaattcaatattgcgcgtatcgagactgagacctgaacgtaacataataggagtctctcctgatcctagactagctaaaaagtttaagctttgttatggtgtaatacccattagtataaacaaaaagatgcagtccatagacgagataatagacgtctcagccaagctaatgcaggaaaaaataaaggacttaaaatttaaaaaaatcgttatagtaggaggggatcctaaacaagaagcggggaagactaacttcgttatagttaagacactagaacaacaaaagaaatga

SEQ ID NO: 128 - protein, 452 aa, Sulfolobus solfataricus P2
MRKTKIVATLGPSSEEKVKELAEYVDVFRINFAHGDETSHRKYFDLIRTYAPESSIIVDLPGPKLRLGELKEPIEVKKGDKIVFSQKDGIPVDDELFYSAVKENSDILIADGTIRVRVKSKAKDRVEGTVIEGGILLSRKGINIPNVNLKSGITDNDLKLLKRALDLGADYIGLSFVISENDVKKVKEFVGDEAWVIAKIEKSEALKNLTNIVNESDGIMVARGDLGVETGLENLPLIQRRIVRTSRVFGKPVILATQVLTSMINSPIPTRAEIIDISNSIMQGVDSIMLSDETAIGNYPVESVRTLHNIISNVEKSVKHRPIGPLNSESDAIALAAVNASKVSKADVIVVYSRSGNSILRVSRLRPERNIIGVSPDPRLAKKFKLCYGVIPISINKKMQSIDEIIDVSAKLMQEKIKDLKFKKIVIVGGDPKQEAGKTNFVIVKTLEQQKK

SEQ ID NO: 129 - DNA, 1419 bp, Clostridium acetobutylicum ATCC 824
  CDS (1)..(1419): transl_table=11
gtgcaaaaaacaaaaatgatttttacaatagggccctctagtgattcagaggagaaattaaaagaattaatgaatgctggaatgaatgctgcaaggttaaatttttcacatggcactcatgaagatcacaaagaaaaaatagatattataaaaaaacttagaaaagaactgaacaaaaatgttgcaattgtagttgacatcaaaggaccaaaaattagaactcataattttgaaaatgacaaagctgaaataaaaaaaggtcaaaccttcacagtaatgtgtggaagcgaaattttgggaaattcagagaaatgctccgtttcttatgatgatctttataaagatgtaaaaaaaggtggattactccttgtcgatgatggtcttttagaatttgaaataactgatgtacaagacaaaaacattatttgtaaggcaaaaaataatggtattatttcaaatcataaaggtgtaaatgtacctggtgtttctataggtcttcctgctgtaactgaaaaagatgtattagatttaaaatttgcatgtaaaatgcaagctgatttagtagctgcttcttttataagaaaagcagaagatgtatctgtcgttagaaaggttcttaaagaaaatggtggagaagatataagagttatctctaagatagaaactcaagaaggtgttgataacatcgataagattctcgaactatctgatggaatcatggtagcaagaggagatatgggtgttgaaattccaatagaggatgttccttcaatacagaaaatgataataagaaaatgtaatgatgcaggcaaaatagttataacagctactcaaatgcttgattcaatgataagaaacccaagacctacaagagctgaggcatcagatgttgccaatgcaatatatgacggaacagatgctataatgctaagtggagaaagtgcaagtggtttatatccaattgaagctgctgaaactatggcaaagatagcacaaaaaacagaatctcaaatagactatactaaagctcttaatgaaagaaaaggtgaaattataacaaaaatttcagacgctataagtcttgctgcatgctcaactgctgctgaacttaaagctgctgctataataacagctactcaaagcggtataactgcaagaatggtatctaaattcagaccaacttgccctataatagctgttacacctcatgatgatgttgcaagaagacttgctctaaactttggtataacacctattacatctgaaaaagttgtttcaacagatgaacttatatctgtttcaataaaaagagcacttaacgagaatttaattaaaaaaggtgacttagttgttgtagttgcaggtgttcctgtaggcgaatctggaactactaatatgttaaaaattcaatacacataa

SEQ ID NO: 130 - protein, 472 aa, Clostridium acetobutylicum ATCC 824
MQKTKMIFTIGPSSDSEEKLKELMNAGMNAARLNFSHGTHEDHKEKIDIIKKLRKELNKNVAIVVDIKGPKIRTHNFENDKAEIKKGQTFTVMCGSEILGNSEKCSVSYDDLYKDVKKGGLLLVDDGLLEFEITDVQDKNIICKAKNNGIISNHKGVNVPGVSIGLPAVTEKDVLDLKFACKMQADLVAASFIRKAEDVSVVRKVLKENGGEDIRVISKIETQEGVDNIDKILELSDGIMVARGDMGVEIPIEDVPSIQKMIIRKCNDAGKIVITATQMLDSMIRNPRPTRAEASDVANAIYDGTDAIMLSGESASGLYPIEAAETMAKIAQKTESQIDYTKALNERKGEIITKISDAISLAACSTAAELKAAAIITATQSGITARMVSKFRPTCPIIAVTPHDDVARRLALNFGITPITSEKVVSTDELISVSIKRALNENLIKKGDLVVVVAGVPVGESGTTNMLKIQYT

SEQ ID NO: 131 - DNA, 1440 bp, Agrobacterium tumefaciens str. C58
  CDS (1)..(1440): transl_table=11
atgaagcgtaaccgcaaagtcaaaattcttgcaactctcggcccggcctcttccgaagaggccatgatcgaaaagctgcatcttgctggcgctgatcttttccggatcaacatgagccatgcgagccacgacgtgatgcggacgctcattcagcgtatccgctctgtcgaaagccgcaacggccgtcccatcggcattctggccgacctgcagggtcccaagctgcgcgtcggaaaattcgccgagacgaaggtcgatctggttccgggccagaccttcacgcttgataacaacgacacccccggcgacaacacccgcgttttcctgccgcatcctgaaattctcgaggcggtcaagcccggccaccgtctgctgatcgatgacggcaagctgcatctgcgcgctgaaaagagcgacggcaagagcatcgtcaccacggtcgtttccggcacccggatttccgaccgcaagggcatcagcctgcccgacaccctgctcggcgtcggcgttctgaccgacaaggaccgcgtcgacctcgatgccgttctcgagaccaacgaagtggactgggttgctctttccttcgttcagcgccctgaagacctggcagaagtgcgcaagatttcccgcggccgcgttggcctgatgtccaagatcgaaaagccgcaggctgttgaacgcatcgaggaaatcatcgagctttccgatgcattgatggttgcgcgcggcgatcttggcgtggaaatgccgttggaagccgttccgggcatccagaagcagctgacccgtgcctgccggcgcgccggcaaacccgtcgtcgttgccacccagatgctggaatcgatgataacggcaccggttccgacccgcgcggaagtatcggacgttgcaacggccgtattcgaaggcgccgacgccatcatgctctcggctgagtccgcttccggcgattatccgatcgaagccgtatcgaccatggcgtctatcgccagcacggtggaacaggacccctattattccaacatcatctacgcgcagcgtccgcagccggaagcaaccggtgccgacgccatttcgcttgccgcccgccagatcgctgaaacgctgaagcttgcggcgatcgtcacctatacgtcctcgggcacgaccggcctgcgcgccgcgcgcgagcggccgcaggtgccgatcattgcactgtcaccgatcatccagaccgcacgccgcctgtcggtcgtctggggcctgcactgcgtcgtcaccggcgatgccagcgatctggacgacatggtgaaccgcgcttgtcgcatcgttgtttccgaaggtttcggcaagcccggtgatcgcatcatcatttccgccggcgtgccgctcggcacccccggcgcaaccaacatggtgcgcatcgcctatatcggctcggacggccagagcggcgtctga

SEQ ID NO: 132 - protein, 479 aa, Agrobacterium tumefaciens str. C58
MKRNRKVKILATLGPASSEEAMIEKLHLAGADLFRINMSHASHDVMRTLIQRIRSVESRNGRPIGILADLQGPKLRVGKFAETKVDLVPGQTFTLDNNDTPGDNTRVFLPHPEILEAVKPGHRLLIDDGKLHLRAEKSDGKSIVTTVVSGTRISDRKGISLPDTLLGVGVLTDKDRVDLDAVLETNEVDWVALSFVQRPEDLAEVRKISRGRVGLMSKIEKPQAVERIEEIIELSDALMVARGDLGVEMPLEAVPGIQKQLTRACRRAGKPVVVATQMLESMITAPVPTRAEVSDVATAVFEGADAIMLSAESASGDYPIEAVSTMASIASTVEQDPYYSNIIYAQRPQPEATGADAISLAARQIAETLKLAAIVTYTSSGTTGLRAARERPQVPIIALSPIIQTARRLSVVWGLHCVVTGDASDLDDMVNRACRIVVSEGFGKPGDRIIISAGVPLGTPGATNMVRIAYIGSDGQSGV

SEQ ID NO: 133 - DNA, 1758 bp, Listeria monocytogenes EGD-e
  CDS (1)..(1758): transl_table=11
atgaaaaaaacgaaaattgtttgtacaattggtcctgcaagtgagtcagttgacacattagttcagttgattgaagcaggaatgaacgtagcacgccttaatttctctcacggagattttgaagagcacggtgcgcgtattgtaaatatccgtgaagcatcgaaaaaaactggtaaacaagtggctatcttacttgatacaaaaggtccagaaatccgtacaaacgacatggtcggtggaaaattagaattccaaacaggtgatgttgtacgtgtttctatgactcctgttgaaggaacaaaagaaaaattctctgtaacttacggagaactttatgatgacgtagaaattggttcttccattttacttgatgacggcttaatcggtcttgaagtaatcgaaaaagacgaagctaatcgcgaactagtaactaaagtacttaaccctggcgtacttaaaaataaaaaaggtgttaacgtacctaacgtttctatcaacctaccaggaatcacagaaaaagatgctgctgatatccgctttggtttagaacaaggtatcgactttatcgctgcatctttcgtacgtcgtgctacagatgttcttgaaattactaaaattttagaagagcataacgcaactcacgtacaaatcattcctaaaatcgaaaaccaagaaggcgttgacaatatcgacgaaatcttgcaagtatctcaaggcctaatggttgctcgtggtgaccttggtgttgaaattccagctgaagaagttccgattgtacaaaaagaacttatcagaaaatgtaataaacttggtaagcctgttattactgcaacacaaatgcttgattccatgcaacgtaacccacgtccaactcgcgctgaagcaagtgacgtagcgaatgcgatttttgatggaacagatgctattatgttatccggtgaaacagctgctggggattatccagtagaagcagttaaaatgatggcgaaaatcgctgttcgtacagaagaagtactagttgctcaagataaatttgcacttaaacttcacgaaaatacggatatgacagaagctatcggtcaagcagttggccatactgcgaaaaacttaaacgttcaaactatcgttgctgcgactcaaagtggtcacacagcgcgtatgatctctaaatatcgtccaaaatctcatatcgttgctgtaacattcaacgagcatgtataccgtggtttagcactttcatggggtgtttatcctcgtctagctactccagttagcaacacagatgaaatgttcgaccttgcagtgaaagaatctcttgcttctggcgttgcaaaacaaggcgacttaattatcatcactgctggtgttccagttactgaaagtggaacaacaaacgtaatgaaaatccaattaattggtgaaaaagtagttaaaggccaaggaattggcagcaaatctgttatcggtaaagcaatcgttgctaaatccaatgcagaagcacttgaaaaagcagaagaaggcggaatcttaatcgttaaaacaacagataaagaaatccttcctgcattcgagaaaagtgctgcagttgttgtggaagaaggcggcttaactagccacgcagcagttgttggaatcaaccttggcattcctgttatcgttggtgctaaagatgcaacatctcttgtaaaagatggtgaaatcatcacagttgattctcgtcaaggtgttgtatataacggcaaaacagcaacacattaa

SEQ ID NO: 134 - protein, 585 aa, Listeria monocytogenes EGD-e
MKKTKIVCTIGPASESVDTLVQLIEAGMNVARLNFSHGDFEEHGARIVNIREASKKTGKQVAILLDTKGPEIRTNDMVGGKLEFQTGDVVRVSMTPVEGTKEKFSVTYGELYDDVEIGSSILLDDGLIGLEVIEKDEANRELVTKVLNPGVLKNKKGVNVPNVSINLPGITEKDAADIRFGLEQGIDFIAASFVRRATDVLEITKILEEHNATHVQIIPKIENQEGVDNIDEILQVSQGLMVARGDLGVEIPAEEVPIVQKELIRKCNKLGKPVITATQMLDSMQRNPRPTRAEASDVANAIFDGTDAIMLSGETAAGDYPVEAVKMMAKIAVRTEEVLVAQDKFALKLHENTDMTEAIGQAVGHTAKNLNVQTIVAATQSGHTARMISKYRPKSHIVAVTFNEHVYRGLALSWGVYPRLATPVSNTDEMFDLAVKESLASGVAKQGDLIIITAGVPVTESGTTNVMKIQLIGEKVVKGQGIGSKSVIGKAIVAKSNAEALEKAEEGGILIVKTTDKEILPAFEKSAAVVVEEGGLTSHAAVVGINLGIPVIVGAKDATSLVKDGEIITVDSRQGVVYNGKTATH

SEQ ID NO: 135 - DNA, 1758 bp, Listeria innocua Clip11262
  CDS (1)..(1758): transl_table=11
atgaaaaaaacgaaaattgtttgtacaattggtcctgcaagtgagtcagttgacacattagttcagttgatcgaagcaggaatgaacgttgcacgtcttaatttctctcacggagattttgaagagcacggtgcgcgtattgtaaatatccgtgaagcatcgaaaaaaactggcaaacaagttgctatcttacttgatacaaaaggtccagaaatccgtacaaacgacatggtcggcggaaaattagaattccaaacaggtgacgttgtacgtgtatctatgactcctgttgaaggaacaaaagaaaaattctctgtaacttacggagaactttatgatgacgtagaaattggttcttccattttacttgatgacggtttaatcggtcttgaagtaatcgaaaaagacgaagctaatcgcgaactagtaactaaagtacttaacccaggtgtacttaaaaataaaaaaggtgttaacgtaccgaatgtttctatcaacctaccaggaatcacagaaaaagatgctgctgatatccgcttcggtttagaacaaggtattgactttatcgctgcatctttcgtacgtcgtgctacagatgttcttgaaattactaaaattttagaagagcataacgcaactcacgtacaaatcattcctaaaatcgaaaaccaagaaggcgttgacaacatcgacgaaatcttacaagtatctcaaggcttaatggttgctcgtggtgacctaggtgttgaaattccagctgaagaagttccgattgtacaaaaagaacttatcagaaaatgtaataaacttggtaaacctgttattactgctacacaaatgcttgattccatgcaacgtaacccacgtccaactcgcgctgaagcaagtgacgtagcgaatgcgatttttgatggaacagatgctattatgttatccggtgaaacagctgctggggattatccagtagaagcagttaaaatgatggcgaaaatcgctgttcgtactgaggaagttctagttgctcaagataaatttgcacttaaacttcatgaaaatacagatatgacagaagctatcggtcaagcagttggccatactgcgaaaaacctaaatgtacaaactatcgttgctgcgactcaaagtggtcacacagctcgtatgatttctaaataccgtccaaaatctcatatcgttgctgtaacattcaacgaacatgtatatcgcggattagctctttcttggggcgtatatcctcgtctagctactccagttagcaatacagacgaaatgtttgaccttgcagtaaaagaatctcttgcttcaggtgttgcgaaacaaggcgacctaatcatcatcactgctggtgttccagttacagaaagcggaacaacaaacgttatgaaaatccaattaattggtgaaaaagtagttaaaggccaaggtattggtagcaaatcagttattggtaaagcagtagttgctaaatccaatgcagaagctcttcaaaaagcagaagaaggcggaatcttaatcgttaaaacaactgataaagaaatccttcctgcattcgagaaaagtgctgcagttgttgtggaagaaggcggcttaactagccatgcagcagttgttggaatcaaccttggcattcctgtcatcgttggcgctaaagacgcaacatcccttgtaaaagacggtgaaatcatcactgttgattctcgtcaaggtgttgtatataacggcaaaacagcaactcactaa

SEQ ID NO: 136 - protein, 585 aa, Listeria innocua Clip11262
MKKTKIVCTIGPASESVDTLVQLIEAGMNVARLNFSHGDFEEHGARIVNIREASKKTGKQVAILLDTKGPEIRTNDMVGGKLEFQTGDVVRVSMTPVEGTKEKFSVTYGELYDDVEIGSSILLDDGLIGLEVIEKDEANRELVTKVLNPGVLKNKKGVNVPNVSINLPGITEKDAADIRFGLEQGIDFIAASFVRRATDVLEITKILEEHNATHVQIIPKIENQEGVDNIDEILQVSQGLMVARGDLGVEIPAEEVPIVQKELIRKCNKLGKPVITATQMLDSMQRNPRPTRAEASDVANAIFDGTDAIMLSGETAAGDYPVEAVKMMAKIAVRTEEVLVAQDKFALKLHENTDMTEAIGQAVGHTAKNLNVQTIVAATQSGHTARMISKYRPKSHIVAVTFNEHVYRGLALSWGVYPRLATPVSNTDEMFDLAVKESLASGVAKQGDLIIITAGVPVTESGTTNVMKIQLIGEKVVKGQGIGSKSVIGKAVVAKSNAEALQKAEEGGILIVKTTDKEILPAFEKSAAVVVEEGGLTSHAAVVGINLGIPVIVGAKDATSLVKDGEIITVDSRQGVVYNGKTATH

SEQ ID NO: 137 - DNA, 1431 bp, Nostoc sp. PCC 7120
  CDS (1)..(1431): transl_table=11
atgcgtcgaactaaaattatctgtactgtaggcccggctacatctgcaccagaacgtttagaagcgttggtagaagctgggatgaatgtagcacggctgaatttttctcatggagcttatgacttccatgcccaaactgctcagtatttgcggcaaatcagtgctgacagacaaaagcctgtggcgattatgcaagacctatgcgggccgaagattcgcttgggaactttaccaccagaagggttaatggtagaggctggtcaggaagtgacttttgtcttgcaagaaaagggtagtagtcttgatgaattgcctttacctttgccgaccttgttcgcaatggtacgacctggggaaccaatcttaattaatgatggtcgtgtcaagttgattgtgacagatcgcgatgccgatcgcattcgggctattgccaaaatcgggggtcttctttctacccgtaagggtgttaacctgccagcgactcgtttacctgtcagttccatcaccgaaaaggacttgcaggatttgcgttttggcatcgatttgagtgtagattgggtggcggtgtcttttgtgcgatcgccttatgacctcgaaccagcgcaacggatgattgaagcggcggggaaaactattcgggtaatcgccaaaattgaacgtccagaagccgttgagcaaattgattctatcatcgacgttgctgatgcgattatgattgctcgtggtgacttgggtgtggaaatgcctatccatgaagtcccattgattcaaaaggacatcattcgccgttgcaaccaagctggtaagcccgtgattacagcaacgcaaatgctagagtcgatgattagcgctcccgatcccacccgtgcggaggctacagacgttgctaactctattctcgatggtacagatgccgtcatgctctctggggaaacggctgtaggacaatatcccgtcgccgccgtccaggttatgcacgatatcgccgtgactacagaaaagtctttgcaagagggtagtaaacattgcttatcccatgaagcaggtggtctgagtgtcaccgaatctgtagctgaagcggtctgtcgtatcgcctacgaaacaggcgcaaaagcgattctttgcaacaccacatcagggagtacagcaaagctcgtgtcgaaatatcgtccgactacacccatttttgcgttgacccccgacgaaaccgcctaccatcagttagcactttcttggggtgtggaacctttattaaccccaccagtccacaatgcggaagaaatgtttatgaatctcatcaacaccgccgtgagaacgggtttggtgcatgacggtgacaaggtagttattacttctggagtgccaattggtaaatcaggcacaactagtttaattaaagtgcattctattggacaaccaatcaccgcctaa

SEQ ID NO: 138 - protein, 476 aa, Nostoc sp. PCC 7120
MRRTKIICTVGPATSAPERLEALVEAGMNVARLNFSHGAYDFHAQTAQYLRQISADRQKPVAIMQDLCGPKIRLGTLPPEGLMVEAGQEVTFVLQEKGSSLDELPLPLPTLFAMVRPGEPILINDGRVKLIVTDRDADRIRAIAKIGGLLSTRKGVNLPATRLPVSSITEKDLQDLRFGIDLSVDWVAVSFVRSPYDLEPAQRMIEAAGKTIRVIAKIERPEAVEQIDSIIDVADAIMIARGDLGVEMPIHEVPLIQKDIIRRCNQAGKPVITATQMLESMISAPDPTRAEATDVANSILDGTDAVMLSGETAVGQYPVAAVQVMHDIAVTTEKSLQEGSKHCLSHEAGGLSVTESVAEAVCRIAYETGAKAILCNTTSGSTAKLVSKYRPTTPIFALTPDETAYHQLALSWGVEPLLTPPVHNAEEMFMNLINTAVRTGLVHDGDKVVITSGVPIGKSGTTSLIKVHSIGQPITA

SEQ ID NO: 139 - DNA, 1716 bp, Arabidopsis thaliana
  CDS (1)..(1716)
atggctgcttatggtcaaatctcctcgggaatgactgtagatcctcaggttctctcttcctccagaaacattggagtttccctatcacctctccggagaacactaatcggcgccggagttaggtctactagtatctctctccgtcaatgttctctctccgttagatcgattaaaatctccgaagatagccgcaaacctaaagcttatgcagagaacggtgcttttgatgtgggagttttggattcttcatcatatagattggctgattcaagaacaagtagtaatgattcaaggaggaagactaagattgtgtgtacgattggaccgtcttcgagttctagggaaatgatttggaaactcgcggaagctggaatgaatgtggctcgtttgaatatgtctcatggtgatcatgcttctcatcagataactattgatttagttaaggagtataattctttgtttgttgacaaagctattgctattatgttggatacaaagggtcctgaggttcgaagcggggatgtaccgcagccgatatttcttgaagagggtcaagagtttaactttactatcaagagaggtgtttcgcttaaagacactgttagtgtaaattatgatgattttgtgaacgatgttgaagttggggatatacttttggtggatggtggaatgatgtcgttagctgttaaatcaaagacgagtgatttggtgaagtgtgtggttattgatggtggagagcttcaatctagacgtcacttgaatgttcgaggaaagagtgcgactcttccatccattacagacaaagattgggaagacataaaatttggagtggacaaccaagtcgatttctacgccgtctcctttgttaaggatgctaaagttgtccatgagttgaagaactatctcaaaacctgcagtgcagacatatcggtgattgtgaaaattgaaagtgcagactctataaagaatcttccttctatcatatctgcttgtgatggggcaatggttgctcgtggagatcttggagctgaacttcccattgaagaggtcccgttgttacaggaagaaataatcagaaggtgtagaagcattcataaaccagtgattgttgccacaaacatgctagagagtatgattaatcatccaacgcctacaagagctgaagtctctgacattgcaattgcagtacgtgaaggcgcagatgctatcatgctttctggtgaaaccgcacatggaaagtttccgctgaaagctgttaacgtaatgcatactgtggcgttgagaaccgaggcaagtctacctgtcagaacctcggcatcccgtaccactgcttacaagggtcacatgggccaaatgtttgcttttcatgcttctataatggcaaatacactgagctcaccgctaattgtatttacgagaaccggatccatggcagtgcttctaagccactaccgcccatctgcaacaattttcgccttcacaaaccagagaagaataatgcaaaggcttgctctttatcaaggtgtcatgcctatatatatggagttctcggatgatgcagaagatacatatgcccggtctctcaaactcttacaggacgagaatatgctcaaggaaggacaacatgtaactcttgtccaaagtggctcgcaacccatttggcgtgaagaatcaacacatctcatacaagtccgtaagataaagataggtggatga

SEQ ID NO: 140 - protein, 571 aa, Arabidopsis thaliana
MAAYGQISSGMTVDPQVLSSSRNIGVSLSPLRRTLIGAGVRSTSISLRQCSLSVRSIKISEDSRKPKAYAENGAFDVGVLDSSSYRLADSRTSSNDSRRKTKIVCTIGPSSSSREMIWKLAEAGMNVARLNMSHGDHASHQITIDLVKEYNSLFVDKAIAIMLDTKGPEVRSGDVPQPIFLEEGQEFNFTIKRGVSLKDTVSVNYDDFVNDVEVGDILLVDGGMMSLAVKSKTSDLVKCVVIDGGELQSRRHLNVRGKSATLPSITDKDWEDIKFGVDNQVDFYAVSFVKDAKVVHELKNYLKTCSADISVIVKIESADSIKNLPSIISACDGAMVARGDLGAELPIEEVPLLQEEIIRRCRSIHKPVIVATNMLESMINHPTPTRAEVSDIAIAVREGADAIMLSGETAHGKFPLKAVNVMHTVALRTEASLPVRTSASRTTAYKGHMGQMFAFHASIMANTLSSPLIVFTRTGSMAVLLSHYRPSATIFAFTNQRRIMQRLALYQGVMPIYMEFSDDAEDTYARSLKLLQDENMLKEGQHVTLVQSGSQPIWREESTHLIQVRKIKIGG

SEQ ID NO: 141 - DNA, 1584 bp, Arabidopsis thaliana
  CDS (1)..(1584)
atgcattcaagtcatctccttctcgaggaaccgatcaggatgacttcaatcctcgaaccttctaaatcaagtttcttcccggctttgactaagattgttgggactctaggtccgaaatctcgatccgtcgaggtgattgctggttgtctcaaagctggaatgtccgtggctcgattcgatttctcttggtgcgatgctgattatcaccaggagacgctggagaatctgaagatagctgtgaagagcactaagaagctttgtgctgttatgctagacactgtaggacctgagttgcaagttattaacaagactgagaaagctatttctcttaaagctgatggccttgtaactttgactccgagtcaagatcaagaagcctcctctgaagtccttcccattaattttgatgggttagcgaaggcggttaagaaaggagacactatctttgttggacaatacctcttcactggtagtgaaacaacttcagtttggcttgaggttgaagaagttaaaggagatgatgtcatttgtatttcaaggaatgctgctactctgggtggtccgttattcacattgcacgtctctcaagttcacattgatatgccaaccctaactgagaaggataaggaggttataagtacatggggagttcagaataagatcgactttctctcattatcttattgtcgacatgcagaagatgttcgccaggcccgtgagttgcttaacagttgtggtgacctctctcaaacacaaatatttgcgaagattgagaatgaagagggactaacccactttgacgaaattctacaagaagcagatggcattattctttctcgtgggaatttgggtatcgatctacctccggaaaaggtgtttttgttccaaaaggctgctctttacaagtgtaacatggctggaaagcctgccgttcttactcgtgttgtagacagtatgacagacaatctgcggccaactcgtgcagaggcaactgatgttgctaatgctgttttagatggaagtgatgcaattcttcttggtgctgagactcttcgtggattgtaccctgttgaaaccatatcaactgttggtagaatctgttgtgaggcagagaaagttttcaaccaagatttgttctttaagaagactgtcaagtatgttggagaaccaatgactcacttggaatctattgcttcttctgctgtacgggcagcaatcaaggttaaggcatccgtaattatatgcttcacctcgtctggcagagcagcaaggttgattgccaaataccgtccaactatgcccgttctctctgttgtcattccccgacttacgacaaatcagctgaagtggagctttagcggagcctttgaggcaaggcagtcacttattgtcagaggtcttttccccatgcttgctgatcctcgtcaccctgcggaatcaacaagtgcaacaaatgagtcggttcttaaagtggctctagaccatgggaagcaagccggagtgatcaagtcacatgacagagttgtggtctgtcagaaagtgggagatgcgtccgtggtcaaaatcatcgagctagaggattag

SEQ ID NO: 142 - protein, 527 aa, Arabidopsis thaliana
MHSSHLLLEEPIRMTSILEPSKSSFFPALTKIVGTLGPKSRSVEVIAGCLKAGMSVARFDFSWCDADYHQETLENLKIAVKSTKKLCAVMLDTVGPELQVINKTEKAISLKADGLVTLTPSQDQEASSEVLPINFDGLAKAVKKGDTIFVGQYLFTGSETTSVWLEVEEVKGDDVICISRNAATLGGPLFTLHVSQVHIDMPTLTEKDKEVISTWGVQNKIDFLSLSYCRHAEDVRQARELLNSCGDLSQTQIFAKIENEEGLTHFDEILQEADGIILSRGNLGIDLPPEKVFLFQKAALYKCNMAGKPAVLTRVVDSMTDNLRPTRAEATDVANAVLDGSDAILLGAETLRGLYPVETISTVGRICCEAEKVFNQDLFFKKTVKYVGEPMTHLESIASSAVRAAIKVKASVIICFTSSGRAARLIAKYRPTMPVLSVVIPRLTTNQLKWSFSGAFEARQSLIVRGLFPMLADPRHPAESTSATNESVLKVALDHGKQAGVIKSHDRVVVCQKVGDASVVKIIELED

SEQ ID NO: 143 - DNA, 1791 bp, Arabidopsis thaliana
  CDS (1)..(1791)
atgtctcagtctattcaattctccactccttcacacactcctcaccttctccatctccctcactcacaattcaaccgtcctctctcctctatctccttccgtcgcttccctctaacaaccatcaaatacacttccatcagagcctcctcgtcatcatctccttcaccggatctcgattcatcgtcctcatcatcatcctcgcaagtacttctctcacctaacggtactggtgctgtgaagtctgatgagagatccgttgtcgctacggcggttacgactgatacgtctgggattgaggttgatactgtgacggaagctgagcttaaggagaatggatttagaagtacgaggaggacgaagctgatctgtacgatcggaccggcgacttgtggatttgagcagcttgaggcgcttgctgtgggaggtatgaatgtggcaaggcttaatatgtgtcacggtacgcgtgattggcaccgcggtgtgattcgtagtgttcggaggcttaatgaggagaaaggctttgcggttgctattatgatggatactgaaggtagtgagattcatatgggagatcttggtggtgaagcttcagctaaagcagaggatggtgaggtttggactttcactgttagagcttttgattcttctcgtcctgaacgtaccattagtgttagctacgatggtttcgctgaagatgtaagagttggggatgaacttttggttgatggtgggatggtgagatttgaagtgattgagaagattggtcctgatgttaagtgtctatgtaccgatcctggattgttgcttcctcgagctaacttgacgttttggagagatggaagtcttgtacgagagcgtaatgccatgcttccaacaatttcttccaaggactggttggatattgattttggaattgctgaaggtgtggatttcattgctgtatcgtttgtcaagtcggctgaagtcattaatcaccttaaaagttatcttgctgctcgttcccgtggaggggaaattggagtgattgcaaagatcgagagtatcgattcactgaccaatttggaagaaattattctagcatcagatggggccatggttgcaagaggagatctgggagctcagatacctcttgagcaagttccagcagctcaacagagaatcgtccaagtatgcagagctcttaacaaacccgtcattgtcgcttcacagctattggagtccatgattgagtacccaactccaaccagagcagaagttgccgacgtgtctgaagcagtaagacaaagatcagatgcattgatgctctctggagaatcagctatgggacaattcccagacaaggcgctcacggttctaaggactgtcagtttaagaatcgagagatggtggagggaagagaaacgccatgagtctgtaccgcttcaagccataggctcttcattttcagacaaaatctcagaagagatctgtaactcagctgctaaaatggctaacaatcttggagtggacgcggttttcgtttacacaacgagcggacacatggcatcactggtctcccgatgtcgcccggactgcccgatctttgctttcacaaccacaacctcagtgagaagacgcttaaacctacaatggggacttatcccattccgtctcagcttctcagacgacatggaaagcaacttgaacaaaacattctcgttactgaaatcaagaggtatgatcaaatctggtgacctcgtgatcgcagtctcggacatgctgcaatcaatccaggtaatgaacgtcccgtaa

SEQ ID NO: 144 - protein, 596 aa, Arabidopsis thaliana
MSQSIQFSTPSHTPHLLHLPHSQFNRPLSSISFRRFPLTTIKYTSIRASSSSSPSPDLDSSSSSSSSQVLLSPNGTGAVKSDERSVVATAVTTDTSGIEVDTVTEAELKENGFRSTRRTKLICTIGPATCGFEQLEALAVGGMNVARLNMCHGTRDWHRGVIRSVRRLNEEKGFAVAIMMDTEGSEIHMGDLGGEASAKAEDGEVWTFTVRAFDSSRPERTISVSYDGFAEDVRVGDELLVDGGMVRFEVIEKIGPDVKCLCTDPGLLLPRANLTFWRDGSLVRERNAMLPTISSKDWLDIDFGIAEGVDFIAVSFVKSAEVINHLKSYLAARSRGGEIGVIAKIESIDSLTNLEEIILASDGAMVARGDLGAQIPLEQVPAAQQRIVQVCRALNKPVIVASQLLESMIEYPTPTRAEVADVSEAVRQRSDALMLSGESAMGQFPDKALTVLRTVSLRIERWWREEKRHESVPLQAIGSSFSDKISEEICNSAAKMANNLGVDAVFVYTTSGHMASLVSRCRPDCPIFAFTTTTSVRRRLNLQWGLIPFRLSFSDDMESNLNKTFSLLKSRGMIKSGDLVIAVSDMLQSIQVMNVP

SEQ ID NO: 145 - DNA, 1584 bp, Arabidopsis thaliana
  CDS (1)..(1584)
atgcattccagtcatcttcttctcgaggagccgatcaggatggcttcaatcctcgagccttccaaatctagtttcttcccggcattgactaagatcgtcggaactctaggtcctaaatcccgatccgtcgaggctctctccggctgtctcaaagccggcatgtctgtggctcgatttgatttctcgtggggagatgctgattatcaccaggagacacttgataatttgaaagttgctgtgaggagcactaagaagctttgtgctgttatgcttgatactgttggacctgagctacaagttattaacaaatctgagaaagctattactttgaaagctgatggccttgtaactttgacaccgaatcaagatcaagaagcttcttctgaagttcttcccattaatttcaatggacttgccaaggcagtgaagaaaggagacaccatcttcgttgggcaatacctattcactggtagtgaaacaacttcagtttggctcgaggttgatgaagttaaaggagatgatgtcatttgcctttcaaggaatgctgctactctggctggttctttgttcactttacactcctctcaagttcacattgatctcccaacgcttacagagaaggataaggaggttataagcacatggggagttcaaaataaaatcgattttctctcattgtcttattgtcgtcatgctgaggatgttcgccagacccgtgaaatgcttaaaaagttgggcgacctctctcaaacacaaatatttgctaagattgagaacgtagagggactaacccacttcgatgagattctacaagaagctgatggcattattctttctcgtgggaatttgggtatagatttacccccggaaaaggtgtttttgtttcaaaaggctgctctttacaagtgcaacatggctggaaagccagctgttcttacccgtgttgttgacagtatgactgacaacttgcgaccaactcgtgctgaggccacggatgttgctaatgctgttttagatggaagtgatgcaattcttcttggtgctgagacccttcgtggattgtaccctgttgagacaatatcaactgttggtaggatctgtgctgaggcagaaaaggttttcaatcaagatttgtactttaagaagactgtcaagtatgttggagaaccaatgactcacttggaatcgattgcttcttcagctgtacgggcagccattaaggttaaggcatccgtaattatatgcttcacctcttctggaagagcagccagattgattgccaaatacaggccaacgatgccggttatttctgttgtcattccccgggttaagacaaatcaactgaaatggagctttagtggagcttttgaggcgaggcagtcacttattgtcagaggcctcttccctatgcttgctgaccctcgtcaccctgcggaatctacaagtgcgacaaacgagtcagtcctgaaggttgctctagaccatgggaagcatgctggagtaatcaagtcgcatgacagagtagtggtgtgtcagaaagttggtgatgcatctgtggttaagatcattgagcttgaggattaa

SEQ ID NO: 146 - protein, 527 aa, Arabidopsis thaliana
MHSSHLLLEEPIRMASILEPSKSSFFPALTKIVGTLGPKSRSVEALSGCLKAGMSVARFDFSWGDADYHQETLDNLKVAVRSTKKLCAVMLDTVGPELQVINKSEKAITLKADGLVTLTPNQDQEASSEVLPINFNGLAKAVKKGDTIFVGQYLFTGSETTSVWLEVDEVKGDDVICLSRNAATLAGSLFTLHSSQVHIDLPTLTEKDKEVISTWGVQNKIDFLSLSYCRHAEDVRQTREMLKKLGDLSQTQIFAKIENVEGLTHFDEILQEADGIILSRGNLGIDLPPEKVFLFQKAALYKCNMAGKPAVLTRVVDSMTDNLRPTRAEATDVANAVLDGSDAILLGAETLRGLYPVETISTVGRICAEAEKVFNQDLYFKKTVKYVGEPMTHLESIASSAVRAAIKVKASVIICFTSSGRAARLIAKYRPTMPVISVVIPRVKTNQLKWSFSGAFEARQSLIVRGLFPMLADPRHPAESTSATNESVLKVALDHGKHAGVIKSHDRVVVCQKVGDASVVKIIELED

SEQ ID NO: 147 - DNA, 1428 bp, Fusobacterium nucleatum subsp. nucleatum ATCC 25586
  CDS (1)..(1428): transl_table=11
gtgaggagtttgaaaaaaacaaaaatagtttgtactattggtcctgtgactgaatcagtagaaactttaaaagaattactaaataggggaatgaatgtaatgagattgaatttctctcatggtgattatgaagaacatggaatgagaatgaagaattttagacaagcaatgtctgaaactggaattagaggaggaatacttcttgatactaagggtccagaaataagaacaatgactttaaaagatggaaaagatgtaagtattaaggctggacaaaaatttactttcacaacagatcaatcggttgttggagataatgaaagagtagcagtaacttatgaaaattttgcaaaagatttaaaagttggaaatatggttcttgttgatgatggattattagaactagatgttgtggaaataaaaggaaatgaagttatatgtatagccagaaataatggagatctaggacaaaagaaaggaataaatttacctaatgtttctgttaatttaccagcattatctgagaaagatatagaagatctaaaatttggttgtcaaaataatgttgattttgtggcagcatcatttataagaaaagctgatgatgtaagacaagtaagaaaagttcttagagaaaatgatggagaaagaatacaaataatttctaagatagaaagccaggaagggcttgataattttgatgaaattttagcagaatctgatggtataatggtagcaagaggagacttaggtgtagaaatccctgttgaagaagttccttgtgcgcaaaaaatgatgataagaaaatgtaatagagtaggaaaaactgttattacagcaactcaaatgctagattcaatgattaaaaatccaagacctacaagagcagaagcaaatgatgttgccaatgctatattagatggtacagatgcagtaatgctttcaggtgaaactgcaaagggaaaatatccattagcagctgttgaagttatgaataaaatagctaaaaaagttgatgctacaataccaccattttacatagaaggtgttataaataaaaatgatataacttctgctgttgcagaaggaagtgctgacataagcgaaaggttaaatgcaaaacttatagttgttggtacagaatctggaagagctgcaagagacatgagaagatatttccctagagcacatattttagcaataactaataatgaaaaaactgcaaatcaattagttttatcaagagggataatttcatatgtagatgcttcaccaaaaactttagaagaattctttgttgtagcagaatctgttgcaaaaaaattaaatttagttaaaaataatgatataattatagcaacttgtggagaaagtgtatttatacaaggaacaactaactcaataaaagtaatacaagtaaaagcatag

SEQ ID NO: 148 - protein, 475 aa, Fusobacterium nucleatum subsp. nucleatum ATCC 25586
MRSLKKTKIVCTIGPVTESVETLKELLNRGMNVMRLNFSHGDYEEHGMRMKNFRQAMSETGIRGGILLDTKGPEIRTMTLKDGKDVSIKAGQKFTFTTDQSVVGDNERVAVTYENFAKDLKVGNMVLVDDGLLELDVVEIKGNEVICIARNNGDLGQKKGINLPNVSVNLPALSEKDIEDLKFGCQNNVDFVAASFIRKADDVRQVRKVLRENDGERIQIISKIESQEGLDNFDEILAESDGIMVARGDLGVEIPVEEVPCAQKMMIRKCNRVGKTVITATQMLDSMIKNPRPTRAEANDVANAILDGTDAVMLSGETAKGKYPLAAVEVMNKIAKKVDATIPPFYIEGVINKNDITSAVAEGSADISERLNAKLIVVGTESGRAARDMRRYFPRAHILAITNNEKTANQLVLSRGIISYVDASPKTLEEFFVVAESVAKKLNLVKNNDIIIATCGESVFIQGTTNSIKVIQVKA

SEQ ID NO: 149 - DNA, 1665 bp, Drosophila melanogaster
  CDS (1)..(1665)
atgtcgttgtccgcgaaatccgtgctaaaggagggctccacacagctgagccacatctgcgagctggatcttgcccagcaggcgtcccaccagcgcctcgtttccctgatcgcaaccatatcggtcagttcccggaacgcggacaccatatacaccatgataatgcgcggagtgaacatattccgtctgaacttctcccacgaatcgcacgagatgcactcgaaaacgatcgagctgatcaacgaggcgctggagaggattcataaggagacgggccaaatccgaacggtcgccattgcggcggacacgcgtggaccccagattcgtactggcctactggatggagatgtgttcctgcgcagcggcgacaatctgcgtctctcgatcaatcgggatctttacgacaagggcaacaaggaggcggtctacgtggactacccgaacatcatcaacctgaccaagaccggcgatcgcctgttcatcgacgacggcaggctgctgctccacatcttggaagtgggagtggatggtctgctgtgcgaggtcatccatggcggccagctgaacaacaactgcaacgtgatcctgccggagatcgagatcgatttgcccgccgtctccgagaaggatatgtttgacatccagttcagcataaaggccaacgtggacttcctcttcgcctccgccgtgcgcagtgccaagaacgtcaaggagctgcgaacggtgctcggcgagaagggcaagcacatcaagatcatcgccaagatggacagcaagatagctctgagcaggttctcggagattctgcgtgcggcggatggattgctgctttcgcgagcggatctgggcacccagatacccattgaaaagctcttcatcacccagaagagcatactgggccaatgcaacaaggtgggcaagccggtcatagtggcctcccacatcctcgagtccatgcgcaccctgccccatcccacacgggccgagtgcttcgatttggccaacgccatcatcgatggagcagactgcatcatgctgtcgtcggaagtggccattgggtcgtttcccaaggagacggtggccacctgcgacacattgtgccgggaggccgagaaggtgctctggtttcgagacctcttctccgacctggtcagcgaggtgcgtggcgagctggacgcggcacactcgctggccattgcagccgtggagacggccaagcgcaccaatgccaccctgatcatcgtgctgaccacctcgggccgctcggccactctggtcagcaagttccgaccccgctgtcccatcatggctatcacgcgctgcgaacggaccgcccgctgggtctatctgcatcgcggagtcctgccgatactgtacaccttggagcccagcacggactacgccaccgatgtggacgctcgggtgcagttcgccatgacctctgccaagaagtggggcatcatcgacgacggcgatcccattgtgatagtgagtgcctggaaggatggcggcgggttcaccaacaatgtccgtgtggtctacgctttcttcgaggcggatcgcgtggactgcctgttccggtcggacaggcggcattctcgaaagaacaccaacctgcagatggcaaatcgggagcctgctgataagaaaagtggtaatgcgtag

SEQ ID NO: 150 - protein, 554 aa, Drosophila melanogaster
MSLSAKSVLKEGSTQLSHICELDLAQQASHQRLVSLIATISVSSRNADTIYTMIMRGVNIFRLNFSHESHEMHSKTIELINEALERIHKETGQIRTVAIAADTRGPQIRTGLLDGDVFLRSGDNLRLSINRDLYDKGNKEAVYVDYPNIINLTKTGDRLFIDDGRLLLHILEVGVDGLLCEVIHGGQLNNNCNVILPEIEIDLPAVSEKDMFDIQFSIKANVDFLFASAVRSAKNVKELRTVLGEKGKHIKIIAKMDSKIALSRFSEILRAADGLLLSRADLGTQIPIEKLFITQKSILGQCNKVGKPVIVASHILESMRTLPHPTRAECFDLANAIIDGADCIMLSSEVAIGSFPKETVATCDTLCREAEKVLWFRDLFSDLVSEVRGELDAAHSLAIAAVETAKRTNATLIIVLTTSGRSATLVSKFRPRCPIMAITRCERTARWVYLHRGVLPILYTLEPSTDYATDVDARVQFAMTSAKKWGIIDDGDPIVIVSAWKDGGGFTNNVRVVYAFFEADRVDCLFRSDRRHSRKNTNLQMANREPADKKSGNA

SEQ ID NO: 151 - DNA, 1752 bp, Thermoanaerobacter tengcongensis MB4
  CDS (1)..(1752): transl_table=11
atgaggagaacaaaaatagtctgtacaattggacctgctagtgaggactacaatatactgagaaagttaatagaaaaaggaatgaatgtagcaaggcttaatttttcccatggagattttgaagagcacggagcgaggattgacaacataaaaaagataagggaagaattaggtcttcctgtagctattttgctggacacaaaaggacccgagattagaacgggaaagtttaaaaacggcggagtagagttaaaggaaggccagacttttacattaactacaagggatgtaataggagatgaaacggtagtcagtgtttcctacaaaggtttgcctcaagatgtttcaagaggtacccaaattttgattgatgacggattgatctcactaagggttgtggatgtcaaaggggaagacataatctgtgtagttgaaaattcgggatttcttggagaccacaaaggagtaaatgttcctggagtgaaattgaatctcccggctttgacacaaaaagacatagaagatatagagtttggcataaagaaaggtattgacatgatagctgcttcttttgtcaggaaagcggcagatgtgcttgctataaggaggcttcttgaggacaataaagcagaccacattcagataattgctaaaatagaaaaccgcgaaggagtagaaaatatagacgaaataataagggtatctgacgggataatggtggccagaggagatttgggcgttgagatacctctggaggaaataccgatagtgcagaagatgataataaagaagtgcaatgaagctggaaagccagttattactgcaacccaaatgctggattccatgatgagaaatccgcgtcctactcgtgctgaagttacggatgttgctaatgctattttggatggaacggatgccataatgctgtcaggtgagacggcccagggcaaatatcctgtcgaagcttttgagacaatggccaggattgcggaaaagacagaggtttacgtccagtacagagatatagtaggtgtaggtacagagagaaatgtttccattactaatgcgataagccatgctacctgcacgactgcgagagatataggcgcttcagctatcataacctgtacaaaatcaggttatacggctaggatggtttcaaggtataggccttcctctcctatcatagctactactcctagcgagcaggtggcaagaaagctttccatcgtgtggggagtatatcctttagtgacaaaagaagtgtcaaccacagacgaaatgatagatgttgcaatagaaagtgcgttaaaagctgggcttataaggaatggagatattgtggtgatttctgcgggaatacctgttgccatgactggcaccacaaacatgctcaaagttcacatagttggagatgtgattttaagaggtattggtataggttcaaaatctactactggcactgtgtgcataattcatgacattggcaaggacagagacaagtttagagaaggagatataattgttacaaccaagacagagagagattttatgcctcttattgaaaaagcttctgccataataacagaagaaggcgggctcacctcccacgctgctattgttgggcttaacttggggatccctgtgattgtagggtgtgaaggagctacttcaaaacttcaggatgggatgacagtcactgttgacaccacgagaggactggtgtataaaggaattgtaaacataaaatga

SEQ ID NO: 152 - protein, 583 aa, Thermoanaerobacter tengcongensis MB4
MRRTKIVCTIGPASEDYNILRKLIEKGMNVARLNFSHGDFEEHGARIDNIKKIREELGLPVAILLDTKGPEIRTGKFKNGGVELKEGQTFTLTTRDVIGDETVVSVSYKGLPQDVSRGTQILIDDGLISLRVVDVKGEDIICVVENSGFLGDHKGVNVPGVKLNLPALTQKDIEDIEFGIKKGIDMIAASFVRKAADVLAIRRLLEDNKADHIQIIAKIENREGVENIDEIIRVSDGIMVARGDLGVEIPLEEIPIVQKMIIKKCNEAGKPVITATQMLDSMMRNPRPTRAEVTDVANAILDGTDAIMLSGETAQGKYPVEAFETMARIAEKTEVYVQYRDIVGVGTERNVSITNAISHATCTTARDIGASAIITCTKSGYTARMVSRYRPSSPIIATTPSEQVARKLSIVWGVYPLVTKEVSTTDEMIDVAIESALKAGLIRNGDIVVISAGIPVAMTGTTNMLKVHIVGDVILRGIGIGSKSTTGTVCIIHDIGKDRDKFREGDIIVTTKTERDFMPLIEKASAIITEEGGLTSHAAIVGLNLGIPVIVGCEGATSKLQDGMTVTVDTTRGLVYKGIVNIK

SEQ ID NO: 153 - DNA, 1437 bp, Streptomyces coelicolor A3(2)
  CDS (1)..(1437): transl_table=11
atgcgccgagcaaagatcgtctgcactcttgggcccgccaccgactcgtacgaccagatcaaggacctggtcgacgccggaatggacatcgcccgcttcaatttcagccacggcacccacgccgaacacgaagagcgctaccaccgtgtccgcaaggcgtccgacgagaccggccgcagcgtcggtgccctcgccgaccttcagggcccgaagatccgcctcggccacttcggtgaagggcccgtactccttgaacgcggcgacagcttcaccatcaccgtcgaggagggcgtcgagggcgaccgctacatctgcggcaccacctacgcgggcctggccgaggacgtcacccccggtgagcgcgtcctcgtcgacgacggcaaggtctgcctggaggtgaccggggtcgacgggacccgggtgcggacgcgggtgatcgagggcggcatggtctccgaccacaagggcctcaacctgcccggcgtcgcggtgtccgtgcccgccctgtcgaagaaggacgaggacgacctgcgctgggcgctgcgggccggcttcgacgtggtcgccctctccttcgtccgcagcggacgcgacatcctcgacgtgcaccgcatcatggacgaggagggccgccgcctccccgtcatcgccaaggtcgagaagccgcaggccgtggagaacatcgaggacatcgtcgcggccttcgacggcatcatggtcgcccggggcgacctcggcgtcgagatgcccctggaacaggtgccgaccgtccagaagcgcgcggtgaagctggccaagcgcaacgccaagccggtcatcgtcgccacccagatgctcgactcgatgatcgacaacgcccgccccacccgcgcggaggcctccgacgtcgccaacgccgtcatcgacggcaccgacgccgtgatgctctccggcgagaccagcgtcggcaagcaccccaccgacaccgtgcgcacgatggcccggatcgtcgaagcggccgaggaggacatcctcgccaagggactccccccgctgaccgaacggaacaagccccgcacccagggcggtgcggtcgcccgcgccgccgccgagatgggcgacttcctcggcgccaagttcctggtcgccttcacccagtccggcgacacggtccgccgcctctcccgctaccgctcgcccattccgctgctcgccttcaccccggaaccggcgacccgctcccagctgagcctgacctggggtgtggagaccttcctcggtccgcacgccgactccacggacgcgatggtcgaccaggtggacgagcttctcacccgctacggacgctgcgaaaagggcgacgtcgtggtcatcacggccggctcaccgccgggggtgtccggcacgacgaacctggtgcgtgtgcaccacatcggggaggacgacattcccaagtga

SEQ ID NO: 154 - protein, 478 aa, Streptomyces coelicolor A3(2)
MRRAKIVCTLGPATDSYDQIKDLVDAGMDIARFNFSHGTHAEHEERYHRVRKASDETGRSVGALADLQGPKIRLGHFGEGPVLLERGDSFTITVEEGVEGDRYICGTTYAGLAEDVTPGERVLVDDGKVCLEVTGVDGTRVRTRVIEGGMVSDHKGLNLPGVAVSVPALSKKDEDDLRWALRAGFDVVALSFVRSGRDILDVHRIMDEEGRRLPVIAKVEKPQAVENIEDIVAAFDGIMVARGDLGVEMPLEQVPTVQKRAVKLAKRNAKPVIVATQMLDSMIDNARPTRAEASDVANAVIDGTDAVMLSGETSVGKHPTDTVRTMARIVEAAEEDILAKGLPPLTERNKPRTQGGAVARAAAEMGDFLGAKFLVAFTQSGDTVRRLSRYRSPIPLLAFTPEPATRSQLSLTWGVETFLGPHADSTDAMVDQVDELLTRYGRCEKGDVVVITAGSPPGVSGTTNLVRVHHIGEDDIPK

SEQ ID NO: 155 - DNA, 1431 bp, Streptomyces coelicolor A3(2)
  CDS (1)..(1431): transl_table=11
atgcgccgttcgaaaatcgtctgtactctcggccccgcggtcgactcccacgagcagctcgtcacgctgatcgaagccggcatgaacgtggcccgcttcaacttcagccatggcacccacgccgagcaccagggtcgttacgaccgggtccgggccgccgccaaggagaccggccgggccatcggcgtcctcgccgacctccagggcccgaagatccgcctggagaccttcgcggagggccccgtcgagctggtgcgcggtgacgagttcaccatcaccgccgaggacgtcccgggcgacaggacgatctgcggcacgacctacaagggcctgcccggtgacgtcaccaagggcgaccaggtgctcatcaacgacggcaacgtcgagctgaaggtcaccgaggtcgagggcccccgggtgaagacgatcgtcatcgagggcggcgtcatctccgaccacaagggcatcaacctgccgggcgcggcggtcaacgtccccgcgctgagcgagaaggacgtcgaggacctccggttcgcgctgcgcatgggctgcgacctggtcgccctctccttcgtccgggacgccaaggacgtcgccgacgtgcaccgcgtcatggacgaggagggccgccgggtcccggtgatcgccaaggtcgagaagccccaggcggtcgacaacatggaggacgtcgtgatggcgttcgacggcgtgatggtcgcccgtggcgacctggccgtcgagtacccgctcgagaaggtccccatggtgcagaagcgcctgatcgagctgtgccggcgcaacgccaagccggtgatcgtggcgacccagatgatggagtcgatgatcacgaactcccggccgacccgcgccgaggcctccgacgtggccaacgcgatcctggacggcgccgacgcggtcatgctgtccgccgagtcgagcgtgggcgcctacccgatcgagaccgtcaagacgatgtcgaagatcgtcaccgccgccgagcaggagctgctctccaagggcctccagccgctggtgccgggcaagaagccgcgcacgcagggcggttcggtggcccgtgcggccgccgagatcgccgacttcctgggcggcaagggcctggtcgccttcacccagtccggcgacaccgcccgccggctctcccgctatcgcgcggcccagccgatcctcgccttcaccaccgacgagtccacccgcaaccagctggcgctcagctggggagtggagccgcacgtggtgccgttcgtgaacaccacggacgagatggtggacctggtggaccaggagacggcccgcctcggccggttcagcgacggcgacaccgtcgtgatcaccgccggttcgccccccggcgtgtccggcaccaccaacatggtgcgggtcctccacctgggcgagacacggcgcggctga

SEQ ID NO: 156 - protein, 476 aa, Streptomyces coelicolor A3(2)
MRRSKIVCTLGPAVDSHEQLVTLIEAGMNVARFNFSHGTHAEHQGRYDRVRAAAKETGRAIGVLADLQGPKIRLETFAEGPVELVRGDEFTITAEDVPGDRTICGTTYKGLPGDVTKGDQVLINDGNVELKVTEVEGPRVKTIVIEGGVISDHKGINLPGAAVNVPALSEKDVEDLRFALRMGCDLVALSFVRDAKDVADVHRVMDEEGRRVPVIAKVEKPQAVDNMEDVVMAFDGVMVARGDLAVEYPLEKVPMVQKRLIELCRRNAKPVIVATQMMESMITNSRPTRAEASDVANAILDGADAVMLSAESSVGAYPIETVKTMSKIVTAAEQELLSKGLQPLVPGKKPRTQGGSVARAAAEIADFLGGKGLVAFTQSGDTARRLSRYRAAQPILAFTTDESTRNQLALSWGVEPHVVPFVNTTDEMVDLVDQETARLGRFSDGDTVVITAGSPPGVSGTTNMVRVLHLGETRRG

SEQ ID NO: 157 - DNA, 1434 bp, Methanosarcina mazei Go1
  CDS (1)..(1434): transl_table=11
atggaaatcccggatcataaaacaaagatcgtctgtacaataggacctgcctcttcttctgaagagatgataaggaagcttatgcttgcgggcatgaacgtggcaaggataaatttttctcacggagactttgagagccactcaagggttgtccgaattatccgtaaggttgcagatgaacttggcaggacaattgcaatccttgcagacctgcctggcccgaaaatacgcataggcaaactcgaaaaagagcctgttatgctccataaagggaacccgataacccttacaattgacgacactccgggaaacgaagagagaatccctgtcagttacaaacagcttccggaaagcgtaacccctgggagccttatctacctcagtgacgggttcatacagctcctctgcaaggaggttacaggaaaagacgttctctgtgaagtccttatcggaggagagctttattcgcacaaagggctgaaccttccaggggcaaagatctttcttgacgctgtgactgaaaaagatttcaggatcctggaatttgcccttgaagaggacattgacactttcagcatctcttttgtagaaaatgcagaagatatccgaaaagtaagaaattttgccgcttccagaggaaagcaggtaaatatagtatcaaaaatagaacgcaggcaggctgtagaaaatataggagaaatccttgacgagaccgatgcccttatggttgcaaggggagacctgggagttgaaattcctatccaggaagtcccttcggtccagaaagaacttatccagagggcaaagctccttggggttcctgtgattactgcaacccatatgctggcttccatgacagataatataagacccacgcgtgccgaagccacggatgttgcaaacgctatccttgacggcacggatgctgttatgctctcggaagaaacagcagtcggaaactaccccgtggaagctgtcgagatgatggcaaagattgcaaagaccactgaaaactggcgctcccggactaaatgggggcttgacacaatgatcaaatccataactgccagggagatgtcagtggatgaggtaatcaccttacaggtttatgaagccctgcagaaactgcctgttgcagccgtacttaccccgacaaggagcggagcgactccccgcaggatttcgcgctttaatcctgacccctggattctggctttcagccgcgttcctaagacctgcaggttcctttccctgtcttacggggtttatcctgttgccgtaaacgaatctattgaaagctgggaaaaagagacaacggaaagaacaaaagaattgggatttgcgaaaagtaaagatctcgtgatttttacccagggccctgcttccggaaaacccggaggtacgaatatgctcaagatcctgacccttgactga

SEQ ID NO: 158 - protein, 477 aa, Methanosarcina mazei Go1
MEIPDHKTKIVCTIGPASSSEEMIRKLMLAGMNVARINFSHGDFESHSRVVRIIRKVADELGRTIAILADLPGPKIRIGKLEKEPVMLHKGNPITLTIDDTPGNEERIPVSYKQLPESVTPGSLIYLSDGFIQLLCKEVTGKDVLCEVLIGGELYSHKGLNLPGAKIFLDAVTEKDFRILEFALEEDIDTFSISFVENAEDIRKVRNFAASRGKQVNIVSKIERRQAVENIGEILDETDALMVARGDLGVEIPIQEVPSVQKELIQRAKLLGVPVITATHMLASMTDNIRPTRAEATDVANAILDGTDAVMLSEETAVGNYPVEAVEMMAKIAKTTENWRSRTKWGLDTMIKSITAREMSVDEVITLQVYEALQKLPVAAVLTPTRSGATPRRISRFNPDPWILAFSRVPKTCRFLSLSYGVYPVAVNESIESWEKETTERTKELGFAKSKDLVIFTQGPASGKPGGTNMLKILTLD

SEQ ID NO: 159 - DNA, 1527 bp, Xanthomonas campestris pv. campestris str. ATCC 33913
  CDS (1)..(1527): transl_table=11
atgccatcctcggtacgtgacgcgtgtgttaagtttcgcggcttttacagggaggccatcatgaaagaacgtcaacgccgcaccaagatcctcgccacgctgggaccggccacggatccgcctggtgtgctggacgccttgttcaaggcgggcgtcaacgtggtgcgcctcaacttcagccacggcgacccgtccggccaggccaagcgcgctgccgaagtgcgtgccgccgccgtccgcgtcggcgccgaagtgggcatcctggccgacctgccgggcccgaagatccgcatcgagcgctttgccggaggcaagatcaagctgaccatgggcgatcgtttcgacctggtggccgatatcaatgcgccggccggcgatcagcatcaggtgggcgtgagctacctgggcctgccgcaggatgtcaccgccggtgacgtgctgctgctcgacgatggcctggtgcagctgcaggtcaccgacgtgcagggcgcgcgcatcgtcaccaccgtgctcaacgatggtgtgttgtccgaccgcaagggcctcaacaagcagggcggcggtctgtcgctgggcgcgttgaccgagcgcgacaaggagctgatcggcatcgtggccaagatcggcgtggacttcatcgcggtgtcgttctgccgtaacgcgcaggacatgcacgacgcccgccagatcgcccagcagcacggctgcgatgcgcagttggtgtccaagatcgagcgcaccgaagcgatcgagaacctggtcgaaatcgtcgaagcctccgacgtggtgatggtggcgcgtggcgatctgggcgtggaaatcggcgatgccgaattgccgggcctgcagaagaagatcattcgcgagtcgctggcgcagaacaaggtggtgatcacggccacccagatgctgcagtcgatggtggaaagcccgatcccgacccgcgccgaagtactcgacgtggccaacgcggtcatcgacggcaccgatgcggtgatgctctcggccgaaaccgctgccggtgcgtatccggtgcgtgcagtggaagcgatggcgcgcatctgcctgggcgccgagcaccagttcgagttcgataccgacttcgaagcggcgcaacgcaacctgcagcgcgccgaccaggcgatcgcaatggcgaccatgttcctgtccgagcacatcggtctgggcggcgtggtggcgttgaccgaatccggcggcacgccgcgttacctgtcgcgcttccgttccaatatgccgatctatgcattcacccgtcatgacggcgcgcgtcgccagatggcgatgatgcgtggcgtgttcccgatcggtttcgacagccgtggcctgaccccacgcgaagccgcgcgcgcagcgatccgcctgctggtggagaacgagcgcatggggcctggcgaccgcgtggtgttcaccagcggcgagcacatggaaacccatggcgccaccaacacgctgcgtctgctggaagtgggcgaagacggccgcgccagcggtctgggcgagctgtag

SEQ ID NO: 160 - protein, 508 aa, Xanthomonas campestris pv. campestris str. ATCC 33913
MPSSVRDACVKFRGFYREAIMKERQRRTKILATLGPATDPPGVLDALFKAGVNVVRLNFSHGDPSGQAKRAAEVRAAAVRVGAEVGILADLPGPKIRIERFAGGKIKLTMGDRFDLVADINAPAGDQHQVGVSYLGLPQDVTAGDVLLLDDGLVQLQVTDVQGARIVTTVLNDGVLSDRKGLNKQGGGLSLGALTERDKELIGIVAKIGVDFIAVSFCRNAQDMHDARQIAQQHGCDAQLVSKIERTEAIENLVEIVEASDVVMVARGDLGVEIGDAELPGLQKKIIRESLAQNKVVITATQMLQSMVESPIPTRAEVLDVANAVIDGTDAVMLSAETAAGAYPVRAVEAMARICLGAEHQFEFDTDFEAAQRNLQRADQAIAMATMFLSEHIGLGGVVALTESGGTPRYLSRFRSNMPIYAFTRHDGARRQMAMMRGVFPIGFDSRGLTPREAARAAIRLLVENERMGPGDRVVFTSGEHMETHGATNTLRLLEVGEDGRASGLGEL

SEQ ID NO: 161 - DNA, 1785 bp, Thermosynechococcus elongatus BP-1
  CDS (1)..(1785): transl_table=11
atgtcgaaccagccgttgcaacgccgcaccaaaattgtcgccaccattggtccagcagtcagtcaccccgacaaattgcgcgccattattcaagcgggagcaaccaccctgcgtctaaacttttcccatggcacccatgacgatcaccagcgcagcattcgcctcattcgccaaatttcctatgaactcgggcaaccggtggggattttgcaggacttgcaaggccccaagattcgccttgggcggtttgagcatggctccatttccctcaagcggggcgatcgctttaccctcacgagtcgccctatcctgggcaatcagcacattagctcaattacctatccccccttggcccaagaggtgcccgccggtgccacgattttgctcgacgatggccgcgtggaaatgctcgtggaagaagtggataaagaggcgggggagctccattgccaagtgattgttgggggtaccctctccaatgccaagggtgtgaactttccgggggtttacctttcgattaaagccctaacagagaaagatcgcgaagatctgatgtttggcctcaatcaaggggtggattgggtggccctcagcttcgttcgcaatccccaagatgtactggagatcaaagaactgattgccaacgctgggaagcaggtgccagtcattgccaaaatcgaaaagcacgaggcgatcgagcagatggatgccattctctccctctgtgatggcgtcatggtggcacggggtgatttgggggttgaattgcccgccgaagatgtaccgattctgcaaaaacggctgatcgctgctgccaaccgcttgggcattccggtcattacggccacacaaatgctcgacagcatggtgaaaagccctcgtcctacccgggccgagatttccgatgtcgccaatgccattctcgatggcactgatgccgtgatgctctccaatgaaacggcgatgggggaataccccgtcgaggcggtcaagatgatggccaccattgccgcccgcattgacaatcaacctcaactgcggcaacctcccggggctgagtctacggcggtgcgttctattcccagtgccattagtcaagcggtgggacaggtggcggcgcagctgcatgccaaagcgatcattacccaaactaaaacaggcgcaacggcgcggaatgtttccaagtttcgtccccaaattcctattttggcggcaacaccccatatcgaagtggcccgtcgcctccagttggtctggggcgtcgaaccgctgctgacattggatcatccctcgatgcgcgaatccttccaggcggcgattaatgctgcccaggagcggggcttccttgaggagggggatctggtggtcatgacggcgggcaccctacaaggggtttctggctccacggatatgatcaaggtggaactggttacctcagtgatgggacggggttgtggcattggccatggatctgttagtggtcctgcgcgggtggtacgccaagggatgccggtgcgtacgtttaatcgtggggaaattttggtggctgagcgcaccagtgctgagttggtggaagtgattcgcaaagcggcaggcattattaccgaggaggacagcctcacaagccatgccgccgtcttggggttgcggctgggtattcctgtgattgtgggcgtcaaaaatgccactcgcctgatccgtgagggcaccattctgacgatggatgtggaacggggcgtggtttattccggtgcccgcaatggcggcgagcgatcgccagagtag

SEQ ID NO: 162 - protein, 594 aa, Thermosynechococcus elongatus BP-1
MSNQPLQRRTKIVATIGPAVSHPDKLRAIIQAGATTLRLNFSHGTHDDHQRSIRLIRQISYELGQPVGILQDLQGPKIRLGRFEHGSISLKRGDRFTLTSRPILGNQHISSITYPPLAQEVPAGATILLDDGRVEMLVEEVDKEAGELHCQVIVGGTLSNAKGVNFPGVYLSIKALTEKDREDLMFGLNQGVDWVALSFVRNPQDVLEIKELIANAGKQVPVIAKIEKHEAIEQMDAILSLCDGVMVARGDLGVELPAEDVPILQKRLIAAANRLGIPVITATQMLDSMVKSPRPTRAEISDVANAILDGTDAVMLSNETAMGEYPVEAVKMMATIAARIDNQPQLRQPPGAESTAVRSIPSAISQAVGQVAAQLHAKAIITQTKTGATARNVSKFRPQIPILAATPHIEVARRLQLVWGVEPLLTLDHPSMRESFQAAINAAQERGFLEEGDLVVMTAGTLQGVSGSTDMIKVELVTSVMGRGCGIGHGSVSGPARVVRQGMPVRTFNRGEILVAERTSAELVEVIRKAAGIITEEDSLTSHAAVLGLRLGIPVIVGVKNATRLIREGTILTMDVERGVVYSGARNGGERSPE

SEQ ID NO: 163 - DNA, 1761 bp, Oceanobacillus iheyensis HTE831
  CDS (1)..(1761): transl_table=11
atgagaaacacaaaaatcgtatgtacaattggtcctgcatcagaatcaattgaaaagttagagcaacttattgaagcaggaatgaacgtagctcgtctcaacttttctcatggagattatgcagagcatggcgcacggattgaaaatatccgaaaagcagctaaaaataaaaataaaacagtagcaattcttttagatactaaaggaccagagattcgtactggtagctttaaagaaggtagagcagatcttatgcagggcaaccctgtaacaatcgctatggatgaagtagaggggactgctgagaaattctctgttacataccaagggctaatcaatgatgtacatgaaggttcaaagattcttttggatgatggacttattgaattagaagtaaaatctattgataaaagtaaaggtgaaattgaaactattgcacttaactctggggaaataaagaataaaaaaggtgttaacgttcctaatgtttctgtaaatctacccggtataacagaaaaagacaccaatgatattatctttggaattgaacagggtgttgattttattgctgcatcttttgtgcgtcgagcttcggatattttagaaattaaagaagtgctagatcagcatcaggcacagtatataaaaatcatccctaaaattgagaaccaagaaggtgtcgataatatcgatagtattcttgaggtaagtgatggattaatggtagctcgtggtgatttaggagtggagatcccagctgaagatgtaccattggtacagaaaaaattaattaagcaatgtaataatgctggaaagccagtaattactgctacacaaatgttagattcgatgcagcgtaatccacgacctacacgtgcagaagcatcagacgttgctaatgcgatttttgatggcacagatgcaattatgctttctggagaaactgctgcgggaacctacccagtagaatctgtacaaacaatgagtaatattgcactaaaagctgaatctgcattagatcataaacaaatgttagaagaacgttcacaatatgtcgatatgactataacagaagcaattagtcaatccgttacgcacacagcatccaatttaaatgttgatacaattatcacaccgacagaaagcggacatacagctagaatgatttctaaataccgtccgaaagcttccattctagcagttacttttaacgaagtagtaaatcgtcaactatccttagtttggggagtgcatgctgttctgggtaaaccagcgacgtctactgacgaaatgctagaaattgcagttgataaaggattaaatacaggaatctgcagtagaggaagccgtgtcattattacggctggtgtacctgttggagagagtggaacaactaacctgttaaaagttcatgtgattggtgatgtgattgctaaaggacaaggaattggaagaagaagtgcatatggacatgccgtatttgctaaaacgaataaagaagctttagaaaaagtacaagacggtgatattttagtaacctatgcaacagaaaaagaaatgatgcctgcaattgaaaaagcatcagctattattacagaagaaggtggattaacttctcatgcagctgttgtcggattaagtcttggaattccagtaattgttggggttgacaatgtatttgaaattcttcaagatggacaagatattactgtagatggtaaccgtggagatatctacgctggccatgcaggtgtattgtaa

SEQ ID NO: 164 - protein, 586 aa, Oceanobacillus iheyensis HTE831
MRNTKIVCTIGPASESIEKLEQLIEAGMNVARLNFSHGDYAEHGARIENIRKAAKNKNKTVAILLDTKGPEIRTGSFKEGRADLMQGNPVTIAMDEVEGTAEKFSVTYQGLINDVHEGSKILLDDGLIELEVKSIDKSKGEIETIALNSGEIKNKKGVNVPNVSVNLPGITEKDTNDIIFGIEQGVDFIAASFVRRASDILEIKEVLDQHQAQYIKIIPKIENQEGVDNIDSILEVSDGLMVARGDLGVEIPAEDVPLVQKKLIKQCNNAGKPVITATQMLDSMQRNPRPTRAEASDVANAIFDGTDAIMLSGETAAGTYPVESVQTMSNIALKAESALDHKQMLEERSQYVDMTITEAISQSVTHTASNLNVDTIITPTESGHTARMISKYRPKASILAVTFNEVVNRQLSLVWGVHAVLGKPATSTDEMLEIAVDKGLNTGICSRGSRVIITAGVPVGESGTTNLLKVHVIGDVIAKGQGIGRRSAYGHAVFAKTNKEALEKVQDGDILVTYATEKEMMPAIEKASAIITEEGGLTSHAAVVGLSLGIPVIVGVDNVFEILQDGQDITVDGNRGDIYAGHAGVL

SEQ ID NO: 165 - DNA, 1530 bp, Bifidobacterium longum NCC2705
  CDS (1)..(1530): transl_table=11
atgagtcggctcgcgctagtagactgggtttcggcaaatggggcaatcgcgcctcgaaccaaattgaacaagaataggcaggcattcatgcgtaaagccaagatcgtagacaccatcggtccttccaccgaggattacgacaacctcctgaagctcgttgaagctggtatggacgttgctcgtctgaaccgctcccacggcacccccgaggatcacctcaaggtctacaacaacgtgcgcaaggccagcgaagccactggtcgcaacgttgccgcgctcgttgatttgcagggcccgaagattcgctgcggttggttcaagaagaacgccgatggcgaagacaaggttcagctgcagctcggccaggaattcgtcatcaccactgatgacgtcgagggcgacgagcacatcacctccaccaccttcaagggcctgccgggcgattgccacccgggcgacccgatcctgatcgatgacggcaaggtccgtcttgaggtcaccaaggtcgagggcaacaacgtgtacaccaaggtcgtcgtggccggtcctgtgtcctcccacaagggcatcaacctgccgggcgtcgccgtctccctgccggctctgaccgagaaggatgaggccgacctgcgttgggccatccgcaccggtgccgacatcatcgccatgtccttcgtgcgtttcgccaccgacatcgaccgcgcccacgagatcatggacgaggaaggccgtcgcatcccgatcatcgccaagatcgagaagccgcaggctctggagaacctcgaagagatcgtcaagaccttcgacggcgtcatggccgcccgtggcgacatggccgttgagtgcccgctggaagaggtcccgctggccactaagcgcatcatcgagctggctcgccagtacgccaagccggtcatcgtggctaccgaagtcctcggctccatggtgaactccccggttccgactcgtgcagaggcttccgactgcgccaacgccatcctcgacggctccgacgccaccatgacctccaacgagaccgccgttggtaagtacccggatgtgaccgtggccaccatggcccgtatctccggctacgccaccgaccacggcttcgaccgtatcccggagctcaagaaccttgacatgtcctccaccggcgctgtctcctccgccgctgtggacctggccgacaagctcaacgccaaggccatcgttgcttacacccagaccggtgccaccgtgcaccgcgtctcccgtgagcgtccggccgccccgatctacggcctgaccagcaacgagcacacctaccactggctggctctgtcctggggcaccgaagccttcctgctcaaggaggactaccacgacaagtcccgcaaggatctcatggtctacacggacaaggtcctcaaggatgctggcaaggttgctgacggcgacaagatcgtcatcctgagctctgctcagggcgatcaccagccgggccgcactgactccatctacgtgcacaccgttggcgcttgcgactga

SEQ ID NO: 166 - protein, 509 aa, Bifidobacterium longum NCC2705
MSRLALVDWVSANGAIAPRTKLNKNRQAFMRKAKIVDTIGPSTEDYDNLLKLVEAGMDVARLNRSHGTPEDHLKVYNNVRKASEATGRNVAALVDLQGPKIRCGWFKKNADGEDKVQLQLGQEFVITTDDVEGDEHITSTTFKGLPGDCHPGDPILIDDGKVRLEVTKVEGNNVYTKVVVAGPVSSHKGINLPGVAVSLPALTEKDEADLRWAIRTGADIIAMSFVRFATDIDRAHEIMDEEGRRIPIIAKIEKPQALENLEEIVKTFDGVMAARGDMAVECPLEEVPLATKRIIELARQYAKPVIVATEVLGSMVNSPVPTRAEASDCANAILDGSDATMTSNETAVGKYPDVTVATMARISGYATDHGFDRIPELKNLDMSSTGAVSSAAVDLADKLNAKAIVAYTQTGATVHRVSRERPAAPIYGLTSNEHTYHWLALSWGTEAFLLKEDYHDKSRKDLMVYTDKVLKDAGKVADGDKIVILSSAQGDHQPGRTDSIYVHTVGACD

SEQ ID NO: 167 - DNA, 1413 bp, Shigella flexneri 2a str. 301
  CDS (1)..(1413): transl_table=11
atgaaaaagaccaaaattgtttgcaccatcggaccgaaaaccgaatctgaagagatgttagctaaaatgctggacgctggcatgaacgttatgcgtctgaacttctctcatggtgactatgcagaacacggtcagcgcattcagaatctgcgcaacgtgatgagcaaaactggtaaaaccgccgctatcctgcttgataccaaaggtccggaaatccgcaccatgaaactggaaggcggtaacgatgtttctctgaaagctggtcagacctttactttcaccactgataaatctgttatcggcaacagcgaaatggttgcggtaacgtatgaaggtttcactactgacctgtctgttggcaacaccgtactggttgacgatggtctgatcggtatggaagttaccgccattgaaggtaacaaagttatctgtaaagtgctgaacaacggtgacctgggcgaaaacaaaggtgtgaacctgcctggcgtttccattgctctgccagcactggctgaaaaagacaaacaggacctgatctttggttgcgaaaaaggcgtagactttgttgctgcttcctttattcgtaagcgttctgacgttatcgaaatccgtgagcacctgaaagcgcacggcggcgaaaacatccacatcatctccaaaatcgaaaaccaggaaggcctcaacaacttcgacgaaatcctcgaagcctctgacggcatcatggttgcgcgtggcgacctgggtgtagaaatcccggtagaagaagttatcttcgcccagaagatgatgatcgaaaaatgtatccgtgcacgtaaagtcgttatcactgcgacccagatgctggattccatgatcaaaaacccacgcccgactcgcgcagaagccggtgacgttgcaaacgccatcctcgacggtactgacgcagtgatgctgtctggtgaatccgcaaaaggtaaatacccgctggaagcggtttctatcatggcgaccatctgcgaacgtaccgaccgcgtgatgaacagccgtctcgagttcaacaatgacaaccgtaaactgcgcatcaccgaagcggtatgccgtggtgccgttgaaactgctgaaaaactggatgctccgctgatcgtggttgctacccagggcggtaaatctgctcgcgcagtacgtaaatacttcccggatgccaccatcctggcactgaccaccaacgaaaaaacggctcatcagttggtactgagcaaaggcgttgtgccgcagctggttaaagagatcacttctactgatgatttctaccgtctgggtaaagaactggctctgcagagcggtctggcacacaaaggtgacgtcgtagttatggtttctggtgcactggtaccgagcggcactactaacaccgcatctgttcacgtcctgtaa

SEQ ID NO: 168 - protein, 470 aa, Shigella flexneri 2a str. 301
MKKTKIVCTIGPKTESEEMLAKMLDAGMNVMRLNFSHGDYAEHGQRIQNLRNVMSKTGKTAAILLDTKGPEIRTMKLEGGNDVSLKAGQTFTFTTDKSVIGNSEMVAVTYEGFTTDLSVGNTVLVDDGLIGMEVTAIEGNKVICKVLNNGDLGENKGVNLPGVSIALPALAEKDKQDLIFGCEKGVDFVAASFIRKRSDVIEIREHLKAHGGENIHIISKIENQEGLNNFDEILEASDGIMVARGDLGVEIPVEEVIFAQKMMIEKCIRARKVVITATQMLDSMIKNPRPTRAEAGDVANAILDGTDAVMLSGESAKGKYPLEAVSIMATICERTDRVMNSRLEFNNDNRKLRITEAVCRGAVETAEKLDAPLIVVATQGGKSARAVRKYFPDATILALTTNEKTAHQLVLSKGVVPQLVKEITSTDDFYRLGKELALQSGLAHKGDVVVMVSGALVPSGTTNTASVHVL

SEQ ID NO: 169 - DNA, 1437 bp, Leptospira interrogans serovar Lai str. 56601
  CDS (1)..(1437): transl_table=11
ttgccttgcatgaaaattctaaacaggaaaaaaaccaaaatcgtctgcactataggtccggcttcttcttccgaagaaaccatactttctattctcaaagcgggaatggatatagctcggatgaatttttcacacggcacacatgattctcataaaagagtctacgacacgttacgcaagtgcgaacaaattttcggatttcctttagggatcatggcagacctacaaggccctaaaattcgaaccggaaaattaaaactcaactccattctacttcataaaaatcaggagattgaaatcgtcccagattctgatattttgggagatgaacacaaaatcggttgtacatatccaaatctaattagagatatacaagaagaagacaagattctaattgatgacggtaagttaattttaaaagttatttctaaaaaatcgaactccgccattttaaaagtaatcgtaggtggaatcttatggagcaacaaaggaatcaatcttccaggaactcctatctctgctcctgcactttccgaaaaagacatagaagatcttaagttcgcactctctctaggtgtagattacgcggctcttagttttgttcgtactggggcagacttagaattagcaaggtcttatttagaaggtacatatacagggctgatcgcaaagatagaaagaccggaagcaattggaaacatagaagaaatcatagaacgagcagatggcatcatgattgcaagaggagatttaggagtagaaattgatacggaaaaggttcccattctacaaaaagaacttatctataaactcaatcaagcgggtaaaccggtcattactgcaacccaaatgctggaatctatgattgaaaacccaagaccaacacgtgcagaagcgagcgacgtagcaaatgcggttatggacggaacggatgcagttatgctttctgcagaatcggctaacggccattatccggtcgaatccgttgaaatcatgtctaaaatcattcaagaaactgaaaccattgatcatatctatgagattcactggaacattaaaaaaactttcttagaatcagaaagaactgcactgggaaatgccgcaagggagattgcccacggaatccacgcaaaggcaatcgtcaattttacgagaagcggttattccgcattgattacctccgaaatgagacccaaggttccgatctactcttttactccgtttgcaaccaccgccagaaagatgaaactctatcgaggtgtggtgccatttgtaatgcctttctttacaagattggaagatatgattgcttatatgaatcaaaaactcaaagaagatgaatttctttttccaggagataaggtggtaattctttccggagccccaggaaccacagtcagaagtgtagactttttacaggtttataaaatacattga

SEQ ID NO: 170 - protein, 478 aa, Leptospira interrogans serovar Lai str. 56601
MPCMKILNRKKTKIVCTIGPASSSEETILSILKAGMDIARMNFSHGTHDSHKRVYDTLRKCEQIFGFPLGIMADLQGPKIRTGKLKLNSILLHKNQEIEIVPDSDILGDEHKIGCTYPNLIRDIQEEDKILIDDGKLILKVISKKSNSAILKVIVGGILWSNKGINLPGTPISAPALSEKDIEDLKFALSLGVDYAALSFVRTGADLELARSYLEGTYTGLIAKIERPEAIGNIEEIIERADGIMIARGDLGVEIDTEKVPILQKELIYKLNQAGKPVITATQMLESMIENPRPTRAEASDVANAVMDGTDAVMLSAESANGHYPVESVEIMSKIIQETETIDHIYEIHWNIKKTFLESERTALGNAAREIAHGIHAKAIVNFTRSGYSALITSEMRPKVPIYSFTPFATTARKMKLYRGVVPFVMPFFTRLEDMIAYMNQKLKEDEFLFPGDKVVILSGAPGTTVRSVDFLQVYKIH

SEQ ID NO: 171 - DNA, 1440 bp, Shewanella oneidensis MR-1
  CDS (1)..(1440): transl_table=11
atgttccgcagaaccaaaatcgtcaccacactgggtcccgccactgaccgtgacgataacttacgccgtattattgcggcaggtgcaaacgttgttcgtcttaacttctcccacggctcccccgaagatcatctcaaacgcgctactcaagctcgcgaaatcgcaaaagaattaggtgtacatgttgctattttaggtgacctacaaggccctaaaatccgtgtgtctacctttaaagacaacaagaaaattcaactgaaattaggccaaacctatattcttgacgccgaacttgctaaaggtgaaggcgatgagaatcaagtcggtatcgactataagcaattgcctgatgatgtgaatgttggcgacatcctgatgctcgatgacggccgagtacaactgcgtgttgagcgcgttgaaggtcgtaaagtccatactactgtgacggttgcaggtcctttatcgaacaataaagggatcaacaagcaaggtggtggtttgtcggctgcggcactaactgaaaaagacaaggcagacattctcaccgcagctatgatccaagtggattacttagccgtgtcattcccacgtagcggtgcagatctcgaatatgcacgctctttagcgcagcaggctggcagtaacgcactgatcgtcgcgaaggttgaacgtgcagaagcggttgccagtgatgaagcaatggatgatgtgattttagcctctgatgttgtgatggttgcccgcggtgatttaggggttgagattggtgatgctgcactggtagcagtacaaaagaaactcatcgcccgttcacgtcagctcaataaaatcgtcatcaccgcgacccaaatgatggaatcgatgatctcgagcccaatgccaacccgtgcagaagtgatggacgtggcaaacgccgtgcttgatggtaccgacgctgtgatgttatcagccgaaaccgcagcgggtgacttcccagaagaaactgttaaagcaatggcgaatgtgtgtgtcggtgcagaatctcacccaagtgtgaaagtttctaagcacagattagatgcacgtttcacgtcggttgaagaaaccatcgccctatcgactatgtatgcggcaaaccacctagaaggtgttaaagcgattatcgctttaacagagtcaggtgcgacacctaaactgatgtcgcgtatcagttcatctttaccaatccttggcctatctcgccatgacacaacactggcgaagatggctctgtaccgtggtgtactaccgatttacttcgactcaacgatctatccagccgatgagcttgcacaaaaagcattggaatcattaaccaaagcgggttacttgcacagcggtgacttagtgttaatgaccaaaggtgatgcgatggaaaccatcggtggcacgaacacttgtaaagtgctgattgtcgcttaa

SEQ ID NO: 172 - protein, 479 aa, Shewanella oneidensis MR-1
MFRRTKIVTTLGPATDRDDNLRRIIAAGANVVRLNFSHGSPEDHLKRATQAREIAKELGVHVAILGDLQGPKIRVSTFKDNKKIQLKLGQTYILDAELAKGEGDENQVGIDYKQLPDDVNVGDILMLDDGRVQLRVERVEGRKVHTTVTVAGPLSNNKGINKQGGGLSAAALTEKDKADILTAAMIQVDYLAVSFPRSGADLEYARSLAQQAGSNALIVAKVERAEAVASDEAMDDVILASDVVMVARGDLGVEIGDAALVAVQKKLIARSRQLNKIVITATQMMESMISSPMPTRAEVMDVANAVLDGTDAVMLSAETAAGDFPEETVKAMANVCVGAESHPSVKVSKHRLDARFTSVEETIALSTMYAANHLEGVKAIIALTESGATPKLMSRISSSLPILGLSRHDTTLAKMALYRGVLPIYFDSTIYPADELAQKALESLTKAGYLHSGDLVLMTKGDAMETIGGTNTCKVLIVA

SEQ ID NO: 173 - DNA, 1539 bp, Drosophila melanogaster
  CDS (1)..(1539)
atggccgcaggagctgatacccaactggagcacatgtgccgtctgcagttcgactcgccagtgccccatgtgcgtctgtccggaatcgtgtgcaccatcggacctgcctccagcagcgtggagatgctggagaagatgatggccaccggcatgaacatcgcgcgcatgaacttctctcacggatcgcacgagtaccatgccgccaccgtggccaatgtgcgccaggcggtgaagaactactcggccaagctgggctacgaacaccccgtggccattgccctggacaccaaggggcccgagatccgtaccggtctgatcggaggcagcggcaccgccgagattgagctgaagaagggcgagaagatcaagctgaccaccaacaaggaattcctggagaagggctctctggagattgtgtacgtggactacgagaacattgtcaatgtggtgaagcccggcaaccgggtgttcgtcgatgacggtctgatctcactgattgtccgcgaggtaggcaaggattccctcacctgcgaggtggagaacggcggctctctgggttcccgcaagggtgtgaacctgccaggcgtgcccgtcgatctgcctgccgtctccgagaaggataagagcgatctgctgttcggtgtggagcaggaagtggacatgatctttgcttcgttcatccgcaacgccgctgctttgaccgagatccgtaaggttcttggcgagaagggcaagaacatcaagatcatttccaagatcgagaaccagcagggcatgcacaacctggacgagatcatcgaggccggtgatggcattatggtggcccgtggagatctgggtattgagattcccgccgagaaggtgttcctcgcccagaaggccatgattgcccgctgcaacaaggctggcaagcctgtgatctgcgccactcagatgttggagtcaatggtgaagaagccacgtcccactcgcgctgagatctctgatgtggccaacgctgtgctcgatggtgctgattgcgtcatgttgtctggtgagaccgccaagggcgagtacccgctggagtgcgtcctgaccatggccaagacctgcaaggaggccgaggctgccctctggcaccagaacctctttaacgacttggttcgcggcgctggtaccatcgatgcctctcacgcggctgccatcgctgccgttgaggctgccaccaaggccaaggcctccgccatcgtggtgatcaccaccagcggcaagtcggccttccaggtgagcaagtaccgcccacgctgccccatcatcgcggtcacccgtttcgcgcagaccgcccgacaggcccatctctaccgtggactggtgccactcatctacaaggagcccggtcttggtgactggctgaaggacgtggacgtgcgcgtgcagttcggtctgcaggtcggaaagaagaacggcttcatcaagaccggcgattccgtcgtggtggttaccggctggaagcagggctccggcttcaccaacaccatccgcattgtcaccgtcgaataa

SEQ ID NO: 174 - protein, 512 aa, Drosophila melanogaster
MAAGADTQLEHMCRLQFDSPVPHVRLSGIVCTIGPASSSVEMLEKMMATGMNIARMNFSHGSHEYHAATVANVRQAVKNYSAKLGYEHPVAIALDTKGPEIRTGLIGGSGTAEIELKKGEKIKLTTNKEFLEKGSLEIVYVDYENIVNVVKPGNRVFVDDGLISLIVREVGKDSLTCEVENGGSLGSRKGVNLPGVPVDLPAVSEKDKSDLLFGVEQEVDMIFASFIRNAAALTEIRKVLGEKGKNIKIISKIENQQGMHNLDEIIEAGDGIMVARGDLGIEIPAEKVFLAQKAMIARCNKAGKPVICATQMLESMVKKPRPTRAEISDVANAVLDGADCVMLSGETAKGEYPLECVLTMAKTCKEAEAALWHQNLFNDLVRGAGTIDASHAAAIAAVEAATKAKASAIVVITTSGKSAFQVSKYRPRCPIIAVTRFAQTARQAHLYRGLVPLIYKEPGLGDWLKDVDVRVQFGLQVGKKNGFIKTGDSVVVVTGWKQGSGFTNTIRIVTVE

SEQ ID NO: 175 - DNA, 1455 bp, Pseudomonas putida KT2440
  CDS (1)..(1455): transl_table=11
atgagcatccgccgcaccaaaatcgtcgccacccttggccccgccagcaactcgccggaagtgatcgaacaactgatcctcgccggcctggacgtggcacgtctgaacttctcccacggcacgccggacgagcacaaggcccgcgcgcgcctgatccgtgacatcgccgccaagaatggccgccatgttgcactgctgggcgacctgcagggtccgaagatccgcatcgccaagttcgccaacaagcgcatcgaactgaagatcggtgacaagttcaccttctccaccgcccacccgctgaccgaaggcaaccaggacatcgtcggtatcgactaccccgacctggtcaaggactgcggcgttggtgacgaactgctgctcgacgatggccgcgtggtcatgcgcgtcgaaaccgccactgcagatgccctgcactgcgtggtgatcatcggtggcccactgtcggaccacaaaggcatcaaccgtaaaggtggcggcctgaccgcaccggccctgaccgaaaaagacaaggccgacatcaaactggctgcggaaatggacctggactacctggccgtatccttcccgcgtgacgccagcgatatggaatacgcgcgcaagctgcgtgacgaagccggcggcagcgcctggctggtagccaagatcgaacgcgccgaagcggtggccgatgacgagaccctcgacaagctgatcgccgcctccgacgctgtgatggttgcccgtggtgacctgggcgtggaaatcggcgacgccgagctgatcgctatccagaagaagatcatccagcacgcccgccgcaacaacaaggccgtgatcgtggcgacccagatgatggagtcgatgatccagaacccgatgccgacccgcgcggaagtgtccgacgtggccaacgccgtgctggacaacaccgatgcggtgatgctgtcggccgaaagcgccgccggttcctacccgatcgaagctgtccaggccatggcacgcatctgcctgggtgccgaaaagcacccgaccagccagaagtccagccatcgcctgcacaccaccttccagcgctgcgacgaaagcatcgccttggcggccatgtacactgccaaccacttcccgggcgtaaaggcgatcatcgccctgaccgaaagcggctacaccccgctgatcatgtcgcgcctgcgttcgcatgtaccgatcttcgccctgtcgccgcaccgcgccacccaggcgcgcgcctcgatgttccgtggcgtgtacccgattgccttcgacccggccgcgctgccggccgataaggtgagccaggcggcggtcgacgaactgctcaaacgtggcctggtggagcaaggtgactgggtgatcctgaccaagggtgacagctaccacaccatcggtggcaccaatggcatgaagatcctgcacgtcggtgatccgctggtcggttga

SEQ ID NO: 176 - protein, 484 aa, Pseudomonas putida KT2440
MSIRRTKIVATLGPASNSPEVIEQLILAGLDVARLNFSHGTPDEHKARARLIRDIAAKNGRHVALLGDLQGPKIRIAKFANKRIELKIGDKFTFSTAHPLTEGNQDIVGIDYPDLVKDCGVGDELLLDDGRVVMRVETATADALHCVVIIGGPLSDHKGINRKGGGLTAPALTEKDKADIKLAAEMDLDYLAVSFPRDASDMEYARKLRDEAGGSAWLVAKIERAEAVADDETLDKLIAASDAVMVARGDLGVEIGDAELIAIQKKIIQHARRNNKAVIVATQMMESMIQNPMPTRAEVSDVANAVLDNTDAVMLSAESAAGSYPIEAVQAMARICLGAEKHPTSQKSSHRLHTTFQRCDESIALAAMYTANHFPGVKAIIALTESGYTPLIMSRLRSHVPIFALSPHRATQARASMFRGVYPIAFDPAALPADKVSQAAVDELLKRGLVEQGDWVILTKGDSYHTIGGTNGMKILHVGDPLVG

SEQ ID NO: 177 - DNA, 1416 bp, Pseudomonas putida KT2440
  CDS (1)..(1416): transl_table=11
atgacgcctgataaaaaagttaagatccttgccacccttggccctgcgatcaacggcatcgacgatatccgccagctggtcgaagccggggtgaacatcttccgcctcaacttcagccacggcgaacatgccgaccacgccctgcgctaccagtggatccgcgaagtcgagcaacagctgaactacccgctgggcatcctcatggacctgcaagggccgaagctgcgcgttggccgcttcgccgaaggcaaggtgcagttgcaacgcgggcaggccctgcgcctggatctggacaagaccccgggcgacagccgccgggtcaacctgccgcaccccgaaatcatcgccgccctcgaacccggcatggacctgctgctggacgacggcaagctgcgcctgcgcgtgaccgccaagcacagcgacgccatcgacaccgaggtgctgaatggtggcgagctttccgaccgcaagggcgtcaacgtaccgcaagcggtgctcgacctctccccgctcaccgaaaaagaccgccgcgacctggcctttggcctggagctgggtgtggactgggtcgccctgtcgttcgtgcagcgccctgaggacatcgtcgaagcgcgccagctgattggcgaccgcgcctacctgatggccaaaatcgagaaaccatcggcagtcgagcaactgcaagccatcgccgagctggcagacgcgatcatggtggcccgtggtgacctgggcgtggaagtaccggccgagagcgtgccgcagatccagaagcgcatcatcggcacctgccgccagctaggcaaacccgtggtggtggccacgcagatgctcgagtcgatgcgtttctcgccagcgccaacccgcgccgaagtcacggacgtggccaacgcggtggccgaaggtgccgatgcagtgatgctgtcggccgaaaccgcctcgggtgattacccgctggaagccgtgcagatgatgagcaagatcatccgccaggttgagaacggcccggactaccaggcccagctcgacgtcggccggccaaaggccgaagccaccgtgtcggatgccatcagctgcgccatccgccgcatcagcggcatcctgccagtggcggtgctggtcaactacagcgagtcgggtgcctcgaccctgcgcgcggcacgtgaacggccacgggcaccgatcctcaacctgacgccgaacctgaacaccgcgcgccgcctgagcgtggcttggggtgtgcattcggtggtcaacgaccgcctgcgtcaggtcgacgaggtggtttccaccgccctggagattgcccaggcgcaaggcatggccagccgtggcgacacgctgctgatcaccgctggcgtgcctttcggcaagccgggtacgactaacacgctgcggatcgagactttgatctga

SEQ ID NO: 178 - protein, 471 aa, Pseudomonas putida KT2440
MTPDKKVKILATLGPAINGIDDIRQLVEAGVNIFRLNFSHGEHADHALRYQWIREVEQQLNYPLGILMDLQGPKLRVGRFAEGKVQLQRGQALRLDLDKTPGDSRRVNLPHPEIIAALEPGMDLLLDDGKLRLRVTAKHSDAIDTEVLNGGELSDRKGVNVPQAVLDLSPLTEKDRRDLAFGLELGVDWVALSFVQRPEDIVEARQLIGDRAYLMAKIEKPSAVEQLQAIAELADAIMVARGDLGVEVPAESVPQIQKRIIGTCRQLGKPVVVATQMLESMRFSPAPTRAEVTDVANAVAEGADAVMLSAETASGDYPLEAVQMMSKIIRQVENGPDYQAQLDVGRPKAEATVSDAISCAIRRISGILPVAVLVNYSESGASTLRAARERPRAPILNLTPNLNTARRLSVAWGVHSVVNDRLRQVDEVVSTALEIAQAQGMASRGDTLLITAGVPFGKPGTTNTLRIETLI

SEQ ID NO: 179 - DNA, 1629 bp, Escherichia coli CFT073
  CDS (1)..(1629): transl_table=11
atggtttcagcactttggactgtagaactcaacgactcaaaaacaggcactcacgttgggctgagacacaagcacacattcctctgcacgctttttcgatgtcacctatccttagagcgaggcacaaccactttcgtaataccggattcgctttccggcagtgcgcccagaaagcaagtttctcccatccttctcaacttaaagactaagactgtcatgaaaaagaccaaaattgtttgcaccatcggaccgaaaaccgaatctgaagagatgttagctaaaatgctggacgctggcatgaacgttatgcgtctgaacttctctcatggtgactatgcagaacacggtcagcgcattcagaatctgcgcaacgtgatgagcaaaactggtaaaaccgccgctatcctgcttgataccaaaggtccagaaatccgcaccatgaaactggaaggcggtaacgacgtttctctgaaagcgggtcagtcctttactttcactactgataaatctgttatcggcaacagcgaaatggttgcggtaacgtatgaaggtttcactactgacctgtctgttggcaacaccgtactggttgacgacggtctgatcggtatggaagttaccgccattgaaggtaacaaagttatctgtaaagtgctgaacaatggcgacctgggcgaaaacaaaggtgtgaacctgcctggcgtttccattgccctgccagcactggctgaaaaagacaaacaggacctgatctttggttgcgaacaaggcgtagactttgttgctgcttcctttattcgtaagcgttctgacgttatcgaaatccgtgagcacctgaaagcgcacggcggcgaaaacatccacatcatctccaaaatcgaaaaccaggaaggcctcaacaacttcgacgaaatcctcgaagcctctgacggcatcatggttgcgcgtggcgacctgggtgtagaaatcccggtagaagaagttatcttcgcccagaagatgatgatcgaaaaatgtatccgtgcacgtaaagttgttatcactgcgacacagatgctggattccatgatcaaaaacccacgcccgactcgcgcagaagccggtgacgttgcaaacgccatcctcgacggtactgacgcagtgatgctgtctggtgaatccgcaaaaggtaaatacccgctggaagcggtttctatcatggcgaccatctgcgaacgtaccgaccgcgtgatgaacagccgtctcgagttcaacaatgacaaccgtaaactgcgtattaccgaagcggtatgccgtggtgccgttgaaactgctgaaaaactggatgctccactgatcgtggttgctactcagggcggtaaatctgctcgcgcagtacgtaaatacttcccggatgccaccatcctggcactgaccaccaacgaaaaaacggctcaccagttagtactgagcaaaggtgttgtgccgcagctggttaaagagatcacatctactgatgacttctaccgtctgggtaaagaactggctctgcagagcggtctggcacacaaaggtgatgtcgtagttatggtttctggtgcactggtaccgagcggcactactaacaccgcatctgttcacgtcctgtaa

SEQ ID NO: 180 - protein, 542 aa, Escherichia coli CFT073
MVSALWTVELNDSKTGTHVGLRHKHTFLCTLFRCHLSLERGTTTFVIPDSLSGSAPRKQVSPILLNLKTKTVMKKTKIVCTIGPKTESEEMLAKMLDAGMNVMRLNFSHGDYAEHGQRIQNLRNVMSKTGKTAAILLDTKGPEIRTMKLEGGNDVSLKAGQSFTFTTDKSVIGNSEMVAVTYEGFTTDLSVGNTVLVDDGLIGMEVTAIEGNKVICKVLNNGDLGENKGVNLPGVSIALPALAEKDKQDLIFGCEQGVDFVAASFIRKRSDVIEIREHLKAHGGENIHIISKIENQEGLNNFDEILEASDGIMVARGDLGVEIPVEEVIFAQKMMIEKCIRARKVVITATQMLDSMIKNPRPTRAEAGDVANAILDGTDAVMLSGESAKGKYPLEAVSIMATICERTDRVMNSRLEFNNDNRKLRITEAVCRGAVETAEKLDAPLIVVATQGGKSARAVRKYFPDATILALTTNEKTAHQLVLSKGVVPQLVKEITSTDDFYRLGKELALQSGLAHKGDVVVMVSGALVPSGTTNTASVHVL

SEQ ID NO: 181 - DNA, 1413 bp, Vibrio vulnificus CMCP6
  CDS (1)..(1413): transl_table=11
atgaaaaagaccaaaatcgtatgtacgattggcccaaaaactgagtctgtagagaaactgactgaactagtcaactcaggtatgaacgtaatgcgcctgaacttttctcacggtgactacgtagagcacggcactcgtatcgcgaacttccgccaagtaatggaaaacacaggtaagcaacttgctatcttactagacactaaaggtccagaaatccgcactatcaaactagaaaacggcgacgacgttgatctagtagctggtcaagaattcactttcacgactgatacttctgttgttggtaacaaagacatcgtagcagtaacttacccaggttttgctgcggatctatctgctggtaacactatcctagttgacgatggtctaatcgagatggaagttatcgcaacgactgcgactgaagttaagtgtaaagtactgaacaacggtgctctaggcgaaaacaaaggtgttaacctaccaggcgtttctgtaaacctacctgcactatctgaaaaagacaaaaacgaccttaaatttggttgtgagcaaggcgttgacttcgttgcagcatctttcatccgtaaagcatctgacgtaaaagaaatccgtgaagttctagcagcaaacggcggcgcgaacattcagatcatttctaagattgaaaaccaagaaggtgttgataacttcgacgaaatcctagagctttctgacggtatcatggttgctcgtggtgacctaggtgtagaaatccctgcagaagaagttatcttcgcacagaagatgatgatcgaaaaatgtaaccgcgcacgtaaagtggttatcactgcaactcaaatgctagattctatgatcaagaacccacgtccaactcgtgctgaagcgggtgacgttgcgaacgcaatcatggatggtactgatgcagtcatgctttctggcgaaacagcgaaaggtaaataccctgttgaagcggtaactatcatggcgcaaatcgctaaccgtactgattctgtactaaaagcagagctaggctctcgtctagacagcccacgcctacgtatcactgaagcggtatgtaaaggtgcagtagacacagctgagaaactagcagcaccactgatcatcgttgcaactgaaggtggtaagtctgcacgctctgtacgtaagtacttcccaactgcaaacattcttgcgctaacgacgaacaagaagacagcagctcaacttgtactgactaaaggtgttacacctgttgttgttgattcaatcgacaacacggatgcgttctacgtaaccggtaaagagcttgctcttgaatctggcctaggtagcaaaggcgacatcgttgtgatggtatctggtgctcttgttgcatctggtacaacgaatactgcgtcagtacacgtactataa

SEQ ID NO: 182 - protein, 470 aa, Vibrio vulnificus CMCP6
MKKTKIVCTIGPKTESVEKLTELVNSGMNVMRLNFSHGDYVEHGTRIANFRQVMENTGKQLAILLDTKGPEIRTIKLENGDDVDLVAGQEFTFTTDTSVVGNKDIVAVTYPGFAADLSAGNTILVDDGLIEMEVIATTATEVKCKVLNNGALGENKGVNLPGVSVNLPALSEKDKNDLKFGCEQGVDFVAASFIRKASDVKEIREVLAANGGANIQIISKIENQEGVDNFDEILELSDGIMVARGDLGVEIPAEEVIFAQKMMIEKCNRARKVVITATQMLDSMIKNPRPTRAEAGDVANAIMDGTDAVMLSGETAKGKYPVEAVTIMAQIANRTDSVLKAELGSRLDSPRLRITEAVCKGAVDTAEKLAAPLIIVATEGGKSARSVRKYFPTANILALTTNKKTAAQLVLTKGVTPVVVDSIDNTDAFYVTGKELALESGLGSKGDIVVMVSGALVASGTTNTASVHVL

SEQ ID NO: 183 - DNA, 1755 bp, Clostridium tetani E88
  CDS (1)..(1755): transl_table=11
atgcaaaaaactaaaatggtgtttaccataggaccagctagtgatagcgaagaagtattaagtgagttaataaaagcaggaatgagtgcatcaaggcataacttttcacatgggacccatgaagaacataaaataaggattgatttaataagaaaattaagtgacaaatttaataagaatattgctgtaatattagacacaaaaggacctgaaataagaacaggagattttaaagataaaactgtacaattaaaagaaggaaataaattcactatatactgtggggaagaaattttaggagatgaaacaaagtgttctataacttataatgatttgcataatgatgtaaaaacaggagattccatactaatagatgatggacttgtaggattagaagttgaagaagtagagggaagtaaagtacattgtgtagttaaaaatagtggtgctgtaagtaaccataagggtgtaaatgtacctggagtagatgtttcattaccttcattaacagaaaaagataaaagtgatcttgaatttggatgtaaagtaggagtagattttattgcagcatcttttattagaaaaggttcagacgtattggaaataagaaaggttctagaagaaaacggcggtacagatatacaaatattttctaaaatagaaaatcaacaaggggtagaaaatatagatgaaataataaagttttctgatggaataatggtagctagaggagatatgggtgtagaattacaaatggaacaagtacctataattcaaaaaatgattatagagaaatgtaacaaagctggcaaacctgttatcacagctactcaaatgttagactctatgattagaaatccaagaccaacaagagcagaagtttcagatgtagccaatgctatatttgatggaactgatgcggtaatgttaagtggtgaaacagcaggaggaaaatatcctatagaagctgctaaagctatggctaagattgctagaactgcagaagaaacaatggattatgatgaaatatttaacagaaaaagagaagcgcgtgtattaagtgtggctaatgcgataagcatagcaacctgtacaacagcttcagagttaaatgcatctgctatattaacagctactcaaacaggatatacagctagagcagtttccaaatatagaccagcatgtcctattatagcgattacaccaagtaagaatgtagcaagaaagttagcattgagttggggtgtgttcccaatacttactactaaatttacatccacagatgctttaatagaaaactctgttgatatagcattgacagcagaatatataagaaaaggagatttggttgtaatagcagctggaatacctgtaagttattcaggaacaactaacatgctaaaggttcatgtagttggagatatccttgttcagggaagaggtgctggaaatagtgcaggttatggtatagctaaagttgtaaatagtacagaagaagcagaaagggttatagaaagtggagatatattagttgtaaaagatgcagatatagattatgtttctatactaaatagagtatcaggagttataactgaaagaggaggattgacttctcacttagcaatagaatgtataaccaatgaaataccatttatatgtggggcaggtggggcaacagatgtattaaaaagtggatatttcataaccatggatgtaaaaagaggaatagtatataacggtaggattactatataa

SEQ ID NO: 184 - protein, 584 aa, Clostridium tetani E88
MQKTKMVFTIGPASDSEEVLSELIKAGMSASRHNFSHGTHEEHKIRIDLIRKLSDKFNKNIAVILDTKGPEIRTGDFKDKTVQLKEGNKFTIYCGEEILGDETKCSITYNDLHNDVKTGDSILIDDGLVGLEVEEVEGSKVHCVVKNSGAVSNHKGVNVPGVDVSLPSLTEKDKSDLEFGCKVGVDFIAASFIRKGSDVLEIRKVLEENGGTDIQIFSKIENQQGVENIDEIIKFSDGIMVARGDMGVELQMEQVPIIQKMIIEKCNKAGKPVITATQMLDSMIRNPRPTRAEVSDVANAIFDGTDAVMLSGETAGGKYPIEAAKAMAKIARTAEETMDYDEIFNRKREARVLSVANAISIATCTTASELNASAILTATQTGYTARAVSKYRPACPIIAITPSKNVARKLALSWGVFPILTTKFTSTDALIENSVDIALTAEYIRKGDLVVIAAGIPVSYSGTTNMLKVHVVGDILVQGRGAGNSAGYGIAKVVNSTEEAERVIESGDILVVKDADIDYVSILNRVSGVITERGGLTSHLAIECITNEIPFICGAGGATDVLKSGYFITMDVKRGIVYNGRITI

SEQ ID NO: 185 - DNA, 1761 bp, Lactobacillus plantarum WCFS1
  CDS (1)..(1761): transl_table=11
atgaaaaaaaccaagattgtttcaacacttggtcctgccagcaccgatactgacactattgttaaattaatcgaagccggcgcaaatattttccgctttaacttttcacatggtgatcatgaagaacatttagatcgcttaaacaaagttcacgaagcagaaaagattacgggtaagaccgttggtatcatgcttgatactaagggtgctgaaattcggacgaccgttcaagctaacggaaaatctgaatacaagatcggtgacaaggttcgtatcaccatggatgattcattagatacgacccatgataagattgccgttacttacaagaacctctatgatgatgttcatgtaggtggccatgtcctctttgatgatggtttattagatatgaagatcgacgaaaaggacgaagctaaccgcgaattggttacaactgttcaaaacgccggcgttttaggctcacgtaagggtgttaacgctcctggcgtttcaatcaacttacctgggatcactgaaaaagactcaagtgatattcgctttggtttggatcatgaaatcaactacatcgctgcttcattcgttcgtaagccacaagatgtcttagacattcgtgaattacttgaagaaaagcacatggaacacgttcaaatcttccctaagatcgaatcacaagaaggtatcgacaacgccgatgaaattcttaaggtttgtgatggtttgatggttgctcgtggtgacatgggtgttgaaattcctgctgaaaatgtgccattggtacaaaagagtttaatcaagaagtgtaatgctttaggtatgcctgttatcacggctactcaaatgttagactcaatgcaagaaaacccacgtcctactcgtgccgaagcttctgacgttgccaacgctgtctttgatggtactgacgcaacgatgctttctggtgaaagtgctaacggtctttaccctgttgaatctgttgccatgatggctaagattgacgaaaaggctgaaaacactttggctgaaaacggtacgttacaattaaaccgtttcgacaagactagtgttactgaaacaatcggtattgcgattgctcgggcagctaagaacttgaacattaagacgattgttgctgcgactgaatctggctacactgctaagatgatttcgaagtaccgtccaaatgctgatatcttagcaatcacttttgacgaacggactcaacgtggcttaatggttaactggggtgttcaaccaatcgtggctgaaaaaccagaaaccactgatgacatgtttgatttagctgcttctaaggctgttgaacttggctttgccaaggaaggcgacttaatcttgattactgccggtgtgccagttggcgaacgcggtacgactaacatcatgaagatccaattaattggttctaagttagctgatggtcaaggtgtcggtgatgaaacggttatcggtaaagccgtaatcgcaacgtctgctcaagaagctatcgacaaggccgttgaaggtggcgtcttagttactaagacgactgacaaagactacttaccagcaatcgaaaagtctagtgctttagttgttgaaaacggtggtttaacttcacacgctgctgttgttggtatctcaatgggaattcctgttatcgttggtgttaaggacgctactagtgttattgctgatggtcaattgatcacagttgattcacgtcgtggccttgtataccgcggtgcttcaaacgccctttaa

SEQ ID NO: 186 - protein, 586 aa, Lactobacillus plantarum WCFS1
MKKTKIVSTLGPASTDTDTIVKLIEAGANIFRFNFSHGDHEEHLDRLNKVHEAEKITGKTVGIMLDTKGAEIRTTVQANGKSEYKIGDKVRITMDDSLDTTHDKIAVTYKNLYDDVHVGGHVLFDDGLLDMKIDEKDEANRELVTTVQNAGVLGSRKGVNAPGVSINLPGITEKDSSDIRFGLDHEINYIAASFVRKPQDVLDIRELLEEKHMEHVQIFPKIESQEGIDNADEILKVCDGLMVARGDMGVEIPAENVPLVQKSLIKKCNALGMPVITATQMLDSMQENPRPTRAEASDVANAVFDGTDATMLSGESANGLYPVESVAMMAKIDEKAENTLAENGTLQLNRFDKTSVTETIGIAIARAAKNLNIKTIVAATESGYTAKMISKYRPNADILAITFDERTQRGLMVNWGVQPIVAEKPETTDDMFDLAASKAVELGFAKEGDLILITAGVPVGERGTTNIMKIQLIGSKLADGQGVGDETVIGKAVIATSAQEAIDKAVEGGVLVTKTTDKDYLPAIEKSSALVVENGGLTSHAAVVGISMGIPVIVGVKDATSVIADGQLITVDSRRGLVYRGASNAL

SEQ ID NO: 187 - DNA, 1422 bp, Tropheryma whipplei str. Twist
  CDS (1)..(1422): transl_table=11
ttgtttatgcgtagggccaagattgttgttactctcggtccggcagtatcagatcttgattctgtgagagatcttatatccgctggtgccgacgtctttcgcatgaatctcagccacggatcgttggattttcacagggaggtatttctgaatgttaggacggctgctgctgagctagacaggcatattgctatatttgctgatcttcagggtccaaaaatacgtttagggcgttttgcttctgggccgtataccctacaagagggtgatatctttacaatcacaaccgagcaggtgttgggaacgaaagagctttccagcacaactttgccgacattaccagataatgtctcagagggggatttgcttttaattgatgatggcaaagttgccctgagggcgattgggaatgacggggttcggatcactacacgtgttgaagttccgggaaaggtctcgaataataagggtattaaccttccgggtgttggagttaaagttccggccttatctgaaaaggatattgactcactccgctgggccctttctcttccagttgatatgattgccttgagttttgtgcgctgcgcatcagatgtggatgctgtgcacaaggttatggatgaagagggtattcgccttcctgttattgcaaagatagaaaagcctcaagcagtatctgccatagaggagattgcactgcggtttgatgcgattatggtagcaaggggtgatcttggggttgaactgccgcttgaagatgtgccggtagcccagaaggaaattgttaaggttgcacgcaggtttgctcggccggttattatcgcaacccagatgcttgagtcaatgatctcttcctcgcggcccaccagggctgaggcgagtgatgttgcaaacgctgttcttgatggagccgatgcactgatgctaagcggtgagacaagtgttggtgagtggcccgttgaagctgtgcgggtcatgtcgagggttattgaaaaaacagaggaaaaggcaatttcacaaatagtcggttttggtacaactccaaaaacacagggtggtgccctcgcctgggccgcagcaaaggttgctgagtttatcgatgcgcgttatctgtgtgtctttagtgaaagtggagattcaataagacgggtgtcgcgactgcgtcatgatatacccattattggatttagtccggttgggtccgttgtccgacaggtctctctctcttggggtgttcgatgttttttgatagagaggctccatcagactgatcagatgatgcgtaaggctgaacatgttctcctcacaaacaatttggccgagattggagagaagattgtgattatttcaggatcaccagttggggtgccggggagtacaaaccatatgagaatccacgagcttggaagcacgtcctag

SEQ ID NO: 188 - protein, 473 aa, Tropheryma whipplei str. Twist
MFMRRAKIVVTLGPAVSDLDSVRDLISAGADVFRMNLSHGSLDFHREVFLNVRTAAAELDRHIAIFADLQGPKIRLGRFASGPYTLQEGDIFTITTEQVLGTKELSSTTLPTLPDNVSEGDLLLIDDGKVALRAIGNDGVRITTRVEVPGKVSNNKGINLPGVGVKVPALSEKDIDSLRWALSLPVDMIALSFVRCASDVDAVHKVMDEEGIRLPVIAKIEKPQAVSAIEEIALRFDAIMVARGDLGVELPLEDVPVAQKEIVKVARRFARPVIIATQMLESMISSSRPTRAEASDVANAVLDGADALMLSGETSVGEWPVEAVRVMSRVIEKTEEKAISQIVGFGTTPKTQGGALAWAAAKVAEFIDARYLCVFSESGDSIRRVSRLRHDIPIIGFSPVGSVVRQVSLSWGVRCFLIERLHQTDQMMRKAEHVLLTNNLAEIGEKIVIISGSPVGVPGSTNHMRIHELGSTS

SEQ ID NO: 189 - DNA, 1413 bp, Vibrio parahaemolyticus RIMD 2210633
  CDS (1)..(1413): transl_table=11
atgaaaaagaccaaaatcgtttgtacgattggccctaaaactgaatctgtagagaagctaactgaactagtaaacgcaggcatgaacgtaatgcgtcttaacttctctcacggtgactacgaagaacacggcactcgtatcgcgaacttccgcaaagtaatggaagctactggcaaacaactagcaatccttctagatactaaaggtccagaaatccgcactatcaaactagaaggcggtaacgacgttgatctagtagctggtcaagaattcactttcacaactgacacttcagttgtaggtaacaaagacaaagttgcagtaacttacgctggcttcgcagctgacctaaacgttggtaacactatcctagtagacgacggtctaatcgagatggaagttatcgcaacaactgacactgaagttaaatgtaaagttcttaacaacggtgctctaggcgaaaacaaaggtgttaaccttcctggcgtttctgtaaacctacctgctctatctgaaaaagataagaacgaccttaaattcggttgtgagcaaggcgttgatttcgtagctgcatctttcatccgtaaagcttctgacgttcaagaaatccgtgaagttctagctgcaaacggcggcgagaacatccacatcatctctaagatcgaaaaccaagaaggtgttgataacttcgatgagatcctagaactttctgacggcatcatggttgctcgtggcgacctaggtgttgaaatcccagctgaagaagtaatcttcgctcagaaaatgatgatcgagaagtgtaaccgtgcacgtaagatggttatcactgcaactcaaatgcttgattctatgatcaacaacccacgtcctactcgtgcggaagcaggcgacgttgcaaacgcagtaatggacggcacagacgcagtaatgctttctggcgaaacagcaaaaggtaaataccctgttgaagcggtaactatcatggctcaaatcgctaagcgtactgactctgtacttaaagctgaactaggttctcgtctagacagcccacgtctacgcatcactgaagcagtatgtaaaggcgcagtagacacagctgaaaaactggctgctccactgatcgttgttgcaactgaaggcggtaagtctgcacgttcagtacgtaagtacttcccaactgcaaacatcctagcgctaacaactaacaagaaaactgcagcacaactagttctaactaagggtgttactccagttgttgttgacgctatcgaaagcactgacgcattctacgtagcaggtaaagaacttgctctagaatctggtctaggtaacaaaggcgatatcgtagtaatggtttctggtgctctagtcgcttcaggtactacgaacacagcttctgtacacgtactataa

SEQ ID NO: 190 - protein, 470 aa, Vibrio parahaemolyticus RIMD 2210633
MKKTKIVCTIGPKTESVEKLTELVNAGMNVMRLNFSHGDYEEHGTRIANFRKVMEATGKQLAILLDTKGPEIRTIKLEGGNDVDLVAGQEFTFTTDTSVVGNKDKVAVTYAGFAADLNVGNTILVDDGLIEMEVIATTDTEVKCKVLNNGALGENKGVNLPGVSVNLPALSEKDKNDLKFGCEQGVDFVAASFIRKASDVQEIREVLAANGGENIHIISKIENQEGVDNFDEILELSDGIMVARGDLGVEIPAEEVIFAQKMMIEKCNRARKMVITATQMLDSMINNPRPTRAEAGDVANAVMDGTDAVMLSGETAKGKYPVEAVTIMAQIAKRTDSVLKAELGSRLDSPRLRITEAVCKGAVDTAEKLAAPLIVVATEGGKSARSVRKYFPTANILALTTNKKTAAQLVLTKGVTPVVVDAIESTDAFYVAGKELALESGLGNKGDIVVMVSGALVASGTTNTASVHVL

SEQ ID NO: 191 - DNA, 1758 bp, Enterococcus faecalis V583
  CDS (1)..(1758): transl_table=11
atgaaaaaaacgaaaatcgtatgtacgattggaccagctagtgaatccgttgatatgctagtaaacttaattaatgcaggtatgaatgtttgccgtttgaacttttcacatggtgactacgaagagcatggtgctcgtattaaaaacattcgtgaagctgtaaaaattacagggaaacgcgtagcgatcttactagatacaaaaggtcctgaaatccgcacaaatgacatggaaaatggcgcaatcacaatgaaaattggtgactcagtacgtatttctatgacagaagttttaggaacaaatgaaaaattctcaatcacttatccagaattaatcaatgatgtaaacgtaggttcacacattcttttagatgatggtttaatcgatttagaagtaactgatatcgaccgtgatgcaaacgaaatcgtaacagttgttaaaaacgaaggcgtcttgaaaaacaaaaaaggcgttaacgtaccaggcgtttctgtaaacttaccagggatcactgaaaaagatgctaacgatatccgtttcggaattggtcaaggaattgactttatcgcagctagcttcgttcgtcgtgcttctgacgttttagaaatcactaaaattttagaagaagaaaacgcaacacacatccaaatcattcctaaaatcgaaaaccaagaaggtatcgataatatcgatgaaatcttaaaagtttctgatggtttaatggttgctcgtggtgacatgggtgttgaaattccaacagaagatgttccagttgtccaaaaagctttaattaaaaaatgtaatgctttaggtaaaccagttatcactgcaacacaaatgttagattcaatgcaacgtaacccacgtccaacacgtgcggaagcaaatgacgtagcaaacgcaatctacgatggaacagatgcagtaatgttatcaggcgaaactgcagcaggggattacccattagaagctgttcaaacaatggctcgtattgcagttcgtacagaagaaacattagttaaccaagattcattcgcattgaaattatatagcaaaacagatatgactgaagcaatcggacaatctgttggccatacagcacgtaacttgggtatccaaacaatcgttgcggcaacagaatcaggccatacagcacgtatgatctctaaataccgtccaaaagcacatatcgttgcaattacgttctcagaacaaaaagcacgtagcttgtcattatcatggggtgtttacgcaacagttgctgacaaaccatcaagcacagatgaaatgtttaatttagcttcaaaagtatcacaagaagaaggttatgcttcagaaggtgatttaatcattatcactgctggtgttccagttggcgaaaaagggacaacaaacttaatgaaaattcaaatgatcggttctaaattagttcaaggtcaaggtgtcggcgaagaagcaattattgcaaaagccgttgtggcagcaactgctgaagaagcagttgctaaagcgactgaaggagctattttagttacaaaaacaacagataaagaatacatgccagcaattgaaaaagcatcagcattagttgttgaagaaggtggtttaacttctcatgcagctgttgtagcgattgcgcaaaatattccagttatcgtaggtgctgcagatgcaacatcattaattaataatgacgaagtgattactgttgatcctcgtcgtggtattgtttaccgcggagcaacaacagctatctaa

SEQ ID NO: 192 - protein, 585 aa, Enterococcus faecalis V583
MKKTKIVCTIGPASESVDMLVNLINAGMNVCRLNFSHGDYEEHGARIKNIREAVKITGKRVAILLDTKGPEIRTNDMENGAITMKIGDSVRISMTEVLGTNEKFSITYPELINDVNVGSHILLDDGLIDLEVTDIDRDANEIVTVVKNEGVLKNKKGVNVPGVSVNLPGITEKDANDIRFGIGQGIDFIAASFVRRASDVLEITKILEEENATHIQIIPKIENQEGIDNIDEILKVSDGLMVARGDMGVEIPTEDVPVVQKALIKKCNALGKPVITATQMLDSMQRNPRPTRAEANDVANAIYDGTDAVMLSGETAAGDYPLEAVQTMARIAVRTEETLVNQDSFALKLYSKTDMTEAIGQSVGHTARNLGIQTIVAATESGHTARMISKYRPKAHIVAITFSEQKARSLSLSWGVYATVADKPSSTDEMFNLASKVSQEEGYASEGDLIIITAGVPVGEKGTTNLMKIQMIGSKLVQGQGVGEEAIIAKAVVAATAEEAVAKATEGAILVTKTTDKEYMPAIEKASALVVEEGGLTSHAAVVAIAQNIPVIVGAADATSLINNDEVITVDPRRGIVYRGATTAI

SEQ ID NO: 193 - DNA, 1434 bp, Coxiella burnetii RSA 493
  CDS (1)..(1434): transl_table=11
atgttacgcagcaccaaaattattgccactttagggccggcaaccgatgatctttctatacttgaggaaattattcacgagggggttgacattattcgcttgaatttctcgcacggcactcacgagaaacacaaacaacggattgaaatggttcgcaaggcggcgaaaaaacaagaacgggtaatcggaattttagcggatttgcaagggcctaaaattcgcatatccagttttaaaactggcaaaattaatttaaaaaaaggcgagttatttattttggacgccgggctcccgcccgaagaaggtacagagaaaagcgttgggattgattataaaaatttgccgaaggacgtaaaagccgaagatattttattgttggatgatgggcgccttaccttaaaggtgcaaaacgtcaagggagaacaaattatttgtcgcgttgttgaaggcggcgcgttgtcagatcacaaaggcattaatcgattaggcggcgggctttcagcggaagcgatgacggaaaaagatatcaacgatttgaaatttgcagttgattttgatgtggattatgtggctatttcatttccccgcgatgcgcaggatattttaaaagccaagcatctggtgcaaggttacaaaggaaaggcgggtatcattgctaaaattgaacgtactgaagcggttaaaaatatcgacgccattattgaagcgagcgacggcgtcatggtggcgcgaggcgatttagcggtcgaaattggcgatgcacaagtgcctttggtgcaaaaagatattattcatcgcgctcgttccatggataaacccgtcattatcgcgactcaaatgatggagtccatgattcacgcgaccgtgcccacacgggctgaagtgtctgatgtggcaaatgccgtactcgataataccgatgccgttatgttgtcagcggaaaccgctgttggcgattatcccgttttagccgtagccgcgatggcgcgaacgtgcgttgtttcggaatctcagccgcgttcgcatatttctcgtcatcgcgttgaatgccgtttcaaacggattgatgaagccattgcgatggcaactatgtatgcagctaatcatctcgatatcaaagccatcatcaccttaaccgaatcgggaatcacccccttgtggatgtcgcgtatccgtacggctatccctatttatggtctcagtcgattcgataaatcgctcgggcgaatgacactttatcgcggtgtttaccctattaaatttgatccaactcaatacacgcgcgacgaaattaatgtaaaagccgttgaaacgttgcaaagtcaggacttattgaaaaacggcgatttagtggtcttaaccaaaggcgattacatgggcgtgggtggcgggtctaacgcaatgaaaattatggtggtggggaaagtcgtttaa

SEQ ID NO: 194 - protein, 477 aa, Coxiella burnetii RSA 493
MLRSTKIIATLGPATDDLSILEEIIHEGVDIIRLNFSHGTHEKHKQRIEMVRKAAKKQERVIGILADLQGPKIRISSFKTGKINLKKGELFILDAGLPPEEGTEKSVGIDYKNLPKDVKAEDILLLDDGRLTLKVQNVKGEQIICRVVEGGALSDHKGINRLGGGLSAEAMTEKDINDLKFAVDFDVDYVAISFPRDAQDILKAKHLVQGYKGKAGIIAKIERTEAVKNIDAIIEASDGVMVARGDLAVEIGDAQVPLVQKDIIHRARSMDKPVIIATQMMESMIHATVPTRAEVSDVANAVLDNTDAVMLSAETAVGDYPVLAVAAMARTCVVSESQPRSHISRHRVECRFKRIDEAIAMATMYAANHLDIKAIITLTESGITPLWMSRIRTAIPIYGLSRFDKSLGRMTLYRGVYPIKFDPTQYTRDEINVKAVETLQSQDLLKNGDLVVLTKGDYMGVGGGSNAMKIMVVGKVV

SEQ ID NO: 195 - DNA, 1446 bp, Chlamydophila caviae GPIC
  CDS (1)..(1446): transl_table=11
atgatcgcaagaacgaaaatcatttgtactataggtccagcaacaaacactccagaaatgcttgagaagcttttagatgcgggtatgaatgttgctaggttgaattttagtcatggtactcatgaaagtcatggtgagacaattcgtcttcttaaggaattgcgagaaaagaaaggggctcctttagcgattatgttggataccaagggtccagaaattcgtttagggaatattcccacaccaattcaggtatctcgaggtcagaaaattaccttagtaggaaaagaggtagagggatctgccgaaggtggcgttaccttacatcctcaatgtgttttcccttatgtgcgtgagggtgttgatgtcttgatagacgatggttatattcaagctgttgtgacctctgttggtgaggatcatctagaattagagtttattaactctggagaattaaagtcgcacaagtctttaagcataagagaaattgatttagctcttccttttatgacggataaggatatcaatgatcttcagtttggcgttgcgcagggcgttgatgttattgctgcttcttttgtccgttatgctgaggatatcgaaagtatgcgcaagtgcttagcagatgctggccgtccggatatgcccattattgctaagatagaaaatcgtttgggagtagagaatttttctcagattgctaaagcttccgatgggattatgattgcccgtggagatttagggattgagctttctgttgttgaggtccctaatttacagaagtttatggcaaagatgtctcgtgaaatgggacgtttttgcattaccgctacgcaaatgttagaatctatgattcgcaatgttttaccgacacgagcagaagtttctgatgttgctaatgctatttatgatggtacctcagcagtaatgttatctggggaaacggcctcgggaagttatcctgtcgcggctgtgaaaattatgcgttctgtgattcaagagacagaaaaaaatcttaattataagtctttcttagaacttagcgatagtgaatgtgctgttaaggtatccccttatcttaagtctataggtttatcaggaattcaaattgctgagaaagctgatgctaaagccattatcgtttacacggaatccggaggatcacccattttcctttctaaataccgtccgcgttttccaattattgctgttacaccaaatctatctgtgtattacaggcttgctttagagtggggagtctatcctatgcttacgcaagagtcagaccgtgcagtatggagacatcaagcttgtatttatggaatcgaaagaggaattttatcaaattatgataagattttagttttgagtcgtggcgctcaaatgaaagatactaataatcttaccttaacaacggtaaatgatatcatcacagcatcagctaaataa

SEQ ID NO: 196 - protein, 481 aa, Chlamydophila caviae GPIC
MIARTKIICTIGPATNTPEMLEKLLDAGMNVARLNFSHGTHESHGETIRLLKELREKKGAPLAIMLDTKGPEIRLGNIPTPIQVSRGQKITLVGKEVEGSAEGGVTLHPQCVFPYVREGVDVLIDDGYIQAVVTSVGEDHLELEFINSGELKSHKSLSIREIDLALPFMTDKDINDLQFGVAQGVDVIAASFVRYAEDIESMRKCLADAGRPDMPIIAKIENRLGVENFSQIAKASDGIMIARGDLGIELSVVEVPNLQKFMAKMSREMGRFCITATQMLESMIRNVLPTRAEVSDVANAIYDGTSAVMLSGETASGSYPVAAVKIMRSVIQETEKNLNYKSFLELSDSECAVKVSPYLKSIGLSGIQIAEKADAKAIIVYTESGGSPIFLSKYRPRFPIIAVTPNLSVYYRLALEWGVYPMLTQESDRAVWRHQACIYGIERGILSNYDKILVLSRGAQMKDTNNLTLTTVNDIITASAK

SEQ ID NO: 197 - DNA, 1758 bp, Bacillus cereus ATCC 14579
  CDS (1)..(1758): transl_table=11
atgcgtaaaactaaaattgtatgtactataggtcctgctagtgaaagtattgaaaaattagagcaattaatcgaagcaggtatgaacgttgctcgtttaaacttctctcatggtagccatgaagagcacggagctcgtattaaaaacattcgtgaagcttcaaagaaaactggtaaaacagttggtatcttacttgatacaaaaggtccagaaatccgtactcacgacttcgtagacggacaagctgagcttgtaacaggtgcagaagtagttctttctactgagcaagtattaggtactgcagagaagttctctgtatcttatgctggtctttatgacgatgtagacccaggttctcgtattctaatcgatgacggtcttatcgaactagaagtaatcgaaaaagctgatggaaacatccgtacaaaagttcttaacagcggaactgtaaaaaataaaaaaggtgttaacgtaccaaacgtaagcattaagcttcctggtatcactgaaaaagacgtaaaagatatcatcttcggtatcgagcaaaaagttgatttcattgcagcttcattcgtacgtaaagcgtctgacgtattagaaatccgtgaattattagaagagcataacgctcaatacatccaaatcgtaccaaaaatcgagaaccaagaaggtatcgacaacatcgattcaatcttagaagtttctgacggtttaatggtagctcgtggtgacatgggtgtagaaattccaccagaagaagtaccgttagtacaaaaacgtctaattaaaaaatgtaacgtgttaggtaaaccagttattactgcaacacaaatgttagattctatgcaacgtaacccacgtccaactcgtgcggaagcaagtgacgtagctaacgcaatcttcgatggtacagatgcaatcatgctttcaggtgaaacagctgctggacaatacccagtagaagcagtaacaatgatggctaacattgcggtacgtgttgaaaaatcattacaatatgaagatatgttcaaaaaacgtattaaagagttcactccaacaattacagatgcaattagccaatctgttgcacatacagcacttgctcttgatgtagctgcaatcgtagctccaacagaaagtggatatactgcgaaaatgatctctaaataccgtccaaaatctccaatcgtagctgtaacatctgacgagcaagtaggacgtcgtcttgcacttgtttggggtgtacaagcatttatggctgagaagcgcgcagcttcaactgacgaaatgttagatacagcaattcaaacaggtatggatgcaggtctaatcggacttggagatactgtagtgattactgctggtgttccagttgctgaaactggtacaacaaacttaatgaaaatccacgttgttggtgaagaaattgctaaaggacaaggaatcggtcgtaaagctgcaaaaggtaaagtagttgtagcaaaaacagctgctgaagctgtagcgaacgtaaacgaaggtgatatccttgttacaacaagcactgataaagatatgattcctgcaatcgaaaaagctgcagctttagttgtagaagaaggtggcttaacaagccatgcagctgttgtaggtgtatcaatcggtattcctgttatcgttggtgtaaacggcgtaacagcaactttaaaaaatggccaagaagtaacagttgatgcagcacgcggaattgtttataatggacatgcggaagtgctataa

SEQ ID NO: 198 - protein, 585 aa, Bacillus cereus ATCC 14579
MRKTKIVCTIGPASESIEKLEQLIEAGMNVARLNFSHGSHEEHGARIKNIREASKKTGKTVGILLDTKGPEIRTHDFVDGQAELVTGAEVVLSTEQVLGTAEKFSVSYAGLYDDVDPGSRILIDDGLIELEVIEKADGNIRTKVLNSGTVKNKKGVNVPNVSIKLPGITEKDVKDIIFGIEQKVDFIAASFVRKASDVLEIRELLEEHNAQYIQIVPKIENQEGIDNIDSILEVSDGLMVARGDMGVEIPPEEVPLVQKRLIKKCNVLGKPVITATQMLDSMQRNPRPTRAEASDVANAIFDGTDAIMLSGETAAGQYPVEAVTMMANIAVRVEKSLQYEDMFKKRIKEFTPTITDAISQSVAHTALALDVAAIVAPTESGYTAKMISKYRPKSPIVAVTSDEQVGRRLALVWGVQAFMAEKRAASTDEMLDTAIQTGMDAGLIGLGDTVVITAGVPVAETGTTNLMKIHVVGEEIAKGQGIGRKAAKGKVVVAKTAAEAVANVNEGDILVTTSTDKDMIPAIEKAAALVVEEGGLTSHAAVVGVSIGIPVIVGVNGVTATLKNGQEVTVDAARGIVYNGHAEVL

SEQ ID NO: 199 - DNA, 1431 bp, Rhodopirellula baltica SH 1
  CDS (1)..(1431): transl_table=11
gtgcaggactaccgtcacacaaaaatcattgccacgatcggcccggcaaccgagtcccccgaaaaactagcggcgttgatcgaagcgggcgtcgatgtcatgcgactcaatatggcacacggaacgcctgaatgggtcggcgaaatcgtcgcacggatccgaaaggtttccaaggatattagtcgtcacgttgcggtgatgatggacgtcaaaggcccagagattcgaaccggtgcggtggaggatgcgatcgaattgaaagccggcgacgagctggtcctgttcaccgaagactgcgcggatcaatcggcggtcgaatccgacggaactccgcgggtcagtgtgaactatctgggcctgcccggtgcgatcgacttggacagcacgattttggtcgacagcggtttgttgcattggcatgtactgaagaaagacgccaccaccgttcgctgccgcgtgatcacgcccggcgttctggaatctcgacgtcacatcaacttgcctggcgtccaagtcaacttgcccgcgatcacggacaaagaccgcaccgatttggcggcgggcgtcaaagcgggcatcgacttcgttgcgctttcgtttgttcgccaagcggaagacgtccgcacgctgcgtgcattcttagacgaacacggctcacccgcacgaatcatttcaaagatcgaagaccaagccggtgttcgcaacatgaaggcgatcatccggcaatccgatgcgatcatggtcgctcgtggtgacctcggcgttgaaattgattaccaccgattgccgcttgttcaaaccgatttgattcgtgcctgccaagaagatggcaagcccgtcatcatcgccacgcacctgctcgagtcgatgattcaatcgccggttccaactcgtgcggaagtgtcggacgtctccaacgcaattcgcgaacaagccgatgcggtgatgctgtctggtgaaacgaccacgggtaaatacccgctggagtccgttggtgtgctgcaaaacattgtcgccagcatcgagccaacggtcagccgccaactgaactcaaagatcgtgcttcgagagcccaaatcgatgatgctgcgatcggcgtgcaccttggcacaggagatgggtgattcaggaatcgttgtcttcacccgcagcggttttctcgcttacgtcctgggggccctgaggcctcggggtgtgccaattttcgccttcaccgatgtcgagcatacgttccgtcacttaatgttgccgtggggtgtggagccgttcttcatggagttctccgaagatcacgatcaaaccatcaccaacgcattggaagttctgaaggagagcggttggtgcaaaccgggcgtttggttgggggtcatcaccaacgctttggccgacgaaaaaatcatcgacacgcttcagttgcgtcaggtccagtaa

SEQ ID NO: 200 - protein, 476 aa, Rhodopirellula baltica SH 1
MQDYRHTKIIATIGPATESPEKLAALIEAGVDVMRLNMAHGTPEWVGEIVARIRKVSKDISRHVAVMMDVKGPEIRTGAVEDAIELKAGDELVLFTEDCADQSAVESDGTPRVSVNYLGLPGAIDLDSTILVDSGLLHWHVLKKDATTVRCRVITPGVLESRRHINLPGVQVNLPAITDKDRTDLAAGVKAGIDFVALSFVRQAEDVRTLRAFLDEHGSPARIISKIEDQAGVRNMKAIIRQSDAIMVARGDLGVEIDYHRLPLVQTDLIRACQEDGKPVIIATHLLESMIQSPVPTRAEVSDVSNAIREQADAVMLSGETTTGKYPLESVGVLQNIVASIEPTVSRQLNSKIVLREPKSMMLRSACTLAQEMGDSGIVVFTRSGFLAYVLGALRPRGVPIFAFTDVEHTFRHLMLPWGVEPFFMEFSEDHDQTITNALEVLKESGWCKPGVWLGVITNALADEKIIDTLQLRQVQ

SEQ ID NO: 201 - DNA, 1440 bp, Wigglesworthia glossinidia endosymbiont of Glossina brevipalpis
  CDS (1)..(1440): transl_table=11
atgcatagaataataagaagaacaaaaatagttgctacattaggaccatcaacagatttaaataataatttagaaaaaatgatattagctggagctaatatggttcgtatgaatttttctcatggaaatttttacgatcatgcaagaagaacaaaacaagtgagaaacatttctcataaactaggtaaaaatattgctattttaggagatttacaaggaccaaaaataagaatatctacttttatgacaggcaaagtatttttatcaccaggagatcaattcatactagatgcatcattaagcaaggatcttggaacagttgaaagtgttggaattgattataaatatcttccaaaagatgtatttccaggagatgttttattattagatgacggaaggatacagctaaaagtcaaaaaaattgtaaataaaaaaatttttacaactgtatatataggaggatatttatataataataaaggtattaataaattaggaggaggtttatcggctaattctttgacagaaaaagacaaaaaagatattatttgcgcagctaaaataggaatagattatttagctgtttcttttcctagaacaggaaaagacttaaaatatgcaagaaatttattaaataatgtagaaagtcatgcaaaaattatttcaaaaatagaaagagcagaagcggtagcaaataatgatattatagatgaaataataacagaatcagatgctattatggtagctagaggagatttgggaatagaaattggagatccagaattagtaggagtgcaaaaaaaattaatacaaagagctagagatttaaatcgtgcggtaattactgcaactcaaatgatggaatccatggtttataaccctatgccaaccagagcagaagttatggatgttgctaatgcagtattggatggcacagatgcagttatgttatcagcagaaacagctattggaaaatatccagtagaaactgtagaatctatgtctaatgtatgcataggagctgaaaaaatttctaatattaattctttgaagaatagattaaacattaaatttaaaaccgtagaagaatcaatggcggtatctgcaatgtatattgcaaatcatttaaatatgataaaagctataatttctcttacagaatctggtaaaactccattaattatgtctcgtataagttctggattaccaatttttgctctttcaaaacatgaacatactttaaatttaacagctttatatagaggggttactcctgtttattttaaaaataatgaaaaaggaatttcagctgctgattctgctattaatttgcttaaagaaaaaaaatttttattctctggagattttgtagtaattactcaaggagatgtcatggggactattggaaaaacaaataccagccgtatattaattgtataa

SEQ ID NO: 202 - protein, 479 aa, Wigglesworthia glossinidia endosymbiont of Glossina brevipalpis
MHRIIRRTKIVATLGPSTDLNNNLEKMILAGANMVRMNFSHGNFYDHARRTKQVRNISHKLGKNIAILGDLQGPKIRISTFMTGKVFLSPGDQFILDASLSKDLGTVESVGIDYKYLPKDVFPGDVLLLDDGRIQLKVKKIVNKKIFTTVYIGGYLYNNKGINKLGGGLSANSLTEKDKKDIICAAKIGIDYLAVSFPRTGKDLKYARNLLNNVESHAKIISKIERAEAVANNDIIDEIITESDAIMVARGDLGIEIGDPELVGVQKKLIQRARDLNRAVITATQMMESMVYNPMPTRAEVMDVANAVLDGTDAVMLSAETAIGKYPVETVESMSNVCIGAEKISNINSLKNRLNIKFKTVEESMAVSAMYIANHLNMIKAIISLTESGKTPLIMSRISSGLPIFALSKHEHTLNLTALYRGVTPVYFKNNEKGISAADSAINLLKEKKFLFSGDFVVITQGDVMGTIGKTNTSRILIV

SEQ ID NO: 203 - DNA, 1440 bp, Haemophilus ducreyi 35000HP
  CDS (1)..(1440): transl_table=11
atgtctagaaaacttagaagaaccaaaattgtttgtacaatggggcctgcaactgatcgtagcaataatttggaaagaattatcgctgcaggagcaaacatggttcgtatgaacttctcacacggcgtgcctgaagaccatattgaacgagcaaataaagttcgtgaaatagctgcacgcttgggtaaacatgttgctattttaggtgacttacaaggtccaaaaattcgtgtatcgacgttcaaagaaggaaaaattttcttaaacataggcgataaatttaccttagatgctgatttacctcgtggtgaaggagatcaacaagtggtcggtttagattataaaaacttacccaacgatgtcgtacccggtgatatccttttattagatgatggtaatgtacaattaaaagttatttctgtagagggtgctaaagtacatactgaagtcacgcttggtggccctttatcaaataataaaggcattaataagttaggcggtggtttatctgctcctgcactaacggaaaaagataaagaagatattaaattagctgcgcgtatcggtgtagattatttagcggtttcatttccacaatctagtcaagacttacactatgcacgtcaattagcagaagaagcgggcttagatgccaaaattgtcgccaaagtagaacgtgctgaaactgtagcaactgaagaagcaatggacgatatcattttaggtgctgatgtggtgatggttgcacgtggtgacttaggtgttgagattggtgatgctgcattagttggcgtacaaaaacgattaattcgtcgtgcaagaaagttaaaccgcgtagtgatcaccgcaactcaaatgatggaatcaatgatcaagaaaccaatgccaacacgtgctgaagtaatggatgtggctaatgccgtgttagatggcactgatgccgtaatgttgtcaggcgaaactgcaagcggtgattaccctgtagaaactgttaaatcaatggcagaagtctgtttaggtgcagaaactatgccaagtattaatatttctcgccaccgcatgcaaggcaaattcgccgccattgatgaagccgttgcaatgtctgcgatgtacacggctaaccatctagaaagcgtttctgcaatcattgcattgactcactccggtgaaacggcaaaattaatgagccgtattagttctggcttaccaatttatgcgctatcacgtaatcaacaagcattaaatcgtaccgcactttatcgtggtgtaacgcccgtatactataacgaagaaagccgtacaatcgaaggagctaaaaaaggtattgcattgctcaaagaaaaaggctatttgatgaccggtgatttagtcttattaacacaaggtagcgaatcaaaagatggcggtactaatacttgtcgaattttaaaagtggaataa

SEQ ID NO: 204 - protein, 479 aa, Haemophilus ducreyi 35000HP
MSRKLRRTKIVCTMGPATDRSNNLERIIAAGANMVRMNFSHGVPEDHIERANKVREIAARLGKHVAILGDLQGPKIRVSTFKEGKIFLNIGDKFTLDADLPRGEGDQQVVGLDYKNLPNDVVPGDILLLDDGNVQLKVISVEGAKVHTEVTLGGPLSNNKGINKLGGGLSAPALTEKDKEDIKLAARIGVDYLAVSFPQSSQDLHYARQLAEEAGLDAKIVAKVERAETVATEEAMDDIILGADVVMVARGDLGVEIGDAALVGVQKRLIRRARKLNRVVITATQMMESMIKKPMPTRAEVMDVANAVLDGTDAVMLSGETASGDYPVETVKSMAEVCLGAETMPSINISRHRMQGKFAAIDEAVAMSAMYTANHLESVSAIIALTHSGETAKLMSRISSGLPIYALSRNQQALNRTALYRGVTPVYYNEESRTIEGAKKGIALLKEKGYLMTGDLVLLTQGSESKDGGTNTCRILKVE

SEQ ID NO: 205 - DNA, 1422 bp, Gloeobacter violaceus PCC 7421
  CDS (1)..(1422): transl_table=11
atgcagcctttagaccgtcgaacgaaagtcgtcgcgacgatcggtcctgcgagcagttcgccggaagtgcttcggcagctggtgaaggcaggaatcaacgtcgcgcgcttgaatttttcccacggcagctacgaagaccacgcgcgcatggtcaagctgctgcgggaggtctccgaggaactcgacaccccgattacgctattgcaggatttgcaggggccgaagatccgcgtgggccagatgcccgagggcgggctggctttaggggagggcgacgagctgacgctgttgccggtggcggaatttgcgggcgaacccggcacggtatccatcgactacccgtatcttgtggaggaggcgacgccgggtacccaggtgctcctggacgacggcttgctcgaatttgccgtggttgaggtgaagggcaacgccgtgcgctgccgggtggtgcgcgggggggtgctcaaaagccgcaagggggtcaacctgcccagtctggatttgcgcctgccctcgatgaccgaaaaggacaagcaagatctcgaatttggactggagcagggggtcgattgggtgtctttgagcttcgtgcgccggggcgaggacattcgcgtgctcaaaggactgctcgctgaacacggggccgccgatgtgccggtgatcgccaagattgagaaaccccaggcgatcgccaatctggaggagattctcgatgaagtgcagggaatcatggtggccaggggcgatctgggcgttgagatgagcccggagaaggtgccgctgctgcaaaagcggatcattcggctttgtaaccggcggggcattccggtgatcaccgccacccagatgctcgacagcatgatccgcaatccccggccgacccgcgctgaggcgagtgatgtcgccaacgccatcctggacggcagcgacgcggtgatgctctcgggcgaatcggcggtgggcgattttccggtgcagtcggtggagatgctcgtgcgcatcgccaaagaagtcgagcgggagtttaccttcgacaacaatccgcccgccaaatccgatgaaatccacgccctgtgcgaatcgctgggcaccatcgacaagatcttggccctgcactgtattgccacttttactaccaccggcttcagcgcttcgatcgcggccgcggagcggccgaaggcgccggtggtcgccttcacccccgacttgaaggtgtatcaccggttgaatctggtctggggcgtgaagcccttgctgttggagcacccggcggcggaactcgaaaaactgatcgagcagatggaaagctgccttgtcgaacgcaacctcgccgcccccggcgaccggatgctggtgctgggaggtagccccgtccagagggcgggcggcacgaattttctgaagatccatacgctgcactaa

SEQ ID NO: 206 - protein, 473 aa, Gloeobacter violaceus PCC 7421
MQPLDRRTKVVATIGPASSSPEVLRQLVKAGINVARLNFSHGSYEDHARMVKLLREVSEELDTPITLLQDLQGPKIRVGQMPEGGLALGEGDELTLLPVAEFAGEPGTVSIDYPYLVEEATPGTQVLLDDGLLEFAVVEVKGNAVRCRVVRGGVLKSRKGVNLPSLDLRLPSMTEKDKQDLEFGLEQGVDWVSLSFVRRGEDIRVLKGLLAEHGAADVPVIAKIEKPQAIANLEEILDEVQGIMVARGDLGVEMSPEKVPLLQKRIIRLCNRRGIPVITATQMLDSMIRNPRPTRAEASDVANAILDGSDAVMLSGESAVGDFPVQSVEMLVRIAKEVEREFTFDNNPPAKSDEIHALCESLGTIDKILALHCIATFTTTGFSASIAAAERPKAPVVAFTPDLKVYHRLNLVWGVKPLLLEHPAAELEKLIEQMESCLVERNLAAPGDRMLVLGGSPVQRAGGTNFLKIHTLH

SEQ ID NO: 207 - DNA, 1818 bp, Gloeobacter violaceus PCC 7421
  CDS (1)..(1818): transl_table=11
atgcgcgtgggtgccgatgtgttcgttctagatgccaatgcccaacagacaactgccgcgccgagcgagcgggcgcgttttcgccgcaccaagattgtcgccaccatcggtcccgccgtcgacgacccgcaggccctgcgcaagctcatccaggccggggcgacgaccctcagactcaatttttcccacggcaaccacgaggagcaccgccgccgcatcggcctcatccgccagatttcctttgaactcaatcagccggtggccatcctgcaggatctgcaaggtcccaagatccggttgggcaagttcgccgacggaccaatcgtcctcaagcacggcgacccgtttattctgaccagccacgacgtgcccgccaaccagcacatcagtccgatcacctactcgcgacttatccaggaagtgcccaccggcgccacgatcttgctggatgacgggcgggtggaactggtagtcgaacgggtggacctcgaagcccaatacctgcactgccggacggtgggggggggcaagctctccaacagcaaaggcgtcaactttccgggtgtcaccctctcggtgccggcgatgaccgaaaaggaccgcgaggatttgctcttcggtctcaatcagggcgtcgattgggtggccctcagtttcgtgcgcaccccgagcgatttgctcgaactgaaggaactgattgcccaatcgggcaagcgggtgccggtgatcgccaagatcgaaaaattcgaggccttcgagaacctcgatgcggtgattgccgcctgcgacgggctgatggtggcccgtggcgatctgggcgtcgagatgcccgccgaggaagtgcccttgctccaaaagcggctgatcgcttcggccaatcgggccggcaagcctgtgatcaccgccacccagatgctcgattcgatggtgagcaacagccgcccgacccgcgccgaagtttccgatgtggccaacgccatcctggacggcaccgacgcggtgatgctctccaacgagaccgccgtgggcgagcacccgatcttggcggtcgagacgatggcgcgcatcgccgatcgcatcgagcgctcgatgccccagcgcacctgggtagacacgggccgctcgatcccgaacgccatctcccaggcagtgggaagcgtcgcccagcaattgggtgcccaggcgattctcaccctcaccaagtccggcgccaccgcccgcaacgtcagcaagtaccggccgagggtgccgattatcgcgattaccccgagcgtgtcggtggcgcgcgaactgcagatggtctggggggtctacccgctgatggtcctggatctgccttcgacccgccagacctttcaagcggcgatcagcgccgcccaggacgaaaacctcgtcctggaaggcgacctggtggtgatgaccgccggcaccatccaggggctctccggttcgacggacctgatcaaagtcgaggtggtgacggcgattctcggccggggattgggcctgggtcagaacgccgtgagtggacgcgcccgcatcgtccgccacagcgacgaagcggcggccttgagtcccggggacatcctgattgccccgcgcaccgacgccaattttatcgaagcgatcaagctcgcgggcggcatcgtcaccgaggagagcggcctcacctcccacgcagcgattatcgggctgcgcctcggactgccggtactgctcggggtgaaagactgcaccacccgcatcccggacggggtggtgctcaccctcgatccgcaaaaaggggtcatcttctccggggcggcctccgccgtctag

SEQ ID NO: 208 - protein, 605 aa, Gloeobacter violaceus PCC 7421
MRVGADVFVLDANAQQTTAAPSERARFRRTKIVATIGPAVDDPQALRKLIQAGATTLRLNFSHGNHEEHRRRIGLIRQISFELNQPVAILQDLQGPKIRLGKFADGPIVLKHGDPFILTSHDVPANQHISPITYSRLIQEVPTGATILLDDGRVELVVERVDLEAQYLHCRTVGGGKLSNSKGVNFPGVTLSVPAMTEKDREDLLFGLNQGVDWVALSFVRTPSDLLELKELIAQSGKRVPVIAKIEKFEAFENLDAVIAACDGLMVARGDLGVEMPAEEVPLLQKRLIASANRAGKPVITATQMLDSMVSNSRPTRAEVSDVANAILDGTDAVMLSNETAVGEHPILAVETMARIADRIERSMPQRTWVDTGRSIPNAISQAVGSVAQQLGAQAILTLTKSGATARNVSKYRPRVPIIAITPSVSVARELQMVWGVYPLMVLDLPSTRQTFQAAISAAQDENLVLEGDLVVMTAGTIQGLSGSTDLIKVEVVTAILGRGLGLGQNAVSGRARIVRHSDEAAALSPGDILIAPRTDANFIEAIKLAGGIVTEESGLTSHAAIIGLRLGLPVLLGVKDCTTRIPDGVVLTLDPQKGVIFSGAASAV

SEQ ID NO: 209 - DNA, 1410 bp, Photorhabdus luminescens subsp. laumondii TTO1
  CDS (1)..(1410): transl_table=11
atgaaaaaaaccaaaattgtttgtactatcggaccaaaaacagaatccgaagaaaaactggccgaactgttgaatgccggcatgaatgttatgcgcctcaacttttcacacggagactatgaagagcacggccagcgtattcaaaatatccattcagttatgactaagacaggtaaacaagccgctattttgctggatactaaaggccctgaaattcgaactatgaagctggaaggcggtaacgatgtctctctaaccgcaggtcagaccttcacttttaccactgacacttccgttatcggtaataaagaccgtgttgctgtcacttaccgcggtttccccgcggatctggctcccggtaataccgtgctagttgatgacggcttgatcggcatgacagttaaagaagtcactaagtcagaggttatttgccaagttttgaataacggtgatttgggggaaaataaaggtgttaatctgccgggtatttccatcagcctgcctgccctggctgaaaaagataagcaagatttgatctttggttgccaacaaggtgttgatttcgtcgccgcttcttttatccgcaagcgctccgatgttctggaaatccgtgaacatctgaaagcgcacggcggtgaaaacattcaaatcatctctaagattgaaaatcaggaaggtctgaacaattttgatgaaattctggaagcttctgacgggatcatggttgctcgtggtgatcttggcgttgaaattccggttgaagaagtgatcttcgcccagaagatgatgattcaaaaatgtaatatcgctcgcaaagttgttatcactgcaactcaaatgctcgattctatgattaaaaacccgcgccctacccgtgcggaagccggtgacgtcgctaacgctattttggatggtactgatgcagttatgctttctggcgaaagtgcaaaaggcaaatatccaatagaagcagtgactatcatggcaacgatttgtgaacgtacagaccgcgttatgccaagccgtatcgaagccgtccattgccgtaacctgcgcgtgaccgaagcggtgtgtcgtggtgccgttgaaacagcagaaaaactggaagcccctctgattgtggtcgcaacctatggcggtaaatctgccaaatccattcgtaagtatttccctgacgcgcccattctggcattaacgactaatgaagtgactgcccgccaattactgcttgttaagggtgtttttacccaaattgttaaagaaatcgcctctaccgacgatttctaccgcattggtaaagaagcggcgctagcaagtggcctagcgaagaaaggtgaaatcgtggttatggtatctggtgccctggttccaagcggcacaaccaacacgtcgtctgttcacgtcctttaa

SEQ ID NO: 210 - protein, 469 aa, Photorhabdus luminescens subsp. laumondii TTO1
MKKTKIVCTIGPKTESEEKLAELLNAGMNVMRLNFSHGDYEEHGQRIQNIHSVMTKTGKQAAILLDTKGPEIRTMKLEGGNDVSLTAGQTFTFTTDTSVIGNKDRVAVTYRGFPADLAPGNTVLVDDGLIGMTVKEVTKSEVICQVLNNGDLGENKGVNLPGISISLPALAEKDKQDLIFGCQQGVDFVAASFIRKRSDVLEIREHLKAHGGENIQIISKIENQEGLNNFDEILEASDGIMVARGDLGVEIPVEEVIFAQKMMIQKCNIARKVVITATQMLDSMIKNPRPTRAEAGDVANAILDGTDAVMLSGESAKGKYPIEAVTIMATICERTDRVMPSRIEAVHCRNLRVTEAVCRGAVETAEKLEAPLIVVATYGGKSAKSIRKYFPDAPILALTTNEVTARQLLLVKGVFTQIVKEIASTDDFYRIGKEAALASGLAKKGEIVVMVSGALVPSGTTNTSSVHVL

SEQ ID NO: 211 - DNA, 1488 bp, Vibrio vulnificus YJ016
  CDS (1)..(1488): transl_table=11
gtgggacatgtaaaggcattaggctacaaacaccgactttcaaattgtaactatattgaccggagagtatcttccatgaaaaagaccaaaatcgtatgtacgattggcccaaaaactgagtctgtagagaaactgactgaactagtcaactcaggtatgaacgtaatgcgcctgaacttttctcacggtgactacgtagagcacggcactcgtatcgcgaacttccgccaagtaatggaaaacacaggtaagcaacttgctatcctactagacactaaaggtcctgaaatccgcactatcaaactagaaaacggcgacgacgttgatctagtagctggtcaagagttcactttcacgactgatacttctgttgttggtaacaaagacatcgtagcagtaacttacccaggttttgctgcggatctatctgctggtaacactatcctagttgacgatggtctaatcgagatggaagttatcgcaacgactgcgactgaagttaagtgtaaagtactgaacaacggtgctctaggcgaaaacaaaggtgttaacctaccaggcgtttctgtaaacctacctgcactatctgaaaaagacaaaaacgaccttaaatttggttgtgagcaaggcgttgacttcgttgcagcatctttcatccgtaaagcatctgacgtgaaagaaatccgtgaagttctagcagcaaacggcggcgcgaacattcagatcatttctaagattgaaaaccaagaaggtgttgataacttcgacgaaatcctagagctttctgacggtatcatggttgctcgtggtgacctaggtgtagaaatccctgcagaagaagttatcttcgcacagaagatgatgatcgaaaaatgtaaccgcgcacgtaaagtggttatcactgcaactcaaatgctagattctatgatcaagaacccacgtccaactcgtgctgaagcgggtgacgttgcgaacgcaatcatggatggtactgatgcagtcatgctttctggcgaaacagcgaaaggtaaataccctgttgaagcggtaactatcatggcgcaaatcgctaaccgtactgattctgtactaaaagcagagctaggctctcgtctagacagcccacgcctacgtatcactgaagcggtatgtaaaggtgcagtagacacagctgagaaactagcagcaccactgatcatcgttgccactgaaggtggtaagtctgcacgttctgtacgtaagtacttcccaactgcaaacattcttgcgctaacgaccaacaagaagacagctgctcaacttgtactgactaaaggtgttacacctgttgttgttgattcaatcgataacacggatgcgttctacgtagccggtaaagagcttgctcttgaatctggcctaggtagcaaaggcgacatcgttgtgatggtatctggtgctcttgttgcatctggtacaacgaatactgcgtcagtacacgtactataa

SEQ ID NO: 212 - protein, 495 aa, Vibrio vulnificus YJ016
MGHVKALGYKHRLSNCNYIDRRVSSMKKTKIVCTIGPKTESVEKLTELVNSGMNVMRLNFSHGDYVEHGTRIANFRQVMENTGKQLAILLDTKGPEIRTIKLENGDDVDLVAGQEFTFTTDTSVVGNKDIVAVTYPGFAADLSAGNTILVDDGLIEMEVIATTATEVKCKVLNNGALGENKGVNLPGVSVNLPALSEKDKNDLKFGCEQGVDFVAASFIRKASDVKEIREVLAANGGANIQIISKIENQEGVDNFDEILELSDGIMVARGDLGVEIPAEEVIFAQKMMIEKCNRARKVVITATQMLDSMIKNPRPTRAEAGDVANAIMDGTDAVMLSGETAKGKYPVEAVTIMAQIANRTDSVLKAELGSRLDSPRLRITEAVCKGAVDTAEKLAAPLIIVATEGGKSARSVRKYFPTANILALTTNKKTAAQLVLTKGVTPVVVDSIDNTDAFYVAGKELALESGLGSKGDIVVMVSGALVASGTTNTASVHVL

SEQ ID NO: 213 - DNA, 1341 bp, Onion yellows phytoplasma OY-M
  CDS (1)..(1341): transl_table=11
atgaacaaaactaaaataatttgtaccttaggacctgcttcttatgataaaaacattttacaagccttaattcaaacaggtttgaatgtagcaagatttaatttttctcacgctcaatacgaacaaactaaacttttaatgaaaaccattaaaactattagcgataaattagacaaaaacacaggacttatgttagatactaaaggacctgaaattagaactcacgaatttgatggtgtagtaacaattcaaaaagattctgaagtaaaaatatctatgacagaagttttaggtaatgctaaacttttttcagttagttattctaatttatacaatgaattaaaagttggcgatatggttaatattgatgatggatacttatctttggaagttgtaggcaaagacgaagccaaacaacaattagttactaaagccaaaaatactcactccatcaaatctcgtagaggtgtaaatgttcctaaagttaatttagaaatggattttatttctcctaaagattatcaagatattgtttttgctgcccaacaagattttgattatattgctgcttcatttgttagaagagctcaagatgtcaaagatattagaaaaattttacaagaacaaggaaattccaacatccaaattatttctaaaatagaaaatcaagaaggtgttgataatttagaagaaatcattcaagaatcagacggtattatggttgcaagaggtgatttaggaatagaagttgatggtgaattagtaccactttaccaaacgcgtatgattactaaatgtttagaatacggcaaaccagttgtagtagctactcaaatgttagaatctatgcaaagaaatccgcgcccaaccaaagctgaaacttctgatgtctttaatgcagttagagaaggcaccacctttactatgctatcgggcgaaagtgcttcaggtgaatatcctgtagaagctgtaacttatatgaaaaaaattaattatcaagctgaaaaagtagttaattatcaagctttatcacaagtataccaacctaaaaactccaaagaaaaccttttattaagtgctgtggaattggctttacgcaccgatgttaaagcaattgttgtctatgacttaaaagatgcttataatgtttctaaatttcatccatccgttcctgttttggctttagttaaaactgaacaagaagctcgtcgtttagtactaaattttggggtttgtccttttgtttctgaaaccaaattacaaactaaattggaagaacttacccaaaatcaaagtagtaattgtcttgttgttaaagatgggatgctttattttaaataa

SEQ ID NO: 214 - protein, 446 aa, Onion yellows phytoplasma OY-M
MNKTKIICTLGPASYDKNILQALIQTGLNVARFNFSHAQYEQTKLLMKTIKTISDKLDKNTGLMLDTKGPEIRTHEFDGVVTIQKDSEVKISMTEVLGNAKLFSVSYSNLYNELKVGDMVNIDDGYLSLEVVGKDEAKQQLVTKAKNTHSIKSRRGVNVPKVNLEMDFISPKDYQDIVFAAQQDFDYIAASFVRRAQDVKDIRKILQEQGNSNIQIISKIENQEGVDNLEEIIQESDGIMVARGDLGIEVDGELVPLYQTRMITKCLEYGKPVVVATQMLESMQRNPRPTKAETSDVFNAVREGTTFTMLSGESASGEYPVEAVTYMKKINYQAEKVVNYQALSQVYQPKNSKENLLLSAVELALRTDVKAIVVYDLKDAYNVSKFHPSVPVLALVKTEQEARRLVLNFGVCPFVSETKLQTKLEELTQNQSSNCLVVKDGMLYFK

SEQ ID NO: 215 - DNA, 1770 bp, Lactobacillus johnsonii NCC 533
  CDS (1)..(1770): transl_table=11
atgaagaaaactaaaattgttagtactttagggccagcctcaaacgatgttgagactattactaaattagctgaagcaggtgcaaacgtattccgtttcaacttctcacacggtgaccacgaagaacaccgtgcacgtatgaacatggttcgtgaggttgaaaagaagactggtaaacttcttggcattgctcttgatactaagggtgccgaaattagaactactgaacaagaaggcggcaagttcactattaacactggtgacactatccgtatttctatggacgacactaagaagggtaacaaggacatgatccacgttacctacgatggtctttacgacgatactcacgttggtggtcacgtattaatcgatgatggtttagttgaccttttgattaaggacaaagatgacgctaagagagaattagtttgtgaagctcaaaacactggtgtaatcggttctaagaagggtgttaacgctcctggcgttgaaatccgcctcccaggtattactgaaaaagatactaacgatattaagttcggtttgaaggaaggtatcaacttcatctttgcttcattcgttcgtaaagcacaagatgttcttgacattcgtcaattgcttgaagaagcacattgtgaatacgtaaagatcttccctaagattgaatcacaagaaggtattgacaacatcgacgaaatcttaaaggtttctgatggtttaatggttgctcgtggtgacatgggtgttgaaattccatttatcaatgttccatttgtacaaaaagaattgatcaagagatgtaacgctttaggtaagccagttattactgctactcaaatgcttgactcaatgcaagaaaacccacgtcctactcgtgccgaagttactgacgttgccaacgctgttcttgatggtactgacgcaactatgctttcaggtgaatctgcaaacggtctttacccagttaaagctgttaaggctatggctgaaatcgacatgcgtactgaaaagcaacttgctaagcgtaacaagttagctcttcaaagattcgaagaatacaagggttcaaacgttactgaagctatcggtgaatcagttgttagaactgctgaagaattgggcgttaagactattattgctgcaactgaatctggttacactgcacgtatgatttctaagtaccgtccaaacgcagacattattgctatgactttcaacgacaagattcaacactcattaggtgttgtttggggtgtaaagccaatgttgactgaaaagcctaagtctactgaagaaatgtttgaaaaggcagctgaacttgctaaagaaactggtcttgcaaaagacggtgacttagtaattatcgttgctggtgttcctttgggcgaaactggtactactaacttgatgaagttacaattaatcggtacccaacttgttaaaggtttaggtgttggtgaacaatcagttattggtaaagctgtagttgcaacttctgctgaagaagctaacagcaaagttcaagatggtgacatcttagttgctaagactactgataaggattacttaccagcaatcaagaaggcttcaggtatggtagttgaagcttctggtttaactagccatgcagctgttgttggtctttcacttggtatcccagttatcgttggtgctactgatgcagtagaaaagatcaaggatggttctaagattactgttgatgctcgtcgcggtgctgtttaccaaggcgaagcaactaacctttaa

SEQ ID NO: 216 - protein, 589 aa, Lactobacillus johnsonii NCC 533
MKKTKIVSTLGPASNDVETITKLAEAGANVFRFNFSHGDHEEHRARMNMVREVEKKTGKLLGIALDTKGAEIRTTEQEGGKFTINTGDTIRISMDDTKKGNKDMIHVTYDGLYDDTHVGGHVLIDDGLVDLLIKDKDDAKRELVCEAQNTGVIGSKKGVNAPGVEIRLPGITEKDTNDIKFGLKEGINFIFASFVRKAQDVLDIRQLLEEAHCEYVKIFPKIESQEGIDNIDEILKVSDGLMVARGDMGVEIPFINVPFVQKELIKRCNALGKPVITATQMLDSMQENPRPTRAEVTDVANAVLDGTDATMLSGESANGLYPVKAVKAMAEIDMRTEKQLAKRNKLALQRFEEYKGSNVTEAIGESVVRTAEELGVKTIIAATESGYTARMISKYRPNADIIAMTFNDKIQHSLGVVWGVKPMLTEKPKSTEEMFEKAAELAKETGLAKDGDLVIIVAGVPLGETGTTNLMKLQLIGTQLVKGLGVGEQSVIGKAVVATSAEEANSKVQDGDILVAKTTDKDYLPAIKKASGMVVEASGLTSHAAVVGLSLGIPVIVGATDAVEKIKDGSKITVDARRGAVYQGEATNL

SEQ ID NO: 217 - DNA, 1416 bp, Treponema denticola ATCC 35405
  CDS (1)..(1416): transl_table=11
atgaaaaaaacaaaaatagtatgcacaatagggcccgcttccgactcggaaagggtcttggcagaaatgtttaaagccggtttaaatgtctgccgccttaatttttcgcatggaagccatgaagaacacaaggttaaaatagatcgaataaaaaaaataagagaagagttaaaaatgcctattgcacttttactggatactaagggacccgaaatccgtttgggcctttttgaaaagcctgtagaaattgtacaaggtcaggaatttataattacaaccagagatgtaatcggaacaaatcaaatatgcagcatctcatataagaatattgccgccgaaattaaacctaaaagcagaatccttataaatgacggattattggagttacaggttatcgatattttaaacgatacggacatagaatgtgtcgcagtaaattccggaaccctaagcagccgaaaaggtgtaaacattccgggcttgagggtaaaccttccttacatgagtgaaaaggatatctccgatatcgaattcggaattgaaaatgatgtggattttattgccgcctcctttacacaaagagccgacgatattatccaaataagaaaacttttggaaaaacacaaaagtacaatcgccgttatagcaaaaatagaaaatcaagaaggcttggacaacatagatgaaattttagcggaagccgacggaataatggtagcccggggagatatgggtgtagaaatagagcccgaaaaaatccctcatcttcaaaagcagctgataaaaaaagcaaaccttgcaggaaagccggttatcaccgcaactcagatgctcgaatctatgacccacaacctgcgtcccaccagagccgaagttaccgacgttgcaaacgctattctcgacggaacatcagctgtaatgctttctggagaaaccgcagcaggcgaataccctgtcgaaaccgtggccatgatgacctcaattgcgaactctatagaagaaacattagattatgaaaaactatttgctgaaaatgcttctcttcatgagaccacaatcacaaatgcaattgcaagagccacctgctccactgccctagccctcgatgcaaatgcaatcataacggcatccgcttcgggaataacgcccagagctctttcaaaatttaaaccaagggtaccgattattgcaataacggaatcgcctcaggttatgagaaagatggccctcgactgggacgtatatccggttttagccgatcctataaaatcgaccgataacatgttcgatgtgtgttcgcaaattgcaaaggatacaggccatgtaaaaaaaggagacatagcaatccttacggccgggattcctataggcaaagcaggatctacaaaccttctaaaggtagaaataatagaataa

SEQ ID NO: 218 - protein, 471 aa, Treponema denticola ATCC 35405
MKKTKIVCTIGPASDSERVLAEMFKAGLNVCRLNFSHGSHEEHKVKIDRIKKIREELKMPIALLLDTKGPEIRLGLFEKPVEIVQGQEFIITTRDVIGTNQICSISYKNIAAEIKPKSRILINDGLLELQVIDILNDTDIECVAVNSGTLSSRKGVNIPGLRVNLPYMSEKDISDIEFGIENDVDFIAASFTQRADDIIQIRKLLEKHKSTIAVIAKIENQEGLDNIDEILAEADGIMVARGDMGVEIEPEKIPHLQKQLIKKANLAGKPVITATQMLESMTHNLRPTRAEVTDVANAILDGTSAVMLSGETAAGEYPVETVAMMTSIANSIEETLDYEKLFAENASLHETTITNAIARATCSTALALDANAIITASASGITPRALSKFKPRVPIIAITESPQVMRKMALDWDVYPVLADPIKSTDNMFDVCSQIAKDTGHVKKGDIAILTAGIPIGKAGSTNLLKVEIIE

SEQ ID NO: 219 - DNA, 1437 bp, Mycoplasma mycoides subsp. mycoides SC str. PG1
  CDS (1)..(1437): transl_table=4
atgactaaagaaaaattacaaaagagaatgaagcgaaccaaagtaattacaacaattggtccttcaactcactctgcagaagctattaaagaattatttaacaatggaatgacaactattcgtttaaatttttcacatggtagttatgaagaacacggttatagaattaaagctgcaaaaaaaatctctaaagctttaaataagccaatctcaataatgttagacactaaaggtcctgaaataagattaggaaaatttaaagataataaacaagaagtagtaaaaggtcaagcaattactatttatacagataattattcttatttaaacaaagaatgtgttcaaggtgaaatgactgttgcttatgatatgtcagttgatttaaaacctgaagatatgattttaattgatgatggtaaattagaattaacagttgattcagttgaacctcaaattattaaagcaactgcatttaatcatcacattgtaaaaactaataaacgtgttaacttacctggaattgatttttcattaccatttttatctgaaaaagatgaaaaagatattttatttggatgtgaacaagatgttgattatatagctgcatcatttgtaaatacagctgaaaatgtaagacaaattaaagaaatcttaactaaagctaatgcaaatcatattcaaattatttcaaaaatagaatcacaagttggattagataatattgatgaaattattgaagaatctgatggaattatgattgcgcgtggtgatttaggattagaaattccatattatgatgtaccttattgagaaaaaattatcatcagaaaatgtagagaaaaaggaaaaatcgttattgttgctactcaaatgttagaaacaatgacagaaaatccatcaccaactagagctgaagtaactgatgtttattatgcaactgaacttggtgctgatgctacaatgttatctggtgaatcagctgctggagattatccatttttaacagttcatacaatgtcaacaattaataaaagagcagaagttgaattctacaacaaaatttactaccaagtacaattagataatgcaagaaactcaacatcaggacctagagctgaaatcgcagacttattagctacaaaaacaaaagatggtgaatataagtatgcaattgttttatcaaaaacaggtgaattattaaaaaccatttctaaatttagaccaaatgtaacaattttaggagttagtccagataagaaattgtgaacttcatttggtgtatgacattcaatttttatgaataaagttgatactttagataatttagataataatgttgaaaaactatcagaaattgctaagtcttgaggagctaagtttggtgaaaaagttttagttgtaagaagtacagctataaaagaaatagaagttatttaa

SEQ ID NO: 220 - protein, 478 aa, Mycoplasma mycoides subsp. mycoides SC str. PG1
MTKEKLQKRMKRTKVITTIGPSTHSAEAIKELFNNGMTTIRLNFSHGSYEEHGYRIKAAKKISKALNKPISIMLDTKGPEIRLGKFKDNKQEVVKGQAITIYTDNYSYLNKECVQGEMTVAYDMSVDLKPEDMILIDDGKLELTVDSVEPQIIKATAFNHHIVKTNKRVNLPGIDFSLPFLSEKDEKDILFGCEQDVDYIAASFVNTAENVRQIKEILTKANANHIQIISKIESQVGLDNIDEIIEESDGIMIARGDLGLEIPYYDVPYWEKIIIRKCREKGKIVIVATQMLETMTENPSPTRAEVTDVYYATELGADATMLSGESAAGDYPFLTVHTMSTINKRAEVEFYNKIYYQVQLDNARNSTSGPRAEIADLLATKTKDGEYKYAIVLSKTGELLKTISKFRPNVTILGVSPDKKLWTSFGVWHSIFMNKVDTLDNLDNNVEKLSEIAKSWGAKFGEKVLVVRSTAIKEIEVI

SEQ ID NO: 221 - DNA, 1758 bp, Bacillus cereus ATCC 10987
  CDS (1)..(1758): transl_table=11
atgcgtaaaactaaaattgtatgtactataggtcctgctagtgaaagtattgaaaaattagagcaattaatcgaagcaggtatgaacgttgctcgtttaaacttctctcatggtagccatgaagaacacggcgctcgtattaaaaacattcgtgaagcttcaaagaaaactggtaaaacagttggtatcttacttgatacaaaaggtccagaaatccgtactcacgacttcgtagacggacaagctgagcttgtaacaggtgcagaagttgttatttctactgagcaagtattaggtactgcagagaagttctctgtatcttatgctggtctttatgacgatgtaaacccaggttctcgcattctaatcgatgatggtcttatcgagctagaagtaatcgaaaaagctgacggaaacatccgtacaaaagttcttaacagcggaactgtaaaaaataaaaaaggtgttaacgtaccaaacgtaagcattaagcttcctggtatcactgaaaaagacgtaaaagatatcatcttcggtatcgagcaaaaagttgatttcatcgcagcttcattcgtacgtaaagcagctgacgtattagaaatccgtgaattactagaagagcataacgctcaatacatccaaatcgtaccaaaaatcgaaaaccaagagggtatcgacaatatcgattcaatcttagaagtttctgacggtttaatggtagctcgtggtgacatgggtgtagaaattccaccagaagaagtaccattagtacaaaaacgtctaatcaaaaaatgtaacgtgttaggtaaaccagttattactgcaacacaaatgttagattctatgcaacgtaacccacgtccaactcgtgcggaagcaagtgacgtagctaacgcaatcttcgatggtacagacgcaatcatgctttcaggtgaaacagctgctggacaatacccagtagaagcagtaacaatgatggctaacattgcagtacgtgttgaaaaatcattacaatatgaagatatgttcaaaaaacgtattaaagagttcactccaacaattacagatgcaattagccaatctgttgcgcatacagcacttgctcttgatgtagctgcaatcgtagctccaacagaaagtggatatactgcgaaaatgatctctaaataccgtccaaaatctccaatcgtagctgtaacatctgacgagcaagtaggacgtcgtcttgcgcttgtttggggtgtacaagcatttatggctgagaagcgcgcagcttctactgacgaaatgttagatacagcgattcaaacaggtatggatgcaggtctaatcggacttggagacactgtagtaatcactgctggtgttccagttgctgaaactggtacaacaaacttaatgaaaatccacgttgttggtgaagaagttgctaaaggacaaggaatcggtcgtaaagctgcaaaaggtaaagtagttgtagcgaaaacagctgctgaagctgtagcgaacgtaaacgaaggtgatatccttgttacaacaagcactgataaagatatgatccctgcaatcgaaaaagctgctgctctagttgtagaagaaggcggtctaacaagccatgcggctgttgtaggtgtatcaatcggtattcctgttatcgttggtgtaaacggcgtaacagcaactttaaaaaatggccaagaagtaacagttgatgcagcacgcggaattgtttataatggacatgcggaagtgctataa

SEQ ID NO: 222 - protein, 585 aa, Bacillus cereus ATCC 10987
MRKTKIVCTIGPASESIEKLEQLIEAGMNVARLNFSHGSHEEHGARIKNIREASKKTGKTVGILLDTKGPEIRTHDFVDGQAELVTGAEVVISTEQVLGTAEKFSVSYAGLYDDVNPGSRILIDDGLIELEVIEKADGNIRTKVLNSGTVKNKKGVNVPNVSIKLPGITEKDVKDIIFGIEQKVDFIAASFVRKAADVLEIRELLEEHNAQYIQIVPKIENQEGIDNIDSILEVSDGLMVARGDMGVEIPPEEVPLVQKRLIKKCNVLGKPVITATQMLDSMQRNPRPTRAEASDVANAIFDGTDAIMLSGETAAGQYPVEAVTMMANIAVRVEKSLQYEDMFKKRIKEFTPTITDAISQSVAHTALALDVAAIVAPTESGYTAKMISKYRPKSPIVAVTSDEQVGRRLALVWGVQAFMAEKRAASTDEMLDTAIQTGMDAGLIGLGDTVVITAGVPVAETGTTNLMKIHVVGEEVAKGQGIGRKAAKGKVVVAKTAAEAVANVNEGDILVTTSTDKDMIPAIEKAAALVVEEGGLTSHAAVVGVSIGIPVIVGVNGVTATLKNGQEVTVDAARGIVYNGHAEVL

SEQ ID NO: 223 - DNA, 1344 bp, Methanococcus maripaludis S2
  CDS (1)..(1344): transl_table=11
ttggttgaaaaatcgacggaatataggaaaaccaaaattctggttactatggggccatctcttgacggaacttttgaaaaaagtcttgaatttattgatggaattcgctttaacatgtctcacacaaatacaaaacatattgaaaaatatctcgatattttaaataaaaaaaatattgcaaaactcatggatttaaagggaaacaagattaggataaaaaaatcaaatttttcagaactcattgaaaatcaggttgtaaaacttggaaaagatattctaatttcatatattccagaatgtattaaaaagggccaaaatatcctgattaatgatggaaaaataaaattaatcgttgaaagtgttgaaaaagatataactgcacgtgttttagttggaggacacataaaagaaaaaatgggagtaaactttcctgaaggatgctttccaaacgatttaacagatgaagatataaaaaacgtgaaatttgcagttgaaaatgaatttgaatacattgcactatctttcgttagaagtgaaacggatattttgaatttaaaaaatttaattaaagaatattctggaaattgctcagttattgcaaaaatcgagaccaaagaaggattgaaaaacattgatgagattttaaatcattcggatggcgtaatgattgcgagaggcgatcttggagttgaagttgccattgaatatctgccgataattcaaaaaaatattataaaacttgcaaatgagaagggaaaactcataattactgcaacccagatgctcgactcaatggtaaataatccgtatcccacaagagcagaagttacggatgttgcaaatgcaatatttgatggaaccgactgtttaatgctttcaaatgaaaccacaattggaaaatatccaatcgaatcaataaaaactctcgataatattgcaagagtttcagaaaatgatatttcaaaatacaaacaggaaatagaatttgaagaacattcaatctattcaggaattgcctatgcagttgaagctctttcaaaaaaattaaatcctaagatagtaattactccaacaacttcgggaaaaactccgctcagaatttcaaaattccggtttaattcaccaattattgcccttgctcctgaaaatatagtttttagaaaattaagattggtttggggagtaattccaataaaaattgatgaaataggagatgttgatgaagtacttgaaatatctaaaaaaattgcgaaaaatataattgacagcggtatttacgttgtaacgctcgggcacccaaaaggcgagaaaaaaacaaacgttataaaagttgagagcatataa

SEQ ID NO: 224 - protein, 447 aa, Methanococcus maripaludis S2
MVEKSTEYRKTKILVTMGPSLDGTFEKSLEFIDGIRFNMSHTNTKHIEKYLDILNKKNIAKLMDLKGNKIRIKKSNFSELIENQVVKLGKDILISYIPECIKKGQNILINDGKIKLIVESVEKDITARVLVGGHIKEKMGVNFPEGCFPNDLTDEDIKNVKFAVENEFEYIALSFVRSETDILNLKNLIKEYSGNCSVIAKIETKEGLKNIDEILNHSDGVMIARGDLGVEVAIEYLPIIQKNIIKLANEKGKLIITATQMLDSMVNNPYPTRAEVTDVANAIFDGTDCLMLSNETTIGKYPIESIKTLDNIARVSENDISKYKQEIEFEEHSIYSGIAYAVEALSKKLNPKIVITPTTSGKTPLRISKFRFNSPIIALAPENIVFRKLRLVWGVIPIKIDEIGDVDEVLEISKKIAKNIIDSGIYVVTLGHPKGEKKTNVIKVESI

SEQ ID NO: 225 - DNA, 1656 bp, Nasonia vitripennis
  CDS (1)..(1656)
atggtctggataaccgccgacgataagatggctggcaagccgaactttaccgcccagaacgcccagagtcatctcgaccacatgtgcgctctcgacatcgactctcacaccctcttcacccggctctccggcatcatctgcacgatcggaccggtctcccgttccgtcgagatgctggagcagatgatcgagaccggcatgaacgtcgcccgcatgaacttcagccacggctcgcacgagtaccacgcggagacgatcgccaacgtccgccaggcccagaagaatctcaccgaaaagaatggcttctgtgtaccagttgctattgcacttgacaccaagggacccgagatccgtactggcctcctcgaagggggtggctctgctgaagtcgaactgaagaagggccagaccttcaagttaacgacggacaaagcctacgcggagaaaggcaatgctgacaccgtctatgtcgactacgccaacatatctaaagttttgcaaaagggaaacagagtgtatgtcgacgatggcttgatgtcgttgatcgtcactggagtcagcgacaataccattacaacgactgtcgagaatggtggaactcttggctcgcgcaagggtgtcaatcttccgggagtcccagtcgacttgccagctgtctccgagaaggacaagtctgacttgcagttcggcgttgagcaagaggtcgacatgatttttgcgtccttcattcgtaacgctgctgctcttactgagattcgctctatccttggcgacaagggtaagaacattaaaatcatctcgaagatcgagaaccagcagggtatgaccaaccttgacgagatcattgaggcttctgacggtatcatggttgctcgtggtgatctgggtatcgagatcccacctgagaaggtgttccttgcccagaagtgcatgattagccgatgcaacaaggttggcaagcctgttatctgcgctactcagatgcttgagtctatggtgaagaaacctcgcgccaccagagccgagtcctccgatgtggctaatgctattcttgatggagccgattgcgttatgctttccggtgaaaccgccaagggagagtacccgttggaatgcgtgcgcacgatggctaatatctgcaaggaagcggaggctgtgatttggcaaaatcagctcttcgctgatctgtccaacaaggctgtgcctccgattgatgcgacgcacgcagtggctatcgcatctgtcgaagcggctgccaagtgtctcgctagtgccatcatagttatcaccacttctggtcggtctgcgcacttgatctccaagtacaggccacgctgccctattattgcggtcacgaggttccaccaggttgctcggcaagcgcatctttacagaggcattcttcctctccactacacagaggctccattatctgactggcttaaggatgttgatatccgtgtacaatatggtttaaactttggcaaaggtcgtggtttcgtacgaactggagattccgtcgtgattgttactggctggaagcagggctctggctttacgaatactttacgcattgtgtacgtagatccagaatttttagttgaacagacttgtgatatagttagtgattctgattcttacgaagatctttactag

SEQ ID NO: 226 - protein, 551 aa, Nasonia vitripennis
MVWITADDKMAGKPNFTAQNAQSHLDHMCALDIDSHTLFTRLSGIICTIGPVSRSVEMLEQMIETGMNVARMNFSHGSHEYHAETIANVRQAQKNLTEKNGFCVPVAIALDTKGPEIRTGLLEGGGSAEVELKKGQTFKLTTDKAYAEKGNADTVYVDYANISKVLQKGNRVYVDDGLMSLIVTGVSDNTITTTVENGGTLGSRKGVNLPGVPVDLPAVSEKDKSDLQFGVEQEVDMIFASFIRNAAALTEIRSILGDKGKNIKIISKIENQQGMTNLDEIIEASDGIMVARGDLGIEIPPEKVFLAQKCMISRCNKVGKPVICATQMLESMVKKPRATRAESSDVANAILDGADCVMLSGETAKGEYPLECVRTMANICKEAEAVIWQNQLFADLSNKAVPPIDATHAVAIASVEAAAKCLASAIIVITTSGRSAHLISKYRPRCPIIAVTRFHQVARQAHLYRGILPLHYTEAPLSDWLKDVDIRVQYGLNFGKGRGFVRTGDSVVIVTGWKQGSGFTNTLRIVYVDPEFLVEQTCDIVSDSDSYEDLY

SEQ ID NO: 227 - DNA, 1587 bp, Magnaporthe grisea 70-15
  CDS (1)..(1587)
atggctaccgcccttgaccacctctacattggcggccgcatcaactggctggcccagttgaacacggctgcccagcctgacaagaactaccgccgttcttccatcatctgcaccattggccccaagaccaactcggtcgaggccatgaacgacctgcgcaaggccggcatgaacgtcgtccgcatgaacttctcccacggaagctacgagtaccaccagtccgttatcgacaatgcgcgtgaggctgagaagcagatgcccggccgtcagctcgccattgctctcgacaccaaaggccccgagatccgtaccggcaacaccaagaacgatgaggacctgcccatctcggccggcaaggagcttaactttaccactgatgagcagtacgccaccagctgtgacacggacaatgtctacgtcgactacaagaacatcaccaaggtcattgagaagggacgcattatttatgtcgacgatggtgtcttggcttttgaggttctcgatgtgattgacgagaagaccgtccgcgtccgtgcccgcaacaacggcttcatctgctccaagaagggtgtcaacctgcccaacaccgacgttgacctgcccgccctttccgagaaggacaaggccgacttgaggtttggtgtcaagaacaacgtcgacatggtctttgcttcgttcatccgccgcggccaggacatcaaggatatccgtgaggttctcggccaggatggcgcccacatccagatcattgccaagattgagaaccgtcaaggcctgaacaacttccctgagatcctcaaggagactgatggcgtcatggttgcccgtggtgacctgggtattgagatccctgccgccgaggttttcgcggctcagaagaagatgattgctctgtgcaacatggccggcaagcccgtcatctgcgctactcagatgctcgagtccatgatcaagaacccccgccccacccgtgccgagatcagcgatgttggcaacgccgtcaccgacggttcggactgtgtcatgctttccggtgagacggccaagggtagctacccctgtgaggccgtcagggagatgagcgatgcttgtctcaaggctgagaacacgatcccgtacgtcagccactttgaggagatgtgcggtgctgtccaccgcccagtcagcattgtcgagtcgtgcgccatggccgctgttcgtgcctcgcttgacatcaacgctggcggcatcatcgtcctctctacctcgggcgtctcggcacgtctcctgtccaagtaccgcccggtctgccccatcttcatggtcacccgcaacgcctcggcatcaaggtacagccacttgtaccgtggtgtctacccattcctgttccctgaggccaagcccgacttctccaaggtcaactggcaggaggatgtcgaccgccgcatcaagtggggtgtcaagcacgccctcgatctgggtgtgcttgagaagaacgactcgattgtcgtcgtccagggctggaagggcggcatgggcaacaccaacaccatccgtgtgctcaaggccgataccgagagccttggaattggccaggctgacatttaa

SEQ ID NO: 228 - protein, 528 aa, Magnaporthe grisea 70-15
MATALDHLYIGGRINWLAQLNTAAQPDKNYRRSSIICTIGPKTNSVEAMNDLRKAGMNVVRMNFSHGSYEYHQSVIDNAREAEKQMPGRQLAIALDTKGPEIRTGNTKNDEDLPISAGKELNFTTDEQYATSCDTDNVYVDYKNITKVIEKGRIIYVDDGVLAFEVLDVIDEKTVRVRARNNGFICSKKGVNLPNTDVDLPALSEKDKADLRFGVKNNVDMVFASFIRRGQDIKDIREVLGQDGAHIQIIAKIENRQGLNNFPEILKETDGVMVARGDLGIEIPAAEVFAAQKKMIALCNMAGKPVICATQMLESMIKNPRPTRAEISDVGNAVTDGSDCVMLSGETAKGSYPCEAVREMSDACLKAENTIPYVSHFEEMCGAVHRPVSIVESCAMAAVRASLDINAGGIIVLSTSGVSARLLSKYRPVCPIFMVTRNASASRYSHLYRGVYPFLFPEAKPDFSKVNWQEDVDRRIKWGVKHALDLGVLEKNDSIVVVQGWKGGMGNTNTIRVLKADTESLGIGQADI

SEQ ID NO: 229 - DNA, 1554 bp, Apis mellifera
  CDS (1)..(1554)
atggtttccggaaaaacgatctctcatgcattatatgctcaaacccaactagatcatgtgtgtgctctggatatcgatgctcctataggagctgtccgtctttcagggattatttgtacaattggaccagcttcaagatctattgatatgcttgaaaaaatgatcgatacgggtatgaacattgctagattaaatttctcgcacggaactcatgaatatcatgctgagactattgctaatgtgcgacaagcacagaaaaacgtttcctctaaagctggattaagcattcctgtaggaattgctcttgatactaaaggtcctgaaatccgtactggacttttagaaggtggtggagctgctgaagtcgaattaaaaaaagatcaactttttaaattgtctactgataaagcatatgcagaaaaaggcacttcaagtattgtttatgttgattatgaaaatattactaaagttttgaagcctaatagtcgcgtttttgtcgatgatggtttaatttcccttaaagttactgccatccttgtaactgttgttgaaaatggtgggatgttgggttctcgtaaaggtgtcaatctaccaggtactcctgtagatttacctgctgtttctgaaaaagataagtctgatttaatattcggtgttgaacatgaagttgatatgatttttgcctcgtttatacgagatgcacacgctttgacagaaattcgaacaattcttggtgaaaaaggaaaaaatattaaagtaatatctaaaattgaaaatcatcagggcgtagtaaatattgatgaaattattgatgcttctgatggtattatggtagcacgtggtgatcttggtattgaaataccaccagagaaagtattcttagctcaaaaatctgctattagcaaatgtaataaagttggaaaaccaataatttgtgctacacaaatgcttgaatctatggtgaaaaaaccacgtgcaaccagagctgaatcatctgatgtagctaatgctattcttgatggagcagattgtgttatgttatcaggagaaactgctaaaggagattatccattggaatgtgtactcacaatggctaatatttgtaaagaagcagagtctgcaatctggcaaacacaattatttcacgagctttcaatgaaagcaatacctccaattgatgctacacatgccgtagcgattgctgttgtagaagcatctgtgaaatgtttagctagtgctattatagtaattacaactaccggccattccgcgtatttaatttctaaatacagaccacgttgcccaattattacagttactagacactcccagactgcacgacaatcacatctttatcgtgggattttgccacttcactttgaagaaccacgattagctgattgggtaaaagatgttgatgtacgtgttcagtttggtatgaaatttggcaaaaatcaaggtttcattaaacctggagatgcagttatagtagtcactggatggagaaaaggcgccggatttacgaactcacttcgtattgtgacggtcgaataa

SEQ ID NO: 230 - protein, 517 aa, Apis mellifera
MVSGKTISHALYAQTQLDHVCALDIDAPIGAVRLSGIICTIGPASRSIDMLEKMIDTGMNIARLNFSHGTHEYHAETIANVRQAQKNVSSKAGLSIPVGIALDTKGPEIRTGLLEGGGAAEVELKKDQLFKLSTDKAYAEKGTSSIVYVDYENITKVLKPNSRVFVDDGLISLKVTAILVTVVENGGMLGSRKGVNLPGTPVDLPAVSEKDKSDLIFGVEHEVDMIFASFIRDAHALTEIRTILGEKGKNIKVISKIENHQGVVNIDEIIDASDGIMVARGDLGIEIPPEKVFLAQKSAISKCNKVGKPIICATQMLESMVKKPRATRAESSDVANAILDGADCVMLSGETAKGDYPLECVLTMANICKEAESAIWQTQLFHELSMKAIPPIDATHAVAIAVVEASVKCLASAIIVITTTGHSAYLISKYRPRCPIITVTRHSQTARQSHLYRGILPLHFEEPRLADWVKDVDVRVQFGMKFGKNQGFIKPGDAVIVVTGWRKGAGFTNSLRIVTVE

SEQ ID NO: 231 - DNA, 1515 bp, Candida albicans SC5314
  CDS (1)..(1515): transl_table=12
atgtctcactcatctttatcttggttatccaacttcaatgttgaaactgttccatctaaatatttgagaagatcctcaattatcggtaccattggtccaaaaaccaacaacgtggacgttttggttaaattgagaaaagctggtttgaacgttgtcagaatgaatttctcccatggttcttatgaataccatcaatctgtcattgacaatgctagaaaatctgaagaagtctacaaaggtagaccattggccattgccttggataccaaaggtccagaaatcagaactggtactaccattggtgacaaagattacccaattccaccaaaccacgaaatgatcttcaccactgatgatgcttacaaaactaaatgtgacgacaaggtcatgtacattgactataagaacatcaccaaagtcattgctccaggtaaaatcatatatgttgatgatggtgtcttgtcatttgaagtcatctccgttgatgatgaacaaactttgaaagtcagatctcttaacgctggtaagatctcttcccacaaaggtgtcaacttgccaggtaccgatgttgatttgccagctttatcagaaaaagatatcgctgatatcaaatttggtgtcaaaaacaaggtccacatgatctttgcttcctttatcagaactgctaacgatgttttggaaattagaaaagttttgggtgaagaaggtaaggacattcaaattatctccaagatcgaaaatcaacaaggtgtcaacaactttgacgaaattttggaagttaccgatggtgttatggttgctagaggtgatttgggtattgaaattccagctccacaagtgtttgttgtccaaaaacaattgattgctaaatgtaacttggctgccaaaccagtcatttgtgccacccaaatgttggaatccatgacctacaacccaagaccaaccagagctgaagtttctgatgttggtaacgctatcttggatggtgctgactgtgttatgttgtctggtgaaaccgctaaaggtaactacccagttgaagccgtctctatgatgcacaacacttgtcttaccgctgaaaaggccattgcctacccacaattgttcaacgaattgagatcattggctaaaaaaccaactgctaccactgaaacttgtgctgttgccgctgtttctgctgcttacgaacaagatgctaaagctattgttgtcttgtccaccagtggtctttctgctagattggtttctaaatacaaaccagatgttccaattttgatggttaccagaaacgaaagagctgctaaattctcccacttgtacagaggtgtctacccattcatttacgataaaccaagtattgaaaactggcaagaagatgttgaaaacagattgagatgggctgtttctgaagctgttgaattgggaatcatttctaaaggtgactcaattgttactgtccaaggttggactagaggttctggtcactctaacactgttagaatcgtccaagcttaa

SEQ ID NO: 232 - protein, 504 aa, Candida albicans SC5314
MSHSSLSWLSNFNVETVPSKYLRRSSIIGTIGPKTNNVDVLVKLRKAGLNVVRMNFSHGSYEYHQSVIDNARKSEEVYKGRPLAIALDTKGPEIRTGTTIGDKDYPIPPNHEMIFTTDDAYKTKCDDKVMYIDYKNITKVIAPGKIIYVDDGVLSFEVISVDDEQTLKVRSLNAGKISSHKGVNLPGTDVDLPALSEKDIADIKFGVKNKVHMIFASFIRTANDVLEIRKVLGEEGKDIQIISKIENQQGVNNFDEILEVTDGVMVARGDLGIEIPAPQVFVVQKQLIAKCNLAAKPVICATQMLESMTYNPRPTRAEVSDVGNAILDGADCVMLSGETAKGNYPVEAVSMMHNTCLTAEKAIAYPQLFNELRSLAKKPTATTETCAVAAVSAAYEQDAKAIVVLSTSGLSARLVSKYKPDVPILMVTRNERAAKFSHLYRGVYPFIYDKPSIENWQEDVENRLRWAVSEAVELGIISKGDSIVTVQGWTRGSGHSNTVRIVQA

SEQ ID NO: 233 - DNA, 1587 bp, Ustilago maydis 521
  CDS (1)..(1587)
atgatctacgctcctattgccaagacacagctcgagtggtacgcctcgctcaacccgcttgagcacggcgttgacaacaagttcttccgtaagacctcgatcatcgctaccattggccccaagaccaacaatgtcgagatgctcggcgctctgcgtcaggctggtatgaacatcgtccgtctcaatgcttcgcacggttcgcacgagtacttcaagtcggttgtcgacaacgcacgtgccgttgttgccaagacccctggccgtccacttgccatcgctctggacaccaagggtcccgagatgcgaactggtgtcatggtcaacggtgaggacgtcaagatctccatgggccacgagttctatgtcaccaccgacgatgcgtatgctgaaaagtgcagcctggactacctctacattgactacaagaacctcgcccagaaggtcgaggtgggccgaaccatcttcatcgatgacggcatcctttcgctccaggtgctcgccatcgagagcgacaagctcgtcaaggtgcgcgccgtcaacaacggtgtcctttcttccaagaagggtgtcaaccttcccatgaccgaggttgacctgcccgcgatctcggacaaggaccgcaaggacatcgagtttgccgtcgagcaggacctcgacatgatctttgcctcgttcatccgacgcggcagcgatgttcgcaccattcgagaaattctcggcgagaagggtgcgcacatcaagatcatctccaaggtggagaaccatcagggtgttcagaactttgacgagatcctcaaggagtcggacggtatcatggtggcacgtggtgacctcggtatcgagatccctgctccccaggtgtttatggcgcaaaaaatgatgatctccaagtgcaacattgctggcaagcccgtcatctgcgcaacccagatgctcgagtcgatgattgtcaacaaccgacccacgcgtgccgaagtttccgacgtggccaacgctgttctcgacggtgctgactgtgtcatgctttccggagagactgccaagggtgcctaccctatcgaggctgtcaagatgatggccgagaccgcctaccttgccgagcagagcgtttcgtacgtgccgctcttcaacgagatgcgcactctcacttcaatccccacggacaccaacgagaccatcgccatggctgcggttgctgcttcgctcgagcagcacgccggtgcgatcttgctcatgtcgaccagcggtaccacggcacgactggtcagcaagtaccgtccaagctgccctatcctgactatcacgcgtaactcgcacaccgcgcgcgatgtgcacttgtaccgtggctgctacccgttcctctacccccacgctcgccccgaggacaacagcaagtggcaggaggacgtcgacaaccgcatcaagtacggtcttgctgaggcgctcgcgctcggcatcattgagaagggcgatgtcgtcatcaccctgcagggctggagggcacagagcggaagcaccaacaccatccgtatcctcagcgttcccgagagcgcgcgtgatttcaagctcgagggcactcaggtttag

SEQ ID NO: 234 - protein, 528 aa, Ustilago maydis 521
MIYAPIAKTQLEWYASLNPLEHGVDNKFFRKTSIIATIGPKTNNVEMLGALRQAGMNIVRLNASHGSHEYFKSVVDNARAVVAKTPGRPLAIALDTKGPEMRTGVMVNGEDVKISMGHEFYVTTDDAYAEKCSLDYLYIDYKNLAQKVEVGRTIFIDDGILSLQVLAIESDKLVKVRAVNNGVLSSKKGVNLPMTEVDLPAISDKDRKDIEFAVEQDLDMIFASFIRRGSDVRTIREILGEKGAHIKIISKVENHQGVQNFDEILKESDGIMVARGDLGIEIPAPQVFMAQKMMISKCNIAGKPVICATQMLESMIVNNRPTRAEVSDVANAVLDGADCVMLSGETAKGAYPIEAVKMMAETAYLAEQSVSYVPLFNEMRTLTSIPTDTNETIAMAAVAASLEQHAGAILLMSTSGTTARLVSKYRPSCPILTITRNSHTARDVHLYRGCYPFLYPHARPEDNSKWQEDVDNRIKYGLAEALALGIIEKGDVVITLQGWRAQSGSTNTIRILSVPESARDFKLEGTQV

SEQ ID NO: 235 - DNA, 1590 bp, Cryptococcus neoformans var. neoformans B-3501A
  CDS (1)..(1590)
atggccggtaccccctcttcccagctcgcttggctctctggtctcagcaccaatttcaatgagatgtccgccgaccagaagttcctccgcaagacttccatcattgctaccattggccccaaaaccaacaacgtcgagactctcgtgcagctcgctgatgcgggcatgaacatcgttcgaatgaacttttctcatggctcctatgagtaccatcaatctgtcattgacaatgctcgtgctgctgctgccaagagcccttctggccgacccattgccatcgctctcgacaccaaaggtccagagattaggactggcttgatgaaggatgacaccgatgtccccatttctgctggccacgaattctgggtcaccaccgacaaggcttatgcagaggctggtactgccgagcacatctatattgactataccaacatcgtcaaggtcactgccccgggcaagctcatctacgttgacgatggtattctttctctccaagtcatctctatccaaggcgaaaagatccgtgtcaagtctctcaactcgggcgttctctcctctcgcaagggtgttaacctgcccaagaccgctgtggatcttcccgctctttctgaaaaggacaagtctgatcttgccttcggtgtcaagaacggtgtcgacatgatcttcgcttctttcatccgttctgccaacgatgtcaaggagattcgaaaggtcctcggccctgaaggcgccgacatcaaaatcattgtcaagattgagaacgagcagggagtgatgaacttcgatgagattctcagggagactgacggcgtcatggtcgcccgaggtgatttgggtattgaaatccccgcaagtcaggtattcatggcccaaaagatgatgattgccaagtgcaacgtcgccggcaagcctgtcatttgtgctactcagatgcttgagtccatgacttacaaccctcgacccactcgtgccgaagtttccgatgttgccaacgcggtcatcgacggtgctgactgtatcatgctttccggcgagactgccaagggcaagtatcccattgaagctgtcaagatgatggctgagactgctttccttgctgagtcttctatcgcctaccctcctcttttcgaccagctccgagctcttactcctcgacctaccgagaccgctgagactcttgctctttctgctgttgccgctgctatcgaacaggatgccggcgctatcattgtgctttcaacttccggtgtttccgccaggttgatttccaagtacaggcctgcttgtcccatcatctgtgtgacccgaaacgaacaaaccgctcgacagctccacctttcgcgaggtgtttaccccgtctggttccctgaaccccgcggtattcctgctgagaagtggcagattgacgttgacaacaggattcgatatggtctcaggatggctctcggtttgggcatcattaagcctgaggctaccgtcatggctgtccaaggatggaagggcggtcttggccacactaacacgcttcgtatcctctccgttccttctgaccccgctgacctcgacctccactctatcgagcgcgactaa

SEQ ID NO: 236 - protein, 529 aa, Cryptococcus neoformans var. neoformans B-3501A
MAGTPSSQLAWLSGLSTNFNEMSADQKFLRKTSIIATIGPKTNNVETLVQLADAGMNIVRMNFSHGSYEYHQSVIDNARAAAAKSPSGRPIAIALDTKGPEIRTGLMKDDTDVPISAGHEFWVTTDKAYAEAGTAEHIYIDYTNIVKVTAPGKLIYVDDGILSLQVISIQGEKIRVKSLNSGVLSSRKGVNLPKTAVDLPALSEKDKSDLAFGVKNGVDMIFASFIRSANDVKEIRKVLGPEGADIKIIVKIENEQGVMNFDEILRETDGVMVARGDLGIEIPASQVFMAQKMMIAKCNVAGKPVICATQMLESMTYNPRPTRAEVSDVANAVIDGADCIMLSGETAKGKYPIEAVKMMAETAFLAESSIAYPPLFDQLRALTPRPTETAETLALSAVAAAIEQDAGAIIVLSTSGVSARLISKYRPACPIICVTRNEQTARQLHLSRGVYPVWFPEPRGIPAEKWQIDVDNRIRYGLRMALGLGIIKPEATVMAVQGWKGGLGHTNTLRILSVPSDPADLDLHSIERD

SEQ ID NO: 237 - DNA, 1719 bp, Cryptococcus neoformans var. neoformans B-3501A
  CDS (1)..(1719)
atggttcttggacatttctctccccaaacgaacaccactgttccccctcctccccatccttctgcctttgtgcccctgtttcaaacaaatacttccgtcgtttctggtaaacccaacgcctttagcaccatggccggtaccccctcttcccagctcgcttggctctctggtctcagcaccaatttcaatgagatgtccgccgaccagaagttcctccgcaagacttccatcattgctaccattggccccaaaaccaacaacgtcgagactctcgtgcagctcgctgatgcgggcatgaacatcgttcgaatgaacttttctcatggctcctatgagtaccatcaatctgtcattgacaatgctcgtgctgctgctgccaagagcccttctggccgacccattgccatcgctctcgacaccaaaggtccagagattaggactggcttgatgaaggatgacaccgatgtccccatttctgctggccacgaattctgggtcaccaccgacaaggcttatgcagaggctggtactgccgagcacatctatattgactataccaacatcgtcaaggtcactgccccgggcaagctcatctacgttgacgatggtattctttctctccaagtcatctctatccaaggcgaaaagatccgtgtcaagtctctcaactcgggcgttctctcctctcgcaagggtgttaacctgcccaagaccgctgtggatcttcccgctctttctgaaaaggacaagtctgatcttgccttcggtgtcaagaacggtgtcgacatgatcttcgcttctttcatccgttctgccaacgatgtcaaggagattcgaaaggtcctcggccctgaaggcgccgacatcaaaatcattgtcaagattgagaacgagcagggagtgatgaacttcgatgagattctcagggagactgacggcgtcatggtcgcccgaggtgatttgggtattgaaatccccgcaagtcaggtattcatggcccaaaagatgatgattgccaagtgcaacgtcgccggcaagcctgtcatttgtgctactcagatgcttgagtccatgacttacaaccctcgacccactcgtgccgaagtttccgatgttgccaacgcggtcatcgacggtgctgactgtatcatgctttccggcgagactgccaagggcaagtatcccattgaagctgtcaagatgatggctgagactgctttccttgctgagtcttctatcgcctaccctcctcttttcgaccagctccgagctcttactcctcgacctaccgagaccgctgagactcttgctctttctgctgttgccgctgctatcgaacaggatgccggcgctatcattgtgctttcaacttccggtgtttccgccaggttgatttccaagtacaggcctgcttgtcccatcatctgtgtgacccgaaacgaacaaaccgctcgacagctccacctttcgcgaggtgtttaccccgtctggttccctgaaccccgcggtattcctgctgagaagtggcagattgacgttgacaacaggattcgatatggtctcaggatggctctcggtttgggcatcattaagcctgaggctaccgtcatggctgtccaaggatggaagggcggtcttggccacactaacacgcttcgtatcctctccgttccttctgaccccgctgacctcgacctccactctatcgagcgcgactaa

SEQ ID NO: 238 - protein, 572 aa, Cryptococcus neoformans var. neoformans B-3501A
MVLGHFSPQTNTTVPPPPHPSAFVPLFQTNTSVVSGKPNAFSTMAGTPSSQLAWLSGLSTNFNEMSADQKFLRKTSIIATIGPKTNNVETLVQLADAGMNIVRMNFSHGSYEYHQSVIDNARAAAAKSPSGRPIAIALDTKGPEIRTGLMKDDTDVPISAGHEFWVTTDKAYAEAGTAEHIYIDYTNIVKVTAPGKLIYVDDGILSLQVISIQGEKIRVKSLNSGVLSSRKGVNLPKTAVDLPALSEKDKSDLAFGVKNGVDMIFASFIRSANDVKEIRKVLGPEGADIKIIVKIENEQGVMNFDEILRETDGVMVARGDLGIEIPASQVFMAQKMMIAKCNVAGKPVICATQMLESMTYNPRPTRAEVSDVANAVIDGADCIMLSGETAKGKYPIEAVKMMAETAFLAESSIAYPPLFDQLRALTPRPTETAETLALSAVAAAIEQDAGAIIVLSTSGVSARLISKYRPACPIICVTRNEQTARQLHLSRGVYPVWFPEPRGIPAEKWQIDVDNRIRYGLRMALGLGIIKPEATVMAVQGWKGGLGHTNTLRILSVPSDPADLDLHSIERD

SEQ ID NO: 239 - DNA, 1560 bp, Encephalitozoon cuniculi GB-M1
  CDS (1)..(1560)
atgtggctcgttgaagagaaatatcttgttcctttctatgaatatcattacgacatgctttgccgaccctatcaatgcacctgttgccagatccttggtggatgggattttgtcatccagagacctcatcacaacggctatagtcttcatgcggcccgtggctgcatgctggattatatctactcctttgggcaggattacgtctcctatctgcagagcacctatcattggtctcaaaagcttgataaatttggaaagtgtttggcgcaagcaatgagaatggtgctgacaaagatagtctgcacgattggacccagaacatcttctagggagaagatcaaggagctgatagatgctgggatgtcgattgcaagactgaacttcagccatggatcaagggaagcacatctggaagtgattaggaacatcagagactccagaagtggtgcagggaggcatgtttcaatagcactggacacaagggggcctgaggtgaggcttaggacaccggagatgaaggatatcaaggtggagggtggagaagttctccggttctcccttctttcttctgaaaaggacatctggatacccggtgttgaccttaagtctctgggtgtagacaacagggtgtttattgacgacggggcaatcgaactgagggtagtcaatgtggaagaagatggatttgaatgcgaggtgctgaacagtggcatgatcaagagcaataagtccatgaacttccctggcacggacattggagatagggctctgggggatgaggacaagaatgatatcgcctttgggttggagaatgggatagatatggtttttgcatcttttgtgagctgccgggcggatgtcgaggagataagaaggcttgtcggaagcaaggtcccggttgtatccaagatagagtcgtgtctagggatgaggaatctgaaggaaatagccctatgctctgacggggtgatgatagcaaggggagatcttggagttgagattgggctggaaaacatgttcagtgcccagaagagaatactttacgaagtgaagagggaggggaggcctgtgatctgtgcaacacaaatgatggagagcatgactttgaagaatgcgccgaaccggtcagaaatttctgatgttggaaatgcagttcttgatggatgcgactgtgtgatgttgagtgcagagtcggctgttgggatgttccctgtcgagactgttaaattcatgaggagcatctgtgctgatgcagagagatatgacatggagagcaggaagggggcaggggcttgcggggtgtcttcctatgtggatggagttgtgatatgctctggtacggagtcacagatagagaagatctacctgagcaagcctgaaactcccattattgtgatttccgagtccctgtggattctcaggaggttcagcatctatcgaggaatcattcctgtgtatggtaaggggtctgaggacgcggaagctactctgcgaaggctaggactgaggggaagattcctagctgtcggcagagaagatgtgaggatggtgagtgtttga

SEQ ID NO: 240 - protein, 519 aa, Encephalitozoon cuniculi GB-M1
MWLVEEKYLVPFYEYHYDMLCRPYQCTCCQILGGWDFVIQRPHHNGYSLHAARGCMLDYIYSFGQDYVSYLQSTYHWSQKLDKFGKCLAQAMRMVLTKIVCTIGPRTSSREKIKELIDAGMSIARLNFSHGSREAHLEVIRNIRDSRSGAGRHVSIALDTRGPEVRLRTPEMKDIKVEGGEVLRFSLLSSEKDIWIPGVDLKSLGVDNRVFIDDGAIELRVVNVEEDGFECEVLNSGMIKSNKSMNFPGTDIGDRALGDEDKNDIAFGLENGIDMVFASFVSCRADVEEIRRLVGSKVPVVSKIESCLGMRNLKEIALCSDGVMIARGDLGVEIGLENMFSAQKRILYEVKREGRPVICATQMMESMTLKNAPNRSEISDVGNAVLDGCDCVMLSAESAVGMFPVETVKFMRSICADAERYDMESRKGAGACGVSSYVDGVVICSGTESQIEKIYLSKPETPIIVISESLWILRRFSIYRGIIPVYGKGSEDAEATLRRLGLRGRFLAVGREDVRMVSV

SEQ ID NO: 241 - DNA, 1539 bp, Tribolium castaneum
  CDS (1)..(1539)
atgagtacgcagccgaaaacaaacctcctggactacatcagtagtttggacattacagccaaaccgaaatatctgcggctaacgggaatcgtgtgtacgatcggaccagcatgccagaaggtagagattttggagaaaatgctcgaagctggaatgaacgtggcacgtttgaacttctctcacggtactcacgagtaccacgtcgatttgatcaaaaacataaggaccgctgtggacaactacagcaagagaataggccgctactgcccccttgccatcgccatcgacaccaaaggctccgaaatccgaactggagtactagaagggggcatctctgccgaagtggtcctggagaaagggtcaaaagtgaccgtgacaaccgacgaaaagtatgccaaaaagtgcaccaagagcgtcatctacgtcgattataaaaacatcaccaaggtgcagaaacccggaaaccagattttcatcgacgacggtttgattaccctcaactgtgagaaaatccaaggctcggagatcacttgctcggttgccaatgggggaaaactggggagtagtaaaggggtgaacctgccaggcgtcgagaaagacctgcccacggtttcggaaaaggacaagaaggatttgaaattcgcagttgagcagaacgtcgactgtgttttcgcctcgttcacacgaaacgccgaagaagtgcgccagattcgctccattttaggcgacagcaacattcgggtgattgccaagatcgagaacacgcaaggtgtgaagaacatggacgagattattgaagctgccgatgggattctcatcgatcggggcgacctggggatggaaatctccttccagaaggtgttcctcgcccagaaagccatcatcgcgaggtgtaacaaggttggaaagcccattattatcgccacccatttgctggaatcaatggttgataaaccaaggcctacgagagccgagagctcggatgtggccaatgctgtgctggacggtgccgactgtgtgatgctagcaggggagacggccaagggcttgtaccctgtggagtgtgtggagaccatggctttgatttgcaaagaggccgaggcagcggtgtggcaaaaacagctctttaacgacctcaaaagccagcctaaagtaccgcttgacatcgtccaaactaccgcaatatccacagttgaagcctcgatgaactcgctagccacggccatcatcgtggtcacgaaaacgggaaaatcggcacaattgttgtcaaaatacaagccaaagtgcccgattattgcagtgacgaggaatgcgcaagttgcgcgccagttacacttgttcagggcgattatgcccttgtattttgacggccaaagcccaaccgagtggttgaaaaatgtggaagtccgggttaaagccggagttagttatggaaagtcgttggggtttgttaaatcaggggatactgtaattattgtgacgggtttgcatcaagggcctggctctacaaacactcttacgttgatgactgtccaatga

SEQ ID NO: 242 - protein, 512 aa, Tribolium castaneum
MSTQPKTNLLDYISSLDITAKPKYLRLTGIVCTIGPACQKVEILEKMLEAGMNVARLNFSHGTHEYHVDLIKNIRTAVDNYSKRIGRYCPLAIAIDTKGSEIRTGVLEGGISAEVVLEKGSKVTVTTDEKYAKKCTKSVIYVDYKNITKVQKPGNQIFIDDGLITLNCEKIQGSEITCSVANGGKLGSSKGVNLPGVEKDLPTVSEKDKKDLKFAVEQNVDCVFASFTRNAEEVRQIRSILGDSNIRVIAKIENTQGVKNMDEIIEAADGILIDRGDLGMEISFQKVFLAQKAIIARCNKVGKPIIIATHLLESMVDKPRPTRAESSDVANAVLDGADCVMLAGETAKGLYPVECVETMALICKEAEAAVWQKQLFNDLKSQPKVPLDIVQTTAISTVEASMNSLATAIIVVTKTGKSAQLLSKYKPKCPIIAVTRNAQVARQLHLFRAIMPLYFDGQSPTEWLKNVEVRVKAGVSYGKSLGFVKSGDTVIIVTGLHQGPGSTNTLTLMTVQ

SEQ ID NO: 243 - DNA, 1611 bp, Tribolium castaneum
  CDS (1)..(1611)
atggttttcacgacaatttacgacaatgacgagcgcgagatggcctcttccagcgttccgcccctgcagatggaggcggccgacgccagcacccacctggaccacatgtgcgctctggacatccaatcgaaggcgccctttgtgcgcctttctggcattatttgcaccattgggccggcctcgcgcgaccccgcaatgttggagaaaatgatggagactggcatgaatatcgcacgcttgaatttctcgcacggctcgcacgagtaccacgccgagactattaaaaatataaggacggctgtggcgaattatagcaaaaaaattggaatgtcgtatcctttggccattgcgctcgacaccaaagggcccgagatcaggaccgggctgctcgaagggggcggttcagcggaagtcgaactgaaacgcggcgaaaaaatcaccctcaccaccaacaaagcgtacgctgaaaaaggcaccgccagcatcgtctacgtcgactacgaaaacatccaaaaagtgctgaaggtcggcaatcgcgtctacgtcgacgacggcctcatgtcgctcgtttgcaccgaaatcaaaggcgccgacttgatctgcaccatcgaaaacggcggaatgctgggcagtcgcaaaggcgtcaacctgcccggcgtccccgtcgacctccccgccgtttcggaaaaagacaaatccgatctgaaattcggcgtggaacaaggcgtcgacatgattttcgcctcgtttatccgaaacggaagtgcacttagcgagattcgcaatatcctcggccccgaaggcaaaaacatcctcatcatctccaaaatcgaaaaccagcaagggatgcaacacctggatgagataatcaaggctagtgacggcatcatggtggcgagaggtgacttaggcattgaaataccgacggagaaagtcttccttgcgcaaaaggccatgattgccaagtgcaacaaagtgggaaaacctgtcatttgcgccacccagatgctggaaagcatggtgaaaaagccacggcccactcgggccgaaagctccgacgttgccaatgccatcctggatggggctgattgtgtgatgctgtcgggggagacggccaagggggattaccccttggagtgtgtgcacacaatggcgaatatttgtaaagaggcagaggcggcgatttggcagaaacagttgtttcaagatcttacaagcaaggctgtgcctccaatggatgctgctcatactgtggccattgcagcagctgaggcttcgtccaagtgtttggcggctgcgattgttgtggtgacaacatcaggacgctctgcacatctcatctccaagtatagaccgaggtgtcccattattgcagttacaaggaatgcgcaaactgcaagacaggcacacttgtatagggcgattttgccgctccattacgaagccgagaggaaggacgactggctgaaggatgtcgaggctcgtgttaacacgtccatcgagttcggcaaagctcgaggtttcataaaacaaggtgacccggtgattatcgtcacagggtggaagcaaggatccggattcaccaacacgatgcgcattgtgaacgtctaa

SEQ ID NO: 244 - protein, 536 aa, Tribolium castaneum
MVFTTIYDNDEREMASSSVPPLQMEAADASTHLDHMCALDIQSKAPFVRLSGIICTIGPASRDPAMLEKMMETGMNIARLNFSHGSHEYHAETIKNIRTAVANYSKKIGMSYPLAIALDTKGPEIRTGLLEGGGSAEVELKRGEKITLTTNKAYAEKGTASIVYVDYENIQKVLKVGNRVYVDDGLMSLVCTEIKGADLICTIENGGMLGSRKGVNLPGVPVDLPAVSEKDKSDLKFGVEQGVDMIFASFIRNGSALSEIRNILGPEGKNILIISKIENQQGMQHLDEIIKASDGIMVARGDLGIEIPTEKVFLAQKAMIAKCNKVGKPVICATQMLESMVKKPRPTRAESSDVANAILDGADCVMLSGETAKGDYPLECVHTMANICKEAEAAIWQKQLFQDLTSKAVPPMDAAHTVAIAAAEASSKCLAAAIVVVTTSGRSAHLISKYRPRCPIIAVTRNAQTARQAHLYRAILPLHYEAERKDDWLKDVEARVNTSIEFGKARGFIKQGDPVIIVTGWKQGSGFTNTMRIVNV

SEQ ID NO: 245 - DNA, 1674 bp, Tribolium castaneum
  CDS (1)..(1674)
atggtttggtacacgcgcgaaaatgacgatagcgagcaaattaaaccgttgcattgttcacccccgaaacaactcacagcaggagccgcttacacacaactcgaccacaactcgctgcttgacattcaatcacatccaccacaagtgcgtctcactggaataatctgcactttgggaccttcaacgacagatgtcgaaacgttggaaagaatgatcgaagctggaatgaacattgcccgcctaacactctcccacggcacccaggaaatgcacaccgaactgatccaaaacgtgagaaccgccgtcgaaaattacagcaaaagactgggagtcatgtaccccttatccctcgccctcgatatcaaaggacccgaagtccggaccggttacatggaaggcggcatcgccgccgaagtcgagctgaaaaagggcgaacaaatcaaactgacaacagacaaagcgtatctggagaagggcagctcgagcgtgatctacgtcgactacgacaacatccagaaggtggtccaacccgggaaccgtattttcctggacgatggtctcatctccctgatttgcacaagcgtccaaggctcggtcctgacatgtagtgtggaaaacgggggaatgcttggcagttgcaaaaacgtgaacctccccggaatcgatatcgacttacccgtggtgtccgaaaaagacaaggaggatttgcttttcggcgtcgaacacggcattgacaccgttcacgcctcattcatccgcaatgctgtcgatgtgtcggaggttcgagacgtgctagggcgggccggtaacaagatcttgatcatttcgaaaatcgaaaaccaccaaggtgtgcacaacatcgacgaaataatcaaagcttccgacggcattatgatcgggcgaggcgacctagcggtggaaatcggccctgagaagcttttcctcgcccagaagagcatcatagctaagtgtaacaaagcggggaaaccggtcatttgcgccaatcagctgctctactcgatgataaaacgtccaagacccactcgggccgaatgcaccgatgttgcaaacgcggtgcttgacggtgttgactgcgtgatgttgacgggggaaacttttcttggccagcacccgatcgagtgcattcgggccgcgtccaaaatttgcaaagaggccgaaggggccatttggtacaaacaccactttcgggaattgatcgggcatgcgagacctccgctagagacgtcgcatacaatttgcatagctgcagtcgaagctgcaaatcagtgtctagcagctgcgattattgtcacgtcagtttcgggacgttcggcccattcactggcaaagtatcggcccaactgccctattattttagtgacacgtgatccgactgtcgccaaacaagcgaacttattccggggaatcatcccccttttttacgaagtcgagaggaaagacgattggaggcgagatattgaagctaggatcagtttcgggatcagttttggaaagtggagggggtttgtaaggtcgggggaccccatcgtggcagtgaatgggtcacaaagggggtcggggtacactgatacgatccgagtcctgtacgttatgaggcccatagtggaaggggactgcacgtgtgataagaaaacgggtgaccaaaacgtatag

SEQ ID NO: 246 - protein, 557 aa, Tribolium castaneum
MVWYTRENDDSEQIKPLHCSPPKQLTAGAAYTQLDHNSLLDIQSHPPQVRLTGIICTLGPSTTDVETLERMIEAGMNIARLTLSHGTQEMHTELIQNVRTAVENYSKRLGVMYPLSLALDIKGPEVRTGYMEGGIAAEVELKKGEQIKLTTDKAYLEKGSSSVIYVDYDNIQKVVQPGNRIFLDDGLISLICTSVQGSVLTCSVENGGMLGSCKNVNLPGIDIDLPVVSEKDKEDLLFGVEHGIDTVHASFIRNAVDVSEVRDVLGRAGNKILIISKIENHQGVHNIDEIIKASDGIMIGRGDLAVEIGPEKLFLAQKSIIAKCNKAGKPVICANQLLYSMIKRPRPTRAECTDVANAVLDGVDCVMLTGETFLGQHPIECIRAASKICKEAEGAIWYKHHFRELIGHARPPLETSHTICIAAVEAANQCLAAAIIVTSVSGRSAHSLAKYRPNCPIILVTRDPTVAKQANLFRGIIPLFYEVERKDDWRRDIEARISFGISFGKWRGFVRSGDPIVAVNGSQRGSGYTDTIRVLYVMRPIVEGDCTCDKKTGDQNV

SEQ ID NO: 247 - DNA, 1593 bp, Tribolium castaneum
  CDS (1)..(1593)
atggcaagccccccgaaaaagatggcctcttccagcgttccgcccctgcagatggaggcggccgacgccagcacccacctggaccacatgtgcgctctggacatccaatcgaaggcgccctttgtgcgcctttctggcattatttgcaccattgggccggcctcgcgcgaccccgcaatgttggagaaaatgatggagactggcatgaatatcgcacgcttgaatttctcgcacggctcgcacgagtaccacgccgagactattaaaaatataaggacggctgtggcgaattatagcaaaaaaattggaatgtcgtatcctttggccattgcgctcgacaccaaagggcccgagatcaggaccgggctgctcgaagggggcggttcagcggaagtcgaactgaaacgcggcgaaaaaatcaccctcaccaccaacaaagcgtacgctgaaaaaggcaccgccagcatcgtctacgtcgactacgaaaacatccaaaaagtgctgaaggtcggcaatcgcgtctacgtcgacgacggcctcatgtcgctcgtttgcaccgaaatcaaaggcgccgacttgatctgcaccatcgaaaacggcggaatgctgggcagtcgcaaaggcgtcaacctgcccggcgtccccgtcgacctccccgccgtttcggaaaaagacaaatccgatctgaaattcggcgtggaacaaggcgtcgacatgattttcgcctcgtttatccgaaacggaagtgcacttagcgagattcgcaatatcctcggccccgaaggcaaaaacatcctcatcatctccaaaatcgaaaaccagcaagggatgcaacacctggatgagataatcaaggctagtgacggcatcatggtggcgagaggtgacttaggcattgaaataccgacggagaaagtcttccttgcgcaaaaggccatgattgccaagtgcaacaaagtgggaaaacctgtcatttgcgccacccagatgctggaaagcatggtgaaaaagccacggcccactcgggccgaaagctccgacgttgccaatgccatcctggatggggctgattgtgtgatgctgtcgggggagacggccaagggggattaccccttggagtgtgtgcacacaatggcgaatatttgtaaagaggcagaggcggcgatttggcagaaacagttgtttcaagatcttacaagcaaggctgtgcctccaatggatgctgctcatactgtggccattgcagcagctgaggcttcgtccaagtgtttggcggctgcgattgttgtggtgacaacatcaggacgctctgcacatctcatctccaagtatagaccgaggtgtcccattattgcagttacaaggaatgcgcaaactgcaagacaggcacacttgtatagggcgattttgccgctccattacgaagccgagaggaaggacgactggctgaaggatgtcgaggctcgtgttaacacgtccatcgagttcggcaaagctcgaggtttcataaaacaaggtgacccggtgattatcgtcacagggtggaagcaaggatccggattcaccaacacgatgcgcattgtgaacgtctaa

SEQ ID NO: 248 - protein, 530 aa, Tribolium castaneum
MASPPKKMASSSVPPLQMEAADASTHLDHMCALDIQSKAPFVRLSGIICTIGPASRDPAMLEKMMETGMNIARLNFSHGSHEYHAETIKNIRTAVANYSKKIGMSYPLAIALDTKGPEIRTGLLEGGGSAEVELKRGEKITLTTNKAYAEKGTASIVYVDYENIQKVLKVGNRVYVDDGLMSLVCTEIKGADLICTIENGGMLGSRKGVNLPGVPVDLPAVSEKDKSDLKFGVEQGVDMIFASFIRNGSALSEIRNILGPEGKNILIISKIENQQGMQHLDEIIKASDGIMVARGDLGIEIPTEKVFLAQKAMIAKCNKVGKPVICATQMLESMVKKPRPTRAESSDVANAILDGADCVMLSGETAKGDYPLECVHTMANICKEAEAAIWQKQLFQDLTSKAVPPMDAAHTVAIAAAEASSKCLAAAIVVVTTSGRSAHLISKYRPRCPIIAVTRNAQTARQAHLYRAILPLHYEAERKDDWLKDVEARVNTSIEFGKARGFIKQGDPVIIVTGWKQGSGFTNTMRIVNV

SEQ ID NO: 249 - DNA, 1761 bp, Clostridium difficile 630
  CDS (1)..(1761): transl_table=11
atgttaaataatgtaaagaagacaaaaattgtttgtacactaggtccagcatcacaaagtgaggaagttttaactcaacttatgcaaaatggtctaaatgtgtgtagatttaacttttctcacggttcgcatgaagaacataaagaaagaattgatatggcaaagaaagttagagaaaaattaaataagccagttgctatattattagatactaaaggtccagaaattagaacaggtaactttgaagacccagaggtatttttagaagaagggcaaaagttcactataactatgaaagatattatggggactaaagaaatgtgtacagtaagctataaaggtcttgctgaagacgttaaatcaggagattctatactaatagatgatggtttagttggcttaagagtaaaagaaataaatggagaagatatagtttgtgttgttgaaaattcaggaatagttaaaaatcataaaggagtaaatgtacctggtgttaagataaatttaccagcaataactcctaaagatataagtgatatagagtttggaataagtcaaggaatagattatatagctgcttcttttgtaagaaaggcatctgatgtactagcaataagagaagtattagagaacaataatgcaactgatatacaaataatatctaaaatagaaaaccaagaaggtgtagagaacctagatgaaatattaaaagtttctgatggtataatggtggctagaggtgacttaggtgttgagataccaactgaagagatgccaatagttcaaaaaatgatgataaaaaaatgtaatgaattagcaaagccagttgttactgccactcaaatgcttgattctatgataagaaatccaagaccaacaagagcagaagttacagacgttgccaatgctatatatgatggaacagatgcgataatgttatctggagaaactgctgctggaaaatatcctgtagaggcagtaaaaatgatggctacaatagcaaaaagaacagaagagactttagattatgatagattactaaaggaaaatggtactaacaatgttactgtaacagatgcaataagccatgcaacttgtacaacagcagtagatttaaatgcatcagctataataacatctacttcttcaggatatactgctagaatggtatctaaattcagaccaaaatctccaataatagctactacaaataatgaaaagactatgaataaattagctcttacatggggagtatatccagttaagtcttctgttgcaggaaatacagatgaagttatagaaaaggcaattgaggcagctagacaagctgattatatagataatggggaattagtagttataactgctggagtaccagtaggagtaagtggaactactaatttaataaaggttcatgtaataagcgaagaaatcgtgcaaggtataggtgtaggtactcaaacagtagaaggtaaagttcgtataataaagaatggaaatgcttgtgtagactttaatgaaggcgacatacttgtttctactgctactgatgctgaaatgaacaattatatagaaaaagcaggagctgtagtaactgagaatggtggaatgacatcacatacagctattgtaggtataaatttagatataccagttattgtgtctgcagctgatataacaaatctagtaaaagatggagaagttgtaactgtggatgcatcaagaggcgtggtatatagaggttcaactagagttttataa

SEQ ID NO: 250 - protein, 586 aa, Clostridium difficile 630
MLNNVKKTKIVCTLGPASQSEEVLTQLMQNGLNVCRFNFSHGSHEEHKERIDMAKKVREKLNKPVAILLDTKGPEIRTGNFEDPEVFLEEGQKFTITMKDIMGTKEMCTVSYKGLAEDVKSGDSILIDDGLVGLRVKEINGEDIVCVVENSGIVKNHKGVNVPGVKINLPAITPKDISDIEFGISQGIDYIAASFVRKASDVLAIREVLENNNATDIQIISKIENQEGVENLDEILKVSDGIMVARGDLGVEIPTEEMPIVQKMMIKKCNELAKPVVTATQMLDSMIRNPRPTRAEVTDVANAIYDGTDAIMLSGETAAGKYPVEAVKMMATIAKRTEETLDYDRLLKENGTNNVTVTDAISHATCTTAVDLNASAIITSTSSGYTARMVSKFRPKSPIIATTNNEKTMNKLALTWGVYPVKSSVAGNTDEVIEKAIEAARQADYIDNGELVVITAGVPVGVSGTTNLIKVHVISEEIVQGIGVGTQTVEGKVRIIKNGNACVDFNEGDILVSTATDAEMNNYIEKAGAVVTENGGMTSHTAIVGINLDIPVIVSAADITNLVKDGEVVTVDASRGVVYRGSTRVL

SEQ ID NO: 251 - DNA, 1419 bp, Bradyrhizobium sp. ORS278
  CDS (1)..(1419): transl_table=11
atgcgtcgtcaccgtcgagccaagatcgtcgcgaccgtcggtcccgccagcaattctcctgacatgctgaaggagctgttcctcgccggtgtcgatacgttccgtctcaacttcagccacggcacgcaggctgatcacgccaaggttcatgccgcgatccgcgcgctggaaaaggacgtgcagcgtccgatcggcatcctgatggatctgcagggaccgaagatccgcgtcggtaccctgcgcgacaagaagatccaggtcgaagcgggcgagacgattcgatttgtgttgaatgggaccgagggtgacaagacgtcgattccgttgccgcatccggagatctttgcggcggtcgcgcccggtcacgatcttctgatcgacgacggccgcgtgcgcgtgcgtgtcaccgggctcggcgacgactggatcgaagccaaggtgatcgtcagcggcgcgatctccaatcacaagggcgtcaacctgcccggcacgatcctcgaactgtcgccgctgaccgcgaaggatcgttccgatcttacgttcggcctcgacctcggcgtcgactgggtcgcgctgtccttcgtgcagaagccatccgacgtgatcgaggcgagggggctcatcgacggccgcgccggcatcatgtccaagatcgagaagcctgccgcgctcgaccgcatcgacgacatcatccagctgtcggatgcgatcatggtggcgcgcggggatctcggtgtcgaaattccgaatgaggatgtgccgggcaagcagaaggagctggtgcgcgcctgccggctcgcggtgaagccggtgatcgtcgcgacgcagatgctggactcgatggtcgccacacccacgccgacgcgcgcggaagtctccgacgtcgcgaccgcgatctatgacggcgccgatgcggtgatgctgtcggcggaatcggccagcggccagtatccgcgcgaggccgtggcgatgatggacagcatcatcaagtcgaccgagaagcacaagatgtacgcctcgattatccaggcgacgcagcccgacgaggagcagacgccgccgcatgcggtggcgaccgccgcggccgatctcgcctcggcgatccatgccaaggcgatcgtggcctacacgtcgagcggtacctcggcctcgcgcgtcgcgcgcaagcggccgagcctgccgatccttgcgatcacgccgaacgaggacacctcgcggcggatgtgcctgttgtggggcgcgcacagcgtgctgtcgcaggacgtgcagagctatgaggagatggtcgagcgcgcgacgtttttcgcggtccaggaggagttcgccgacaagggcgatctgctggtcgtcgtcgccggcatcccgttcgcgcaggccggcaccaccaacaatctacgcgtcgtcaccgtgcccagatag

SEQ ID NO: 252 - protein, 472 aa, Bradyrhizobium sp. ORS278
MRRHRRAKIVATVGPASNSPDMLKELFLAGVDTFRLNFSHGTQADHAKVHAAIRALEKDVQRPIGILMDLQGPKIRVGTLRDKKIQVEAGETIRFVLNGTEGDKTSIPLPHPEIFAAVAPGHDLLIDDGRVRVRVTGLGDDWIEAKVIVSGAISNHKGVNLPGTILELSPLTAKDRSDLTFGLDLGVDWVALSFVQKPSDVIEARGLIDGRAGIMSKIEKPAALDRIDDIIQLSDAIMVARGDLGVEIPNEDVPGKQKELVRACRLAVKPVIVATQMLDSMVATPTPTRAEVSDVATAIYDGADAVMLSAESASGQYPREAVAMMDSIIKSTEKHKMYASIIQATQPDEEQTPPHAVATAAADLASAIHAKAIVAYTSSGTSASRVARKRPSLPILAITPNEDTSRRMCLLWGAHSVLSQDVQSYEEMVERATFFAVQEEFADKGDLLVVVAGIPFAQAGTTNNLRVVTVPR

SEQ ID NO: 253 - DNA, 1455 bp, Dichelobacter nodosus VCS1703A
  CDS (1)..(1455): transl_table=11
atgccatttaaaagagatttacaccgtattagccaccacaccaaaatcgttgcaactttggggccggcaagcaatagcgtagaaatgttggagcaactcattcgcgtgggattaaacgtggtgcgcatgaatttttctcacggcgatcgtgcgtttcatgctgaaaatgcccgtcgcgtgcggttagcgtcagaaaatgtgggacgacaagttgccattattgccgatttacaaggccctaaaatccgaattggggcgattgccggcggtaaagtgtcgttaattgaagggcaaacttatattttagacgccgcatattgtggtgaaggaacggcggagcgcgtgggattagattatgccgatttgcccaaagacgttcgaattggagacgtgttattgcttgatgatggtttggtgacgttaaccgtgagcaaaattgttggcgatgaaattcataccgttgtgggcaattcggcgctgttaaaaagtaataaaggcattaataaacaaggcggcggactttcggcaccggcgttaaccgataaagatcgccaagatttaaaaacggcagtggaattgggcgcggattatttggcggtgagttttgttaaatcagccgcagatatggagttggcgcggcaattggttgcgcaagcttgccccaatacgcatcaccccgcgctgattgccaaaattgaacgcgccgaagccattactcatttggaagaaatcgtgatggcaagcgacggcattatggtggcgcgcggtgatttagcggtggaagtgggcaatgcggcggtgccggttttgcaaaaacgtatgattaaactcgcgcggcggcatcgtcgttttgtgattacagcaacgcaaatgatggaaagtatgattacgaatcccgtgccgacgcgggcggaagtttctgacgtggcaaacgcggtaattgatggtactgatgcggtgatgttatcggcagaatcagccgttggtttgtatccttttgaaacggtgcaaacgatggcgctcgtttgtcaggcggtagaaaatgcgcaaaatccgatggaaaatattgatatggatattcccatcacggatcgcattgatcatacgattgccgccggcgccgtttttaccgctcaaaaaattggtgctaaagctattattgccttaactaacagcggtaccacggcgtttcaattaagccgttatggcatcaatattccgatttatgcgttaaccagcagtttgagtgtgcaacgcaaaatggcgatgtatcgcggcgtgcgtcctttaatggcggatatcagtaatgatcatcaaaatgcgattgcggaggcagaagcgcatttggcgtggcgcggtgttgttcatagcggggatttatatgtgattaccagcggcatgaaaatggggttgacgggttcgacgaatactttgcaaatttgtcgcgccaaataa

SEQ ID NO: 254 - protein, 484 aa, Dichelobacter nodosus VCS1703A
MPFKRDLHRISHHTKIVATLGPASNSVEMLEQLIRVGLNVVRMNFSHGDRAFHAENARRVRLASENVGRQVAIIADLQGPKIRIGAIAGGKVSLIEGQTYILDAAYCGEGTAERVGLDYADLPKDVRIGDVLLLDDGLVTLTVSKIVGDEIHTVVGNSALLKSNKGINKQGGGLSAPALTDKDRQDLKTAVELGADYLAVSFVKSAADMELARQLVAQACPNTHHPALIAKIERAEAITHLEEIVMASDGIMVARGDLAVEVGNAAVPVLQKRMIKLARRHRRFVITATQMMESMITNPVPTRAEVSDVANAVIDGTDAVMLSAESAVGLYPFETVQTMALVCQAVENAQNPMENIDMDIPITDRIDHTIAAGAVFTAQKIGAKAIIALTNSGTTAFQLSRYGINIPIYALTSSLSVQRKMAMYRGVRPLMADISNDHQNAIAEAEAHLAWRGVVHSGDLYVITSGMKMGLTGSTNTLQICRAK

SEQ ID NO: 255 - DNA, 1425 bp, Thermus thermophilus HB27
  CDS (1)..(1425): transl_table=11
atgccgccttttaagcgcaccaagatcgtggccaccctggggccggccacggacgacaaggaggtgatccgcgccctggcggaggccggggccgacgtcttccgcctgaacttcagccacggcgcccccgaggaccacaggcgccgggtgggctgggtgcgggaggtggcggaggagctcggccgaaccctggccgtcctccaggacctccagggcccgaagatccgtgtgggccgtttccgggagggccaggtcctcctccgcccggggcagaggttcgtcctcaccgccgagcccgtggagggggacgagcaccgcgtttccgtgagctacaaggggcttcccgaggacgtttccccggggcagatcctccttctggacgacggccgcatccggctcaaggtcctggaggtccggagcccggagatcctcacggaggtggaggtgggcggggtcctctccaacaacaaggggatcaacatccccggggcggacctctccatccccgccctctcggagaaggatatccaggacctggccctgggggcggagctcggggtggactgggtggcggtctccttcgtccgcacgcgggacgacctcctcctcgcccggcactacctctcccgctacggctccaaggccaggctcatggccaagatcgagaagccctcggccgtggcccggtttgaggagatcctggaggaggcggacgggatcatggtggcccggggggacctcggggtggagatgcccctggaggaggtgcccatcgtccagaagcgcctcatcctccggtgcatcgccgccgggaagccggtgatcaccgccacccagatgctggagtccatggtgcagaacccgagccccacccgggccgaggcctcggacgtggccaacgccatctttgacgggaccgacgcggtgatgctctccgcggagacggcggccggggcctacccggtggaggcggtggccatgatgagcaggatcgccaaggcggtggaatcctccccggagttcttgcagaagctcaacgtcctccgccccgcccccacccccaccacccaggacgccatcgcccaggcggcggacgacgtggtggaggcggtgggggcacgggccatcgtggtcttcacggccacgggcggctcggcgcggaggatcgcccgcacccggccccaggtgcccatcctggccctcaccccgaaccccgaggtgcggaaccagctggccttggtctggggggtctacccccatctcgcccccgacccccaggacaccgacgacatggtccgcatcgccctcagggaggtgaaagccctggggctcgcccaggtgggggaccgggtggtcatcgccgccggggttcccttcggggtccgggggacaacgaacctcatccgcgtggagcgggtggggtag

SEQ ID NO: 256 - protein, 474 aa, Thermus thermophilus HB27
MPPFKRTKIVATLGPATDDKEVIRALAEAGADVFRLNFSHGAPEDHRRRVGWVREVAEELGRTLAVLQDLQGPKIRVGRFREGQVLLRPGQRFVLTAEPVEGDEHRVSVSYKGLPEDVSPGQILLLDDGRIRLKVLEVRSPEILTEVEVGGVLSNNKGINIPGADLSIPALSEKDIQDLALGAELGVDWVAVSFVRTRDDLLLARHYLSRYGSKARLMAKIEKPSAVARFEEILEEADGIMVARGDLGVEMPLEEVPIVQKRLILRCIAAGKPVITATQMLESMVQNPSPTRAEASDVANAIFDGTDAVMLSAETAAGAYPVEAVAMMSRIAKAVESSPEFLQKLNVLRPAPTPTTQDAIAQAADDVVEAVGARAIVVFTATGGSARRIARTRPQVPILALTPNPEVRNQLALVWGVYPHLAPDPQDTDDMVRIALREVKALGLAQVGDRVVIAAGVPFGVRGTTNLIRVERVG

SEQ ID NO: 257 - DNA, 1797 bp, Candidatus Protochlamydia amoebophila UWE25
  CDS (1)..(1797): transl_table=11
atggcattaattagaacaaaaattgtttgtacaataggacctgcttgcaattccttagagaaaattattgagttaataaacgtaggaatgaacgttgcaaggttgaattttagtcatggaactcaagaagaacatttaaggacaattaatcttttaaaagaagcgagatgtcaacttaacttacctttagccatcatgttagatacaaaagggccagaaatacggctaggaaaaattcgagatggacaaatttttttaacggtaggtcaaaaatggcggttagtgaaaaaggaggttttaggagatgaaagtcaggtttctatttttcctctcaatattttagatcaacttcctgttgggacaacaattttatttgatgatgggtatattgcctcacgcgtgattgaaaattcatccgaaggtgtgcttgttgaaattaataacagcgggatgattcgttcaagtaaaggagttaatattcccaatacaagcctaaatttgcctgctgtcaccgaaaaagacattgacgatattcgttttggatgtagccaggatattgacttgattgctgcttcctttgttcgttctgcagaacatgtcttggagattaagcgtttattagctgatgaaaaaaaaactgatattctagttattgcaaaaattgaaaatagtgaaggggtgcaaaattttgatagcattgtccaagcagcagacggaatcatgatagcaagaggagatttaggggttgaagttcctttaagccatgttcctagattgcagaaaatgatgatccgtaaaagttatttggcaggcaagccagttgtgacagcaacgcagatgttagaatcaatgatcaataatcctagaccaactcgtgcagaaacatctgatgtagcaaatgcgatttatgatagtacatctgctatcatgctttcaggagaaacagcaattggtcgttatcctgttgagacggttaatgtgatgcgaagtatcgtagaagaggctgaagctgatttcaactacagtactttttttgatcaacatgcccctttagtttatcatgatgttccctctgctgtgactttagctactgtaaaaacagcttacagttctagcgctaaagctatttttgcttttactaaagcaggaacaacggcacgacttttatcaagacttaggcctaaaatgcctattattgcgatgacagcaaaagaaaaaatttttcatcagttggcatttaattggggagttattccttttttaagtgaaccttgtaactctttagataaaagtttaaaaaaaatcagtgatttcgcccttggaagtcaacacgtcagctatggagatttggttgtgattactgcaggaactccttttggattttcaggaacgaccaatatgatgatcgttgaaaatattggagatgttttggtaagagggcactctggatatggtatacgtgtgcatgggaacgtagtaatagttcttgctcctcagtctaaagctccttatgcggtcaaagatcaggtacttgtgattgccaaatgcgatgagagttatttatctttaatgaaggaagcttctgctattattttacagaaccatatcaatgattttgcgtctgaaaaatacgcgaagaagattgctctgagtttaggtaagcctattcttcttcgagctgatgcggcatgtcaaattttaaaagaaggacagcttgttactctcgatcctgaaaaagcccttgtttacaaaggagttgttttggaccaattgttggcgagtggagaattttcatga

SEQ ID NO: 258 - protein, 598 aa, Candidatus Protochlamydia amoebophila UWE25
MALIRTKIVCTIGPACNSLEKIIELINVGMNVARLNFSHGTQEEHLRTINLLKEARCQLNLPLAIMLDTKGPEIRLGKIRDGQIFLTVGQKWRLVKKEVLGDESQVSIFPLNILDQLPVGTTILFDDGYIASRVIENSSEGVLVEINNSGMIRSSKGVNIPNTSLNLPAVTEKDIDDIRFGCSQDIDLIAASFVRSAEHVLEIKRLLADEKKTDILVIAKIENSEGVQNFDSIVQAADGIMIARGDLGVEVPLSHVPRLQKMMIRKSYLAGKPVVTATQMLESMINNPRPTRAETSDVANAIYDSTSAIMLSGETAIGRYPVETVNVMRSIVEEAEADFNYSTFFDQHAPLVYHDVPSAVTLATVKTAYSSSAKAIFAFTKAGTTARLLSRLRPKMPIIAMTAKEKIFHQLAFNWGVIPFLSEPCNSLDKSLKKISDFALGSQHVSYGDLVVITAGTPFGFSGTTNMMIVENIGDVLVRGHSGYGIRVHGNVVIVLAPQSKAPYAVKDQVLVIAKCDESYLSLMKEASAIILQNHINDFASEKYAKKIALSLGKPILLRADAACQILKEGQLVTLDPEKALVYKGVVLDQLLASGEFS

SEQ ID NO: 259 - DNA, 1758 bp, Listeria monocytogenes str. 4b F2365
  CDS (1)..(1758): transl_table=11
atgaaaaaaacgaaaattgtttgtacaattggtcctgcaagtgagtcagttgacacattagttcagttgatcgaagcaggaatgaacgttgcacgtcttaatttctctcacggagattttgaagagcacggtgcgcgtattgtaaatatccgcgaagcatcgaaaaaaactggtaaacaagtggctatcttacttgatacaaaaggtccagaaatccgtacaaacgacatggtcggcggaaaattagaattccaaacaggtgatgttgtacgtgtttctatgactcctgttgaaggaacaaaagaaaaattctccgtgacttacggcgaactttacgatgatgtagaaattggttcttccattttacttgatgacggcttaatcggtcttgaagtaatcgaaaaagacgaagctaatcgcgaactagtaacaaaagtacttaacccaggtgtacttaaaaataaaaaaggtgttaacgtaccaaacgtttctatcaacctaccaggaatcacagaaaaagatgctgctgatatccgctttggtttagaacaaggtattgattttatcgctgcatctttcgtacgtcgtgctacagatgttcttgaaatcactaaaattctagaagagcacaatgcaactcacgtacaaatcattcctaaaatcgaaaaccaagaaggcgttgataatatcgacgaaatcttacaagtatctcaaggcctaatggttgctcgtggggaccttggtgttgaaattccagctgaagaagttccgattgtacaaaaagaacttatcagaaaatgtaataaacttggtaaacctgttattactgcaacacaaatgcttgattccatgcaacgtaacccacgtccaactcgcgctgaagcaagtgacgtagcgaatgcgatttttgatggaacagatgcaattatgttgtccggtgaaacagctgctggggattatccagtagaagcagttaaaatgatggcgaaaatcgctgttcgtacagaagaagtactagttgctcaagataaatttgcacttaaacttcacgaaaatacggatatgacagaagctatcggtcaagcagttggccatactgcgaaaaacctaaatgtacaaactattgttgctgcgactcaaagtggtcacacagcgcgtatgatctctaaataccgtcctaaatctcatatcgttgctgtaacattcaacgagcatgtataccgcggtttagcactttcatggggtgtttatcctcgcctagctactccagttagcaacacagatgaaatgttcgaccttgcagtgaaagaatctcttgcttctggcgttgcaaaacaaggcgacttaattatcatcactgctggtgttccagttactgaaagtggaacaacaaacgtaatgaaaatccaattaattggtgaaaaagttgttaaaggccaaggtattggcagcaaatctgttatcggtaaagcaatcgttgctaaatccaatgcagaagcacttgaaaaagcagaagaaggcggaatcttaatcgttaaaacaacggataaagaaatgctacctgcattcgagaaaagtgcagcagttgttgtggaagaaggcggcttgactagccacgcagcagttgtaggaatcaacctaggcattcctgtcatcgttggcgctaaagatgcaacatctcttgtaaaagacggtgaaatcattactgttgattctcgtcaaggtgttgtatataacggcaaaacagcaacacattaa

SEQ ID NO: 260 - protein, 585 aa, Listeria monocytogenes str. 4b F2365
MKKTKIVCTIGPASESVDTLVQLIEAGMNVARLNFSHGDFEEHGARIVNIREASKKTGKQVAILLDTKGPEIRTNDMVGGKLEFQTGDVVRVSMTPVEGTKEKFSVTYGELYDDVEIGSSILLDDGLIGLEVIEKDEANRELVTKVLNPGVLKNKKGVNVPNVSINLPGITEKDAADIRFGLEQGIDFIAASFVRRATDVLEITKILEEHNATHVQIIPKIENQEGVDNIDEILQVSQGLMVARGDLGVEIPAEEVPIVQKELIRKCNKLGKPVITATQMLDSMQRNPRPTRAEASDVANAIFDGTDAIMLSGETAAGDYPVEAVKMMAKIAVRTEEVLVAQDKFALKLHENTDMTEAIGQAVGHTAKNLNVQTIVAATQSGHTARMISKYRPKSHIVAVTFNEHVYRGLALSWGVYPRLATPVSNTDEMFDLAVKESLASGVAKQGDLIIITAGVPVTESGTTNVMKIQLIGEKVVKGQGIGSKSVIGKAIVAKSNAEALEKAEEGGILIVKTTDKEMLPAFEKSAAVVVEEGGLTSHAAVVGINLGIPVIVGAKDATSLVKDGEIITVDSRQGVVYNGKTATH

SEQ ID NO: 261 - DNA, 1758 bp, Bacillus thuringiensis serovar konkukian str. 97-27
  CDS (1)..(1758): transl_table=11
atgcgtaaaactaaaattgtatgtactataggtcctgctagtgaaagtattgaaaaattagagcaattaatcgaagcaggtatgaacgttgctcgtttaaacttctctcatggtagccatgaagagcacggtgctcgtattaaaaacattcgtgaagcttcaaagaaaactggtaaaacagttggtatcttacttgatacaaaaggtccagaaatccgtactcatgacttcgtagacggacaagctgagcttgtaacaggtgcagaagtagttctttctactgagcaagtattaggtactgcagagaagttctctgtatcttatgctggtctttatgacgatgtagatccaggttctcgcattctaatcgatgacggtcttatcgagctagaagtaatcgaaaaagctgacggaaacatccgtacaaaagttcttaacagcggaactgtaaaaaataaaaaaggtgttaacgtaccaaacgtaagcattaagcttcctggtatcactgaaaaagacgtaaaagatatcatcttcggtatcgagcaaaaagttgatttcatcgcagcttcattcgtacgtaaagcagctgacgtattagaaatccgtgaattattagaagagcataacgctcaatacatccaaatcgtaccaaaaattgaaaaccaagagggtatcgacaacatcgattcaatcttagaagtttctgacggcttaatggtagctcgtggtgacatgggtgtagaaattccaccagaagaagtaccattagtacaaaaacgtctaatcaaaaaatgtaacgtgttaggtaaaccagttattactgcaacacaaatgttagattctatgcaacgtaacccacgtccaactcgtgcggaagcaagtgacgtagctaacgcaatcttcgatggtacagatgcaatcatgctttcaggtgaaacggctgctggacaatacccagtagaagcagtaacaatgatggctaacattgcagtacgtgttgaaaaatcattacaatatgaagatatgttcaaaaaacgtattaaagagttcactccaacaattacagatgcaattagccaatctgttgcgcatacagcacttgctcttgatgtagctgcaatcgtagctccaacagaaagtggatatactgcgaaaatgatctctaaataccgtccaaaatctccaatcgtagctgtaacatctgatgagcaagtaggacgtcgtcttgcacttgtttggggtgtacaagcatttatggctgagaagcgtgcggcttctactgacgaaatgttagatacagcgattcaaacaggtatggatgcaggtctaatcggacttggagacactgtagtaatcactgctggtgttccagttgctgaaactggtacaacaaacttaatgaaaatccacgttgttggtgaagaagttgctaaaggacaaggaatcggtcgtaaagctgcaaaaggtaaagtagttgtagcgaaaacagctgctgaagctgtagcgaacgtaaacgaaggtgatatccttgttacaacaagcactgataaagatatgattcctgcaatcgaaaaagctgctgctttagttgtagaagaaggcggcctaacaagccatgcggctgttgtaggtgtatcaatcggtattcctgttatcgttggtgtaaacggcgtaacagcaactttaaaaaatggccaagaagtaacagttgatgcagcacgcggaattgtttataatggacatgcggaagtgctataa

SEQ ID NO: 262 - protein, 585 aa, Bacillus thuringiensis serovar konkukian str. 97-27
MRKTKIVCTIGPASESIEKLEQLIEAGMNVARLNFSHGSHEEHGARIKNIREASKKTGKTVGILLDTKGPEIRTHDFVDGQAELVTGAEVVLSTEQVLGTAEKFSVSYAGLYDDVDPGSRILIDDGLIELEVIEKADGNIRTKVLNSGTVKNKKGVNVPNVSIKLPGITEKDVKDIIFGIEQKVDFIAASFVRKAADVLEIRELLEEHNAQYIQIVPKIENQEGIDNIDSILEVSDGLMVARGDMGVEIPPEEVPLVQKRLIKKCNVLGKPVITATQMLDSMQRNPRPTRAEASDVANAIFDGTDAIMLSGETAAGQYPVEAVTMMANIAVRVEKSLQYEDMFKKRIKEFTPTITDAISQSVAHTALALDVAAIVAPTESGYTAKMISKYRPKSPIVAVTSDEQVGRRLALVWGVQAFMAEKRAASTDEMLDTAIQTGMDAGLIGLGDTVVITAGVPVAETGTTNLMKIHVVGEEVAKGQGIGRKAAKGKVVVAKTAAEAVANVNEGDILVTTSTDKDMIPAIEKAAALVVEEGGLTSHAAVVGVSIGIPVIVGVNGVTATLKNGQEVTVDAARGIVYNGHAEVL

SEQ ID NO: 263 - DNA, 1437 bp, Mesoplasma florum L1
  CDS (1)..(1437): transl_table=4
atgaacaagaaagaattacaagcacgtgtaaaacgtactaaaattattactacaactggtccatcaacaaatgaaccagaacaaataagagaattatttgaaaatggaatgacaacaatacgtttaaatttttcacatggtgattatgaagaacaaggttacagaattgctggagctaaaaaagttagagaagaattaggaaaacctgtttctattttattagatacaaaagggcctgaaattcgtgttggtaaatttgtagatggaaaacaagaagttactgcaaatcaatcaattacaatttacacagatgctgaatcattcaaaaacaaagaatgtttatcaggagaaatgactgttgcttatgacatgtcagttgatttaaaaattggtgatacaattttaatcgatgatggtaaattagaaatgactgttgaagaagttaaaccaggtgttgttaaagctatcgctttcaataaccacttagtaaaaactaacaaacgtgttaacttaccaggtgttgatttctcaatgccattcttagctcaaaaagatatcaatgatattaaatatggagttgaacaaggtgttgactacatcgctgcatcatttgttaactcagctgaaaatgtaaaagaaattcgtgatattttagcagaagctaatggatcagatattcaaattatttcaaaaattgaatcacaagttggaattgacaacattgatgcaattattgaagcatcagatggaattatgattgctcgtggtgacttaggattagaaattccttactacgacgtaccatactgagaaaaaataatgatcagaaaatgtcgtgaagctggtaaagttgttattgttgctactcaaatgttagaaacaatgacagaaaacccagcacctacaagagctgaagtaactgacgtttactttgctactgaattaggagcagatgcaacaatgttatctggagaatcagcagctggagattacccattcattactgttaacacaatggcaacaatcaacaaacgtgctgaaatagaattctacaaaaaagcatactaccaaactcaattagaaaacgctaaaaactcaactagtggaccacgtgcagatattgcaatggacttagctgaaagaactcgtgatggacaatatgaatttgctgttgttttatcaagaactggagctttattaaaaactatttctaaatttagaccaaatgtaacaattttaggtgtaagtgaatcagaaagattatgaactgcatttggtgtatgacactcaatcttcatgaacaaaactgctaacttattagaattagaagaaaatgttgctcaaatctcagaaattgcaaaattatgaggtgcaaaatcaggatcaaaaatcttagttgtaagaaacaaagatattcgtgaaattacagtagcttaa

SEQ ID NO: 264 - protein, 478 aa, Mesoplasma florum L1
MNKKELQARVKRTKIITTTGPSTNEPEQIRELFENGMTTIRLNFSHGDYEEQGYRIAGAKKVREELGKPVSILLDTKGPEIRVGKFVDGKQEVTANQSITIYTDAESFKNKECLSGEMTVAYDMSVDLKIGDTILIDDGKLEMTVEEVKPGVVKAIAFNNHLVKTNKRVNLPGVDFSMPFLAQKDINDIKYGVEQGVDYIAASFVNSAENVKEIRDILAEANGSDIQIISKIESQVGIDNIDAIIEASDGIMIARGDLGLEIPYYDVPYWEKIMIRKCREAGKVVIVATQMLETMTENPAPTRAEVTDVYFATELGADATMLSGESAAGDYPFITVNTMATINKRAEIEFYKKAYYQTQLENAKNSTSGPRADIAMDLAERTRDGQYEFAVVLSRTGALLKTISKFRPNVTILGVSESERLWTAFGVWHSIFMNKTANLLELEENVAQISEIAKLWGAKSGSKILVVRNKDIREITVA

SEQ ID NO: 265 - DNA, 1434 bp, Propionibacterium acnes KPA171202
  CDS (1)..(1434): transl_table=11
gtgcgtagagctaagattgtgaatacccttgggcccgctgtgaccagccatgacgccatgaaggagctcatggaggctggcatgaatattgcccgtctcaacatgagccacggcgactactccgagcaccaggagcgtcttgacctggttcgctcggtctcgaaagagcttggtctcaacgtggcagccttggccgacctccaaggcccgaagatccgtaccggcctgttcgagaaggccgaaggagagtcgaacggcaagatcgacctcaagattggtgacaagttcactatcaccactgacgacattgtgggcaatcaggagcgcgtctccaccactttcaagggtctgccccaggactgcaagcccggcgacgtcatcctcatcgacgacggcaagaccgtcctccaggttgactctgtgagcggcaacgacgtcaattgtcactgcactgtcgctggcccggttggcgaccacaagggcatcaacctccccggtgttgccgtgtctattcccgccctcaccaaaaaggacgaggagaacctgcgctgggctctcaaagctggcatcgaccttgttgctctgtccttcgtccgacacggctctgacatcgaccgtgtccacgagattatggacgaggagggacgtaccgtccccgttatagccaagctcgagaagccgcaggctatcgagaacctggacgagattattgacgtctttgacgccgtcatggttgctcgtggcgatatggccgtcgagtgcccgctcgaggaggttccgctgatccaaaagcagatcatcgagaaggctcggttacaggctaagcccgtcatcgtggccacccagatgctcgagtcgatgatccacgctccccgcccgacccgcgctgaggccgccgacgtcgccaacgccatccttgacggcgccgacggcgtcatgacgtccgctgagaccagcgttggtgacttcccaggtgagactgtccgcaccatggccaagatcgttgagtctactgaggcccgtggcttggacaagatcgccaagatcgactgggatccgcacaccaccagtggcatcatgtcgaaggcagctgctgagatcgctgagcgcgccgaggccaagttcatcgtggcctttaccaagtccggtgacaccgcccgtcgtatcgctcgtctgcgtccgagcaccccgctcatcgttttcacctctgatgagaccacgaccaagaccctcgcctgggtctggggcgctcacgccgtcgttaccccggtgtttaagaatgcggaggagctgtaccgctgggttaacgcgtacctgcgcgacaagggtttcgtgccggtcggtgaccgcgtcgtcgtgttgtccggttccccgatggatattccgggtaagaccaacaatctgcgcatccttcgtatcaaggaagatgactga

SEQ ID NO: 266 - protein, 477 aa, Propionibacterium acnes KPA171202
MRRAKIVNTLGPAVTSHDAMKELMEAGMNIARLNMSHGDYSEHQERLDLVRSVSKELGLNVAALADLQGPKIRTGLFEKAEGESNGKIDLKIGDKFTITTDDIVGNQERVSTTFKGLPQDCKPGDVILIDDGKTVLQVDSVSGNDVNCHCTVAGPVGDHKGINLPGVAVSIPALTKKDEENLRWALKAGIDLVALSFVRHGSDIDRVHEIMDEEGRTVPVIAKLEKPQAIENLDEIIDVFDAVMVARGDMAVECPLEEVPLIQKQIIEKARLQAKPVIVATQMLESMIHAPRPTRAEAADVANAILDGADGVMTSAETSVGDFPGETVRTMAKIVESTEARGLDKIAKIDWDPHTTSGIMSKAAAEIAERAEAKFIVAFTKSGDTARRIARLRPSTPLIVFTSDETTTKTLAWVWGAHAVVTPVFKNAEELYRWVNAYLRDKGFVPVGDRVVVLSGSPMDIPGKTNNLRILRIKEDD

SEQ ID NO: 267 - DNA, 1467 bp, Leifsonia xyli subsp. xyli str. CTCB07
  CDS (1)..(1467): transl_table=11
atgagaagggcgaaaatcgtcgcgaccctcgggccggcgacctccagctatgacaacatccgcgccatcgtcgacgcgggcgtcgacgtggcccggatgaacctcagccacggcagctacgaggtgcatgagggggtctacgccaacgttcggaaggctgcggaggacgccggcaaaccggtcgcggtcctggtcgacctccaaggcccgaagattcgcctcggcaagttcgaggccggtccctacgaactcgccgagggcgatatcttcacgatcaccaccgaggaaatcatcggcaccaaggagatctcctccaccacgttcaaggggttgccccaggacgtgaagccgggtgacttcctgctgatcgacgacggaaaggtgcgcgtgcgcgtgctggagaccgatggcacggccgtaaccactgaggtggtcgtggccggtcccgtctccaacaacaagggcatcaaccttcccggtgtcgcggtgaacgtgcccgcgctgtccgagaaggacgaggccgacctccgctggggcctgaatctgggcgccgatctcatcgccctctcgttcgtgcgcaacgcgggggacatcgagcgcgtacacgagatcatggccgaggagggccgtaaggtccccgtcatcgccaagatcgagaagccgcaagccgttgacgctctggagggcatcatcgaggcgttcgacggcatcatggtcgcgcgtggcgacctgggcgtcgagttgccgctggaggcggtgccgatcgtgcagaagcgcgcggtcgaactcgcccgccgtgcggccaagccggtcatcgtcgcgacgcagatgctggagtcgatgatctcgagcccggtaccgacccgcgccgagacatccgacgtcgctaacgccgtcctcgatggctcggatgcggtcatgctctcgggggagaccagtgtcggcgagtacccgaagatcaccgttcagacgatggcgaagatcgtgaaatcgaccgaagagcacggtctcgaccggatcgccccgctcggcaccaagccgcgcacgcagtccggcgcgatcaccctggccgcgaccgaggtggcggacttcgtcgaggccaagtacctctgcgtgttcaccgagtccggcgagtcggcccgtcgcatggcgcgtctgcgcagcaagatccggatcctcgccttcacaccggaggagtcgacccgtcgcaagatggcgctctattggggcgtggagtccttcgtggtcgaccgggtcacccacaccgaccagatggtcgcgcaggtggacgaggcgctgaagtccacgggccgagcggagaacggcgacaaggtggtcatcatttccgggtcgcctcccgggattcctggcaccaccaacgacatccgcgtacaccgggtcggcgacgtcctgtgtagcgaaacgcagcgaagggcctcgcgcttcggggaccgctcccggctgtga

SEQ ID NO: 268 - protein, 488 aa, Leifsonia xyli subsp. xyli str. CTCB07
MRRAKIVATLGPATSSYDNIRAIVDAGVDVARMNLSHGSYEVHEGVYANVRKAAEDAGKPVAVLVDLQGPKIRLGKFEAGPYELAEGDIFTITTEEIIGTKEISSTTFKGLPQDVKPGDFLLIDDGKVRVRVLETDGTAVTTEVVVAGPVSNNKGINLPGVAVNVPALSEKDEADLRWGLNLGADLIALSFVRNAGDIERVHEIMAEEGRKVPVIAKIEKPQAVDALEGIIEAFDGIMVARGDLGVELPLEAVPIVQKRAVELARRAAKPVIVATQMLESMISSPVPTRAETSDVANAVLDGSDAVMLSGETSVGEYPKITVQTMAKIVKSTEEHGLDRIAPLGTKPRTQSGAITLAATEVADFVEAKYLCVFTESGESARRMARLRSKIRILAFTPEESTRRKMALYWGVESFVVDRVTHTDQMVAQVDEALKSTGRAENGDKVVIISGSPPGIPGTTNDIRVHRVGDVLCSETQRRASRFGDRSRL

SEQ ID NO: 269 - DNA, 1746 bp, Desulfotalea psychrophila LSv54
  CDS (1)..(1746): transl_table=11
atgaataaaacaaaaataattgccaccctagggccccagagccaaagcgtcgaggagatttattcccttattcaagcgggaatgaatgttgcacggataaacctttcccatggagatgctgaaagctacaagcatcttatcagtaatgtaaaagaggctcgcaagttagcagaaaaagataccgcgatcctacttgataaccgtggccctgaaattcgtgttagcgagatggaagaagatatacatctcgttgatggagaagagctagtcatcaccaacagagctgaaactgtttccccatcgcggatcactacaaattacccacagcttgcaggtgatgtccaggtaggttcacgcatccttctcgatgacggaaagctcgccctggaagtgcttgccattgaagatgaagaggtgatcacgaaagttattgccggcggaatcctcagtagtcgtaaacgtgttgccctccccgataacgaggttaacctgccctctttgtcagaaaaagacaaagaagatatcgccttcggagtcgaacaggatgttgatttcatcgctgcttcttttgttagacaggcaggtgatgtctgggcggtacgaaaaatcatcgaagataacggtggtgatcaggagatcattgccaagatcgagaaccgccagggagtaaacaatcttgatgaaatactgcaagcagccaacggaataatggtagctcggggtgatctaggcgttgaagtacccgccgaagaggtgcctattattcaaaaaagcatcatcaaagctgcaaacagactaggcaaacctgtaatcactgccacccagatgctcgaatcaatgatcacctgccccactcctaccagagccgaggcaaatgatgtaaccaacgctatcttcgatggcaccgatgcagtaatgctctccggcgaaacagccattggtaagtatcctgttcaggctgtagcctttcttgtccgctgtgcgacaatagctgagaatgccctggactatgatcatatcctggcaaatggcctgcagaaccgaagaccaacgatcaccgactctatctcctatgcaagttgtgcgacggcagcggatcttaaagcaaccgccatcattacggcaacaagctctggttccaccgctcgcatggtggccagatatcgccccaaggctcccgttattgccgtcagcccttcgcccagcaccattcgccaccttcaacttattcgcggggtaacccccctgctctgcaactttggttcctccatggatgagcagctggatcgagtcattcatgcagcaacccttgcagagcttattcataatggcgatttggtcattataaccgccggcatgcctcttggacccacagggacaaccaatatgcttaaggtacacacggtggcagatatttgcgttaccggccaggggattggggtcaagcatgcccagggtgccgtccgcattattcaagcagaagatgattggcaggatctccccgaacataccattgcggtagtatcctcaaccaatgaatccatgctgaaacatctcggtaaggtgcgtggaattattgcagaagcaccgggactcacctcacatgcggcaattgttggccgcgaactggggatccctgttatctgtaatgttaccaatgcccttatgctctttgaaaatgaccaggttatcaccattgatgggacaactggccatatctgttacggaagtacacaaaacacatga

SEQ ID NO: 270 - protein, 581 aa, Desulfotalea psychrophila LSv54
MNKTKIIATLGPQSQSVEEIYSLIQAGMNVARINLSHGDAESYKHLISNVKEARKLAEKDTAILLDNRGPEIRVSEMEEDIHLVDGEELVITNRAETVSPSRITTNYPQLAGDVQVGSRILLDDGKLALEVLAIEDEEVITKVIAGGILSSRKRVALPDNEVNLPSLSEKDKEDIAFGVEQDVDFIAASFVRQAGDVWAVRKIIEDNGGDQEIIAKIENRQGVNNLDEILQAANGIMVARGDLGVEVPAEEVPIIQKSIIKAANRLGKPVITATQMLESMITCPTPTRAEANDVTNAIFDGTDAVMLSGETAIGKYPVQAVAFLVRCATIAENALDYDHILANGLQNRRPTITDSISYASCATAADLKATAIITATSSGSTARMVARYRPKAPVIAVSPSPSTIRHLQLIRGVTPLLCNFGSSMDEQLDRVIHAATLAELIHNGDLVIITAGMPLGPTGTTNMLKVHTVADICVTGQGIGVKHAQGAVRIIQAEDDWQDLPEHTIAVVSSTNESMLKHLGKVRGIIAEAPGLTSHAAIVGRELGIPVICNVTNALMLFENDQVITIDGTTGHICYGSTQNT

SEQ ID NO: 271 - DNA, 1755 bp, Symbiobacterium thermophilum IAM 14863
  CDS (1)..(1755): transl_table=11
atgctgcgaaagacgaagatcgtggccaccatcggcccggccagcgagcaggtggaggtgctgacccggctgatcgaggcgggtgtcgatgtctgtcggctcaacttcagccacggcaccctcgacgagcagaggcgccggatcgagaacatccgtgaggccggccgccgggtgggcaaggacgtcgcgatcatgatcgacctgaaggggcccgagatccgcatcggaacgttcgagaacggcaaggtcacgctgcgggacggggacctcttcaccctgaccacggagccttgcgtcggcaaccaggagcgggtctgggtccagtaccccgggatcgttcacgacgtggccgagggcgggtacctgctgctggatgacggcaacctgacgttccaggcggtggaggtgacgcccaccgagatccgttgccgggtgatcgtcggcggcgtcctgtccgaccgcaagaaggtgaacctgcccggcacgaaggtctcgctgcccgcgctgtccgagaaggacatcgaggacatccgcttcggcgtcgagatgggcgtcgacttcgtggccggctcgttcatccggaaggcccaggacgtgctggagatccgccgggtgatcgaggaggcgggcggccaccagcagatcatctcgaaggtggagtcccaggaggggttcgacaacctggaggccatcctgcaggtctccgacggcctgatggtggcccgcggcgacctgggggtggaggtgcccaccgaagaggtgccgctgatgcagaagcggatgatcgagcgggccaatgccatgggcaagcccgtgatcaccgcgacgcagatgctggagtccatggtcaaccggccccgtccgacccgggccgaggcctccgacgtggccaacgcgatcatggacggcaccgacgccatcatgctgtcggcggagtccgccgccggcaagtacccggtggaggcggtgcggacgatggcgacgatcgcccgccgcaccgaggaggcgctggaccactcgcagctgatggcccgacgcggccgcttcggccggatggacagcgtcaccgaggccatctcccacgcgacggtgaccacggcccacgacctgggcgccacggccatcgtctcggccaccacctcgggctttaccgcccgtatggtgtccaagtaccgcccgggctgccccatcatcgccgtgaccccggatccgcgggtcgcgcggcagctgcggctggtctggggcgttttccccgtcgtcgagccggtggcctcgggcactgaggacctgacccagcgggccgtggaaggggccctggtttccgggctggtgaagaacggcgacctggtcgtcatcaccgccggtctgccggtgggggtgaagggcaccaccaacctgctgaaggtgcacacggtggcggacgtgctggcccagggtacgggcatcggccggcagccggtcacggggcgggccgtcatcgtgcggtccgaggaggacctggcccgcgtgcagcccggcgacatcctggtcagcaggctgaccgacgccgactgcgtccccgcgatggagcgggccgcggggatcatcacggaagagggcggcctgacctcgcacgcggcggtggccggcatctcgctgggcaagcccgtgatcgtgggcgccgagggcgccacccgccgcattcccgacggggcgatcatcacgatggacgtggcccatggcctggtcttgcgcggcgaggccaccgtcaagtaa

SEQ ID NO: 272 - protein, 584 aa, Symbiobacterium thermophilum IAM 14863
MLRKTKIVATIGPASEQVEVLTRLIEAGVDVCRLNFSHGTLDEQRRRIENIREAGRRVGKDVAIMIDLKGPEIRIGTFENGKVTLRDGDLFTLTTEPCVGNQERVWVQYPGIVHDVAEGGYLLLDDGNLTFQAVEVTPTEIRCRVIVGGVLSDRKKVNLPGTKVSLPALSEKDIEDIRFGVEMGVDFVAGSFIRKAQDVLEIRRVIEEAGGHQQIISKVESQEGFDNLEAILQVSDGLMVARGDLGVEVPTEEVPLMQKRMIERANAMGKPVITATQMLESMVNRPRPTRAEASDVANAIMDGTDAIMLSAESAAGKYPVEAVRTMATIARRTEEALDHSQLMARRGRFGRMDSVTEAISHATVTTAHDLGATAIVSATTSGFTARMVSKYRPGCPIIAVTPDPRVARQLRLVWGVFPVVEPVASGTEDLTQRAVEGALVSGLVKNGDLVVITAGLPVGVKGTTNLLKVHTVADVLAQGTGIGRQPVTGRAVIVRSEEDLARVQPGDILVSRLTDADCVPAMERAAGIITEEGGLTSHAAVAGISLGKPVIVGAEGATRRIPDGAIITMDVAHGLVLRGEATVK

SEQ ID NO: 273 - DNA, 1758 bp, Bacillus licheniformis ATCC 14580
  CDS (1)..(1758): transl_table=11
atgagaaagactaaaatagtttgtacaattggaccggccagcgaaagtgttgaaaagctcacccagctgatggaagccggaatgaacgtggcgcgcctgaacttttcccatggagatttcgaagagcacggcgcaagaattaaaaacattcgtgaagcagccggcaagctgggaaaagatatcggcatccttcttgacacgaaagggcctgaaatccgcacgcacacaatggaaaacggttcgatcgaactggcagcgggttctcagctgatcgtttcaatggacgaagtcatcggtacgcctgataaaatctcagttacatatgatgggttgattcacgatgtgtcagtcggttcaacgattttgcttgacgatggattggtcggacttgaagtcactgacataaacaaggacaagcgtgaaatcgtcacgaaagtgatgaacagcggaacgttgaaaaacaaaaaaggcgtgaatgtgccgggcgtcagcgtcaatcttccgggaattacggaaaaagatgcaaacgacatcgtattcggcatcgagcagggcgttgatttcatcgcggcatcctttgtgcgccgtccgtcggatgtccttgaaatccgcgaacttcttgaagagcacaatgcggcagatattcaaatcattccaaaaatcgaaaaccaggaaggcgttgacaacatcgatgccattcttgaagtatcagacggtctgatggttgcgcgtggagacctgggtgtagaaatccctgccgaagaagtgccgctcgttcaaaaagaactgatcaaaaaatgcaatgcgcttggcaagcctgtcatcacggctacccaaatgctcgacagcatgcagcgcaatccgcgcccgacacgcgcggaagcgagcgacgttgccaatgcgatctttgacggaactgacgcaatcatgctttcaggtgaaacggcagcgggaaattatcctgttgaagccgttcagacgatgcacaatatcgcttcccgttcagaagaagcgctcaaccataaaaagatcctttccgcacgaagcaagcaagtcagcatgtcaattacggatgcgatcggccaatctgtggcgcatacggcaatcaaccttgatgtgaatgccatcgtcacaccgacggaaagcggccatacggcgagaatgatttccaaatatcgcccgcaggcgccgattgtcgcagttacggtaaacgatgcggtgtcaagaaagctgtcacttgtgttcggggttttcgcaacaagcggacaaaaccacagctccactgacgaaatgcttgaaaaagcggtgcaaaaatctctcgatacaggcatcgtacgccacggcgacttgatcgttatcacggccggagctgtcggtgaagccggtacaacaaacttgatgaaagtgtatgttgtcggagacgtggtcgcaaaaggccagggcatcggacgcaaatccgcatttggtgaagtggtcatcgctcaaaacgcacaagaagcggccaaaaaaatgaaagatggcgccgttttagttacaaaaagcacggatcgtgacatgatggcatcccttgaaaaagccggctgcgctgattacggaagaaggcggcttaacaagccacgcgcagtcgtaggcttaagcctcggcatccctgtcatcgtcggaatggaaaatgcgacttccattctgaaagagggagaagacatcacggtcgactccgcccgcggagctgtatacaaaggacgtgcaagcgtgctttaa

SEQ ID NO: 274 - protein, 585 aa, Bacillus licheniformis ATCC 14580
MRKTKIVCTIGPASESVEKLTQLMEAGMNVARLNFSHGDFEEHGARIKNIREAAGKLGKDIGILLDTKGPEIRTHTMENGSIELAAGSQLIVSMDEVIGTPDKISVTYDGLIHDVSVGSTILLDDGLVGLEVTDINKDKREIVTKVMNSGTLKNKKGVNVPGVSVNLPGITEKDANDIVFGIEQGVDFIAASFVRRPSDVLEIRELLEEHNAADIQIIPKIENQEGVDNIDAILEVSDGLMVARGDLGVEIPAEEVPLVQKELIKKCNALGKPVITATQMLDSMQRNPRPTRAEASDVANAIFDGTDAIMLSGETAAGNYPVEAVQTMHNIASRSEEALNHKKILSARSKQVSMSITDAIGQSVAHTAINLDVNAIVTPTESGHTARMISKYRPQAPIVAVTVNDAVSRKLSLVFGVFATSGQNHSSTDEMLEKAVQKSLDTGIVRHGDLIVITAGAVGEAGTTNLMKVYVVGDVVAKGQGIGRKSAFGEVVIAQNAQEAAKKMKDGAVLVTKSTDRDMMASLEKAGCADYGRRRLNKPRAVVGLSLGIPVIVGMENATSILKEGEDITVDSARGAVYKGRASVL

SEQ ID NO: 275 - DNA, 1581 bp, Mannheimia succiniciproducens MBEL55E
  CDS (1)..(1581): transl_table=11
ttgattatttctatcgctttactcacaatttcagcgtataatacagcgcagttttttcttcatggctgttttttagtatttagcagtaacatgaaaaaaggttatttaaatcaaacaaataaaatatttacggagtatttaatgtccagaagattaagaagaacgaaaatcgtatgtacaatggggcctgcaacagacaaaggcaataatttagaaaaaatcattgctgccggtgcaaacgttgtacgtatgaacttctcccacggtacgcccgaagatcatatcggtcgtgctgaaaaagtacgtgaaatcgctcataaattaggtaaacacgtagcaatcttaggtgacttacaaggccctaaaatccgtgtttctacttttaaagaaggcaaaattttcttaaatatcggtgataaattcattttagacgcagagatgcctaaaggtgaaggtaaccaggaagcggttggtttagactataaaacattaccgcaagatgtggttccgggcgatatcttattattagatgacggtcgagttcaattgaaagtattggcgaccgaaggtgcaaaagtattcaccgaagtaacggtcggtggcccactatcaaataataaaggcattaacaaattaggcggcggtttatctgccgatgcattaaccgaaaaagataaagcggatatcattactgcggcgcgtatcggggtggattaccttgccgtatctttcccgcgttcaagcgcggatttaaactacgcccgtcaattagcaaaagatgcgggcttggatgcgaaaattgttgcgaaagtagaacgtgccgaaacagttgaaacggacgaagcaatggacgatatcatcaatgcggcggacgtaatcatggttgcgcgcggtgacttaggtgttgaaatcggtgaccctgaattagtcggtgttcagaaaaaattaatccgtcgttcacgtcagttaaatcgtgttgttattaccgcaactcaaatgatggaatcaatgattagcaatcctatgccgactcgtgcggaagtaatggacgtagctaacgcagtattggacggtaccgatgcggtaatgctttctgctgaaaccgcggctggtcaatatccggcggaaactgttgcggcgatggcgaaagttgcgttaggtgcggagaaaatgccaagcattaatgtgtctaaacaccgtatgaacgttcaattcgagtctattgaagaatctgttgcaatgtctgcaatgtatgcggcaaaccacatgagaggcgtagcggcgattatcacattaacaagtagcggtcgtactgctcgtttaatgtctcgcattagttccggtttaccaatctttgcattgtcacgtaacgaatctacattaaatttatgtgcattgtatcgtggtgtgacaccggttcattttgataaagacagccgtacttcagaaggtgcgaaagcagcggttcaattattaaaagacgaaggtttcttagtgtctggcgatttagtgttattaactcagggcgacgcaagcagttctagcggtactaacctttgccgtacattgattgttgaataa

SEQ ID NO: 276 - protein, 526 aa, Mannheimia succiniciproducens MBEL55E
MIISIALLTISAYNTAQFFLHGCFLVFSSNMKKGYLNQTNKIFTEYLMSRRLRRTKIVCTMGPATDKGNNLEKIIAAGANVVRMNFSHGTPEDHIGRAEKVREIAHKLGKHVAILGDLQGPKIRVSTFKEGKIFLNIGDKFILDAEMPKGEGNQEAVGLDYKTLPQDVVPGDILLLDDGRVQLKVLATEGAKVFTEVTVGGPLSNNKGINKLGGGLSADALTEKDKADIITAARIGVDYLAVSFPRSSADLNYARQLAKDAGLDAKIVAKVERAETVETDEAMDDIINAADVIMVARGDLGVEIGDPELVGVQKKLIRRSRQLNRVVITATQMMESMISNPMPTRAEVMDVANAVLDGTDAVMLSAETAAGQYPAETVAAMAKVALGAEKMPSINVSKHRMNVQFESIEESVAMSAMYAANHMRGVAAIITLTSSGRTARLMSRISSGLPIFALSRNESTLNLCALYRGVTPVHFDKDSRTSEGAKAAVQLLKDEGFLVSGDLVLLTQGDASSSSGTNLCRTLIVE

SEQ ID NO: 277 - DNA, 1449 bp, Azoarcus sp. EbN1
  CDS (1)..(1449): transl_table=11
atgccacgccacaccaagatcgtcgccactctcggccccgcctcgtccgacccgcaggtgcttgaacgcatggttcacgccggcgtcgacgtggtgcggatgaatttctcgcacggcaaggcggaggatcacgtcgcgcgggccgaggcgatccgcgaagcggcatcgctggcgggccggccggtcggcattctcgccgacctgcagggacccaagatccgtgtcggcaagttcgccgaagggcaggtcgaactgcagcgcgatgccggattcatcctcgatgcgcgctgcgagctgggcaacgccgagcgggtcgggctcgactacaaggacctgccgaaggacgtcaaggccggcgacgtgctgctgctcgacgacggacggctgaagctgacggtcacgcgcgtcatcggccacgagatccacaccgtcgtcaaggtcggcggcacgctgtcgaacaacaagggcatcaaccgccagggcggcggcctgactgcgcccgcactgaccgcgaaggacatggacgacatcaagacggcggcgaagatcggcgtcgatttcgtcgcggtgtcgttcccgaaaagcgcagccgacatgtacatggcgcgccagctgatgcgcgcgtcgggagtcgatgcgctgctgatcgcgaagatcgagcgcaccgaagcggtcgcgaacctcgacgagatcctcgatgcatccgacggcatcatggtcgcgcgcggcgatctcgcggtcgaagtgggggacgccgcagtgccggcgctgcagaagaagatgatccgtgcggcacgggaccgcaacaagctgacgatcaccgcgacgcagatgatggagtcgatgatcacgagtccggtgccgacgcgcgccgaagtctccgacgtcgccaacgcggtgctcgacggcaccgacgcggtgatgctgtcggccgaaaccgcgtccggcaggttccccgtcgaagtcgtcgaagcgatgagccgcgtgtgcctcgaagccgagaagtcgtccgacgtggcgctcgaccgcgacgtgctgaaccgcgtcttcacgcgcatcgaccagtcgatcgcgatggcggcgatctggacggcgtggcatctcaaggtcaaggcgatcgcgtcgctgacgcagaccggctcgaccgcactatggatgagccgcctcaacagcggagtgccgatctacgcgctcactcccgaagcgagcgcgcgcaaccagatgacgctgtatcgcgaagtgttcccgctgctgatgtcgcagacgcatcaggatcgcgacgtgctgctgtgggaggccgagcagatcctgatcgaccagggcgtcgccgagcgcggcgacctgatcgtgctgacgatcggcgagccgatcggcgcatccggcggcaccaacacgctgaagatcgtccgcgtcggcgaacatccgccgccgcacgtcaccgaccagtaa

SEQ ID NO: 278 - protein, 482 aa, Azoarcus sp. EbN1
MPRHTKIVATLGPASSDPQVLERMVHAGVDVVRMNFSHGKAEDHVARAEAIREAASLAGRPVGILADLQGPKIRVGKFAEGQVELQRDAGFILDARCELGNAERVGLDYKDLPKDVKAGDVLLLDDGRLKLTVTRVIGHEIHTVVKVGGTLSNNKGINRQGGGLTAPALTAKDMDDIKTAAKIGVDFVAVSFPKSAADMYMARQLMRASGVDALLIAKIERTEAVANLDEILDASDGIMVARGDLAVEVGDAAVPALQKKMIRAARDRNKLTITATQMMESMITSPVPTRAEVSDVANAVLDGTDAVMLSAETASGRFPVEVVEAMSRVCLEAEKSSDVALDRDVLNRVFTRIDQSIAMAAIWTAWHLKVKAIASLTQTGSTALWMSRLNSGVPIYALTPEASARNQMTLYREVFPLLMSQTHQDRDVLLWEAEQILIDQGVAERGDLIVLTIGEPIGASGGTNTLKIVRVGEHPPPHVTDQ

SEQ ID NO: 279 - DNA, 1755 bp, Bacillus clausii KSM-K16
  CDS (1)..(1755): transl_table=11
atgcgtaaaacaaaaattgtttgtacgattggaccagcaagtgagtcgcttgaaaaactaacagcactcatcgaagcggggatgaatgtagcccgtttgaatttttcacacggtgattttgaagagcacggtgcccgaattaaaaacattcgcgaagcggcaaaacggactggaaaaacggttgctattctacttgatacgaaagggccggaaatccgcacacaaacggtagaaggcggagcgattgaacttgagaaagggcaagagctcattttgtcaatgaatgaagtccaaggtacgaaagaaaagatctccattacgtatccagggctttgcgaggatgtagaagtcggaagtacgatcttgctcgatgatggcttaattgggcttgaggtaaaggaaatccgcgacactgagctggttacgattgttcgcaacagtggcgtgctgaaaaacaagaaaggcgtcaacgtcccaaatgtcagcgtcaacctaccggggatgaccgaaaaggatgcagccgacattgtatttgggattgagcaaaaagttgactttatagccgcctcctttgtgcgccgcgcttctgatgttctagaaatccgcgagctccttgaaaagcatggcgctgcagatacagcgattatcccgaaaatcgaaaaccaagaaggcgttgacaatatcgatgaaattcttgaagtatcggacggccttatggtcgcaaggggagacttaggtgtagaaattccagcagaagaagtaccgcttgtgcaaaaacagctcattaaaaaatgcaatgagttggccaagccggtcatcactgccacgcaaatgcttgattccatgcaacgcaacccgcgtcctacacgagcggaagcaagcgacgtagccaacgctatttttgacgggacagacgccattatgctttctggtgaaaccgctgctggtgattaccctgtagaatcggtgcaaacaatgcacaatattgccgaacgaacagaacaagccctcaattatgaaaacatgctgcgtcggaaaagcaaagaagtgaaaacatcgattacaagtgcaattggccagtctgttgcttacaccgcctcaaacttgaatgctgctgcgattttaacagcgacagaaagcggctatacagcacggatgacatcacgtttccggccgaaatcgccaatcttggccgtaacgagcaatgagcgtgcttaccggagaatggcgctcgtgtggggggttacgccaatacttggtaaacaagcaaacacaactgacgaaatgttagaccgtacagttgaagcggctgtcgctacaggagtggtgaaacaaggtgaccttgttatcattacggctggtgttcccgttggggagtcaggcacaacgaatttaatgaaagtccatatgcttggggaagttgcagcaaaaggacaaggcatcggacgtcgctctgcctcaggaaaagtcgttgttgcccgtgacgcaaaagaagcgattgcaaaagtaacggaaggctctgtgcttgtcacaaaatcaaccgataaagacatgatcgaagcgttcgagaaagctgctgctgtcgtgactgtagaaggcggtcttacatcccatgcagctgttgttggcttaaacttgagcacgcctgttatcgtcggtgtagccaacgcccttgaacgtttccaagacggcgatgaagtgactgtggactgcattagcggaaacatttacagcggccaagcccgtgtattataa

SEQ ID NO: 280 - protein, 584 aa, Bacillus clausii KSM-K16
MRKTKIVCTIGPASESLEKLTALIEAGMNVARLNFSHGDFEEHGARIKNIREAAKRTGKTVAILLDTKGPEIRTQTVEGGAIELEKGQELILSMNEVQGTKEKISITYPGLCEDVEVGSTILLDDGLIGLEVKEIRDTELVTIVRNSGVLKNKKGVNVPNVSVNLPGMTEKDAADIVFGIEQKVDFIAASFVRRASDVLEIRELLEKHGAADTAIIPKIENQEGVDNIDEILEVSDGLMVARGDLGVEIPAEEVPLVQKQLIKKCNELAKPVITATQMLDSMQRNPRPTRAEASDVANAIFDGTDAIMLSGETAAGDYPVESVQTMHNIAERTEQALNYENMLRRKSKEVKTSITSAIGQSVAYTASNLNAAAILTATESGYTARMTSRFRPKSPILAVTSNERAYRRMALVWGVTPILGKQANTTDEMLDRTVEAAVATGVVKQGDLVIITAGVPVGESGTTNLMKVHMLGEVAAKGQGIGRRSASGKVVVARDAKEAIAKVTEGSVLVTKSTDKDMIEAFEKAAAVVTVEGGLTSHAAVVGLNLSTPVIVGVANALERFQDGDEVTVDCISGNIYSGQARVL

SEQ ID NO: 281 - DNA, 1437 bp, Thermococcus kodakarensis KOD1
  CDS (1)..(1437): transl_table=11
atgcggctcccaggacagaaaaccaagataatagccaccctaggtcctgcgtctctcaacgaaaagaccataacggcaatggttcgagcggggatgagtgttgcaaggataaacttcgcccacggtgatctgaaacagcacgagaagtcgataaaactcgtgagaaaggtctctgagaggctcaacaggcccgttgcaattctcggagacctgcccggagtgaagatccgcgttggtgagattgagggcggctcagtgacgctgagacgctggcagacggtaacccttaccacgagggacgtaatcggcaacgaggccgttatacccgttgagttcaaggactttccaaggctcgtctcgaagggggacgtcatctatctcagcgacggtttcatagcgctaagggttgaagacgtcagggaccaggatgtcatctgtaaggtgctcgtcggaggaactctcttctcccgcaaaggaatcaacattcccaaggctcgcctggctatcgaagcaataaccgagaaggatttagaattcctggagttctctctggagcacggagttgacgccgtcggcataagcttcgtcggttccgcctacgacgttctaaaggcaaggcgattcgtcgaggaaaggaacggcaagctgttcctgatagccaaaatagaaaggcccgacgcggtgagaaacttcgacgagattctcagggcggcggacggggtcatggtagccaggggagacctcggagtggagatgcccatagaaaagctcccgattctccagaaaaagcttatccaaaaggcaaactgtgcgggaaagcccgtgataacagcgactcagatgctagagagcatgacccacgagaagctcccaacgagggctgaggtcaccgatgttgcgaacgcaatccttgatggaaccgacgccgtgatgctctccgaggagacggcggtcggaaagtacccggttgagaccgtcaaaatgatggccaggatagcgaagactaccgaggcatacagggactccaaatgggctgaaagaaccgtcgaatggaagatgagtgagttgaggggtacacggccgacaaagggtaccataaaggacgcaataacgaggagtataatagaggccctgaactccatagacattaaatacatactaacaccgaccaggatgggacaaactgcgaggctaatagcccgttttaagccaaagcagtgggtactggcatttgtaactgatgaatgggtcaaaaacactctgatgttctcctacggcgtttatccgttcctcgttgaggacaccagcgaagaggagatactgcgcgtgataaccgggctcggactggtagatgagggcgatacggtacttctgacgaagggaacgcccataggaaagaccgcggggacgaacaccatccgcatcttcaacgtttga

SEQ ID NO: 282 - protein, 478 aa, Thermococcus kodakarensis KOD1
MRLPGQKTKIIATLGPASLNEKTITAMVRAGMSVARINFAHGDLKQHEKSIKLVRKVSERLNRPVAILGDLPGVKIRVGEIEGGSVTLRRWQTVTLTTRDVIGNEAVIPVEFKDFPRLVSKGDVIYLSDGFIALRVEDVRDQDVICKVLVGGTLFSRKGINIPKARLAIEAITEKDLEFLEFSLEHGVDAVGISFVGSAYDVLKARRFVEERNGKLFLIAKIERPDAVRNFDEILRAADGVMVARGDLGVEMPIEKLPILQKKLIQKANCAGKPVITATQMLESMTHEKLPTRAEVTDVANAILDGTDAVMLSEETAVGKYPVETVKMMARIAKTTEAYRDSKWAERTVEWKMSELRGTRPTKGTIKDAITRSIIEALNSIDIKYILTPTRMGQTARLIARFKPKQWVLAFVTDEWVKNTLMFSYGVYPFLVEDTSEEEILRVITGLGLVDEGDTVLLTKGTPIGKTAGTNTIRIFNV

SEQ ID NO: 283 - DNA, 1458 bp, Bacteroides fragilis NCTC 9343
  CDS (1)..(1458): transl_table=11
atgttgctgaaacagactaaaatcgtagcttccatctcagacagacgttgcgatgtagattttataaaagagttgtttgatgcagggatgaatgtggttcgtatgaacacagcccacgccagtcgtgaaggttttgaggcgttgattgccaatgtgcgtgccgtatccaatcgcattgccatccttatggataccaagggaccggaagtgcgtaccactgccaatgcggaccccatactttatcagatcggtgagaaagttaaaatcgtaggagatcccgatcgtgagactacccgtgaatgcattgccgtttcatatccgaattttgtgcatgacctgaatgtaggggggactattttgatagatgatggtgaccttgaattgcgagttattgataaaacaaccgaatacttactttgtgaagtccagaacgaggcaactttggggagccgtaagagtgtaaacgttccgggtgttcgtatcaatctcccctctttaaccgagaaagatcgtaataacatcctttatgccatagagaaagatatcgatttcattgctcattcttttgtgcgtaaccgccaggatgtgcttgatatccgtggaatactggacgctcacaatagtgatatccgcattattgccaagatcgaaaatcaggaaggtgtcgataacattgatgagatcctggaagttgccgatggagtaatggtagctcgtggtgacttgggtattgaagtaccgcaggaacgtattccgggaattcagcgtatgttgatacgcaaatgtatccttgccaaaaaaccggtaatcgtggcaacacaaatgttgcatacgatgattaataatccacgtccgactcgtgcggaagtaaccgatattgccaatgcaatctattatcgtacagacgctttgatgttgagtggtgagactgcctatggcaaatatcctgtagaggccgtgaaaacgatgactaagattgctgcacaggctgagaaggacaagttggaggagaatgacattcgcattcctttggacgaaaacagtaatgatgtcacagctttccttgctaaacaagctgtaaaagcaactactaagctaaagatacgtgccatcattacggatagctatcaggggcgtactgcacgcaatttagcagctttccgtggtaaatatccggtacttgcaatttgttataaggagaagactatgcgtcaccttgcactttcttatggtgtggaagcgatttatatgcctgaacttgccaacgggcaggagtactattttgcagctctgcgccgtttgttgaaagaaggacgtttgcatccaactgatatggtgggttatctgagtagcggtaaagccggaacgcagacttctttcctcgaaatcaatgtcgtggaagatgctttgaagcatgccggtgatagtgtgttgcctaatagcaaccgttatttataa

SEQ ID NO: 284 - protein, 485 aa, Bacteroides fragilis NCTC 9343
MLLKQTKIVASISDRRCDVDFIKELFDAGMNVVRMNTAHASREGFEALIANVRAVSNRIAILMDTKGPEVRTTANADPILYQIGEKVKIVGDPDRETTRECIAVSYPNFVHDLNVGGTILIDDGDLELRVIDKTTEYLLCEVQNEATLGSRKSVNVPGVRINLPSLTEKDRNNILYAIEKDIDFIAHSFVRNRQDVLDIRGILDAHNSDIRIIAKIENQEGVDNIDEILEVADGVMVARGDLGIEVPQERIPGIQRMLIRKCILAKKPVIVATQMLHTMINNPRPTRAEVTDIANAIYYRTDALMLSGETAYGKYPVEAVKTMTKIAAQAEKDKLEENDIRIPLDENSNDVTAFLAKQAVKATTKLKIRAIITDSYQGRTARNLAAFRGKYPVLAICYKEKTMRHLALSYGVEAIYMPELANGQEYYFAALRRLLKEGRLHPTDMVGYLSSGKAGTQTSFLEINVVEDALKHAGDSVLPNSNRYL

SEQ ID NO: 285 - DNA, 1434 bp, Corynebacterium glutamicum ATCC 13032
  CDS (1)..(1434): transl_table=11
atgggcgtggatagacgaactaagattgtatgtaccctaggcccagcggtggctagtgcagatggaattctgcgtttggtagaagacggcatggatgttgctcgcctcaacttctcccatggtgaccacccagatcatgagcaaaactacaagtgggtccgcgaggcggcggagaagactggccgtgcagtcggtattctcgcagacctccaaggaccgaagatccgtcttggccgtttcactgacggcgcaaccgtgtgggaaaacggcgagaccattcggatcaccgttgacgatgtagagggaacgcacgatcgtgtgtccaccacctacaagaatctggcaaaagacgcgaagccaggcgaccgcctgctcgttgatgacggcaaggttggcctcgtctgcgtttccgtcgaaggtaacgacgtcatctgtgaggttgttgagggcggaccagtctccaacaacaagggtgtttccctgccaggtatggatatttccgtacctgcactgtccgaaaaggatatccgtgacctgcgcttcgccctgaagctcggcgtggactttattgcactgtccttcgtacgttccccagcagatgctgaactcgttcacaagatcatggacgaagaaggtcgtcgtgttcctgtgatcgccaagctggaaaagccagaggctgtcacctccctcgagccaatcgtgttggcattcgacgccgtcatggttgctcgtggtgacctcggcgttgaggttcctctggaggaggttccactggttcagaagcgcgcaatccagattgcccgtgagaacgcaaagccagttatcgtggcaacccagatgctggattccatgattgagaactcccgcccaacccgtgcggaagcttctgacgtggcaaacgctgtgctcgatggcgcagatgctgtcatgctttctggtgaaacttcagtgggcaaagatccgcacaacgttgtgcgcaccatgtctcgcattgttcgcttcgctgaaaccgacggtcgcgtcccagacctgacccacatccctcgcactaagcgtggcgttatttcctactctgcacgtgatatcgccgagcgcctcaacgctcgtgcattggttgcgttcaccacctctggtgataccgcaaagcgtgtggctcgtctgcacagccacctgccactgctcgtgttcactccaaatgaggcagttcgctctgagctggcgctgacctggggtgcaaccaccttcctgtgtccacctgtcagcgataccgatgacatgatgcgcgaagtcgaccgtgctcttttagcaatgcctgagtacaacaagggtgacatgatggttgttgttgcaggttcccctcctggtgttaccggtaacaccaacatgattcacgtccaccttcttggtgacgacacaaggattgcaaagctctaa

SEQ ID NO: 286 - protein, 477 aa, Corynebacterium glutamicum ATCC 13032
MGVDRRTKIVCTLGPAVASADGILRLVEDGMDVARLNFSHGDHPDHEQNYKWVREAAEKTGRAVGILADLQGPKIRLGRFTDGATVWENGETIRITVDDVEGTHDRVSTTYKNLAKDAKPGDRLLVDDGKVGLVCVSVEGNDVICEVVEGGPVSNNKGVSLPGMDISVPALSEKDIRDLRFALKLGVDFIALSFVRSPADAELVHKIMDEEGRRVPVIAKLEKPEAVTSLEPIVLAFDAVMVARGDLGVEVPLEEVPLVQKRAIQIARENAKPVIVATQMLDSMIENSRPTRAEASDVANAVLDGADAVMLSGETSVGKDPHNVVRTMSRIVRFAETDGRVPDLTHIPRTKRGVISYSARDIAERLNARALVAFTTSGDTAKRVARLHSHLPLLVFTPNEAVRSELALTWGATTFLCPPVSDTDDMMREVDRALLAMPEYNKGDMMVVVAGSPPGVTGNTNMIHVHLLGDDTRIAKL

SEQ ID NO: 287 - DNA, 1452 bp, Pseudomonas fluorescens Pf-5
  CDS (1)..(1452): transl_table=11
atgtccgttcgtcgtaccaaaatcgttgccacccttggcccggccagtaactcgccggaagttctcgaacagctgattctcgcgggcctggatgttgcccgtctgaacttctcccacggcactccggacgagcacaaggctcgcgccaaactggtccgcgacctggcagccaagcacggccgcttcgtggccatcctcggcgacctgcagggcccgaagatccgcatcgccaaattcgccaacaagcgcatcgagctgaagatcggtgacaagttcaccttctccaccagccatccgctgaccgaaggcacccaggatatcgtcggcatcgactacccggatctggtcaaggactgcggcgtgggcgacgagctgctgctggacgacggccgcgtggtgatgcgtgtggaaaccgccaccgccaccgagctgcattgcgtggtgaccatcggcggcccgctgtccgaccacaagggcatcaaccgtcgtggtggtggcctgaccgctccggccctgaccgagaaagacaaggccgacatcaagctcgcggccgagatggaagtcgattacctggccgtgtccttcccacgggacgccgccgacatggaatacgcgcgcaagctgcgtgacgaagccggtggtactgcctggctggtagcgaagatcgaacgcgcggaagcggtggccgacgacgaaaccctcgacggcctgatcaaggccagcgacgcggtcatggttgcccgtggcgacctgggcgtggaaatcggcgacgccgagctggtgggcatccagaagaaaatcattctgcacgcccgtcgccacaacaaggcggtgatcgttgcgacccagatgatggagtcgatgatccagaacccgatgccgacccgcgccgaagtgtccgacgtggccaacgccgtgctcgactacaccgatgcggtgatgctctcggcggaaagcgcagccggtgcctacccgctggaagcggtgcaggccatggcgcggatctgcgtcggtgcggaaaagcaccccaccagcaagacctccagccaccgcatgggcaaggtgttcgaaagctgcgaccagagcatcgccctggctgccatgtacaccgccaaccacttcccgggcgtgaaggcgatcatcgccctgaccgaaagtggctacaccccgctgatcatgtcgcgcattcgctcctcggtgccgatctacgcctactccccgcaccgcgaaacccaggctcgcgcagccatgttccgtggcgtctacaccatcccgttcgatccggcttccctgccgcccgagcaggtcagccaggcagcgatcgatgagctgctcaagcgcggtgtcgtagagaaaggcgactgggtgattctcaccaagggcgacagctaccacaccaccggcggcaccaacggcatgaagatcctgcacgtgggcgacccgatggtctga

SEQ ID NO: 288 - protein, 483 aa, Pseudomonas fluorescens Pf-5
MSVRRTKIVATLGPASNSPEVLEQLILAGLDVARLNFSHGTPDEHKARAKLVRDLAAKHGRFVAILGDLQGPKIRIAKFANKRIELKIGDKFTFSTSHPLTEGTQDIVGIDYPDLVKDCGVGDELLLDDGRVVMRVETATATELHCVVTIGGPLSDHKGINRRGGGLTAPALTEKDKADIKLAAEMEVDYLAVSFPRDAADMEYARKLRDEAGGTAWLVAKIERAEAVADDETLDGLIKASDAVMVARGDLGVEIGDAELVGIQKKIILHARRHNKAVIVATQMMESMIQNPMPTRAEVSDVANAVLDYTDAVMLSAESAAGAYPLEAVQAMARICVGAEKHPTSKTSSHRMGKVFESCDQSIALAAMYTANHFPGVKAIIALTESGYTPLIMSRIRSSVPIYAYSPHRETQARAAMFRGVYTIPFDPASLPPEQVSQAAIDELLKRGVVEKGDWVILTKGDSYHTTGGTNGMKILHVGDPMV

SEQ ID NO: 289 - DNA, 1452 bp, Colwellia psychrerythraea 34H
  CDS (1)..(1452): transl_table=11
atgcctagaagaacaaaaattgttgctaccttaggtcctgcaacagacgatcgtgaaattttaaaaaatgtattagctgcgggtgtaaacgtagttagacttaatttctctcacggtattccacaagatcatatagatagagccgacaatgtcagagcaatagcaaaagaattaggcgtttatgttggtatattaggtgatttacaaggccctaagattcgtgtttctacctttaaaaatggcccaattaaattagccattggtgataagtttgaattagatgcaaccttagaaaaaggtgaaggctgtcaagaaaaagtgggcattgattataaaaaattagtacaagatgttaacactggagacattttattacttgacgatggccgtgtacaattaaaagtattatctacctctgataattcggtattcactgaagttactgttggtggccctttatcaaataacaaaggtattaaccgtcaaggtggcggtttaactgcaccagccttaaccgctaaagataaagaagacattaaattagcagcaaagatcaatgttgattttctagcggtttcatttcctcgtgatgcagcagatatgcgtgaagcacgtttactcgcgcaagaagctggctgtgatgctcgtttggtttctaaaattgaacgtgctgaagccgttaatgatgacaaaattcttgatggtattatcttagcttcagatgttgttatggtagcccgtggtgatttaggcgttgaaattggtgatgcggcattggttggtaagcaaaagcatattatcactcgctctcgtcaattaaatcgtgtagtaatcacggcaacacaaatgatggagaccatgattgagcaacctatgccaacacgtgctgaagttatggatgtagcaaatgccgtattagatggtactgatgcggtaatgttatcagcagaaactgctgcaggtaagtatcctgttgaaacagtaacagcaatggctaatgtttgtgttggtgcggagcagcatcgttcagttaatatttcaaaccatagaatggaactgacttttagtgaagtgtcagaaacaattgcactatctgctatgtacgctgcaaaccatttagagggtgttaaagcgattatatctttaaccgaatcaggtcaaaccagtaagttaatgtcacgtatcacttcaggtttaccgatattctcattatctcgccatccaaaaacattaaataaaaccgcaatataccgtggtgtttatccgattgaatttgattcaactcacgtaaacaatgacaacttatctgatgagatgttaaaagtggtaagtggcaagattgagttagcagtaggtgataaacttattttaacccatggtgatatgatggaaaccgttggtgcttcaaatacattgaaaattttaactatttctaaaagacaccttaagtaa

SEQ ID NO: 290 - protein, 483 aa, Colwellia psychrerythraea 34H
MPRRTKIVATLGPATDDREILKNVLAAGVNVVRLNFSHGIPQDHIDRADNVRAIAKELGVYVGILGDLQGPKIRVSTFKNGPIKLAIGDKFELDATLEKGEGCQEKVGIDYKKLVQDVNTGDILLLDDGRVQLKVLSTSDNSVFTEVTVGGPLSNNKGINRQGGGLTAPALTAKDKEDIKLAAKINVDFLAVSFPRDAADMREARLLAQEAGCDARLVSKIERAEAVNDDKILDGIILASDVVMVARGDLGVEIGDAALVGKQKHIITRSRQLNRVVITATQMMETMIEQPMPTRAEVMDVANAVLDGTDAVMLSAETAAGKYPVETVTAMANVCVGAEQHRSVNISNHRMELTFSEVSETIALSAMYAANHLEGVKAIISLTESGQTSKLMSRITSGLPIFSLSRHPKTLNKTAIYRGVYPIEFDSTHVNNDNLSDEMLKVVSGKIELAVGDKLILTHGDMMETVGASNTLKILTISKRHLK

SEQ ID NO: 291 - DNA, 1434 bp, Dechloromonas aromatica RCB
  CDS (1)..(1434): transl_table=11
atgttgcgccataccaagatcgttgccacgctgggccccgcctcttcaacgccggaagttctcgaccgcatggtgctggcgggcatcgatgtggtgcgcatgaatttctcgcacggcacggccgacgatcaccgggcgcgcgccgagggcatccgtgcggcagcagccagacacggtcgcactatcggcatcctgggtgacctgcaaggtccgaagattcgcgtcggcaagttcgaggcaggcaagatcaccctcgttcccggtgaaaaattcattctcgatgcccagtgcccgctcggcaatcaggagcgtgtcggccttgattacaaggatctgccgaaggatgtggtcaatggcgacattctgctgctcgacgacggccgcctgaaactcgaagtgaccggcgttcgcggtcatgagatttacacccgcatcatcgtcggcggcgacctgtcgaacaacaagggcatcaaccgccagggtggcggcctgactgcaccggcactgaccggcaaggacatggacgacatcaagacggccgccgacatcggcgtcgatttcgtcgctgtctccttcccgaagagcgccgccgacatgtatatggcgcgccagttgctgcgcgctgccggcagcaccgccgtgctgatcgccaagatcgagcgcgtcgaagcgatcaccaatctggctgaaatcctcgatgcctccgacggcatcatggtcgcccgcggcgacctcgccgtcgaagtcggtgacgcctcggtgccggcgctgcaaaagaagatgatccgcatggcgcgggacaggaacaagctgaccatcaccgccacccagatgatggagtcgatgattacctcgccggtgccaacccgcgccgaagtctccgacgtcgccaatgccgtgctcgacggcaccgacgccgtgatgctgtcggccgaaacggcgagcggcaagtatccggtcgaaaccgtcgaatcgatggcccgcatctgcgttgaagccgaacgctcggccgaagtcacgctcgaccgcgaattcctcgaccgcatcttcacccgcatcgaccagtcgatcgccatggccgccatctggacggcgcatcacctcaaggtgaaggccatcgctgcactgacccagtccggctcgacggccttgtggatgagccggatgaactccggcgtgcccatctacgcactgaccccggatgccgaatcggtcggccgcatggtgctctttcgcggcgtctgcccgctgccgatgaagcagcagcacaccgaccgcgaccgcctgttggctgaagccgagcaactgttgatcgatcgcggtgtcgtagaaaagggcgacctgatcgccctgaccatcggtgaaccaatcggcaccaccggcggcaccaatacccttaagatcgtccgggtgggcgagcaccaactcgactag

SEQ ID NO: 292 - protein, 477 aa, Dechloromonas aromatica RCB
MLRHTKIVATLGPASSTPEVLDRMVLAGIDVVRMNFSHGTADDHRARAEGIRAAAARHGRTIGILGDLQGPKIRVGKFEAGKITLVPGEKFILDAQCPLGNQERVGLDYKDLPKDVVNGDILLLDDGRLKLEVTGVRGHEIYTRIIVGGDLSNNKGINRQGGGLTAPALTGKDMDDIKTAADIGVDFVAVSFPKSAADMYMARQLLRAAGSTAVLIAKIERVEAITNLAEILDASDGIMVARGDLAVEVGDASVPALQKKMIRMARDRNKLTITATQMMESMITSPVPTRAEVSDVANAVLDGTDAVMLSAETASGKYPVETVESMARICVEAERSAEVTLDREFLDRIFTRIDQSIAMAAIWTAHHLKVKAIAALTQSGSTALWMSRMNSGVPIYALTPDAESVGRMVLFRGVCPLPMKQQHTDRDRLLAEAEQLLIDRGVVEKGDLIALTIGEPIGTTGGTNTLKIVRVGEHQLD

SEQ ID NO: 293 - DNA, 1434 bp, Thiobacillus denitrificans ATCC 25259
  CDS (1)..(1434): transl_table=11
atgattcgcagaaccaaaatcgtcgccaccctcggccccgcctgctccgacgccaagacgctcgatcggatgatggaagccggcctggacgtggtccgtctcaacttctcccacggcgtggcgcaggaccacatcgaccgcgccgaactcgtgcgttcgctcgcgcgtacgcgcggtcgcgcggtcggcgtcctcgtcgacctgcaggggccgaagatccgcatcggcaaattcaaggacaacaagatcgtcctcgccaagggcgacaacttcatcctcgacgcggaatgcgcgctcggcgaccaggagcgcgtcggcctcgactacaaggaattgccgagcgacgtcgcccgtggcgtgacgctcctgctcgacgacggccggatcgaactctgggtcgaagacgtcaagggcagcgaaatccactgcaaggtcgtgcagggcggcgtgctctcgaataacaagggcatcaaccgcaagggcggcggtctttcggccgccgcgctgaccgagaaggacatcgaggacatcaagaccgccgcggcgctcaaggccgactacctcgcggtctccttcccgcgctcgggcgccgacatgcgccaggcgcgcgagttgctgcgggccgcgggcggcaggagccagctcgtcgccaagatcgagcgcactgaagcgatcgagaacctcgaagaaatcctcgatgcgtccgacgcgatcatggtcgcccgcggcgacctcggcgtcgaggtcggcgacgctgcggtgccggcgctgcagaagcgcatgatccgtatggcgatcgcgcgcaacaaggtcgtcatcaccgcgacgcagatgatggagtcgatgatcacgagcccgatcccgacccgcgccgaagtctccgacgtcgccaacgccgtgctcgacggcaccgacgccgtcatgctctcggccgagaccgcggccgggcaatacccggtcgaagccgtgcaggcgatggaccgcgtctgcctcgaagccgaaaaggaagccgagacgcagttcacgcgcgagcggctcgaccacagcttcctgcgcgccgacgaggcgatcgcgatgtcggccgtgttcacctcggtgcacctcaacatcaaggccatcgccgcgctgaccgagtccggcaatacctgtctgtggatgagccgcctgtcgacgcgcgtgccgatctacgccttgacacctcaggtcgaaacccgtagaaaagtcactctcttccgcggtgtctatccgatcaacctcaagaccgccaccaaggagcgcgacgtgctgctcgccgaggccgaggaagaattgcggcggcgcggcgccgtgcgcgacggcgacctgatcctgctgacgatcggcgagccgatcggccagtcgggcggcaccaatacgatgaagatcgtccgtgtgggcgcttcgaagaaaccctga

SEQ ID NO: 294 - protein, 477 aa, Thiobacillus denitrificans ATCC 25259
MIRRTKIVATLGPACSDAKTLDRMMEAGLDVVRLNFSHGVAQDHIDRAELVRSLARTRGRAVGVLVDLQGPKIRIGKFKDNKIVLAKGDNFILDAECALGDQERVGLDYKELPSDVARGVTLLLDDGRIELWVEDVKGSEIHCKVVQGGVLSNNKGINRKGGGLSAAALTEKDIEDIKTAAALKADYLAVSFPRSGADMRQARELLRAAGGRSQLVAKIERTEAIENLEEILDASDAIMVARGDLGVEVGDAAVPALQKRMIRMAIARNKVVITATQMMESMITSPIPTRAEVSDVANAVLDGTDAVMLSAETAAGQYPVEAVQAMDRVCLEAEKEAETQFTRERLDHSFLRADEAIAMSAVFTSVHLNIKAIAALTESGNTCLWMSRLSTRVPIYALTPQVETRRKVTLFRGVYPINLKTATKERDVLLAEAEEELRRRGAVRDGDLILLTIGEPIGQSGGTNTMKIVRVGASKKP

SEQ ID NO: 295 - DNA, 1431 bp, Anabaena variabilis ATCC 29413
  CDS (1)..(1431): transl_table=11
atgcgtcgaactaaaattatctgtactgtaggcccggctacatctgcaccagaacgtttagaagcgttggtagaagctgggatgaatgtagcgcggctgaatttttctcatggggcttatgatttccatgcccaaactgctcagtatttgcggcaaatcagtgctgatagacaaaagcctgttgctattatgcaagacctatgtgggccgaagattcgcttgggaacactaccaccagaagggttaacggtagaagctggtcaggaagtgacttttgtcttgcaagaaaagggtaatagtctggatgaattgcctttaccgttgccgactttgtttgcaatggtacgccctggggaaccaatcttaattaatgatggtcgtgtgaagttgattgtgaccgatcgcgatgccgatcgcattcgagctattgccaaaatcgggggtcttctttccacgcgtaagggtgttaacttgccagccactcgtttacccgttagttccatcaccgaaaaggacttgcaggatttacgttttggtattgagttaggtgtggattgggtagcggtgtcctttgtgcgatcgccttatgacctcgaaccagcccaacggatgattgaagcggctgggaaaaccatccgagtgattgccaaaatcgaacgtccagaggcagttgagcaaattgattctatcatcgacgtggctgatgccattatgattgctcgtggtgatttgggtgtagaaatgcctatccacgaagtacccctgattcaaaaggacatcattcgccgttgcaaccaagctggtaagcctgtaattacagcaacgcaaatgctggagtcgatgattagcgctcctgatcccacccgtgcagaagctaccgacgttgctaactctattctcgatggtacggatgcggtcatgctatctggggaaacggctgtgggacaatatcccgtcgccgccgtccagactatgcacgatatcgctacgactacagaaaagtctttgcaagagggtagtaaaaattgtttatcccatgaagcaggtggtctgagcgtcaccgaatctgtagctgaagctgtctgtcgtatcgcctacgaaacaggtgcaaaagcgattctttgcaacaccacatctgggagtacagcaaaactcgtgtcgaaatatcgtccgactacaccaatttttgctttgactcccgacgaaaccgcctaccatcaattagcactttcctggggtgtggaacctttattaactccaccagtccacaatgcggaagaaatgtttatgaatctcataaacaccgcagtgagaacgggtttggtgcatgacggtgacaaggtagttattacttctggagtgccaattggtaaatcaggcacaactagtttaattaaagtgcattctattggacaaccaatcaccgcctaa

SEQ ID NO: 296 - protein, 476 aa, Anabaena variabilis ATCC 29413
MRRTKIICTVGPATSAPERLEALVEAGMNVARLNFSHGAYDFHAQTAQYLRQISADRQKPVAIMQDLCGPKIRLGTLPPEGLTVEAGQEVTFVLQEKGNSLDELPLPLPTLFAMVRPGEPILINDGRVKLIVTDRDADRIRAIAKIGGLLSTRKGVNLPATRLPVSSITEKDLQDLRFGIELGVDWVAVSFVRSPYDLEPAQRMIEAAGKTIRVIAKIERPEAVEQIDSIIDVADAIMIARGDLGVEMPIHEVPLIQKDIIRRCNQAGKPVITATQMLESMISAPDPTRAEATDVANSILDGTDAVMLSGETAVGQYPVAAVQTMHDIATTTEKSLQEGSKNCLSHEAGGLSVTESVAEAVCRIAYETGAKAILCNTTSGSTAKLVSKYRPTTPIFALTPDETAYHQLALSWGVEPLLTPPVHNAEEMFMNLINTAVRTGLVHDGDKVVITSGVPIGKSGTTSLIKVHSIGQPITA

SEQ ID NO: 297 - DNA, 1752 bp, Carboxydothermus hydrogenoformans Z-2901
  CDS (1)..(1752): transl_table=11
atgaaacgcaccaagattgtttgtacaattgggccggcttcaaacgacgtaggtatcttaaaagaaatgattatatccggaatgaatgtggccagaattaattttgctcatggcagtcacgaggagcaccgggagagaattgaaaaggttagacgggcgtctttagaagtaggaatcccggtggcaattttaattgatacaaaaggtccggaaattcgcattggtaaagttgaaaacggaaaaattgtcttaaaagaaggggacttagtggtatttgatccggatatagcagagggtcaaggtttgagagttccagtaaattatccgggattagcccgggatgttaatgtcggaggaactattcttttagatgatgggttaatagaattgaaaatcgaagatattcagggtaataaagttattgcccgggttataaccggtggtgagttatccaataacaaaggagtaaatttaccgggagttaaagttaatcttccggcgttaaccgaaaaggaccggaaggatattgattttggtattgaaattggagcggactttattgcccactcttttgtccgaaaagcagcggatgtgttagctttacggcgttacctggaagaaaaaggggcggatatggaaataattgctaaaatcgaaaaccaagaaggggtcgaaaacatcgatgaaatcatcaaagttgcggatgggataatggttgcccggggggatctgggagtagaaattccaacggaagatgtgcctttggtgcaaaaggaaataattgaaaagtgtaataaaaatggtaaaccggtaatcaccgccacccagatgttagattcaatgattagaaataaacgtccgacccgggccgaagctaccgatgtggctaatgctatttttgacggcaccgatgcggtaatgctgtcgggagaaacggctgccgggaaatatccggtagaagcggttaaaacaatggcccggattgcggaaaaagcggaagaaaaattactcacgttacgaaaactaaataaacccaccacaaaatcttttaaaactgtaaccgatgccataagccacgccagtgttaccaccgctgaagaattggatgcgggggcaattatcacgcctacttcttcgggctatacggcgcgaatggtttcccggtaccgcccggcggttcctattattgctgccacaccggatatgaaggtacttagaaagttgacgctggtttggggggtatttccccttttggttaaaacctccgattctaccgatgaaatgttaagtaaagcaatagaagcctctttagaaagtgggcttttaaaacctggcgatttggtggtgcttaccgccggagttccggtgggcgtaaaagggacaaccaaccttttaaaagtccatgtagcgggaaatgttttggccaaaggtgtgggcattggaacaaggcctataaccggaacggctcgggtctgtcgaaccgccagggaagcaatcgagcggattcagccgggagatattttggtaaccgaagcaaccgacagagattttgtttcggctattgaaaaggccgcgggactggtagttgaagcgggaggacttacgtcgcatgcggctattgcggggttagagtttgggatacctgtaatagttggggtcgatggtgctacttcgataattaaagatggggaaaagttaactctagatccccagaggggtctggtataccacggttctgctaaagttttataa

SEQ ID NO: 298 - protein, 583 aa, Carboxydothermus hydrogenoformans Z-2901
MKRTKIVCTIGPASNDVGILKEMIISGMNVARINFAHGSHEEHRERIEKVRRASLEVGIPVAILIDTKGPEIRIGKVENGKIVLKEGDLVVFDPDIAEGQGLRVPVNYPGLARDVNVGGTILLDDGLIELKIEDIQGNKVIARVITGGELSNNKGVNLPGVKVNLPALTEKDRKDIDFGIEIGADFIAHSFVRKAADVLALRRYLEEKGADMEIIAKIENQEGVENIDEIIKVADGIMVARGDLGVEIPTEDVPLVQKEIIEKCNKNGKPVITATQMLDSMIRNKRPTRAEATDVANAIFDGTDAVMLSGETAAGKYPVEAVKTMARIAEKAEEKLLTLRKLNKPTTKSFKTVTDAISHASVTTAEELDAGAIITPTSSGYTARMVSRYRPAVPIIAATPDMKVLRKLTLVWGVFPLLVKTSDSTDEMLSKAIEASLESGLLKPGDLVVLTAGVPVGVKGTTNLLKVHVAGNVLAKGVGIGTRPITGTARVCRTAREAIERIQPGDILVTEATDRDFVSAIEKAAGLVVEAGGLTSHAAIAGLEFGIPVIVGVDGATSIIKDGEKLTLDPQRGLVYHGSAKVL

SEQ ID NO: 299 - DNA, 1443 bp, Geobacter metallireducens GS-15
  CDS (1)..(1443): transl_table=11
atggataaatcgtcgcgcaaaaccaagatcgtagccaccctcggaccggccagctcctcgccggagatgatcagcaagctcatggaggcaggggcagaccttttccgcctcaacttctcccacggggccaacgaccagcgccgggagaccattgccaccatccggcgtctttctgccgcccggggaaaggagatcggcatcctggccgacctccaggggccaaagatcaggaccggccgcatggagaacggcgccatctccctgcgcaagggagaccccctcgacatcgtcaccgatgaggtcctcggcaccccgaccctcatctccaccatctacaaggccctcccccatgacgtgaagcccggctcccgcattctcatggacgacggcctcatcgagctgaaggtccattcggtggagggaaacctggtccgctgcaccgtggtggaggggggaaccctcaaggacctgaaggggatcaacctccccggagtccatgtctcggccccctccctctcggagaaggatctgcgggacctggagttctgcctggccgagggggtggactacatcgccctctcctttgtccggagcgccgaggacgtggaggggctcaagcggatcctcttcgagcgcggcatccacatccccgtggtggccaagatcgagaagcccgaggccctgcgcaatttcaagagcatcctcaaagcggccgacggtgtcatggtggcccggggcgacctgggtgttgagatcagcgccgagaaggtccccctcttccagaaaaaaatcatccgagcctgcaacgaggcggggaagccggttatcaccgccacccagatgctggaatcgatgatcagccacccgcgccccacccgggccgagacctccgacgtggctaacgccatccttgacgggaccgacgcggtcatgctctcgggagagaccgcctcggggcagttccccctggaagcggtgcggaccatggccaaggtggccctggatgtggagcgctacgctcagatggaggacaccctcccccagcggcgccacaacccgagcatcgccgaggcggtggccgaggccgcctgccgcgccgccgtcaccgtggacgcccgggccatctcggtcatgacccagtcggggagcaccgccgccctcatctccaagttccggccgccgctccccatcatcgcctttacccagtccctggagacccggcggcgcctctccctctactggggggtgaagccgctccccattggccccatgaccggcaccgacgagcagatcgcggccgtggaatcgacgttcctctcggcggggtaccgcaagggagacgtgatcgtcataaccatgggggtgccggtggaggcccgaggttccacgaaccttatgaaggtccacaagctggggacggggaagtttttcgagattttctga

SEQ ID NO: 300 - protein, 480 aa, Geobacter metallireducens GS-15
MDKSSRKTKIVATLGPASSSPEMISKLMEAGADLFRLNFSHGANDQRRETIATIRRLSAARGKEIGILADLQGPKIRTGRMENGAISLRKGDPLDIVTDEVLGTPTLISTIYKALPHDVKPGSRILMDDGLIELKVHSVEGNLVRCTVVEGGTLKDLKGINLPGVHVSAPSLSEKDLRDLEFCLAEGVDYIALSFVRSAEDVEGLKRILFERGIHIPVVAKIEKPEALRNFKSILKAADGVMVARGDLGVEISAEKVPLFQKKIIRACNEAGKPVITATQMLESMISHPRPTRAETSDVANAILDGTDAVMLSGETASGQFPLEAVRTMAKVALDVERYAQMEDTLPQRRHNPSIAEAVAEAACRAAVTVDARAISVMTQSGSTAALISKFRPPLPIIAFTQSLETRRRLSLYWGVKPLPIGPMTGTDEQIAAVESTFLSAGYRKGDVIVITMGVPVEARGSTNLMKVHKLGTGKFFEIF

SEQ ID NO: 301 - DNA, 1794 bp, Prochlorococcus marinus str. MIT 9312
  CDS (1)..(1794): transl_table=11
atgtcgaatattgatttaaaaagaagaacaaaaatagtagcaactattggacctgcaactcagtctgaagagataattacaaatttaattaaagcaggagtaacaacattcagattaaatttctcacatggagatcataatgatcacgctgagagaattaaaactataagggaggtttcacaaaagctagatattgatattggtattctgcaagatcttcaaggacctaaaattaggttaggacgattcaaggatggtccagtaaaagtaaaaaaaggggataaatttacactaacctccaatgaagttgaatgttcaaatactattgcgaatgtaacttacgagaatctttctcaagaagttagtgaagggaaaagaatactattagatgatggtaaaattgaaatgattgttgaaaaagtagatactaaagctaatcttttagaatgtttggttactgtaggtggtgttttatcaaataataaaggtgtaaatttcccagatgttcaattatctgtaaaagcattaacagaaaaagataaagaggatttaaaatttggtttatctgagggagttgactggatagctctgagtttcgtaagaaatccttccgatattaatgaaattaaagatttaataaacaaaaatggtcattcaactccagtagttgcaaaaatagaaaaatttgaagcaatagatcaaattgatgctgtattacctttatgtgatggagttatggttgcaagaggggatttgggagtagaaatgcctgctgaagaagttccacttttacaaaaggatttaataagaaaagctaattcattaggtataccaataattaccgcgactcaaatgcttgattccatggcttctaatccaagaccgactagagccgaagtaagcgatgtcgccaatgcaatactggatggaacagatgcagtaatgctttcaaacgaaactgccgttggcgattatcctgtagaggcagtacaaacgatggcaacaatagcaagaagaattgagagggattatcctcttaaagctattgagagccacttacctagcacgataccaaatgctattagtggagctgtaagtaatatagctagacaactagatgcaggagcaataattcctttaacaaaatcaggttctactgctcgaaatgtaagtaaatttagaccgccaactcctattttggcaactacaactgaaaggagtgtagcgagaagacttcaacttgtttggggagtcaccccgatagtagtaaataatgatgaaagaacagcaaaaacatttagtttagctatgcaaattgctcaagaaatgggaatattaaaacaaggagatttagtcgttcaaactgcaggtacactaactggtataagtggctctacagatttaataaaagttggtttagtaaggaagatactttcaagagggatctcaataggtgaaattggagttacaggtaaagcaagaaaaataaatactaaacttgatttgtcattaatttgccctggcgaaattttatttgttaataaagaattattggaaaatgttccattgagcaaaaatattgcaggtattgttacgaaccaaaatgtagatgatgtttatgccttttttaacaaaaacaataagaagatttctacaatctgtaatgtagaaaacattgataataatcaaattattaatggtgatctagtaactttacagcttaacgaaggtgtaatttatatgggacaaattgaagatgatgaagaagctatagataaatataaatatgtctag

SEQ ID NO: 302 - protein, 597 aa, Prochlorococcus marinus str. MIT 9312
MSNIDLKRRTKIVATIGPATQSEEIITNLIKAGVTTFRLNFSHGDHNDHAERIKTIREVSQKLDIDIGILQDLQGPKIRLGRFKDGPVKVKKGDKFTLTSNEVECSNTIANVTYENLSQEVSEGKRILLDDGKIEMIVEKVDTKANLLECLVTVGGVLSNNKGVNFPDVQLSVKALTEKDKEDLKFGLSEGVDWIALSFVRNPSDINEIKDLINKNGHSTPVVAKIEKFEAIDQIDAVLPLCDGVMVARGDLGVEMPAEEVPLLQKDLIRKANSLGIPIITATQMLDSMASNPRPTRAEVSDVANAILDGTDAVMLSNETAVGDYPVEAVQTMATIARRIERDYPLKAIESHLPSTIPNAISGAVSNIARQLDAGAIIPLTKSGSTARNVSKFRPPTPILATTTERSVARRLQLVWGVTPIVVNNDERTAKTFSLAMQIAQEMGILKQGDLVVQTAGTLTGISGSTDLIKVGLVRKILSRGISIGEIGVTGKARKINTKLDLSLICPGEILFVNKELLENVPLSKNIAGIVTNQNVDDVYAFFNKNNKKISTICNVENIDNNQIINGDLVTLQLNEGVIYMGQIEDDEEAIDKYKYV

SEQ ID NO: 303 - DNA, 1749 bp, Moorella thermoacetica ATCC 39073
  CDS (1)..(1749): transl_table=11
atgcggcacacgaagattgtctgtaccatgggcccggccagcgagcgggtcgaggtaatcaaggctatgatccgggcggggatgaacgtagcccggttcaatttttcccatggcagccacgccgagcacggggcgcggatggctgccgtgcgccaggcggcagctgaactgggcgccagggtagcgttaatgctggataataaggggcccgaaattcgcctgggagagatccagggcgaggtcaccctgaaggacggcgaccaggtgaccctgaccacagaacctattattggtgacgccaggcgtttgccggtgagctttgccggtctgccgggggacgtccggccgggccagatcattctcctggacgacggcctggtggagctggaggtcctggcgaccaccgccaccgagattcactgccgcgtccgtcacggcgatgttatttccagccataagggcgtcaacgtccccggggccgagatcagcctgcctccttttaccgagcaggatattaaagaccttgagttcggcctccagcaggggatagattttatcgccctctcctttgtccggacggccggggatgtcctggcagtacgccgggagcttgagaagcgcaacgccagggtagccattatcgccaagatagaaaaccatgccggggtcaataacatccacgagatccttgaggtggccgacggggtcatggtggcccggggtgacctgggggtagagatccccgtggaagaggtccccctggtgcagaaaaagattatcgaggcgtgtaacctggccggcaagccggttatcacggccacccagatgctggagtctatgattcataacccgcggccgacccgggccgaagccagcgatgtggccaatgccatctttgacggaacggatgccattatgctctccggggaaacggctacgggccgttatccggtagaggctgtggcgaccatggcccgcatcgcccgccgggccgagaggggtttgccctatggtgacctgttgacgaaaaagggtctggctgccgagcggacggccaccgatgccatcagccacgcgagctgcaccattgcctatgaactcgacgccgccgccattatcacccccacggcttccggttccaccgcccgccgggtggccaaataccgtccccgggcgcctatcctggccaccagccccaacgagaaggttttgaaccagctctgcctggtctggggggttgaacccctcctggtggagccgacaagcggcaccgacgaaatggttaatgccgcggtggcggcggccatactctccggccgggtgaaacagggcgacctggtggttattactgccggcgtgcctgccggtgttccgggtaccaccaacctcctcaaggtccacatcgtcggcgaggtcctggtgcggggacgggggatcggcaaagaagtaaccagtggcccggtccggctggtaaagactgctgctgacgccgtggcaagggtcaaaaaaggcgacattctggtgaccactgagaccggccctgaattcctgccagctatggaaagggcggcagcagtaattacggaaaccggggggctgagttcccatgccgcggtaaccggcctgagcctgggtataccggtagtcgtcggggcaaagggggccactgaaaagctaaccgatgatctggtcgtaaccatagacgttgtccgcggcctggtctaccgcggtcagacgcgggtgttgtga

SEQ ID NO: 304 - protein, 582 aa, Moorella thermoacetica ATCC 39073
MRHTKIVCTMGPASERVEVIKAMIRAGMNVARFNFSHGSHAEHGARMAAVRQAAAELGARVALMLDNKGPEIRLGEIQGEVTLKDGDQVTLTTEPIIGDARRLPVSFAGLPGDVRPGQIILLDDGLVELEVLATTATEIHCRVRHGDVISSHKGVNVPGAEISLPPFTEQDIKDLEFGLQQGIDFIALSFVRTAGDVLAVRRELEKRNARVAIIAKIENHAGVNNIHEILEVADGVMVARGDLGVEIPVEEVPLVQKKIIEACNLAGKPVITATQMLESMIHNPRPTRAEASDVANAIFDGTDAIMLSGETATGRYPVEAVATMARIARRAERGLPYGDLLTKKGLAAERTATDAISHASCTIAYELDAAAIITPTASGSTARRVAKYRPRAPILATSPNEKVLNQLCLVWGVEPLLVEPTSGTDEMVNAAVAAAILSGRVKQGDLVVITAGVPAGVPGTTNLLKVHIVGEVLVRGRGIGKEVTSGPVRLVKTAADAVARVKKGDILVTTETGPEFLPAMERAAAVITETGGLSSHAAVTGLSLGIPVVVGAKGATEKLTDDLVVTIDVVRGLVYRGQTRVL

SEQ ID NO: 305 - DNA, 1428 bp, Syntrophus aciditrophicus SB
  CDS (1)..(1428): transl_table=11
atgaagatttcttcaccgaagacgaagatcgtctgcaccatcgggccggcgtctgagaatcccgacgtgatgaaacagatgatcgaagcgggaatgaacgtcgcccgactcaacttctcccatggcgacttcgcgtcccacgggaaagtcatcgggaatctgcgggctgtgtcggcattgctcggccggaggatcgcaatcctggccgatctttccggtccgaagatgcgtatcggaacgtttgcatccgaaccgatccaactcgatacgggtgacctgttcacgctgacgaccgaggacatcgtcggtgaccggaatcgagtgtccgtctcattcgatcgccttccgaagtctgtaagacccggggacatgctttttctcaatgacggatacattcagctcaaggtgaacgaggccaggggcaatgatgtcttatgcagcgtcatggtcggcggcgaacttcgttcccgcaagggactcaatctgccgggcatcgatctcgggatcagcgcttttaccgaacgtgatcgtgagtgcctgcagtttgccctcgagaacggggtggacgccgtgagccagtccttcgtcgaaggaccggaggatgtcgaggccgtgcgcagggccgccgcagacatgggatacactcccttcgttatcgcgaagatcgaacggtccggggcgcttgatcgcattgaggagatcatcgccgcagccgacggcatcatgatcgcccgcggcgacctgggtgttgaagttccgatcgaacagatcgccatggtccagaagcgggttatgctccttgcaaacatgtgcgcgaagcccgtcattacggcaacacagatgctcgagtcgatgacggaaaatcgacgccctacccgcgccgaggcaaccgatgtggccaacgcgattcttgacggcaccgactgcgtcatgctttcaggcgaatccgccatggggaggtatcctgtggaagctgtcgggatgctggcgaaaatagccctttcggcggaagcgcaccgctccatgatcgcggtcaaagagatgttcaagggaatcgatcttcgagggagggttcgtctggaacatctcattgcgatcggcgtagaggcgtgcttcgaatttgtgacaccggcggccgtgtttgtcccgacgcgaagcggcgccacggcgcggagcatggccagattccgctttcccgtatggactgtggccgtgagttccgaagaatcgacctgccaggaactccttttctcctcaggggtttatccggtgcgcgagcttcccatgcctgagaactggaatgattatgtcaaaaggcaagtcgctgatcttggtctggaaggaaaaatcgcaattctgacccggggtccgtcgcgggagcattccgagacgaatcacggcgtggaaattctcgacctgaccatttga

SEQ ID NO: 306 - protein, 475 aa, Syntrophus aciditrophicus SB
MKISSPKTKIVCTIGPASENPDVMKQMIEAGMNVARLNFSHGDFASHGKVIGNLRAVSALLGRRIAILADLSGPKMRIGTFASEPIQLDTGDLFTLTTEDIVGDRNRVSVSFDRLPKSVRPGDMLFLNDGYIQLKVNEARGNDVLCSVMVGGELRSRKGLNLPGIDLGISAFTERDRECLQFALENGVDAVSQSFVEGPEDVEAVRRAAADMGYTPFVIAKIERSGALDRIEEIIAAADGIMIARGDLGVEVPIEQIAMVQKRVMLLANMCAKPVITATQMLESMTENRRPTRAEATDVANAILDGTDCVMLSGESAMGRYPVEAVGMLAKIALSAEAHRSMIAVKEMFKGIDLRGRVRLEHLIAIGVEACFEFVTPAAVFVPTRSGATARSMARFRFPVWTVAVSSEESTCQELLFSSGVYPVRELPMPENWNDYVKRQVADLGLEGKIAILTRGPSREHSETNHGVEILDLTI

SEQ ID NO: 307 - DNA, 1437 bp, Francisella tularensis subsp. holarctica
  CDS (1)..(1437): transl_table=11
atgagaagaacaaaaattttagctactcttggtcctgctagtgaatcaagagaagctctaacagagatgattaaagcaggggttaatgcagttagatgtaatttttcgcatggctctgctgaagatcatcgcaaaagagttgatttaattcgtcaaatcgcaaaagagcaagatacacatgttggtattttagctgatttacagggaccaaaaatcagattatcaaaatttaaaaatggttccgtagaaattaagaaaggtcaaaaatttacactggatgctgatcttggtattaatgatggtgatgagaatactgtagggattgactataaagaactcattcaagatgtaaaaaaaggcgatatactacttgtagatgatggcaaaattgtcttagaggttgattctgtaaaaggaaataaggcagtcactaaagttgtcgttggcggtaaagtttctaataataaaggcatcaataagaaaggtggcggacttacagcacctgcacttactgagaaagacaaagaagatataaaaatagctgcgatgctacaagtggatttcttagcggtatcatttgtcagagatggtaaggatatggagtatgcacgtcaacttgtccacgaagccggttggagacctgctatggtggctaaaattgagcgtgcagaggctgtcttggaagataaccttaagagtattgttgatgcttctgaccttgtaatggtagcgcgtggtgatttggctgttgaaattggtgatgagaatgtgccaactatacagaagcttattatcaatacagctagacgaaatgaaaaaggttctattactgctacacaaatgatggagtcgatgatagagaactcttcaccaactcgtgctgaagcatctgatgttgctaatgctgtttttgatggcacagatgctgtaatgttatcagctgaaacagcggtaggtaaatatcctgttgaaacagtttctgcaatgtcaaggatatgtaaatctgctgaaaaaagtaagtatacacatatttctaaaaagcaaaaaatagctgattgtgataggattgatcatgctgtatctgttgcagcagtcaaaatagctaacgatattggagctaaaggattaattgtattgacagagggtggtaatacttcgcgttggatgtcacgaataaatactgatttacctatttacgcattatcaagaaacgcaacaactttaggtgcgatgacattatttagaggtgtggtaccaatatactttgattcaactagaatgtctaagttgtatgtaaatagatcagcttgtatggagctagagagcagaaatttagccaaagatggtgatatttttgtgcttactagtggcgatagtatgggtgtacatggaagcactaataagattaaagtgataattgcaggtcaggtaagataa

SEQ ID NO: 308 - protein, 478 aa, Francisella tularensis subsp. holarctica
MRRTKILATLGPASESREALTEMIKAGVNAVRCNFSHGSAEDHRKRVDLIRQIAKEQDTHVGILADLQGPKIRLSKFKNGSVEIKKGQKFTLDADLGINDGDENTVGIDYKELIQDVKKGDILLVDDGKIVLEVDSVKGNKAVTKVVVGGKVSNNKGINKKGGGLTAPALTEKDKEDIKIAAMLQVDFLAVSFVRDGKDMEYARQLVHEAGWRPAMVAKIERAEAVLEDNLKSIVDASDLVMVARGDLAVEIGDENVPTIQKLIINTARRNEKGSITATQMMESMIENSSPTRAEASDVANAVFDGTDAVMLSAETAVGKYPVETVSAMSRICKSAEKSKYTHISKKQKIADCDRIDHAVSVAAVKIANDIGAKGLIVLTEGGNTSRWMSRINTDLPIYALSRNATTLGAMTLFRGVVPIYFDSTRMSKLYVNRSACMELESRNLAKDGDIFVLTSGDSMGVHGSTNKIKVIIAGQVR

SEQ ID NO: 309 - DNA, 1734 bp, Desulfitobacterium hafniense Y51
  CDS (1)..(1734): transl_table=11
atgcgccgcaccaaaatagtatgtaccatcggaccgtccagtgaatccaatgagaagattcgccaattacttaaggccggcatgaatgtagcccgtttaaatttctctcatggaacccatggtgagcatggcaagcggatacgaaccttaagagaagaagcacagaaactcggtgttcatttaggggttcttctggataccaaaggcccggaaatcagaacgggaacggttccggaggagggagttcaattaaacagcggtgatacctttattcttgataccgatctatcgactctggggtccgcagagcgggtgggtataacctaccttcagctttggcaggaggttcatcagggtacgcatatccttcttgatgatggtctcatcgaccttgaagtcattgccagtgaggaaggaaagatcatcaccaaaatccaaaatggcggagttcttaaatcgaaaaaaggggtcaatgtgccaggtgttccgattcagctgccggcgattacggaaaaagatcgtgatgatatcatctttggcttaagggaaggaatcgactttattgctgcttcttttgcccgcaaggctgccgatattttggccgtaaggcgtttggttgaggaagaaggggccaatgtcaagattatcgctaagattgaaaaccgcgaaggtatcgagcatttagatgagatcctggaggttgccgacggtctgatggtagcccgcggggatctgggagtggaggtgcctgtagaagaggtccccattcatcaaaaggacatgattgaaaaatgccatcatctgggtaaacccgtcatcgtggctacacagatgctggattccatgatccgcaacccgcggccgacccgggcggaagccagtgatgtggctaatgccattttagacggtaccgatgccatcatgctttccggggagacggctgccggacagtatccggtagaagctgtggagatgatgaataagatagctctgcagatcgaaaaacattatgaaccgcggaagatttatgacccccatatcaatattgccgaagccatcagtcatgccagctataccgtagccagagatctggaggcggccgctattcttactcctactcattccgggttgacggcccgcatgatctccaagtaccgtcccacctccctgattattgctgccacaccttttgttcatgtagcccgccaactctctttgacctggggaatttatcctttgctgattcccgagagcttaggcacggatcagcttttatctgtttctgtgaatgaagcgatttcccatcacctgatcaagaccggtgatgtggttgtcattaccgcaggggttcccgttggtaaagtagggaccaccaatatcatcaaagttcaggtcatcggggatgtgatcgcgaaaggaacggggattggccgcaaagcttattccggaacggcacggatagccacttcggctgctttggagcttttccaaaaaggagatatcctggtagcgccttataccgataaagagctgatccccttaatcgccaaagccggggcaattctggtggaagaagggggactcacctcccatggggcgatagccgccttaaactatggcattccggctattgtcggtgccgccgatgtgctgatgaaggttaaggatgggcaagtgctgactgtggatgctttggcaggtgtggtctatgagggcaccgtcagtattatctag

SEQ ID NO: 310 - protein, 577 aa, Desulfitobacterium hafniense Y51
MRRTKIVCTIGPSSESNEKIRQLLKAGMNVARLNFSHGTHGEHGKRIRTLREEAQKLGVHLGVLLDTKGPEIRTGTVPEEGVQLNSGDTFILDTDLSTLGSAERVGITYLQLWQEVHQGTHILLDDGLIDLEVIASEEGKIITKIQNGGVLKSKKGVNVPGVPIQLPAITEKDRDDIIFGLREGIDFIAASFARKAADILAVRRLVEEEGANVKIIAKIENREGIEHLDEILEVADGLMVARGDLGVEVPVEEVPIHQKDMIEKCHHLGKPVIVATQMLDSMIRNPRPTRAEASDVANAILDGTDAIMLSGETAAGQYPVEAVEMMNKIALQIEKHYEPRKIYDPHINIAEAISHASYTVARDLEAAAILTPTHSGLTARMISKYRPTSLIIAATPFVHVARQLSLTWGIYPLLIPESLGTDQLLSVSVNEAISHHLIKTGDVVVITAGVPVGKVGTTNIIKVQVIGDVIAKGTGIGRKAYSGTARIATSAALELFQKGDILVAPYTDKELIPLIAKAGAILVEEGGLTSHGAIAALNYGIPAIVGAADVLMKVKDGQVLTVDALAGVVYEGTVSII

SEQ ID NO: 311 - DNA, 1443 bp, Saccharophagus degradans 2-40
  CDS (1)..(1443): transl_table=11
atgttcagacgtaccaaaattgttagcacacttgggccagcaaccgacgagcccggtattttagaaaaacttattcttgcaggtgttaacgtagtacgtctgaatttctcccacgggagtccggaagatcacaagcgtcgtgcagatgaagtacgcagcttggccgctaagcacggtaagtttgttgcagtattgggcgaccttcaaggccccaaaattcgtattgctcgttttgcagatggcccaatcagcttggctgttggtgacaagtttcttttggatgcgagcttagagcgtgatgcaggtaaccagcatcaagtgggcatcgactataaagaattgccaaacgacgtaaacccaggcgacagcttattgctggatgacggccgtgttgtgttgaaagtactttctgttgaaggcactaaagttcacacggaagtaacggttgctggcaagctttcaaataacaaaggtattaaccgtcaaggtggtggcttaacagcgccagcacttaccgataaagaccgtgcagacattaaaactgctgttgctatcgatgttgattacttggctgtgtcgttcccacgcagtgcagaagacatgaatcttgctcgtcagttagttgtagaggccggcggcaatatccacctagttgctaaaattgaacgcgctgagtcagtagaaaaccaagaagtattggatgacctcattcgcgcttcagacgcagtgatggttgcccgtggtgacttaggtgttgagattggcgatgccgctttgattggcatgcaaaagcttattatcgaacgtgctcgtgctttaaaccgttgcgtaattactgcgactcaaatgatggagtccatgattagcagcccattaccaactcgcgcagaagtattcgacgtggctaacgccgtgttggatggtaccgatgctgtgatgttgtctgctgaaactgcagctggccaattccctgtgcaaacagttgaggcgatggtacgtgtgattcttggtgcagaaaaacacccacgtgcggaaactcgtcctgttcgtgcagacggcgactacagtgctattgacgaatctattgcattggcagctatgtacacagcacaccaattgaaaggtgttaagtgtattgccagcatgactgaatctggttcaactccaatgttgatgtcgcgctttggtgctcgtttgccaattttcgcattctctcgcgatattcgtacattgcgtcgcgcggcattgttccgcggtgttcaaactattttgtttgataacaacgctatcccaccgggtgaaatgtatgatcgtgcattagaaatcatgcgcgagcaaaagattatcgaagatggcgaccttgtgattctttctaaaggtgacactagcgagcacggtggaaccaacaccatgaagattcttcaggttggttcaactaactaa

SEQ ID NO: 312 - protein, 480 aa, Saccharophagus degradans 2-40
MFRRTKIVSTLGPATDEPGILEKLILAGVNVVRLNFSHGSPEDHKRRADEVRSLAAKHGKFVAVLGDLQGPKIRIARFADGPISLAVGDKFLLDASLERDAGNQHQVGIDYKELPNDVNPGDSLLLDDGRVVLKVLSVEGTKVHTEVTVAGKLSNNKGINRQGGGLTAPALTDKDRADIKTAVAIDVDYLAVSFPRSAEDMNLARQLVVEAGGNIHLVAKIERAESVENQEVLDDLIRASDAVMVARGDLGVEIGDAALIGMQKLIIERARALNRCVITATQMMESMISSPLPTRAEVFDVANAVLDGTDAVMLSAETAAGQFPVQTVEAMVRVILGAEKHPRAETRPVRADGDYSAIDESIALAAMYTAHQLKGVKCIASMTESGSTPMLMSRFGARLPIFAFSRDIRTLRRAALFRGVQTILFDNNAIPPGEMYDRALEIMREQKIIEDGDLVILSKGDTSEHGGTNTMKILQVGSTN

SEQ ID NO: 313 - DNA, 1443 bp, Methylobacillus flagellatus KT
  CDS (1)..(1443): transl_table=11
atggcattacgtaaaacaaaaattgtggcgacgctggggccggcttccagtgaggaggcggtgattgagcggctggtggatgccgggatggatgtagtgcgactcaatttttcgcatgggtctgcgcaagaccatattgcccgcgccgagttggtgcgcgatatctcccgtcgcagcgggcggccagtgggggtattgtgcgacctgcaggggccgaagattcgtatcggcaagttcgaaaatgaccgcatcctactgaaggccggcgacaggttcatcctcgacgcggcgtgcaagttgggcaaccaggagcgggtggggttggattacaagacgctgccatccgaagtggagcctggtgcggtgttgctgctggatgacgggcgcattgtgctcaatgtcgaagcggtgaacggcggcgaggtgcattgcacggtggcggccggtggagtgctgtcgaacaataagggcatcaatcgtaaagggggagggctttctgcgccagcgttgacgctgaaggatcaggaagatatccggacggcagtggcattggaggcagactatatcgctgtttcgttcccgcgcagcggtgcggatatcgagctggcgcgccacttggtcagggaggcaggcggccatgcggcgattgtcgccaagatcgagcgcgcggaggcgatagatgcgctcgaagagattatcgatgctgctgatgtgatcatggtggcgcgcggcgacctcggcgtcgaggtgggcgatgcggcggtgcccggcttgcagaagcgcatgatccgcacggcgcgcatgcgcaacaagctggtgattacggcgacgcagatgctggagtccatgatcagcagcccgatcccgacccgggcagaggtatccgatgtcgcgaatgccgtgctggatggcaccgatgcggtgatgctttccggcgagacggctgtggggcattatccggtcgagtccatccaggccatgcaccgtgtctgtctggaggcggagaaggagtatgatagccatcatcttcaggcgccgatcaatgatgaattcgagttcatcgatgaggcgattgccatggcatcggtgtatgcggcagaacatttgaatgtgaaggcgattgctgccctgacaaagtcgggttcatctgtcacctggctgtcacgctcgaatacgaatgtgccgatttatgccttgacgacagaacgcgacacaagacgcaagctgacgttgtaccggggggtctatccttatcatgtggagtttgctagccaggaactgagcaagatactctacgatgcagaggaaacgctattgcggctgggcgctgtgcagcgcggcgatctcatgatgctgaccttcggcgagccgatcggcaaggcgggcggcaccaataccctgcagatcgtcagagtaggcgagcacaggcgcgagcggcactga

SEQ ID NO: 314 - protein, 480 aa, Methylobacillus flagellatus KT
MALRKTKIVATLGPASSEEAVIERLVDAGMDVVRLNFSHGSAQDHIARAELVRDISRRSGRPVGVLCDLQGPKIRIGKFENDRILLKAGDRFILDAACKLGNQERVGLDYKTLPSEVEPGAVLLLDDGRIVLNVEAVNGGEVHCTVAAGGVLSNNKGINRKGGGLSAPALTLKDQEDIRTAVALEADYIAVSFPRSGADIELARHLVREAGGHAAIVAKIERAEAIDALEEIIDAADVIMVARGDLGVEVGDAAVPGLQKRMIRTARMRNKLVITATQMLESMISSPIPTRAEVSDVANAVLDGTDAVMLSGETAVGHYPVESIQAMHRVCLEAEKEYDSHHLQAPINDEFEFIDEAIAMASVYAAEHLNVKAIAALTKSGSSVTWLSRSNTNVPIYALTTERDTRRKLTLYRGVYPYHVEFASQELSKILYDAEETLLRLGAVQRGDLMMLTFGEPIGKAGGTNTLQIVRVGEHRRERH

SEQ ID NO: 315 - DNA, 1440 bp, Ralstonia metallidurans CH34
  CDS (1)..(1440): transl_table=11
atgacacgttccaccaagatcgtcgccacgattggccccgcatccagcacgctggaagtgttgacccgcatgatcggagcaggggttgacgtggtgcgcctgaacttctcgcatggcaccgcgcaggaccatatcgatcgcgccgccctggtgcgtgaggcggcggcggcctgcgggcgcgaggtggccatcatggccgacctgcagggccccaagatccgcgtgggcaagttcgagaacggcaagatcacgctcaagccgggcgacgcgttcatcctcgattcggcctgccagatgggcaatcaggagcgcgtgggcctggattacaaggatctgccgcgcgatgtgggcccgggcgacctgctcctgctcaacgacggcctgatcgtgctggtggtggaccgcgtgctcggcaacgagatcttcaccacggtgcgtatcggtggcgagctgtccaacaacaagggcatcaatcgtcagggtggcggcctgtcggcgccggcgctgaccgccaaggacatggaggacatcaagaccgccatggcgctgggcgcggactacgtggccgtgagcttcccgaagaacgccactgacatggaaatggcccgccagctcaccaacgtggcaggccagccgcacaaccacaaggcgcgcatgatcgcgaagatcgagcgggccgaggcgattcgtccgggcgtgctcgaggaaatcctgctggcgtcggacggcatcatggtggcgcgcggcgatctggccgtcgaagttggcaacgccgccgtgcccgcgctgcagaagcgcatgatcaagctggcccgcgaggccaacaagctgacgatcaccgccacccagatgatggagagcatgatcgtcaacccggtgccgacgcgggccgaagtgtccgacgtggccaacgccgtgctcgatggcaccgacgccgtgatgacgtcggccgagaccgctgccggccgctatccggtggaaacggtcgaagccatggccgcgatctgtctggaagccgagaagtcggaggtggtgcagctcgacaccgacttcctgaaccagaccttcgcgcggatcgaccagtcgatcgcgatgggtgcgctgttcaccgcctatcatctaggtgtcaaggcgatcgcggcgctgaccgattccggcgccacggcgctgtggatgagccgtcaccgcattcatgtgccgatctacgcgatgacgccgaacctggcgtcgcaacgcaagatgcagctctatcgcaatgtggtgccgctgccgctgcagtcgagcgcggaccgcgacgtggcgcttgagcaggccgaggaactgctgctgtcccagggcgtggtgcagcgcggcgatttcatcgtgctgacgatcggcgagccgatgggccagcccggcggcacgaatacgctcaagatcgtgagggtgggcacccggtag

SEQ ID NO: 316 - protein, 479 aa, Ralstonia metallidurans CH34
MTRSTKIVATIGPASSTLEVLTRMIGAGVDVVRLNFSHGTAQDHIDRAALVREAAAACGREVAIMADLQGPKIRVGKFENGKITLKPGDAFILDSACQMGNQERVGLDYKDLPRDVGPGDLLLLNDGLIVLVVDRVLGNEIFTTVRIGGELSNNKGINRQGGGLSAPALTAKDMEDIKTAMALGADYVAVSFPKNATDMEMARQLTNVAGQPHNHKARMIAKIERAEAIRPGVLEEILLASDGIMVARGDLAVEVGNAAVPALQKRMIKLAREANKLTITATQMMESMIVNPVPTRAEVSDVANAVLDGTDAVMTSAETAAGRYPVETVEAMAAICLEAEKSEVVQLDTDFLNQTFARIDQSIAMGALFTAYHLGVKAIAALTDSGATALWMSRHRIHVPIYAMTPNLASQRKMQLYRNVVPLPLQSSADRDVALEQAEELLLSQGVVQRGDFIVLTIGEPMGQPGGTNTLKIVRVGTR

SEQ ID NO: 317 - DNA, 1530 bp, Acidobacteria bacterium Ellin345
  CDS (1)..(1530): transl_table=11
atgactttctcgtataacgccttcaccgagcccgccggcgaacacaccgccactcatcgccgtgccaagatcgtttgcaccatcggccccgcctgcaataccgaggccgcgatgcaggagctgatgcgcgccggcatggacgtcgctcgcttgaatttttcgcatggtacgcacgacgagcatctcgtggtcatccagcgcctgcgtaaagttgcggccgaggagcagcgctctatctgcatcctgcaagacctgcaaggtcccaagatccgcaccggattgctcaaagatcacaagcccgtgatgctcgaaaccggcaacacggtcacgatcacgccgcgcgacattgtcggcgatgcctcgctgctcgcaaccacctttcaaaccctcgccctggatgtgcagcctggctcgcgcatcctgctctccgacggcaagattgaactcagcgtcagtcgcatcgaaggcgccgatgtcgagtgccacatcgtgaacggcggcgaactcaaggagcaccagggcatcaacattcccggcgcgatcctcagcattcctgcgctcaccaataaagacctcgaagatctcgcgttcggtctgaaaaacggcgtggatgccgttgccatctcattcgtgcgcaccgccaacgatctcaagcaagtgcgcaacgcgatctccgagcaccagggcaatgtcttcgtcatcgctaagctcgaaaagccccaagctatcgagcacttggaagagatcttcaatgagaccgacggtgtcatggttgcgcgcggcgatctcggcgtcgaagtgccgcccgaaaaagtgccagtccttcagaagcacatcatcaagcgctcgcagagccgccgcattcccgtcatcaccgcgacacagatgctggagtctatgatcgacaatccgcgcccaacgcgcgccgaagccagcgacgtggccaacgccatcttcgacggcaccgatgccgtcatgctctcgggcgagaccgccagcggcaagtatccccgcgaagccgtggcgatgatggcacgcatcattacggaagccgagtcgcactgcctcgccgagggccgtcgccgccgtcacgaagaccacaagaacaccatctctgaggccgtgtgcgatgcggtttcgcacgccgccgaagacctcgacatgctcgcgatcgccatctataccgaatcgggcaacacggcgcgcatcctctccaagcatcgccccaagccgccgatctacgccttctcgcacctcgacaccgtgatcaaccgcctgaacctgttttggggagtgcatccggtacagtgcgagcctttgcgttcctcaaaagaaatgattctctacgccgaacagttacttctcggtgcccaccaggtggctgcgggagatatcattggagtcgttgcgggcacgcgttccacatcaggttctacgaacttcatgcgcctgcacgtgattggcagcgagtccgaggaagagcgaccgcccgcggagaacgcgccgccgatgaagaaagagattcgatga

SEQ ID NO: 318 - protein, 509 aa, Acidobacteria bacterium Ellin345
MTFSYNAFTEPAGEHTATHRRAKIVCTIGPACNTEAAMQELMRAGMDVARLNFSHGTHDEHLVVIQRLRKVAAEEQRSICILQDLQGPKIRTGLLKDHKPVMLETGNTVTITPRDIVGDASLLATTFQTLALDVQPGSRILLSDGKIELSVSRIEGADVECHIVNGGELKEHQGINIPGAILSIPALTNKDLEDLAFGLKNGVDAVAISFVRTANDLKQVRNAISEHQGNVFVIAKLEKPQAIEHLEEIFNETDGVMVARGDLGVEVPPEKVPVLQKHIIKRSQSRRIPVITATQMLESMIDNPRPTRAEASDVANAIFDGTDAVMLSGETASGKYPREAVAMMARIITEAESHCLAEGRRRRHEDHKNTISEAVCDAVSHAAEDLDMLAIAIYTESGNTARILSKHRPKPPIYAFSHLDTVINRLNLFWGVHPVQCEPLRSSKEMILYAEQLLLGAHQVAAGDIIGVVAGTRSTSGSTNFMRLHVIGSESEEERPPAENAPPMKKEIR

SEQ ID NO: 319 - DNA, 1434 bp, Myxococcus xanthus DK 1622
  CDS (1)..(1434): transl_table=11
atgcgaagagcgaagattgtctgcaccctcggtcccgccagccagagccaggagatgctcgaagcgctcctggagaacggcatggacgtggctcgcctgaacttctcccacggcagccacgagcagcacgcggagaacatcgcgaagctgcgcgccgcgtcgctgaaggttcgcaaggcggtgggcatcctcggcgacctgcaaggcccgaagattcgcactggccgtttcgtgaagggcagcaccgagctgaaggaaggcggcaccttccacatcaccacggatgaaacggtcccgggcacggacgaaatcgtgtccacgacgtacccgttcctggccgcggacgtgaatccgggggaccgcatcctcctggatgacggcctgctggagctgaaggtcctggagacggacaagcagaagctcatccgcacgcaggtcatccacggcggcacgctgaagaacaacaagggcatcaacctgcccggcgtggcggtgcgcgcggaggcgctgacgccgaaggaccgtgaggacctggtgttcgggatcaaggccggcgtggattacatcgcgctgtccttcgtgcgccagccgtccgacctggacaccgcgcgccaggccatggccgaggtgggccgcacggtgcccatcatcgccaagctggagaagccggaggccattgcccggctggacgccatcctggacaagacggacggcgtgatggtggcgcgcggcgacctgggcgtggagattccccccgaggaagtgccggccgtccagaaggacatcatccggcgctccaacctgcgcggcctgcccgtcatcgtggccacgcagatgctgaactccatgattgataacccgcgccccacgcgcgccgaggccagcgacgtggccaacgccgtgttcgacggcgcggacgcggtgatgctgtcgggcgagacggccagcggcaagttccccatcgagtccgtgcagatgatggagcgcatcatcctggcggccgagtcctccgcgcgcacgacgcagtcgctgatgcgcgtgctggagacgccggtggggctgcccaaccacttcccggacgtcatcgcgcgcgtggcctgcgaggcggccaaggcgagcaacgcctcgctcatcgcggccttcacgctgtcgggtgtgacggcgcgcctgctgtcgcactaccggcccccggtgccgattgtcgccttcagccccaaccaggaagtgcgccgccggctgtcgctgttgtggggcgtggtgccgcgcgtgctggagcccacccaggacaccgaggccatggtgaagcgcgtggaggaagagctcctggcgcgaggcctgggccgcaagggcgaccgcatcgtcatcgtgttcggcgcgcccgtggggcagccgggcaagatcaacagcctgcgcctgcacaccatccagggctga

SEQ ID NO: 320 - protein, 477 aa, Myxococcus xanthus DK 1622
MRRAKIVCTLGPASQSQEMLEALLENGMDVARLNFSHGSHEQHAENIAKLRAASLKVRKAVGILGDLQGPKIRTGRFVKGSTELKEGGTFHITTDETVPGTDEIVSTTYPFLAADVNPGDRILLDDGLLELKVLETDKQKLIRTQVIHGGTLKNNKGINLPGVAVRAEALTPKDREDLVFGIKAGVDYIALSFVRQPSDLDTARQAMAEVGRTVPIIAKLEKPEAIARLDAILDKTDGVMVARGDLGVEIPPEEVPAVQKDIIRRSNLRGLPVIVATQMLNSMIDNPRPTRAEASDVANAVFDGADAVMLSGETASGKFPIESVQMMERIILAAESSARTTQSLMRVLETPVGLPNHFPDVIARVACEAAKASNASLIAAFTLSGVTARLLSHYRPPVPIVAFSPNQEVRRRLSLLWGVVPRVLEPTQDTEAMVKRVEEELLARGLGRKGDRIVIVFGAPVGQPGKINSLRLHTIQG

SEQ ID NO: 321 - DNA, 1434 bp, Rubrobacter xylanophilus DSM 9941
  CDS (1)..(1434): transl_table=11
atgagggtgcggcggaccaagatagtggccaccctggggccggccacctcctccgaggagagcatcggggcgctggtccgggcgggggtggacgtgatgcggctgaacttcagccacggcacccacgacatgcacctggacaacgcccgcaccgtccgcgaggccgccgccgaggccgggcgcaacgtggcgatcatgcaggatctgcaggggccgaagatccggaccggcgaggtggagggcgggaccgagctcgtggagggcagccgggtcgtgatagcccccggcgacttcgtgggggacgccagccgactctccacctcctacgaccggctggcgcaggacgtgaagcccggccaccggctgctcatagacgacgggctcatcgggctgcgggtggagagcatcaaggagaacggagagatcgtctgcgaggttttggagggcgggcccgtctcctcccacaaggggctcaacttcccggactcctcgctctccataagcgggctgacggagaaggatctggaggatctgcgcttcggccttgaggagctgcgccccgactgggtagccatctccttcgtgcgcaccggcgaggaggtgctcgacgtcaaggagcgcatccgggagctcggcggggacgtgccggtgatctccaagatcgagaagcacgaggcgatagacaacatagaggaggtcatagaagcctccgacggggtgatggtggcccgcggggacctggcggtggagctctcggcggagcgggtgcccatagagcagaagcggatcgtcgcgcgctgccgccggcggggccggccggtgatcgtggccacccagatgctggactcgatgatgcgcaacccccgccccacccgggccgaggtctccgacgtggcgaacgccatcttcgaccggaccgacgcggtgatgctgagcggggagacggccgtcggccgctacccgacccagagcgtgatggagatggaccgcatctgccgggcggcggagggggccatagactacggccgggacatcgccgcctccaccgcctgggggcggggcgaccgctacgacgccgtcacccacgccgcctgcgagctcgccgaggtgctcgaggcgcaggcgatcctcacctccacccagaccggcctctcctgcataagggtcgcccgcttccggccgccgaacaggatcctggcggtgagccccatcgaggccacggtccgccgcctcgccctggtgtggggggtgacggcggtgcggggcgagcaggcgggctcgatagaggagcgcttcagggagtccgtggaggccgccgaggccagggggcacctgaagaagggcgaccggctggtcttcaccggggggacggcgggctccctgccgggctccaccaacctgctgcaggtgcacacggtgggggagaacgggtga

SEQ ID NO: 322 - protein, 477 aa, Rubrobacter xylanophilus DSM 9941
MRVRRTKIVATLGPATSSEESIGALVRAGVDVMRLNFSHGTHDMHLDNARTVREAAAEAGRNVAIMQDLQGPKIRTGEVEGGTELVEGSRVVIAPGDFVGDASRLSTSYDRLAQDVKPGHRLLIDDGLIGLRVESIKENGEIVCEVLEGGPVSSHKGLNFPDSSLSISGLTEKDLEDLRFGLEELRPDWVAISFVRTGEEVLDVKERIRELGGDVPVISKIEKHEAIDNIEEVIEASDGVMVARGDLAVELSAERVPIEQKRIVARCRRRGRPVIVATQMLDSMMRNPRPTRAEVSDVANAIFDRTDAVMLSGETAVGRYPTQSVMEMDRICRAAEGAIDYGRDIAASTAWGRGDRYDAVTHAACELAEVLEAQAILTSTQTGLSCIRVARFRPPNRILAVSPIEATVRRLALVWGVTAVRGEQAGSIEERFRESVEAAEARGHLKKGDRLVFTGGTAGSLPGSTNLLQVHTVGENG

SEQ ID NO: 323 - DNA, 1437 bp, Mesorhizobium sp. BNC1
  CDS (1)..(1437): transl_table=11
atgaagcggagccgcaaggtcaagatcctcgccacgctcgggcccgcatcttcggatgaggaaatcatcgtccgccttcatgaggccggtgctgacgcgttccgcatcaatatgagccacacggaccacccgacgatgcgtgagctggtggcacgcatccgcagcgttgaaacgcaggtgagccgtcccatcggcattctggccgatctgcagggcccgaagctgcgtgtcggcactttcgccgataagagcgccacattaagcatcggccaggaattcactttggacgataatccggcgccgggcgacgccacgcgcgtgcatctgccgcacccggaaattctgcaagccgtccaaccgggtcaccgcctcctgatcgatgacggccgcctgcaactcgcagcactcaagaccgacggccgatcgatagtcgcccgggtcatcgcgggaaacaagatctccgaccgcaagggcgtcagccttcccgacacggaattgccgctcggcgcccttacggaaaaggaccggcgcgacctggacgcggtgctgcaaacgggcgtcgattggatcgccctgtcttttatccagaggccgcaagacctggcggaggtccgcaaaatcgcgcgtggccgcgccgccctgatggcgaaaatcgaaaagcctcaggcggtgaaacgcctgccggagatcatcgagctttccgacgggttgatggtggcacgcggcgatcttggcgtggaaatgccgcttgaggcggtgccgggcatccagaagcagatcacgcgcgcctgccgccgcgccggcaagccggttgtggtggcgacgcagatgctggaatccatgatcacggcgcccgtgccgacccgcgccgaggtgtcagatgtggcgacggccgtgttcgagggcgcggatgcggtaatgctctccgccgaatcggctgccggccagtacccggtcgaggcggtggccatgatgaatgcgatcgcgatccaggtcgagcgcgatcccgtattcaacgatgtcatcaatgcgcagcgcacggagccggaagcgacgggcgccgacgccatctcgctcgcctcgcgagagatcgcggaaacgctgaaactcgcggccatcatcacatatacggcgtcgggcaccacagggcttcgcgccgcccgcgagcggccgaaggtgccgatcatcgcgctttcgccggtggtcgagacgacgcgccgcctcagtctggtctggggtacccattgcgttgtctcggaagatgcaaccgacctcgatgatatggtggatcgggcgtgccgcattgcctatgaggagcagttcgccaagccgggcgaccgcgtgatcatcaccgccggcgtgccgctcaggacgccgggcgtcaccaatatgctgcgcatcgcctatatcggctcggatgggctgagcggattgtaa

SEQ ID NO: 324 - protein, 478 aa, Mesorhizobium sp. BNC1
MKRSRKVKILATLGPASSDEEIIVRLHEAGADAFRINMSHTDHPTMRELVARIRSVETQVSRPIGILADLQGPKLRVGTFADKSATLSIGQEFTLDDNPAPGDATRVHLPHPEILQAVQPGHRLLIDDGRLQLAALKTDGRSIVARVIAGNKISDRKGVSLPDTELPLGALTEKDRRDLDAVLQTGVDWIALSFIQRPQDLAEVRKIARGRAALMAKIEKPQAVKRLPEIIELSDGLMVARGDLGVEMPLEAVPGIQKQITRACRRAGKPVVVATQMLESMITAPVPTRAEVSDVATAVFEGADAVMLSAESAAGQYPVEAVAMMNAIAIQVERDPVFNDVINAQRTEPEATGADAISLASREIAETLKLAAIITYTASGTTGLRAARERPKVPIIALSPVVETTRRLSLVWGTHCVVSEDATDLDDMVDRACRIAYEEQFAKPGDRVIITAGVPLRTPGVTNMLRIAYIGSDGLSGL

SEQ ID NO: 325 - DNA, 1413 bp, Cytophaga hutchinsonii ATCC 33406
  CDS (1)..(1413): transl_table=11
atggtaaacaagaaaacaaagattattgcaactgtaggtccggcatgtaacacgaaggagaagttatgggagttggttcaagctggcgcgaacattttcagattgaatttttctcacggcactcacgatgtacatcaaggcgtaattaacgcgatccgcgaacttagaaaagaacacaatgttaacatagcaatccttcaggatttgcaaggtcctaagatccgtactgacgaagttgagaacaacggtgttgaacttgttgcaggtgcgcagattgttattactaaagaaaaaatgttaggtactaaagataaaattagtacttcttataaaatgcttacatcggatgttaaaaaaggcgatgctattttaattgatgatggtaatattgaattaaaagttttagaaacaggtaatggtgaagttacgtgtgtggttatttatggcggtatcttaaaatcacgtaaaggtatcaacctgccaaacacaattgtttccgaaccttcattaacagacaaggataaagaagatttattattcggtttgaaaaatgaagttgactggattgcgctttcttttgttagaagcgcagttgatctgaatgaattaaaagcaattattgctgaacatggtaaatcatgtaaagtaattgccaaggttgaaaaacctgaagcagttaaagatattgatgcgattattgaagcatctgatgcaatcatggttgcacgtggtgacctgggggttgaacttcagatggaagatgttccgatgatccagaaaatgatcattaaaaaatgtaatcagttagctaaacctgttattgtggcaacacaaatgatggaaagtatgattacaaacgcgcgtcctacacgtgccgaagcaagtgacgtagcgaacgcaatcattgatggtacagatacaatcatgttgtctgctgaaacagcttcaggaaactatccggtgatcacggttaaagcaatgacacgtatttgccaggcggtagaaaaagaagctgatatctataataaatcaacattagatgatattacaaataccagcgacagtgttatcgcttctgcatgtgaattagcggataaagtaaatgctaaagcaattatcggattgtctcaatccggttattctgctttcagaattgcaagccacaggccaaaagcaagcatttatatcgctacacatgatgagcaattaatgaatcagatgaaccttgtttggggtgtacaggctttcaggtttgaaaaatttacaacaacagacgaatcaatcgaagcggttaagaaaagccttgttgaaaaaggacttttaaagaaaggtgatatctacgttactacggcttctatgccaatggcagatattcagcttgcaaacagcctgaagttaggaattgttgaataa

SEQ ID NO: 326 - protein, 470 aa, Cytophaga hutchinsonii ATCC 33406
MVNKKTKIIATVGPACNTKEKLWELVQAGANIFRLNFSHGTHDVHQGVINAIRELRKEHNVNIAILQDLQGPKIRTDEVENNGVELVAGAQIVITKEKMLGTKDKISTSYKMLTSDVKKGDAILIDDGNIELKVLETGNGEVTCVVIYGGILKSRKGINLPNTIVSEPSLTDKDKEDLLFGLKNEVDWIALSFVRSAVDLNELKAIIAEHGKSCKVIAKVEKPEAVKDIDAIIEASDAIMVARGDLGVELQMEDVPMIQKMIIKKCNQLAKPVIVATQMMESMITNARPTRAEASDVANAIIDGTDTIMLSAETASGNYPVITVKAMTRICQAVEKEADIYNKSTLDDITNTSDSVIASACELADKVNAKAIIGLSQSGYSAFRIASHRPKASIYIATHDEQLMNQMNLVWGVQAFRFEKFTTTDESIEAVKKSLVEKGLLKKGDIYVTTASMPMADIQLANSLKLGIVE

SEQ ID NO: 327 - DNA, 1404 bp, Clostridium perfringens ATCC 13124
  CDS (1)..(1404): transl_table=11
atgagaagaacaaaattagtatgcactatcggaccagctagtgaaaacgaagaaatcttaacaaaaataatcgaagcaggtatgaacgcttcaagacacaatttctcacatggtgaccatgaagaacataaaggaagaatggttaaagtaagagaaatatcaaaaaaattaggtaaagaagtagctatattattagatactaaaggacctgaaataagaactggaaaattcgagccaagcaaagttgaattaactgctggaactgaatttactatatatgctggagcagaagacgtaataggagacactactaagtgttcagttacatatgctggattagctaaagacgttaaagctggagatactatcttaatagacgacggtttagttggattagaagttgtatctgtagaaggaaacgctgttaaatgtgtagtaagaaacactggattagttggaactcacaaaggagttaacgttcctggagtatcaataaaattaccagctatgactgataaagatagagctgacttaatattcggttgtgaaatgggcgttaacatggttgctgcttcattcataagaaaagcagaagacgttaaagctataagagaagtattaattgctaacggtggagctgatatacaaatattctcaaaaatcgaaaaccaagaaggtgttgataacatagatgctatcatcgaagcttcagacggtatcatggtagctagaggagaccttggtgttgaaataccaatggaagacgttccttcagttcaaaaaatgatcatcgaaaaatgtaacaatgctggaaaaccagttataactgctactcaaatgttagactcaatgatgagaaacccaagaccaacaagagctgaggtttcagacgtaactaacgctatcttagatggtactgatgctatcatgttaagtggtgagtcagctaacggaagctggccagtagaagctgttgaaactatggttaaaatagctactaaatcagaagaaatgttaagctacgaattagcttcatcaaaagctaaaaaacatataccagctgtaccaggagttatctcaagagctgcttgtaatgctgcacacgagttaaaatcagctgctatagtttcattaactcaatcaggagctactgctaagagaatatctcaatgcagaccagatgcaccaatcgttactgtaactccaaatgaaagagttgctaagaaagttgctttatgcttcggagtttacccagttgttgctgaaaatgctacaatggaaaacgctgttgaaatagctaaaaatgctggattcgttaaagctaatgacactgctgtagttgttgcaggtgtaccagctaacgaaggaaacactaacatagtaaaagttgaagttgtaaaataa

SEQ ID NO: 328 - protein, 467 aa, Clostridium perfringens ATCC 13124
MRRTKLVCTIGPASENEEILTKIIEAGMNASRHNFSHGDHEEHKGRMVKVREISKKLGKEVAILLDTKGPEIRTGKFEPSKVELTAGTEFTIYAGAEDVIGDTTKCSVTYAGLAKDVKAGDTILIDDGLVGLEVVSVEGNAVKCVVRNTGLVGTHKGVNVPGVSIKLPAMTDKDRADLIFGCEMGVNMVAASFIRKAEDVKAIREVLIANGGADIQIFSKIENQEGVDNIDAIIEASDGIMVARGDLGVEIPMEDVPSVQKMIIEKCNNAGKPVITATQMLDSMMRNPRPTRAEVSDVTNAILDGTDAIMLSGESANGSWPVEAVETMVKIATKSEEMLSYELASSKAKKHIPAVPGVISRAACNAAHELKSAAIVSLTQSGATAKRISQCRPDAPIVTVTPNERVAKKVALCFGVYPVVAENATMENAVEIAKNAGFVKANDTAVVVAGVPANEGNTNIVKVEVVK

SEQ ID NO: 329 - DNA, 1512 bp, Rhodococcus sp. RHA1
  CDS (1)..(1512): transl_table=11
atgaccgagtcggtcacgcgcaccgcaccgcaccgcagtgaagtcgtcagcgagtcggcgagcaccacacgccacttcgacagccacactgctccactacgccacacgaagatcgtatgcacacttggacctgctaccgccaccggtgaccgtattcgcgaactcgtcgaaagcggtatggacgtggcgcggctgaatttcagccacggcgaacacgccgaccacgaggagaactacaaacgcgtccgggcggcctcggacgcgacggggaaggcggtcggtgtcctcgccgacctgcagggcccgaagatccggctcggccggttcgccgaggggcgcaccacgtgggccaacggtgaggaagtgcggatcaccgtcgacgaggtcgagggcacccacgaccgggtgtcgaccacctacaagcagctcgccgaggacgccaaggccggtgaccgcctgctggtcgacgacggcaaggtcggtctcgtcgtctccggggtggacggcaacgacgtgatctgccgggtcaccgagggcggcccggtcagcaacaacaagggtgtgtccctgccggggatgaacgtgtcggtcccggcgctgtcggagaaggacatcgccgacctcgagttcgcgctcggtctcggtgtcgacttcatcgccctgtcgttcgtgcggtcgccggccgacgtggaactggttcacgccgtgatggatcgggtcggtcgccggatcccggtgatcgcgaagctcgagaagccggaggcgatcgacaacctcgaggcgatcgtgctggcgttcgacgcggtgatggtcgcccgtggtgacctgggggtggagttgccgctcgaacaggtgccgctggtgcagaagcgggcgatccagatcgcccgggagaacgcgaagccggtcatcgtcgcgacgcagatgctggagtcgatgatcgagaactcgcggcccacccgcgccgaggcgtccgacgtcgcgaacgcggtcctcgacggtgcggacgcggtgatgctgtcgggtgagacgtcggtgggcaagtacgtgatggagacggtgcgcacgatggcgcggatcgtcgaggcggtggagaacgagtccactcaggtgccgccgctcacgcacgtgccgcggaccaagcgcggtgtcatctcctatgcggcccgcgacatcggggagcggctggatgcgaaggcgctggtcgcgttcacccagtccggggacacggtgcgccggttggcgcggctgcacacgccgttgccgttgctggcgttcaccccgctgccggaggtgcgcagccagttgtcgctgacgtggggtaccgagacgttcatcgtcgatccggtcgagagcaccgacgcgatggtgcggcaggtcgaccacgcgctgctcgggttgggccggtaccagaagggggaactggtggtcatcgtggccgggtcgccgcccggcaccgtcggctcgaccaacctgatccacgtccacagaatcggcgaagaggaccactga

SEQ ID NO: 330 - protein, 503 aa, Rhodococcus sp. RHA1
MTESVTRTAPHRSEVVSESASTTRHFDSHTAPLRHTKIVCTLGPATATGDRIRELVESGMDVARLNFSHGEHADHEENYKRVRAASDATGKAVGVLADLQGPKIRLGRFAEGRTTWANGEEVRITVDEVEGTHDRVSTTYKQLAEDAKAGDRLLVDDGKVGLVVSGVDGNDVICRVTEGGPVSNNKGVSLPGMNVSVPALSEKDIADLEFALGLGVDFIALSFVRSPADVELVHAVMDRVGRRIPVIAKLEKPEAIDNLEAIVLAFDAVMVARGDLGVELPLEQVPLVQKRAIQIARENAKPVIVATQMLESMIENSRPTRAEASDVANAVLDGADAVMLSGETSVGKYVMETVRTMARIVEAVENESTQVPPLTHVPRTKRGVISYAARDIGERLDAKALVAFTQSGDTVRRLARLHTPLPLLAFTPLPEVRSQLSLTWGTETFIVDPVESTDAMVRQVDHALLGLGRYQKGELVVIVAGSPPGTVGSTNLIHVHRIGEEDH

SEQ ID NO: 331 - DNA, 1440 bp, Haemophilus somnus 129PT
  CDS (1)..(1440): transl_table=11
atgtctagaagactaagaagaacaaaaatagtatgtacactgggaccatccacagatcgaggtaataatttagaaaaaattattgtagccggtgcaaatgttgttcgtatgaatttttctcatggtacaccagaagatcatcttgctcgtgctgaaaaagttcgtgaaattgctaaaaaattaggtaaaactgttgcaattttaggagatctacaaggtccaaaaattcgggtatctacttttaaagagggtaaaattttcttaaatattggtgataattttactttagatgctgatttacccaaaggtgaaggtaatcaagaagccgtaggactggattataaaacattaccgcaagatgttgttccgggcgatattttattattggatgacggacgtgttcaattaaaagtgttatcgacagacaatactaaagtatttacagaagtaattgttggcggtccattatcaaataataaaggtatcaataaattaggtggtgggctatctgctaacgcactgacagaaaaagacaaagaagacattattttagctgcacgtattggtgttgattatcttgctgtttctttccctcgttccagtgctgatttaaattatgctcgtgaattagctcaacaagcaggtttaaaagccaaaattgtggctaaagttgaaagagcggagactgttattgacgaggaggcaatggacgatattattttagcttctgatgtaattatggttgctcgtggtgatttgggtgttgaaattggtgatccggaattagtcggaatacagaaaaaattaattcgtcgttcacgtcagctaaatcgtgtagtgattaccgcaacacaaatgatggaatctatgattagcaatcctatgccaactcgtgccgaggtgatggatgttgccaatgctgtattagatggcactgatgccgtcatgctttctgcggaaacagcagcaggtcaatacccttcagaaactgtttcagcaatggctaaagtttgtttaggtgctgaaaaaatgcctagtgtaaatatttctcggcatcgcttagataaagaatttgatacgattgaagaaactattgcgatgtctacgatgtttgcagccaaccatatgaaaggtgttgcagccattatcgcaatgacaagtagtggtcatactgcaaaattgatgtctcgcattagttccggactaccaatttttgccctttctcgaaatgaaagtacattaaatttatgtgcattgtatcgtggtgttattccaattcattttgatcaggatagtcgtacgcttgaaggattaaaagctgccatacaatcgctaaaagataaaggttatttagtttccggtgatttggttttattaactcaaggagaccacttaacatcaaatggtacgagtacttgccgtgctttagtggttgaatga

SEQ ID NO: 332 - protein, 479 aa, Haemophilus somnus 129PT
MSRRLRRTKIVCTLGPSTDRGNNLEKIIVAGANVVRMNFSHGTPEDHLARAEKVREIAKKLGKTVAILGDLQGPKIRVSTFKEGKIFLNIGDNFTLDADLPKGEGNQEAVGLDYKTLPQDVVPGDILLLDDGRVQLKVLSTDNTKVFTEVIVGGPLSNNKGINKLGGGLSANALTEKDKEDIILAARIGVDYLAVSFPRSSADLNYARELAQQAGLKAKIVAKVERAETVIDEEAMDDIILASDVIMVARGDLGVEIGDPELVGIQKKLIRRSRQLNRVVITATQMMESMISNPMPTRAEVMDVANAVLDGTDAVMLSAETAAGQYPSETVSAMAKVCLGAEKMPSVNISRHRLDKEFDTIEETIAMSTMFAANHMKGVAAIIAMTSSGHTAKLMSRISSGLPIFALSRNESTLNLCALYRGVIPIHFDQDSRTLEGLKAAIQSLKDKGYLVSGDLVLLTQGDHLTSNGTSTCRALVVE

SEQ ID NO: 333 - DNA, 1764 bp, Trichodesmium erythraeum IMS101
  CDS (1)..(1764): transl_table=11
atggaactacaaaattatctgcgtcgcactaaaatagtagccactattggcccagccacaattaagcctgatgtacttcgggagctaattaaagctggtgctacaaccctgcgactcaacttttctcatggaactcatgaagatcatcagaatagtattcgccttatccggcaaacctcttttgagctgaatcaaacggtggctattctacaggatcttcaaggaccaaaaattagattaggaaaatttgaaacaggctcaatatctttagaggatggagacccttttattttgacgagtcacttgaaattaggaactcaaaaaatttcttctgtaacttatgaacctttggcagatgaagtgccggaaggggcaaaaattctccttgatgatggcaaagtagaaatgttagtggagaaagtagataaaacagagaaagaactacattgtcgtgttgtagtcggtggtactctttctaataataaaggtgttaactttccgggagtttatctgtcaattaaagcactgacagacaaagacagaaaagatttaatgtttggtcttgaccaaggagtagactgggtagcgcttagttttgttcgtaacccccaggatgttatagagattaaacaattaattgctaatgcggggaaaaaggttcctgtaattgctaaaatagaaaagcacgaagctatcgaacaaatggaagaaattttggctttgtgtaatggggtgatggttgcccgtggtgacttgggggtggagttacctgcagaggaggtacctctgttacaaaaacgactaatttctacttctaacaggatgggaatacctgtaattactgctacccaaatgttagatagtatggtgaataacccccgcgctactcgtgccgaaatttctgatgtggcaaatgcaattattgatggtactgatgctgtcatgttatcaaatgagacagcagtgggtaagtatcctgtggaagctgtaacaacaatggcaactatcgccaaacgcattgagcaagaagttattacttgcaacgtttcgagtatgaatgatacaggtcattctattcccaatgctattagtcatgcagttagtcagattgcacaagagttagatgcagcagctattatgagtctgacaaaaaccggtgcaacagcacgcaatgtatctaagtttcgaccaaaaactcctattttagcagtgactccccatgtggatgtggcgcgacagttacaacttgtatggggagtgaaaccactattagtattggatttaccttctgcaggtcagactttccaatcagccattaatgtagctcaggaaaacgagttattggttgatggagatttagtagttatgactgcgggtactttacaaggcatagcaggttcaacagatttaattaaagttgaggttgtaactgcagttttgggtcaaggtactggagttggtcaaggttctgtgagcggtcgtgctcgggttgctcgtaattcgacggaggttcgggattttaaccatggagaaattttggtggttaatcagacaaatgctgagtttgtggaggcaatgcaaaaagcttctggagtggtgacggaagaggatagtgttaccagtcatgctgcagttattggtttacgtttggggttgccagtgatcgtgggagtgaagaatgcgactaatgtagttcgggatggaacaattttgacgttggatgctcaaagaggtatggtttactctggaactaatcgaaggtaa

SEQ ID NO: 334 - protein, 587 aa, Trichodesmium erythraeum IMS101
MELQNYLRRTKIVATIGPATIKPDVLRELIKAGATTLRLNFSHGTHEDHQNSIRLIRQTSFELNQTVAILQDLQGPKIRLGKFETGSISLEDGDPFILTSHLKLGTQKISSVTYEPLADEVPEGAKILLDDGKVEMLVEKVDKTEKELHCRVVVGGTLSNNKGVNFPGVYLSIKALTDKDRKDLMFGLDQGVDWVALSFVRNPQDVIEIKQLIANAGKKVPVIAKIEKHEAIEQMEEILALCNGVMVARGDLGVELPAEEVPLLQKRLISTSNRMGIPVITATQMLDSMVNNPRATRAEISDVANAIIDGTDAVMLSNETAVGKYPVEAVTTMATIAKRIEQEVITCNVSSMNDTGHSIPNAISHAVSQIAQELDAAAIMSLTKTGATARNVSKFRPKTPILAVTPHVDVARQLQLVWGVKPLLVLDLPSAGQTFQSAINVAQENELLVDGDLVVMTAGTLQGIAGSTDLIKVEVVTAVLGQGTGVGQGSVSGRARVARNSTEVRDFNHGEILVVNQTNAEFVEAMQKASGVVTEEDSVTSHAAVIGLRLGLPVIVGVKNATNVVRDGTILTLDAQRGMVYSGTNRR

SEQ ID NO: 335 - DNA, 1455 bp, Alkalilimnicola ehrlichei MLHE-1
  CDS (1)..(1455): transl_table=11
atgcccctgccccgccgcaccaagatcatcgccaccctcgggccagcctccgacggcccgcagatggccacccggctggtgaaggccgggatcgacctggtccgcatcaacttctcccacggcacggtggacgatcaccgccggcgggtggaggctgtccgtcaggcggcccgggaggccggccgtgaggtcggggtgctggccgacctgcaaggtccgaagatccgcatcgagggcttccgtaacggcgcggtggacctcgaggaggacgcaccattcaccctcgacaccgctttggataaggatgccggtgacacggagcgcgtcggggtggcctatccccagctggtccgggatgtggagccgggcgacgtcctgcttctggacgacggccgggtactgctcaaggtggagtcggtcagcgacacggccatccactgccgggtcgccaccggcggccggttgtccaaccgcaaggggctgaaccgcctcggcggcggcctctccgcggaggcgctgaccgacaaggacgaggcggatatccgtaccgcggtggaactgggggccgactatctggcggtctcgttcgtgcgcgaggcggcggatgtggagcgggcccgtgaactgctgcaggccgccggtggcaacgccgggatcatcgccaagatcgagcgcgccgaggcgctggattgccagaccgagatcatccaggctgccgacgccatcatggtggcccgcggcgacctgggcgtggagatcggcgatgccgcgctgccgcaggtccagaaacaactgatccaccaggcccgcgacctgaaccgggtggtgatcacggcgacccagatgatggagtccatgatcgagagcccgctgcccacgcgcgccgaggtcttcgacgtggccaacgccgtccttgacggcaccgatgcggtgatgctctcggcggagaccgcggccggtgaatatcccgacgcggcggtggcggccatggaccgggtctgccgggaggcggagaagagccgggccgccaccgagtccggccaccggttggagtgccgcttcggcagctccgaggaggcggtggccatggcggccatgtacaccgccaaccacctgccggtgaaggcgatcatcgccctcaccgaatcgggcaccaccgcactctggatgtcccgtatccgctccggcatcccgatctatgccttgacccggcacccggagacccagggccgggtcaccctctaccgcggggtctaccccatcgccttcgacccgacccagggcgatgccgacagcgtgcgccagcgcctggtccagacgctgcgggagaagcggctggtgacggaggaggaccacctggtgctgaccttcggcagtcggatgggggtggccggtggcaccaacaccatgaaggtggtgaaggtgggtgacctgttgaacggcacggggcattag

SEQ ID NO: 336 - protein, 484 aa, Alkalilimnicola ehrlichei MLHE-1
MPLPRRTKIIATLGPASDGPQMATRLVKAGIDLVRINFSHGTVDDHRRRVEAVRQAAREAGREVGVLADLQGPKIRIEGFRNGAVDLEEDAPFTLDTALDKDAGDTERVGVAYPQLVRDVEPGDVLLLDDGRVLLKVESVSDTAIHCRVATGGRLSNRKGLNRLGGGLSAEALTDKDEADIRTAVELGADYLAVSFVREAADVERARELLQAAGGNAGIIAKIERAEALDCQTEIIQAADAIMVARGDLGVEIGDAALPQVQKQLIHQARDLNRVVITATQMMESMIESPLPTRAEVFDVANAVLDGTDAVMLSAETAAGEYPDAAVAAMDRVCREAEKSRAATESGHRLECRFGSSEEAVAMAAMYTANHLPVKAIIALTESGTTALWMSRIRSGIPIYALTRHPETQGRVTLYRGVYPIAFDPTQGDADSVRQRLVQTLREKRLVTEEDHLVLTFGSRMGVAGGTNTMKVVKVGDLLNGTGH

SEQ ID NO: 337 - DNA, 1764 bp, Pediococcus pentosaceus ATCC 25745
  CDS (1)..(1764): transl_table=11
atgaagaaaaccaaaatcgtttcaacacttggtcctgcaagtacttctgttgacacaattgttaaattaattgaagccggtgctaatgtattccgctttaacttttcacatggtgaccatgaagaacatctaggtcgttataacatggttaaagaagcagaaaagattactggcaagtcagtaggtattttgcttgatacaaagggtgctgaaatccgtacaactccacaaaaagatggtaaccaagaatatcacacaaatgataaggttcgcatctcaatggatgacactttggaaacaacaaaagaaaagattgctgttacatatgatggactttttgatgacgttcatgttggtggacacgttctttttgatgatggacttcttgattttaagattgacgaaaaagatgaagaaaaccgcgaattagttgctcatgcaactaacaatggtgttcttggatcacgtaagggtacaaatgctcctggtgtttcaattaacttacctggtattactgaaaaagatgctgatgatattcgttttggtcttgaatcaatgaacatcaacttcatcgctgcaagtttcgtacgtaagccacaagacgttcttgaaattcgtgaattgttggaagaaaagaacatggaagatgttcaaattttccctaagatcgaatcacaagaaggtattgacaacacagacgaaatcttgaaagtttcagatggtattatgattgctcgtggtgacatgggtgttgaaattccagctgaaaatgttcctttggtacaaaagacattgatcaagaagtgtaatgcagttggtttgcctgttatcacagcaactcaaatgcttgactcaatgatcgaaaacccacgtccaacacgtgctgaagcttctgacgttgctaatgctgtttgggatggtacagatgctactatgctttctggtgaaagtgctaatggtgactaccctgttgaagctgttgctacaatggctaagattgacgaaaaagctgaaaatgctatggctgaagacggaaatcttcaaatcaacacatttgatcaaagtgatgttacagaaacaattagtgctgctgttgctcgtgctgctaagaaccttggtgttaagactatcgttgctgcaacacaatcaggttacacagctcgtatgatttctaagtatcgtccagatgctgacattcttgcaatcacatttgacgaacgtgttcgtcgcggtttgatggttaactggggtgtacacccaatcatcgctgaccgtccatcaacaactgatgaaatgtttgaactagctgctaacaaagctgtagatcttggtcttgctaaagaaggagacttgattcttgttgttgctggtgttccagttggcgaaagtggaacaacaaacatcatgaagttacaactaattggttcaaagcttgcttctggtcaaggtgttggtgatgaaacagttattggtaaagcagttgttgctacatcagctgatgaagctaacaaaaaagctgttgaaggcggagtacttgttacaaagacaactgacaaagactatctaccagcaattgaaaaatcaagtgctttagtagttgaaaatggtggtttgacatcacacgctgcagtagttggtatttcaatgggaattcctgttattgttggtgtacaaaacgcaacttcaatcctttcagatgatgaattgattacagttgactcacgtcgtggtattatctaccatggtgcatcaaactcactataa

SEQ ID NO: 338 - protein, 587 aa, Pediococcus pentosaceus ATCC 25745
MKKTKIVSTLGPASTSVDTIVKLIEAGANVFRFNFSHGDHEEHLGRYNMVKEAEKITGKSVGILLDTKGAEIRTTPQKDGNQEYHTNDKVRISMDDTLETTKEKIAVTYDGLFDDVHVGGHVLFDDGLLDFKIDEKDEENRELVAHATNNGVLGSRKGTNAPGVSINLPGITEKDADDIRFGLESMNINFIAASFVRKPQDVLEIRELLEEKNMEDVQIFPKIESQEGIDNTDEILKVSDGIMIARGDMGVEIPAENVPLVQKTLIKKCNAVGLPVITATQMLDSMIENPRPTRAEASDVANAVWDGTDATMLSGESANGDYPVEAVATMAKIDEKAENAMAEDGNLQINTFDQSDVTETISAAVARAAKNLGVKTIVAATQSGYTARMISKYRPDADILAITFDERVRRGLMVNWGVHPIIADRPSTTDEMFELAANKAVDLGLAKEGDLILVVAGVPVGESGTTNIMKLQLIGSKLASGQGVGDETVIGKAVVATSADEANKKAVEGGVLVTKTTDKDYLPAIEKSSALVVENGGLTSHAAVVGISMGIPVIVGVQNATSILSDDELITVDSRRGIIYHGASNSL

SEQ ID NO: 339 - DNA, 1434 bp, Oenococcus oeni PSU-1
  CDS (1)..(1434): transl_table=11
atgaaaaagacaaagattgtttctactttaggtcccgcatccaacgatctaaagattatttccgcattgataaataatgggattaatgttgcccgttttaatttcagtcacggtgaccatgatgagcatgctgctcgtatggccctagtccatgatgctgaaaaaaagaccggcaagttgatcggatttatgcttgatacgaaaggtgcagagattcgtacaactgttcaagatacaccgaacggtaagattgaattcaagaaaggtgacaggcttcgcatttcgatgaatgaaaagattaagggcacaaaagagaaaattgctgtgacctataagggactttatgacgacgtaaaagtcggtggtaaagttttgttcgatgatggcattatcgaaatgaccgttatcagtaaagattccgaaaaaaaagaactgcttgtccaagttgataacgatggagtgctgggcggaagaaaaggcgttaacgctcctggtgttgcaattaaccttcctggaattactaagaaggataaatcagatatcgagttcggtttggaacagggaattgacttcatcgctgcttcctttgttcgtaaggctcaggatgttcttgacatccgtaagttgttgaaaaagcatcatcaagaaaatcatgtcatgatttttcctaagattgaatctcaagaaggaattgataacttcgaatcaatcattgccgtttccgatggtttgatggtaccgcgtggtgatatgggagtcgagattccttatgaagaagtacctgtgattcaaaaaatgatgattcgttacatgaaccgtcttggaaagccggtcattactgctacccaaatgcttgattcgatgattgaaaatcctcgtgcaactcgtgccgaaattaacgatgtcgaaaatgctgtttgggatggcactgatgcgacgatgctttctggtgaatctgccaatggtagttggcctgttgaagctgttaagacgatgtctacatctgatgaatacgctgaaaatcatgttcacgacgacggcaataggatcgatttgagaaacgaaccaaagtcaagtgacacagaagttttggctcaggccgccgttgacgcagcacgcgaggctggtgctaaagcaattgttgcttctacagcatctggctacactgctcgcttaatttccaaatatcgacctgatatgccaattttggcaatcacttacgatgaaaaagttgctaggtctttgactgttaattatgctgtttatccggtcgttaaagatgctccggaaacaacagatgatctgattgaattggccaagaaaactgttcatgatgaaaaattggctaagagagacgacacaatcgttgttactgctggccttccaatcaaaaagcccggcacaaccaatttaattcatgttgtaaagctttaa

SEQ ID NO: 340 - protein, 477 aa, Oenococcus oeni PSU-1
MKKTKIVSTLGPASNDLKIISALINNGINVARFNFSHGDHDEHAARMALVHDAEKKTGKLIGFMLDTKGAEIRTTVQDTPNGKIEFKKGDRLRISMNEKIKGTKEKIAVTYKGLYDDVKVGGKVLFDDGIIEMTVISKDSEKKELLVQVDNDGVLGGRKGVNAPGVAINLPGITKKDKSDIEFGLEQGIDFIAASFVRKAQDVLDIRKLLKKHHQENHVMIFPKIESQEGIDNFESIIAVSDGLMVPRGDMGVEIPYEEVPVIQKMMIRYMNRLGKPVITATQMLDSMIENPRATRAEINDVENAVWDGTDATMLSGESANGSWPVEAVKTMSTSDEYAENHVHDDGNRIDLRNEPKSSDTEVLAQAAVDAAREAGAKAIVASTASGYTARLISKYRPDMPILAITYDEKVARSLTVNYAVYPVVKDAPETTDDLIELAKKTVHDEKLAKRDDTIVVTAGLPIKKPGTTNLIHVVKL

SEQ ID NO: 341 - DNA, 1422 bp, Leuconostoc mesenteroides subsp. mesenteroides ATCC 8293
  CDS (1)..(1422): transl_table=11
atgaaaaagacgaaaatcgtctcaacacttggtccgtcatcatctgatgtcgaaacaatcgtaaagttaatccaagcgggcgccaacgtattccgttttaacttttcacacggtgatcacgaagaacatttgggtcgtatgaatgctgttcacgaagccgaaaagattactggtaagacagttggtattttgttggacactaagggtgctgaaatccgtacaacaaagcaagctgacggcaagatcgaattccatacaggtgacacattgcgtattgcaatggatgaaaaccttgaaggaacgaaagaaaaaatcgccgttacatacgctggtttgttcgatgatgttaaagaaggtggacaagtcttgtttgatgatgggttgcttggtacaactgttatcgaaaaagattcagccactcgcgaattagttgttcgcgttgataatgatggtattttgggatcacgtaagggtgttaacgcacctggtgtttcaattaacttgccaggtattactgaaaaagatgctgatgacatccgttttggtttggatcacgaaatcaactatattgctgcttcattcgttcgtaagcctgaagatgtgcttgaaattcgtggactattgaaggaaaagaacatggaacatgttcaaattattcctaagattgaatcacaagaaggtattgacaaccttgatgcaattttggaagtttcagatgccttgatggtaccacgtggtgacatgggtgttgaaattcctgctgaaaacgtgcctttggttcaaaaagacatgattcgcaagatgaacaaggcaggtttacctgttattactgctacacaaatgcttgactcaatggaagaaaacccacgtcctacgcgtgccgaagcttccgatgttgccaacgctgtgtttgatggtactgatgcaacaatgttatcaggtgaatcagctaacggagactatccagttgaatctgttgccacaatggctgctatcgacgaaaaagctgaaacttcattgcgcgaaaacggtcgtcatgaggatattttcttcgatgagactgattcaacggaagctgttgcagcatctgttgctcgtatcgcacgcaatgtgaacgctaaggctgttgttgtatcaactaactctggttacactgcacgtatggtttcaaagcaccgtcctgatgttaacattttggccgttacttattcagaacgcgtacaacgtggtttgacattgaactatggtgttgttccagtagtttatgatgcaccaaagactattgacgaaatggttgacttagctaagaaggccgtaaaagaccaaggattggctaattcaggtgatactattgttattgcagcaggtgtaccaatgtcacaatcaggtacaacaaacatgttgactgttcaaacagtataa

SEQ ID NO: 342 - protein, 473 aa, Leuconostoc mesenteroides subsp. mesenteroides ATCC 8293
MKKTKIVSTLGPSSSDVETIVKLIQAGANVFRFNFSHGDHEEHLGRMNAVHEAEKITGKTVGILLDTKGAEIRTTKQADGKIEFHTGDTLRIAMDENLEGTKEKIAVTYAGLFDDVKEGGQVLFDDGLLGTTVIEKDSATRELVVRVDNDGILGSRKGVNAPGVSINLPGITEKDADDIRFGLDHEINYIAASFVRKPEDVLEIRGLLKEKNMEHVQIIPKIESQEGIDNLDAILEVSDALMVPRGDMGVEIPAENVPLVQKDMIRKMNKAGLPVITATQMLDSMEENPRPTRAEASDVANAVFDGTDATMLSGESANGDYPVESVATMAAIDEKAETSLRENGRHEDIFFDETDSTEAVAASVARIARNVNAKAVVVSTNSGYTARMVSKHRPDVNILAVTYSERVQRGLTLNYGVVPVVYDAPKTIDEMVDLAKKAVKDQGLANSGDTIVIAAGVPMSQSGTTNMLTVQTV

SEQ ID NO: 343 - DNA, 1413 bp, Solibacter usitatus Ellin6076
  CDS (1)..(1413): transl_table=11
atgccaaatacaaaaattgtagccacacttgggccggccacagatgcgcccggtgtcttgcgtcaactgctcgccgcaggcgtcgatgtttttcgactgaatgcatcgcacggagcacaggatgcgcatgccgcgcggatcgacgcggtgcgagctgcggcgcgcgaggcgcacgttcacgccgggattctgctggatttgcaggggccgaagatccggctcgggcgctttgaaaatggcggagtgacgctggtgaccgacgccatatttacgatcacgacagagcaggtgatgggcacctccgagcgcgcatcgacgggctattcgcggttcgcgaaggacgtgaaggcgggcgatcgcattctgctcgccgatggcatcatcgaactgatcgcgctcgaatcggacggtgtcagtgtgcaaacccgtatcgtgaacggcggtccgatcggcgaccacaaggggatcaatcttccgggggtgcaggtgagcattccctctctgaccgagaaggacctggccgatctgcattttggattgaacgccggagtcgatatcgtggcgctttcgtttgtgcgcacggcggacgatgtgcggcagttgcgcgaccggctcggggggcggccggtctcgattgtcgccaagatcgaaaagccggagggctacgagaatatcgagccgattctggatgtgacggatggcgtgatggtggcgcgcggggacctgggcgtagagatttcgctggagcgtgtgccgcgaattcagaaatcgatcatccggcgcgcgcggcgcaagggtcggttcgtgattacggcgacgcagatgctggaatccatgatcgagaatccacggcccacacgggccgaggtgagcgatgtcgccaatgcgatttacgatggcacggacgcggtgatgctgtcggcggagacgtcggtcggcaagtatccggtggaagccgtgcgctacatggcgaagatcgcggcggagagcgaggattcgattcgcaagaagggatatatcgacccgcctcaccaaccgcagccatcgaacgcggagatcctggcggatgcggcgcatcacgccgcgcgcgattcgggggcggcggcgatcgtggtgttcagttcgcgcggatctagtgcgcggctggtatcgcggtaccgtccgccggtaggggtgttcgcgatcacgccgcacgatactacggcgcggcaactctccgtcagttacggcgtgaccccgctgctggcgccggatgtctcgagcacggatgaaatgttgagccagatggaccgcgtgctcattgaaggcgggtatctgcagaaggggcagctggtggtgtttgtcgcaggtcagccggtggggcggcccggaacgacgaacctgatgaagctgcatcgcgtgggtctgggatag

SEQ ID NO: 344 - protein, 470 aa, Solibacter usitatus Ellin6076
MPNTKIVATLGPATDAPGVLRQLLAAGVDVFRLNASHGAQDAHAARIDAVRAAAREAHVHAGILLDLQGPKIRLGRFENGGVTLVTDAIFTITTEQVMGTSERASTGYSRFAKDVKAGDRILLADGIIELIALESDGVSVQTRIVNGGPIGDHKGINLPGVQVSIPSLTEKDLADLHFGLNAGVDIVALSFVRTADDVRQLRDRLGGRPVSIVAKIEKPEGYENIEPILDVTDGVMVARGDLGVEISLERVPRIQKSIIRRARRKGRFVITATQMLESMIENPRPTRAEVSDVANAIYDGTDAVMLSAETSVGKYPVEAVRYMAKIAAESEDSIRKKGYIDPPHQPQPSNAEILADAAHHAARDSGAAAIVVFSSRGSSARLVSRYRPPVGVFAITPHDTTARQLSVSYGVTPLLAPDVSSTDEMLSQMDRVLIEGGYLQKGQLVVFVAGQPVGRPGTTNLMKLHRVGLG

SEQ ID NO: 345 - DNA, 1710 bp, Magnetococcus sp. MC-1
  CDS (1)..(1710): transl_table=11
gtggcgcgtcgtgcaaagattgtagcaaccttgggacccgcctgttccagtgtggaacagattacccgtttgatcgaagccgggctggatgtggcccgtttgaatatgagccatggggatcataaagcccatttggagctgattcataatgtgcgggaggcctcgcggattgccaagcgcgaggtggcgctgctgtgtgatctgcaagggccaaaaattcgtgtgggccatctggatgaaccccttagattggaaaaggggcagcagtgggcgattattcccgagggcagtcatccccccaagctcaagtgtgatgggattatcccttgtacctatgcaggtttggcaaaggatgcggtgccgggctgccgcattctgtttgatgatggctatttgcaagcccgcgctattggtaccgaagagggggccttgctggtcaatattgaacatggggggctgcttaaatcccacaagggcatcaacatgcccgatgccagcatctcggccccgagtttgaccaccaaagatcagcaggatctcttttttggggttaaacatgatgtggattatgtggcactctcctttgtgcgcagtgctaagtgtgtgcaaaacgtcaagtttatgctgcatcggcgtaaaatttacaaacccattatcgccaaaattgagcggccagaggctatccgcaatattgatgagatcatcaaggtggtggatggcattatgatcgcccgtggcgatatggcggtggagattggcaaccatcgggtgccctcggtgcagcgtcagatcattcaaaagtgccgggccaagggtaagccggtgattaccgcaacccaaatgctggagtcgatgattcaaaatccatcccccacccgggccgaggcttctgacgtggccaacgccatttgggatggtaccgatgcggttatgttatccgccgagacttcggtgggggtagacccgatcaatacggtgctcaccatggggcgcattgtggaggaggcggagcgcaatccccgtggcccccgcttggatgcggaatcccacagcattagcagcgcctccatgatggcggcggcgcgggtggcggagcaggtgtcggcccgctggattattgccctgacggtgaccggtagttcggccttatcattggcccgttttcgaccggaggtgccggtgttgggggcggcccgtacccagggtggggtgcggcgtatgaatctctattggggcattaccccccggctgttcaactactccattgaagagcgggaggatattgagcccgaggtgatccagtggatgcgtgaacagagcatgttgcaggtgggcgagaaaattgtggtggtcaaaggaggtgggctgctgagcaatcacagcacatccagctcgatccgtgtagatctggtgcgcgatacccgcaatattgatgaaggcgtcagccaaatcacccaggagtccgtggcgggtaaaggcattatcaccctggatgccgcccgttgtgtggcgtgtggcaactgcgtcaatatctgcccctatggtatctgggtggcggcggccagtaatacccgtagcgtcagctttaaccgcgatcaggtggacaattgtagtttggatcaggagtgtgtgcgggtctgttccagccacgccattaccattaccgatgccaaagatatgcatgaatgggtggagaaagaggaattgtaa

SEQ ID NO: 346 - protein, 569 aa, Magnetococcus sp. MC-1
MARRAKIVATLGPACSSVEQITRLIEAGLDVARLNMSHGDHKAHLELIHNVREASRIAKREVALLCDLQGPKIRVGHLDEPLRLEKGQQWAIIPEGSHPPKLKCDGIIPCTYAGLAKDAVPGCRILFDDGYLQARAIGTEEGALLVNIEHGGLLKSHKGINMPDASISAPSLTTKDQQDLFFGVKHDVDYVALSFVRSAKCVQNVKFMLHRRKIYKPIIAKIERPEAIRNIDEIIKVVDGIMIARGDMAVEIGNHRVPSVQRQIIQKCRAKGKPVITATQMLESMIQNPSPTRAEASDVANAIWDGTDAVMLSAETSVGVDPINTVLTMGRIVEEAERNPRGPRLDAESHSISSASMMAAARVAEQVSARWIIALTVTGSSALSLARFRPEVPVLGAARTQGGVRRMNLYWGITPRLFNYSIEEREDIEPEVIQWMREQSMLQVGEKIVVVKGGGLLSNHSTSSSIRVDLVRDTRNIDEGVSQITQESVAGKGIITLDAARCVACGNCVNICPYGIWVAAASNTRSVSFNRDQVDNCSLDQECVRVCSSHAITITDAKDMHEWVEKEEL

SEQ ID NO: 347 - DNA, 1443 bp, Azoarcus sp. BH72
  CDS (1)..(1443): transl_table=11
atgccccgccacaccaagatcgtcgccaccctcggcccggcctcctccgacccgcaggtactcgaacgcatggtccacgccggcgtggacgtggtgcggatgaacttctcccacggcaaggcggaagaccatgtcgcccgcgccgcggcgatccgcgaggcgtcggcgcgtgccggacggccggtcggcatcctcgccgacctgcaggggccgaagatccgcgtcggcaagttcgagaacggccgggtgacgctgacccgcgacgccgagttcatcctcgacgcccactgcaacctcggcaacggccagcgcgtggggctggactacaaggacctgcccaaggacgtgcgcgccggcgacatcctgctgctcgacgacggccgcctcaagctgcaggtggagcgcgtgctcggcgccgagatccacacccgggtacgggtcggaggcgagttgtccaacaacaagggcatcaaccgccagggcggcggcctcaccgcgccggcgctcaccgccaaggacatggacgacatcaagaccgcagcgcagatcggcgtcgatttcctcgcggtgtccttccccaagagcgcggccgacatgtacatggcccgccagctgatgcgcgcggccggcggcgacgcgctgctgatcgcgaagatcgagcgcaccgaggcggtggcgaacctggaggaaatcctcgccgcctccgacggcatcatggtggcgcgcggcgacctcgcggtggaggtgggcgacgccgcggtgccggcgctgcagaagaagatgatccgcgccgcgcgcgaccacaacaagctgacgatcaccgcgacccagatgatggagtcgatgatcaccagcccggtgccgacccgcgccgaggtgtcggacgtcgccaacgcggtgctcgacggcaccgatgcggtgatgctgtcggccgagaccgccgccggcagctttccggtggaagtcgtcgaggcgatgagccgcgtctgcctggaagccgagaagtcggccgaggtcagcctcgaccgcgaggtgctcgaccgggtgttcacccgcatcgaccagtcgatcgcgatggcagcgatctggaccgcctggcacctgaaggtgaaggcggtcgcctcgctcacccagaccggctccaccgcgctgtggatgagccggctcaactgcggcgtgccgatctacgcgctgacgcccgaaatcggcgcgcgcaaccagatgacgctctaccgcgaggtctatccgctgctgatgagccagacccacttcgaccgcgacgtgctgctgtgggaagccgagcaggtgctgctcgaccagggcgtggtggaatacggcgacctcatcgtgctcaccatcggcgagccgatcggcgcctcgggcggcaccaacaccctcaagatcgtgcgcgtgggcgaacacaaggcacccggcgtgcagtaa

SEQ ID NO: 348 - protein, 480 aa, Azoarcus sp. BH72
MPRHTKIVATLGPASSDPQVLERMVHAGVDVVRMNFSHGKAEDHVARAAAIREASARAGRPVGILADLQGPKIRVGKFENGRVTLTRDAEFILDAHCNLGNGQRVGLDYKDLPKDVRAGDILLLDDGRLKLQVERVLGAEIHTRVRVGGELSNNKGINRQGGGLTAPALTAKDMDDIKTAAQIGVDFLAVSFPKSAADMYMARQLMRAAGGDALLIAKIERTEAVANLEEILAASDGIMVARGDLAVEVGDAAVPALQKKMIRAARDHNKLTITATQMMESMITSPVPTRAEVSDVANAVLDGTDAVMLSAETAAGSFPVEVVEAMSRVCLEAEKSAEVSLDREVLDRVFTRIDQSIAMAAIWTAWHLKVKAVASLTQTGSTALWMSRLNCGVPIYALTPEIGARNQMTLYREVYPLLMSQTHFDRDVLLWEAEQVLLDQGVVEYGDLIVLTIGEPIGASGGTNTLKIVRVGEHKAPGVQ

SEQ ID NO: 349 - DNA, 1437 bp, Acidovorax sp. JS42
  CDS (1)..(1437): transl_table=11
atgcagatccgccgcgccaccaagatcgttgccaccctgggccccgcctccagcgacccgcaactgctggagcagatgatcgcggcgggcgtgaacgtggtgcgcctgaacttcagccacggcaaggcgcaggaccatgtggagcgcgccgccatggtgcgcgaggccgcccagcgcgccgggcgcgaggtcgccatcatggccgacctgcaggggccgaagattcgcgtgggcaagtttgccgaaggacgggtgatgctggagccgggccagcctttcgtgctggacgcgtcgcgcagcgagcccggcgacctgcagggcgtgggcctggactacaaggaacttccccgcgacgtgaagcccggcgacgtgctgctgctgaacgacggcctcatcgtgctgcaggtggatgccgtgcgcggcgaggcggtgtacaccaccgtgaagatcggcggcgagctgtccaacaacaagggcatcaacaagcaggggggaggcctcacggcgcccgccctcacggccaaggacatggaggacatcaagaccgccatgagcttccaggccgactatgtggccgtgagcttccccaagaacgccaccgacatggagatggcgcgccagctgtgcaacgttgccgcggccgagttccgccacaagcccggcctgatcgcgaagatcgagcgtgcagaggccgtgccgctgctggaggagatcctgcgcgtgtccgacggcatcatggtggcgcgcggcgacctggccgtggaggtgggcaacgccgcggtgcccgcgctgcagaaaaagatgatccgcatggcgcgcgacatgaacaaggtggtgatcaccgcgacccagatgatggagagcatgatcgccaaccccgtgcccacgcgcgccgaagtgagcgacgtggccaacgccgtgctggacggcaccgacgccgtgatgctcagcgccgagacggcggccggcaagtacccgctggacacggtgcgggagatggccgctatctgcgccgccgcggaagcggccgaagacctggagcgcgactccgacttcatcggccagaccctgggccgcatcgaccagtccatcgccatgggtgcgctgttcacggcgcaccacctgggtgccaaggccatcgtggcgatgaccgacagcggttccacggcactgtggatgagccgccaccgcatccacattcccatctatgcattgacgccgaaggtggccacgcagcggcgcatggcgatgttccgcaacgtgtgcccgttgctcatggacaccagcgccgaccgcgacactgcactggaccaggccgagagccacctgaagatgcgcaacatcgtgcaacagggcgacctgtacgtgatcacctgcggcgagcccatgggtgcgcccggcggcacgaacatgctcaagatctgccgcgcacgatga

SEQ ID NO: 350 - protein, 478 aa, Acidovorax sp. JS42
MQIRRATKIVATLGPASSDPQLLEQMIAAGVNVVRLNFSHGKAQDHVERAAMVREAAQRAGREVAIMADLQGPKIRVGKFAEGRVMLEPGQPFVLDASRSEPGDLQGVGLDYKELPRDVKPGDVLLLNDGLIVLQVDAVRGEAVYTTVKIGGELSNNKGINKQGGGLTAPALTAKDMEDIKTAMSFQADYVAVSFPKNATDMEMARQLCNVAAAEFRHKPGLIAKIERAEAVPLLEEILRVSDGIMVARGDLAVEVGNAAVPALQKKMIRMARDMNKVVITATQMMESMIANPVPTRAEVSDVANAVLDGTDAVMLSAETAAGKYPLDTVREMAAICAAAEAAEDLERDSDFIGQTLGRIDQSIAMGALFTAHHLGAKAIVAMTDSGSTALWMSRHRIHIPIYALTPKVATQRRMAMFRNVCPLLMDTSADRDTALDQAESHLKMRNIVQQGDLYVITCGEPMGAPGGTNMLKICRAR

SEQ ID NO: 351 - DNA, 1428 bp, Fusobacterium nucleatum subsp. vincentii ATCC 49256
  CDS (1)..(1428): transl_table=11
gtgagtagtttgaaaaaaacaaaaatagtttgtactattggtcctgtgactgaatcagtagaaacattaaaagaattactaaatagagggatgaatgtaatgagattaaatttctctcatggtgattatgaagagcatggaataagaataaaaaattttagacaggctatgtctgaaactggaattagaggaggcttgttacttgatactaagggtccagaaataagaactatgactttaaaagatggaaaagatgtaagtattaaggctggacaaaaatttacttttacgacagatcaatcagttgttggagataatgaaagagtagcggtaacttatgaaaattttgcaaaagatttaaaagttggaaatatggttcttgttgatgatggattacttgaactagatgttacagaaataaaaggaaatgaagttatatgtgtagctagaaatagtggtgatttagggcaaaagaaaggaataaatttacctaatgtttctgttaatttgccagcattatctgaaaaagatatagaagatttaaaatttggttgtcaaaataatgttgattttgtagctgcttcatttataagaaaagctgatgatgtaagacaagttagaaaagttcttaaagaaaatggtggagaaagaatacaaataatttctaaaatagaaagtcaagaaggacttgataattttgatgaaattttagcagaatctgatggtataatggtagcaagaggagatttaggagtagaaattcctgttgaagaagttccttgtgcacaaaaaatgatgataaaaaaatgtaatagagcaggaaaagttgtaattactgcaactcaaatgcttgattcaatgataaaaaatccaagacctacaagagcagaagcaaatgatgttgctaatgctatatttgatggtacagatgcaataatgctttcaggagaaacagcaaaaggaaaatatccattagcagctgttgaggttatgaataaaatagccaaaaaagttgatgctacaataccagcattttatgtagatggggttataaataaacatgatataacttctgctgttgctgagggaagtgctgacataagtggaagattaaatgcaaaacttatagtagttggtacagaatctggaagagctgcaagagatatgagaagatattttcctaaggcaaatattttagcaataactaataatgaaaaaactgcaaatcaattagttttatcaagaggagtaatttcttatgtagatgcttcaccaaagactttggaagaattctttattttagcagaagttattgcaaaaaaattaaatttagttgaaaataatgatataattatagcaacttgtggagaaagtgtatttatacaaggaacaactaactcaataaaagttatacaagtaaaagcttag

SEQ ID NO: 352 - protein, 475 aa, Fusobacterium nucleatum subsp. vincentii ATCC 49256
MSSLKKTKIVCTIGPVTESVETLKELLNRGMNVMRLNFSHGDYEEHGIRIKNFRQAMSETGIRGGLLLDTKGPEIRTMTLKDGKDVSIKAGQKFTFTTDQSVVGDNERVAVTYENFAKDLKVGNMVLVDDGLLELDVTEIKGNEVICVARNSGDLGQKKGINLPNVSVNLPALSEKDIEDLKFGCQNNVDFVAASFIRKADDVRQVRKVLKENGGERIQIISKIESQEGLDNFDEILAESDGIMVARGDLGVEIPVEEVPCAQKMMIKKCNRAGKVVITATQMLDSMIKNPRPTRAEANDVANAIFDGTDAIMLSGETAKGKYPLAAVEVMNKIAKKVDATIPAFYVDGVINKHDITSAVAEGSADISGRLNAKLIVVGTESGRAARDMRRYFPKANILAITNNEKTANQLVLSRGVISYVDASPKTLEEFFILAEVIAKKLNLVENNDIIIATCGESVFIQGTTNSIKVIQVKA

SEQ ID NO: 353 - DNA, 1776 bp, Crocosphaera watsonii WH 8501
  CDS (1)..(1776): transl_table=11
atgacatcctcttctatatcccgtcgcacaaaaatcgtggcaaccatcggtccagctactcaaaacaaagaaattttaaggcaattgatcttagcaggggcaaccacgttacgactcaatttttctcataatgatcatgactatcatcaaaatagtattcgcctgattcgtcaaacggcttttgaattaaatcaaccagtggctattttacaggacttacaggggccaaaaattcgtctgggtcaatttgccaacggaccaattaccgttcaaccaggggatgtttttatcttgaccagtcgtgaagttgaatgcaatcaaactatcagttatgtctcctatgagcatctggccgatgaagtgcctgagaaggcgagaattttaatggatgatggcaaagtagaaatgctagtggagaaagtggataaggagaataaggatcttcattgtcgggttgtggttgggggtgtgttgtccgatcgcaaaggggtaaattttccaggggtttatttatccgtgaaggctttaacggagaaagataaacgggatttgatgtttggtttagatcaaggagtagactgggtggccttgagttttgtgagaaaccctcaagatattctcgaaattaagggattgattgctagtgccggcaaaaatgttcctgtcattgccaaaattgaaaaacacgaggccatcgaggatatggaagaaattctctccttgtgtaatggggtaatggtggcacggggagatttaggggtagagttacccccagaggatgttcctatcctccaaaaacgcctaatttctacggctaatcgtttgggtattccggtgattactgctactcaaatgttagatagtatggccagtaaccctcgtcccacccgtgcagaagtgtccgatgtggctaacgctattttggatggtactgatgcggtaatgttatccaacgagactgctgtaggtaaatatcccgtggaagcagtggcaactatggccactattgcggaaaggatcgaacgagaaccaactatccctaaagtcctctcagaaaagaagcagtcagtcactaattccatttcctcagcggttagtcacattgctcaagaattgaatgcggcggccattatgtctttgacaaaaacgggatcaacggcccgtaatgtttctaagtttcgccctcaaatacccattgtagcggttactccccatgtggatgtggctaggcagttacagttagtctggggggttaaacctttgctggtgcttgatttagcttcacctaatcaaacctttcaatctgcggttaatgtggcccaagaaaataattggctcaaggatggggatctagtggtgatgacggccggaacccttcaaggggtggcaggatctacggatttgattaaggtagaaatggtcaaggcggttttgggcaaaggtgtgggtattggtcagggagcagccagtggacgggcaagaattgctcataacgccagggaattgggcaattttgaacctggggacattttggtggttccgggaaccaatgcggagtttgtggaaatgatgcgtaaagcttcgggtattattaccgaagaagcaagtttaactagccatgcggcagttattggactaaggttgggtgttcctgtaattattgattttaaggaggcaacggctaatattagagaaggggcaattattacggttgatgctgaaaaaggccaggtttattcgggtctggttacgagtaataataacggcaataagtga

SEQ ID NO: 354 - protein, 591 aa, Crocosphaera watsonii WH 8501
MTSSSISRRTKIVATIGPATQNKEILRQLILAGATTLRLNFSHNDHDYHQNSIRLIRQTAFELNQPVAILQDLQGPKIRLGQFANGPITVQPGDVFILTSREVECNQTISYVSYEHLADEVPEKARILMDDGKVEMLVEKVDKENKDLHCRVVVGGVLSDRKGVNFPGVYLSVKALTEKDKRDLMFGLDQGVDWVALSFVRNPQDILEIKGLIASAGKNVPVIAKIEKHEAIEDMEEILSLCNGVMVARGDLGVELPPEDVPILQKRLISTANRLGIPVITATQMLDSMASNPRPTRAEVSDVANAILDGTDAVMLSNETAVGKYPVEAVATMATIAERIEREPTIPKVLSEKKQSVTNSISSAVSHIAQELNAAAIMSLTKTGSTARNVSKFRPQIPIVAVTPHVDVARQLQLVWGVKPLLVLDLASPNQTFQSAVNVAQENNWLKDGDLVVMTAGTLQGVAGSTDLIKVEMVKAVLGKGVGIGQGAASGRARIAHNARELGNFEPGDILVVPGTNAEFVEMMRKASGIITEEASLTSHAAVIGLRLGVPVIIDFKEATANIREGAIITVDAEKGQVYSGLVTSNNNGNK

SEQ ID NO: 355 - DNA, 1749 bp, Exiguobacterium sibiricum 255-15
  CDS (1)..(1749): transl_table=11
atgcgcagaactaaaattgtatgtacgattggaccggcgtcagaaaaacgtcttccagaaatgattgaagcgggtatgaacgttgctcgtcttaacttctcacacggtgactatgaagaacatggtgcccgcatcacggatatccgtcgtgcagcagaagaagcaaacaaattagttacgattcttttagatacaaaaggtccggaaatccgcacgcatacgtttgaagaaggtaaagccctcctcgtacgcggcaaacaagttatcgtcgtcagcggtgacgcaaacgaaatcgtcggtacagctgacaagttctctgtcacatacgacggtttatacgatgatgtcgaagtcggttcaatgattatgcttgatgacgggttaatcggactccgtgtcgcagaaaaactcgacaaccgtgaacttctttgcgacatcgaaaacgaaggaatcattaaaacgaaaaaaggggttaacttaccaaatgtaaaagttaacttgcctgctttgacagacaaagacatcgcagacatcgagttcggaattaagagcgacatcgatttgatcgctgcttcattcgtgcgtcgtgcgtctgacgttgttgcgattcgtcaattgctcgaaaaacacaatgccagccacatcaaaatcttcccgaaaatcgaaaaccaggaaggtgtcgccaacatcgaagaaatcatcgcgatttctgacggtttgatggtcgcacgtggtgatctcgggatcgaaattccgactgaagaagtcacgccgacacaaaaagatctcatcaaaatttgtaatgactacggtaaaccggtcatcacagcaacgcagatgcttgactcgatgcaacgtttcccgcgtccgacacgtgcggaagcatcagacgtcgccaacgcaattcttgatggaacagatgccatcatgctttcaggtgaaacagcagccggggactacccgattgaatctgttcaaatgatgcacacgattgcgaagcgtacggagaaaatgctcgactacaaaatgctcttgaaagatcgtcaaacacgcagtgagcacactgtgacggatgcgatcgctcaagcggttacgcatacagccatcaacctggacgcaaaagcaatcttgacaccgacacagtctggttacacagctgcccggatttcaaaataccgtccagagccaaacatcgttgccgtcacaccgagcgcgcgtgttgcacgtcaactcaacatcgtttggggtgtttatccgatcgttgtcgatcacctctcagacaacacggatgacatgttgacacttgctgctgatacagcaaaagaagcaggattcgtcacagacggtgacctcgtcgtcatctctgcaggtatcccggctcttacagcaggtacaacaaacatgttgaaaattcacatcgtcggtaaagaaatcacaaacggtcgcggaatcggtgaacgtggtgtcgttggcgaagtcgtcatcgcgcatacagctgaagaagcaaacgcaaaagcaaaaccaggcatgattcttgtcacgaactcaacggatcgcgacatgatgcctgcaatcgagatggctgcagcaatggtcacagtagacggcggattgactagccatgctggaatcgttggtccttcactcggtaaaccggttatcgtcggtgttgaaaacgccatgacaatcttcacggatggtcaacgtatttcaatcgatccgttaacaggtaaattgtacaacgcataa

SEQ ID NO: 356 - protein, 582 aa, Exiguobacterium sibiricum 255-15
MRRTKIVCTIGPASEKRLPEMIEAGMNVARLNFSHGDYEEHGARITDIRRAAEEANKLVTILLDTKGPEIRTHTFEEGKALLVRGKQVIVVSGDANEIVGTADKFSVTYDGLYDDVEVGSMIMLDDGLIGLRVAEKLDNRELLCDIENEGIIKTKKGVNLPNVKVNLPALTDKDIADIEFGIKSDIDLIAASFVRRASDVVAIRQLLEKHNASHIKIFPKIENQEGVANIEEIIAISDGLMVARGDLGIEIPTEEVTPTQKDLIKICNDYGKPVITATQMLDSMQRFPRPTRAEASDVANAILDGTDAIMLSGETAAGDYPIESVQMMHTIAKRTEKMLDYKMLLKDRQTRSEHTVTDAIAQAVTHTAINLDAKAILTPTQSGYTAARISKYRPEPNIVAVTPSARVARQLNIVWGVYPIVVDHLSDNTDDMLTLAADTAKEAGFVTDGDLVVISAGIPALTAGTTNMLKIHIVGKEITNGRGIGERGVVGEVVIAHTAEEANAKAKPGMILVTNSTDRDMMPAIEMAAAMVTVDGGLTSHAGIVGPSLGKPVIVGVENAMTIFTDGQRISIDPLTGKLYNA

SEQ ID NO: 357 - DNA, 1467 bp, Xylella fastidiosa Ann-1
  CDS (1)..(1467): transl_table=11
atgtctgaacgccagcgccgtaccaggattcttgccactcttgggccagcgacagatccgcccggtgtgcttgatgcgctgtttaaggcgggagttaatgtggtgcggctgaatttcagccatggcgatgtttcggatcaggccaggcgtgctgctgaagtgcgtgcggcggcggcgcatgtgggcgttgagattggcattcttgcggatctacccggtccgaagatccgtattggacgttttatcggggggaaagtgcggcttgtggctggtgcgcgctttgatctgcttgccgatagcaatgcgtcgctgggggatgcgactcaagttggggtcagttatctggggttgccgcaggatgtcgtcgccggagatgtgttgttactggatgatggcctcatgcaattgcaagtggtgcaagtgcagggtgcgcggattgtgacgacggttcttaacgatggtgtgttgtccgaccgtaaggggctgaataagcaaggcggcggtttgtcgctgggtgcgctgacggatcgtgatcgcgaactgattggtatcgttgccaggatggggatcgactttattgcagtttcgttttgtcgtcatgctgaagagatgcatgaggcgcgtcgcattgctcgggagtgcggctgtgatgctgcgttggtgtctaagatcgagcgtgctgaggctatcgtgaatcttgccgagattgttgcggcttcggatgtggtgatggttgcgcgtggtgatttaggtgtggagattggtgacgctcaattgccgggcttgcaaaaaaagatcatcaaggaagcgttgttacagaacaaggtggtgattactgccacgcagatgctgcaatcaatggttgaaagtccgatgccgacccgtgctgaggtgctggatgtggctaatgcggtgattgatgggaccgatgcggtgatgctgtcggctgaaacggcgacaggtgattatccagtcaaggcagtagaggcgatggcgcgtatctgtctgggagcggaacaccagtttgagtttgatactgattatgagatggcgcagcgtaatttgcagcgtgcagatcatgcgattgcaatggcaacgatgttcttatctgagcacatttgccttggtggtgtggttgcgttgacggagtccggtacgacgccacggtttctctcgcggttccggtcgcacgtcccgatctatgcgtttacgcgtcacgaggatgtgcggcggcgcatggtgctgatgcgtggtgtatttccgatgcgttttgacagccgtggtttgacgccgcgtgaggcagctagggcgacaatccgtcttttggtggaatgtggttgtatgagtccgggtgatcgtgtggtgttcacgagcggcgagcatatggaaacgcttggcgcaaccaatacactgcgtttacttgaagtaggcgctgatggttgtgtcagtggtctgtgggaactctaa

SEQ ID NO: 358 - protein, 488 aa, Xylella fastidiosa Ann-1
MSERQRRTRILATLGPATDPPGVLDALFKAGVNVVRLNFSHGDVSDQARRAAEVRAAAAHVGVEIGILADLPGPKIRIGRFIGGKVRLVAGARFDLLADSNASLGDATQVGVSYLGLPQDVVAGDVLLLDDGLMQLQVVQVQGARIVTTVLNDGVLSDRKGLNKQGGGLSLGALTDRDRELIGIVARMGIDFIAVSFCRHAEEMHEARRIARECGCDAALVSKIERAEAIVNLAEIVAASDVVMVARGDLGVEIGDAQLPGLQKKIIKEALLQNKVVITATQMLQSMVESPMPTRAEVLDVANAVIDGTDAVMLSAETATGDYPVKAVEAMARICLGAEHQFEFDTDYEMAQRNLQRADHAIAMATMFLSEHICLGGVVALTESGTTPRFLSRFRSHVPIYAFTRHEDVRRRMVLMRGVFPMRFDSRGLTPREAARATIRLLVECGCMSPGDRVVFTSGEHMETLGATNTLRLLEVGADGCVSGLWEL

SEQ ID NO: 359 - DNA, 1788 bp, Synechococcus sp. WH 5701
  CDS (1)..(1788): transl_table=11
atggcgcagcccgatctgtcgcgtcgcaccaaaatcgtggcaacgatcggtccagccacggagtccccccagcgactgcgggacctgatccaggcaggggctaccacgttccgtctcaatttttcccacggggaccactccgaacatgccgcccggatcgccacgatccgtcaggtggcccacgagctggggatccatgtgggcatccttcaggatctccagggtccgaagatccgtctcggccgcttcgagggcggtccgatcaccctcgccaacggcgacccctttgccctcacctcccggccggtgagctgcaaccagtcgatcgccacgatcacctacgaccgtctggccgatgaggtgaccgccggcagccgcattcttctcgacgacggccgggtcgagatggtggtcaagtcggtggacatccccgagcagaccctgcactgcaccgtggtcgtgggtggggtgctctccaacaacaagggggtgaacttccccgacgtgcagctctcgatccgtgcgctcaccaccaaggaccgcgaggacctcagcttcggcctccagcaggaggtcgactgggtggccctgagctttgtgcgcaacccctccgacatgcaggagatccgcgagctgatcagcagccaggggtacagcaccccggtgatcgccaagatcgagaagttcgaggcaatcgatcagatcgacgccatccttcccctctgcgatggcgtgatggtggcccggggcgacctgggggtggagatgccggccgaggaggtaccgctgctgcagaaggagctgatccgcaaggccaacaccctgggcatcccgatcatcacggccacccagatgctcgacagcatggccagctgcccgcgccccacccgggccgaggtgagcgatgtggccaacgccatcctcgatggcaccgacgcggtgatgctctccaacgaaaccgccgtgggtgactacccggtggaggcggtcgaaacgatggctcgcatcgcccgccgcatcgagcgcgactacccccgccgggtcgtggacagccacatggcctccaccatccccaacgccatcagccaggcggtcagcacgattgcccgtcagcttcaggctgcggcgatccttcccctcaccaagagcggggccacggcgcgcaacgtcagcaagttccgcccctccaccacgatcctggccatcaccagcgaggtgaaggtggcccgccagttgcagctggtctggggggtgaaccccctgctgatcggccatcaggcctccaccaccagcaccttcaccctggccatgggcgtggcccaggagaggggactgctcaaggagggcgatctggtcgttcagaccgccgggaccctctcgggagtgagcggctccaccgatctggtcaaggtgggcattgtctccgccgtgctgggccggggcctgggcatcggcaacggctcggtcagcggccgggtgcgggtggccaccaccgccgaggaggcggcgcggctggagagcggcgagatcctggtggtgcgcgataccaatgccggttacctcgatgccatccgcaaggcccgaggggtgatcgccgaggagcacggctgcgacagccatgccgccgtgattgcccagcggctgggggtgccggtgatcgtgggggtggccaacgccacttcggatctgcgcctgggtgaattcgtgaccctggaggtgcgtgagggggtggtgcaccgcggcgcccgcaaccacacccaggccgatcgcagcgaaaccatcctctga

SEQ ID NO: 360 - protein, 595 aa, Synechococcus sp. WH 5701
MAQPDLSRRTKIVATIGPATESPQRLRDLIQAGATTFRLNFSHGDHSEHAARIATIRQVAHELGIHVGILQDLQGPKIRLGRFEGGPITLANGDPFALTSRPVSCNQSIATITYDRLADEVTAGSRILLDDGRVEMVVKSVDIPEQTLHCTVVVGGVLSNNKGVNFPDVQLSIRALTTKDREDLSFGLQQEVDWVALSFVRNPSDMQEIRELISSQGYSTPVIAKIEKFEAIDQIDAILPLCDGVMVARGDLGVEMPAEEVPLLQKELIRKANTLGIPIITATQMLDSMASCPRPTRAEVSDVANAILDGTDAVMLSNETAVGDYPVEAVETMARIARRIERDYPRRVVDSHMASTIPNAISQAVSTIARQLQAAAILPLTKSGATARNVSKFRPSTTILAITSEVKVARQLQLVWGVNPLLIGHQASTTSTFTLAMGVAQERGLLKEGDLVVQTAGTLSGVSGSTDLVKVGIVSAVLGRGLGIGNGSVSGRVRVATTAEEAARLESGEILVVRDTNAGYLDAIRKARGVIAEEHGCDSHAAVIAQRLGVPVIVGVANATSDLRLGEFVTLEVREGVVHRGARNHTQADRSETIL

SEQ ID NO: 361 - DNA, 1437 bp, Pseudoalteromonas tunicata D2
  CDS (1)..(1437): transl_table=11
atggctagacgtactaaaatcgtcgctacacttggaccggctacagatagagataataatttagaaaaaatcatagaagctggcgtcaatgttgttcgtttaaacttttctcatggtgttgcacaagaccataaagaccgcgcggcaaaagtacgtgaaatcgcggcaaaattaggcaagcacattgcaattttagccgatttacaaggccctaaaatccgtgtttcaaccttccaagatggcaaagtaaccttagtagaaggtgctaaatttatccttgatgcccaaatggctaaaggcgaaggtaacattaatgcggttggtattgattataaagaattaccacaagacgtatcatctggtgacttattattacttaatgatggtttaattcaacttacagttgatagcgttcaaggccaacaagtgcattgtatcgtcacaattggtggtgtgttatcaaataataaagggattaaccgtttaggcggtggattaacagcccctgctttcacagaaaaagatgaacaagatttaattaccgcctctgaaattggtgttgactatatcgcagtgtctttccctcgtagtggtgatgatatgcgtcatgttcgtgctctagcagaaaaagccggcagtaatgcgcaactactagctaaaattgaacgtgctgaagctgtgtgctctgttgccgctatcgatgatatcgttctagcatctgatgctgtgatggtagctcgtggtgatttaggcgttgaaattggtgatgctgaattagtcggtaaacaaaaactgataattagtcgtgctcgttcattaaatcgtgttgtgatcactgcaactcaaatgatggaatcaatgattgataacccaatgccaacacgcgctgaagtaatggatgttgctaatgcggtgattgatggtacagatgccgtgatgctttctgctgaaactgctgcaggtgactacccggtagaaaccgtcaaagcaatggcgcgtgtttgtgttggtgcagaatctcaacctgaaacaaacgtttcaaaacatcgtttagacagcatgtttgcagatacatctgaaacattagcgctttcggctatgtatgctgccaatcacttaagcagtgtaaaagcgattgttgctttaacagaatcaggtaatactgcaaaattaatgtcacgtattagttctggtttacccatttattcattgtcgcgccatgcatcaacacttggccaaacagcactttatcgtggcgtttaccctgtttactttgattcaaccgcatgcagtaaagatgcgatggtcactgaagcagtgaaagcgcttgttgccaaaggcgtacttgttgcaggcgaccaagttattttaactcatggcgattcaatggaaactgttggtgcaactaatacaatgaagattgtaacagtccaataa

SEQ ID NO: 362 - protein, 478 aa, Pseudoalteromonas tunicata D2
MARRTKIVATLGPATDRDNNLEKIIEAGVNVVRLNFSHGVAQDHKDRAAKVREIAAKLGKHIAILADLQGPKIRVSTFQDGKVTLVEGAKFILDAQMAKGEGNINAVGIDYKELPQDVSSGDLLLLNDGLIQLTVDSVQGQQVHCIVTIGGVLSNNKGINRLGGGLTAPAFTEKDEQDLITASEIGVDYIAVSFPRSGDDMRHVRALAEKAGSNAQLLAKIERAEAVCSVAAIDDIVLASDAVMVARGDLGVEIGDAELVGKQKLIISRARSLNRVVITATQMMESMIDNPMPTRAEVMDVANAVIDGTDAVMLSAETAAGDYPVETVKAMARVCVGAESQPETNVSKHRLDSMFADTSETLALSAMYAANHLSSVKAIVALTESGNTAKLMSRISSGLPIYSLSRHASTLGQTALYRGVYPVYFDSTACSKDAMVTEAVKALVAKGVLVAGDQVILTHGDSMETVGATNTMKIVTVQ

SEQ ID NO: 363 - DNA, 1413 bp, Photobacterium sp. SKA34
  CDS (1)..(1413): transl_table=11
atgaaaaagaccaagatcgtatgtacgattggacctaaaactgaatctgtagaaatgcttactaaactagctaacgctggtatgaacgtaatgcgtctaaacttctcacacggtgacttcgaagaacacggtcaacgtattcgtaacctacgcgaagtaatggttaatacaggcaaagaactagcaatcctgttagatactaaaggccctgaaatccgtacaatcaaactagaaggcggtcaagacttctctctagtagctggtcaagattttacatttacaactgacacttcagttgtaggtaaccaaaactgcgttgcagtaacttacccaggttttgcaaaagacctaacaaaaggtaacactatcctagtagacgacggtctaatcgaaatggaagtgttagaaacaacagagactgaagttaagtgtaaagtacttaacaacggtgacttaggcgaaaacaaaggtgttaacctacctggcgtttctgtaaaacttcctgcacttgctgaaaaagacaaagctgatcttaagtttggttgcgagcaaggcgttgatttcgttgctgcatctttcatccgtaaagctgaagacgtacaggaaatccgtgcgcttctaacagctaatggtggcgaaaacatccaaatcatctctaagattgaaaaccaagaaggtgttgataacttcgacgctattcttgatgcctctgacggtatcatggttgctcgtggtgatcttggtgttgaaattccagttgaagaagttatcttcgctcagaagatgatgatcgagaaatgtaaccgtgcacgtaaagttgtaatcactgcgactcaaatgcttgattctatgattaagaacccacgtccaactcgcgcagaagcgggcgacgttgctaacgcaatcatggatggtacggatgcagtaatgctttctggtgaatcagcgaagggtaaatatccaattgaagctgtaactatcatggcgcaaatctgtgcacgtactgattacgttgttaagcctgagctaggttctcgtctagatagccctcgcctacgtatcacagaagcggtatgtaaaggtgctgtagatacagctgagaaactaaacgctccgctaattattgtagcaactgaagctggtaagtcagctcgctctgtacgtaagtacttcccaacagcacgcattcttgctgtaacaacaaatactaagacagctgctcagctatgtctttctaaaggtgttacacctgttgttgttgattcaattgaaagcactgatgcattctacctacgcggtaaagagctagcgcttgaaacgggtctaggtgctaaaggcgacatcgttgttatggtttctggcgctctagttacttcaggtactacaaacacagcatctgtacacgtactttaa

SEQ ID NO: 364 - protein, 470 aa, Photobacterium sp. SKA34
MKKTKIVCTIGPKTESVEMLTKLANAGMNVMRLNFSHGDFEEHGQRIRNLREVMVNTGKELAILLDTKGPEIRTIKLEGGQDFSLVAGQDFTFTTDTSVVGNQNCVAVTYPGFAKDLTKGNTILVDDGLIEMEVLETTETEVKCKVLNNGDLGENKGVNLPGVSVKLPALAEKDKADLKFGCEQGVDFVAASFIRKAEDVQEIRALLTANGGENIQIISKIENQEGVDNFDAILDASDGIMVARGDLGVEIPVEEVIFAQKMMIEKCNRARKVVITATQMLDSMIKNPRPTRAEAGDVANAIMDGTDAVMLSGESAKGKYPIEAVTIMAQICARTDYVVKPELGSRLDSPRLRITEAVCKGAVDTAEKLNAPLIIVATEAGKSARSVRKYFPTARILAVTTNTKTAAQLCLSKGVTPVVVDSIESTDAFYLRGKELALETGLGAKGDIVVMVSGALVTSGTTNTASVHVL

SEQ ID NO: 365 - DNA, 1437 bp, Oceanospirillum sp. MED92
  CDS (1)..(1437): transl_table=11
atgctgaagcgaaccaaaatagttgcaaccctgggcccatcaacagatcagccgggtgttcttgaagatattctacgtaatggcgtgaataccgttcggttgaatttctctcatggtagcgcggatgatcataagcgcagagccgaagaagtcaggcaagcgtcgcgaaagcttggcctgtctatagctgtattaggtgatcttcaggggcctaaaatccgtatcgctcgcttcaaagaggatcgtatccaacttgccgttggtgatagatttgctctggatgccgatctcgggaataacgatggcgatcaaagccaggtagggatcgattacaaagcccttccggcagactcttcccccggtgacatcctcttactggatgatggtcgcgttcagttaaaagttgttgaagtgcaaggtaaccgcatcgataccgaagtgatcatcggcggccctctatccaacaataaaggcattaaccgccagggcggcggattatcggctgcggctctaacggagaaagatcgcagagacattaaagtcgccgctgaaatcgatatggattatatcgctgtatctttcccgcgctgcgcagctgacctgttagaggcccgtgaactgctcaatgctgcaggctctcgcgctgaaattgtcgctaaagttgaacgcgctgaaacggtcgctagcaccgaagcccttgatgagatcattctggcttgcgacggcatcatggtggcgcgaggcgatctgggtgtagagatcggcgatgcagaattaatcggtgtacagaaacaccttattcagcgttctcgtgaactgaaccgctttgtcattacggcaacccagatgatggagacaatgatcgagaatccgatgcccacccgtgctgaggtatttgacgtcgctaatgccattcttgatggtacggatgcagtcatgctttcggcagagactgcggcgggtaaacatccggttgaagttgttaaatccatgacatcgatttgccagggcgctgaaaagcaccagctttcccgccctgcgccaaccaatatttcgcagaaacttgaacgctttgatgaaaccattgcccgctctgcaatgtatacagcaaataatctggcgggagttaaagcaattatctgtttaactgaatcaggctctacgcctttatggatgtcacgaattcgttccgggctaccgatctatgccttaacccgcaacgaacgcacaatgcgccgtaccgcactatatcgcggcgtggaacctatcttctttgactcgacccgcattgataaagacaagttaaatgaagaggttctggccggactcaaagcacgtaatttattgcagaccggtgatctggtgattctgactcgcggcgcatcactgggtgaagatggcggtacgaactccatgcaggttctcgcagtacaataa

SEQ ID NO: 366 - protein, 478 aa, Oceanospirillum sp. MED92
MLKRTKIVATLGPSTDQPGVLEDILRNGVNTVRLNFSHGSADDHKRRAEEVRQASRKLGLSIAVLGDLQGPKIRIARFKEDRIQLAVGDRFALDADLGNNDGDQSQVGIDYKALPADSSPGDILLLDDGRVQLKVVEVQGNRIDTEVIIGGPLSNNKGINRQGGGLSAAALTEKDRRDIKVAAEIDMDYIAVSFPRCAADLLEARELLNAAGSRAEIVAKVERAETVASTEALDEIILACDGIMVARGDLGVEIGDAELIGVQKHLIQRSRELNRFVITATQMMETMIENPMPTRAEVFDVANAILDGTDAVMLSAETAAGKHPVEVVKSMTSICQGAEKHQLSRPAPTNISQKLERFDETIARSAMYTANNLAGVKAIICLTESGSTPLWMSRIRSGLPIYALTRNERTMRRTALYRGVEPIFFDSTRIDKDKLNEEVLAGLKARNLLQTGDLVILTRGASLGEDGGTNSMQVLAVQ

SEQ ID NO: 367 - DNA, 1431 bp, Flavobacteria bacterium BBFL7
  CDS (1)..(1431): transl_table=11
atgccaaaaacaaaaaagactaaaatcgtagctacattaggacctgcaacttcttcaaaagaagtgttgttaggtatgatgaaggctggcgtgaatgtatttagaattaatttttcacatgcagatcatgaggatgtaaaagaacgtgttcaaatgatacgtgaccttaatgaagaacacggatttgcaacaggtatattaggagatttacaaggtcctaaactacgtgttggtgtcatgaaagaagaagtggttgtaaatcctggcgatattattactatttctactggagagccatttaaaggtactgcagaacgtgtatacatgaattacgagcatttccctagagatgtaaaagctggggaacgtattttactagatgatggtaaattaatgtttgaagtagtttctactgatggtgttaaagatgtagttactaaagtgattcaaggtggaccactacgttctaaaaaaggagtcaatctaccgcaaacagatatttctttaccagcccttactgaaaaagatgtggtagacgccatatttgcatgcgagttacaagtagactggatggcactttcatttgtacgtcatagtcgtgatttgatggaattacaagatttaattaaggaacactcagagcataaaattcctattatcgctaaaatagaaaagcctgaagcagtcactaacatcgataaaattgtagcttattgtgacggtttaatggtggctcgtggtgatttaggtgtagaggtgcctgcacatgaagtacctcttattcaaaaacaattagttcttaaggcaaaacaagcgcgtattcctgttatcatcgctacacaaatgatggaaacaatgattactagccttacacctacacgtgctgaggttaatgatgtggcaaactctgtaatggatggtgcagatgctgtaatgttatctggtgaaacatcagtaggtcagtatcctattcaagtaatagaaaaaatgaccagcatttgtttatctgttgaaaacagtgacttgattaacgtaccacatagtgcgccgcatattaaaacaaagagatatatcactaaatcgatatgttatcatgctgcaaaaatggctgacgagattgatgcaaaagccatcacgacaatgaccaatagtggttatacagcgtttcaaataagcgcctggagaccagatgcacatatcttaacttttactagtaataagcgtatccttactcaattaagtctcttatggggcgttaaagcctttttatacgaccgttttgtaagtactgatgaaactattgaagatgtgaatcagtttgcaaaagacaagaaattcgttagaaaaggagatttcttaatcaatcttgcagcaatgccagttaccgataaaggaatggtaaatacactaagagttactgagatagaatag

SEQ ID NO: 368 - protein, 476 aa, Flavobacteria bacterium BBFL7
MPKTKKTKIVATLGPATSSKEVLLGMMKAGVNVFRINFSHADHEDVKERVQMIRDLNEEHGFATGILGDLQGPKLRVGVMKEEVVVNPGDIITISTGEPFKGTAERVYMNYEHFPRDVKAGERILLDDGKLMFEVVSTDGVKDVVTKVIQGGPLRSKKGVNLPQTDISLPALTEKDVVDAIFACELQVDWMALSFVRHSRDLMELQDLIKEHSEHKIPIIAKIEKPEAVTNIDKIVAYCDGLMVARGDLGVEVPAHEVPLIQKQLVLKAKQARIPVIIATQMMETMITSLTPTRAEVNDVANSVMDGADAVMLSGETSVGQYPIQVIEKMTSICLSVENSDLINVPHSAPHIKTKRYITKSICYHAAKMADEIDAKAITTMTNSGYTAFQISAWRPDAHILTFTSNKRILTQLSLLWGVKAFLYDRFVSTDETIEDVNQFAKDKKFVRKGDFLINLAAMPVTDKGMVNTLRVTEIE

SEQ ID NO: 369 - DNA, 1482 bp, delta proteobacterium MLMS-1
  CDS (1)..(1482): transl_table=11
atgattgagcagcgggaagcaggggtgatggccgaggggcggccgcggcggaccaagattgtttgcaccatcggcccggccaccgcctcctttgaggccatctgtcggctggcggagcaggggatgaacgtggcccggctcaatatgtcccacggcagccgggagtggcaccggggggtgatcggcaacatcaagcgctacaataaaaaatatgccggctccctggcggtgctgctggacacccggggggcggagatccgcagcggcgatctcaagcaggatcttgaattgcgggtgggcgatgggttgaccctgaccacccggcgtcaggccgaactggaacccggctgcgtggaggtcagccacgacggattcgtggccgaggtgacgccgggggatatcatcctggtggatggcggcatgctgcggctcaaggttgtggaggtggggcgcaccgatgttcgctgccaatccctggacgagggggtgctgggctcccgccgccacctcaacatccggggtaaaagtgctgatttgccggccatcaccgagcaggattgggccgatatcgagttcggcatggagcagcgggtggatttcattgccctctcctttgtccgcaccgccgagcccatccaggtggtgcagcagcacctggcggccaggggcgtgaccatggaggtaatggccaagattgaaagcgcggcctccattgcccaactcgacgccatcatcgccgccgccgacggggtgatggtggcccggggtgatctgggggccgagctgccctacgaagaggtgccgctgctgcaggatgaaattgttgccaagtgccggcgggccggcaaaccggtggtggtggccacccacatgctggagtcgatgatcgttaaccccacccccacccgggccgaggtcaccgatatcacccacgccgtgcagcaggggtccgacgccatcatgctctccggggaaaccgccaccggccgctacccctacaaggccctggaggtcatggacgcggtggcccggcgcatcgaaagacaccaggaacagcagggcggccaggccggtttcggctgcgcctgccaactggggcgacaaggcggcggcagcgaccgcctccacgccaagatggagatttcccgcagcgcggcgatcctgggcaacaacctgggggctgccggcaccctggtcatcacccgccgggggctgatggccgccctgctttccaactgccgccccaccgcccccatcctggcctttaccaacaccacccacgtgcgccgccggctggggatttactggggagtgcaggcctttgtggtcaagctttccagcgacccggaggtttccatccagcgggcggtggagcaattgcaacgcaagggcatcgtccaccgggggcagcggatcatcgtgctctccgatatcctggccggcggccttttcgtggaaacggtgcaggtgcgggtgatttaa

SEQ ID NO: 370 - protein, 493 aa, delta proteobacterium MLMS-1
MIEQREAGVMAEGRPRRTKIVCTIGPATASFEAICRLAEQGMNVARLNMSHGSREWHRGVIGNIKRYNKKYAGSLAVLLDTRGAEIRSGDLKQDLELRVGDGLTLTTRRQAELEPGCVEVSHDGFVAEVTPGDIILVDGGMLRLKVVEVGRTDVRCQSLDEGVLGSRRHLNIRGKSADLPAITEQDWADIEFGMEQRVDFIALSFVRTAEPIQVVQQHLAARGVTMEVMAKIESAASIAQLDAIIAAADGVMVARGDLGAELPYEEVPLLQDEIVAKCRRAGKPVVVATHMLESMIVNPTPTRAEVTDITHAVQQGSDAIMLSGETATGRYPYKALEVMDAVARRIERHQEQQGGQAGFGCACQLGRQGGGSDRLHAKMEISRSAAILGNNLGAAGTLVITRRGLMAALLSNCRPTAPILAFTNTTHVRRRLGIYWGVQAFVVKLSSDPEVSIQRAVEQLQRKGIVHRGQRIIVLSDILAGGLFVETVQVRVI

SEQ ID NO: 371 - DNA, 1431 bp, Rickettsiella grylli
  CDS (1)..(1431): transl_table=11
atgaaacggtttaaacgaacgaagattgtcgctacattgggtcctgctaccgatagcgtagcggttttgcaaaagatgattgcggccggtttagatgttgttcgattaaatttttctcatggtaaagcagacgatcatataaaacgtgctgattatgttcgcaaatacgcaaaagctgcgaatcgagaaattgctattatggcggatttacaaggacctaaaattcgtatttcgtgttttaaaaaaggcgctatttttttaaaaaaaaatgctttatttattttggatgctgatttagacgaagaggaaggcgatgaatgtgtcgtcggtatcgattataaagaattaccacgcgatgtgcattctggagattcattattgcttgacgatggacgtattgtattaaaagttaaaaaaattcagaaaaataaaatattctgtagggttgaggtcgggggaaaactttctgataataaaggaattaatcgcaaagggggaggactttcagcgatagcattaactgagaaggataaaaaagatttaaaaatcgcagttaaattggatgcagattatattgctatttctttcccacgcagtgcagcggatataaatttagcacgaagtttattaaaaaaagcgaaaggtcatgcgggtttaattgcaaaaatagaacggagtgatgctattcctgttattgacgagattattcgcgcttctgatgcggttatggtcgctcgtggtgatttaggcgtggaaatcggcgatgcagaattgcctgcggtccaaaaacacattatccaacgggcacgctcattagataaggccgtgataaccgccacacagatgatggaatcaatgattcatagcgcaattccaacccgagccgaagtttttgatgttgcaaatgcggtgttagatggtacagatgcggtgatgctctctgcagaaacagccattggtgaccatccggctttagtcgttgaagcaatggcgcgtatttgcttaggtgcagaaaagcaagcaaaaacacgcatatcccgacatcgtgtagaatgccaattttcccgtcccgatgaggccattgcgatggcggccatgtataccgccaatcattatgatattaaagcgattattgccttaactgagtcaggcgcgactcctttatggatgtctcgaattcgttctggattacctatctatgggttggcgcataacttaaaaacgacgcgccgattagcgttgtatcgcggcgtatatcccttgtattttaatattgatgaactgtgcccagaaaatattgctcatttagcgattaaagaattaaaaaaacacaaaattttaaaaaagggagaacacgtgttaattacgtacggtgatttgttaaaaacaacaggcggcactaatacgttaaaaattttagaagtggattaa

SEQ ID NO: 372 - protein, 476 aa, Rickettsiella grylli
MKRFKRTKIVATLGPATDSVAVLQKMIAAGLDVVRLNFSHGKADDHIKRADYVRKYAKAANREIAIMADLQGPKIRISCFKKGAIFLKKNALFILDADLDEEEGDECVVGIDYKELPRDVHSGDSLLLDDGRIVLKVKKIQKNKIFCRVEVGGKLSDNKGINRKGGGLSAIALTEKDKKDLKIAVKLDADYIAISFPRSAADINLARSLLKKAKGHAGLIAKIERSDAIPVIDEIIRASDAVMVARGDLGVEIGDAELPAVQKHIIQRARSLDKAVITATQMMESMIHSAIPTRAEVFDVANAVLDGTDAVMLSAETAIGDHPALVVEAMARICLGAEKQAKTRISRHRVECQFSRPDEAIAMAAMYTANHYDIKAIIALTESGATPLWMSRIRSGLPIYGLAHNLKTTRRLALYRGVYPLYFNIDELCPENIAHLAIKELKKHKILKKGEHVLITYGDLLKTTGGTNTLKILEVD

SEQ ID NO: 373 - DNA, 1470 bp, Synechococcus sp. RS9916
  CDS (1)..(1470): transl_table=11
atggcgcaaatcgatctttcccgtcgtaccaagatcgtggccaccatcggcccagcaaccgaaagccctgaacggctcaggcagttgatcgaagctggtgccaccaccttccgcctgaatttttcccacggcgatcacagcgagcatgcagcccgcatcgccaccatccgccgagtctcggctgagatgggagttcacatcggcatccttcaggatcttcaggggccaaaaatccgtctcggccgcttcgccgatgggccgatcaccctcgccaacggtgatcccttcacgctcacatcccgtcccgtcagctgcaatcaggagatcgccacggtcacctacgacaagctggctgacgaagtcactgctggcagccgcatccttctcgatgacggccgggtcgagatgaaggtcgagcgggtcgacaaggcagaacagaacctccactgcacggtcaccgtcggcggagtcctctccaacaacaagggcgtcaacttcccggacgtacaactatctgttcgcgccctcactgagaaggacaaaacagacctggccttcggtcttggtcaaggggtggactgggtggccctgagctttgtgcgtaatccttccgacatggaggagattcgaggtctgatccgccagcacggccacaccactccggtggtggccaagatcgagaaattcgaagccattgatcagatcgatgccattctcccgctctgtgatggcgtgatggtggccaggggcgatctgggcgttgagatgcccgccgaggaggtcccccttctccagaaagagttgatccagaaggccaacagccttggcattccgatcatcacggccactcagatgctcgattcgatggcttcaagcccacgacccacgcgagccgaagtcagcgacgtggccaacgccatccttgatggcacggacgctgtgatgttgtccaacgagacagccgtgggtgatttccctgtggaggccgtggaaaccatggccaccatcgcgcgccgcattgagaaggattacccccagcgccgcatcgacagccatctgccatgcaccatccccaacgccatcagcagcgcagtgagcacgattgcaagccagctgaatgcggctgcgatcttgccactcaccaaaactggtgccacagctcataacgtgagcaagttccgtccagctgctccgattcttgcgatcaccagcgaaccatgggtggcatgcaaactccaattggtctggggagtcactccattggtgaccgaaccacaggagcgcacctcatccacattcgcgacagcaaccaacatctgtcgtgagcggggctggttgaagcaaggcgatctggtggtccaaacagcaggcacccagcctgaagtctctggctccaccgatctggtcaaagtgggaatcgttggtagcgacggactgctcgacagcactcaccacaacgccaccatctaa

SEQ ID NO: 374 - protein, 489 aa, Synechococcus sp. RS9916
MAQIDLSRRTKIVATIGPATESPERLRQLIEAGATTFRLNFSHGDHSEHAARIATIRRVSAEMGVHIGILQDLQGPKIRLGRFADGPITLANGDPFTLTSRPVSCNQEIATVTYDKLADEVTAGSRILLDDGRVEMKVERVDKAEQNLHCTVTVGGVLSNNKGVNFPDVQLSVRALTEKDKTDLAFGLGQGVDWVALSFVRNPSDMEEIRGLIRQHGHTTPVVAKIEKFEAIDQIDAILPLCDGVMVARGDLGVEMPAEEVPLLQKELIQKANSLGIPIITATQMLDSMASSPRPTRAEVSDVANAILDGTDAVMLSNETAVGDFPVEAVETMATIARRIEKDYPQRRIDSHLPCTIPNAISSAVSTIASQLNAAAILPLTKTGATAHNVSKFRPAAPILAITSEPWVACKLQLVWGVTPLVTEPQERTSSTFATATNICRERGWLKQGDLVVQTAGTQPEVSGSTDLVKVGIVGSDGLLDSTHHNATI

SEQ ID NO: 375 - DNA, 1437 bp, Alteromonadales bacterium TW-7
  CDS (1)..(1437): transl_table=11
atgctaagacgcacaaaaatagtcgctacccttgggcccgctaccgatagagataacaacttagaaaaaattattcgcgcaggcgcaaacgtagtacgtttaaacttctcacacggtgtggctcaagatcataaagaccgtgcacaagcagttcgtgatattgcaaaacgattgaacaaacatattgctattcttgccgaccttcaaggtcctaaaatccgtgtatcaacgtttaaagaaggcaaagtaaccctagaagtgggcgctaagtttattcttgatgcaaaaatggaaaaagggcaaggcgatgtaaacgctgtaggcatcgattataaagagcttccgcaagacgtatctcctaacgatttacttcttttaaatgatggtttaattcaacttacagttgataaagtagttgatcatctagttcactgtaccgttacagtgggaggtgttttatcaaataataaagggattaaccgtttgggcggtggattaactgcccctgcgtttactgataaagacaaagaagatttaattacagcagcagaaatcgatgtagattatattgcggtatctttcccacgtagtggtgatgatatgcgttacgttcgttctttagcagaagcagctggctctaaagcgcaacttcttgcaaaaattgaacgtgctgaagctgtagaaacgcaagaagcgattgatgacattgtacttgcatcagatgctgttatggttgcacgtggtgacttaggtgtagaaattggcgatgctgcgttaatgggcaagcaaaaacttattattcgtcgtgctcgttcattgaaccgtactgttgttacagcaacacaaatgatggaatcgatgatcgataacccaatgccaacacgtgctgaagtaatggatgttgcaaacgcagtgcttgatggtaccgacgctgtaatgctttctgcagaaaccgcagcgggtgattaccctgaagaaactgtagcgactatggcgcgagtttgtttaggtgctgagtcacaaaaagaaacacacgtatctaagcaccgtttagatagccgcttttctaataatgcagaatcaattgcattatctgctatgtatgcagcaaaccatttagactctgttaaagctattgtaacgcttactgaatcaggtagcacagcaaaactaatgtcacgtattagttcgggtttaccaatctactcactatctcgtcatgctagtacgcttggtcaaaccgcactttatcgtggtgtttaccctgtgttttttgattcaacacaaacagaaaaagatgcaatggttaaagcagctttagatacgcttgttgcccaaggatcattagcgtcaggtgatacagtgattttaacgcatggtgattcaatggaaacggttggcgcaacaaatacaatgaaaattgttactgttgagtaa

SEQ ID NO: 376 - protein, 478 aa, Alteromonadales bacterium TW-7
MLRRTKIVATLGPATDRDNNLEKIIRAGANVVRLNFSHGVAQDHKDRAQAVRDIAKRLNKHIAILADLQGPKIRVSTFKEGKVTLEVGAKFILDAKMEKGQGDVNAVGIDYKELPQDVSPNDLLLLNDGLIQLTVDKVVDHLVHCTVTVGGVLSNNKGINRLGGGLTAPAFTDKDKEDLITAAEIDVDYIAVSFPRSGDDMRYVRSLAEAAGSKAQLLAKIERAEAVETQEAIDDIVLASDAVMVARGDLGVEIGDAALMGKQKLIIRRARSLNRTVVTATQMMESMIDNPMPTRAEVMDVANAVLDGTDAVMLSAETAAGDYPEETVATMARVCLGAESQKETHVSKHRLDSRFSNNAESIALSAMYAANHLDSVKAIVTLTESGSTAKLMSRISSGLPIYSLSRHASTLGQTALYRGVYPVFFDSTQTEKDAMVKAALDTLVAQGSLASGDTVILTHGDSMETVGATNTMKIVTVE

SEQ ID NO: 377 - DNA, 1437 bp, marine gamma proteobacterium HTCC2143
  CDS (1)..(1437): transl_table=11
atgataagacggacaaaaattgtcgccactattggccccgcttcgggtcattcggaaatgattgcaaagttattagacgcgggagttaacgtttttcggttgaacttttctcatggcacagcggatgggcatcggcagcaggtagctatcattcggcaagtctgcgcgagtaaaaaggtacatgcggcgattttgggagacctgcagggaccgaagatacgaattggtgacctgcgcaacgatgctgtcacgcttgttaatggtgaagaaataatcctcacgatagaccaaagtcgtggtgaagatgacgaccgtataccggtgggctacaaggcgctgcctcaatctgttgctactggagacacgctgctgctcgatgatggattgatagagctatcggtttcgctgattgttgggggtgatgttcattgtagtgttcaagttggcggcgagctgaaatcgagaaagggcctaaatcgactgggtggcggtttatcggcgccagcaattacagagaaagatttacaggatattgatttggcagctgaactctcggtggattatcttgccgtttcctttccctgttgtgcttcggatcttgacccggttaaacgtcgattggacgatctcggggcacgtattggtatcattgcgaaaattgaacgtgcagaggcggttgccaacgaacagacattaaatgagctgattttggcagcggacggtgtgatggtcgcgcggggagatctgggtgtcgaagtgggaaattcccagctcattggtctacaaaagcgaattatcaggcaggcacgacgatcaaatcgtccggttattacagcaacgcagatgatggagtctatgattagttcaccggtgcctactcgcgccgaagtatttgatgtggcgaatgccgtattggacggtactgatgcggtgatgctctccgccgaaacagccactggaaaatacccagtgaaggtagtgatggcaatggctgacgcctgtgtgggggccgaacaacaaccggatacacgaatttcgggtcaccgagttgatgaccgggttgaaaatattagtgaatccatcgcgctttccgccatttacgccgccaatcatttagataacgtgaaggccagtctgtgcctgacagaatccggggcaacggctttaattatgtcgcgattgagttcgagcttgccaatctatggtgtatcacggcatcccgagacatgccgaagaatgactctgtatcgaggcgttattcccatccactgtgatattactaccaacgatgaggaaggttatcagcaggccttactgtctgttacaagcaccggggcgattgggcttggtgatcgggtaattgtaaccagtggtgatatcaccggcactggcgggatgaccaataccctgaaaattttgcaagttaaaggagcctaa

SEQ ID NO: 378 - protein, 478 aa, marine gamma proteobacterium HTCC2143
MIRRTKIVATIGPASGHSEMIAKLLDAGVNVFRLNFSHGTADGHRQQVAIIRQVCASKKVHAAILGDLQGPKIRIGDLRNDAVTLVNGEEIILTIDQSRGEDDDRIPVGYKALPQSVATGDTLLLDDGLIELSVSLIVGGDVHCSVQVGGELKSRKGLNRLGGGLSAPAITEKDLQDIDLAAELSVDYLAVSFPCCASDLDPVKRRLDDLGARIGIIAKIERAEAVANEQTLNELILAADGVMVARGDLGVEVGNSQLIGLQKRIIRQARRSNRPVITATQMMESMISSPVPTRAEVFDVANAVLDGTDAVMLSAETATGKYPVKVVMAMADACVGAEQQPDTRISGHRVDDRVENISESIALSAIYAANHLDNVKASLCLTESGATALIMSRLSSSLPIYGVSRHPETCRRMTLYRGVIPIHCDITTNDEEGYQQALLSVTSTGAIGLGDRVIVTSGDITGTGGMTNTLKILQVKGA

SEQ ID NO: 379 - DNA, 1437 bp, Candidatus Desulfococcus oleovorans Hxd3
  CDS (1)..(1437): transl_table=11
atgcagaccaaactgattgcaaccatcggaccccgctccagggaccgggctgttattgaaaagctggtggcggtcggcgtcacgatattcaggttgaatttttcccatgccggtcccggcgactttgccgacgtgattcaatcggtccgtgaaatcgaacagcagaccggcaccatcctcaccctgatgggcgacctgagcggccccaagatccgcatcggcgaggtggccggggctcctctgtcggttgccaccggccaactggtgcgcctgggtccggcccgggcaaagggagcctttggcgacgcgctctacctgcccctggagcttgccgaaattttagaacagctgaaaccgggcgccccggtgatcctgagcgacggcattccggttttccgggtccggaaacggcttgacacggaagcgggcccggtttttgaactggagacacaaaacagcggactggtatcgtccaacaagggcatctcctttcccggcctggccattgacctgccggccctgacggccaaggaccggtcggatgtggctgccgccctggatgtcggcatcgacgccctggccctctcctttgtccagaaaagccaggacgtggtggacctaaaaaaggagatggaacaccacggccggcaagtgccggtgattgtcaaaatcgaacgcatgaacgccatcgaccactttcaggagattgtagccgaggccgacgttatcatggtggcccggggagacctgggtctggagtgttcccttccggccctgcctgtaattcagaagcggatcatcgacatgtgcgccgaacaccagaagcccgtggtggtggccacgcagatgctgctctccatggtacacaacccccttcccacccgggccgaagtcgcggatgtggccaacgccatcatggacggggccgacgcggtgatgctgtccgaggaaacagcggtgggcgaatatccggtggaggcggccggcatgctggcccaggtagcggagcacacggaacggttcatggcggaaaagatgggcggcccccggcggccccggggcaaagagcaggtgggcaagcacctggcctactcggcctgcctggtggccgaccatgccggcagccgggcccttgcctgccacacggtcagcggccataccgcggccaccctgtcggcctgccgtcccgcccggaccgtttacgccctgtcacctcacctggaggccttgcggtacgccaactttctgtggggcgtcaagccggtccatgtggatgaccggatcgccgaccacctggaccgggtggaacacttcatcagcacatccggcgcctttgtcccgggcgagagcatcgtgatcacgtcgggccagcccacgccgggccagcggcataacgataccaaccagataaaaatatactacaaggggaatacctga

SEQ ID NO: 380 - protein, 478 aa, Candidatus Desulfococcus oleovorans Hxd3
MQTKLIATIGPRSRDRAVIEKLVAVGVTIFRLNFSHAGPGDFADVIQSVREIEQQTGTILTLMGDLSGPKIRIGEVAGAPLSVATGQLVRLGPARAKGAFGDALYLPLELAEILEQLKPGAPVILSDGIPVFRVRKRLDTEAGPVFELETQNSGLVSSNKGISFPGLAIDLPALTAKDRSDVAAALDVGIDALALSFVQKSQDVVDLKKEMEHHGRQVPVIVKIERMNAIDHFQEIVAEADVIMVARGDLGLECSLPALPVIQKRIIDMCAEHQKPVVVATQMLLSMVHNPLPTRAEVADVANAIMDGADAVMLSEETAVGEYPVEAAGMLAQVAEHTERFMAEKMGGPRRPRGKEQVGKHLAYSACLVADHAGSRALACHTVSGHTAATLSACRPARTVYALSPHLEALRYANFLWGVKPVHVDDRIADHLDRVEHFISTSGAFVPGESIVITSGQPTPGQRHNDTNQIKIYYKGNT

SEQ ID NO: 381 - DNA, 1455 bp, Pseudomonas putida GB-1
  CDS (1)..(1455): transl_table=11
atgagcatccgccgtaccaaaatcgtcgccacccttggccccgccagcaactcgccggaagtgatcgaacagctgatccttgccggcctggacgtggcacgcctgaacttctcccacggcacgccggacgagcacaaggcccgtgcgcgcctgatccgtgacatcgccgccaagaacggccgccatgttgcattgctgggcgacctgcagggtccgaagatccgcatcgccaagttcgccaacaagcgcatcgaattgaagatcggtgacaagttcaccttctccaccgcccacccgctgaccgaaggcaaccaggacatcgtcggtatcgactaccccgacctggtcaaggactgcggcgttggtgacgagctgctgctcgacgatggtcgcgtggtcatgcgcgtcgaaaccgccactgcagacgccctgcactgcgtggtgatcatcggtggcccgctgtcagaccacaaaggcatcaaccgtaaaggtggcggcctgaccgcaccggccctgaccgaaaaagacaaggccgacatcaagctggccgcggaaatggacctggactatctggccgtatccttcccacgtgacgccagcgacatggaatacgcgcgcaagctgcgtgacgagtccggcggcagcgcctggctggtggccaagatcgaacgcgccgaagcggttgccgacgacgagaccctcgacaagctgatcgccgcctccgacgcagtgatggttgcccgtggcgacctgggcgtggaaatcggcgacgccgagctgatcgccatccagaagaagatcatccagcacgcccgccgcaacaacaaggcggtgatcgtggcgacccagatgatggagtcgatgatccagaacccgatgccgacccgtgccgaagtgtccgacgtggccaatgccgtgctggacaacaccgacgcggtgatgctgtcggccgaaagcgccgcaggttcctacccgatcgaagccgtccaggccatggcccgcatctgcctgggtgccgaaaagcacccgaccagccagaagtccagccaccgcctgcacaccaccttcgagcgctgcgacgaaagcatcgccttggcggccatgtacaccgccaaccacttcccgggcgtgaaggcgatcatcgccctgaccgaaagcggctacaccccgctgatcatgtcgcgcctgcgttcgcacgtgccgatcttcgccctgtcgccgcaccgcgctacccaggcgcgcgccaacatgttccgtggcgtgtacccgattgccttcgacccggcttcgctgccggccgacaaggtgagccaggcagccgtggacgagctgctcaagcgtggcctggtgcagcaaggtgactgggtgatcctgaccaagggtgacagctaccacaccatcggtggcaccaacggcatgaagatcctgcatgtcggtgacccgctggtcggttga

SEQ ID NO: 382 - protein, 484 aa, Pseudomonas putida GB-1
MSIRRTKIVATLGPASNSPEVIEQLILAGLDVARLNFSHGTPDEHKARARLIRDIAAKNGRHVALLGDLQGPKIRIAKFANKRIELKIGDKFTFSTAHPLTEGNQDIVGIDYPDLVKDCGVGDELLLDDGRVVMRVETATADALHCVVIIGGPLSDHKGINRKGGGLTAPALTEKDKADIKLAAEMDLDYLAVSFPRDASDMEYARKLRDESGGSAWLVAKIERAEAVADDETLDKLIAASDAVMVARGDLGVEIGDAELIAIQKKIIQHARRNNKAVIVATQMMESMIQNPMPTRAEVSDVANAVLDNTDAVMLSAESAAGSYPIEAVQAMARICLGAEKHPTSQKSSHRLHTTFERCDESIALAAMYTANHFPGVKAIIALTESGYTPLIMSRLRSHVPIFALSPHRATQARANMFRGVYPIAFDPASLPADKVSQAAVDELLKRGLVQQGDWVILTKGDSYHTIGGTNGMKILHVGDPLVG

SEQ ID NO: 383 - DNA, 1449 bp, Marinobacter sp. ELB17
  CDS (1)..(1449): transl_table=11
atgctccggcgtacaaagattgttgccacccttggtcccgctaccgacagccccgaatctttgggcgctattattgctgcgggtgtcgacgttacccgtctgaatttttcccacggcactgcggaagatcacgaaaagcgcgcgcgcctggtacgcgacaccgccaaggcacagggccgttttgtcgctattatggccgacctgcaagggccaaaattgcgcattgcccgctttcgcgacaataaagtcaccctgaccgccggccaaacctttgtgctggatgccaccatggacaaagaaagtggcacctccgattgcgtaggcatcgattacgaacagctgatccgcgatgtaaaacccggcgacattctggtgttggacgacggtcgcatcgaaatgcagatagacgcggtagacgatcacagcatcacctccacggttctgatcggtggacccttgtctaacaacaaaggcctgaacaagcgcggcggtggcctgtcggctgaggcgctgaccgagaaagacaagcaagacattgttactgccgccaagttgggcgcggattatgtggccgtttctttcgttcgcaacgccgaagacatgcacacagctcgtcgtttgctgaaagaagccggctctgaagcggggctggtcgcaaaaattgaacgcgccgagctggcccacgatgacgccgcactggatgcggtcatcgaagcgtctgacgtggtcatggttgcccgcggcgatctggcagtggaaatcggcgatgccgaactggtcggtgtgcaaaagcacattattcagcgcgctcgaattctcaaccgcgcggtgattactgccacccagatgatggaatcgatgatcaccaaccctatgcccacccgcgccgaagtgtcggatgtggctaacgcggtgatggattacacggacgcagtgatgctgtcggcagaaaccgctgttggtgattatccggtggaagcggtaaccgccatggtgcgaatttgcattggtgcggagaaacacccctccatgcaccagtccaaacatcggatgcacgagtccatgggacgggtagatgaagccattgctctgtctaccatgtacgcggccaatcacctgaacggcatagccgctatcatctgcctgaccgaaaccggtgcaaccccgcagctgatgtctcgcatcaagtccagcttgccgatttatgcgttttcacgccatcacaccacccagcaccgggtagtgatgtaccgtggcgtgcaaaccgtaccctttgatgctgcaaactttgcggccgaagacaccaacaccgaggcggtagagcaactggtaaaacaaggcgtagtgaaaaacggcgatctggttatcatcaccaaaggcaattttaccaatgcccaaggcggcaccaattccatgcaaatcctgcgtgtaggtgaacatttgcactaa

SEQ ID NO: 384 - protein, 482 aa, Marinobacter sp. ELB17
MLRRTKIVATLGPATDSPESLGAIIAAGVDVTRLNFSHGTAEDHEKRARLVRDTAKAQGRFVAIMADLQGPKLRIARFRDNKVTLTAGQTFVLDATMDKESGTSDCVGIDYEQLIRDVKPGDILVLDDGRIEMQIDAVDDHSITSTVLIGGPLSNNKGLNKRGGGLSAEALTEKDKQDIVTAAKLGADYVAVSFVRNAEDMHTARRLLKEAGSEAGLVAKIERAELAHDDAALDAVIEASDVVMVARGDLAVEIGDAELVGVQKHIIQRARILNRAVITATQMMESMITNPMPTRAEVSDVANAVMDYTDAVMLSAETAVGDYPVEAVTAMVRICIGAEKHPSMHQSKHRMHESMGRVDEAIALSTMYAANHLNGIAAIICLTETGATPQLMSRIKSSLPIYAFSRHHTTQHRVVMYRGVQTVPFDAANFAAEDTNTEAVEQLVKQGVVKNGDLVIITKGNFTNAQGGTNSMQILRVGEHLH

SEQ ID NO: 385 - DNA, 1761 bp, Bacillus sp. SG-1
  CDS (1)..(1761): transl_table=11
atgagaaaaacgaaaattgtatgtaccattggaccggcaagtgaatcggttgaaaaattaacagaactaattgaagcaggaatgaatgtagcacgcctcaatttctcacatggtgaccatgaagaacatggtgccagaattcaaaacatccggacagcttccgaaaagacaggcaagactgtagggatcctgttggatacgaaaggtcccgaaatccgtacgaacaacatggagaacgggtccatcgagcttgagaaaggttctgaagttatcgtttccatgaaagaagtactgggaacacaagagaaattctctatcacatacgagagcttgattgatgatgtggaagagggatctaaaatccttttggatgacggattaatcggccttgaagttctttctcttgataaagctgcaggagaaatcaagacaaaagtacttaactcgggaacgctaaagaacaaaaaaggcgtgaatgttcctggagtatctgtaaatctgcctggaatcactgagaaggatgccaaggatatcattttcggaatcgagcaaggtgttgatttcatcgcagcttcattcgttcgccgtgcttcagatgttttggaaatccatcagctgttggaagatcataatgcaggagatatccaaatcatccctaaaatcgaaaaccaggaaggtgtcgacaatatcgatgaagtactggaagtttctgatggtctaatggtcgctcgtggtgatcttggagtggaaatcccagcagaagaagttcctcttgtacaaaaagcattgatcaaaaaatgtaatgcactgggcaagccggttatcacagcaactcaaatgcttgactccatgcagcgcaatccgcgtccgacaagagcggaagcaagtgacgttgcaaatgcaatctttgacggcacggatgcaatcatgctttcaggggaaacagcagccggtgtttaccctgtagaagctgttcagacaatgcataacatcgcgtcccgtgcagaaacggcattggattataaagaaatcctatccaaccgcagcaaagacacaggtcataacatgacagatgctatcgggcaatccgttgcacacacagctatcaacctttctgtgaatgccatcgtggcaccgacagaaagcggccatacagcaaaaatgatctcaaaataccgtccaaaagcaccaatcatcgcggtaacggcaaatgattctgtttcccgtaagctagcattggcttggggcgtatattcgcaaaaaggcagaaaagtggccactacagatgaaatgttggaaatggcagttgaagaaagtgtcaattccggtatgattactcacggtgaccgcatcatcatcacggcgggtgtgcctatcggtgagtccggcacaaccaaccttatgaaaatccacgtagttggcgatatccttgcaaaaggccagggaatcggacgcaaaacggcattcgggaaagcggtagttgcaaaaaatgcagccgaagccaatgagaaagtcaagcctggttctatacttgtgacagtaggcagcgacaaagatatggtccctgcacttgaaaaatgctctgcattgattacagaagaaggcggcctgacaagccatgctgcagtcgttggaatcaatatcggcattccggtcatcgttggagtggaaaatgctatgtccattctaaaagatggacaggaaatcacagttgattcctctagaggtgtcatctacgacggacatgcaagtgtactataa

SEQ ID NO: 386 - protein, 586 aa, Bacillus sp. SG-1
MRKTKIVCTIGPASESVEKLTELIEAGMNVARLNFSHGDHEEHGARIQNIRTASEKTGKTVGILLDTKGPEIRTNNMENGSIELEKGSEVIVSMKEVLGTQEKFSITYESLIDDVEEGSKILLDDGLIGLEVLSLDKAAGEIKTKVLNSGTLKNKKGVNVPGVSVNLPGITEKDAKDIIFGIEQGVDFIAASFVRRASDVLEIHQLLEDHNAGDIQIIPKIENQEGVDNIDEVLEVSDGLMVARGDLGVEIPAEEVPLVQKALIKKCNALGKPVITATQMLDSMQRNPRPTRAEASDVANAIFDGTDAIMLSGETAAGVYPVEAVQTMHNIASRAETALDYKEILSNRSKDTGHNMTDAIGQSVAHTAINLSVNAIVAPTESGHTAKMISKYRPKAPIIAVTANDSVSRKLALAWGVYSQKGRKVATTDEMLEMAVEESVNSGMITHGDRIIITAGVPIGESGTTNLMKIHVVGDILAKGQGIGRKTAFGKAVVAKNAAEANEKVKPGSILVTVGSDKDMVPALEKCSALITEEGGLTSHAAVVGINIGIPVIVGVENAMSILKDGQEITVDSSRGVIYDGHASVL

SEQ ID NO: 387 - DNA, 1431 bp, unidentified eubacterium SCB49
  CDS (1)..(1431): transl_table=11
atgccaaaccagaagaagacgaagattgttgctaccttagggccagcaacacaagatagagagatactaaagcagatgattctagaaggcgtaaatgtctttagagtaaacttctctcatgcaaattatgaaaatgtaaaagaagtagttgctactataagagatttagggaaagaactaggtactagcacggcaattttaggagatttacaagggcctaaattacgtgtggggattatgaaagaagaagttgtagtaagtcctggtgataccatttctttttgtaccggagaagagtttgaaggtaatgcagagaaggtgtacatgaactatgataactttccgagagatgtaaaaaaaggagaacgtattttacttgatgatggtaaattaatgtttgaagtactggcaacagatggaaaaaaagaagtaaaaacaaaggtgatacaaggtggacctttacgctctagaaaaggggtaaacctacctaacacggctatctcattacctgctttgacaactaaggataaagaagatgctgtatttgctatttctctagaggtagattggattgcactttcatttgtgcgtcacgcagaagatttaaaagaactacaagcactaattgaagcgcacagtgagtataaaatcccgattattgctaagattgaaaaaccagaagcagtaaaaaatatagataaaatagttgcttattgcgacggccttatggttgcacgtggagatctaggtgttgaggttcctgctgccgaagtgccacttattcaaaagcaactggtattaaccgcaaagcgtgccagaatacctgtaattattgccactcaaatgatggaaaccatgattacctcacttacgcctaccagagccgaggtaaatgatgttgcaaactctgtaatggatggcgcagatgctgttatgttatctggagaaacttctgtaggtaaatatccagttcaggtgatacaaactatggcaaacatttgtaaaaatgtagagaatagtgatctaattacggtaccacacgaaccacctcacgttcgtaccaatagatacattacaaaatctatttgttatcatgcagcgcatatggcaaacgagattgatgcaaaagcaatttgtactttaacaaatagtgggtatacagcattccagatttctgcttggcgtccagatgctcaaattttagtgtttacaagtaatcatcgtattctctcaagacttaatttattgtggggtgtaaaggcatttttttatgacaaatgcgtgagcacagatgaaactgtagaagatgtaaatgccattgcgcaagaacgtggttttgtaaaaaaaggtgattatttaattaaccttgcagcaatgcctatagtagataaagggatggtaaatacattgcgtgtgagtttaggtaaataa

SEQ ID NO: 388 - protein, 476 aa, unidentified eubacterium SCB49
MPNQKKTKIVATLGPATQDREILKQMILEGVNVFRVNFSHANYENVKEVVATIRDLGKELGTSTAILGDLQGPKLRVGIMKEEVVVSPGDTISFCTGEEFEGNAEKVYMNYDNFPRDVKKGERILLDDGKLMFEVLATDGKKEVKTKVIQGGPLRSRKGVNLPNTAISLPALTTKDKEDAVFAISLEVDWIALSFVRHAEDLKELQALIEAHSEYKIPIIAKIEKPEAVKNIDKIVAYCDGLMVARGDLGVEVPAAEVPLIQKQLVLTAKRARIPVIIATQMMETMITSLTPTRAEVNDVANSVMDGADAVMLSGETSVGKYPVQVIQTMANICKNVENSDLITVPHEPPHVRTNRYITKSICYHAAHMANEIDAKAICTLTNSGYTAFQISAWRPDAQILVFTSNHRILSRLNLLWGVKAFFYDKCVSTDETVEDVNAIAQERGFVKKGDYLINLAAMPIVDKGMVNTLRVSLGK

SEQ ID NO: 389 - DNA, 1413 bp, Moritella sp. PE36
  CDS (1)..(1413): transl_table=11
atgaaaaagactaaaattgtttgtacaattggtccaaaaactgaatcagtagagaaactaacagagcttgttaaagcaggcatgaacgtaatgcgtttaaacttctctcacggtaactttgctgagcactcagttcgtattcaaaatatccgtgaagtaagtgaaaacctaaatgaaaaaatcgcagtattactggatactaaaggtccagagatccgtacgattaaattagaaaatggtgaagacgtaatactgactgctggtcagttattcacatttacaactgatattaatgttgtaggtaataaagatagtgttgctgtaacttatcctggatttgctaaagatctcagcgcaggcgcgatcatccttgtcgatgatggtctgattgaaatgaaagttgttgaaacaactgatacagaagtaaaatgtacagtattaaatactggcgcacttggtgaaaacaaaggtgttaacttacctaacatcagtgtaggtctacctgcattgtcagaaaaagataaagcagatttagcgtttggttgtgagcaagaagttgattttgttgctgcatcattcatccgtaaagctgacgatgtaagagaaattcgcgaaatcttatttaataatggtggcgaaaacattcagattatctcaaaaattgaaaaccaagaaggtgttgataatttcgatgagatccttgcagaatcagacggtatcatggttgctcgtggcgatctcggtgttgagatccctgttgaagaagtgatcatggcacagaagatgatgatcaagaaatgtaataaagcaggtaaagttgtgatcactgcaacgcaaatgcttgattcaatgatcaacaatcctcgtccaacacgtgcagaagcgggcgatgttgccaatgctgtacttgatgggactgatgcggtaatgctttctggtgaaactgcgaaaggtaaatacccggttgaagcggtatctatcatggctaacatttgtgaacgtaccgataactcaatgtcttctgacttgggtgcaaatattgttgcaaaaagcatgcgtattaccgaagctgtgtgtaaaggtgcggtagaaacaactgaaaaattatgcgcgccattgattgttgttgctactcgcggcggtaaatcagcgaagtctgttcgtaaatattttccgaaagcaaatatcttagcgattacgactaacgaaaaaacagcgcaacaattatgcctaacgaaaggtgttagcacttgtatcgttgcgcaaattgatagcacggatgagttttaccgtaaaggtaaagaacttgcgctagcaactggcttagcgaaagaaggtgatattgttgttatggtgtcaggtgcacttgtaccatcaggcacaacaaacacggcatcagttcaccaactttaa

SEQ ID NO: 390 - protein, 470 aa, Moritella sp. PE36
MKKTKIVCTIGPKTESVEKLTELVKAGMNVMRLNFSHGNFAEHSVRIQNIREVSENLNEKIAVLLDTKGPEIRTIKLENGEDVILTAGQLFTFTTDINVVGNKDSVAVTYPGFAKDLSAGAIILVDDGLIEMKVVETTDTEVKCTVLNTGALGENKGVNLPNISVGLPALSEKDKADLAFGCEQEVDFVAASFIRKADDVREIREILFNNGGENIQIISKIENQEGVDNFDEILAESDGIMVARGDLGVEIPVEEVIMAQKMMIKKCNKAGKVVITATQMLDSMINNPRPTRAEAGDVANAVLDGTDAVMLSGETAKGKYPVEAVSIMANICERTDNSMSSDLGANIVAKSMRITEAVCKGAVETTEKLCAPLIVVATRGGKSAKSVRKYFPKANILAITTNEKTAQQLCLTKGVSTCIVAQIDSTDEFYRKGKELALATGLAKEGDIVVMVSGALVPSGTTNTASVHQL

SEQ ID NO: 391 - DNA, 1464 bp, Riemerella anatipestifer
  CDS (1)..(1464): transl_table=11
atgcaaagagcccgccgcgcgcgcatcgtcgcgacactcggacccgccagccgtgcgccgggaacggtcaaggcgctggcgcaggccggggtggacgtctttcgcctgaacttcagccatggctcgcacgacgaccacgccgccgccctcaaggccgtgcgcggggccgaaatggcgctgaagcggccgctgggcgtattggccgacctgcaggggcccaagctgaggttgggccgcttcgctgatgtcgagatcgaggtgaagccgggccaccagatgcgcttcgacctgaacccggcgctgggcgacgagacgcgggtgcagatgccgcatccggaaatcttcaaggcgctgcggccgggcatgctgctgctgctggacgacggccgggtgcgcctgcgcgtgggcgagcgcaccgatgaatggtgcgacgtgacggtcgagagcggctccaagctgtcggaccgcaagggggtggcggtgcccgaggcggtcattccggtctcggccctgacgcccaaggaccgcgaggatctggccttcgcgcttcgcctcggcgtcgactgggtggccctcagtttcgtgcagaaggccgaggacatggccgagctgaagagcatcgtgaacggtcaggccgcctgcctggccaagatcgaaaagcctcaggccctgaacgacctcgagagcatcctcgactactgcgacggcgtcatggtcgcgcgcggcgatctgggggtcgagatggacccggaggaagtgccggtcgcccagaagaagatcctgcgcgccgcccgccagcgcggcgtccccgccatcgtcgcgacgcagatgctggaatcgatgaccagcgccccggccccgacccgcgccgaggcgtccgacgtggccaacgccgtctatgagggcgccgacgccctgatgctgtcggccgagacggcggcgggcgactatccgctggaagccgtcgccatcatgaaccgcatcatggagcgggtggagcgcgaccccctgtggccgggcctgatggacgccgaacacgcgggcatggacatcgacgacgtcgacgccctggtcgcggcggcgaggaaggcggccgaggcgtcctcgaccgcctgcatggtggtgttcaccaccctgggcggcacggcgcggcggatgtcgcgcgagcggccgctgcagccggtcctggcgctgacgcccaagcccgagacggcgcgtcgcctggccctggtctgggggctggagccgcgtctgggcgaacagccgacctcgctggaaggcctgaccgacgatgcggtcgaggcggccatgctttacggcctggccgagccggggcagcgcatcctgatcctggccggaacgcccttcggcgcgccgggggccgcgaatctgttgcgtctggcccatgctccggcccatgctgccccccggcaacacggggcgaagcgcgcccgcaaaacctga

SEQ ID NO: 392 - protein, 487 aa, Riemerella anatipestifer
MQRARRARIVATLGPASRAPGTVKALAQAGVDVFRLNFSHGSHDDHAAALKAVRGAEMALKRPLGVLADLQGPKLRLGRFADVEIEVKPGHQMRFDLNPALGDETRVQMPHPEIFKALRPGMLLLLDDGRVRLRVGERTDEWCDVTVESGSKLSDRKGVAVPEAVIPVSALTPKDREDLAFALRLGVDWVALSFVQKAEDMAELKSIVNGQAACLAKIEKPQALNDLESILDYCDGVMVARGDLGVEMDPEEVPVAQKKILRAARQRGVPAIVATQMLESMTSAPAPTRAEASDVANAVYEGADALMLSAETAAGDYPLEAVAIMNRIMERVERDPLWPGLMDAEHAGMDIDDVDALVAAARKAAEASSTACMVVFTTLGGTARRMSRERPLQPVLALTPKPETARRLALVWGLEPRLGEQPTSLEGLTDDAVEAAMLYGLAEPGQRILILAGTPFGAPGAANLLRLAHAPAHAAPRQHGAKRARKT

SEQ ID NO: 393 - DNA, 2040 bp, Oryza sativa subsp
  CDS (1)..(2040)
atggcgcaggtggtggctgcggcagggacggcggcggcggtggcggcggtggggaggccgctggttggcggcggatctggggccgacgcgctccgcccggcggtgaggctgtcgttcgcgccgcgctggtgcggtgggagcgcgggggcagcgagggcgcgccgcgagtccgccgtcacgtccgtgattagccgcgccccgcgtctcgacgccgaggtgctgccggtgtcggccgacgacgacgcggacgtgaaggaagaagaaaacttccagcatctcaaggccattcagcaacttgcaacatcagccaatggtgtgtggtctaaaccaaatgtgagacgcaagacaaagatcgtgtgcaccattggtccttcaactaacacaaaggagatgatatggaaacttgctgaggctggcatgaatgtggctcggcttaatatgtcacatggagaccatgcatcacaccagaaagttattgacttagtaaaggaatataatgctcaaacaaaggataacgtgattgctattatgcttgacacgaagtcttacacagagtatgatgtgctcatgctagagtgtttttttgcggtctacgcctcctctggaggtattggaccagaagttaggagtggagatttgcctcaaccaataatgttggaaactggccaggagttcactttcacaattaagagaggagttgggactgagacatgtgttagcgttaactatgatgactttgttaatgatgtagaagtgggtgacatgctcctcgtagatggtggaatgatgtcgttgttggtcaagtccaaaactgaagattcggtaaaatgtgaagttattgatggaggtgaactgaaatccaggcgtcacctgaatgttcgtggaaagagcgcaaccttgccatcaataactgacaaggattgggatgatattaagtttggtgtggagaatcaagttgactactatgccgtttcttttgtcaaagatgctcaagttgtgcatgaattgaaggattatctcagaagctccaatgccgatatacatgtaattgtaaagattgaaagtgcagattccattccaaacctacactcaatcatcacagcatcggatggggctatggttgccagaggtgacttgggagctgaactccctattgaggaggtaccgctgctgcaggaagaaattattagaatgtgcaggagcatgggaaaagctgttattgttgccactaatatgctagaaagtatgattgttcatccaactccaacccgagcagaagtttcagacattgctatagctgttcgagaaggttctgatggcattatgctttctggggaaactgcacacggaaagtttcctttgaaagctgttaaggtcatgcatactgttgccctgagaactgaagccactatgtctggtggggaaacaccggctaaccttggtcaggtgttcaagaatcacatgagtgaaatgtttgcataccattcaacaatgatgtccaacactcttggaacatcaattgtggttttcaccaggacaggatttatggctatcctacttagtcattaccgcccttctggcaccatttttgcctttacggaccaggagagagttagacaacgattggctttgtaccaaggtgtatgtccagtccagatggaattttctgatgatgctgagaagacatttggtgacgctttgtcatacttgctgaaacatggtatggtgaaggaaggcgaggaggttgcacttgttcaaagtggcaggcaacctatctggcggtcgcagtccacccataatattcaggtcaggaaggtccaatctgctcaggcaacgggcggaagcttcgccatgaccatgagagtagcttttgcctttcaattcttagccataggagcgccggagaccggagtcgcggagctcgcgtgccctcgtttctccttccccagcggaaccacacgtcacatgcgtgcgcggtgcgccggtgggcgtgctctgcgggctgacggagagaaagacagctgccgcttcgcgaattga

SEQ ID NO: 394 - protein, 679 aa, Oryza sativa subsp
MAQVVAAAGTAAAVAAVGRPLVGGGSGADALRPAVRLSFAPRWCGGSAGAARARRESAVTSVISRAPRLDAEVLPVSADDDADVKEEENFQHLKAIQQLATSANGVWSKPNVRRKTKIVCTIGPSTNTKEMIWKLAEAGMNVARLNMSHGDHASHQKVIDLVKEYNAQTKDNVIAIMLDTKSYTEYDVLMLECFFAVYASSGGIGPEVRSGDLPQPIMLETGQEFTFTIKRGVGTETCVSVNYDDFVNDVEVGDMLLVDGGMMSLLVKSKTEDSVKCEVIDGGELKSRRHLNVRGKSATLPSITDKDWDDIKFGVENQVDYYAVSFVKDAQVVHELKDYLRSSNADIHVIVKIESADSIPNLHSIITASDGAMVARGDLGAELPIEEVPLLQEEIIRMCRSMGKAVIVATNMLESMIVHPTPTRAEVSDIAIAVREGSDGIMLSGETAHGKFPLKAVKVMHTVALRTEATMSGGETPANLGQVFKNHMSEMFAYHSTMMSNTLGTSIVVFTRTGFMAILLSHYRPSGTIFAFTDQERVRQRLALYQGVCPVQMEFSDDAEKTFGDALSYLLKHGMVKEGEEVALVQSGRQPIWRSQSTHNIQVRKVQSAQATGGSFAMTMRVAFAFQFLAIGAPETGVAELACPRFSFPSGTTRHMRARCAGGRALRADGEKDSCRFAN

SEQ ID NO: 395 - DNA, 1503 bp, Streptococcus bovis
  CDS (1)..(1503): transl_table=11
atgaataaacgcgtaaaaatcgttgcaacacttggtcctgcggttgaaatccgtggcggtaaaaaattcggtgaagatggatattggggtgaaagccttgatgttgaagcatcagcacaaaaaatcgctcaattgattaaagaaggtgcaaacgtcttccgtttcaacttctcacacggtgaccacgcagaacaaggtgaacgtatggcaactgtacgtcgtgccgaagaaattgctggacaaaaagttggtttccttcttgacactaaaggtcctgaaatccgtactgaactttttgaaggcgaagctaaagaatattcatacaaaactggtgaacaaatccgtgttgctactaaacaaggtatcaaatcaactcgcgaagttatcgctttgaacgttgctggtgcccttgacatctacgatgacgttgaagttggtaaacaagttcttgttgacgatggtaaacttggtcttcgtgttgtcgctaaagacgatgcaactcgtgaatttgttgttgaagttgaaaacgatggtattatcgctaaacaaaaaggtgtaaacattccttacactaaaatcccattcccagctcttgctgaacgtgataacgctgatatccgttttggtcttgaacaaggtcttaacttcatcgctatctcattcgtacgtactgcaaaagacgttgaagaagttcgtgcaatctgtgaagaaactggtaacggacacgttcgtttgtttgctaaaatcgaaaaccaacaaggtatcgaaaacatcgacgaaatcatcgaagctgctgatggtatcatgatcgctcgtggtgacatgggtatcgaagttccatttgaaatggttccagtttaccaaaaaatgatcatcactaaagttaacgcagctggtaaagcagttatcacagcaacaaacatgcttgaatctatgactgaaaaaccacgtgcaactcgttcagaagtatctgacgtgttcaacgctgttattgatggtactgacgcaacaatgctttcaggtgaatctgcaaatggtaaatacccagttgaagcagttcgtgcaatggctacaatcgataaaaacgctcaaactcttcttaacgaatacggacgtcttgattcatcatcattcgctcgtacttctaaaacagaagttgttgcttctgcagttaaagatgcaacaagctcaatggatatcaaacttgtagttgctcttactgaatctggtaacactgctcgtcttatctctaaataccgtccagatgctgacatcttggctgtaacattcgacgaaaaaactcaaaaatcattgatgattaactggggtgttattccagtcgtaactgaaaaacctgcatcaactgatgacatgtttgaagttgctgaaaaagctgctcttgaatcaggtttggttcaatcaggtgataacatcgttatcgtcgctggtgttcctgttggttcaggtggtacaaacacaatgcgtatccgcactgtaaaataa

SEQ ID NO: 396 - protein, 500 aa, Streptococcus bovis
MNKRVKIVATLGPAVEIRGGKKFGEDGYWGESLDVEASAQKIAQLIKEGANVFRFNFSHGDHAEQGERMATVRRAEEIAGQKVGFLLDTKGPEIRTELFEGEAKEYSYKTGEQIRVATKQGIKSTREVIALNVAGALDIYDDVEVGKQVLVDDGKLGLRVVAKDDATREFVVEVENDGIIAKQKGVNIPYTKIPFPALAERDNADIRFGLEQGLNFIAISFVRTAKDVEEVRAICEETGNGHVRLFAKIENQQGIENIDEIIEAADGIMIARGDMGIEVPFEMVPVYQKMIITKVNAAGKAVITATNMLESMTEKPRATRSEVSDVFNAVIDGTDATMLSGESANGKYPVEAVRAMATIDKNAQTLLNEYGRLDSSSFARTSKTEVVASAVKDATSSMDIKLVVALTESGNTARLISKYRPDADILAVTFDEKTQKSLMINWGVIPVVTEKPASTDDMFEVAEKAALESGLVQSGDNIVIVAGVPVGSGGTNTMRIRTVK

SEQ ID NO: 397 - DNA, 1503 bp, Vitis vinifera
  CDS (1)..(1503)
atggaggggggaggaggatggaaaaggcccaagacaaagatagtgtgcacgttgggaccggcgtccaggtctgttgaagtgatagagaagcttttgagggctggtatgaacgtggcgcgcttcaacttctcccatggctcccatgcctaccaccagcaaacccttgacaatctcaggactgccatggccaacaccgaaaccctttgcgccgtcatgttggatacgaagggtccagagattcgtactggatttttgaaggatgggaagcctgtccaactcaaaaagggtcaagagatcaccatctccactgactatagcatcaagggtgatgaccacatgatctgtatgagctaccaaaagctggctgaggatttgaggccacagagtgtaattctatgtgctgatggcactatcaccctcacagtcttggcctgtgacaaagaattggggttggttcgatgtcgttgtgaaaactctgcagttctgggtgagaggaagaatgtcaatcttcctggggttgttgtggaccttcccaccttaacagagaaagacaaagaggatatcttagaatggggggtacccaataagattgatatgattgctctgtcttttgttcgcaaagggtcagaccttgtggaggttcgaatgctgctggcggaacatgctaagtctatccttctcatgtcaaaggttgaaaatcaagagggtgttgctaattttgatgaaattcttgcaaactcagatgcgtttatggtggccaggggtgaccttggaatggaaatccccattgagaagatatttcttgcacagaaagtgatgatatataagtgtaacattcagggaaaacctgtagtcactgcaactcagatgttggagtccatgatcaaatctccccggcctacacgagctgaagccactgatgttgccaatgcagttcttgatggcaccgactgtgtgatgctgagtggggaaactgctgctggggcataccctgaacttgctgttcaaaccatggccaggatttgcttggaggcagagaattcacttaattatggagatgtcttcaagacaatcatggaaactgcaccaatgcccatgagccccatagagagtttggcctcctcagcagtacgggcagccaatgggtctaaagcagctttgattttggtcctgaccagaggtggaacaactgctaatctggtggctaagtaccggcccagcatgccaattttgtctgtggtagtcccggagatcacagcagattcctttgattggtcttgcagtgatgaatccccggccagacacggcctgattttcaggggactggtacctgttctatgctcaggatctgcaaaagcttctgacagtgagtcaacagaagaggctttggagttttcacttcaatatgcaaagaccaaggaaatgtgcaagcctggagactcagttgtggcattgcaccgagttggaactgcttctgtgatcaagatactaactgtcaaatga

SEQ ID NO: 398 - protein, 500 aa, Vitis vinifera
MEGGGGWKRPKTKIVCTLGPASRSVEVIEKLLRAGMNVARFNFSHGSHAYHQQTLDNLRTAMANTETLCAVMLDTKGPEIRTGFLKDGKPVQLKKGQEITISTDYSIKGDDHMICMSYQKLAEDLRPQSVILCADGTITLTVLACDKELGLVRCRCENSAVLGERKNVNLPGVVVDLPTLTEKDKEDILEWGVPNKIDMIALSFVRKGSDLVEVRMLLAEHAKSILLMSKVENQEGVANFDEILANSDAFMVARGDLGMEIPIEKIFLAQKVMIYKCNIQGKPVVTATQMLESMIKSPRPTRAEATDVANAVLDGTDCVMLSGETAAGAYPELAVQTMARICLEAENSLNYGDVFKTIMETAPMPMSPIESLASSAVRAANGSKAALILVLTRGGTTANLVAKYRPSMPILSVVVPEITADSFDWSCSDESPARHGLIFRGLVPVLCSGSAKASDSESTEEALEFSLQYAKTKEMCKPGDSVVALHRVGTASVIKILTVK

SEQ ID NO: 399 - DNA, 1743 bp, Vitis vinifera
  CDS (1)..(1743)
  misc_feature (200)..(200): y is t or c
  misc_feature (1338)..(1338): y is t or c
atggctcaggtggtggcgactcgcgcgattcagagctcgattctgtgccctagctctggatccgtgcatgagcgatttgagaagctgaagccctccggtttcgctgcgaaagtgttggctcgcgaagagcggaggagccggagagtggcttggaggggcggtccgattgcggcggcgaagagatctgtgggagctgagayggaggttgttccggtcacaccagaggatgcgaagggagaggagcaatatcatcgtttacggggaattcaacagcttggtgagacatctgttggtatgtggtctaagccaacagttagacgcaagacaaagattgtttgcactattggtccatccaccaacacacgggaaatgatatggaagctggctgaagctggaatgaatgtagcccgcctgaatatgtctcatggagatcatgcatctcatcagaaggttattgatttggtaaaagagtataatgcacaatccaaagataatgtcattgcaatcatgcttgataccaaggcaagttttctaggccctgaggtcaggagtggggacttgccccagccaatcatgttaaaaagtgggcaggaattcaccttcacaattcaaagaggcgttgggacagcagattgtgttagtgttaactatgatgattttgtcaatgatgtagaaatgggcgacatgcttcttgtggatggtggtatgatgtcattaatggtcaagtccaagactggagattcagtgaaatgtgaagttgttgatggaggagagctcaagtctagaaggcatctaaatgttcgaggaaaaagtgcaacactgccatcaattactgaaaaggactgggatgatatcaagtttggtgttgacaataaagtggacttttatgcagtctcctttgttaaagatgcgaaagtagtccatgaattgaagaactatctgaaaagctgtaatgcagatatccatgtcattgttaaaattgaaagtgccgactccattcccaatctacattcaattattaccgcatctgatggggcaatggttgctagaggggatcttggtgccgagcttcctattgaggaggtcccattgctacaggaagagataatcaggatatgtcgtagcatgggaaaagctgttattgtagcaaccaatatgctggaaagcatgattgttcacccaacaccaacccgagcagaggtatcagacattgccattgctgtccgagagggtgctgatgcagttatgctttctggagaaactgctcatggaaagtttcccttgaaagctgtgaaagtcatgcatacagtttccttaagaactgaagcaaccttggtyggtagcccaatgccaccaaatcttggtcaggctttcaagaaccatatgagcgaaatgtttgctttccatgcaaccatgatgtccaatactctcggtacttcaatagttgttttcactagaactggtttcatggctatccttctgagccattatcgaccttctggcaccatatttgcctttacaaatgaggagagagtacaacagagactagccgtgtaccaaggggtatgtcccatatacatgcagttctcagacgatgctgaagaaacctttgcaaatgccttgtctttgttgcagaagcaagggatggtgaaggaaggagaagaggtggctcttgttcagagtggcaggcagccgatctggcggttccaatccacacacaatatccaggtcaggaaagtttaa

SEQ ID NO: 400 - protein, 580 aa, Vitis vinifera
  misc_feature (67)..(67): The Xaa at location 67 stands for Met, or Thr.
MAQVVATRAIQSSILCPSSGSVHERFEKLKPSGFAAKVLAREERRSRRVAWRGGPIAAAKRSVGAEXEVVPVTPEDAKGEEQYHRLRGIQQLGETSVGMWSKPTVRRKTKIVCTIGPSTNTREMIWKLAEAGMNVARLNMSHGDHASHQKVIDLVKEYNAQSKDNVIAIMLDTKASFLGPEVRSGDLPQPIMLKSGQEFTFTIQRGVGTADCVSVNYDDFVNDVEMGDMLLVDGGMMSLMVKSKTGDSVKCEVVDGGELKSRRHLNVRGKSATLPSITEKDWDDIKFGVDNKVDFYAVSFVKDAKVVHELKNYLKSCNADIHVIVKIESADSIPNLHSIITASDGAMVARGDLGAELPIEEVPLLQEEIIRICRSMGKAVIVATNMLESMIVHPTPTRAEVSDIAIAVREGADAVMLSGETAHGKFPLKAVKVMHTVSLRTEATLVGSPMPPNLGQAFKNHMSEMFAFHATMMSNTLGTSIVVFTRTGFMAILLSHYRPSGTIFAFTNEERVQQRLAVYQGVCPIYMQFSDDAEETFANALSLLQKQGMVKEGEEVALVQSGRQPIWRFQSTHNIQVRKV

SEQ ID NO: 401 - DNA, 1866 bp, Vitis vinifera
  CDS (1)..(1866)
atggcacatatttggaatattacttttaattccctttaccaaatcccatatgatgcgtatgcacttaagaagtatcatacccatgtttctttgtatttgtgttggggaatggttcttggggtcaatgtcctggatgtggctgctggtgtgaacttcaatgtgcaacttggatgggaatgtgaacatcatccatggggcagtgaggagcccttatgtgagactttcccatccttgtttgccctatttgattcgaaggagacatgggtagctgattttttggagcaacgtggggaaggagattgtgtcattattgtttcatggatatttacatatagaaggattttgtttggttacatcctgggttccaacgcccatgaaaagaacatatcatatcaaaatacagtttatgactttatggatacggtgaagactccttttgaacttcaatctagtgattccactctgggaaatcagaggataatgtcgaatcctcgacggaaaacgaagatagtatgtactattggtccctccactagttcacgagaaatgatatggaaactggcagaaactggaatgaatgttgcacgtttgaatatgtcacatggggaccatgcatcgcacaagaaaaccattgatctggtcaaagaatacaatgctcaatttgaagacaaggttatagccataatgctggacaccaagggtcctgaggtcagaagtggagatgtccctaaaccaatcatgcttaaggagggacaagaattcaacttcactattaaaagaggagtcagctcagaaaacactgtcagtgtaaattatgatgactttgtgaatgacgtggaggttggagatatacttcttgttgatggtggaatgatgtcattagctgtgaaatcaaagtctaaggatttggttaagtgccaagtaattgatggtggtgagctgaaatcaaggcgtcacttgaatgtgcgtggaaaaagtgcaactctgccttcaataacagacaaagactgggaagatatcaagtttggagtggacaaccaagttgatttctatgctgtttcctttgtgaaagatgctgaagtggtccatgagttgaaagattacctcagaagctgtggtgcagatattcatgtgattgtgaaaattgaaagtgcagattccataccaaatcttcattccattatttctgcttctgatggggcaatggttgcacgtggggatctcggagctgaacttccaattgaggaagtccctttattgcaggaggacatcattagaaggtgtcacagcatgcagaagcctgttattgtagcaacaaacatgttggagagcatgattaatcatcctacaccaacaagggccgaagtttctgatattgcaattgctgtaagagaaggtgctgatgcagttatgctttctggagaaactgcccatggaaacacccatgaaattcctaacaaggagaagaccatctgccataaaattcttgcgttgagtcatatgggtacaatgtttgctttccatgccaccactatggctaacactcttaatactcccatcattgtctttacaagaactggatccatggctataactttaagccattatcggcctttctcaacaatctttgccttcactaatgaagaaagagttaagcagaggttggtgctttatcatggtgtgatgcctatatttatgcagttttcagatgatgctgaggagaccttctctcgagccctcagcatactagtgaacaagggcctaatgaaggagggagagcatgtgactcttgttcaaagtggagcacaaccaatctggcgtgttgaatctactcaccacatccaagttcgtaaggtccaaggttga

SEQ ID NO: 402 - protein, 621 aa, Vitis vinifera
MAHIWNITFNSLYQIPYDAYALKKYHTHVSLYLCWGMVLGVNVLDVAAGVNFNVQLGWECEHHPWGSEEPLCETFPSLFALFDSKETWVADFLEQRGEGDCVIIVSWIFTYRRILFGYILGSNAHEKNISYQNTVYDFMDTVKTPFELQSSDSTLGNQRIMSNPRRKTKIVCTIGPSTSSREMIWKLAETGMNVARLNMSHGDHASHKKTIDLVKEYNAQFEDKVIAIMLDTKGPEVRSGDVPKPIMLKEGQEFNFTIKRGVSSENTVSVNYDDFVNDVEVGDILLVDGGMMSLAVKSKSKDLVKCQVIDGGELKSRRHLNVRGKSATLPSITDKDWEDIKFGVDNQVDFYAVSFVKDAEVVHELKDYLRSCGADIHVIVKIESADSIPNLHSIISASDGAMVARGDLGAELPIEEVPLLQEDIIRRCHSMQKPVIVATNMLESMINHPTPTRAEVSDIAIAVREGADAVMLSGETAHGNTHEIPNKEKTICHKILALSHMGTMFAFHATTMANTLNTPIIVFTRTGSMAITLSHYRPFSTIFAFTNEERVKQRLVLYHGVMPIFMQFSDDAEETFSRALSILVNKGLMKEGEHVTLVQSGAQPIWRVESTHHIQVRKVQG

SEQ ID NO: 403 - DNA, 1515 bp, Pichia guilliermondii
  CDS (1)..(1515)
atgtcccacgctgctttaacttggcttacctgcctcaacaccactgagactccagacaaagtgctccgtcgttcctcaattatcggtaccattggtcctaagaccaactctgccgaagtgatggtcaagttgagaaaagccggtcttaacattgtgagaatgaacttctctcatggatcgcacgagtatcaccagtcggtcattgacaacgccagaaagtcggaggagttgtatcctggtagaccattggccattgccttggataccaagggtcctgagatccgtactggtaccaccgtgggagagaaggattacccaattcttccaaaccacgaaatgattatcactactgacgatgagtacgcgaagaaatgtgacgacaaaatcatgtacgtcgactacaagaacattactaaggtcatcgagactggaaagatcatatatgtagatgatggtgtgctttcgtttgaagttgctgaagttgttgactccaagaccttgaaggtcagatctgtcaatgccggttccatctcgtctcacaagggtgtcaacctccctggcaccgacgttgatcttcctgctctttctgaaaaggacaagaacgatatcagattcggtgtcaagaacggcgtccacatgatcttcgcttcgtttattcgttccggagacgatatcaaggccattcgtgaagtccttggtgaagatggaaaggatattcagatcattgccaagatcgagaaccaacaaggtgtgaacaactttgatgatatccttgccgagaccgacggtgtcatggtggccagaggtgacttgggtattgagattccagctcctcaagtgttcgtcgttcaaaagcagttgattgccaaatgtaacttggctgctaagcctgtaatttgtgctacccaaatgttggagtccatgacctacaacccaagaccaaccagagccgaagtcagtgacgtcggtaacgctatcttggatggtgctgactgtgtcatgttgtctggtgaaactgccaagggtaactacccatttgaggccgtctcgatgatgcacaacactgctatcattgctgaaaaggctattgcttaccagccattgcacaatgaaatcagagctttggccaagaaacctactcctaccaccgaaacttgtgcaattgctgctgtttccgctgcctacgagcaagatgccaaggccattgtcgtcttatctacttctggtttgacttcaagactcgtgtccaaatacaagcctaatgttccaattatgatggttaccagaaacgagagagctgctaggtattgtcacttgtacagaggtgtctaccccttcgtgtacactaagggtaaggttgaaaactggcaagaggatgtagagaacagattgagatgggctgtttcggaagccatcgatttgggtattatcaagaagggcgactcaattgttactattcaaggatggactagaggctctggtcactccaacaccgtcagagtcgttcaagcttag

SEQ ID NO: 404 - protein, 504 aa, Pichia guilliermondii
MSHAALTWLTCLNTTETPDKVLRRSSIIGTIGPKTNSAEVMVKLRKAGLNIVRMNFSHGSHEYHQSVIDNARKSEELYPGRPLAIALDTKGPEIRTGTTVGEKDYPILPNHEMIITTDDEYAKKCDDKIMYVDYKNITKVIETGKIIYVDDGVLSFEVAEVVDSKTLKVRSVNAGSISSHKGVNLPGTDVDLPALSEKDKNDIRFGVKNGVHMIFASFIRSGDDIKAIREVLGEDGKDIQIIAKIENQQGVNNFDDILAETDGVMVARGDLGIEIPAPQVFVVQKQLIAKCNLAAKPVICATQMLESMTYNPRPTRAEVSDVGNAILDGADCVMLSGETAKGNYPFEAVSMMHNTAIIAEKAIAYQPLHNEIRALAKKPTPTTETCAIAAVSAAYEQDAKAIVVLSTSGLTSRLVSKYKPNVPIMMVTRNERAARYCHLYRGVYPFVYTKGKVENWQEDVENRLRWAVSEAIDLGIIKKGDSIVTIQGWTRGSGHSNTVRVVQA

SEQ ID NO: 405 - DNA, 1326 bp, Nosema bombycis
  CDS (1)..(1326)
atgttcccgacaatgacaaagataattgtaaccgtaagttctgtctcagatgatgaagaaacccttaccaacttccttaaagaaggagtacatatatttcgaataaacttaagtcatggcacttcttaccaacacgagcacagcattttaaacatcaggaaatgtgctaaagaaatgggaattgttccagttatttgcttggacacccgtggacctgaagtccgaatagaaatagccgaaaggtctgaaattcccctaaaagaaggcgataaaattactttttcaaatgtccggacttcaaataagattttcttaccaattccggactttacaaaattccctttgaagagtaaaatttatttggatgatgcaatgttagccattgaagtcctggaaacttcgaaatgtgaatgcacgggtagagctatgaattcccacagattaaaaaataataaaaaagcatctcttcctggtcttgtattcgaagataatgaatcagaggctagagacaaaaaagatttcgaaatcattttaaaacacaaaattgatgttgtttttgcttcgttcattaacagcagaaaagaagttgagtctttaaaaaagttaattggatctgaggatgttttaattttttctaaaatagaaacactaagaggagttgaaaatattgatgaaataattgaagttagtgacggaattatgatcgctaggggagacctgggtgttgagatgacagcctcaaaaatgtttagtacacaaaaaaaaattacgataaaatgtcgagaagccaagaagcccgtgatttgtgctactcaaatgctggagacaatgattcaaaatcccgtgccttcccgtgccgaaatcacagacgtaggaaatgccgtcttcgatcaatttgatggccttcttttgagtggggaaactgcagtagggaaatttcctacgttgacagtccggacaatgagaaaaattattgaagatgccgaggcttaccactttgaaatttcagatcataaaaataggtgtcctctactaggaacaaggattaaggaatcctgtgctgtaattagatgcccggatctagcgactatctttggtctttacagtaatcactttgagatccctgtttactttgtctccaaagaagtccaaaatttcaggtgtctccacatgctcaggggagttattccgtacgaaattaaagaagatgaagatattattaaggtagtagatcaaattaaggacaagtttaattataaaaaaatttatttctttgaaatgcaagggaatgatgaagttatgagtaagttacgggtattcaaataa

SEQ ID NO: 406 - protein, 441 aa, Nosema bombycis
MFPTMTKIIVTVSSVSDDEETLTNFLKEGVHIFRINLSHGTSYQHEHSILNIRKCAKEMGIVPVICLDTRGPEVRIEIAERSEIPLKEGDKITFSNVRTSNKIFLPIPDFTKFPLKSKIYLDDAMLAIEVLETSKCECTGRAMNSHRLKNNKKASLPGLVFEDNESEARDKKDFEIILKHKIDVVFASFINSRKEVESLKKLIGSEDVLIFSKIETLRGVENIDEIIEVSDGIMIARGDLGVEMTASKMFSTQKKITIKCREAKKPVICATQMLETMIQNPVPSRAEITDVGNAVFDQFDGLLLSGETAVGKFPTLTVRTMRKIIEDAEAYHFEISDHKNRCPLLGTRIKESCAVIRCPDLATIFGLYSNHFEIPVYFVSKEVQNFRCLHMLRGVIPYEIKEDEDIIKVVDQIKDKFNYKKIYFFEMQGNDEVMSKLRVFK

SEQ ID NO: 407 - DNA, 1755 bp, Bacillus subtilis
  CDS (1)..(1755): transl_table=11
atgagaaaaactaaaattgtttgtaccatcggtccggcaagtgaaagtattgaaatgcttacgaaattaatggagtcaggaatgaacgtggctcgattaaacttttctcacggagattttcaggagcacggtgcaagaattaaaaatatccgcgaggcagctgaaaaacttggcaagaacgttggaattctgcttgatacaaagggtcctgaaatccgcacacatacaatggaaaacggttccatagagctgaacgcaggaagcaaactcgtaataagcatgacggaggtgataggaacaccagataaaatttcagtgacatatgaaggtttagtccatgacgttaacaaaggttcaacgattctgttagatgacggccttatcggtcttgaggtacttgatgtagatgccgtaaaacgcgaaatcaaaacaaaagtattaaacaacggaacactcaaaaataaaaaaggtgttaacgtacccgggcgtaagtgtcaatcttccgggattactgaaaaggatgcgcgagacatcgttttcggtattgagcaaggagtagacttcatcgcaccatctttcattcgacgttctacggatgtgctcgaaatccgtgagcttcttgaagagcacaacgctcaggatattcaaatcatccctaaaatcgaaaaccaagagggcgttgacaacatcgatgcgattctcgaagtgtctgacggcttaatggttgcacgcggagacttaggtgtggaaattccagctgaagaagtgccgcttgtgcaaaaagaactgatcaaaaaatgcaacgcgctgggcaaacctgttattacagcgacacaaatgcttgacagcatgcagcgcaacccgcgtccgactcgtgcggaagcaagtgacgttgcaaacgcgatcttcgacggaacagatgcgatcatgctatctggtgaaactgctgccggaagctatccggttgaagcagttcaaacaatgcataacatcgcgtcccgttctgaagaagctttaaattataaagaaattctctcaaaacgcagagatcaagtgggcatgacaattacagacgcaattggacaatctgtcgcgcatacggcgattaacctgaatgctgcgatcgtaacgccgacagaaagcggccatacagcacgtatgattgcaaaataccgtccgcaggctccgattgttgcggttactgtaaatgactctatttccagaaagcttgccctcgtatctggcgtattcgcggaaagcggccaaaatgcgagctcaacagatgagatgcttgaggatgctgtccaaaaatcattgaacagcggaattgtaaaacacggcgatcttatcgttattacagcaggcactgtcggtgagtccggcactacgaatttgatgaaggttcatactgtcggtgatatcatcgctaaaggccaaggcattggacgcaaatcagcttacggtccggtcgtcgttgcacaaaatgcaaaagaagctgagcaaaaaatgactgacggtgcggtacttgttaccaaaagcactgaccgtgatatgattacatcccttgaaaaagcgtctgctcttattacagaagaaggcggtttgactagccatgcggcggtagtcggattaagccttggcatcccggttatcgtgggtctggaaaatgcgacatctattttgacagatggccaggatattacagttgacgcttccagaggtgcagtctatcaaggccgtgcgagcgttctttaa

SEQ ID NO: 408 - protein, 584 aa, Bacillus subtilis
MRKTKIVCTIGPASESIEMLTKLMESGMNVARLNFSHGDFQEHGARIKNIREAAEKLGKNVGILLDTKGPEIRTHTMENGSIELNAGSKLVISMTEVIGTPDKISVTYEGLVHDVNKGSTILLDDGLIGLEVLDVDAVKREIKTKVLNNGTLKNKKGVNVPGRKCQSSGITEKDARDIVFGIEQGVDFIAPSFIRRSTDVLEIRELLEEHNAQDIQIIPKIENQEGVDNIDAILEVSDGLMVARGDLGVEIPAEEVPLVQKELIKKCNALGKPVITATQMLDSMQRNPRPTRAEASDVANAIFDGTDAIMLSGETAAGSYPVEAVQTMHNIASRSEEALNYKEILSKRRDQVGMTITDAIGQSVAHTAINLNAAIVTPTESGHTARMIAKYRPQAPIVAVTVNDSISRKLALVSGVFAESGQNASSTDEMLEDAVQKSLNSGIVKHGDLIVITAGTVGESGTTNLMKVHTVGDIIAKGQGIGRKSAYGPVVVAQNAKEAEQKMTDGAVLVTKSTDRDMITSLEKASALITEEGGLTSHAAVVGLSLGIPVIVGLENATSILTDGQDITVDASRGAVYQGRASVL

SEQ ID NO: 409 - DNA, 1428 bp, Zymomonas mobilis
  CDS (1)..(1428): transl_table=11
ttgactgaaggacttttcccacgcggccgcaaggtacgtgttgtttctacgctgggtcctgccagctcgacggcagaacagattcgtgatcgtttcttggctggtgcggatgtattccgtatcaacatgagccatggtacccatgacgaaaagaaggtcatcgttgacaacattcgtgcgcttgaaaaagaattcaaccgcccgaccacgatccttttcgatcttcagggtccgaagctccgcgttggtgacttcaaagaaggcaaggttcagttgaaagaaggccagaccttcactttcgatcaggacccaactctcggtgacgaaacccgcgtcaacctgccgcatcctgaaatcttcaaggctttagacaaaggtcatcgcctgcttttggatgatggtaagatcgttgttcgttgcgtcgaatcttccccgaccaaaatcgttacccgcgtcgaagttccgggtccgctttccgaccataaaggtttcaacgttcctgacgttgtgattccgctggccgctctgaccccgaaagatcgcaaagatctcgactttgctcttaaggaaaaagctgactgggttgctcttagctttgtgcagcgcgtcgaagacgtcatcgaagccaaagaactcatcaaaggtcgcgcaccgcttctcgttaaactcgaaaagccagctgccattgaaaacctcgaatccatcttggctgcaaccgatgctgtcatggttgctcgtggtgacctcggtgttgaatgcttgccggaatccgttcccccgacgcagaagcgtatcgttgaacgctcccgccagctgggtaagccggttgttgttgcaaccgctatgctcgaatccatgatcaaagctccggctccgacccgcgctgaagtaagtgacgttgcaaacgccatttacgaaggtgctgatggtatcatgctttctgcagaatccgccgccggtgattggccgcatgaagctgtcaacatgatgcatcgtattgcttcttatgttgaaaatgctccgggttacatcgaacgcgttcgcttcaccccgactccggcagaaccgacgacggttgacgctctggctgaaaacgccagcaaaaccgctgaaacggttggcgcaaaagcgatcatcgtcttcaccgaaaccggtaagaccgcacagcgcgtttcccgcgcccgtccggttgctccgatcctgtctctgaccccggatgccgaagttgctcgtcgtcttggtttggtctggggcgcacagccggttcaggtttccacggttaagaccctcgacgaagccaagaagctggctgctgaaaccgctaaaaaatacggtttcgccaaagccggtgacaagctggttgttgttgcaggtgaacctttcggtaaagctggaaccaccaacattgttgatgttatcgaagcctaa

SEQ ID NO: 410 - protein, 475 aa, Zymomonas mobilis
MTEGLFPRGRKVRVVSTLGPASSTAEQIRDRFLAGADVFRINMSHGTHDEKKVIVDNIRALEKEFNRPTTILFDLQGPKLRVGDFKEGKVQLKEGQTFTFDQDPTLGDETRVNLPHPEIFKALDKGHRLLLDDGKIVVRCVESSPTKIVTRVEVPGPLSDHKGFNVPDVVIPLAALTPKDRKDLDFALKEKADWVALSFVQRVEDVIEAKELIKGRAPLLVKLEKPAAIENLESILAATDAVMVARGDLGVECLPESVPPTQKRIVERSRQLGKPVVVATAMLESMIKAPAPTRAEVSDVANAIYEGADGIMLSAESAAGDWPHEAVNMMHRIASYVENAPGYIERVRFTPTPAEPTTVDALAENASKTAETVGAKAIIVFTETGKTAQRVSRARPVAPILSLTPDAEVARRLGLVWGAQPVQVSTVKTLDEAKKLAAETAKKYGFAKAGDKLVVVAGEPFGKAGTTNIVDVIEA

SEQ ID NO: 411 - DNA, 2100 bp, Ostreococcus tauri
  CDS (1)..(2100)
atgagcgggttgagctcgaacacggcgctgagcgcgttattaggctcgcgagggcacgggacggcgcaacacattctggagaatgggcacgtgcgggcgctgagtgagagcgcggaggggatgtttcgcgagcgggatagtcacaggattgggttcaagtcgaagatcatctgcacgctcggaccggtttcgaggacggtggagattttggagaagatgttgcgagccggaatgtccatcgcgcgattcaacttctctcacggctcgcacgagtaccaccaggagactttggataatctcagacttgcgtgcgcgaatactggagtggattgtgcgattttactcgacacgaagggaccggagattcgcaccggtatgctcgacggcggcggccccatcatgttggaagtcggcaacgagatcacgttgaccacggattacgacttcaagggtagcgcggagaagatcgcggtatcgtacccggatttggcgaaggatgtcaagcctggatcgaagattttgtgcgccgacggctcggtgacgttcaccgtgctcgagtgcgacgtcgccaagggcgaggtgcgatgtaagctcgaaaacagcgccaagctcggcgagcgcaagaacatgaacttaccgggcgtcgtcgtgaacttgccgacgatcaccgagaaggatcgccatgacttgatcgagtggggcgtgaagaaccaagtcgatttcatcgccgcctccttcgttcgcaagggcagcgacgtggagtacattcgcagcgtcttgggcgactttgcgagcaaggtgtccatcatctccaaggttgaaaacatggagggtctggacaactttgaagacatcgtggaagcctccgacggtgtcatggtcgctcgcggtgatttgggcatggagatccgcatggaacagattttcttggctcaaaagcgcatgattaagcgatgtaatctggcgggcaaacccgtcgtgacggctacgcaaatgttggagtccatgactggcgctccgcgaccgactcgcgctgaggcgacggacgtcgcgaacgccattctcgatggcaccgacgccgtgatgctttcgggcgaaaccgcagcgggctcgtaccctctggatgcggtgaagtgcatggcgtccatctgccgcgaagccgaggcgtacgtcaacgatgtcgccgactacttccaaatcctcgagcaacaaatggtcccgctcggggtgacggaggccatggcatcctcggcggtgcgtacggcgcaaaaggtcaacgcctcgctcatcattaccctctcacgcaccggtcacacggctcagatgatcgcaaagtaccgtcccgctatgcgcatcattaacgtgtgcatggacgacgctgggtttccgggtcgcgccctggaagtatctcgtcggtcgctcataacccgcggactcgttcctctgctagaacacccagcatggcgtggcgagagcggccacccgcaagaggtcatgcgcaatgccatcatatactgccgagacgtcctcggcttggtcaaagctggcgacgccgtaatcggagtccacagaatcatgggcgaggcagtcttaaaggtcgtcatccacagcagattagaaggccacaacagtcacagtcatccgcgcgcgaggtctccgcccgagcgtcccaagattcccaaaatctcaaaccgtcagggcaaaaccagactggcgaagtactacgtcccgctcgacgacgacgagaaacgccgagtcgagagcgacgtccatcgattggtcgtcaacagagaccccaagcacaccaacatctgcgagttccgtgggaactcgaagattgtctatcggagatacgccggactattcttctcgttgtgcgtcgacctgaacgataacgagctgacgcacctggagtcgattcacctattcgtggagatgctcgatcacttcttcgcaaacgtgtgcgagttggacttggtgtttaactttcagaaagtgtatctgttggtggatgagttcattctggggggagaagtgcaagatacgagtaagcgggcgatcatggagcgcttggcggagctcgagcggttgaaggattga

SEQ ID NO: 412 - protein, 699 aa, Ostreococcus tauri
MSGLSSNTALSALLGSRGHGTAQHILENGHVRALSESAEGMFRERDSHRIGFKSKIICTLGPVSRTVEILEKMLRAGMSIARFNFSHGSHEYHQETLDNLRLACANTGVDCAILLDTKGPEIRTGMLDGGGPIMLEVGNEITLTTDYDFKGSAEKIAVSYPDLAKDVKPGSKILCADGSVTFTVLECDVAKGEVRCKLENSAKLGERKNMNLPGVVVNLPTITEKDRHDLIEWGVKNQVDFIAASFVRKGSDVEYIRSVLGDFASKVSIISKVENMEGLDNFEDIVEASDGVMVARGDLGMEIRMEQIFLAQKRMIKRCNLAGKPVVTATQMLESMTGAPRPTRAEATDVANAILDGTDAVMLSGETAAGSYPLDAVKCMASICREAEAYVNDVADYFQILEQQMVPLGVTEAMASSAVRTAQKVNASLIITLSRTGHTAQMIAKYRPAMRIINVCMDDAGFPGRALEVSRRSLITRGLVPLLEHPAWRGESGHPQEVMRNAIIYCRDVLGLVKAGDAVIGVHRIMGEAVLKVVIHSRLEGHNSHSHPRARSPPERPKIPKISNRQGKTRLAKYYVPLDDDEKRRVESDVHRLVVNRDPKHTNICEFRGNSKIVYRRYAGLFFSLCVDLNDNELTHLESIHLFVEMLDHFFANVCELDLVFNFQKVYLLVDEFILGGEVQDTSKRAIMERLAELERLKD

SEQ ID NO: 413 - DNA, 1692 bp, Crassostrea gigas
  CDS (1)..(1692)
atggtgagtttaacatctaagaagattgaagcggcaggcgtggctactatcgacagctgtcagcttctggccgcagccgacgcaatgtctcatctgctgctcatgtgtaagctggacatcgactccaacccacgcgatgtctctatgacaggcatcatctgtactattgttccggcttgcagagaaattgacacgttacagaagatggtgattgaaggaatgaatgttgctcgccttaacttctcacacggaacccacgagtaccacgaggggaccatcaagaacatccgggaggcggtgaaggggttcagctccccccgccccctagcgatcgccctggacaccaaggggccagaaatcaggaccggactcctggaggggggagcctcagcggaattaacactgaacacaggggacaagatcaagatcacgacggacgacaagttcaaggagaagtgtagcaaggacacgctgtgggtcgactacaagaacatcaccaaggtcatgtccgtgggctccaggatgttcatcgacgacggactcatctccgtcatcgtcaaggaaatgggtgctgactatattaactgtgtggtggagaatgggggcgacctgggcagtaagaagggctgtaacctccccgggatagccgttgacctccccgccgtctcaaccaaggacaaggaggacctattgtttggtgtcgctcaaggggtggacatgattttcgcgtccttcatcagaagcggtcagcacatcaaagacatcaggtctatcctaggagagaaaggaaagaacatcaagatcatcgccaagatagagaaccatgaaggagtcaaacgatttgacgagatcctgcaggagtcggatggtatcatggtggccagaggtgaccttggcattgagattcccccagagaaggtgttcctggcccagaagatgatgattggtcgatgtaacagggcggggaaacccgtcatctgtgccacacagatgttggagtcgatggtgaagaagccccgccccacgagggcagagtccagcgatgtggccaatgccgtgctagacggggccgactgtgtcatgttgtcaggggaaactgccaagggagactacccactggagtgtgtcaaaatgatgcagaagatttgccgggaagctgagtccgcagtcttccaccaccagctgtttgaggaactccgtaaggagacccccacccccacagacgccacccataccgtcgccatagcagcagtggaggcctcgttcaagtgtatggccgccgccatcattgttatcactacctcaggaaggtcggcccatctgatctcagcgtacaggccccgctgtccaatcctggccatcacaaggatagaacagacagctcgtcagtgtcatctcttcaggggcatcttccctatccactatgtggactctgtcatgagcgaatggaccgtcgatgttgacaggaggatctacaaaggaatccagagtggtatggatcgtggatttatccagaagggagatccggtcatcatcattacaggctggaagcccggatccggatccacaaacaccatgcggatcatcaacgctgtggatgtggctaacaaagacctactggcccccatcacaggaataactagtgtgccgagtttcgacaagatagagagtgatttgtctataatcttctga

SEQ ID NO: 414 - protein, 563 aa, Crassostrea gigas
MVSLTSKKIEAAGVATIDSCQLLAAADAMSHLLLMCKLDIDSNPRDVSMTGIICTIVPACREIDTLQKMVIEGMNVARLNFSHGTHEYHEGTIKNIREAVKGFSSPRPLAIALDTKGPEIRTGLLEGGASAELTLNTGDKIKITTDDKFKEKCSKDTLWVDYKNITKVMSVGSRMFIDDGLISVIVKEMGADYINCVVENGGDLGSKKGCNLPGIAVDLPAVSTKDKEDLLFGVAQGVDMIFASFIRSGQHIKDIRSILGEKGKNIKIIAKIENHEGVKRFDEILQESDGIMVARGDLGIEIPPEKVFLAQKMMIGRCNRAGKPVICATQMLESMVKKPRPTRAESSDVANAVLDGADCVMLSGETAKGDYPLECVKMMQKICREAESAVFHHQLFEELRKETPTPTDATHTVAIAAVEASFKCMAAAIIVITTSGRSAHLISAYRPRCPILAITRIEQTARQCHLFRGIFPIHYVDSVMSEWTVDVDRRIYKGIQSGMDRGFIQKGDPVIIITGWKPGSGSTNTMRIINAVDVANKDLLAPITGITSVPSFDKIESDLSIIF

SEQ ID NO: 415 - DNA, 1437 bp, Spiroplasma citri
  CDS (1)..(1437): transl_table=4
atggataaatttaatattaacgagaaaatgaaaagaacgaaaattattacaacaattgggccaagtacacattcaccgggtgccattgaagaattgtttaaaacaggaatgacaacaattcgcttaaacttttcacatggagatcatgctgaacaaggagcacgaattgtatgagcacgagaagttagtgctaaaattggaaaaccaatttcagtgttattagatacgaaaggaccagaaattcgtgctggaataatgaaaggtgggaaacaagaaattgttgctggagcaacagttacgatttattcattaccaacagaatatcaaaaccgtgaaggaactggaacagaaatcactgtttcatatgatatgtcacaagatttaaaagttggtgatgtggtgctagttgatgatggaaaattacagttaaatgttactggtattaaaccaggcattattgaaacaaaagctttcaaccatcatattgttaaaacaaacaaacgaattaatttaccaggggttgactttacattaccatttttagctgaaaaagatattaatgatattaaatttggagttgaacaagggattgactatattgcagcatcatttgttaacacagctggtaatatcaaagaaattcgcaaattattaaaagagtgtaaagctgaacatgttcaaattattgccaaaattgaatcacaaattggaattaataatattgatgaaattattgccgccgctgatggaattatggttgcacgaggagatttaggtttagaaattccttattatgatgttccatattgagaaaaaattattattcgtaaatgtcgtgaagcagggaaaattgttattgttgcaacacaaatgttagaaacaatgacagaaaatccatcaccaacgcgagcagaagtaactgatgtttattttgcaacagaattaggttctgatgcaacgatgttatcaggtgaatcagcaaatggtgattatccgtttattgctgttcatacaatggcaatgattaacaaacgagcagagcatgaattttattcaaaattgtactatgaaaagcaattagaagacgctatgaattcaacaacaggcccacgcgctgatattgctaaaaaattagcaaataaatgtaaagatggaaaatatgagtatgccgttgttgtctcaaatacaggggaattattaaaaacaatttcaaaattccgcccaaatgtggtaattttaggagttagtccattaccagaattatatactgcctttggatcatgacattcaatttttatgaataaagttgataattatgaagcatttaaaacagatgaaaaagcaatttgtgaagtggcaaaaaaatgaggggcaaaaattggttcaacaattctatttgctcgcaatgaagaaattaaagaaattacaattaaataa

SEQ ID NO: 416 - protein, 478 aa, Spiroplasma citri
MDKFNINEKMKRTKIITTIGPSTHSPGAIEELFKTGMTTIRLNFSHGDHAEQGARIVWAREVSAKIGKPISVLLDTKGPEIRAGIMKGGKQEIVAGATVTIYSLPTEYQNREGTGTEITVSYDMSQDLKVGDVVLVDDGKLQLNVTGIKPGIIETKAFNHHIVKTNKRINLPGVDFTLPFLAEKDINDIKFGVEQGIDYIAASFVNTAGNIKEIRKLLKECKAEHVQIIAKIESQIGINNIDEIIAAADGIMVARGDLGLEIPYYDVPYWEKIIIRKCREAGKIVIVATQMLETMTENPSPTRAEVTDVYFATELGSDATMLSGESANGDYPFIAVHTMAMINKRAEHEFYSKLYYEKQLEDAMNSTTGPRADIAKKLANKCKDGKYEYAVVVSNTGELLKTISKFRPNVVILGVSPLPELYTAFGSWHSIFMNKVDNYEAFKTDEKAICEVAKKWGAKIGSTILFARNEEIKEITIK

SEQ ID NO: 417 - DNA, 1536 bp, Capsicum annuum
  CDS (1)..(1536)
atggccaacatagacatagctggaatcatgaaggatctccccaatgatggccgtgtcccaaagaccaagattgtttgcactttagggccatcttctagatcagtgccaatgttagagaagcttcttcgtgctggcatgaatgttgccaggtttaacttttcccatgggacccacgagtaccatcaggagacattgaacaatcttaagattgcaatgcagaatactcagattctatgtgctgtcatgcttgataccaaggggcctgagattcgaactggttttttaaaggatggaaaaccgattcagcttaaggaaggccaagaaatcactgtatccacagactataccataaaaggaaatgtagaaatgatctcaatgagctataagaagttggtagtggacttgaagcctggaaataccatcctgtgtgcagatggtacaattacccttactgttttgtcatgtgatccagcggcgggaacggtgagatgtcgctgcgagaacactgccaccttaggagagaggaagaatgtgaaccttccaggtgtggttgttgaccttccaacacttacggagaaggataaagaagatatactagagtggggtgttcctaacaacatcgatatgattgctctttcatttgtgcgcaagggttcagatcttgtcaatgttcgcaaggttcttggtccacatgccaagcgcattcaactaatgtcaaaggttgagaatcaggagggagttgtcaacttcgatgaaatccttcgtgagacagattctttcatggttgctcgaggtgatctcggaatggagattcctgttgagaagattttcttggcccagaagatgatgatatacaagtgtaatcttgctggtaagcctgtggtaactgctactcagatgcttgaatcaatgatcaagtctccacgacccacccgtgctgaggctactgatgtggctaatgccgtcttggatggcactgactgtgttatgttaagtggggagagtgcagctggagcttatcctgagttggcggtaaaaatcatggcacgaatctgccttgaggcagagtcttcacttgagtacgaggctatcttcaaggaaatgatcaggtgtactccattgccaatgagcccattggatgagtctagcatcatcagctgtccgcacgggctaacaaagctaaagcaaaactccattgttgtccttacacgtggcgggagcacagcaaaactggttgccaagtataggcctgctgttcctattctttcagtagttgtgcctgttttgactacagattctttcgattggtccatcagtgacgagaccccagctagacacagtttggtatataggggcttgattccaattcttggtgaaggttcagcaaaagctactgattctgaatcaactgaggtaatcttggaagcttccttgaaatcagccacagagaaagggctatgccaacccggtgatgctgtcgtggcacttcatcgtattggtgctgcatctgttatcaagatttgcatcgtgaagtaa

SEQ ID NO: 418 - protein, 511 aa, Capsicum annuum
MANIDIAGIMKDLPNDGRVPKTKIVCTLGPSSRSVPMLEKLLRAGMNVARFNFSHGTHEYHQETLNNLKIAMQNTQILCAVMLDTKGPEIRTGFLKDGKPIQLKEGQEITVSTDYTIKGNVEMISMSYKKLVVDLKPGNTILCADGTITLTVLSCDPAAGTVRCRCENTATLGERKNVNLPGVVVDLPTLTEKDKEDILEWGVPNNIDMIALSFVRKGSDLVNVRKVLGPHAKRIQLMSKVENQEGVVNFDEILRETDSFMVARGDLGMEIPVEKIFLAQKMMIYKCNLAGKPVVTATQMLESMIKSPRPTRAEATDVANAVLDGTDCVMLSGESAAGAYPELAVKIMARICLEAESSLEYEAIFKEMIRCTPLPMSPLDESSIISCPHGLTKLKQNSIVVLTRGGSTAKLVAKYRPAVPILSVVVPVLTTDSFDWSISDETPARHSLVYRGLIPILGEGSAKATDSESTEVILEASLKSATEKGLCQPGDAVVALHRIGAASVIKICIVK

SEQ ID NO: 419 - DNA, 1731 bp, Medicago truncatula
  CDS (1)..(1731)
atgtctcaggttcgatccattcaaacctccttctcacgccccacttcaggatctacacatgacaggtctcaaaccttgttaaagcctccatctttttcctccaaaatcttcccacctaagtctaacaatccccccaagctttgcttcacaacctcccccatcaatgcaagaaagtcctcatctgctgaagttgtccctgtctcacccgaagacgattcaaagattgaagaggagttgcagaagttacacgttttgcaacaagttggtaatgtttctggtggaatctggtctaagccaatgattaaaagaaagactaacattgtttgtactattggtccttctactaatacaaaggaaatgatttggaaacttgctgaggctggaatgaatgttgctcgtatgaatatgtctcatggtgatcatgcttctcataagaaagttattgatttggtgaaagagtataatgcacaatctaaagataatgttattgcaatcatgcttgacaccaagggtcctgaggttaggagtggggatttaccacaaccaatcatgttaaaaactggccaggaattcacttttactatccagagcggtgttggaactgctgattgtgtcagcgtgaactatgatgattttgtcaacgatgttgaagaaggggacatgcttcttgttgatggtggtatgatgtcgttcttggttaagtccaagacagcggattccgtgaaatgcgaagttattgatggaggagagctcgcgtcacggaggcatttgaatgttagaggaaaaagtgcaacactgccttcaatcactgaaaaggattgggatgacatcaaatttggagtcgataatgaagttgatttctatgccgtttctttcgttaaggatgcacaagtagttcatgagctgaagaattatttgaaaagctgtggtgctgatatacatgtaattgtaaaaattgaaagtgcagactctataccgaacttgcattcaattattactgcatctgatggggctatggttgcaagaggagatcttggtgcagaactccctattgaggaggttccgcttttgcaggaagagataataaggatatgccgtagcatgggaaaggccgttattgtagccacaaatatgctggaaagtatgattgttcaccccacgccaaccagagcagaggtatctgatattgcaattgctgttcgagaaggttccgatggaataatgctttctggagaaactgcacatggaaagtttccaattaaagctgcgaaagtaatgcacaccgtagcattacggacagaagccgctttaccaaatgggcagatgccacctaatattggccaagtattcaagaaccacatgagcgagatgtttgcataccatgcaaccatgatgtccaatacccttggaacatcaactgttgtcttcactagatcgggtttcatggctattctattgagccattatcgacctgcaggcaccatatttgcttttactgatcagaaaagggtacaacagaggttggctttgtatcaaggtgtctgtcctatttacatggaattctctgatgatgctgaagagacattcacaaaagccttggatttgttgcagaagaatggaatggttaaagaaggagaagaagtagcccttgtacaaagtggaaggcaacctatatggaggttccattccactcacaatattcaggtccgaacagtagctgccacaaattaa

SEQ ID NO: 420 - protein, 576 aa, Medicago truncatula
MSQVRSIQTSFSRPTSGSTHDRSQTLLKPPSFSSKIFPPKSNNPPKLCFTTSPINARKSSSAEVVPVSPEDDSKIEEELQKLHVLQQVGNVSGGIWSKPMIKRKTNIVCTIGPSTNTKEMIWKLAEAGMNVARMNMSHGDHASHKKVIDLVKEYNAQSKDNVIAIMLDTKGPEVRSGDLPQPIMLKTGQEFTFTIQSGVGTADCVSVNYDDFVNDVEEGDMLLVDGGMMSFLVKSKTADSVKCEVIDGGELASRRHLNVRGKSATLPSITEKDWDDIKFGVDNEVDFYAVSFVKDAQVVHELKNYLKSCGADIHVIVKIESADSIPNLHSIITASDGAMVARGDLGAELPIEEVPLLQEEIIRICRSMGKAVIVATNMLESMIVHPTPTRAEVSDIAIAVREGSDGIMLSGETAHGKFPIKAAKVMHTVALRTEAALPNGQMPPNIGQVFKNHMSEMFAYHATMMSNTLGTSTVVFTRSGFMAILLSHYRPAGTIFAFTDQKRVQQRLALYQGVCPIYMEFSDDAEETFTKALDLLQKNGMVKEGEEVALVQSGRQPIWRFHSTHNIQVRTVAATN

SEQ ID NO: 421 - DNA, 1590 bp, Medicago truncatula
  CDS (1)..(1590)
atgccttccagtcacttgcttctcgaggaaccaattaggatggcttccatcctagaaccatcaaaagccagctttttttctgcaatgacaaagattgttggaacattgggtcctaaatctcgatctgttgagactatttctggatgtcttaaagctggcatgtctgtggctcgttttgatttttcatggtgtgatcctgagtatcatcaggaaactttggagaatttgaagactgctattaagggtactaagaagctatgtgctgttatgctggatacagtgggtgcagagatgcaggttgttaacaaaagtgagacaactatctcacttgagatagatgctcaggttgttctaacccccaaccagggacaagaagcttcttcagagatattgccaatcaactttgatggactggcccaggcagtgaagacgggagacactatttttattggtcaatacttgttcacaggaagtgaaactacttctgtatggcttgaggtatctgaagtcaaagggaacgatgttgtgtgtattataaagaattcagctacattgaccgggtcattgttcactttgcatgcctctcaaattcacattgatctacctacccttacggagaaagacaaggaggttataagcacctggggagttaaaaacaaaattgattttctgtcattgtcatatactaggcatgctaaagatgtccgcgaggctcgggacttcctttcaaagttaggcgatcttagccagacacaaatttttgcgaagattgaaaatgttgagggattgacccattttgatgagattctgcaagaagctgatggtattattctttctcgtggaaatttgggcattgatcttccaccagagaaggtttttctatttcaaaaatctgccctacacaagtgtaatatggctgggaaacctgctgtgcttacacgtgttgtggacagtatgactgataacttaagaccaactcgtgctgaagccactgatgttgccaatgctgttctagatggaagtgatgcaattcttctgggtgccgagactttacgtggattgtaccctgttgagactatttctactgttggtaggatttgttcagaggctgagaaagttttcaatcaagacctttattttaagaggacagtcaaatatgttggagaacccatgacccacttggaatctattgcatcctctgcggtacgggctgctattaaggtgaaggcttccattataatttgcttcacttcatctggaagggctgcaagattgattgcaaagtataggccgacaatgcctgttctctctgtggtgatcccccgacttaagacaaatcagctaaagtggagcttcagtggagcttttgaggcaaggcaatcacttattgtaagaggtctctttcccatgcttgctgatcctcgtcatcctgctgagtctgagacaacaactgcatcaaatgaatctattcttaaggttgcccttgatcatggaaaagcattgggagttataaagtcacacgaccgtgttgttgtttgtcagaaactcggcgatgcatcagtggttaagattattgagcttgaagattaa

SEQ ID NO: 422 - protein, 529 aa, Medicago truncatula
MPSSHLLLEEPIRMASILEPSKASFFSAMTKIVGTLGPKSRSVETISGCLKAGMSVARFDFSWCDPEYHQETLENLKTAIKGTKKLCAVMLDTVGAEMQVVNKSETTISLEIDAQVVLTPNQGQEASSEILPINFDGLAQAVKTGDTIFIGQYLFTGSETTSVWLEVSEVKGNDVVCIIKNSATLTGSLFTLHASQIHIDLPTLTEKDKEVISTWGVKNKIDFLSLSYTRHAKDVREARDFLSKLGDLSQTQIFAKIENVEGLTHFDEILQEADGIILSRGNLGIDLPPEKVFLFQKSALHKCNMAGKPAVLTRVVDSMTDNLRPTRAEATDVANAVLDGSDAILLGAETLRGLYPVETISTVGRICSEAEKVFNQDLYFKRTVKYVGEPMTHLESIASSAVRAAIKVKASIIICFTSSGRAARLIAKYRPTMPVLSVVIPRLKTNQLKWSFSGAFEARQSLIVRGLFPMLADPRHPAESETTTASNESILKVALDHGKALGVIKSHDRVVVCQKLGDASVVKIIELED

SEQ ID NO: 423 - DNA, 1437 bp, Nitrosovibrio sp
  CDS (1)..(1437): transl_table=11
atgatccgaagaacaaaaatagttgccaccctcggtcctgcatccagcgaccccaagacgctcgagcgcatgatccatgccggagtggatgttgtccgcatcaacttctcccacggcagccgggaagagcatatcgcgctggcggagctgacgcgctcgctggcacgttccgccggccacacggtgggcgtgttggcggacctgcaggggccgaaaatccgcatcggcaggtttgagcacggaaaaatcacgctcaaggccggcgacaagttcgtgctggatgccgaatgcgaactcggcaatcaggagcgggtgggactggattacaaggagctgcctaacgacgtggaaaccggctcgacgctgatgctggacgatggtcgcatcgtgctgggcgttgccaacgtcaaggggcggcaggtgtactgcgtggtggaacagggcggggtcctgtccaacaacaagggcatcaaccgcaaaggcggcgggctgagcgcgcccgcgctcaccaaaaaagacatggacgatatccggacagccgccgtgctcaaggcggattatctggccgtgtcctttccgcgctcgggcgatgacatacgctgggcgcgcgacttgatgcgcgaagccggcggcaaaagcctgctgatggcgaaaattgagcgttccgaggcaatccccgcgctgaatgacatactgcaggcttctgacgcgatcatggtggcgcgcggcgacctggcggtggaagtgggcgatgctgtcgtgccggcgctgcaaaagcagatgatacgcgccgctcgcgccgccaacaaactggtggtgacccccacgcagatgatggaatcaatgatcaccagcccgattccgacccgggcggaattgtccgacgtcgccaatgccgtgctggacggaaccgatgcggtcatgctgtcggcggaatccgctgccggccaatacccggtcgagtcggtcgaggcgatggccagggtgtgcctcgaggcggaaaaggaatatctggtgacgcaggagttgcggcgcatgccggacaccgtgccggaaacgatcgaggaagcgattgcccgggcgaccatgttcaccgccggtagcctgaagatccgcgcgattgccgcgctcactcatagcggcgtgaccgcactgctgatgtcgcgcaggagcaccaacgtgccgatcttcgcgttaagcccgcaggaggacacgcgccgcaagacgacgctgtttcacggcgtctatccgatgaaattcggcggcgaccagagtgatcccgagattatcctgaatcaggctgaagacgaactgctcaagcgcggcgcggtgcacatcggtgatctgatcgtgatgaccatcggcgaaccggtcggcaaggcaggcggcaccaatgccatgaagatcgtcaaagtgggggaatacagaaaggcttga

SEQ ID NO: 424 - protein, 478 aa, Nitrosovibrio sp
MIRRTKIVATLGPASSDPKTLERMIHAGVDVVRINFSHGSREEHIALAELTRSLARSAGHTVGVLADLQGPKIRIGRFEHGKITLKAGDKFVLDAECELGNQERVGLDYKELPNDVETGSTLMLDDGRIVLGVANVKGRQVYCVVEQGGVLSNNKGINRKGGGLSAPALTKKDMDDIRTAAVLKADYLAVSFPRSGDDIRWARDLMREAGGKSLLMAKIERSEAIPALNDILQASDAIMVARGDLAVEVGDAVVPALQKQMIRAARAANKLVVTPTQMMESMITSPIPTRAELSDVANAVLDGTDAVMLSAESAAGQYPVESVEAMARVCLEAEKEYLVTQELRRMPDTVPETIEEAIARATMFTAGSLKIRAIAALTHSGVTALLMSRRSTNVPIFALSPQEDTRRKTTLFHGVYPMKFGGDQSDPEIILNQAEDELLKRGAVHIGDLIVMTIGEPVGKAGGTNAMKIVKVGEYRKA

SEQ ID NO: 425 - DNA, 1620 bp, Phaeodactylum tricornutum
  CDS (1)..(1620)
atgggcacatatcctgccggagtgtgttatgctgtcgtgtatctcaacgggcgttatcgttcgtatctcgtccttaccattacgggcgctcggctcgatcactcactgcttcctactatgttccagggacctgcttgttggagcgaagaaggcctcggccagctcatggacgccggcatgaatgtggctcgcttcaacttttcccacggcgatcacgaaggacacggaaaagtcctcgaacgtttgcgcaaggttgccaaggaaaagaagcgcaacattgcggtgctcttggacaccaagggtccggaaattcgcacgggattctttgccgacggcattgacaagattaacctgtccaagggagacacgatcgtactgaccacggactatgacttcaagggcgatagcaagcgtttggcgtgcagttaccccacgctagccaagtccgttacccagggacaagccattcttattgccgacggatcactcgttttgaccgtcttgagcatcgacacggctaataacgaagtgcagtgtcgcgtcgagaacaacgcttccattggcgaacgcaaaaacatgaatttgcccggagttgtcgtcgatttacccaccttcaccgaacgtgacgtcaacgatatcgtcaattttggtatcaagaacaaggtagactttatcgctgcttcttttgttcgcaagggaagtgacgtgaccaacctgcgcaagctcctcgccgacaatggcggtccacagatcaaaatcatttgtaagattgagaatcaagaaggcctcgagaactacggagacattctggagcacacggatgccatcatggtggcccgcggtgatctcggtatggaaattccttcgtccaaggtatttctggcgcaaaagtacatgattcgcgaagccaacgttgcgggcaagcccgttgtcactgccacgcaaatgctcgaaagtatggtgaccaacccgcgtcctacgcgtgccgaatgttccgacgttgccaacgccgtttacgacggcaccgacgccgttatgctgtcgggagaaaccgccaacggtccacactttgaaaaggccgtgctggtcatggcgcgtacgtgttgcgaagccgagtcgtcccgcaactacaacctgttgttccagtcggtccgcaactcaatcgtcattgcgcgcggtggcttgtctaccggggaatccatggccagcagtgccgtcaagtcggccctcgacattgaagccaagttgattgtggtcatgagtgaaacgggcaagatgggcaactacgtggccaaatttcgtccgggcttgagtgtcctgtgcatgacccccaacgaaacggccgcgcggcaggctagtggattgctgttgggcatgcacacggtcgtggtggattcgttggaaaaatcggaagagttggtggaagaactcaattacgaattagtgcaatccaactttctcaaacccggcgacaagatggttgtcattgccggacgcatggccggcatgaaggaacagttgcgcattgtgacgttggacgaggggaagtcgtatggtcacattgtctccggcacgagcttcttctttgaacgcacacgtctgttggactttaacgactag

SEQ ID NO: 426 - protein, 539 aa, Phaeodactylum tricornutum
MGTYPAGVCYAVVYLNGRYRSYLVLTITGARLDHSLLPTMFQGPACWSEEGLGQLMDAGMNVARFNFSHGDHEGHGKVLERLRKVAKEKKRNIAVLLDTKGPEIRTGFFADGIDKINLSKGDTIVLTTDYDFKGDSKRLACSYPTLAKSVTQGQAILIADGSLVLTVLSIDTANNEVQCRVENNASIGERKNMNLPGVVVDLPTFTERDVNDIVNFGIKNKVDFIAASFVRKGSDVTNLRKLLADNGGPQIKIICKIENQEGLENYGDILEHTDAIMVARGDLGMEIPSSKVFLAQKYMIREANVAGKPVVTATQMLESMVTNPRPTRAECSDVANAVYDGTDAVMLSGETANGPHFEKAVLVMARTCCEAESSRNYNLLFQSVRNSIVIARGGLSTGESMASSAVKSALDIEAKLIVVMSETGKMGNYVAKFRPGLSVLCMTPNETAARQASGLLLGMHTVVVDSLEKSEELVEELNYELVQSNFLKPGDKMVVIAGRMAGMKEQLRIVTLDEGKSYGHIVSGTSFFFERTRLLDFND

SEQ ID NO: 427 - DNA, 1632 bp, Phaeodactylum tricornutum
  CDS (1)..(1632)
atgtccttgtcccagagctccgacgtcccaatcctcgcgggaggttttattaccttggataccgtcaagcatcctacaaatactattaaccgtcgtaccaagattgtttgtaccattggacccgcctgctggaatgtcgatcagttggaaatactgattgaatcgggcatgaatgtggcgcgctttaacttttcgcacggtgatcatgcaggccatggcgctgttctcgaacgagtacgtcaggctgcacaaaacaagggccgaaacattgctattctattggataccaagggaccggagattcgtaccggtttttttgccaatggcgcttccaagattgaactggtcaagggcgaaacaatcgtattgacgtcggactataagttcaagggcgaccagcataagctggcttgttcctaccccgccttggcacagtctgtaacacaaggacagcaaattctagtggccgatggatcgctcgtgttaacggttctccaaacggacgaggcagccggtgaagtgtcctgccggatcgacaacaatgcatcgatgggcgaacgcaagaacatgaatttacccggggtcaaggtggacctgcccaccttcaccgaaaaggatgtggacgatatcgtcaatttcggaattaagcacaaggttgactttattgcggcctcgtttgttcgcaagcagtccgatgtggctaacttgcgccagctgctggccgaaaacggtggtcagcaaattaaaatctgttgtaaaattgagaaccaagaaggtctggaaaactacgatgcaattctgcaggcaaccgattccatcatggttgctcgcggtgatttgggtatggaaattcctccagctaaggtcttcttggcccaaaagatgatgattcgtgaagcgaacattgcgggcaagcccgtcattactgccactcaaatgttggaatcaatgattaacaaccctcgtccgactcgtgccgagtgtagtgatgtcgccaacgcagtcttggacggcactgactgtgtaatgctttccggagaaaccgccaacggcccatactttgaagaggctgttaaagtcatggcgcgaacctgctgcgaggccgaaaactcacgcaactacaattcgttgtattctgccgtgcgttcttctgtcatggccaagtacggcagtgtaccacccgaagaatctttggctagttctgccgtcaagacggcgattgatgtcaacgctcgcttgattctagttctctccgaaagcggaatgacggctgggtatgtgagtaaattccgtccgggaagggctattgtttgcttgacaccaagtgatgccgttgctcgtcaaacgggtggaattctgaagggtgtgcactcctatgtcgtggacaacttggataacacggaagagctcatcgcggagactggcgttgaggcggtgaaggcgggcatcgctagcgtgggtgatttgatggttgtagtcagtggaactctttacggcatcggaaagaataatcaggttcgcgttagcgttatcgaggctccggaaggtaccgtgaaggagacgccagctgcaatgaaacgccttgtatcttttgtatacgccgcggacgaaattccaggaaatgccgactag

SEQ ID NO: 428 - protein, 543 aa, Phaeodactylum tricornutum
MSLSQSSDVPILAGGFITLDTVKHPTNTINRRTKIVCTIGPACWNVDQLEILIESGMNVARFNFSHGDHAGHGAVLERVRQAAQNKGRNIAILLDTKGPEIRTGFFANGASKIELVKGETIVLTSDYKFKGDQHKLACSYPALAQSVTQGQQILVADGSLVLTVLQTDEAAGEVSCRIDNNASMGERKNMNLPGVKVDLPTFTEKDVDDIVNFGIKHKVDFIAASFVRKQSDVANLRQLLAENGGQQIKICCKIENQEGLENYDAILQATDSIMVARGDLGMEIPPAKVFLAQKMMIREANIAGKPVITATQMLESMINNPRPTRAECSDVANAVLDGTDCVMLSGETANGPYFEEAVKVMARTCCEAENSRNYNSLYSAVRSSVMAKYGSVPPEESLASSAVKTAIDVNARLILVLSESGMTAGYVSKFRPGRAIVCLTPSDAVARQTGGILKGVHSYVVDNLDNTEELIAETGVEAVKAGIASVGDLMVVVSGTLYGIGKNNQVRVSVIEAPEGTVKETPAAMKRLVSFVYAADEIPGNAD

SEQ ID NO: 429 - DNA, 1542 bp, Phaeodactylum tricornutum
  CDS (1)..(1542)
atgacggcgtctcaaaccaaaatcacggcttctggtccggaactccgcggggccaacattacgttggacaccatcatgaagaagacggacgtgtctactcgtcagaccaagatcgtttgtacgctgggtccggcgtgttgggaagtcgagcagttggaatctcttattgacgcgggcctctccattgctcgtttcaacttttctcacggagatcacgaaggacacaaggcttgtttggatcggctgcgtcaggccgcggaccacaagaaaaaacacgttgcggttatgttggacaccaaaggcccagaaattcgttccggattctttgccgatggcgccaagaaaatctccctcgtcaagggtgaaaccatcgtgcttacctcggattattccttcaaaggtgacaagcacaagctcgcctgttcgtaccctgtgttggccaagtctgttacacctggtcagcaaattctggtcgcggacggttcgctcgtcctcaccgtcctgagctgcgacgaagccgccggggaagtatcttgccgcgtcgagaacaatgcgggtattggcgagcgtaaaaatatgaaccttcccggtgttattgtcgaccttccgacattgaccgacaaggatattgacgatattcaaaactgggggattgtgaacgacattgatttcattgcggcctcgtttgttcgcaaagccagtgacgtgcacaagatccgcgaagtcctgggtgagaagggcaaaggaatcaagattatttgcaaaattgaaaaccaagaaggcatggacaattacgacgaaatccttgaagcaaccgacgccatcatggtcgcccgcggtgatctgggtatggaaatcccacccgagaaggtatttttggcacaaaagatgatgatccgacaagccaacattgccggcaagccggtagtaacggccacacagatgcttgagtccatgattaccaatccgcgcccgacccgtgccgagtgtagtgacgtggcgaacgccgtcttggacggcacggactgcgtcatgctctccggagaaaccgcgaacggcgaatacccgaccgcggccgtcaccattatgagcgaaacctgttgcgaagccgaaggggcccaaaataccaacatgctttatcaagccgtccgtaacagtaccctctcacaatatggtatcttgtccacgtccgaatccattgcgtcctccgccgccaagacggccattgatgtcggcgccaaggcaatcattgtctgttccgaatccggtatgactgccacgcaagtagccaagttccgccccggtcgtccgatccacgtgctcacgcatgatgtgcgcgtcgcccgtcagtgcagcggctacctgcgcggagcctcggtagaagtcatttccagtatggatcagatggaccccgccatcgatgcctacattgagcgctgtaaagccaatggcaaggccgttgccggtgacgcctttgtggtcgtgaccggtacggtcgctcagcgtggggccaccaatctcatgcgcgtcatgtatgcctag

SEQ ID NO: 430 - protein, 513 aa, Phaeodactylum tricornutum
MTASQTKITASGPELRGANITLDTIMKKTDVSTRQTKIVCTLGPACWEVEQLESLIDAGLSIARFNFSHGDHEGHKACLDRLRQAADHKKKHVAVMLDTKGPEIRSGFFADGAKKISLVKGETIVLTSDYSFKGDKHKLACSYPVLAKSVTPGQQILVADGSLVLTVLSCDEAAGEVSCRVENNAGIGERKNMNLPGVIVDLPTLTDKDIDDIQNWGIVNDIDFIAASFVRKASDVHKIREVLGEKGKGIKIICKIENQEGMDNYDEILEATDAIMVARGDLGMEIPPEKVFLAQKMMIRQANIAGKPVVTATQMLESMITNPRPTRAECSDVANAVLDGTDCVMLSGETANGEYPTAAVTIMSETCCEAEGAQNTNMLYQAVRNSTLSQYGILSTSESIASSAAKTAIDVGAKAIIVCSESGMTATQVAKFRPGRPIHVLTHDVRVARQCSGYLRGASVEVISSMDQMDPAIDAYIERCKANGKAVAGDAFVVVTGTVAQRGATNLMRVMYA

SEQ ID NO: 431 - DNA, 1533 bp, Solanum tuberosum
  CDS (1)..(1533)
atggccaacatagacatagctgggatcatgaaggatctcccaaatgatggccgtattccaaagaccaagattgtttgcacgctagggccatcttctagaacagtaccaatgctggagaagcttctccgtgctggcatgaacgttgccaggtttaacttttctcatgggacccatgagtaccatcaggagacattggacaatcttaagattgctatgcagaatactcagatcctgtgtgctgtcatgcttgacaccaaggggcctgagattcgtactggtttcttaacagatggaaaaccgattcagcttaaggaaggtcaagaaatcactgtatccacagactataccataaaaggaaatgaagaaatgatctcaatgagctataagaagttggtagtggacttgaagcccggcaataccatcttgtgtgcagatggtaccataacccttactgttttgtcatgtgatccaccgtctggaacggtgagatgtcgctgcgagaattctgccaccttaggagagaggaagaatgtaaaccttccaggtgtggttgtggaccttccaacacttacagagaaggataaagaagatatactagagtggggtgttcctaacaacattgatatgatagcgctttcgtttgtgcgtaagggttcagatcttgtcaatgttcgcaaggctcttggtccacatgccaagcgcattcaactaatgtcaaaggttgaaaaccaagaaggggtaatcaactttgacgaaatccttcgtgagacagattcttttatggttgctcgaggtgatctcggaatggaaattccagttgagaagattttcttggctcagaaaatgatgatatacaagtgtaatcttgctggcaaagctgtggtaactgccactcagatgcttgaatcaatgatcaagtctccacgacccacccgtgctgaggctactgatgtggctaatgctgtcttggatggcactgattgtgttatgttaagtggggagagtgcagctggtgcttatcctgagctggcagtaaaaatcatgtcacgaatttgcattgaggcagagtcttcacttgacaatgaggctatcttcaaggaaatgatcaggtgtaccccgctgccaatgagcccattggagagtcttgcatcatctgctgtccgtacagctaacaaagctagagcaaaactcattgttgtcctgacacgtggtgggagtacagcaaagctggttgccaagtataggcctgcagttcctattctgtcagtagtcgtgcctgttttgactacagactcttttgattggtccatcagcgacgagaccccagctagacacagtttagtatataggggcttgattcctcttcttggtgaaggttctgcaaaggccactgattctgaatcaactgaggtaatccttgaagcggccctgaagtctgccgtaacgagagggctatgcaaacctggtgatgctgtcgtggcacttcatcgtattggttctgcatccgttatcaagatttgcgtcttgaagtaa

SEQ ID NO: 432 - protein, 510 aa, Solanum tuberosum
MANIDIAGIMKDLPNDGRIPKTKIVCTLGPSSRTVPMLEKLLRAGMNVARFNFSHGTHEYHQETLDNLKIAMQNTQILCAVMLDTKGPEIRTGFLTDGKPIQLKEGQEITVSTDYTIKGNEEMISMSYKKLVVDLKPGNTILCADGTITLTVLSCDPPSGTVRCRCENSATLGERKNVNLPGVVVDLPTLTEKDKEDILEWGVPNNIDMIALSFVRKGSDLVNVRKALGPHAKRIQLMSKVENQEGVINFDEILRETDSFMVARGDLGMEIPVEKIFLAQKMMIYKCNLAGKAVVTATQMLESMIKSPRPTRAEATDVANAVLDGTDCVMLSGESAAGAYPELAVKIMSRICIEAESSLDNEAIFKEMIRCTPLPMSPLESLASSAVRTANKARAKLIVVLTRGGSTAKLVAKYRPAVPILSVVVPVLTTDSFDWSISDETPARHSLVYRGLIPLLGEGSAKATDSESTEVILEAALKSAVTRGLCKPGDAVVALHRIGSASVIKICVLK

SEQ ID NO: 433 - DNA, 1533 bp, Citrus sinensis
  CDS (1)..(1533)
atggcgaacatagatatagagggactcttgagagatgtgccaaatgataagcggttgccgaagacgaagattgtgtgtactttaggtcctgcttcccgttctgtgccgatgcttgagaagcttctgagggctggaatgaatgttgctcgtttcaatttctctcacggtacgcacgagtatcagcaggagactttgaacaatctcagagctgccatgcacaacacccagatcctctgtgctgtcatgctcgataccaagggacccgagattcgaactggtttccttaaggatggaaaacccatacaacttaaagaaggtcaggaaattactgtatctactgattatgacttcaagggaaatgaagaaatgatcaccatgagttacaagaagctgcctgtggatgtgaagcctggaaataccatcttgtgtgcagatggcaccataaccctgactgtcttgtcttgtgatccaaaatctggaactgtcaggtgccgttgtgagaacactgcaatgctaggcgagagaaagaatgtcaatcttcctggtgttgtggtggatctgcccacactgactgaaaaggataaagaggatatcctccgatggggtgttcctaataatatagatatgattgctctttcatttgtgcgcaagggttcagatcttgtcactgtacgtaaggtccttgggcctcatgccaaaaacatacagttaatgtctaaggttgagaaccaggagggagttgtcaacttcgatgatattttgcgtgaaactgattcatttatggttgcccgaggtgaccttggaatggagattccagttgagaagattttccttgcacaaaagatgatgatatacaagtgcaatcttgtgggcaagcctgtggtcaccgcgactcagatgcttgaatcaatgatcaagtctcctcggccaactcgtgctgaagctactgatgttgccaatgctgttcttgacggcactgattgtgtaatgcttagtggtgagagtgcagctggggcctacccggagattgctgttaagatcatgcgacgaatttgcatcgaagctgaatcctcccttgattatagggctgtgtttaaggagatgattagatcaactcctcttcctatgagcccactggagagccttgcttcatcggctgttaggacagctaacaaagctagagctaaactaattgttgttctgacacgtggtgggactacagccaagttggttgccaagtatagaccagctgttccaatcctatctgtagttgtcccagtcctaacgactgattcatttgattggacctgcagtgatgaaaccccagctaggcatagtctgatatacaggggcctgattcctatcctggcagaaggatctgctaaggccacagatgctgaatctacagaggtgatactggagggtgctctgaagtcggcaatagagaagggattgtgcagccccggtgatgctgtggtggcacttcatcgcattggagttgcttctgttatcaagatctgcatagtgaaatga

SEQ ID NO: 434 - protein, 510 aa, Citrus sinensis
MANIDIEGLLRDVPNDKRLPKTKIVCTLGPASRSVPMLEKLLRAGMNVARFNFSHGTHEYQQETLNNLRAAMHNTQILCAVMLDTKGPEIRTGFLKDGKPIQLKEGQEITVSTDYDFKGNEEMITMSYKKLPVDVKPGNTILCADGTITLTVLSCDPKSGTVRCRCENTAMLGERKNVNLPGVVVDLPTLTEKDKEDILRWGVPNNIDMIALSFVRKGSDLVTVRKVLGPHAKNIQLMSKVENQEGVVNFDDILRETDSFMVARGDLGMEIPVEKIFLAQKMMIYKCNLVGKPVVTATQMLESMIKSPRPTRAEATDVANAVLDGTDCVMLSGESAAGAYPEIAVKIMRRICIEAESSLDYRAVFKEMIRSTPLPMSPLESLASSAVRTANKARAKLIVVLTRGGTTAKLVAKYRPAVPILSVVVPVLTTDSFDWTCSDETPARHSLIYRGLIPILAEGSAKATDAESTEVILEGALKSAIEKGLCSPGDAVVALHRIGVASVIKICIVK

SEQ ID NO: 435 - DNA, 1509 bp, Glycine max
  CDS (1)..(1509)
atggctacgacgaggattgaggcagagaagaagccgaagacgaagatcgtgtgcactctgggccccgcatcacggtcggtcccaatgatcgagaagcttctgcgagcaggcatgaacgtggcgcgcttcaacttctcccatgggtcccacgagtaccaccaggaaaccctcgacaacctccgcgccgccatggagaacaccggtattctctgcgccgtcatgctcgacaccaaggggcctgagattcgaactggttttctcaaggacggtaagcctatccaactgatacaaggtaatgaaataaccatttccactgactatgacctaaagggagatgagaagacgatttgtatgagctacaaaaagctgcctgaggatgtgaggcctgggatggtcatactctgcgcggatggcaccatatcatttacagttttatcatgtgacaaacaagcgggtttggttcaatgccgatgcgagaactctgccactcttggtgagaggaagaatgttaatttgcctggagtgatagtggatctcccaactttgacagacaaagacaaggaagatatcttggcctggggagttcccaataaaattgacatgattgctctttcttttgttcgaaaaggttctgacctggtggaagtcaggaaagttctgggaaaacatgccaagaacattatgctcatgtctaaggttgaaaaccaagaaggggttgcaaattttgatgaaatccttgcaaattcagatgcatttatgacggcacgtggtgaccttggaatggaaattccaatagagaagatatttctcgcacagaaagtgatgatttacaagtgcaacatccaaggaaaaccagttgtcactgcaacccagatgttggagtcaatgatcaaatctcccaggccaaccagggccgaagctactgatgttgccaatgcagttctggatggcacagactgtgtgatgcttagtggtgaaaccgctgctggagcctatccagaccttgctgttcaaacaatggctaaaatatgcattgaagcagagagcacccttgactatggtgatgtgttcaaaaggattatggagcactcaccggtacccatgagcccattagagagtctagcttcttctgctgttagaacagccaactcggctagagcggctcttatcttggttttaactagaggagggagtactgcaaaattggtggcgaaatacaggccagggatgccaattctttccgtggttgttcccgagctcaagactgatagctttgattgggcatgcagtgatgaggcccctgcgagacatagccttatattccgcgggttggttcccgtgttgagtgcagcttctgctagagcttctcatgctgaaacaacagaagaagcaatagaattcgccatgcaacatgccaagtccaagggtctctgccacaacggggattcagtggtggcactgcatcgtgtgggcactgcatctatcatcaagatcttgactgtgaaatga

SEQ ID NO: 436 - protein, 502 aa, Glycine max
MATTRIEAEKKPKTKIVCTLGPASRSVPMIEKLLRAGMNVARFNFSHGSHEYHQETLDNLRAAMENTGILCAVMLDTKGPEIRTGFLKDGKPIQLIQGNEITISTDYDLKGDEKTICMSYKKLPEDVRPGMVILCADGTISFTVLSCDKQAGLVQCRCENSATLGERKNVNLPGVIVDLPTLTDKDKEDILAWGVPNKIDMIALSFVRKGSDLVEVRKVLGKHAKNIMLMSKVENQEGVANFDEILANSDAFMTARGDLGMEIPIEKIFLAQKVMIYKCNIQGKPVVTATQMLESMIKSPRPTRAEATDVANAVLDGTDCVMLSGETAAGAYPDLAVQTMAKICIEAESTLDYGDVFKRIMEHSPVPMSPLESLASSAVRTANSARAALILVLTRGGSTAKLVAKYRPGMPILSVVVPELKTDSFDWACSDEAPARHSLIFRGLVPVLSAASARASHAETTEEAIEFAMQHAKSKGLCHNGDSVVALHRVGTASIIKILTVK

SEQ ID NO: 437 - DNA, 1530 bp, Zea mays
  CDS (1)..(1530)
atggcggcgggcggtgagttggcgtggggggaggagcccgtggcgcggcgccggcctaagaccaagatcgtctgcacgctcggcccggcgtcgcgatccgtcgagatgatctcgcgcctgctgcgcgccgggatgtgcgtcgcgcgcttcaacttctcccatggctcccacgagtaccaccaggagacgctcgacaacctgcacgccgccatggagctcaccgggatcctctgcgccgttatgctcgacaccaagggtccagagattagaactggatttttgaaagatgggaagcctattcaattgataaaaggccaagaaatcacaatttctacagactatagcattcagggtgatgagaaaatgatatcaatgagctacaagaagcttgctgttgatctgaagccaggcagtgtcatattgtgtgctgatggtaccatcactcttactgttcttcactgtgataaagaacaaggcttggttcgctgccgctgtgagaacactttcaagcttggcgagaggaagaatgttaatcttccaggagttattgttgatctccccacactcacagacaaggacaaggaggacatccttaaatggggtgttccaaacaagattgacatgattgccttgtcatttgttcggaagggttcggatcttgtggaggttaggaaggtacttggtgagcatgccaagtccataatgctgatgtcaaaggttgagaatcaagagggagtagctaactttgatgatatcctggcaaactctgatgcttttatggtggcaagaggtgatttaggaatggaaattcctatagagaagattttctttgcacagaaggtgatgattttcaagtgcaatattcaaggcaagcctgttgtgactgcaacccagatgttggaatctatgatcaagtctcctcgccctactcgggcagaagcaacggatgttgcaaacgcagttcttgatggcacagactgtgttatgctcagtggtgagactgctgctggggcctatccagagttggcggtgcagactatggctaagatctgcctgcaagcagagtcttgcgtagaccatgctgctatttttaaatcaatcatggcttcagctccaattccaatgagtccattggagagccttggatcatcagctgttcgcacagcaaactctgccagggcagcacttatcttggtcctgaccaggggaggaactactgctaggcttgtagccaagtataggccatccatgccgattctgtccgttgtggttcctgagctgaagacagactcgttcgactgggcctgcagtgacgagggtccggcaaggcacagcctcattgtgaggggtgtcatcccaatgctgagtgccgccactgccaaggcctttgacaacgaagccactgacgaagctattggttttgccattgaaaatgcgaagacgatggggctatgcaacaccggtcaatccgttgtggccctgcaccgcatcgggatttcatccgtcatcaagcttcttactgtgaagtag

SEQ ID NO: 438 - protein, 509 aa, Zea mays
MAAGGELAWGEEPVARRRPKTKIVCTLGPASRSVEMISRLLRAGMCVARFNFSHGSHEYHQETLDNLHAAMELTGILCAVMLDTKGPEIRTGFLKDGKPIQLIKGQEITISTDYSIQGDEKMISMSYKKLAVDLKPGSVILCADGTITLTVLHCDKEQGLVRCRCENTFKLGERKNVNLPGVIVDLPTLTDKDKEDILKWGVPNKIDMIALSFVRKGSDLVEVRKVLGEHAKSIMLMSKVENQEGVANFDDILANSDAFMVARGDLGMEIPIEKIFFAQKVMIFKCNIQGKPVVTATQMLESMIKSPRPTRAEATDVANAVLDGTDCVMLSGETAAGAYPELAVQTMAKICLQAESCVDHAAIFKSIMASAPIPMSPLESLGSSAVRTANSARAALILVLTRGGTTARLVAKYRPSMPILSVVVPELKTDSFDWACSDEGPARHSLIVRGVIPMLSAATAKAFDNEATDEAIGFAIENAKTMGLCNTGQSVVALHRIGISSVIKLLTVK

SEQ ID NO: 439 - DNA, 1767 bp, Lactobacillus casei
  CDS (1)..(1767): transl_table=11
atgaaaaaaaccaagatcgtcagcacgcttggacctgcaagtaacaccactgatatcatcgttaagttgattgaagcgggtgccaacgttttccgtttcaatttctcacatggtgatcatgaagagcatttggcacggatgaacatggttcacgaagctgaaaagatcacgggtaagaccgttggtatcatgctggatacgaagggtgccgaaattcggacaactcttgaagataccccgaatggtaagatcgattttcacaccggtgacaaagttcgcatctccatggatgcaagtctgaaaggcaccaaggaaaaagttgctgttacctatcctggcctttatgatgacactcacgttggcggccatgttttgtttgatgatggcttgattgacatgaagatcaccgaaaaggacgaaaagaaccgtgaactcgttaccgttgttcaaaacgacggtgtccttggtggtaagaaaggtgtcaacgctcctggtgttgccatcaacttgcctgggattacggaaaaagactccgatgacattcgtttcggcttggacaacgggatcaacttcattgctgcttcctttgttcgtaagcctcaagacgttttagacattcgtgaactccttgaagaaaagaacgcacttaatgttcagatcttccctaagatcgaatcacaagaaggcatcgacaacattgatgacatcttgaaggtttccgatggcttaatggttgctcgtggcgacatgggtgttgaaattccatttgaacatgttccgatcgttcagaagcgcttgatcaagaagtgcaactctttgggtaagccggttatcacggctacacaaatgttggattccatgcaagaaaacccacgtcctacccgtgccgaagtaaacgacgttgccaatgccgtgtttgatggcaccgatgcaacgatgctttctggcgaatctgctaatggtgactatccggttgaatccgttgctgcaatggctcggattgacgaatacaccgaagcagcgatgatggatcaggatgccttcgcattgaaggaatacagtaacaagaacgtcaccgaagctgttggccaaagtgttgcacacacggctcgcaacttaggggttaagaccattgttgctgcgaccgaatccggctacactgcccgcatgatttccaagtatcgtccgaaggctgacattcttgccattaccttcagcgaaaagacccaacgcggcctgatggtcaactggggtgtttacccaatcattgctgaaaagcctgctaacaccgatgctatgttcgacttggcaaccaagaaggcccaagaccttggctttgctaaggaaggcgatctgatcttgatcactgccggtgttcctgttggtgaatctggcacaaccaacgtaatgaaggttcaactcattggctccaagctggttcaaggctcaggtgtcggcgacgaatccacgattggtaaggcagtcatcgcaagcaacgctcaagaagctgctgctaagatgcaaaagggtgacattctggttgttaagacgactgacaaagattacttgccagcaatcgaaaaagcagctgccttggttgttgaaaccggtggcttgaccagtcacgcagctgttgttggtattgctatgggtatcccagttgttgttggtgctgaaaatgctaccagcgtcatctccgatggccagatcattactgttgactcccgtcgtgggatcatctacaaaggtgctaccaacgccctttaa

SEQ ID NO: 440 - protein, 588 aa, Lactobacillus casei
MKKTKIVSTLGPASNTTDIIVKLIEAGANVFRFNFSHGDHEEHLARMNMVHEAEKITGKTVGIMLDTKGAEIRTTLEDTPNGKIDFHTGDKVRISMDASLKGTKEKVAVTYPGLYDDTHVGGHVLFDDGLIDMKITEKDEKNRELVTVVQNDGVLGGKKGVNAPGVAINLPGITEKDSDDIRFGLDNGINFIAASFVRKPQDVLDIRELLEEKNALNVQIFPKIESQEGIDNIDDILKVSDGLMVARGDMGVEIPFEHVPIVQKRLIKKCNSLGKPVITATQMLDSMQENPRPTRAEVNDVANAVFDGTDATMLSGESANGDYPVESVAAMARIDEYTEAAMMDQDAFALKEYSNKNVTEAVGQSVAHTARNLGVKTIVAATESGYTARMISKYRPKADILAITFSEKTQRGLMVNWGVYPIIAEKPANTDAMFDLATKKAQDLGFAKEGDLILITAGVPVGESGTTNVMKVQLIGSKLVQGSGVGDESTIGKAVIASNAQEAAAKMQKGDILVVKTTDKDYLPAIEKAAALVVETGGLTSHAAVVGIAMGIPVVVGAENATSVISDGQIITVDSRRGIIYKGATNAL

SEQ ID NO: 441 - DNA, 1521 bp, Saccharomyces bayanus
  CDS (1)..(1521)
atgccagaatcaagactgcagagactagccaacttgaaaataggcactccgcaagagcttagacggacctccattataggcaccatcgggcccaagactaatagctgcgaggcaatcaccgctttgaggaaggctgggctgaacatcatccgaatgaacttctcccacggctcttatgaattccaccaatcggtgatagacaatgccttgaagtcggaacagcaattccccggaagaccgcttgccattgctctggacaccaagggccctgagattaggacaggccgcaccccgaacgaccaggacttccacatcctcgttgaccaccagatgatcttcaccaccgacgcgaagttcgaacactcctctaatgacaaaatcatgtatatagactatgccaatttgacaaaggtaattgtgcccgggaaactcatctacgtcgatgacgggattctgtcttttaaagtgctccagatcatggacgatgccaacataagggtccaagctctcaattcgggctatatctcatcccgtaaaggtgtcaacttacccaataccgacgtggatttgccccctctttccgcaaaggatattcaggacttgcaattcggcatgcggaatggaatccacatggtgtttgcctctttcattagggcccccgaagacgtcttgaccattaggaaagtcctgggcaccgaaggcgaggacatcaaaatcatctccaagatcgaaaatcaacaaggcctggataatttcgacgaaatcctgcaagtcacagatggtgtcatgatagccaggggtgatctgggcattgagatcctggcaccagaagtgctggccattcagaaaaaactcattgccaaatgtaacgtggcgggcaaacctgtcatttgcgcgacccaaatgctggagtcaatgacctacaacccaagacccacaagggctgaagtctctgatgtcggaaacgccgttttggatggtgccgattgtgttatgttgtctggcgaaacggcaaagggcgattatccagttaatgcagtcaagataatggcggccacagctctaattgcagagagtactattgcgcatttggctctatacgatgatcttagagacgccacttctaagcccacctccactacagaaaccgttgcagccgcagccactgcagcgatcttggagcaaaatggtaaagccatcgttgtattatccactacgggaaacacagcaaggctgttgtctaagtacagaccaagttgtcctatcatactagtgacgaggcacgcaagaacggcaagaatcgcacatttatacagaggtgtttttccatttgtctttgagccaaaacggctgtacgattggggtgaagacgttcacagacgcttaaagtttggcgtggaaatggcaagatcttttggaatggttgaaagtggtgataccgttgtatccatccaaggcttcagaggcggtattggtcattcaaacaccttgcgtgtttctaccgttggtgaagagttttag

SEQ ID NO: 442 - protein, 506 aa, Saccharomyces bayanus
MPESRLQRLANLKIGTPQELRRTSIIGTIGPKTNSCEAITALRKAGLNIIRMNFSHGSYEFHQSVIDNALKSEQQFPGRPLAIALDTKGPEIRTGRTPNDQDFHILVDHQMIFTTDAKFEHSSNDKIMYIDYANLTKVIVPGKLIYVDDGILSFKVLQIMDDANIRVQALNSGYISSRKGVNLPNTDVDLPPLSAKDIQDLQFGMRNGIHMVFASFIRAPEDVLTIRKVLGTEGEDIKIISKIENQQGLDNFDEILQVTDGVMIARGDLGIEILAPEVLAIQKKLIAKCNVAGKPVICATQMLESMTYNPRPTRAEVSDVGNAVLDGADCVMLSGETAKGDYPVNAVKIMAATALIAESTIAHLALYDDLRDATSKPTSTTETVAAAATAAILEQNGKAIVVLSTTGNTARLLSKYRPSCPIILVTRHARTARIAHLYRGVFPFVFEPKRLYDWGEDVHRRLKFGVEMARSFGMVESGDTVVSIQGFRGGIGHSNTLRVSTVGEEF

SEQ ID NO: 443 - DNA, 1434 bp, Stigmatella aurantiaca
  CDS (1)..(1434): transl_table=11
atgcgacgagcaaagattgtctgcacccttggtcccgccagccagagccaggacatgttagaggccctcatcgaggccggcatggacgtggcccggttgaacttctcccacggcagtcacgagcagcacgcggagaacatcgccaaactccgcgcggcttcgctgaagcttcgcaaggcggtgggcatcctcggagacctgcaaggaccgaagatccgcacgggccgcttcatcaccggcagcacggtgctgaaggaaggcgccatcttttccatcaccaccgacgagagcgtgaagggcaacgacgacatcgtgtccaccacgtacgcgcacctggcggcggacgtgaatcccggggaccgcatcctcttggatgacggcctgctggagctcaaggtcctcgagacggacaagaagcagctcctgcgcacgcaggtcgtcatcggcggcacgctgaagaacaacaagggcatcaacctgccgggcgtggcggtgcgcgccgacgcgctgacgccgaaggaccgcgaggacctcgtcttcggcatcaaggaaggcgtggacttcctggcgctgtccttcgttcgccagccggcggacatcgagctggcgcgccaggccatggcggaggcgggccggcaggtgcccatcgtcgccaagctggagaagccggaggccatcgcgcggctggacgccatcctggacaagacggacggggtgatggtggcgcgcggcgacctgggcgtggagattccccccgaggaggtgccggccgtccagaaggacatcatccggcgctccaaccagcgcggcctgccggtcatcgtggccacgcagatgctcaactcgatgatcgagaacccccgccccacgcgcgcggaggccagcgacgtggccaacgccgtgttcgacggggcggacgcggtcatgctctcgggcgagacggccagcggccgctaccccatcgagtcggtgcagatgatggaccgcatcgtcctggcggccgagtcggcgggtcgggcgcagtcgtcgctgggccggatcccggatgggcccatcggcgtgccctcgcacttcccggacgtgattgcccgggtggcgtgccaggcggcgcaggcgagcggcgcttcgctcatcgcggcgttcacgctgtcgggcgtgacggcgcggctgctggcgcactaccggccggcggtccccatcgtggcgttcagcccgaaccaggaagtgcgccgccgcctggcgctgctctggggcgtggtgccgcgggtgctggagcccatccaggagaccgaggcgatggtgaagcgcgtggaggaggaactgctggcgcgcggactggcgcgcaagggcgagcgcatcgtcatcgtctttggcgcgcccgtgggacagccagggaagatcaacagcctgcgcctgcacaccatccagggctga

SEQ ID NO: 444 - protein, 477 aa, Stigmatella aurantiaca
MRRAKIVCTLGPASQSQDMLEALIEAGMDVARLNFSHGSHEQHAENIAKLRAASLKLRKAVGILGDLQGPKIRTGRFITGSTVLKEGAIFSITTDESVKGNDDIVSTTYAHLAADVNPGDRILLDDGLLELKVLETDKKQLLRTQVVIGGTLKNNKGINLPGVAVRADALTPKDREDLVFGIKEGVDFLALSFVRQPADIELARQAMAEAGRQVPIVAKLEKPEAIARLDAILDKTDGVMVARGDLGVEIPPEEVPAVQKDIIRRSNQRGLPVIVATQMLNSMIENPRPTRAEASDVANAVFDGADAVMLSGETASGRYPIESVQMMDRIVLAAESAGRAQSSLGRIPDGPIGVPSHFPDVIARVACQAAQASGASLIAAFTLSGVTARLLAHYRPAVPIVAFSPNQEVRRRLALLWGVVPRVLEPIQETEAMVKRVEEELLARGLARKGERIVIVFGAPVGQPGKINSLRLHTIQG

SEQ ID NO: 445 - DNA, 1584 bp, Arabidopsis thaliana
  CDS (1)..(1584)
atgcattcaagtcatctccttctcgaggaaccgatcaggatgacttcaatcctcgaaccttctaaatcaagtttcttcccggctttgactaagattgttgggactctaggtccgaaatctcgatccgtcgaggtgattgctggttgtctcaaagctggaatgtccgtggctcgattcgatttctcttggtgcgatgctgattatcaccaggagacgctggagaatctgaagatagctgtgaagagcactaagaagctttgtgctgttatgctagacactgtaggacctgagttgcaagttattaacaagactgagaaagctatttctcttaaagctgatggccttgtaactttgactccgagtcaagatcaagaagcctcctctgaagtccttcccattaattttgatgggttagcgaaggcggttaagaaaggagacactatctttgttggacaatacctcttcactggtagtgaaacaacttcagtttggcttgaggttgaagaagttaaaggagatgatgtcatttgtatttcaaggaatgctgctactctgggtggtccgttattcacattgcacgtctctcaagttcacattgatatgccaaccctaactgagaaggataaggaggttataagtacatggggagttcagaataagatcgactttctctcattatcttattgtcgacatgcagaagatgttcgccaggcccgtgagttgcttaacagttgtggtgacctctctcaaacacaaatatttgcgaagattgagaatgaagagggactaacccactttgacgaaattctacaagaagcagatggcattattctttctcgtgggaatttgggtatcgatctacctccggaaaaggtgtttttgttccaaaaggctgctctttacaagtgtaacatggctggaaagcctgccgttcttactcgtgttgtagacagtatgacagacaatctgcggccaactcgtgcaggggcaactgatgttgctaatgctgttttagatggaagtgatgcaattcttcttggtgctgagactcttcgtggattgtaccctgttgaaaccatatcaactgttggtagaatctgttgtgaggcagagaaagttttcaaccaagatttgttctttaagaagactgtcaagtatgttggagaaccaatgactcacttggaatctattgcttcttctgctgtacgggcagcaatcaaggttaaggcatccgtaattatatgcttcacctcgtctggcagagcagcaaggttgattgccaaataccgtccaactatgcccgttctctctgttgtcattccccgacttacgacaaatcagctgaagtggagctttagcggagcctttgaggcaaggcagtcacttattgtcagaggtcttttccccatgcttgctgatcctcgtcaccctgcggaatcaacaagtgcaacaaatgagtcggttcttaaagtggctctagaccatgggaagcaagccggagtgatcaagtcacatgacagagttgtggtctgtcagaaagtgggagatgcgtccgtggtcaaaatcatcgagctagaggattag

SEQ ID NO: 446 - protein, 527 aa, Arabidopsis thaliana
MHSSHLLLEEPIRMTSILEPSKSSFFPALTKIVGTLGPKSRSVEVIAGCLKAGMSVARFDFSWCDADYHQETLENLKIAVKSTKKLCAVMLDTVGPELQVINKTEKAISLKADGLVTLTPSQDQEASSEVLPINFDGLAKAVKKGDTIFVGQYLFTGSETTSVWLEVEEVKGDDVICISRNAATLGGPLFTLHVSQVHIDMPTLTEKDKEVISTWGVQNKIDFLSLSYCRHAEDVRQARELLNSCGDLSQTQIFAKIENEEGLTHFDEILQEADGIILSRGNLGIDLPPEKVFLFQKAALYKCNMAGKPAVLTRVVDSMTDNLRPTRAGATDVANAVLDGSDAILLGAETLRGLYPVETISTVGRICCEAEKVFNQDLFFKKTVKYVGEPMTHLESIASSAVRAAIKVKASVIICFTSSGRAARLIAKYRPTMPVLSVVIPRLTTNQLKWSFSGAFEARQSLIVRGLFPMLADPRHPAESTSATNESVLKVALDHGKQAGVIKSHDRVVVCQKVGDASVVKIIELED

SEQ ID NO: 447 - DNA, 1533 bp, Glycine max
  CDS (1)..(1533)
atggcgaacatagacatcgaagggatcttgaagcagcagcctgatgatgggcgcgttccgaagacgaaaatagtgtgtactttgggccccgcttctcgatccgtggaaatgactgagaagcttcttagggctgggatgaacgttgctcgtttcaatttctctcatggcacccacgactatcatcaggaaaccctcaacaatctcaagactgctatgcacaacactggtatactctgtgccgtcatgcttgacactaagggacctgagattcggactggttttctgaaagatggaaaacctattcaacttaaggaaggacaagaaatcaccataactactgattatgacattaagggggatcaggagatgatatccatgagttacaagaagctgcctgtccacttgaagcctggaaacaccatattgtgctctgatgggacgattactctcactgtcttatcttgtgatcctgatgctggtactgttagatgtcgttgtgaaaacactgctacgttgggtgagagaaaaaatgttaaccttcctggtgttgttgttgatctccccacacttactgagaaggataaggaagatattcttcaatggggtgtacccaacaagattgacatgattgctctttcatttgttcgcaaaggctcagatcttgttaatgtccgcaaggttctcgagccacatgcaaagactattcagttgatgtctaaggttgagaatcaggaaggagtcctgaattttgacgaaatcctgcgcgagactgatgcattcatggtggcacgaggtgatcttggaatggagatcccagttgaaaagatattcctggcgcagaagatgatgatatacaagtgtaatctggttgggaagccagtggtgactgctacccaaatgcttgaatcaatgataaagtctcccaggccaacccgagctgaagcaactgacgtagccaatgcagttcttgatggaacagattgtgtgatgcttagtggtgaaagtgctgctggggcatacccagaacttgctgtgaaaatcatggctcgtatctgcattgaagcagaatcatcccttgactatggtgccatcttcaaagagatgataaggtctacaccattgccaatgagtccattggagagccttgcatcatctgctgtccgcacagcaaacaaggccaaagcaaaactcattgttgtactgacacgtggcgggtctacagctaagttggttgctaagtataggccagcggttccaatattatcggtggtggttccagtgttgagcacagactcatttgattggacatgcagtgatgagacgccagcaaggcacagcttgatatataggggcttgattccaatattgggggagggatccgccaaggctactgatgcagaatctacagaggtcattctcgaagctgctcttaagtccgcaacacaaaggggcctttgtaagcctggtgatgcagttgttgccctgcatcgtattggcactgcctctgtcataaagatctgcatagtcaaataa

SEQ ID NO: 448 - protein, 510 aa, Glycine max
MANIDIEGILKQQPDDGRVPKTKIVCTLGPASRSVEMTEKLLRAGMNVARFNFSHGTHDYHQETLNNLKTAMHNTGILCAVMLDTKGPEIRTGFLKDGKPIQLKEGQEITITTDYDIKGDQEMISMSYKKLPVHLKPGNTILCSDGTITLTVLSCDPDAGTVRCRCENTATLGERKNVNLPGVVVDLPTLTEKDKEDILQWGVPNKIDMIALSFVRKGSDLVNVRKVLEPHAKTIQLMSKVENQEGVLNFDEILRETDAFMVARGDLGMEIPVEKIFLAQKMMIYKCNLVGKPVVTATQMLESMIKSPRPTRAEATDVANAVLDGTDCVMLSGESAAGAYPELAVKIMARICIEAESSLDYGAIFKEMIRSTPLPMSPLESLASSAVRTANKAKAKLIVVLTRGGSTAKLVAKYRPAVPILSVVVPVLSTDSFDWTCSDETPARHSLIYRGLIPILGEGSAKATDAESTEVILEAALKSATQRGLCKPGDAVVALHRIGTASVIKICIVK

SEQ ID NO: 449 - DNA, 1536 bp, Glycine max
  CDS (1)..(1536)
atggcgaacatagacatcgaagggatcttgaagcagcagcagccttatgatgggcgcgttccgaagacgaagatagtgtgtactttgggccctgcttctcgatccgtagaaatgaccgagaagcttctgagggcagggatgaacgttgctcgtttcaatttctctcatggcacccacgactatcaccaggaaaccctcaacaatctcaagactgccatgcacaacactggcatactctgtgccgtcatgcttgacactaagggacctgagattcggactggttttctgaaagatggaaaacctattcaacttaaagaaggccaagaagtcaccataactactgattatgacattaagggggatccggagatgatatccatgagttacaagaagctgcctgtccacttgaagcctggaaataccatactgtgctctgacgggacgattactctcactgtcttgtcttgtgaccctgatgctggtactgttagatgtcgttgtgaaaacactgcaacgttgggtgagagaaaaaatgttaaccttcctggtgttgtggtggatctacccacacttactgagaaggataaggaagacattcttggatggggtgtacccaacaagattgacatgattgctctttcatttgttcgtaaaggctcggatcttgttaatgtccgcaaggttctggggccacatgcaaagaatattcagttgatgtcaaaggttgagaatcaggagggagtcctgaattttgacgaaatcctgcgggagactgatgcattcatggtggcacgtggtgatcttggaatggagatcccagtagaaaagattttcctggcacagaagatgatgatatacaagtgtaatcttgttgggaagccagtggtgactgctacccaaatgcttgaatcaatgataaagtctcccaggccaacccgagctgaagcaactgatgtagctaatgcagttcttgatggaacagattgtgtgatgcttagtggtgaaagtgctgctggggcatacccagaacttgctgtgaaaatcatggctcgcatttgcattgaagcagaatcatcccttgactatggtgccatcttcaaagagatgataaggtctaccccattgcctatgagtccattggagagccttgcatcatctgctgtccgcacagcaaacaaggccaaagcaaaactcattgttgtactgacacgtggcgggtctacagctaagttggttgctaagtataggccagcggttccaatattatcggtggtggttccagtgttgagcacagactcatttgattggacatgcagtgatgagacgccagcaaggcacagcttgatatataggggcttgattccaatattgggggagggatccgccaaggctactgatgcagaatctacagaggtcattctcgaagctgctcttaagtccgcaacacaaaggggcctttgtaagcctggtgatgcagttgttgccctgcatcgtattggcactgcctctgtcataaagatctgcatagtcaaataa

SEQ ID NO: 450 - protein, 511 aa, Glycine max
MANIDIEGILKQQQPYDGRVPKTKIVCTLGPASRSVEMTEKLLRAGMNVARFNFSHGTHDYHQETLNNLKTAMHNTGILCAVMLDTKGPEIRTGFLKDGKPIQLKEGQEVTITTDYDIKGDPEMISMSYKKLPVHLKPGNTILCSDGTITLTVLSCDPDAGTVRCRCENTATLGERKNVNLPGVVVDLPTLTEKDKEDILGWGVPNKIDMIALSFVRKGSDLVNVRKVLGPHAKNIQLMSKVENQEGVLNFDEILRETDAFMVARGDLGMEIPVEKIFLAQKMMIYKCNLVGKPVVTATQMLESMIKSPRPTRAEATDVANAVLDGTDCVMLSGESAAGAYPELAVKIMARICIEAESSLDYGAIFKEMIRSTPLPMSPLESLASSAVRTANKAKAKLIVVLTRGGSTAKLVAKYRPAVPILSVVVPVLSTDSFDWTCSDETPARHSLIYRGLIPILGEGSAKATDAESTEVILEAALKSATQRGLCKPGDAVVALHRIGTASVIKICIVK

SEQ ID NO: 451 - DNA, 1584 bp, Arabidopsis thaliana
  CDS (1)..(1584)
atgcattcaagtcatctccttctcgaggaaccgatcaggatgacttcaatcctcgaaccttctaaatcaagtttcttcccggctttgactaagattgttgggactctaggtccgaaatctcgatccgtcgaggtgattgctggttgtctcaaagctggaatgtccgtggctcgattcgatttctcttggtgcgatgctgattatcaccaggagacgctggagaatctgaagatagctgtgaagagcactaagaagctttgtgctgttatgctagacactgtaggacctgagttgcaagttattaacaagactgagaaagctatttctcttaaagctgatggccttgtaactttgactccgagtcaagatcaagaagcctcctctgaagtccttcccattaattttgatgggttagcgaaggcggttaagaaaggagacactatctttgttggacaatacctcttcactggtagtgaaacaacttcagtttggcttgaggttgaagaagttaaaggagatgatgtcatttgtatttcaaggaatgctgctactctgggtggtccgttattcacattgcacgtctctcaagttcacattgatatgccaaccctaactgagaaggataaggaggttataagtacatggggagttcagaataagatcgactttctctcattatcttattgtcgacatgcagaagatgttcgccaggcccgtgagttgcttaacagttgtggtgacctctctcaaacacaaatatttgcgaagattgagaatgaagagggactaacccactttgacgaaattctacaagaagcagatggcattattctttctcgtgggaatttgggtatcgatctacctccggaaaaggtgtttttgttccaaaaggctgctctttacaagtgtaacatggctggaaagcctgccgttcttactcgtgttgtagacagtatgacagacaatctgcggccaactcgtgcagaggcaactgatgttgctaatgctgttttagatggaagtgatgcaattcttcttggtgctgagactcttcgtggattgtaccctgttgaaaccatatcaactgttggtagaatctgttgtgaggcagagaaagttttcaaccaagatttgttctttaagaagactgtcaagtatgttggagaaccaatgactcacttggaatctattgcttcttctgctgtacgggcagcaatcaaggttaaggcatccgtaattatatgcttcacctcgtctggcagagcagcaaggttgattgccaaataccgtccaactatgcccgttctctctgttgtcattccccgacttacgacaaatcagctgaagtggagctttagcggagcctttgaggcaaggcagtcacttattgtcagaggtcttttccccatgcttgctgatcctcgtcaccctgcggaatcaacaagtgcaacaaatgagtcggttcttaaagtggctctagaccatggggagcaagccggagtgatcaagtcacatgacagagttgtggtctgtcagaaagtgggagatgcgtccgtggtcaaaatcatcgagctagaggattag

SEQ ID NO: 452 - protein, 527 aa, Arabidopsis thaliana
MHSSHLLLEEPIRMTSILEPSKSSFFPALTKIVGTLGPKSRSVEVIAGCLKAGMSVARFDFSWCDADYHQETLENLKIAVKSTKKLCAVMLDTVGPELQVINKTEKAISLKADGLVTLTPSQDQEASSEVLPINFDGLAKAVKKGDTIFVGQYLFTGSETTSVWLEVEEVKGDDVICISRNAATLGGPLFTLHVSQVHIDMPTLTEKDKEVISTWGVQNKIDFLSLSYCRHAEDVRQARELLNSCGDLSQTQIFAKIENEEGLTHFDEILQEADGIILSRGNLGIDLPPEKVFLFQKAALYKCNMAGKPAVLTRVVDSMTDNLRPTRAEATDVANAVLDGSDAILLGAETLRGLYPVETISTVGRICCEAEKVFNQDLFFKKTVKYVGEPMTHLESIASSAVRAAIKVKASVIICFTSSGRAARLIAKYRPTMPVLSVVIPRLTTNQLKWSFSGAFEARQSLIVRGLFPMLADPRHPAESTSATNESVLKVALDHGEQAGVIKSHDRVVVCQKVGDASVVKIIELED

SEQ ID NO: 453 - DNA, 1665 bp, Drosophila melanogaster
  CDS (1)..(1665)
atgtcgttgtccgcgaaatccgtgctaaaggagggctccacacagctgagccacatctgcgagctggatcttgcccagcaggcgtcccatcagcgcctggtgtccctgatcgcgaccatatcggtcagttcccggaacgcggacaccatatacaccatgataatgcgcggagtgaacatattccgtctgaacttctcccacgaatcgcacgagatgcactcgaaaacgatagagctgatcaacgaggcgctggagaggattcataaggagacgggccaaatccgaacggtcgccattgcggcggacacgcgtggaccccagatccgtactggcctactggatggagatgtgttcctgcgcagcggcgacaatctgcggctctcgatcaatcgggatctttacgacaagggcaacaaggaggcggtctacgtggactacccgaacatcatcaatctgaccaagaccggcgatcgcctgttcatcgacgacggcaggctgctgctccacatcttggaagtgggagtggatggtctgctgtgcgaggtcatccatggcggccagctgaacaacaactgcaacgtgatcctgccggagatcgagatcgatttgcccgccgtctccgagaaggatatgtttgacatccagttcagcataaaggccaacgtggacttcctcttcgcctccgccgtgcgcagtgccaagaacgtcaaggagctgcgaacggtgctcggcgagaagggcaagcacatcaagatcatcgccaagatggacagcaagatagctctgagcaggttctcggagattctgcgtgcggcggatggattgctgctttcgcgagcggatctgggcacccagatacccattgaaaagctcttcatcacccagaagagcatactgggccaatgcaacaaggtgggcaagccggtcatagtggcctcccacatcctcgagtccatgcgcaccctgccccatcccacacgggccgagtgcttcgatttggccaacgccatcatcgatggagcagactgcatcatgctgtcgtcggaagtggccattgggtcgtttcccaaggagacggtggccacctgcgacacattgtgccgggaggccgagaaggtgctctggtttcgagacctcttctccgacctggtcagcgaggtgcgtggcgagctggacgcggcccactcgctggccattgcagccgtggagacggccaagcgcaccaatgccaccctgatcatcgtgctgaccacctcgggccgctcggccactctggtcagcaagttccgaccccgctgtcccatcatggctatcacgcgctgcgaacggaccgcccgctgggtctatctgcatcgcggagtcctgccgatactgtacacctcggagcccagcacggactacgccaccgatgtggacgctcgggtgcagttcgccatgacctctgccaagaagtggggcatcatcgacgacggcgatcccattgtgatagtgagtgcctggaaggatggcggcgggttcaccaacaatgtccgtgtggtctacgccttcttcgaggcggatcgcgtggactgcctgttccggtcggacaggcggcattctcgaaagaacaccaacctgcagatggcaaatcgggagcctgatgataagaaaagtgctaatgcgtag

SEQ ID NO: 454 - protein, 554 aa, Drosophila melanogaster
MSLSAKSVLKEGSTQLSHICELDLAQQASHQRLVSLIATISVSSRNADTIYTMIMRGVNIFRLNFSHESHEMHSKTIELINEALERIHKETGQIRTVAIAADTRGPQIRTGLLDGDVFLRSGDNLRLSINRDLYDKGNKEAVYVDYPNIINLTKTGDRLFIDDGRLLLHILEVGVDGLLCEVIHGGQLNNNCNVILPEIEIDLPAVSEKDMFDIQFSIKANVDFLFASAVRSAKNVKELRTVLGEKGKHIKIIAKMDSKIALSRFSEILRAADGLLLSRADLGTQIPIEKLFITQKSILGQCNKVGKPVIVASHILESMRTLPHPTRAECFDLANAIIDGADCIMLSSEVAIGSFPKETVATCDTLCREAEKVLWFRDLFSDLVSEVRGELDAAHSLAIAAVETAKRTNATLIIVLTTSGRSATLVSKFRPRCPIMAITRCERTARWVYLHRGVLPILYTSEPSTDYATDVDARVQFAMTSAKKWGIIDDGDPIVIVSAWKDGGGFTNNVRVVYAFFEADRVDCLFRSDRRHSRKNTNLQMANREPDDKKSANA

SEQ ID NO: 455 - DNA, 1740 bp, Arabidopsis thaliana
  CDS (1)..(1740)
atggctcaagtggttgctaccaggtcaattcaaggctcgatgttatctcccaacggtggatctgtgtctacaagatccgagaagctattgaaaccagcgagttttgcagtgaaggttcttggcaacgaagcaaagagaagtggaagagtctctgtaagaagcagaagagtggttgatactactgtgagatccgctcgtgttgagactgaagtcattcctgtttctcctgaagatgtgcctaacagagaggagcagcttgagaggttgttggaaatgcagcagtttggtgatacatcggtagggatgtggtcgaagccgacagtgaggaggaagacaaagattgtttgcaccgttggtccgtcgaccaacacacgagaaatgatatggaaattggctgaagctgggatgaatgttgctaggatgaatatgtctcatggagatcatgcttcacataagaaggttattgatttggttaaagaatacaatgcacaaactaaagacaacactattgctatcatgcttgacaccaagggtccggaagttaggagtggagatttacctcagccaattatgttagatcctggtcaagagtttacctttacaattgagagaggagtcagcacaccaagttgtgtcagtgttaactatgatgatttcgttaatgacgtggaagcgggtgacatgcttcttgttgatggtggtatgatgtcgtttatggtgaagtcaaagaccaaagactctgtcaaatgtgaagttgttgatggtggagaacttaagtcaaggagacacctgaatgtccgaggaaagagtgcaactttaccttcaatcactgagaaggactgggaggatattaaatttggagtggagaacaaagttgacttttatgcagtttcctttgtcaaagatgctcaagttgtacacgagttgaagaaataccttcaaaatagtggtgctgatatacacgtgatagtgaaaattgagagtgcagactccatacctaacttgcactccattatcacagcaccagatggggcaatggttgcaagaggtgatcttggtgcagagcttccaattgaagaagtccccattcttcaggaggagatcattaacctgtgccgtagtatgggaaaagctgttattgttgcgactaacatgcttgagagtatgatagttcatccaactccaacccgggcagaggtctcagacattgctatcgctgttagagaaggtgctgatgcggtaatgctttcaggagaaactgctcacggaaagttcccattgaaagctgctggagtgatgcacactgttgcattgcgaacagaagcaaccattactagcggtgaaatgccacctaatcttggtcaagccttcaagaaccatatgagtgagatgtttgcataccatgcaaccatgatgtcaaacacacttggaacttcaactgttgtcttcaccagaaccggtttcatggccatattgttaagtcactatcgtccttccggcacaatctatgccttcacaaatgagaaaaaaatacaacaaagattagctttgtatcaaggtgtatgccccatatatatggagttcacagatgatgcagaagaaacttttgctaatgctttggctacattactgaaacaaggaatggtgaagaagggagaggaaatagcaatcgtacagagcggtacacagccaatctggcgatctcaatcgacacataacatccaagtccgcaaggtttaa

SEQ ID NO: 456 - protein, 579 aa, Arabidopsis thaliana
MAQVVATRSIQGSMLSPNGGSVSTRSEKLLKPASFAVKVLGNEAKRSGRVSVRSRRVVDTTVRSARVETEVIPVSPEDVPNREEQLERLLEMQQFGDTSVGMWSKPTVRRKTKIVCTVGPSTNTREMIWKLAEAGMNVARMNMSHGDHASHKKVIDLVKEYNAQTKDNTIAIMLDTKGPEVRSGDLPQPIMLDPGQEFTFTIERGVSTPSCVSVNYDDFVNDVEAGDMLLVDGGMMSFMVKSKTKDSVKCEVVDGGELKSRRHLNVRGKSATLPSITEKDWEDIKFGVENKVDFYAVSFVKDAQVVHELKKYLQNSGADIHVIVKIESADSIPNLHSIITAPDGAMVARGDLGAELPIEEVPILQEEIINLCRSMGKAVIVATNMLESMIVHPTPTRAEVSDIAIAVREGADAVMLSGETAHGKFPLKAAGVMHTVALRTEATITSGEMPPNLGQAFKNHMSEMFAYHATMMSNTLGTSTVVFTRTGFMAILLSHYRPSGTIYAFTNEKKIQQRLALYQGVCPIYMEFTDDAEETFANALATLLKQGMVKKGEEIAIVQSGTQPIWRSQSTHNIQVRKV

SEQ ID NO: 457 - DNA, 1581 bp, Aspergillus oryzae
  CDS (1)..(1581)
atggccgccagcagttctctcgaccatttgagcaaccgtatgaagctggagtggcactccaagctgaacacggagatggtgcccgcgaagaacttccgccgcacctccatcattggcaccattggccctaagaccaactcggtggagaagatcaacgctctccgcagatccggtctcaatgttgttcgtatgaacttctcccacggttcgtatgagtaccaccagtccgttatcgacaacgcccgtgaggccgccagagtccagaccggacgtcccctcgccattgctcttgataccaaaggacctgaaatccgtactggaaacactaccgatgataaggatatccccatcaaggagggtcacgagctcaacatcaccactgatgagaagtacgctaatgctagcgacgaccagaacatgtacctggactataagaacattaccaatgtgatcgctcccggaaagctcatctatgtcgacgatggtatcctctccttccaggttctggaggtcgttgacgacaagaccctgcgcgtcaagtgtcttaacaatggcaacatctcctctcgcaagggtgttaacctgcccggcaccgatgttgaccttcccgccctttccgagaaggatatcagtgatctcaagttcggtgtcaagaacggcgtcgacatgatctttgcctcgttcattcgtcggggaagtgacatccgccacattcgtgacgtgttgggtgaagagggtaaggagattcagatcatcgccaagattgagaaccagcagggtgtcaacaacttcgacgagattctcgaggagactgacggtgttatggtcgcccgtggtgatcttggtatcgaaatccccgcccccaaggtcttcatcgctcagaagatgatgatcgccaagtgcaacatcaagggcaagcctgtcatctgtgccactcaaatgctcgagtccatgacatacaaccctcgccccactcgtgccgaggtgtccgatgtcgctaacgctgttcttgacggagccgactgtgtcatgctttctggtgagaccgctaagggctcatacccttgtgaggctgttaagatgatgagcgagacctgtttgctcgccgaggttgccattccccacttcaatgtctttgacgagttgcgcaacctcgctccccgccccactgatactgtggaatccatcgccatggctgccgttagcgccagtcttgagcttaacgccggtgccattgttgtcttgaccaccagtggtaacactgctcgccttctttccaagtaccgccctgtgtgccccatcctgatggtcacccgtaaccctagagcttcgaggtattctcacctctaccgtggtgtctggcccttcctcttccccgagaacaagcccgacttcaacgtcaagatctggcaggaggacgttgaccgccgtctcaagtgggctatctcccacggtatcaagctcggtatcatcaacaagggagacaacattgtctgtgtccagggttggcgcggaggccagggccacaccaacaccgtccgtgtggtcccagctgaggagaaccttggtctgattgagtaa

SEQ ID NO: 458 - protein, 526 aa, Aspergillus oryzae
MAASSSLDHLSNRMKLEWHSKLNTEMVPAKNFRRTSIIGTIGPKTNSVEKINALRRSGLNVVRMNFSHGSYEYHQSVIDNAREAARVQTGRPLAIALDTKGPEIRTGNTTDDKDIPIKEGHELNITTDEKYANASDDQNMYLDYKNITNVIAPGKLIYVDDGILSFQVLEVVDDKTLRVKCLNNGNISSRKGVNLPGTDVDLPALSEKDISDLKFGVKNGVDMIFASFIRRGSDIRHIRDVLGEEGKEIQIIAKIENQQGVNNFDEILEETDGVMVARGDLGIEIPAPKVFIAQKMMIAKCNIKGKPVICATQMLESMTYNPRPTRAEVSDVANAVLDGADCVMLSGETAKGSYPCEAVKMMSETCLLAEVAIPHFNVFDELRNLAPRPTDTVESIAMAAVSASLELNAGAIVVLTTSGNTARLLSKYRPVCPILMVTRNPRASRYSHLYRGVWPFLFPENKPDFNVKIWQEDVDRRLKWAISHGIKLGIINKGDNIVCVQGWRGGQGHTNTVRVVPAEENLGLIE

SEQ ID NO: 459 - DNA, 1503 bp, Streptococcus thermophilus
  CDS (1)..(1503): transl_table=11
atgaataaacgcgtaaaaatagttgctacacttggtcctgcggttgaaatccgtggtggcaagaaatttggtgaagatggttactggagtgaaaaacttgaccctgatgcatctgctaaaaacattgctcaattgatcgaggaaggtgctaacgttttccgtttcaacttctcacatggtaaccacgctgagcaaggtgaacgtatggatgtcgtacgtatggctgaatctattgctggtcaaaaagtaggtttccttcttgacactaagggacctgaaatccgtactgaattgtttgaaggtgatgctaaagagtatgcatacaaaactggtgaacaaatccgtattgctactaaacaaggtctcaaatcaactcgcgacgttattgctttgaacgttgctggtgcacttgacattttcgacgatgtagaagttggtaaacaagttcttgtggatgatggtaaacttggtcttcgtgttgtagacaaggatgctgaaaaacgtgaattcatcgttgaagttgaaaatgatggtattattgctaaacaaaaaggtgtaaacatcccttacactaaaattcctttcccagcacttgctgaacgtgataatgctgatattcgttttggtctcgaacaaggtattaactttatcgcaatctcatttgtacgtactgcgaaagacgtacaagaagtacgtgctatctgtgaagaaactggaaacggccacgttaaattgttggctaaaatcgaaaaccaacaaggtatcgataatatcgatgaaatcattgaagctgctgatggtatcatgatcgctcgtggtgacatgggtatcgaagtaccattcgaaatggttccagtttaccaaaaaatgattatcactaaagtaaatgctgctggtaaaattgttgttacagctacaaacatgcttgaaacaatgacagaaaaaccacgtgcaactcgttctgaagtatctgacgtgtttaacgcagttatcgacggtactgatgcgacaatgctttctggtgagtctgcaaatggtccatatcccgttgaatcagttcgtacaatggccacaattcataaaaacgctcaaactcttcttaaagagtacggtcgtcttaattcatcaacatttgatcgctcaagtaacactgaagtcgttgcatctgcagttaaagatgctactaactcaatgcatatccaacttattgttgcacttactgaatctggtaacacagctagcttgatcgatacataccgtccagaagctgacatctgggcaataacattcgatgaacttactcaaaaatcattgatgcttaactggggtgttattccagttgttactgaaacaccttcatctactgatgatatgtttgaagttgctgagcgtgttgctcttgaatcaggtcttgtagaatcaggtgataacattgttattgttgctggtgttccagttggttctggtaatacaaatactatgcgtatccgcacagttaaataa

SEQ ID NO: 460 - protein, 500 aa, Streptococcus thermophilus
MNKRVKIVATLGPAVEIRGGKKFGEDGYWSEKLDPDASAKNIAQLIEEGANVFRFNFSHGNHAEQGERMDVVRMAESIAGQKVGFLLDTKGPEIRTELFEGDAKEYAYKTGEQIRIATKQGLKSTRDVIALNVAGALDIFDDVEVGKQVLVDDGKLGLRVVDKDAEKREFIVEVENDGIIAKQKGVNIPYTKIPFPALAERDNADIRFGLEQGINFIAISFVRTAKDVQEVRAICEETGNGHVKLLAKIENQQGIDNIDEIIEAADGIMIARGDMGIEVPFEMVPVYQKMIITKVNAAGKIVVTATNMLETMTEKPRATRSEVSDVFNAVIDGTDATMLSGESANGPYPVESVRTMATIHKNAQTLLKEYGRLNSSTFDRSSNTEVVASAVKDATNSMHIQLIVALTESGNTASLIDTYRPEADIWAITFDELTQKSLMLNWGVIPVVTETPSSTDDMFEVAERVALESGLVESGDNIVIVAGVPVGSGNTNTMRIRTVK

SEQ ID NO: 461 - DNA, 1545 bp, Arabidopsis thaliana
  CDS (1)..(1545)
atggcttcaatcctcgagccttccaaatctagtttcttcccggcattgactaagatcgtcggaactctaggtcctaaatcccgatccgtcgaggctctctccggctgtctcaaagccggcatgtctgtggctcgatttgatttctcgtggggagatgctgattatcaccaggagacacttgataatttgaaagttgctgtgaggagcactaagaagctttgtgctgttatgcttgatactgttggacctgagctacaagttattaacaaatctgagaaagctattactttgaaagctgatggccttgtaactttgacaccgaatcaagatcaagaagcttcttctgaagttcttcccattaatttcaatggacttgccaaggcagtgaagaaaggagacaccatcttcgttgggcaatacctattcactggtagtgaaacaacttcagtttggctcgaggttgatgaagttaaaggagatgatgtcatttgcctttcaaggaatgctgctactctggctggttctttgttcactttacactcctctcaagttcacattgatctcccaacgcttacagagaaggataaggaggttataagcacatggggagttcaaaataaaatcgattttctctcattgtcttattgtcgtcatgctgaggatgttcgccagacccgtgaaatgcttaaaaagttgggcgacctctctcaaacacaaatatttgctaagattgagaacgtagagggactaacccacttcgatgagattctacaagaagctgatggcattattctttctcgtgggaatttgggtatagatttacccccggaaaaggtgtttttgtttcaaaaggctgctctttacaagtgcaacatggctggaaagccagctgttcttacccgtgttgttgacagtatgactgacaacttgcgaccaactcgtgctgaggccacggatgttgctaatgctgttttagatggaagtgatgcaattcttcttggtgctgagacccttcgtggattgtaccctgttgagacaatatcaactgttggtaggatctgtgctgaggcagaaaaggttttcaatcaagatttgtactttaagaagactgtcaagtatgttggagaaccaatgactcacttggaatcgattgcttcttcagctgtacgggcagccattaaggttaaggcatccgtaattatatgcttcacctcttctggaagagcagccagattgattgccaaatacaggccaacgatgccggttatttctgttgtcattccccgggttaagacaaatcaactgaaatggagctttagtggagcttttgaggcgaggcagtcacttattgtcagaggcctcttccctatgcttgctgaccctcgtcaccctgcggaatctacaagtgcgacaaacgagtcagtcctgaaggttgctctagaccatgggaagcatgctggagtaatcaagtcgcatgacagagtagtggtgtgtcagaaagttggtgatgcatctgtggttaagatcattgagcttgaggattaa

SEQ ID NO: 462 - protein, 514 aa, Arabidopsis thaliana
MASILEPSKSSFFPALTKIVGTLGPKSRSVEALSGCLKAGMSVARFDFSWGDADYHQETLDNLKVAVRSTKKLCAVMLDTVGPELQVINKSEKAITLKADGLVTLTPNQDQEASSEVLPINFNGLAKAVKKGDTIFVGQYLFTGSETTSVWLEVDEVKGDDVICLSRNAATLAGSLFTLHSSQVHIDLPTLTEKDKEVISTWGVQNKIDFLSLSYCRHAEDVRQTREMLKKLGDLSQTQIFAKIENVEGLTHFDEILQEADGIILSRGNLGIDLPPEKVFLFQKAALYKCNMAGKPAVLTRVVDSMTDNLRPTRAEATDVANAVLDGSDAILLGAETLRGLYPVETISTVGRICAEAEKVFNQDLYFKKTVKYVGEPMTHLESIASSAVRAAIKVKASVIICFTSSGRAARLIAKYRPTMPVISVVIPRVKTNQLKWSFSGAFEARQSLIVRGLFPMLADPRHPAESTSATNESVLKVALDHGKHAGVIKSHDRVVVCQKVGDASVVKIIELED

SEQ ID NO: 463 - DNA, 1704 bp, Arabidopsis thaliana
  CDS (1)..(1704)
atggctgcttatggtcaaatctcctcgggaatgactgtagatcctcaggttctctcttcctccagaaacattggagtttccctatcacctctccggagaacactaatcggcgccggagttaggtctactagtatctctctccgtcaatgttctctctccgttagatcgattaaaatctccgaagatagccgcaaacctaaagcttatgcagagaacggtgcttttgatgtgggagttttggattcttcatcatatagattggctgattcaagaacaagtagtaatgattcaaggaggaagactaagattgtgtgtacgattggaccgtcttcgagttctagggaaatgatttggaaactcgcggaagctggaatgaatgtggctcgtttgaatatgtctcatggtgatcatgcttctcatcagataactattgatttagttaaggagtataattctttgtttgttgacaaagctattgctattatgttggatacaaagggtcctgaggttcgaagcggggatgtaccgcagccgatatttcttgaagagggtcaagagtttaactttactatcaagagaggtgtttcgcttaaagacactgttagtgtaaattatgatgattttgtgaacgatgttgaagttggggatatacttttggtggatggtggaatgatgtcgttagctgttaaatcaaagacgagtgatttggtgaagtgtgtggttattgatggtggagagcttcaatctagacgtcacttgaatgttcgaggaaagagtgcgactcttccatccattacagacaaagattgggaagacataaaatttggagtggacaaccaagtcgatttctacgccgtctcctttgttaaggatgctaaagttgtccatgagttgaagaactatctcaaaaacatatcggtgattgtgaaaattgaaagtgcagactctataaagaatcttccttctatcatatctgcttgtgatggggcaatggttgctcgtggagatcttggagctgaacttcccattgaagaggtcccgttgttacaggaagaaataatcagaaggtgtagaagcattcataaaccagtgattgttgccacaaacatgctagagagtatgattaatcatccaacgcctacaagagctgaagtctctgacattgcaattgcagtacgtgaaggcgcagatgctatcatgctttctggtgaaaccgcacatggaaagtttccgctgaaagctgttaacgtaatgcatactgtggcgttgagaaccgaggcaagtctacctgtcagaacctcggcatcccgtaccactgcttacaagggtcacatgggccaaatgtttgcttttcatgcttctataatggcaaatacactgagctcaccgctaattgtatttacgagaaccggatccatggcagtgcttctaagccactaccgcccatctgcaacaattttcgccttcacaaaccagagaagaataatgcaaaggcttgctctttatcaaggtgtcatgcctatatatatggagttctcggatgatgcagaagatacatatgcccggtctctcaaactcttacaggacgagaatatgctcaaggaaggacaacatgtaactcttgtccaaagtggctcgcaacccatttggcgtgaagaatcaacacatctcatacaagtccgtaagataaagataggtggatga

SEQ ID NO: 464 - protein, 567 aa, Arabidopsis thaliana
MAAYGQISSGMTVDPQVLSSSRNIGVSLSPLRRTLIGAGVRSTSISLRQCSLSVRSIKISEDSRKPKAYAENGAFDVGVLDSSSYRLADSRTSSNDSRRKTKIVCTIGPSSSSREMIWKLAEAGMNVARLNMSHGDHASHQITIDLVKEYNSLFVDKAIAIMLDTKGPEVRSGDVPQPIFLEEGQEFNFTIKRGVSLKDTVSVNYDDFVNDVEVGDILLVDGGMMSLAVKSKTSDLVKCVVIDGGELQSRRHLNVRGKSATLPSITDKDWEDIKFGVDNQVDFYAVSFVKDAKVVHELKNYLKNISVIVKIESADSIKNLPSIISACDGAMVARGDLGAELPIEEVPLLQEEIIRRCRSIHKPVIVATNMLESMINHPTPTRAEVSDIAIAVREGADAIMLSGETAHGKFPLKAVNVMHTVALRTEASLPVRTSASRTTAYKGHMGQMFAFHASIMANTLSSPLIVFTRTGSMAVLLSHYRPSATIFAFTNQRRIMQRLALYQGVMPIYMEFSDDAEDTYARSLKLLQDENMLKEGQHVTLVQSGSQPIWREESTHLIQVRKIKIGG

SEQ ID NO: 465 - DNA, 1533 bp, Lilium longiflorum
  CDS (1)..(1533)
atggcgaacatcgacatcgagggcatcctgaaggagctcccggccgacggccgcgtcccgaagacgaaattggtctgcaccctcgggccgtcgtccagatccgtgccgatgctcgagaagctgctgcgcgccggcatgaacacggccagattcaacttctcccacggcacgcacgagtatcaccaggagacgctcgataacctccggatcgcaatgcagaacacgcagattctctgcgccgtcgtgctcgataccaagggtcctgagattcgcactgggtttctgaaggatggaaaggccgtccaaccaaaggagggtcaagaaatcatagtgagcactgattacgatctcaaaggcggcgggaatacaattactatgagttacaagaaacttcctgtggatatgaaacctggaggcacaatcctgtgtgcagatggcagcattagcttaactgtcctatcatgtgacccagatgccggaactgtgagatgccgctgtgagaatactgcacttttaggtgagagaaagaatgtcaatctgccaggtgttgttgtggatctccccacactgacagagaaggacaaggaagacattttggaatggggtgttcccaacaacattgatatgattgctctgtccttcgtgcgcaagggctccgatcttgtcaatgtccgacaggttcttggatctcatgcaaaaaacataaagttgatgtcaaaggttgagaaccaagagggtgtcgtaaacttcgatgaaatcttaaaagagacagatgccttcatggttgcccgtggtgatctgggcatggaaattcccgttgagaagatcttccttgctcagaagctgatgatatacatatgcaaccttgcgggcaagcctgttgtcactgccacccagatgcttgagtctatgataaaatcccctcgcccgacacgtgctgaagccactgatgtcgccaatgccgtcctcgatggcaccgactgcgtcatgcttagtggcgaaagtgcggcgggagcctatctagagatagccgtgaaggtcatggccaagatatgtatcgaggcagagtcatcccttgattatgatgccatcttcaaggagatgataaggtctgcgcctctccccatgagcccactggagagtcttgcgtcctcggctgtccgtactgcgaacaaggccaaggcggctctgattgttgtattgacccgtggtgggactacagccaagctggtagcgaagtaccgcccggcagtgccaatcctgtctgtggtggtgccagtgctgacaagcgattcgttcgactggaatgttagtgacgagtcaccagcaaggcatagcctcatctacagaggcctcatcccgctgctagcggagggttctgcgaaggcgactgatgccgagtcgacagaggtgatcctggaggctgcactcaagtcagcgacggcaaggaggctgtgcaaacctggtgactctattgttgcgctgcatcgcattggtgttgcttctgtcattaaaatttgcatagtgaaatga

SEQ ID NO: 466 - protein, 510 aa, Lilium longiflorum
MANIDIEGILKELPADGRVPKTKLVCTLGPSSRSVPMLEKLLRAGMNTARFNFSHGTHEYHQETLDNLRIAMQNTQILCAVVLDTKGPEIRTGFLKDGKAVQPKEGQEIIVSTDYDLKGGGNTITMSYKKLPVDMKPGGTILCADGSISLTVLSCDPDAGTVRCRCENTALLGERKNVNLPGVVVDLPTLTEKDKEDILEWGVPNNIDMIALSFVRKGSDLVNVRQVLGSHAKNIKLMSKVENQEGVVNFDEILKETDAFMVARGDLGMEIPVEKIFLAQKLMIYICNLAGKPVVTATQMLESMIKSPRPTRAEATDVANAVLDGTDCVMLSGESAAGAYLEIAVKVMAKICIEAESSLDYDAIFKEMIRSAPLPMSPLESLASSAVRTANKAKAALIVVLTRGGTTAKLVAKYRPAVPILSVVVPVLTSDSFDWNVSDESPARHSLIYRGLIPLLAEGSAKATDAESTEVILEAALKSATARRLCKPGDSIVALHRIGVASVIKICIVK

SEQ ID NO: 467 - DNA, 1413 bp, Vibrio marinus
  CDS (1)..(1413): transl_table=11
atgaaaaagactaaaattgtttgtacaattggtccaaaaactgaatcagtagagaaactaacagagcttgttaatgcaggcatgaacgttatgcgtttaaatttctctcatggtaactttgctgaacattcagtgcgtattcaaaatatccgtcaagtaagtgaaaacctgaataagaaaattgctgttttactggatactaaaggtccagaaatccgtacgattaaactagaaaacggtgacgatgtaatgttgaccgctggtcagtcattcacgtttacaacagacattaacgtggtaggtaataaagactgtgttgctgtaacatatgctggttttgctaaagaccttaatcctggtgcaatcatccttgttgatgatggtttaattgaaatggaagttgttgcaacaactgacactgaagttaaatgtacagtattaaatactggtgcacttggtgaaaataaaggcgttaacttacctaacatcagtgtaggtctacctgcattgtcagaaaaagataaagctgatttagcgtttggttgtgagcaagaagttgattttgttgctgcatcatttattcgtaaggctgatgatgtaagagaaattcgtgaaatcctatttaataatggtggcgaaaacattcagattatctcgaaaattgaaaaccaagaaggtgtagacaatttcgatgaaatcttagctgaatcagacggtatcatggttgctcgtggcgatctcggtgttgagatcccagttgaagaagtgatcatggcacagaagatgatgatcaaaaaatgtaataaagcaggtaaagttgtaattactgcaacacaaatgcttgattcaatgatcagtaacccacgtccaacacgtgcagaagcgggcgatgttgccaatgctgtgcttgacggtaccgacgcggtaatgctttctggtgaaactgcgaaaggtaaatacccagttgaagctgtgtctatcatggcaaacatctgtgaacgtactgataactcaatgtcttcggatttaggtgcgaacattgttgctaaaagcatgcgcattacagaagctgtgtgtaaaggtgcggtagaaacaacagaaaaattgtgtgctccacttattgttgttgcaactcgtggcggtaaatcagcaaaatctgttcgtaaatacttcccgaaagcaaatattcttgctatcacaacaaatgaaaaagcagcgcaacagttatgcctaactaaaggcgtaagcagctgcatcgttgagcagattgatagcactgatgagttctaccgtaaaggtaaagagcttgcattagcaactggtttagctaaagaaggcgatatcgttgttatggtatcaggtgcgttagtaccatcaggtacaacgaatacggcatctgttcaccaactttaa

SEQ ID NO: 468 - protein, 470 aa, Vibrio marinus
MKKTKIVCTIGPKTESVEKLTELVNAGMNVMRLNFSHGNFAEHSVRIQNIRQVSENLNKKIAVLLDTKGPEIRTIKLENGDDVMLTAGQSFTFTTDINVVGNKDCVAVTYAGFAKDLNPGAIILVDDGLIEMEVVATTDTEVKCTVLNTGALGENKGVNLPNISVGLPALSEKDKADLAFGCEQEVDFVAASFIRKADDVREIREILFNNGGENIQIISKIENQEGVDNFDEILAESDGIMVARGDLGVEIPVEEVIMAQKMMIKKCNKAGKVVITATQMLDSMISNPRPTRAEAGDVANAVLDGTDAVMLSGETAKGKYPVEAVSIMANICERTDNSMSSDLGANIVAKSMRITEAVCKGAVETTEKLCAPLIVVATRGGKSAKSVRKYFPKANILAITTNEKAAQQLCLTKGVSSCIVEQIDSTDEFYRKGKELALATGLAKEGDIVVMVSGALVPSGTTNTASVHQL

SEQ ID NO: 469 - DNA, 1752 bp, Ricinus communis
  CDS (1)..(1752)
atgtcacagtctctccatttctcaccgaacctcactttcgccaaacaacctttccctaagctccctctcccattcccaacctccaattcccggtatccagtcaataattataaatcactctcaatcaaagcgtccacgtcgccgtcatcatcatcagatcctcaagttttagttgcggataacggaacagggaacagcggcgttttgtataataataacaacaaatcagttacagtttctgatccgagctcaattgaagttgacgccgtgacggagacggagttaaaagagaatggattcaggagtacacgtaggacaaagctagtgtgtacgataggaccagcgacttgtggatttgaagagctggaagcgttagcagtaggaggaatgaatgtagcgagaattaatatgtgtcatggaacacgtgagtggcacaagagtgtaattgaacgtgttaggagattgaatgaagagaaaggttttgctgttgctattatgatggatactgaaggtagtgaaattcatatgggtgatttaggtggtgcttcttctgctaaagctgaggatggtgaaatctggacttttagtgtcagagcctatgattctcctcgcccagagcgcaccatcaatgttaactatgacggttttgctgaggatgtgaaagttggggatgagctacttgtggatggtggaatggttaggtttgaggtgattgagaaaattggcccagatgtcaagtgccgatgtactgatcctggactgttattaccacgagctaatttgactttctggagggatgggagtcttgttagagaacgtaatgcaatgcttccaacaatttcctctaaggattggttagatattgactttggtatcgcagagggtgttgattttattgcaatatcttttgtcaagtctgctgaagtgattaatcatcttaaaagctacattgctgcaaggtctcgtgacagtgatatagctgtcattgctaagatagagagtattgactcattgaagaacttagaagagatcattcgagcatcagatggagctatggtagcaagaggagatctgggtgctcagataccattggaacaggttccatcagcccagcaaaacattgttcaggtctgcaggcagctaaataagccagtcattgttgcttctcagttacttgaatcaatgattgaataccctacacccaccagagcagaagtggctgatgtttctgaagctgttaggcaacgggctgatgctttgatgctctctggtgagtcagccatgggccagtaccccgagaaggcattggctgttctcagaagtgtcagtgtgagaattgagaagtggtggagagaagagaagcaccatgaagcaatggaactcccagcaattggatccacttattccgactctatttcagaggagatttgcaactctgctgccaagatggcgaacaacttgggggtggatgcactttttgtgtatacaaaagatggtcacatggcatctctcttgtctcgttgccggcctgactgcccaatctttgcttttacaactaccacatctgtacggagacgcctgaatttacagtggggcctgatacccttccgcctgagctttgctgatgatatggaaagcaaccttaacaaaaccttctctttgctcaaggctagaggaatgatcaaatcgggtgatcttgttatagctgtttcagacatgttacagtccatccaagttatgaatgttccttag

SEQ ID NO: 470 - protein, 583 aa, Ricinus communis
MSQSLHFSPNLTFAKQPFPKLPLPFPTSNSRYPVNNYKSLSIKASTSPSSSSDPQVLVADNGTGNSGVLYNNNNKSVTVSDPSSIEVDAVTETELKENGFRSTRRTKLVCTIGPATCGFEELEALAVGGMNVARINMCHGTREWHKSVIERVRRLNEEKGFAVAIMMDTEGSEIHMGDLGGASSAKAEDGEIWTFSVRAYDSPRPERTINVNYDGFAEDVKVGDELLVDGGMVRFEVIEKIGPDVKCRCTDPGLLLPRANLTFWRDGSLVRERNAMLPTISSKDWLDIDFGIAEGVDFIAISFVKSAEVINHLKSYIAARSRDSDIAVIAKIESIDSLKNLEEIIRASDGAMVARGDLGAQIPLEQVPSAQQNIVQVCRQLNKPVIVASQLLESMIEYPTPTRAEVADVSEAVRQRADALMLSGESAMGQYPEKALAVLRSVSVRIEKWWREEKHHEAMELPAIGSTYSDSISEEICNSAAKMANNLGVDALFVYTKDGHMASLLSRCRPDCPIFAFTTTTSVRRRLNLQWGLIPFRLSFADDMESNLNKTFSLLKARGMIKSGDLVIAVSDMLQSIQVMNVP

SEQ ID NO: 471 - DNA, 1782 bp, Nicotiana tabacum
  CDS (1)..(1782)
atgtcgcaagctcttaacttcttcgtttcctcgtcttcacgttctccggcgactttcacaatctcaaggccgtcggttttcccgtcaaccggtagtttacggttactggtgaagaaatcgttgcggacgttagttgtggaagcgtcgtcggcggcggcgtcagatctcgacgagccgcagtcgtccccggtgttagtatcggagaatggttcaggaggggtattatcgagtgcgacgcaggagtacggtcgtaatgctgcaccggggaccgattcgagttcgattgaagtggatacagtaacggaggcggagttaaaggagaacgggtttaggagtacacgtagaacaaagttgatttgcacgattggacctgccacgtgtgggtttgagcagctggaacgattagctgagggaggaatgaatgtagctaggataaatatgtgccatggaacacgcgagtggcatcgtatggtgattgagagactgaggaggttgaatgaggagaaagggtttgctgtagctatcatgatggatactgaaggtagtgaaattcatatgggagatcttggtggcgcttcttctgctaaagctgaggatggtgaaatttggaatttcactgttcgttcatttgatccaccactcccagaacgcaccgttactgttaactatgatggctttgctgaagatgtgaaagtgggtgatgagctactagtagatggtggaatggtgagatttgaagtgattgagaaaattggcccagatgttaagtgtctttgcacagatcctggacttcttctacctcgggctaatctgacattttggcgggatggtaaactagtaagggaacgcaatgccatgcttccaacaatttcctcaaaggattggctagacatagactttggtattgctgagggtgttgattttattgctgtatcatttgtcaagtctgctgaagtcattaagcatcttaagagctacattcaagcccgggctcgggatagtgatatttctgtaattgcaaaaatagagagcattgactcattgaagaacttagaagagataatccaggcatcagatggtgctatggtcgcgagaggagatcttggtgctcaaattccattagaacaggttccatcagagcagcaaaagattgttcagatatgcaggcagctgaataggcctgttatagtagcctcccagctgctggaatctatgattgaataccctattccaactagagctgaagttgctgatgtttctgaagcagttaggcaaaggggggatgctttgatgctttctggtgagtcggccatgggacagtttcctgagaaggcattgactgtactaagaagtgttagcttgagaattgaaagaatgtggagggaacagaaacgccatgaagttattgaattgccatccatagcatcttcattttcagatagtatttcagaagagatctgcaactctgccgccaagatggcaaacaatttggaagttgatgctctttttgtttacaccaagaatgggcacatggcatctctcttgtcacgctgccgtcctgactgcccaatatttgcatttacaacgacaacatctgtacgcagacgcctgaacctgcaatggggtctaatgcctttccgcttgagtttctccgatgatatggaaagcaacctcaacaagacattctccttactaaaagctcggggcatgatcaagtcaggtgacctcatcattgctgtttccgacatgctgcagtccattcaagttatgaatgttccatga

SEQ ID NO: 472 - protein, 593 aa, Nicotiana tabacum
MSQALNFFVSSSSRSPATFTISRPSVFPSTGSLRLLVKKSLRTLVVEASSAAASDLDEPQSSPVLVSENGSGGVLSSATQEYGRNAAPGTDSSSIEVDTVTEAELKENGFRSTRRTKLICTIGPATCGFEQLERLAEGGMNVARINMCHGTREWHRMVIERLRRLNEEKGFAVAIMMDTEGSEIHMGDLGGASSAKAEDGEIWNFTVRSFDPPLPERTVTVNYDGFAEDVKVGDELLVDGGMVRFEVIEKIGPDVKCLCTDPGLLLPRANLTFWRDGKLVRERNAMLPTISSKDWLDIDFGIAEGVDFIAVSFVKSAEVIKHLKSYIQARARDSDISVIAKIESIDSLKNLEEIIQASDGAMVARGDLGAQIPLEQVPSEQQKIVQICRQLNRPVIVASQLLESMIEYPIPTRAEVADVSEAVRQRGDALMLSGESAMGQFPEKALTVLRSVSLRIERMWREQKRHEVIELPSIASSFSDSISEEICNSAAKMANNLEVDALFVYTKNGHMASLLSRCRPDCPIFAFTTTTSVRRRLNLQWGLMPFRLSFSDDMESNLNKTFSLLKARGMIKSGDLIIAVSDMLQSIQVMNVP

SEQ ID NO: 473 - DNA, 1494 bp, Arabidopsis thaliana
  CDS (1)..(1494)
atggctatggaacagaggcctaagacgaagatcgtgtgcacactcgggccggcgtccagatctgtcccaatggtcgagaagcttcttatggcggggatgagcgtggctcgcttcaacttttctcatggatcttacgaatatcaccaggagactctcgacaatcttcgtcaggccatgcttaacactggcatgctatgtgctgtcatgctcgacaccaagggaccagagattcgaaccgggttcttaaaggatgggaaacctatccagctcaaacaaggccaagaaatcaccatttcaactgactatgacttgaagggtgatgagaaaactatttgcatgagctacaagaagttggcgcaagatgtgaatccaggcatggtcatactctgtgccgatggtaccatctcgttaaaggtcctttcttgtgacaaagaaaagggcactgtccgttgtcgttgtgagaacacttcaatgcttggtgaaagaaagaacgttaatctccctggtgttgtggttgatctcccaactctaactgaaaaagacaagcaagacattcttgaatggggagttcccaatcaaatcgacatgattgctctgtcttttgtcagaaaaggttcggacttggtacaagttaggaagctacttggaaaacatgctaaaaccatacttctcatgtcaaaggttgaaaaccaagaaggtgtagcgaattttgatgatatcttgataaactcggatgcgtttatgatcgcaagaggtgaccttggaatggagattccaattgagaagatattcttagctcagaaagtgatgatctacaagtgcaatttcatggggaagccagtggttacagcgactcagatgcttgagtctatgatcaaatccccacgaccaacaagagcagaagctactgatgttgcaaatgctgtcctcgatggcacagactgtgtcatgcttagtggtgaaaccgcagctggagcatacccagagcttgctgttcgtacaatggccaagatatgtgtggaagcagagagcacacttgactatggagacatcttcaagaggataatgcttcacgctgcggtccctatgagcccgatggagtcacttgcttcatctgcggtcagaaccgctacttcctcaagagccactcttatgatggtcttgaccagaggaggcagcacggcgaggctggtggctaagtatagaccagggatacccattttgtccgtggtggttcctgaaatcacgtctgactcttttgattgggcgtgtagcaacgaggcaccggcaagacacagtctcatctaccgtggtttagtcccggtgctgtatgctggatcggctagagcctcgatcgacgagtcaacagaagaaactctcgagttcgcgtcagagtatggtaaaaagaagcaactctgcaagaccggagactctgttgtggctctcttccgtacaggtaacgctattgttatcaagatcttgaccgtcaagtga

SEQ ID NO: 474 - protein, 497 aa, Arabidopsis thaliana
MAMEQRPKTKIVCTLGPASRSVPMVEKLLMAGMSVARFNFSHGSYEYHQETLDNLRQAMLNTGMLCAVMLDTKGPEIRTGFLKDGKPIQLKQGQEITISTDYDLKGDEKTICMSYKKLAQDVNPGMVILCADGTISLKVLSCDKEKGTVRCRCENTSMLGERKNVNLPGVVVDLPTLTEKDKQDILEWGVPNQIDMIALSFVRKGSDLVQVRKLLGKHAKTILLMSKVENQEGVANFDDILINSDAFMIARGDLGMEIPIEKIFLAQKVMIYKCNFMGKPVVTATQMLESMIKSPRPTRAEATDVANAVLDGTDCVMLSGETAAGAYPELAVRTMAKICVEAESTLDYGDIFKRIMLHAAVPMSPMESLASSAVRTATSSRATLMMVLTRGGSTARLVAKYRPGIPILSVVVPEITSDSFDWACSNEAPARHSLIYRGLVPVLYAGSARASIDESTEETLEFASEYGKKKQLCKTGDSVVALFRTGNAIVIKILTVK

SEQ ID NO: 475 - DNA, 1533 bp, Solanum tuberosum
  CDS (1)..(1533)
atggccaacatagacatagctggaatcatgaaggatctcccaaatgatggccgtattccaaagaccaagattgtttgcacgttagggccatcttctagaacagtgccaatgctggagaagcttctccgtgctggcatgaacgttgccaggtttaacttttctcatgggacccatgagtaccatcaggagacattggacaatcttaagattgctatgcagaatactcagatcctgtgtgctgtcatgcttgacaccaaggggcctgagattcgtactggtttcttaacagatggaaaaccgattcagcttaaggaaggtcaagaaatcactgtatccacagactataccataaaaggaaatgaagaaatgatctcaatgagctataagaagttggtaatggacttgaagcccggcaataccattttgtgtgcagatggtaccataacccttactgttttgtcatgtgatccaccgtctggaacggtgagatgtcgctgcgagaatactgccaccttaggagagaggaagaatgtaaaccttccaggtgtggttgtggaccttccaacacttacagagaaggataaagaagatatactagagtggggtgttcctaacaacattgatatgatagcgctttcgtttgtgcgtaagggttcagatcttgtcaatgttcgcaaggttcttggtccacatgccaagcgcattcaactaatgtcaaaggttgaaaaccaagaaggggtaatcaactttgatgaaatccttcgtgagacagattcttttatggttgctcgaggtgatctcggaatggaaattccagttgagaagattttcttggctcagaaaatgatgatatacaagtgtaatcttgctggcaaagctgtggtaactgccactcagatgcttgaatcaatgatcaagtctccagcacccacccgtgctgaggctactgatgtggctaatgctgtcttggatggcactgattgtgttatgttaagtggggagagtgcagctggtgcttatcctgagctggcagtaaaaatcatgtcacgaatctgcattgaggcagagtcttcacttgacaacgaggctatcttcaaggaaatgatcaggtgtaccccactgccaatgagcccattggagagtcttgcatcatcagctgtccgtacggctaacaaagctagagcaaaactcattgttgtcctgacacgtggcgggagtacagcaaagctggttgccaagtataggcctgcagttcctattctgtcagtagtcgtgcctgttttgaccacagactctttcgattggtccatcagcgacgagaccccagctagacacagtttggtatataggggcttgattccacttcttggtgaaggttctgcaaaggccactgattctgaatcaactgaggtaatccttgaagcggccctgaagtctgccgtaacgagagggctatgcaaacctggtgatgctgtcgtggcacttcatcgtattggttctgcatccgttatcaagatttgcgtcgtgaagtaa

SEQ ID NO: 476 - protein, 510 aa, Solanum tuberosum
MANIDIAGIMKDLPNDGRIPKTKIVCTLGPSSRTVPMLEKLLRAGMNVARFNFSHGTHEYHQETLDNLKIAMQNTQILCAVMLDTKGPEIRTGFLTDGKPIQLKEGQEITVSTDYTIKGNEEMISMSYKKLVMDLKPGNTILCADGTITLTVLSCDPPSGTVRCRCENTATLGERKNVNLPGVVVDLPTLTEKDKEDILEWGVPNNIDMIALSFVRKGSDLVNVRKVLGPHAKRIQLMSKVENQEGVINFDEILRETDSFMVARGDLGMEIPVEKIFLAQKMMIYKCNLAGKAVVTATQMLESMIKSPAPTRAEATDVANAVLDGTDCVMLSGESAAGAYPELAVKIMSRICIEAESSLDNEAIFKEMIRCTPLPMSPLESLASSAVRTANKARAKLIVVLTRGGSTAKLVAKYRPAVPILSVVVPVLTTDSFDWSISDETPARHSLVYRGLIPLLGEGSAKATDSESTEVILEAALKSAVTRGLCKPGDAVVALHRIGSASVIKICVVK

SEQ ID NO: 477 - DNA, 1536 bp, Glycine max
  CDS (1)..(1536)
atggcgaacatagacatcgaagggatcttgaagcagcagcagccttatgatgggcgcgttccgaagacgaagatagtgtgtactttgggccctgcttctcgatccgtagaaatgaccgagaagcttctgagggcagggatgaacgttgctcgtttcaatttctctcatggcacccacgactatcaccaggaaaccctcaacaatctcaagactgccatgcacaacactggcatactctgtgccgtcatgcttgacactaagggacctgagattcggactggttttctgaaagatggaaaacctattcaacttaaagaagggcaagaagtcaccataactactgattatgacattaagggggatccggagatgatatccatgagttacaagaagctgcctgtccacttgaagcctggaaataccatactgtgctctgacgggacgattactctcactgtcttgtcttgtgaccctgatgctggtactgttagatgtcgttgtgaaaacactgcaacgttgggtgagagaaaaaatgttaaccttcctggtgttgtggtggatctacccacacttactgagaaggataaggaagacattcttggatggggtgtacccaacaagattgacatgattgctctttcatttgttcgtaaaggctcggatcttgttaatgtccgcaaggttctggggccacatgcaaagaatattcagttgatgtcaaaggttgagaatcaggagggagtcctgaattttgacgaaatcctgcgggagactgatgcattcatggtggcacgtggtgatcttggaatggagatcccagtagaaaagattttcctggcacagaagatgatgatatacaagtgtaatcttgttgggaagccagtggtgactgctacccaaatgcttgaatcaatgataaagtctcccaggccaacccgagctgaagcaactgatgtagctaatgcagttcttgatggaacagattgtgtgatgcttagtggtgaaagtgctgctggggcatacccagaacttgctgtgaaaatcatggctcgcatttgcattgaagcagaatcatcccttgactatggtgccatcttcaaagagatgataaggtctaccccattgcctatgagtccattggagagccttgcatcatctgctgtccgcacagcaaacaaggccaaagcaaaactcattgttgtgctgacacgtggcgggtctacagccaagttagttgccaagtataggccagcggttccaatattgtcggtggtggttccagtgttgagcacggactcatttgattggacctgcagtgatgagacgccagcaaggcacagcctgatatacaggggcttgattcctatactgggcgagggatctgcaaaggctaccgatgcagaatccacagaggtcattctcgaagctgctcttaagtccgcaacagaaagggccctttgtaagcctggtgatgcagttgttgccctgcatcgtattggagctgcctctgtcataaagatctgcatagtcaaataa

SEQ ID NO: 478 - protein, 511 aa, Glycine max
MANIDIEGILKQQQPYDGRVPKTKIVCTLGPASRSVEMTEKLLRAGMNVARFNFSHGTHDYHQETLNNLKTAMHNTGILCAVMLDTKGPEIRTGFLKDGKPIQLKEGQEVTITTDYDIKGDPEMISMSYKKLPVHLKPGNTILCSDGTITLTVLSCDPDAGTVRCRCENTATLGERKNVNLPGVVVDLPTLTEKDKEDILGWGVPNKIDMIALSFVRKGSDLVNVRKVLGPHAKNIQLMSKVENQEGVLNFDEILRETDAFMVARGDLGMEIPVEKIFLAQKMMIYKCNLVGKPVVTATQMLESMIKSPRPTRAEATDVANAVLDGTDCVMLSGESAAGAYPELAVKIMARICIEAESSLDYGAIFKEMIRSTPLPMSPLESLASSAVRTANKAKAKLIVVLTRGGSTAKLVAKYRPAVPILSVVVPVLSTDSFDWTCSDETPARHSLIYRGLIPILGEGSAKATDAESTEVILEAALKSATERALCKPGDAVVALHRIGAASVIKICIVK

SEQ ID NO: 479 - DNA, 1527 bp, Nicotiana tabacum
  CDS (1)..(1527)
atggcgattgagaataacaacaatggagtgaatttttgtacggtgaagaggccgaagacgaagatagtatgtactttggggccagcatctcgatcggtgccgatgatcgagaagcttctacgggcaggcatgaacgtggcccgattcaacttttctcatggatctcacgactatcatcaggagactattgacaatctccgtcaagctatggagagtaccggtattctctgtgccgttatgcttgacaccaagggtccagaaattcgaacagggtttttaaaagatgctaagcctgttcaacttaaacagggtcaggagatcacaatctcaactgattacagcattaaaggtgatgagagtatgatatgcatgagctacaaaaagttagcagaggacgtaaagccacaaagtgtgatcctctgtgcagatggccaaatcacctttacagttttgtcttgtgacaaagagaacggtttggatcgatgccgctgtgagaacactgctgttcttggtgaaagaaagaatgtcaatctcccgggagtaattgtggatctgccaacattgacagataaagacaaggatgacattttaaactggggagttccgaatcatattgacatgattgcgttatcttttgttcgtaagggttcagatctcgtggaggttcggaagctgctaggtgaacatgcaaagaacattcttctgatgtctaaggttgaaaaccaggaaggtgtagcgaattttgatgacattcttctcaactctgatgcatttatggtggcaagaggtgacctgggaatggaaattccaattgagaagatatttttggctcaaaaggtaatgatttacaagtgcaacatccaagggaagcctgttgtcacagcaacacagatgttggagtccatgatcaaatctccaaggccaactcgtgcagaagcaacagatgttgccaatgctgttcttgatggcacagactgtgtcatgcttagtggtgaaacagctgctggagcttaccctgatcttgcagtgggtaccatggctaagatttgtattgaagcagaaagcacaattgattatccagatgttttcaaaagaattatgtcaaatgccccagttcccatgagcccattggagagccttgcatcttctgctgttcgaaccgctaactctgcaaaagctgctcttatcctagtgttaaccaggggaggaagtactgcaaaattggtggccaagtacagacctggaatgcctatattgtcggtggttgtccccgagatcaaaactgattcttttgattggacttgcagtgacgagtctccagcaaggcatagccttatattcaggggattggttcccgttctccatgcaggatctgctagggcttctcatgaagagtctacagaagaagcactggactttgctcttcaacatgccaaaacaaaagggttatgcaagcaaggagactccgttgtagccctacaccgtgttggaactgcatctgtgatcaagattgttacagtcaagtga

SEQ ID NO: 480 - protein, 508 aa, Nicotiana tabacum
MAIENNNNGVNFCTVKRPKTKIVCTLGPASRSVPMIEKLLRAGMNVARFNFSHGSHDYHQETIDNLRQAMESTGILCAVMLDTKGPEIRTGFLKDAKPVQLKQGQEITISTDYSIKGDESMICMSYKKLAEDVKPQSVILCADGQITFTVLSCDKENGLDRCRCENTAVLGERKNVNLPGVIVDLPTLTDKDKDDILNWGVPNHIDMIALSFVRKGSDLVEVRKLLGEHAKNILLMSKVENQEGVANFDDILLNSDAFMVARGDLGMEIPIEKIFLAQKVMIYKCNIQGKPVVTATQMLESMIKSPRPTRAEATDVANAVLDGTDCVMLSGETAAGAYPDLAVGTMAKICIEAESTIDYPDVFKRIMSNAPVPMSPLESLASSAVRTANSAKAALILVLTRGGSTAKLVAKYRPGMPILSVVVPEIKTDSFDWTCSDESPARHSLIFRGLVPVLHAGSARASHEESTEEALDFALQHAKTKGLCKQGDSVVALHRVGTASVIKIVTVK

SEQ ID NO: 481 - DNA, 1689 bp, Nicotiana tabacum
  CDS (1)..(1689)
atggccacaatgaatctacctacaggactacatgtcgcggctaaaccggcgtcattggatcggctttcctcggccaagaacgtcggtgatttgttcttctccgattctcgtcacaggaaacgagtgaatacttcgaatcaaatcatggccgttcaatcacttgagcatattcatggcgttaataacaatgtttatgccaattatgttaatttcaatgtaccctcttccggttacagtctggggcaagaaagtgtgtatctgaattctccaagaaaaaccaagatagtttgcaccattggtccctccacaagctcacgggagatgatctggaaattggcagaggctggaatgaacgtggcccgtctgaatatgtcacatggggaccacgcatcgcatcagagaacgattgaccttgttaaagaatacaatgctcaatttgaggacaaggttattgcaataatgttggacactaagggacctgaggtaataagtggagatgtgcccaaaccaattctccttaaggagggtcaagaattcaactttagcattaaaagaggagtcagcacagaagacaccgttagtgtaaattatgatgatttcataaatgatgtggaggccggagacatactactcgttgatggtgggatgatgtcattagctgtgaaatcgaaaaccagcgatatagtgaaatgtgaagttattgatggaggagaactgaaatcgagacggcatctaaatgtaagaggaaaaagtgccaccctgccttcaataacagaaaaagactgggatgatattaagtttggtgtgaacaatcaagtcgacttctatgccgtttcttttgtgaaggatgctaaggtggtccatgaattgaaagattacctgaaaagctgtaatgcagatattcatgttattgtaaagattgaaagtgcagactccattccaaatctccactcgatcatttccgcttccgatggggcaatggtggcccgtggtgatcttggagctgaacttccaattgaggaagtgccgttgcttcaggaagacattattagaaggtgtcagagcatgcaaaaacctgtaatagtagcaacgaacatgctcgaaagcatgattgatcacccaaccccaacaagggcagaagtttcagacatttccattgcagtacgtgaaggcgctgatgctgtaatgctttcaggcgaaaccgctcatgggaagtatccactgaaggcagttaaggtgatgcatattgtggcattaaggaccgagtctagcctacaaaaaagcactagttctcctagtcaatctgccgcctataagagccatatgggtgaaatgtttgccttccactcttcctcaatggctaatacccttagcactcccatcattgtcttcacaagaactgggtccatggcaataattttaagtcataatcggccttcatcaacagtttttgccttcacaaacaatgaaagggtgaagcagcgtctggctctgtatcatggtgtcgtgcctatatatatggagttttcaagtgacgcagaggagaccttttctcgagctatcaagcttttgttgagcaaaagcttggtgaaggatgggcaatatgtaactctcgtccaaagtggagcccaaccaatctggcgtagacattctactcaccacatacaagtccgtaaggtccaaagttga

SEQ ID NO: 482 - protein, 562 aa, Nicotiana tabacum
MATMNLPTGLHVAAKPASLDRLSSAKNVGDLFFSDSRHRKRVNTSNQIMAVQSLEHIHGVNNNVYANYVNFNVPSSGYSLGQESVYLNSPRKTKIVCTIGPSTSSREMIWKLAEAGMNVARLNMSHGDHASHQRTIDLVKEYNAQFEDKVIAIMLDTKGPEVISGDVPKPILLKEGQEFNFSIKRGVSTEDTVSVNYDDFINDVEAGDILLVDGGMMSLAVKSKTSDIVKCEVIDGGELKSRRHLNVRGKSATLPSITEKDWDDIKFGVNNQVDFYAVSFVKDAKVVHELKDYLKSCNADIHVIVKIESADSIPNLHSIISASDGAMVARGDLGAELPIEEVPLLQEDIIRRCQSMQKPVIVATNMLESMIDHPTPTRAEVSDISIAVREGADAVMLSGETAHGKYPLKAVKVMHIVALRTESSLQKSTSSPSQSAAYKSHMGEMFAFHSSSMANTLSTPIIVFTRTGSMAIILSHNRPSSTVFAFTNNERVKQRLALYHGVVPIYMEFSSDAEETFSRAIKLLLSKSLVKDGQYVTLVQSGAQPIWRRHSTHHIQVRKVQS

SEQ ID NO: 483 - DNA, 1506 bp, Candida glabrata
  CDS (1)..(1506)
atggactctagattggctagattgactaccttgcaaacctctgccggtgaggaattgagaagaacctctatcatcggtaccattggtccaaagaccaacaacccagaaaccttggttgctctaagaaaggctggtttgaacattgtccgtatgaacttctcccacggttcttacgaataccacaagtctgtcattgacaatgccagaaagtccgaagagctatacccaggtagaccattggctatcgctttggacaccaagggtccagaaatcagaactggtaccaccactaacgaagtcgactacccaatcccaccaaaccacgaaatgatcttcaccaccgatgacaagtacgctaaggcttgtgacgacaagatcatgtacttggactacaagaacatcaccaaggtcatctccgctggtagaatcatctacgtcgatgacggtgttttgtctttcgaagtcttgcaagtcgttgacgacaagaccttgaaggtcaagtccttgaacgctggtaagatctgctcccacaagggtgttaacttgccaggtaccgatgtcgacttgccagctttgtctgaaaaggacaaggctgacttgagattcggtgttgaaaacggtgtccacatgatcttcgcttctttcatcagaaccgctcaagatgttttgaccatcagagaagttttgggtgaagacggtaaggacatcaagatcgtcgtcaagattgaaaaccaacaaggtgttaacaacttcgacgaaatcttgaaggtcactgacgctgtcatggttgccagaggtgacttgggtatcgaaatcccagccccagaagtcttggctgtccaaaagaagttgatcgctaagtctaacttggccggtaagccagttatctgtgctacccaaatgttggaatctatgacctacaacccaagaccaaccagagctgaagtttccgatgtcggtaacgctgttttggacggtgctgactgtgtcatgttgtccggtgaaaccgctaagggtaactacccaattaacgctgttaccactatggctgaaactgctttgatcgctgaacaagctattgcttacttgccaaactacgatgacatcagaaactgcactccaaagccaacttctaccactgaaactgttgctgcttccgccgtcgctgctgtcttcgaacaaaaggctaaggctatcatcgttttgtctacctctggtaccaccgctagattggtttccaagtacagaccaaactgcccaatcatcttggtcaccagaaacgccagaactgctagattctctcacttgtacagaggtgttttcccattcgtttacgagaaggaatctgtctctgactggactgaagatgttgaagctagattgaacttcggtatcgaacaagctatcgaattcggtatcttgaagaagggtgacacttacgtttccatccaaggtttcaaggctggtgtcggtcactccaacactttgcaagtctccactgcttaa

SEQ ID NO: 484 - protein, 501 aa, Candida glabrata
MDSRLARLTTLQTSAGEELRRTSIIGTIGPKTNNPETLVALRKAGLNIVRMNFSHGSYEYHKSVIDNARKSEELYPGRPLAIALDTKGPEIRTGTTTNEVDYPIPPNHEMIFTTDDKYAKACDDKIMYLDYKNITKVISAGRIIYVDDGVLSFEVLQVVDDKTLKVKSLNAGKICSHKGVNLPGTDVDLPALSEKDKADLRFGVENGVHMIFASFIRTAQDVLTIREVLGEDGKDIKIVVKIENQQGVNNFDEILKVTDAVMVARGDLGIEIPAPEVLAVQKKLIAKSNLAGKPVICATQMLESMTYNPRPTRAEVSDVGNAVLDGADCVMLSGETAKGNYPINAVTTMAETALIAEQAIAYLPNYDDIRNCTPKPTSTTETVAASAVAAVFEQKAKAIIVLSTSGTTARLVSKYRPNCPIILVTRNARTARFSHLYRGVFPFVYEKESVSDWTEDVEARLNFGIEQAIEFGILKKGDTYVSIQGFKAGVGHSNTLQVSTA

SEQ ID NO: 485 - DNA, 1413 bp, Escherichia coli O157
  CDS (1)..(1413): transl_table=11
atgaaaaagaccaaaattgtttgcaccatcggaccgaaaaccgaatctgaagagatgttagctaaaatgctggacgctggcatgaacgttatgcgtctgaacttctctcatggtgactatgcagaacacggtcagcgcattcagaatctgcgcaacgtgatgagcaaaactggtaaaaccgccgctatcctgcttgataccaaaggtccggaaatccgcaccatgaaactggaaggcggtaacgacgtttctctgaaagctggtcagacctttactttcactactgataaatctgttatcggcaacagcgaaatggttgcggtaacgtatgaaggtttcacaactgacctgtctgttggcaacaccgtactggttgacgatggtctgatcggtatggaagttactgccattgaaggtaacaaagttatctgtaaagtgctgaacaacggcgacctgggtgaaaacaaaggtgtgaacctgcctggcgtttccattgccctgccagcactggctgaaaaagacaaacaggacctgatctttggttgcgaacaaggcgtagactttgtcgctgcttcctttattcgtaagcgttctgacgttatcgaaatccgtgagcacctgaaagcgcacggcggcgaaaacatccacatcatctccaaaatcgaaaaccaggaaggcctcaacaacttcgacgaaatcctcgaagcctctgacggcatcatggttgcgcgtggcgacctgggtgtagaaatcccggtagaagaagttatcttcgcccagaagatgatgatcgaaaaatgtatccgtgcacgtaaagtcgttatcactgcgacccagatgctggattccatgatcaaaaacccacgcccgactcgcgcagaagccggtgacgttgcaaacgccatcctcgacggtactgacgcagtgatgctgtctggtgaatccgcaaaaggtaaatacccgctggaagcggtttctatcatggcgaccatctgcgaacgtaccgaccgcgtgatgaacagccgtctcgagttcaacaatgacaaccgtaaactgcgcattaccgaagcggtatgccgtggtgccgttgaaactgctgaaaaactggatgctccgctgatcgtggttgctacccagggcggtaaatctgctcgcgcagtacgtaaatacttcccggatgccaccatcctggcactgaccaccaacgaaaaaacggctcatcagttggtactgagcaaaggcgttgtgccgcagctggttaaagagatcacttctactgatgatttctaccgtctgggtaaagaactggctctgcagagcggtctggcacacaaaggtgacgttgtagttatggtttctggtgcactggtaccgagcggcactactaacaccgcatctgttcacgtcctgtaa

SEQ ID NO: 486 - protein, 470 aa, Escherichia coli O157
MKKTKIVCTIGPKTESEEMLAKMLDAGMNVMRLNFSHGDYAEHGQRIQNLRNVMSKTGKTAAILLDTKGPEIRTMKLEGGNDVSLKAGQTFTFTTDKSVIGNSEMVAVTYEGFTTDLSVGNTVLVDDGLIGMEVTAIEGNKVICKVLNNGDLGENKGVNLPGVSIALPALAEKDKQDLIFGCEQGVDFVAASFIRKRSDVIEIREHLKAHGGENIHIISKIENQEGLNNFDEILEASDGIMVARGDLGVEIPVEEVIFAQKMMIEKCIRARKVVITATQMLDSMIKNPRPTRAEAGDVANAILDGTDAVMLSGESAKGKYPLEAVSIMATICERTDRVMNSRLEFNNDNRKLRITEAVCRGAVETAEKLDAPLIVVATQGGKSARAVRKYFPDATILALTTNEKTAHQLVLSKGVVPQLVKEITSTDDFYRLGKELALQSGLAHKGDVVVMVSGALVPSGTTNTASVHVL

SEQ ID NO: 487 - DNA, 1413 bp, Salmonella typhi
  CDS (1)..(1413): transl_table=11
atgaaaaagacgaaaattgtttgtactatcggtccgaaaaccgaatccgaagagatgttaagcaaaatgctggacgcgggcatgaacgtgatgcgtctgaacttctctcatggcgattatgcagaacacggtcagcgtatccagaacttgcgcaacgtgatgagcaaaactggtaaaaaagctgctattctgcttgatactaaaggaccagaaatccgcaccattaaactggaaggcggtaacgacgtttcgctgaaagcgggccaaacctttacttttaccaccgacaaatccgtggtcggtaataatgaaatcgttgccgtcacctatgaaggcttcaccagcgacctgagcgttggcaacaccgtcctggttgacgatggtctgatcggtatggaagtgaccgccatcgaaggcaataaagtcatttgtaaggtgctgaacaacggcgatctgggcgagaacaaaggcgttaacctgccgggcgtttctattgctctgccggcgctggctgaaaaagacaaacaggacctgatcttcggttgcgaacagggcgttgactttgttgctgcgtcctttatccgtaaacgttctgacgttgtcgaaattcgcgagcatctgaaagcccacggcggcgaaaacatccagattatctctaagatcgaaaaccaggaaggcctgaacaacttcgatgaaattctcgaagcttccgacggcatcatggttgcgcgtggcgacctgggcgtagaaatcccggttgaagaagtgatctttgcgcagaaaatgatgatcgaaaaatgtatccgcgcacgtaaagtcgtgatcaccgcgactcagatgctggattctatgatcaaaaatccgcgtccgacccgcgcagaagcaggcgatgttgcaaacgccatcctcgacggtacggatgcggttatgctgtccggcgaatccgcaaaagggaaatacccgctggaagccgtttctatcatggcgaccatctgcgaacgtaccgaccgcgtcatgaacagccgtctggactacaacaacgacagccgtaaactgcgcattacggaagcggtatgccgcggcgcggtagaaaccgccgaaaaattgaaagcgccgctgatcgtggtagcgacccagggcggtaaatccgctcgcgccgtgcgtaaatacttcccggacgccaccatcctggcattgaccaccaatgaagtgaccgcccgtcagttagtactgagcaaaggcgtggtatcgcagctggtgaaagaaatcaattctactgatgatttctaccgtctgggcaaagatgtcgccctacaaagcggcctcgcccagaaaggcgacgtcgtagtgatggtctccggcgcgctggttccaagcggcaccactaacaccgcctctgttcacgtactgtaa

SEQ ID NO: 488 - protein, 470 aa, Salmonella typhi
MKKTKIVCTIGPKTESEEMLSKMLDAGMNVMRLNFSHGDYAEHGQRIQNLRNVMSKTGKKAAILLDTKGPEIRTIKLEGGNDVSLKAGQTFTFTTDKSVVGNNEIVAVTYEGFTSDLSVGNTVLVDDGLIGMEVTAIEGNKVICKVLNNGDLGENKGVNLPGVSIALPALAEKDKQDLIFGCEQGVDFVAASFIRKRSDVVEIREHLKAHGGENIQIISKIENQEGLNNFDEILEASDGIMVARGDLGVEIPVEEVIFAQKMMIEKCIRARKVVITATQMLDSMIKNPRPTRAEAGDVANAILDGTDAVMLSGESAKGKYPLEAVSIMATICERTDRVMNSRLDYNNDSRKLRITEAVCRGAVETAEKLKAPLIVVATQGGKSARAVRKYFPDATILALTTNEVTARQLVLSKGVVSQLVKEINSTDDFYRLGKDVALQSGLAQKGDVVVMVSGALVPSGTTNTASVHVL

SEQ ID NO: 489 - DNA, 1413 bp, Salmonella typhimurium
  CDS (1)..(1413): transl_table=11
atgaaaaagacgaaaattgtttgtactatcggtccgaaaaccgaatccgaagagatgttaagcaaaatgctggacgcgggcatgaacgtgatgcgtctgaacttctctcatggcgattatgcagaacacggtcagcgtatccagaatttgcgcaacgtgatgagcaaaactggtaaaaaagccgctattctgcttgatactaaaggaccagaaatccgcaccattaaactggaaggcggtaacgacgtttcgctgaaagcgggccaaacctttacttttaccaccgacaaatccgtggtcggtaataatgaaatcgttgccgtcacctatgaaggctttaccagcgacctgagcgttggcaacaccgtcctggttgacgatggtctgatcggtatggaagtgaccgccatcgaaggcaataaagtcatttgtaaggtgctgaacaacggcgatctgggcgagaacaaaggcgttaacctgccgggcgtttctattgctctgccggcgctggctgaaaaagacaaacaggacctgatcttcggttgcgaacagggcgttgactttgttgcggcgtcctttatccgtaaacgttctgacgttgtcgaaattcgcgagcatctgaaagctcacggcggcgaaaatatccagattatctctaagatcgaaaaccaggaaggcctgaacaacttcgatgaaattctcgaagcttccgacggcatcatggttgcgcgtggcgacctgggcgtagaaatcccggttgaagaagtgatttttgcgcagaaaatgatgatcgaaaaatgtatccgcgcacgtaaagtcgtgatcaccgcgactcagatgctggattctatgatcaaaaacccgcgtccgacccgcgcagaagcaggcgacgttgcgaacgccatcctcgacggtacggatgcggttatgctgtccggcgaatccgcaaaagggaaatacccgctggaagccgtttctatcatggcgaccatctgcgaacgtaccgaccgcgtcatgaacagccgtctggactacaacaacgacagccgtaaactgcgcattacggaagcagtatgccgcggcgcggtagaaaccgccgaaaaactggaagcgccgctgatcgtggtagcgacccagggcggtaaatccgctcgcgccgtgcgtaaatacttcccggacgccaccatcctggcattgaccaccaatgaagtgaccgcccgtcagttagtactgagcaaaggcgtggtatcgcagctggtgaaagaaatcaattctactgatgatttctaccgtctgggcaaagatgtcgccctgcaaagcggcctcgcccagaaaggcgacgtcgtagtgatggtctccggcgcgctggttccaagcggcaccactaacaccgcctctgttcacgtactgtaa

SEQ ID NO: 490 - protein, 470 aa, Salmonella typhimurium
MKKTKIVCTIGPKTESEEMLSKMLDAGMNVMRLNFSHGDYAEHGQRIQNLRNVMSKTGKKAAILLDTKGPEIRTIKLEGGNDVSLKAGQTFTFTTDKSVVGNNEIVAVTYEGFTSDLSVGNTVLVDDGLIGMEVTAIEGNKVICKVLNNGDLGENKGVNLPGVSIALPALAEKDKQDLIFGCEQGVDFVAASFIRKRSDVVEIREHLKAHGGENIQIISKIENQEGLNNFDEILEASDGIMVARGDLGVEIPVEEVIFAQKMMIEKCIRARKVVITATQMLDSMIKNPRPTRAEAGDVANAILDGTDAVMLSGESAKGKYPLEAVSIMATICERTDRVMNSRLDYNNDSRKLRITEAVCRGAVETAEKLEAPLIVVATQGGKSARAVRKYFPDATILALTTNEVTARQLVLSKGVVSQLVKEINSTDDFYRLGKDVALQSGLAQKGDVVVMVSGALVPSGTTNTASVHVL

SEQ ID NO: 491 - DNA, 1503 bp, Saccharomyces cerevisiae
  CDS (1)..(1503)
atgtctagattagaaagattgacctcattaaacgttgttgctggttctgacttgagaagaacctccatcattggtaccatcggtccaaagaccaacaacccagaaaccttggttgctttgagaaaggctggtttgaacattgtccgtatgaacttctctcacggttcttacgaataccacaagtctgtcattgacaacgccagaaagtccgaagaattgtacccaggtagaccattggccattgctttggacaccaagggtccagaaatcagaactggtaccaccaccaacgatgttgactacccaatcccaccaaaccacgaaatgatcttcaccaccgatgacaagtacgctaaggcttgtgacgacaagatcatgtacgttgactacaagaacatcaccaaggtcatctccgctggtagaatcatctacgttgatgatggtgttttgtctttccaagttttggaagtcgttgacgacaagactttgaaggtcaaggctttgaacgccggtaagatctgttcccacaagggtgtcaacttaccaggtaccgatgtcgatttgccagctttgtctgaaaaggacaaggaagatttgagattcggtgtcaagaacggtgtccacatggtcttcgcttctttcatcagaaccgccaacgatgttttgaccatcagagaagtcttgggtgaacaaggtaaggacgtcaagatcattgtcaagattgaaaaccaacaaggtgttaacaacttcgacgaaatcttgaaggtcactgacggtgttatggttgccagaggtgacttgggtattgaaatcccagccccagaagtcttggctgtccaaaagaaattgattgctaagtctaacttggctggtaagccagttatctgtgctacccaaatgttggaatccatgacttacaacccaagaccaaccagagctgaagtttccgatgtcggtaacgctatcttggatggtgctgactgtgttatgttgtctggtgaaaccgccaagggtaactacccaatcaacgccgttaccactatggctgaaaccgctgtcattgctgaacaagctatcgcttacttgccaaactacgatgacatgagaaactgtactccaaagccaacctccaccaccgaaaccgtcgctgcctccgctgtcgctgctgttttcgaacaaaaggccaaggctatcattgtcttgtccacttccggtaccaccccaagattggtttccaagtacagaccaaactgtccaatcatcttggttaccagatgcccaagagctgctagattctctcacttgtacagaggtgtcttcccattcgttttcgaaaaggaacctgtctctgactggactgatgatgttgaagcccgtatcaacttcggtattgaaaaggctaaggaattcggtatcttgaagaagggtgacacttacgtttccatccaaggtttcaaggccggtgctggtcactccaacactttgcaagtctctaccgtttaa

SEQ ID NO: 492 - protein, 500 aa, Saccharomyces cerevisiae
MSRLERLTSLNVVAGSDLRRTSIIGTIGPKTNNPETLVALRKAGLNIVRMNFSHGSYEYHKSVIDNARKSEELYPGRPLAIALDTKGPEIRTGTTTNDVDYPIPPNHEMIFTTDDKYAKACDDKIMYVDYKNITKVISAGRIIYVDDGVLSFQVLEVVDDKTLKVKALNAGKICSHKGVNLPGTDVDLPALSEKDKEDLRFGVKNGVHMVFASFIRTANDVLTIREVLGEQGKDVKIIVKIENQQGVNNFDEILKVTDGVMVARGDLGIEIPAPEVLAVQKKLIAKSNLAGKPVICATQMLESMTYNPRPTRAEVSDVGNAILDGADCVMLSGETAKGNYPINAVTTMAETAVIAEQAIAYLPNYDDMRNCTPKPTSTTETVAASAVAAVFEQKAKAIIVLSTSGTTPRLVSKYRPNCPIILVTRCPRAARFSHLYRGVFPFVFEKEPVSDWTDDVEARINFGIEKAKEFGILKKGDTYVSIQGFKAGAGHSNTLQVSTV

SEQ ID NO: 493 - DNA, 1449 bp, Agrobacterium vitis
  CDS (1)..(1449): transl_table=11
atgttcatacgcaacaaccggcgatcaaagatcgtcgcgacggtcggaccggcgtcaagttcgcccgacatgcttcgctcactgtttctcgccggtgtcgatacgttccgcctgaatttcagccatggtgcccgggccgatcacgcggaagtctataggaacatccgggctctcgagcaggagcatgatgctgctatcgccgtgctgcaggatcttcagggtccgaagatccggatcggagttctggcacatggcaggctcgatctcgcacgtggatccaccatcggatttatccttggccgtgagggtggtgaaggaatgaacgatattccgctacctcatcgggaaatcttcgaggtggcggtgcccggaatggacctcctgatcgacgacggtagaataaaagtccggatcatggaggtgatggacgggcggcttgtttgcgaggtcctcaatggaggcgccttgtcgaaccgcaagggtgtcaacgtgcccggcgctgtcctggacatttccccgctcacggcgaaagatcgtgaggacctggaattcgggctcgagcttggcgtcgactgggtcgcactttctttcgttcagcgggcacgcgacatgatcgaagcccggtccctcgttggagacagggctggcctcattgccaagatcgagaagccgtctgccctcgatgacatcgaggatattgtcaggctttcggacagcgtcatggttgcgcgaggtgatctcggcgtggagatcccgccggaggacgttccgggcaagcagaaggaaatcatccgtgcatgccggctagcggccaagcccgtgattgtcgccacacagatgctcgactcgatggtgagttcgccaacgccgacgcgcgctgaagcttcggacgttgccggtgccatctatgatggggcagatgccgtcatgctttccgccgagaccgcaacaggcgcctacccggtggaggcggtcgaaattatgaaccggatcatcgagaagacggagaagcacaagcactaccggccgatccttgaggcaacggaacccgatgtcgctcaatcaccgccgcatgcagttgccactgcagcagccaacgttgccgtggctctgggatcgccggttgtggtggcctatacatcgagcggaacaaccgcggccagaatttcgcgtgccagaccggcattgccaattctggctctcactccgtccgaacaagtcgcgcgccggctcaacatgttctggggggttgtcggcgtgcgatcacaagatgtccacacctatgaggcgtcgctgattcatgcgcaacaggcggtgcaggaagcaaagctggcaagtccctccgatcacattgtcatcgtggcgggatttccatttgcgcaacagggcagcaccaacaatctccgcgtcgttcagatcgccgcaaccgacaacctagagattgcgtag

SEQ ID NO: 494 - protein, 482 aa, Agrobacterium vitis
MFIRNNRRSKIVATVGPASSSPDMLRSLFLAGVDTFRLNFSHGARADHAEVYRNIRALEQEHDAAIAVLQDLQGPKIRIGVLAHGRLDLARGSTIGFILGREGGEGMNDIPLPHREIFEVAVPGMDLLIDDGRIKVRIMEVMDGRLVCEVLNGGALSNRKGVNVPGAVLDISPLTAKDREDLEFGLELGVDWVALSFVQRARDMIEARSLVGDRAGLIAKIEKPSALDDIEDIVRLSDSVMVARGDLGVEIPPEDVPGKQKEIIRACRLAAKPVIVATQMLDSMVSSPTPTRAEASDVAGAIYDGADAVMLSAETATGAYPVEAVEIMNRIIEKTEKHKHYRPILEATEPDVAQSPPHAVATAAANVAVALGSPVVVAYTSSGTTAARISRARPALPILALTPSEQVARRLNMFWGVVGVRSQDVHTYEASLIHAQQAVQEAKLASPSDHIVIVAGFPFAQQGSTNNLRVVQIAATDNLEIA

SEQ ID NO: 495 - DNA, 1527 bp, Candida glabrata
  CDS (1)..(1527)
atggactccaggttgcatagattgattaacttagaagtcactccaggtaaggatgtcagaaagactgccattattggtaccattggtcccaagactaacaatgttgacacattagttgctttgagaaaggctggtttgaatattgtccgtatgaacttctctcatggttcttacgaataccaccaatctgtgattgataacgccagaaagtcagaacaggtttatcctggtagaccattggccattgccttggacaccaagggtccagagattagaacaggtaccaatgttgacgatgttgactacccaattccaccaaatcatgagatgatcttcactactgatgataaatatgccaaggcatgtgatgacaagatcatgtatgttgattataagaacatcaccaaagtgattcaaccaggtaaagtcatctatgttgatgacggtgttttgtcttttgaagtcttagaagtcgtcgacgataagaccttgaaggtcaaatccttaaatgcaggtaaaatttcttctcataaaggtgttaacttgccaggaactgatgtcgacttaccagctttatctgaaaaggacaaagaagatttgagattcggtgtcaaaaatggtgttcatatgatctttgcctcttttatcagaactgcacaagatgtcttgactatcagagaagtactgggcgaggaaggtaaagacataaaagtcattgttaagatagaaaaccagcaaggtgtcaataactttgatgagattttggaagtggcccatggtgttatggttgccagaggtgacttgggtatcgaaattccggcaccacaggtcttggccgttcaaaagaaacttatagctaaatgtaacttggctggtaagccagtcatttgtgctactcaaatgctagagtccatgacattcaacccaagaccaaccagagctgaagtttctgatgttggtaacgctatattggatggtgctgattgtgtcatgttgtctggagaaactgctaaaggtaattaccccatcaatgctgtcacaacaatggcagaaactgccattatcgctgaacgagccattgcttatatgccattgtatgatgatttgagaaattgtactccaaaaccaacatcgacaacagagactgttgctgcctcggcagttgcagctgttcaagagcaaggtgccaaacttattttggtactatctacttctggtaacactgcaagattagtctccaagtatagacctcaatgcccaatcgttttggttacaagaaacccaagaactgctagattttctcatttattcagaggtgtgttcccatttgtttatgaaaaagaaccactagatgactggagtgaggatacccacgctcgtttgagatttggtgtcgatatggccaaagaatatggctttgttaagaatggtgatgcagttatttccattcaaggtttcaagggtggtgttggtcactctaatactatgcgtgtttccattgtaggtggagaaaaggaggatatctga

SEQ ID NO: 496 - protein, 508 aa, Candida glabrata
MDSRLHRLINLEVTPGKDVRKTAIIGTIGPKTNNVDTLVALRKAGLNIVRMNFSHGSYEYHQSVIDNARKSEQVYPGRPLAIALDTKGPEIRTGTNVDDVDYPIPPNHEMIFTTDDKYAKACDDKIMYVDYKNITKVIQPGKVIYVDDGVLSFEVLEVVDDKTLKVKSLNAGKISSHKGVNLPGTDVDLPALSEKDKEDLRFGVKNGVHMIFASFIRTAQDVLTIREVLGEEGKDIKVIVKIENQQGVNNFDEILEVAHGVMVARGDLGIEIPAPQVLAVQKKLIAKCNLAGKPVICATQMLESMTFNPRPTRAEVSDVGNAILDGADCVMLSGETAKGNYPINAVTTMAETAIIAERAIAYMPLYDDLRNCTPKPTSTTETVAASAVAAVQEQGAKLILVLSTSGNTARLVSKYRPQCPIVLVTRNPRTARFSHLFRGVFPFVYEKEPLDDWSEDTHARLRFGVDMAKEYGFVKNGDAVISIQGFKGGVGHSNTMRVSIVGGEKEDI

SEQ ID NO: 497 - DNA, 1443 bp, Escherichia coli
  CDS (1)..(1443): transl_table=11
atgtccagaaggcttcgcagaacaaaaatcgttaccacgttaggcccagcaacagatcgcgataataatcttgaaaaagttatcgcggcgggtgccaacgttgtacgtatgaacttttctcacggctcgcctgaagatcacaaaatgcgcgcggataaagttcgtgagattgccgcaaaactggggcgtcatgtggctattctgggtgacctccaggggcccaaaatccgtgtatccacctttaaagaaggcaaagttttcctcaatattggggataaattcctgctcgacgccaacctgggtaaaggtgaaggcgacaaagaaaaagtcggtatcgactacaaaggcctgcctgctgacgtcgtgcctggtgacatcctgctgctggacgatggtcgcgtccagttaaaagtactggaagttcagggcatgaaagtgttcaccgaagtcaccgtcggtggtcccctctccaacaataaaggtatcaacaaacttggcggcggtttgtcggctgaagcgctgaccgaaaaagacaaagcagacattaagactgcggcgttgattggcgtagattacctggctgtctccttcccacgctgtggcgaagatctgaactatgcccgtcgcctggcacgcgatgcaggatgtgatgcgaaaattgttgccaaggttgaacgtgcggaagccgtttgcagccaggatgcaatggatgacatcatcctcgcctctgacgtggtaatggttgcacgtggcgacctcggtgtggaaattggcgacccggaactggtcggcattcagaaagcgttgatccgtcgtgcgcgtcagctaaaccgagcggtaatcacggcgacccagatgatggagtcaatgattactaacccgatgccgacgcgtgcagaagtcatggacgtagcaaacgccgttctggatggtactgacgctgtgatgctgtctgcagaaactgccgctgggcagtatccgtcagaaaccgttgcagccatggcgcgcgtttgcctgggtgcggaaaaaatcccgagcatcaacgtttctaaacaccgtctggacgttcagttcgacaatgtggaagaagctattgccatgtcagcaatgtacgcagctaaccacctgaaaggcgttacggcgatcatcaccatgaccgaatcgggtcgtaccgcgctgatgacctcccgtatcagctctggtctgccaattttcgccatgtcgcgccatgaacgtacgctgaacctgactgctctctatcgtggcgttacgccggtgcactttgatagcgctaatgacggcgtagcagctgccagcgaagcggttaatctgctgcgcgataaaggttacttgatgtctggtgacctggtgattgtcacccagggcgacgtgatgagtaccgtgggttctactaataccacgcgtattttaacggtagagtaa

SEQ ID NO: 498 - protein, 480 aa, Escherichia coli
MSRRLRRTKIVTTLGPATDRDNNLEKVIAAGANVVRMNFSHGSPEDHKMRADKVREIAAKLGRHVAILGDLQGPKIRVSTFKEGKVFLNIGDKFLLDANLGKGEGDKEKVGIDYKGLPADVVPGDILLLDDGRVQLKVLEVQGMKVFTEVTVGGPLSNNKGINKLGGGLSAEALTEKDKADIKTAALIGVDYLAVSFPRCGEDLNYARRLARDAGCDAKIVAKVERAEAVCSQDAMDDIILASDVVMVARGDLGVEIGDPELVGIQKALIRRARQLNRAVITATQMMESMITNPMPTRAEVMDVANAVLDGTDAVMLSAETAAGQYPSETVAAMARVCLGAEKIPSINVSKHRLDVQFDNVEEAIAMSAMYAANHLKGVTAIITMTESGRTALMTSRISSGLPIFAMSRHERTLNLTALYRGVTPVHFDSANDGVAAASEAVNLLRDKGYLMSGDLVIVTQGDVMSTVGSTNTTRILTVE

SEQ ID NO: 499 - DNA, 1443 bp, Salmonella typhimurium
  CDS (1)..(1443): transl_table=11
atgtccagaaggcttcgcagaaccaaaatcgttaccacgttaggcccggcaactgaccgcgataacaaccttgagaaggttatcgccgcgggcgcaaacgtagtacgtatgaacttctctcacggctcgccggaagatcataaaatgcgtgctgataaagtccgtgagattgccgccaaactggggcgtcatgtggctattttaggcgacctgcaagggccaaaaattcgcgtttccacttttaaagaaggcaaagtgttcctcaacatcggggacaaatttctgttagacgctaacctgggtaaaggcgaaggcgacaaagaaaaagtcggcattgattacaaagggttgccggcagacgtcgttcctggcgatatcctgctgcttgacgatggtcgagtgcagttgaaagtgcttgaagtccagggcatgaaagtctttaccgaggtcaccgtcggcggcccgctgtctaacaataaaggcattaacaagctcggcggcgggctttctgctgaagcgctgaccgaaaaagacaaagccgatattcaaaccgctgcgctgataggtgttgactatctggccgtctccttcccgcgctgcggcgaagatctgaactatgcacgccgcctggcgcgcgacgccggctgcgacgcgaaaattgtggctaaggtcgaacgcgccgaagcggtatgcgaccaaaacgccatggacgatatcattctggcctctgacgttgtgatggtcgcacgtggcgatctgggcgttgaaatcggcgatccggagctggttggtatccagaaagcgctgattcgccgtgcgcgtcagctaaaccgcgcagtcatcaccgcaacgcaaatgatggagtcgatgatcaccaacccgatgccgacccgtgcggaagtgatggacgtggcgaacgccgtcctggatggcacggatgcggttatgctgtctgccgaaaccgcagccggtcagtatccttctgaaaccgttgccgcaatggcgcgcgtctgcctgggcgcagaaaaaatccccagcatcaatgtgtctaaacaccgtctcgacgtgcagttcgacaacgttgaagaagccattgccatgtctgcgatgtatgcggcaaaccatctgaaaggcgttaccgcgatcatcaccatgacggaatccggtcgtaccgcgctaatgacttcccgtatcagctccggcctgccgattttcgccatgtcgcgccatgaacgcacgctgaacctgaccgcgctctatcgcggagtaacgccggtgcattttgatagcgcggctgatggcgttgtcgcggcacatgaagctgttaatctgctgcgcgataaagggtatctggtttccggcgacctggttatcgtgacccagggcgatgtcatgagcaccgtcggttcaaccaataccacgcgtattttgaccgttgagtaa

SEQ ID NO: 500 - protein, 480 aa, Salmonella typhimurium
MSRRLRRTKIVTTLGPATDRDNNLEKVIAAGANVVRMNFSHGSPEDHKMRADKVREIAAKLGRHVAILGDLQGPKIRVSTFKEGKVFLNIGDKFLLDANLGKGEGDKEKVGIDYKGLPADVVPGDILLLDDGRVQLKVLEVQGMKVFTEVTVGGPLSNNKGINKLGGGLSAEALTEKDKADIQTAALIGVDYLAVSFPRCGEDLNYARRLARDAGCDAKIVAKVERAEAVCDQNAMDDIILASDVVMVARGDLGVEIGDPELVGIQKALIRRARQLNRAVITATQMMESMITNPMPTRAEVMDVANAVLDGTDAVMLSAETAAGQYPSETVAAMARVCLGAEKIPSINVSKHRLDVQFDNVEEAIAMSAMYAANHLKGVTAIITMTESGRTALMTSRISSGLPIFAMSRHERTLNLTALYRGVTPVHFDSAADGVVAAHEAVNLLRDKGYLVSGDLVIVTQGDVMSTVGSTNTTRILTVE

SEQ ID NO: 501 - DNA, 1521 bp, Saccharomyces cerevisiae
  CDS (1)..(1521)
atgccagagtccagattgcagagactagctaatttgaaaataggaactccgcagcagctcagacgcacctccataataggtaccattgggcccaagacaaatagctgcgaggccattactgctctgagaaaagctggtttgaacatcattcgattgaacttttcccatggctcctacgaattccatcaatcagtaatcgaaaatgctgtgaaatcggaacagcaattccctggcaggccgctcgccattgccctggataccaagggtcccgagatcagaacaggtcgcacgttaaatgaccaagatctttatatccccgtagaccaccaaatgatctttaccactgacgcaagttttgcaaacacctccaatgataaaatcatgtatatagactatgctaacctgacaaaagttatcgttccggggagatttatatacgtggacgacgggattctctcttttaaagtgctccaaatcattgacgaatctaatttaagggtgcaagcggtaaactcgggttatatcgcatctcataaaggtgttaatctgcctaataccgacgttgatttgccccccttgtccgccaaagacatgaaggacttgcaattcggagtccgcaatggcattcacatcgtatttgcctctttcataagaacttcagaagatgtgttgtctatcagaaaagcgttgggttctgaagggcaagatatcaagattatatccaagatagaaaaccagcaagggttggataattttgacgaaatcctggaagtcacggatggtgttatgatagcgagaggcgatttaggaattgaaatcctggcacctgaagtattagccattcaaaaaaagctgattgcaaaatgtaatttggcgggcaaacctgtcatttgcgcgactcagatgctggattcaatgacacacaatccgagaccgacaagggctgaagtatcggatgtgggtaacgctgtgttggatggtgctgattgtgttatgctttctggagaaacggcgaagggtgattatccggtgaatgcagttaatattatggcggcgaccgctctgattgctgaaagtactatcgctcatttggctctttatgacgatctcagagacgccactcccaaacctacttccactacggaaactgtagcagctgcagctaccgcagcaatcttggagcaagatggtaaggccatcgttgtattatctactacagggaacacggcaaggctactgtcgaagtatagaccaagctgccctatcatattagtaacaagacacgcaagaacggcaagaattgcgcatttgtatagaggtgttttcccatttctgtatgaaccgaaacgcctagacgactggggtgaggatgttcataggcgcctaaagtttggtgttgaaatggcgaggtctttcggaatggtggacaacggtgatactgttgtttccattcaaggattcaaaggaggagtcggccattccaataccttacgcatttctactgttggtcaagaattctag

SEQ ID NO: 502 - protein, 506 aa, Saccharomyces cerevisiae
MPESRLQRLANLKIGTPQQLRRTSIIGTIGPKTNSCEAITALRKAGLNIIRLNFSHGSYEFHQSVIENAVKSEQQFPGRPLAIALDTKGPEIRTGRTLNDQDLYIPVDHQMIFTTDASFANTSNDKIMYIDYANLTKVIVPGRFIYVDDGILSFKVLQIIDESNLRVQAVNSGYIASHKGVNLPNTDVDLPPLSAKDMKDLQFGVRNGIHIVFASFIRTSEDVLSIRKALGSEGQDIKIISKIENQQGLDNFDEILEVTDGVMIARGDLGIEILAPEVLAIQKKLIAKCNLAGKPVICATQMLDSMTHNPRPTRAEVSDVGNAVLDGADCVMLSGETAKGDYPVNAVNIMAATALIAESTIAHLALYDDLRDATPKPTSTTETVAAAATAAILEQDGKAIVVLSTTGNTARLLSKYRPSCPIILVTRHARTARIAHLYRGVFPFLYEPKRLDDWGEDVHRRLKFGVEMARSFGMVDNGDTVVSIQGFKGGVGHSNTLRISTVGQEF

SEQ ID NO: 503 - DNA, 1377 bp, Aeropyrum pernix
  CDS (1)..(1377): transl_table=11
atgagggggcctgtcaagatagtcgccacggtagggccatcatcatcctctgcctccatactagcacagatgctcagcctaggagttgatgtggctaggataaacgccagccacgggggtgtagagcagtggaatagcatgctggagtcgcttaggagggctgaggaggctgtcgggaagagggtcggagtggctgtcgacctagagggccctagggttaggactggtaacagcgagcctgttaagctggagaagggtgatctcgttacactaggcttcatggagggcgacgtgccggttgacgccagacagtttttcgaaacaatagacgagggcgatatagtgcttctcgacgacgggaagataatcctccaggtggagtctgtggaggggttccgggttaaagccagggttctagagggtggagtgctagggcctaggaagggcgtggttgttagaggtaaggagcccgatctcccgccactctcggctaaggataggagggcgctcgagttcttcgctgacaagggggtcagccacgtctatgtgagcttcgcccgcagtgctgaacatgttgagaaggttcgtaccgtggtgagaaggctcggactgaggcaggccaggattttcgccaagatagaggggcctagcggcgtgtctaggataggagagattgctgaggccagcgatggcgtgataatagctagaggagacctcgggatgcactacagcctagaggagctcccggagattcaggagcttatagtatgggaggctaggaagaggtacaagactgttgtgctagccacggagttcctgtcaagcatgatcgagaagccggtccccactagaagcgaggtagtcgatatataccaggcggtgcttcagacggcggacgcgctcatgctgacgggtgagactgccataggcaagtaccccgtcaagtctgtacagtggatggcaaagatatcctcccgagcctacaaaaagctggcgactagccccccggagaggcccaggcccacgtcgaccccctacaagctagcattggggcttgtagagctggcggagagcctcgactcccctctagtcgtctacagtaagaccggcaggttcgccgagaggcttgcaagcttcaagccgctcaaaaccttctacgtgggggtgcccagccgtgaggtggagagggttgtcagacacctctggggggctgagcccatagttgtgggcgattatccctacgaagcgggcctcgccaagacctatgagaagcttcgtagagagaacattatacacggtgatgaaaccgtggttgaggcggcctggagcagcgagaggggaatatacataatcagagttaggaacctggagttctag

SEQ ID NO: 504 - protein, 458 aa, Aeropyrum pernix
MRGPVKIVATVGPSSSSASILAQMLSLGVDVARINASHGGVEQWNSMLESLRRAEEAVGKRVGVAVDLEGPRVRTGNSEPVKLEKGDLVTLGFMEGDVPVDARQFFETIDEGDIVLLDDGKIILQVESVEGFRVKARVLEGGVLGPRKGVVVRGKEPDLPPLSAKDRRALEFFADKGVSHVYVSFARSAEHVEKVRTVVRRLGLRQARIFAKIEGPSGVSRIGEIAEASDGVIIARGDLGMHYSLEELPEIQELIVWEARKRYKTVVLATEFLSSMIEKPVPTRSEVVDIYQAVLQTADALMLTGETAIGKYPVKSVQWMAKISSRAYKKLATSPPERPRPTSTPYKLALGLVELAESLDSPLVVYSKTGRFAERLASFKPLKTFYVGVPSREVERVVRHLWGAEPIVVGDYPYEAGLAKTYEKLRRENIIHGDETVVEAAWSSERGIYIIRVRNLEF

SEQ ID NO: 505 - DNA, 1599 bp, Agaricus bisporus
  CDS (1)..(1599)
atgtatcccgtcgatggcatccgttctcagatcgagtggaacaccactcttaacgtctctgatgctcctgtcccgactgagaccactaaatatcatcgcaagacagctatcattgcgaccattgggcctaaaatcaataccgtcgaaaagctcactgacgttcgcctagctggtgtaaacatcgttcgcatgaatttctcgcacggcacccatgagtaccatcagagtgttattgataacaccaggcaaatgatcaaaaacgacccacatgggcgccccgtagctattgctttggataccaaaggtcccgaaattcggaccggtcagacgagggatggcaatgactatcccattaaggctggggatgaatttatcgtcaccacagatcccaagtatagtgatatatgcgacaataaagttttgttcgttgactacgccaatcttgcaagcgtcactgcccctggcaaactgatctatattgatgatggtatcatctctcttctcattctctctattgatggtatgaacctccatgttcgtgctctcaataatgggaccctctcctctcgcaagggtgtaaatttgcccaaaacggacgtcgaccttccaccactttccgagaaagacaaagatgatctgcgtttcgggattcgtaatggagtcgatatgatcttcgcgtcttttatccgccgtggtgaggacgtaagacagatccgtgaagttctcggccccgatggtgccagcatcaaaattatcgtcaagattgaaaatgagcaaggtgtcgctaactttgatgagattttaaaggaggccgacggtgtcatggttgctcgcggcgatttgggaattgaaattcctgcaagtcaagtattccttgctcagaagatgatgatcgccaagtgcaacattgttgggaagccagtgatcgtcgcaactcaaatgcttgagtccatgacgtacaacccccggcctactcgtgcggaagttagtgacgtcgcaaatgctgtccttgatggctctgattgtgtcatgttgtcgggagagactgctaagggatcttatcccgttcaatctgtcctgatgatggcggagacttgcttgcttgcggaaactgctatttgctacccgcctctatatgacgacctccgcgctgtccaggctcggccaacagaaactgcggagactgttgctatcgccgctgttgctgctgcagccgaacaggatgccaaagcactacttgtcctatcaacaagtggggagactgcccgtctcgtttccaagtatcgccccaagatcccgatcatcactgtcacccgtaatgagcaaaccgcaagacaaatccacttgcatcgcggttgctatcctttctggtaccctgaacctcgaggtgtccaaaaccatcaatggcagactgatgtggacaaccgcatccggtttggtcttcgcaacgctttggcactcaatgtcatccaacctggcgccagtattatcgcagtgcagggttggaagggcggtcttggtcacaccaatacgcttcgcattctgacagtgcccactgaccctgccgaccttgagcttcagcctctgggttctctataa

SEQ ID NO: 506 - protein, 532 aa, Agaricus bisporus
MYPVDGIRSQIEWNTTLNVSDAPVPTETTKYHRKTAIIATIGPKINTVEKLTDVRLAGVNIVRMNFSHGTHEYHQSVIDNTRQMIKNDPHGRPVAIALDTKGPEIRTGQTRDGNDYPIKAGDEFIVTTDPKYSDICDNKVLFVDYANLASVTAPGKLIYIDDGIISLLILSIDGMNLHVRALNNGTLSSRKGVNLPKTDVDLPPLSEKDKDDLRFGIRNGVDMIFASFIRRGEDVRQIREVLGPDGASIKIIVKIENEQGVANFDEILKEADGVMVARGDLGIEIPASQVFLAQKMMIAKCNIVGKPVIVATQMLESMTYNPRPTRAEVSDVANAVLDGSDCVMLSGETAKGSYPVQSVLMMAETCLLAETAICYPPLYDDLRAVQARPTETAETVAIAAVAAAAEQDAKALLVLSTSGETARLVSKYRPKIPIITVTRNEQTARQIHLHRGCYPFWYPEPRGVQNHQWQTDVDNRIRFGLRNALALNVIQPGASIIAVQGWKGGLGHTNTLRILTVPTDPADLELQPLGSL

SEQ ID NO: 507 - DNA, 1506 bp, Ashbya gossypii
  CDS (1)..(1506)
atggaatctagattgggatggctaactcgtttgaactacgacactggttctgcattgagaagaacgtcgatcatcgggacgattggtcctaagaccaacaacccagagacgttggtggagcttagaaaggcgggcttgaacatcgtgagaatgaacttctcgcacggctcgtacgagtaccaccagtcggtgatcgacaacgccagaaagtcggaggagttgtaccctggtagaccattggccattgcgttggacaccaagggtcctgagatcagaactggtaccactgtcgacaacgtcgactacccaatcccacctaaccacgagatgatcttcaccaccgacgaccagtacgccaagtcctgcgacgacaaagtcatgtttgtcgactacaagaacatcacgaaggtgattgagaagggcagagtgatttacgttgacgacggtgttctatcgttcgaggtgttggaggtcgtggacgacaagaccttgaaggtcaagtctttgaacgcagggaagatctgctcccacaagggtgtgaacttgccgggtaccgatgtcgacttgccagctctgtctgagaaggacaagtctgacttgcgcttcggtgtcaagaacggtgtgcacatggtcttcgcttccttcatcagaactgctggagacatcctaactatcagagagatcttgggcgaggatggcaaggacatcaagatcatcgccaagattgagaaccagcagggtgtgaacaacttcgacgagattttgaaggtcaccgacggtgttatggtcgccagaggtgacttgggtatcgagatcccagcgcctcaggtatttgctgtgcaaaagatgttgatcgccaagtgtaacttggctggtaagccagttatctgtgccacccagatgttggagtctatgacctataacccaagaccaaccagagctgaggtttctgacgttggtaacgctgtcctggacggtgctgactgtgttatgttgtctggtgagaccgccaagggtatctacccaatcaacgctgttaagaccatggctgagactgctttgattgctgagcaggccattccatacgttccaacttacgatgacctcagaaacttgactccaaagccaactccaacctccgagaccatcgctgctgctgctgtcgcggctactttcgagcagaaggccaaggccattgtcgtgctatccacctccggtgacaccaccagattggtctccaagtacaagccaaacgttccaatcgttatggtgaccagaaacccaagagcggccagatactgccacttgcacagaggtgtcttcccattcgtctacgaacaggaggcagctgatgagtggaccgatgacgtcgaggccagattgaacttcggtgtggagaagtccaaggagcttggtatcctgagcgagggtgacactattgtcactattcagggtttcgcgtctggtgttggccactctaacaccttgagggtgttgaccgtctaa

SEQ ID NO: 508 - protein, 501 aa, Ashbya gossypii
MESRLGWLTRLNYDTGSALRRTSIIGTIGPKTNNPETLVELRKAGLNIVRMNFSHGSYEYHQSVIDNARKSEELYPGRPLAIALDTKGPEIRTGTTVDNVDYPIPPNHEMIFTTDDQYAKSCDDKVMFVDYKNITKVIEKGRVIYVDDGVLSFEVLEVVDDKTLKVKSLNAGKICSHKGVNLPGTDVDLPALSEKDKSDLRFGVKNGVHMVFASFIRTAGDILTIREILGEDGKDIKIIAKIENQQGVNNFDEILKVTDGVMVARGDLGIEIPAPQVFAVQKMLIAKCNLAGKPVICATQMLESMTYNPRPTRAEVSDVGNAVLDGADCVMLSGETAKGIYPINAVKTMAETALIAEQAIPYVPTYDDLRNLTPKPTPTSETIAAAAVAATFEQKAKAIVVLSTSGDTTRLVSKYKPNVPIVMVTRNPRAARYCHLHRGVFPFVYEQEAADEWTDDVEARLNFGVEKSKELGILSEGDTIVTIQGFASGVGHSNTLRVLTV

SEQ ID NO: 509 - DNA, 1581 bp, Aspergillus niger
  CDS (1)..(1581)
atggccgccagctcttccctcgaccacctgagcaaccgcatgaagttggagtggcactccaagctcaacactgagatggtgccctccaagaacttccgccgcacctccatcatcggaaccatcggccccaagaccaactccgtggagaagatcaactctctccgcactgccggtcttaacgttgttcgcatgaacttctcccacggttcttatcagtaccaccaatctgttatcgacaacgcccgcgaggccgccaagacccaggtcggacgtcctctcgccattgctcttgataccaaaggacccgagatccgtaccggaaacacccccgatgataaggatatccctatcaagcagggccacgagctcaacatcaccaccgacgagcaatatgccaccgcctccgacgacaagaacatgtacctcgactacaagaacatcaccaaggtgatctctcctggcaagctcatctatgttgatgacggtatcctttccttcgaggtcctcgaagtcgtagatgacaagaccatccgcgtccggtgcttgaacaacggcaacatctcttcccgcaagggtgttaacttgcccggcactgacgttgacctccccgccctttccgagaaggacattgccgatctcaagttcggtgttaggaacaaggtcgacatggtcttcgcttctttcatccgccgcggtagcgacattcgccacatccgtgaggttctgggtgaggagggcaaggagatccagatcattgccaagattgagaaccagcagggtgtcaacaacttcgacgagatcctcgaagagactgacggtgtcatggttgcccgtggtgaccttggtatcgagatccccgcccccaaggtcttcatcgcccagaagatgatgatcgccaagtgtaacatcaagggtaagcccgtcatctgtgccactcagatgctcgagtccatgacatacaaccctcgtcctactcgtgccgaggtgtccgatgttgccaacgccgtccttgacggtgccgactgtgtcatgctgtcgggagagaccgccaagggtaactaccccaacgaggccgtcaagatgatgtccgagacctgcctgctcgccgaggttgccatcccccacttcaatgtgttcgatgagctccgcaaccttgctcctcgccccaccgacactgtcgagtccatcgccatggctgccgttagcgccagtctggaactcaacgctggtgccattgtcgtcttgactaccagcggtaaaactgctcgctacctttccaagtaccgccccgtctgccccattgtcatggttacccgtaaccccgctgcctcccggtactctcacctgtaccgtggtgtctggcccttcctcttccccgagaagaagcccgacttcaacgtcaaggtctggcaggaggatgttgaccgccgtctcaagtggggtatcaaccacgctcttaagctcggcatcatcaacaagggtgacaacatcgtctgtgtccagggatggcgcggcggtatgggccacaccaacaccgtccgtgtggtccctgctgaggagaaccttggcctggctgagtaa

SEQ ID NO: 510 - protein, 526 aa, Aspergillus niger
MAASSSLDHLSNRMKLEWHSKLNTEMVPSKNFRRTSIIGTIGPKTNSVEKINSLRTAGLNVVRMNFSHGSYQYHQSVIDNAREAAKTQVGRPLAIALDTKGPEIRTGNTPDDKDIPIKQGHELNITTDEQYATASDDKNMYLDYKNITKVISPGKLIYVDDGILSFEVLEVVDDKTIRVRCLNNGNISSRKGVNLPGTDVDLPALSEKDIADLKFGVRNKVDMVFASFIRRGSDIRHIREVLGEEGKEIQIIAKIENQQGVNNFDEILEETDGVMVARGDLGIEIPAPKVFIAQKMMIAKCNIKGKPVICATQMLESMTYNPRPTRAEVSDVANAVLDGADCVMLSGETAKGNYPNEAVKMMSETCLLAEVAIPHFNVFDELRNLAPRPTDTVESIAMAAVSASLELNAGAIVVLTTSGKTARYLSKYRPVCPIVMVTRNPAASRYSHLYRGVWPFLFPEKKPDFNVKVWQEDVDRRLKWGINHALKLGIINKGDNIVCVQGWRGGMGHTNTVRVVPAEENLGLAE

SEQ ID NO: 511 - DNA, 1758 bp, Bacillus licheniformis
  CDS (1)..(1758): transl_table=11
atgagaaagactaaaatagtttgtacaattggaccggccagcgaaagtgttgaaaagctcacccagctgatggaagccggaatgaacgtggcgcgcctgaacttttcccatggagatttcgaagagcacggcgcaagaattaaaaacattcgtgaagcagccggcaagctgggaaaagatatcggcatccttcttgacacgaaagggcctgaaatccgcacgcacacaatggaaaacggttcgatcgaactggcagcgggttctcagctgatcgtttcaatggacgaagtcatcggtacgcctgataaaatctcagttacatatgatgggttgattcacgatgtgtcagtcggttcaacgattttgcttgacgatggattggtcggacttgaagtcactgacataaacaaggacaagcgtgaaatcgtcacgaaagtgatgaacagcggaacgttgaaaaacaaaaaaggcgtgaatgtgccgggcgtcagcgtcaatcttccgggaattacggaaaaagatgcaaacgacatcgtattcggcatcgagcagggcgttgatttcatcgcggcatcctttgtgcgccgtccgtcggatgtccttgaaatccgcgaacttcttgaagagcacaatgcggcagatattcaaatcattccaaaaatcgaaaaccaggaaggcgttgacaacatcgatgccattcttgaagtatcagacggtctgatggttgcgcgtggagacctgggtgtagaaatccctgccgaagaagtgccgctcgttcaaaaagaactgatcaaaaaatgcaatgcgcttggcaagcctgtcatcacggctacccaaatgctcgacagcatgcagcgcaatccgcgcccgacacgcgcggaagcgagcgacgttgccaatgcgatctttgacggaactgacgcaatcatgctttcaggtgaaacggcagcgggaaattatcctgttgaagccgttcagacgatgcacaatatcgcttcccgttcagaagaagcgctcaaccataaaaagatcctttccgcacgaagcaagcaagtcagcatgtcaattacggatgcgatcggccaatctgtggcgcatacggcaatcaaccttgatgtgaatgccatcgtcacaccgacggaaagcggccatacggcgagaatgatttccaaatatcgcccgcaggcgccgattgtcgcagttacggtaaacgatgcggtgtcaagaaagctgtcacttgtgttcggggttttcgcaacaagcggacaaaaccacagctccactgacgaaatgcttgaaaaagcggtgcaaaaatctctcgatacaggcatcgtacgccacggcgacttgatcgttatcacggccggagctgtcggtgaagccggtacaacaaacttgatgaaagtgtatgttgtcggagacgtggtcgcaaaaggccagggcatcggacgcaaatccgcatttggtgaagtggtcatcgctcaaaacgcacaagaagcggccaaaaaaatgaaagatggcgccgttttagttacaaaaagcacggatcgtgacatgatggcatcccttgaaaaagcggctgcgctgattacggaagaaggcggcttaacaagccacgcggcagtcgtaggcttaagcctcggcatccctgtcatcgtcggaatggaaaatgcgacttccattctgaaagagggagaagacatcacggtcgactccgcccgcggagctgtatacaaaggacgtgcaagcgtgctttaa

SEQ ID NO: 512 - protein, 585 aa, Bacillus licheniformis
MRKTKIVCTIGPASESVEKLTQLMEAGMNVARLNFSHGDFEEHGARIKNIREAAGKLGKDIGILLDTKGPEIRTHTMENGSIELAAGSQLIVSMDEVIGTPDKISVTYDGLIHDVSVGSTILLDDGLVGLEVTDINKDKREIVTKVMNSGTLKNKKGVNVPGVSVNLPGITEKDANDIVFGIEQGVDFIAASFVRRPSDVLEIRELLEEHNAADIQIIPKIENQEGVDNIDAILEVSDGLMVARGDLGVEIPAEEVPLVQKELIKKCNALGKPVITATQMLDSMQRNPRPTRAEASDVANAIFDGTDAIMLSGETAAGNYPVEAVQTMHNIASRSEEALNHKKILSARSKQVSMSITDAIGQSVAHTAINLDVNAIVTPTESGHTARMISKYRPQAPIVAVTVNDAVSRKLSLVFGVFATSGQNHSSTDEMLEKAVQKSLDTGIVRHGDLIVITAGAVGEAGTTNLMKVYVVGDVVAKGQGIGRKSAFGEVVIAQNAQEAAKKMKDGAVLVTKSTDRDMMASLEKAAALITEEGGLTSHAAVVGLSLGIPVIVGMENATSILKEGEDITVDSARGAVYKGRASVL

SEQ ID NO: 513 - DNA, 1761 bp, Bacillus psychrophilus
  CDS (1)..(1761): transl_table=11
atgagaaaaacgaaaatagtatgtacgattggccctgcaagtgaatcaccggaattattggaacaacttattgaggctggtatgaatgtagcgaggctgaatttttcccatggtaatcatgcggaacataaagcccgtatcgattccattagaaaagtcgcacgtgaaaaaggcaaagttgttgggattctattagatacgaaaggaccagaaattcggacgcattctatgatgaatggaaagttggaacttgtaacaggacaaaaaattgatatttccatgacgcaagtcgaaggaaacaatgatgtattttcagtaagttacgataaacttattgaagatgtaaacgagggttctgttattcttttagacgatggtctaatccaattagaagttactggtaaagacgtagcacgagggttaattcatacactaattattaattcggggtcattaagcaataataagggcgttaacataccgggtgtttcagtacaacttcctggaatgacggaaaaagatgcagaagatatcctgtttggtattagggaaggtgtcgacttcatagctgcctcattcgtaagacgggcttccgatgttatggaaatccgtgcccttcttgagaacaacaacggctcgaacctgcaaattattccgaagatagaaaaccaagaaggcgtcgacaatatcgatgaaattttgaatgtttcagatggtcttatggtagcacgtggtgatctgggtgtagaaataccaccagaagaagtaccacttgtccagaaaaatttgattgagaagtgtaaccaggcgggtaaaccggttatcacggcaacacaaatgcttgattcgatgcagcgtaacccgcgtcctacacgtgcagaagcgagcgatgtagcgaatgcgatttttgacggtaccgatgcaattatgctgtcaggagagacggcagcaggaatttatccagtcgaatcagtccaaacgatggatcgaattgcgcttactacggaagctgccatcgattatcgctctgtagtgtcgacacgtcgacgagaaaaacatggtaatatgactgaagcgattggacaagctgcagcatacacggctatcaacttgaaagtgaaggctgtccttgccccaacagaaagtggtcacacagctaaaatgattgccaaatatcgtccaggttgcccagttattgcggtaacgtcatctgaaatgtgttcaagaaaactatcacttatctggggcgtctacccgatagttggaaaaaaagcttcttcgattgatgaaatcttgcaagagtctgtagaagagagtgttaaacatcaatatgtcggacatggtgatgtggttatcattacagcaggtgttccagttggtgaagcgggaacgacgaacttgatgaaaatacatgtcataggtgatttgcttgcacgaggacaaggaattggcaaagatgtagcttatggtcgaactgttgtagccaaaaatgcagctgaagcattggcgtatgatacagaaggagctattcttgtaacgaacgcatctgatcgtgatatgatgcctgccatcgagaaatgcgcaggactcattacggaagaaggcggattgacgagtcatggtgcaattgtcggactcagtttaggtataccgataattgtcggagttgaaaatgctaccgagcttatccaacatggcaaggaaattacgatggatgctgaatctggcgttatctataatggacacgcgagcgttctataa

SEQ ID NO: 514 - protein, 586 aa, Bacillus psychrophilus
MRKTKIVCTIGPASESPELLEQLIEAGMNVARLNFSHGNHAEHKARIDSIRKVAREKGKVVGILLDTKGPEIRTHSMMNGKLELVTGQKIDISMTQVEGNNDVFSVSYDKLIEDVNEGSVILLDDGLIQLEVTGKDVARGLIHTLIINSGSLSNNKGVNIPGVSVQLPGMTEKDAEDILFGIREGVDFIAASFVRRASDVMEIRALLENNNGSNLQIIPKIENQEGVDNIDEILNVSDGLMVARGDLGVEIPPEEVPLVQKNLIEKCNQAGKPVITATQMLDSMQRNPRPTRAEASDVANAIFDGTDAIMLSGETAAGIYPVESVQTMDRIALTTEAAIDYRSVVSTRRREKHGNMTEAIGQAAAYTAINLKVKAVLAPTESGHTAKMIAKYRPGCPVIAVTSSEMCSRKLSLIWGVYPIVGKKASSIDEILQESVEESVKHQYVGHGDVVIITAGVPVGEAGTTNLMKIHVIGDLLARGQGIGKDVAYGRTVVAKNAAEALAYDTEGAILVTNASDRDMMPAIEKCAGLITEEGGLTSHGAIVGLSLGIPIIVGVENATELIQHGKEITMDAESGVIYNGHASVL

SEQ ID NO: 515 - DNA, 1764 bp, Bacillus stearothermophilus
  CDS (1)..(1764): transl_table=11
atgaagcggaaaacgaaaatcgtctgcacgatcgggccggcaagcgagagcgtagacaagctcgtgcaactgatggaagcgggaatgaacgtggcgcgcctaaacttttcgcacggcgatcatgaagagcacgggcggcgcatcgccaatattcgcgaagcggcgaagcgaacgggccgaacggtcgccattttgcttgacacgaaagggccggaaatccggacgcacaatatggaaaacggcgccattgagctgaaggaagggtcaaagctcgtcatttcgatgagcgaagtgctcggcacgccggaaaaaatttcggtcacctatcccagcttaatcgatgatgtgtccgtcggcgcgaaaattttgcttgatgacgggctcatcagcctggaagtcaacgcggtcgacaagcaagcgggagaaatcgtcacgaccgtgttaaacggcggcgtgctgaaaaacaaaaaaggagtcaatgtgccgggtgtcaaagtcaacttgccaggcatcaccgagaaagatcgggctgacattttgtttggcattcgccaagggatcgatttcatcgccgcctcgtttgtgcgccgggcgtccgatgtgctggagatccgcgagctgcttgaggcgcatgacgccctccatatccaaattatcgccaaaattgaaaatgaagaaggcgtcgccaacattgacgaaattttagaagccgccgacggcctgatggtggcgcgcggcgatttgggcgtggaaattccggctgaggaagtgccgctcattcaaaaactgctcattaaaaagtgcaacatgctcggcaagccggtcattacggcgacgcaaatgctcgattcgatgcagcgcaatccgcgtccgacgcgggcggaggcgagcgacgtcgccaacgccatttttgacggcaccgacgccgtcatgctttccggggaaacggcggccggccagtatccggtcgaagcggtgaaaacgatgcaccaaatcgcgctccgcaccgaacaggcgcttgagcaccgcgacattttgtcccaacgcacaaaagaaagccaaacgacgatcaccgacgccatcgggcagtcggtcgcccacaccgcgctcaacttggatgtggcggcgatcgtgacgccgaccgtgagcggaaaaacgccgcaaatggtggcgaagtatcgcccgaaagcgccgattattgccgtgacgtcaaatgaagcggtatcgcgccggctggcgcttgtgtggggcgtgtatacgaaagaagcgccgcatgtgaacacgacggacgaaatgctcgatgtcgccgtcgatgcggcggtgcgctccgggttggtgaagcacggtgacttggtcgtcatcacggctggcgtgccggtcggcgaaacgggttcgacgaacttaatgaaggtgcacgttatcagcgatcttctcgccaaagggcaaggcatcggccgcaagtcggcgttcggcaaggccgttgtagcgaaaacagcggaagaagcgcggcaaaaaatggtcgacggcggcattttagtcactgtcagcaccgatgccgacatgatgccggcgatcgaaaaagcggcagccatcattactgaagagggcgggttgaccagccatgcggcggtcgtcggtttgagccttgggattccagtgattgtcggagtggaaaacgcaacaaccttgtttaaagatgggcaggagattacggtggacggcgggttcggtgccgtctatcgcggccatgccagcgtgttgtaa

SEQ ID NO: 516 - protein, 587 aa, Bacillus stearothermophilus
MKRKTKIVCTIGPASESVDKLVQLMEAGMNVARLNFSHGDHEEHGRRIANIREAAKRTGRTVAILLDTKGPEIRTHNMENGAIELKEGSKLVISMSEVLGTPEKISVTYPSLIDDVSVGAKILLDDGLISLEVNAVDKQAGEIVTTVLNGGVLKNKKGVNVPGVKVNLPGITEKDRADILFGIRQGIDFIAASFVRRASDVLEIRELLEAHDALHIQIIAKIENEEGVANIDEILEAADGLMVARGDLGVEIPAEEVPLIQKLLIKKCNMLGKPVITATQMLDSMQRNPRPTRAEASDVANAIFDGTDAVMLSGETAAGQYPVEAVKTMHQIALRTEQALEHRDILSQRTKESQTTITDAIGQSVAHTALNLDVAAIVTPTVSGKTPQMVAKYRPKAPIIAVTSNEAVSRRLALVWGVYTKEAPHVNTTDEMLDVAVDAAVRSGLVKHGDLVVITAGVPVGETGSTNLMKVHVISDLLAKGQGIGRKSAFGKAVVAKTAEEARQKMVDGGILVTVSTDADMMPAIEKAAAIITEEGGLTSHAAVVGLSLGIPVIVGVENATTLFKDGQEITVDGGFGAVYRGHASVL

SEQ ID NO: 517 - DNA, 1758 bp, Bacillus subtilis
  CDS (1)..(1758): transl_table=11
atgagaaaaactaaaattgtttgtaccatcggtccggcaagtgaaagtattgaaatgcttacgaaattaatggagtcaggaatgaacgtggctcgattaaacttttctcacggagattttgaggagcacggtgcaagaattaaaaatatccgcgaagcaagtaaaaaacttggcaagaacgttggaattctgcttgatacaaaaggtcctgaaatccgcacacatacaatggaaaacggcggtattgagcttgaaacaggcaaagagctcattatttcaatggacgaggttgtaggaacaacagataaaatttcagtgacatatgaaggtttagtccatgacgttgaacaaggttcaacgattctgttagatgacggccttatcggtcttgaggtacttgatgtagatgccgctaaacgcgaaatcaaaacaaaagtattaaacaacggaacactcaaaaataaaaaaggtgttaacgtaccgggcgtaagtgtcaatcttccggggattactgaaaaggatgcgcgagacatcgttttcggtattgagcaaggagtagacttcatcgcaccatctttcattcgacgttctacggatgtgctcgaaatccgtgagcttcttgaagagcacaacgctcaggatattcaaatcatccctaaaatcgaaaaccaagagggcgttgacaacatcgatgcgattctcgaagtgtctgacggcttaatggttgcacgcggagacttaggtgtggaaattccagctgaagaagtgccgcttgtgcaaaaagaactgatcaaaaaatgcaacgcgctgggcaaacctgttattacagcgacacaaatgcttgacagcatgcagcgcaacccgcgtccgactcgtgcggaagcaagtgacgttgcaaacgcgatcttcgacggaacagatgcgatcatgctttctggtgaaactgctgccggaagttacccggttgaagcagttcaaacaatgcataacatcgcgtcccgttctgaagaagcattaaattataaagaaattctctcaaaacgcagagaccaagtgggcatgacaattacagacgcaattggacaatctgtcgcacatacggcgattaacctgaatgctgctgcgatcgtaacgccgacagaaagcggccatacagcacgtatgattgcaaaataccgtccgcaggctccgattgttgcggttactgtaaatgactctatttccagaaagcttgccctcgtatctggcgtattcgcggaaagcggccaaaatgcgagctcaacagatgagatgcttgaggatgctgtccaaaaatcattgaacagcggaattgtaaaacacggcgatcttatcgttattacagctggcactgtcggtgagtccggcactacgaacttaatgaaggttcatactgtcggcgatatcatcgctaaaggccaaggcattggacgcaaatcagcttacggtccggttgtcgttgcacaaaatgcaaaagaagctgagcaaaaaatgactgacggtgcggtacttgttaccaaaagcactgaccgtgatatgattgcatcccttgaaaaagcgtctgctcttattacagaagaaggcggtttgactagccatgctgcggtagtcggattaagccttggcatcccggttatcgtgggtctggaaaatgcgacatctattttgacagatggccaggatattacagttgacgcttccagaggcgcagtctatcaaggccgtgcgagcgttctttaa

SEQ ID NO: 518 - protein, 585 aa, Bacillus subtilis
MRKTKIVCTIGPASESIEMLTKLMESGMNVARLNFSHGDFEEHGARIKNIREASKKLGKNVGILLDTKGPEIRTHTMENGGIELETGKELIISMDEVVGTTDKISVTYEGLVHDVEQGSTILLDDGLIGLEVLDVDAAKREIKTKVLNNGTLKNKKGVNVPGVSVNLPGITEKDARDIVFGIEQGVDFIAPSFIRRSTDVLEIRELLEEHNAQDIQIIPKIENQEGVDNIDAILEVSDGLMVARGDLGVEIPAEEVPLVQKELIKKCNALGKPVITATQMLDSMQRNPRPTRAEASDVANAIFDGTDAIMLSGETAAGSYPVEAVQTMHNIASRSEEALNYKEILSKRRDQVGMTITDAIGQSVAHTAINLNAAAIVTPTESGHTARMIAKYRPQAPIVAVTVNDSISRKLALVSGVFAESGQNASSTDEMLEDAVQKSLNSGIVKHGDLIVITAGTVGESGTTNLMKVHTVGDIIAKGQGIGRKSAYGPVVVAQNAKEAEQKMTDGAVLVTKSTDRDMIASLEKASALITEEGGLTSHAAVVGLSLGIPVIVGLENATSILTDGQDITVDASRGAVYQGRASVL

SEQ ID NO: 519 - DNA, 1443 bp, Buchnera aphidicola subsp
  CDS (1)..(1443): transl_table=11
atgttaaatcgattaagaagaacaaaaatcgtagctactttaggaccttctacagacattaataataatttagaaaaaataattcgttctggagtaaatgttcttcgatttaatttctctcatggttcaaaagatgaacataaatccagagcaaatcaagctcgagaaataatgactcgtttaaattttcacattgcattgcttggcgatttacaaggtcctaaaattcgcatttctaaatttataaaaaataatatttttttgaatgttggtgatttttttatattagatgcgaatttagatcaaaataatggaaatcaagaacgggtaggaattgattataaacagttaccatatgatctaaaagtaggtgatgtattattattagatgatggaagaatacaattaaaggttataaaatcaactggtcatgaaatattaacaaaagttgttatcggcggaatactttctaacaataaaggcattaataaactaggtggtggtttatctgcagatgcgttaactgaaaaagacaagaaggatataatcctagcaactgaaattaatgtagactatttagcaatatctttcccacgatgcagtaatgacttgaaacaagcaagaaaattagctaaagaatttggtagcaatgctaaaattatcgctaaaatagaacgtgctgaagctgtattaaatcaaaatactatcgaagatataattttagcatcagatgcaattatgatagctagaggcgatttaggtgtggaaattggagattctgaattagcaggtattcaaaaaaaattaatacgaactgctaggcaattaaatagaatagtaattactgctacacagatgatggaatctatgattactaacccattacctactcgtgcagaagttatggatgtagctaatgctgttttagatggcagtgatgcagttatgctttcggctgaaacagcatcaggcgaatatccagctgaaactgttataaaaatggcaaaaatttgcaaaggtgcagaaaaagttcctagtattaatgtatctagacatcgtattcatgcaaaatttgatgatattgaagaagcaattgctatgtccgcaatgtatgttgctaatcatttgaaaggtattacagcaattataacgatgacagaatcaggtaagactgcactaatgacatcgaggattacatctggattgcctatttttgctttatcaaaaaataaagaaactttaaatttagcaagtctttatagaggtgtgactcctatatattttaatagtaaaaataataattttaaagctgcgaatgaagcaattgttcttttacgtaaacgaggttttttatgtcgtggcgagttagttattataactcaaggtgatattatgggaaaaatcggaaaaactaatactagtagaattttaaaagtagtatga

SEQ ID NO: 520 - protein, 480 aa, Buchnera aphidicola subsp
MLNRLRRTKIVATLGPSTDINNNLEKIIRSGVNVLRFNFSHGSKDEHKSRANQAREIMTRLNFHIALLGDLQGPKIRISKFIKNNIFLNVGDFFILDANLDQNNGNQERVGIDYKQLPYDLKVGDVLLLDDGRIQLKVIKSTGHEILTKVVIGGILSNNKGINKLGGGLSADALTEKDKKDIILATEINVDYLAISFPRCSNDLKQARKLAKEFGSNAKIIAKIERAEAVLNQNTIEDIILASDAIMIARGDLGVEIGDSELAGIQKKLIRTARQLNRIVITATQMMESMITNPLPTRAEVMDVANAVLDGSDAVMLSAETASGEYPAETVIKMAKICKGAEKVPSINVSRHRIHAKFDDIEEAIAMSAMYVANHLKGITAIITMTESGKTALMTSRITSGLPIFALSKNKETLNLASLYRGVTPIYFNSKNNNFKAANEAIVLLRKRGFLCRGELVIITQGDIMGKIGKTNTSRILKVV

SEQ ID NO: 521 - DNA, 1422 bp, Clostridium acetobutylicum
  CDS (1)..(1422): transl_table=11
atgcaaaaaactaaaatgatttttacagttggaccagcaagtgagacagaggagattgtaacagctttcataaaagctggaatgaatgcttcaagacataacttttcacacggtgatcatgcagagcacggtggaagaatagctttagtaaaaaaggttagagcaaagcttaataagcctgtagctatatgccttgatactaaaggaccagaaataagaactggagatttcaatccttcaaagcttgaacttcaaaaaggttcaaaatttactatcgtttgtggcgaagaaatagttggagatgctacaaaatgttcaatatcatataaagatttatacaaagatgtaaaaccaggaaacactatattaatagatgatggtttagttggacttacagtagaagctatagaaggaacaaatgtaatttgtactgtagcaaatacaggattagttggaagccataaaggagtaaatgttccaaacgtttcaatacaacttcctgcaatgacagaaaaagataagagcgatttaatattcggatgtaaagaagaaatagatatggtaagtgcatcattcataagaaaacctgaagatgtacttgcaataagaaaagtattaaatgagaatggcggagaaaacattcaaatattctctaaaattgaaaatcaagaaggcgtggacaacatagatgctattatagaagtttctgacggaataatggtagctagaggagatatgggagttgaaattcctatacaaagagttccattaatccaaaaaatgataatcaaaaaatgtaatgcagtaggaaaacctgttataacagcaactcaaatgcttgattcaatgatgagaaatccaagacctacaagagcagaagcttcagatatagcaaatgctatatttgatggaacagatgctataatgttaagtggagaaagcgctaatggatcatatccaatagaagctgtaactacaatggcaaaaatagcacaagaggcagaaaatgaaatcaattatgataaattcctagcagaaagaaaaggaaatgaaaagaaaaatacttctgatgtaataagtcttggaacttgcacagcagcagcagacttagaagcttcagcaataataactgcaactcaaacaggaagcacagcaagaacagtttcaaaatatagaccaaaagcacctgtaatagcagttactccatctgaaaaagtagcaagaaaacttgcaatgagctggggagtacaccctataatatctgataaatttggttcaactgatgaacttatctctacttcagtagataaagcccttgaagcaggatatgtacaaaaaggagatcttgtagttgtagctgcaggtgtaccaacaaatgtatcaggtactacaaacatgcttaaagttcaagttgttgagtaa

SEQ ID NO: 522 - protein, 473 aa, Clostridium acetobutylicum
MQKTKMIFTVGPASETEEIVTAFIKAGMNASRHNFSHGDHAEHGGRIALVKKVRAKLNKPVAICLDTKGPEIRTGDFNPSKLELQKGSKFTIVCGEEIVGDATKCSISYKDLYKDVKPGNTILIDDGLVGLTVEAIEGTNVICTVANTGLVGSHKGVNVPNVSIQLPAMTEKDKSDLIFGCKEEIDMVSASFIRKPEDVLAIRKVLNENGGENIQIFSKIENQEGVDNIDAIIEVSDGIMVARGDMGVEIPIQRVPLIQKMIIKKCNAVGKPVITATQMLDSMMRNPRPTRAEASDIANAIFDGTDAIMLSGESANGSYPIEAVTTMAKIAQEAENEINYDKFLAERKGNEKKNTSDVISLGTCTAAADLEASAIITATQTGSTARTVSKYRPKAPVIAVTPSEKVARKLAMSWGVHPIISDKFGSTDELISTSVDKALEAGYVQKGDLVVVAAGVPTNVSGTTNMLKVQVVE

SEQ ID NO: 523 - DNA, 1428 bp, Corynebacterium glutamicum
  CDS (1)..(1428): transl_table=11
gtggatagacgaactaagattgtatgtaccctaggcccagcggtggctagtgcagatggaattctgcgtttggtagaagacggcatggatgttgctcgcctcaacttctcccatggtgaccacccagatcatgagcaaaactacaagtgggtccgcgaggcggcggagaagactggccgtgcagtcggtattctcgcagacctccaaggaccgaagatccgtcttggccgtttcactgacggcgcaaccgtgtgggaaaacggcgagaccattcggatcaccgttgacgatgtagagggaacgcacgatcgtgtgtccaccacctacaagaatctggcaaaagacgcgaagccaggcgaccgcctgctcgttgatgacggcaaggttggcctcgtctgcgtttccgtcgaaggtaacgacgtcatctgtgaggttgttgagggcggaccagtctccaacaacaagggtgtttccctgccaggtatggatatttccgtacctgcactgtccgaaaaggatatccgtgacctgcgcttcgccctgaagctcggcgtggactttattgcactgtccttcgtacgttccccagcagatgctgaactcgttcacaagatcatggacgaagaaggtcgtcgtgttcctgtgatcgccaagctggaaaagccagaggctgtcacctccctcgagccaatcgtgttggcattcgacgccgtcatggttgctcgtggtgacctcggcgttgaggttcctctggaggaggttccactggttcagaagcgcgcaatccagattgcccgtgagaacgcaaagccagttatcgtggcaacccagatgctggattccatgattgagaactcccgcccaacccgtgcggaagcttctgacgtggcaaacgctgtgctcgatggcgcagatgctgtcatgctttctggtgaaacttcagtgggcaaagatccgcacaacgttgtgcgcaccatgtctcgcattgttcgcttcgctgaaaccgacggtcgcgtcccagacctgacccacatccctcgcactaagcgtggcgttatttcctactctgcacgtgatatcgccgagcgcctcaacgctcgtgcattggttgcgttcaccacctctggtgataccgcaaagcgtgtggctcgtctgcacagccacctgccactgctcgtgttcactccaaatgaggcagttcgctctgagctggcgctgacctggggtgcaaccaccttcctgtgtccacctgtcagcgataccgatgacatgatgcgcgaagtcgaccgtgctcttttagcaatgcctgagtacaacaagggtgacatgatggttgttgttgcaggttcccctcctggtgttaccggtaacaccaacatgattcacgtccaccttcttggtgacgacacaaggattgcaaagctctaa

SEQ ID NO: 524 - protein, 475 aa, Corynebacterium glutamicum
MDRRTKIVCTLGPAVASADGILRLVEDGMDVARLNFSHGDHPDHEQNYKWVREAAEKTGRAVGILADLQGPKIRLGRFTDGATVWENGETIRITVDDVEGTHDRVSTTYKNLAKDAKPGDRLLVDDGKVGLVCVSVEGNDVICEVVEGGPVSNNKGVSLPGMDISVPALSEKDIRDLRFALKLGVDFIALSFVRSPADAELVHKIMDEEGRRVPVIAKLEKPEAVTSLEPIVLAFDAVMVARGDLGVEVPLEEVPLVQKRAIQIARENAKPVIVATQMLDSMIENSRPTRAEASDVANAVLDGADAVMLSGETSVGKDPHNVVRTMSRIVRFAETDGRVPDLTHIPRTKRGVISYSARDIAERLNARALVAFTTSGDTAKRVARLHSHLPLLVFTPNEAVRSELALTWGATTFLCPPVSDTDDMMREVDRALLAMPEYNKGDMMVVVAGSPPGVTGNTNMIHVHLLGDDTRIAKL

SEQ ID NO: 525 - DNA, 1515 bp, Debaryomyces hansenii
  CDS (1)..(1515)
atgtctaacgcatcattatcttggttaaccaaattgaataccagtgaaaccccagataaggttttacgtcgttcgtctattatcggtactattggaccaaagaccaacaacgttgacgttttggtcaaattaagaaaggccggtttaaacattgttcgtatgaacttctcgcacggatcttacgaataccatcaatccgttattgacaatgctaagcaatcggaagaaatctacaagggccgtccattggccattgctttggacactaaaggtccagaaatcagaactggtactaccattgacgacaaggactacccaatcttaccaaaccatgaaatgatcttcaccactgacgaagcttacgctaagaagtgtgacgacaaggttatgttcatcgactacaagaatatcaccaaggtcatcgaagccggtaaaatcatatatattgacgatggtgttgtttcattcgaagttttacaaattgtcgacgataagaccttgaaggttagatccgtcaactccggtaagatatgttcccacaagggtgttaacttgccaggtaccgatgttgacttaccagctttatccgaaaaggataaggctgatatcaaattcggtgtcaagaacggtgtccacatgatctttgcttctttcatcagaactggtgacgatatcaaggaaatccgtaaggttttaggtgaagaaggtaaggatatccaaatcattgctaagatcgaaaatcaacaaggtgtcaacaactttgacgaaatcttagtcgaaaccgatggtgttatggttgccagaggtgatttaggtattgaaattcctgctcctcaagtctttgttgttcaaaagcaattgattgctaagtgtaacttggctgctaagccagtcatttgtgccacccaaatgttggaatccatgacttacaacccaagaccaaccagagccgaagtttctgatgtcggtaacgccattttagatggtgctgattgtgttatgttgtctggtgaaactgccaagggtaactacccattcgaagctgtctccatgatgcacaacaccgctatcattgctgaaaaggccatcgcttaccaacctttacacaacgaaatcaggtctttagctaacagaccaacacctaccaccgaaacatgtgccatggcttccgtctcagctgcctacgaacaagatgctaaggctattgttgttttgtccacctctggtttcacctccagattggtttccaaatacaagccaaatgtcccagttatgatggttacaagaaaccatagagctgctagatactgtcacttgtacagaggtgtctacccatttgtctacgaaaagaaaactgttgacaactggcaagaagatgtcgaaaacagattaagatgggctgtttctgaagctattgatttaggtatcatcaagaagggtgactccatcgttactattcaaggttggaccagaggttctggtcactctaacactgttagggttgtccaagcttaa

SEQ ID NO: 526 - protein, 504 aa, Debaryomyces hansenii
MSNASLSWLTKLNTSETPDKVLRRSSIIGTIGPKTNNVDVLVKLRKAGLNIVRMNFSHGSYEYHQSVIDNAKQSEEIYKGRPLAIALDTKGPEIRTGTTIDDKDYPILPNHEMIFTTDEAYAKKCDDKVMFIDYKNITKVIEAGKIIYIDDGVVSFEVLQIVDDKTLKVRSVNSGKICSHKGVNLPGTDVDLPALSEKDKADIKFGVKNGVHMIFASFIRTGDDIKEIRKVLGEEGKDIQIIAKIENQQGVNNFDEILVETDGVMVARGDLGIEIPAPQVFVVQKQLIAKCNLAAKPVICATQMLESMTYNPRPTRAEVSDVGNAILDGADCVMLSGETAKGNYPFEAVSMMHNTAIIAEKAIAYQPLHNEIRSLANRPTPTTETCAMASVSAAYEQDAKAIVVLSTSGFTSRLVSKYKPNVPVMMVTRNHRAARYCHLYRGVYPFVYEKKTVDNWQEDVENRLRWAVSEAIDLGIIKKGDSIVTIQGWTRGSGHSNTVRVVQA

SEQ ID NO: 527 - DNA, 1602 bp, Drosophila melanogaster
  CDS (1)..(1602)
atggtgaacgtaaccatctacgatgaggcaccgcagctgaagcccaacgaagtaccccaaaacatggccgcaggagctgatacccaactggagcacatgtgccgtctgcagttcgactcgccagtgccccatgtgcgtctgtccggaatcgtgtgcaccatcggacctgcctccagcagcgtggagatgctggagaagatgatggccaccggcatgaacatcgcgcgcatgaacttctctcacggatcgcacgagtaccatgccgccaccgtggccaatgtgcgccaggcggtgaagaactactcggccaagctgggctacgaacaccccgtggccattgccctggacaccaaggggcccgagatccgtaccggtctgatcggaggcagcggcaccgccgagattgagctgaagaagggcgagaagatcaagctgaccaccaacaaggaattcctggagaagggctctctggagattgtgtacgtggactacgagaacattgtcaatgtggtgaagcccggcaaccgggtgttcgtcgatgacggtctgatctcactgattgtccgcgaggtaggcaaggattccctcacctgcgaggtggagaacggcggctctctgggttcccgcaagggtgtgaacctgccaggcgtgcccgtcgatctgcctgccgtctccgagaaggataagagcgatctgctgttcggtgtggagcaggaagtggacatgatctttgcttcgttcatccgcaacgccgctgctttgaccgagatccgtaaggttcttggcgagaagggcaagaacatcaagatcatttccaagatcgagaaccagcagggcatgcacaacctggacgagatcatcgaggccggtgatggcattatggtggcccgtggagatctgggtattgagattcccgccgagaaggtgttcctcgcccagaaggccatgattgcccgctgcaacaaggctggcaagcctgtgatctgcgccactcagatgttggagtcaatggtgaagaagccacgtcccactcgcgctgagatctctgatgtggccaacgctgtgctcgatggtgctgattgcgtcatgttgtctggtgagaccgccaagggcgagtacccgctggagtgcgtcctgaccatggccaagacctgcaaggaggccgaggctgccctctggcaccagaacctctttaacgacttggttcgcggcgctggtaccatcgatgcctctcacgcggctgccatcgctgccgttgaggctgccaccaaggccaaggcctccgccatcgtggtgatcaccaccagcggcaagtcggccttccaggtgagcaagtaccgcccacgctgccccatcatcgcggtcacccgtttcgcgcagaccgcccgacaggcccatctctaccgtggactggtgccactcatctacaaggagcccggtcttggtgactggctgaaggacgtggacgtgcgcgtgcagttcggtctgcaggtcggaaagaagaacggcttcatcaagaccggcgattccgtcgtggtggttaccggctggaagcagggctccggcttcaccaacaccatccgcattgtcaccgtcgaataa

SEQ ID NO: 528 - protein, 533 aa, Drosophila melanogaster
MVNVTIYDEAPQLKPNEVPQNMAAGADTQLEHMCRLQFDSPVPHVRLSGIVCTIGPASSSVEMLEKMMATGMNIARMNFSHGSHEYHAATVANVRQAVKNYSAKLGYEHPVAIALDTKGPEIRTGLIGGSGTAEIELKKGEKIKLTTNKEFLEKGSLEIVYVDYENIVNVVKPGNRVFVDDGLISLIVREVGKDSLTCEVENGGSLGSRKGVNLPGVPVDLPAVSEKDKSDLLFGVEQEVDMIFASFIRNAAALTEIRKVLGEKGKNIKIISKIENQQGMHNLDEIIEAGDGIMVARGDLGIEIPAEKVFLAQKAMIARCNKAGKPVICATQMLESMVKKPRPTRAEISDVANAVLDGADCVMLSGETAKGEYPLECVLTMAKTCKEAEAALWHQNLFNDLVRGAGTIDASHAAAIAAVEAATKAKASAIVVITTSGKSAFQVSKYRPRCPIIAVTRFAQTARQAHLYRGLVPLIYKEPGLGDWLKDVDVRVQFGLQVGKKNGFIKTGDSVVVVTGWKQGSGFTNTIRIVTVE

SEQ ID NO: 529 - DNA, 1581 bp, Emericella nidulans
  CDS (1)..(1581)
atggccgcaagctcttccctcgaccacttgtccaaccgtatgaagctggagtggcactccaagctgaatactgagatggtgccggcgaagaacttccgccgtacatccatcatctgtaccatcggtcccaagacaaactccgttgagaaaatcaatgccctccgcagagccggtctcaatgtcgttcgcatgaacttttctcacggttcatacgagtaccaccaatcagttatcgaccacgctcgggaagccgaaaagcagcaggctggccgccccgttgccattgctctggacaccaaaggacccgagatccgtaccggaaacaccgtaggtgacaaggacatcccaatcaaggctggccatgagatgaacatcagcaccgatgagcaatatgccaccgcatccgacgaccagaacatgtatgtcgattacaagaacatcaccaaggtgatttctgccggcaagctcatctatgtcgatgacggtatcctttcatttgaggttcttgaagttgtagatgacaagaccctgcgcgtccgatgccttaacaacggcaacatctcttcccgcaagggtgtcaaccttcccggtaccgacgtagacttgcccgctctttcagagaaggacatcagcgatctgaagtttggtgtcaagaacaaggtcgacatggttttcgcttccttcatccgtcgtggcagcgacatccgccacatccgtgaggtgttgggtgaagagggccgagagattcagatcatcgccaagattgagaaccaacaaggtgtcaacaatttcgacgagattctggaagagaccgacggtgtcatggtcgcccgtggtgaccttggtatcgagatccccgctcccaaggtgttcatcgcccagaagatgatgatcgccaagtgtaacatcaagggcaagcccgtcatttgtgccactcagatgcttgagtccatgacatataaccctcgtcccactcgtgctgaggtgtccgatgtggccaacgctgttctcgacggtgccgactgtgtcatgctttctggagagactgccaagggtaactacccttgcgaggctgtcacgatgatgtctgagacctgcctcctcgccgaggttgccattcctcacttcaacgtcttcgacgagctgcgaaacctggcccctcgtcccaccgacactgttgaatccatcgccatggctgctgtgagtgccagtcttgaactgaacgccggcgccattgtggtcctcaccactagtggaaacactgcccgtatgatctccaagtaccgccccgtttgccccatcatcatggtttctcgcaaccctgctgctacaaggtactcccacctgtaccgtggtgtctggcccttctacttccccgagaagaagcccgacttcaacgtcaagatctggcaggaggatgtcgaccgtcgcctcaagtggggtatcaaccacggtctcaagctcggtatcatcaacaagggcgacaacatcgtctgtgttcagggctggcgcggcggtatgggccacactaacactgtccgtgtggtccctgctgaggagaacctcggactttctgagtaa

SEQ ID NO: 530 - protein, 526 aa, Emericella nidulans
MAASSSLDHLSNRMKLEWHSKLNTEMVPAKNFRRTSIICTIGPKTNSVEKINALRRAGLNVVRMNFSHGSYEYHQSVIDHAREAEKQQAGRPVAIALDTKGPEIRTGNTVGDKDIPIKAGHEMNISTDEQYATASDDQNMYVDYKNITKVISAGKLIYVDDGILSFEVLEVVDDKTLRVRCLNNGNISSRKGVNLPGTDVDLPALSEKDISDLKFGVKNKVDMVFASFIRRGSDIRHIREVLGEEGREIQIIAKIENQQGVNNFDEILEETDGVMVARGDLGIEIPAPKVFIAQKMMIAKCNIKGKPVICATQMLESMTYNPRPTRAEVSDVANAVLDGADCVMLSGETAKGNYPCEAVTMMSETCLLAEVAIPHFNVFDELRNLAPRPTDTVESIAMAAVSASLELNAGAIVVLTTSGNTARMISKYRPVCPIIMVSRNPAATRYSHLYRGVWPFYFPEKKPDFNVKIWQEDVDRRLKWGINHGLKLGIINKGDNIVCVQGWRGGMGHTNTVRVVPAEENLGLSE

SEQ ID NO: 531 - DNA, 1506 bp, Kluyveromyces lactis
  CDS (1)..(1506)
atggaatctagattaggctggttgaccgatttgagtaccgaaactggtaccaacttgagaagaacctcaattatttgtaccattggtccaaagaccaacaacccagaaactttggttgaattgagaaaggctggtatgaacattgttcgtatgaacttctcccacggttcttacgaataccatcaatctgtcattgacaacgccagaaaatctgaagaactataccaaggtagacctctggctattgcattggacactaagggtcctgaaatcagaactggtaccaccactaacgatgtggattacccaattcctccaaaccacgaaatgatcttcactactgatgacaagtacgctaaggcttgtgacgacaaaaccatgtacgttgattacaagaacatcaccaaggtcattgaagctggtagaattatctacgtcgatgatggtgttttgtcattcgaagttttggaagttattgatgacaacaccttgaaggttaagtctttgaacgccggtaagatttgttctcacaagggtgtcaacttgccaggtaccgatgtcgatttgccagctttgtccgaaaaggacaagtctgacttgaaattcggtgtcaagaacggtgtccacatggtcttcgcctctttcatcagaaccgctcaagatgttttgactatcagagaagttttgggtgagcaaggtaaggatatcaagatcattgttaagattgaaaaccaacaaggtgtcaacaactttgacgatatcttgaaggtcactgacggtgttatggttgctagaggtgatttgggtattgaaattccagctcctcaagtgtttgctgtgcaaaagaagttgattgctaagtgtaacttggctggtaagccagttatctgtgctacccaaatgttggaatccatgacctacaacccaagaccaaccagagctgaagtctctgatgttggtaacgccgttcttgatggtgctgactgtgttatgttgtctggtgaaactgccaagggtaactacccaatcaatgccgttaagaccatggctgaaactgctttgattgctgaacaagccatcccatacatcccaacttacgatgacttaagaaacttgactccaaagccaacctcaaccactgaaactatcgctgctgcttctgtttctgctgtatttgaacaaaaggccagagctttgattgtcctatccaccaccggtgacactccaagattggttgccaagtacaagccaaatgtcccaattgttatggttactagaaacccaagagctgctagattctctcatctatatagaggtgtcttcccattcgtatacgatgaatcctctgactccgaatggactgtcgatgttgaaaagagaatcaacttcggtgtcaagaaggccaaggaattcggaattttggttgacggtgacaccattgtcaccattcaaggtttcgccgctggtgtcggtaactccaacactctacgtgtcttgaccgtttaa

SEQ ID NO: 532 - protein, 501 aa, Kluyveromyces lactis
MESRLGWLTDLSTETGTNLRRTSIICTIGPKTNNPETLVELRKAGMNIVRMNFSHGSYEYHQSVIDNARKSEELYQGRPLAIALDTKGPEIRTGTTTNDVDYPIPPNHEMIFTTDDKYAKACDDKTMYVDYKNITKVIEAGRIIYVDDGVLSFEVLEVIDDNTLKVKSLNAGKICSHKGVNLPGTDVDLPALSEKDKSDLKFGVKNGVHMVFASFIRTAQDVLTIREVLGEQGKDIKIIVKIENQQGVNNFDDILKVTDGVMVARGDLGIEIPAPQVFAVQKKLIAKCNLAGKPVICATQMLESMTYNPRPTRAEVSDVGNAVLDGADCVMLSGETAKGNYPINAVKTMAETALIAEQAIPYIPTYDDLRNLTPKPTSTTETIAAASVSAVFEQKARALIVLSTTGDTPRLVAKYKPNVPIVMVTRNPRAARFSHLYRGVFPFVYDESSDSEWTVDVEKRINFGVKKAKEFGILVDGDTIVTIQGFAAGVGNSNTLRVLTV

SEQ ID NO: 533 - DNA, 1770 bp, Lactobacillus delbrueckii subsp
  CDS (1)..(1770): transl_table=11
atgaaaaaaacaaagattgttagtactttagggccagcttcagacgatattgaaactattaccaagttagccgaagcaggcgcaaacgtattccgtttcaacttctcacacggtaaccacgaagaacacttggcaagaatgaacatggttcgtgaagttgaaaagaagactggcaagcttttgggcatcgctttggacaccaagggtgctgaaatcagaaccactgaccaagaaggcggcaagttcactatcaacactggtgacgaaatccgcgtgtcaatggacgcaaccaaggccggcaacaaggacatgatccacgttacctacccaggtctgttcgacgacactcacgtaggcggcactgtattgatcgacgacggtgctgttggtttgactatcaaggccaaggacgaagaaaagcgcgaattggtttgtgaagctcaaaacactggtgtcatcggctcaaagaagggtgttaacgctccaggtgttgaaatccgcctcccagggattactgaaaaggacactgacgacatccgctttggtttgaagcacggtattaacttcatctttgcttcatttgtacgtaaggctcaagacgttcttgacattcgcgcactttgcgaagaagctaacgcatcatacgttaagatcttcccaaagattgaatcacaagaaggtattgacaacatcgacgaaatcttgcaagtttcagatggtttgatggttgcccgtggtgacatgggtgttgaaatcccattcatcaacgtgccatttgttcaaaagactttgatcaagaagtgcaacgctttgggcaagccagttatcactgctactcaaatgctggactcaatgcaagaaaacccacgtccaacccgtgccgaagtaactgacgttgctaacgccgttcttgacggtactgacgcaactatgctgtcaggtgaatcagcaaacggtttgtacccagtacaatcagttcaagctatgcacgacatcgatgttcggactgaaaaggaattggacacccggaacactctggctctgcaacgctttgaagaatacaagggctcaaacgttactgaagctatcggtgaatcagttgtccgcactgctcaagaactgggcgttaagactatcatcgctgctactagctccggctacacagctcgtatgatctccaagtaccgtccagacgcaaccatcgttgccttgactttcgacgaaaagatccaacactcattgggtatcgtttggggcgttgaaccagttttggcaaagaaaccttcaaacactgacgaaatgttcgaagaagctgcccgcgtagctaaggaacacggtttcgttaaggatggcgacctggtaatcatcgttgccggcgtaccattcggccaatcaggtactactaacttgatgaagctgcaaatcatcggcaaccaacttgctcaaggtttgggcgtaggcactggctcagttatcggcaaggctgttgttgcgaacagcgctgaagaagccaacgctaaggttcacgaaggcgacatcctggtagctaagactactgacaaggactacatgccagctatcaagaaggccagcggtatgatcgttgaagcttccggcttgaccagccacgcagctgttgtcggcgtatcactcggcattccagttgttgtcggtgttgctgacgcaacttcaaagatcgctgacggctcaactttgactgttgacgcacgtcgcggcgcaatttaccaaggtgaagtttcaaacctgtaa

SEQ ID NO: 534 - protein, 589 aa, Lactobacillus delbrueckii subsp
MKKTKIVSTLGPASDDIETITKLAEAGANVFRFNFSHGNHEEHLARMNMVREVEKKTGKLLGIALDTKGAEIRTTDQEGGKFTINTGDEIRVSMDATKAGNKDMIHVTYPGLFDDTHVGGTVLIDDGAVGLTIKAKDEEKRELVCEAQNTGVIGSKKGVNAPGVEIRLPGITEKDTDDIRFGLKHGINFIFASFVRKAQDVLDIRALCEEANASYVKIFPKIESQEGIDNIDEILQVSDGLMVARGDMGVEIPFINVPFVQKTLIKKCNALGKPVITATQMLDSMQENPRPTRAEVTDVANAVLDGTDATMLSGESANGLYPVQSVQAMHDIDVRTEKELDTRNTLALQRFEEYKGSNVTEAIGESVVRTAQELGVKTIIAATSSGYTARMISKYRPDATIVALTFDEKIQHSLGIVWGVEPVLAKKPSNTDEMFEEAARVAKEHGFVKDGDLVIIVAGVPFGQSGTTNLMKLQIIGNQLAQGLGVGTGSVIGKAVVANSAEEANAKVHEGDILVAKTTDKDYMPAIKKASGMIVEASGLTSHAAVVGVSLGIPVVVGVADATSKIADGSTLTVDARRGAIYQGEVSNL

SEQ ID NO: 535 - DNA, 1452 bp, Methylobacterium extorquens
  CDS (1)..(1452): transl_table=11
atgatggaggcccctttgaagcgctcgcgccgcaccaagatcgtcgccaccctcggcccggcatccgacacgccggagatgatcgagaagctgttccacgccggtgcggacgtgttccgcatcaacatgagccatctggctcgcgagaagctgcctgaacgcatcgaggtgattcgcaccatcgagcgggagggcaagcgccccatcggcatcctcgtcgaccttcagggcccgaagctgcggctcggcaccttcgtcggcgacgcggccgtgctggagaacggccagaccttcgtgctcgattcggatccgacgccgggcgataccgaccgcgtcttccttccccatcctgagatcctgtcggcgctggagcccagccacggcatcctgatcgacgatggcaagcttcgcctcatcgtcacggaggtgagcgaggggcgtgccgtcacccgcgtcgaggtcggcggtcgcatctcgaatcgcaagggcgtgtcgctgccccacaccgcgctgccggtgccggcgatgaccgagaaggatcgcggtgatctggaagcgggcctcgcggccggcgccgactggatcgcggtgtccttcgtgcagcgcccggaagacgtggcggaggtcaagaaggtcgccgccgggcgcgccctggtgatggccaagatcgagaagccgcaggcgctcacccgcctcgatgagatcatcgagatctccgacggcatcatggtcgcccgcggcgacctcggcgtcgagatgccgctcgaacaggtgccgggcgtgcagaagcgcatcacccgcgtcgcccgccggctcggcaagccggtcgtcgtcgcgacgcagatgctcgaatcgatgatcacctcaccggtgccgacccgcgccgaggtgtcggacgtggccaccgccgtctacgagggcgcggatgcggtgatgctctcggccgaaagcgccgccggcgactttccggtcgaggcgatcggcaccatgaaccgcatcgccgaacaggtggagcgcgacgcgctctactggtcgatcctgatggcgcagcgttccgagccggagccgaccgcttccgacgccatcgcggccgcggcccaccagatcgtcgaggcgctgagcctgcgctcgatcatggcctggacccattccggttcaacggtgctgcggctggcgcgcgcccggcccaatgccagcgtcatcgcgctgacgccgaagcgcgagacggcgcggcgcctcaccatggcctggggcgtgcacccgatcgtcaccaaggatgccagcgacgtggacgacatggccttccgcgccgcgaagttcgcggtgcgcgagcgcttcgccgagatcggcgaccgagtgatcatcgtggccggcgtgccgttcggcattccgggggcgaccaacatggtgcgcatcgccttcgtcacccgcgagcacgccgagcgggcctga

SEQ ID NO: 536 - protein, 483 aa, Methylobacterium extorquens
MMEAPLKRSRRTKIVATLGPASDTPEMIEKLFHAGADVFRINMSHLAREKLPERIEVIRTIEREGKRPIGILVDLQGPKLRLGTFVGDAAVLENGQTFVLDSDPTPGDTDRVFLPHPEILSALEPSHGILIDDGKLRLIVTEVSEGRAVTRVEVGGRISNRKGVSLPHTALPVPAMTEKDRGDLEAGLAAGADWIAVSFVQRPEDVAEVKKVAAGRALVMAKIEKPQALTRLDEIIEISDGIMVARGDLGVEMPLEQVPGVQKRITRVARRLGKPVVVATQMLESMITSPVPTRAEVSDVATAVYEGADAVMLSAESAAGDFPVEAIGTMNRIAEQVERDALYWSILMAQRSEPEPTASDAIAAAAHQIVEALSLRSIMAWTHSGSTVLRLARARPNASVIALTPKRETARRLTMAWGVHPIVTKDASDVDDMAFRAAKFAVRERFAEIGDRVIIVAGVPFGIPGATNMVRIAFVTREHAERA

SEQ ID NO: 537 - DNA, 1506 bp, Saccharomyces castellii
  CDS (1)..(1506)
atggaatccagattagccagattaaccactttacaagttaccgccggtgacaacttaagaagaacctctattattggtactattggtccaaagaccaacaacccagaagtcttggttgctctaagaaaggctggtttgaacattgtccgtatgaacttctctcacggttcttacgaataccatcaatccgttattgaaaacgccagaaagtctgaagaactttacccaggtagaccattagctattgctttggacaccaagggtccagaaatcagaactggtaccaccaccggtgaagttgactacccaattccaccaaaccacgaaatgatcttctctactgatgaaaagtacgctaaggcttgtgatgacaaggttatgttcgtcgactacgctaacatcaccaaggttatctccaagggtaagatcatctacgtcgatgacggtgtgttgtctttcgaagttttggaagtcgttgatggtaagactttgaaggttaagtccttgaacgccggtaagatctgttctcacaagggtgttaacttaccaggtaccgatgtcgatttgccagctttgtccgaaaaggataaggctgatttgagattcggtgttaagaacggtgtccacatggtcttcgcttctttcattagaaccgctcaagatgttttgaccatcagagaagtcttaggtgaagatggtaaggacatcaagattgttgtcaagattgaaaaccaacaaggtgttaacaacttcgacgaaatcttgaaggtcactgatgccgttatggttgccagaggtgatttaggtattgaaattccagccccagaagtcttagctgtccaaaagaaattgattgctaagtctaacttggccggtaagccagttatctgtgctacccaaatgttggagtctatgacttacaacccaagaccaaccagagctgaagtttccgatgtcggtaacgctatcttggatggtgctgactgtgttatgttgtctggtgaaaccgccaagggtaactacccaatcaatgctgtcaccaccatggctgacactgctttgattgctgaacaagccattgcttaccaaccattgtacgatgacttgagaaacttgactccaaagccaacttctaccactgaaaccgttgctgcttccgctgttgccgctgtctacgaacaaaaggccaaggctatcattgtcttgtctacttccggtaccactccaagattggtctccaagtacagaccagactgtccaattatcttggttaccagaaacccaagagctgctagattctctcacttgtctagaggtgttttcccattcgtctacgaagctgactccgttgctgactggactgaagatgtcgaattgagattgaagttcggtattgaaaaggccatcgaaatgggtgtcatgaagaagggtgacacttacgtctccattcaaggtttcaaggctggtgaaggtcactccaacactttgcaagtctctaacgcttaa

SEQ ID NO: 538 - protein, 501 aa, Saccharomyces castellii
MESRLARLTTLQVTAGDNLRRTSIIGTIGPKTNNPEVLVALRKAGLNIVRMNFSHGSYEYHQSVIENARKSEELYPGRPLAIALDTKGPEIRTGTTTGEVDYPIPPNHEMIFSTDEKYAKACDDKVMFVDYANITKVISKGKIIYVDDGVLSFEVLEVVDGKTLKVKSLNAGKICSHKGVNLPGTDVDLPALSEKDKADLRFGVKNGVHMVFASFIRTAQDVLTIREVLGEDGKDIKIVVKIENQQGVNNFDEILKVTDAVMVARGDLGIEIPAPEVLAVQKKLIAKSNLAGKPVICATQMLESMTYNPRPTRAEVSDVGNAILDGADCVMLSGETAKGNYPINAVTTMADTALIAEQAIAYQPLYDDLRNLTPKPTSTTETVAASAVAAVYEQKAKAIIVLSTSGTTPRLVSKYRPDCPIILVTRNPRAARFSHLSRGVFPFVYEADSVADWTEDVELRLKFGIEKAIEMGVMKKGDTYVSIQGFKAGEGHSNTLQVSNA

SEQ ID NO: 539 - DNA, 1506 bp, Saccharomyces kluyveri
  CDS (1)..(1506)
atggaatctagactaggttggttaactgaattgcaaactgaaaccggtgctaacttgagaagaacctctatcatcggtaccattggtccaaagaccaacaacccagaaaccttggttgccttgagaaaggctggtttgaacattgttcgtatgaacttctctcacggttcttacgaataccaccaatctgtcattgacaacgctagaaagtctgaagagctatatccaggtagaccattggctattgctttggacaccaagggtccagaaatcagaactggtaccaccactaacgaagtcgactacccaatcccaccaaaccacgaaatgatcttctccattgacgacaaatacgccaaggcttgtgatgacaaggttatgtacattgactacaagaacatcaccaaggttatcgaaaagggtaagatcatctacgttgatgacggtgtcttgtctttcgaagttttggaagtcgttgacgaacaaactttgaaggttaagtccttgaacgctggtaagatctgctcccacaagggtgttaacttgccaggtaccgatgtcgacttgccagctttgtccgaaaaggacaagtctgacttgagattcggtgtcaagaacggtgtccacatggtcttcgcttctttcatcagaaccgctcaagatgttttgaccatcagagaagttttgggtgaagacggtaaggacgtcaagatcattgtcaagattgaaaaccaacaaggtgttaacaactttgacgaaatcttgaaggttactgacggtgtcatggttgccagaggtgacttgggtatcgaaatcccagctccacaagttttcgctgtccaaaagaagttgattgctaagtgtaacttggccggtaagccagttatctgtgccacccaaatgttggaatctatgacttacaacccaagaccaaccagagctgaagtttccgatgtcggtaacgctgttttggacggtgctgactgtgtcatgttgtctggtgaaaccgctaagggtaactacccaattaacgccgttaccatcatggctgaaaccgctttgattgctgaacaagctatcccatacgtcgccacttacgacgacttgagaaacttcactccaaagccaacttctaccactgaaaccatcgctgccgccgctgtctcttctgttttcgaacaaaaggccaaggctatcattgtcttgtctaccaccggtgacaccccaagattggtctccaaatacaagccaaacgttccaattgttatggttaccagaaacccaagagctgctagattctctcacttgtacagaggtgtcttcccattcgtctacgaatctgacactgaatccgaatggaccaaggatgttgaaagccgtttgaacttcggtattgccaaggccaaggaattcggtatgttgaaggaaggtgacaccattgtcactatccaaggtttcgctgctggtgttggtcactctaacactttgcgtgtcttgaccgtctaa

SEQ ID NO: 540 - protein, 501 aa, Saccharomyces kluyveri
MESRLGWLTELQTETGANLRRTSIIGTIGPKTNNPETLVALRKAGLNIVRMNFSHGSYEYHQSVIDNARKSEELYPGRPLAIALDTKGPEIRTGTTTNEVDYPIPPNHEMIFSIDDKYAKACDDKVMYIDYKNITKVIEKGKIIYVDDGVLSFEVLEVVDEQTLKVKSLNAGKICSHKGVNLPGTDVDLPALSEKDKSDLRFGVKNGVHMVFASFIRTAQDVLTIREVLGEDGKDVKIIVKIENQQGVNNFDEILKVTDGVMVARGDLGIEIPAPQVFAVQKKLIAKCNLAGKPVICATQMLESMTYNPRPTRAEVSDVGNAVLDGADCVMLSGETAKGNYPINAVTIMAETALIAEQAIPYVATYDDLRNFTPKPTSTTETIAAAAVSSVFEQKAKAIIVLSTTGDTPRLVSKYKPNVPIVMVTRNPRAARFSHLYRGVFPFVYESDTESEWTKDVESRLNFGIAKAKEFGMLKEGDTIVTIQGFAAGVGHSNTLRVLTV

SEQ ID NO: 541 - DNA, 1530 bp, Schizosaccharomyces pombe
  CDS (1)..(1530)
atgtcctcttctgctgtctctcctaagcaatgggtcgccggcctcaacagcgagcttgatatccccgctgtcaaccgtcgtacctccatcatttgcaccattggtcccaagtccaacaacgttgagaccttgtgcaagctccgtgatgctggtatgaacattgttcgtatgaacttctctcacggttcctacgaataccaccaatccgtcattgacaatgcccgtaaggcctctgccaccaaccctctcttccccttggccattgccttggatactaagggacctgagattcgtactggtctcaccgttggcggtactgactaccccatctcctctggtcacgagatgatcttcaccaccgacgatgcttatgccgagaagtgtaacgacaaggtcatgtacattgactacaagaacatcaccaaggtcattcaacctggccgtatcatctacgttgatgatggtatcctttccttcactgtcatcgagaaggttgatgacaagaatttgaaggtccgtgtcaacaacaacggtaagatctcttccaagaagggtgtcaacttgcctaagactgatgtcgatttgcccgctttgtccgagaaggacaaggccgatctccgcttcggtgtcaagaacggtgtcgacatgatctttgcttccttcatccgtcgtgctgaggacgttatccacatccgtgaagttttgggtgaggagggtaagaacatcaagatcatctgcaagatcgagaaccaacaaggtgttaacaactttgactctatccttgacgttaccgacggtatcatggttgcccgtggtgacttgggtattgaaatccctgcctctcaagttttcgtcgcccaaaagatgatgattgccaagtgcaacatcgctggtaagcccgttgcttgtgccactcaaatgcttgagtccatgacctacaaccctcgtcctactcgtgccgaggtttccgatgttggtaacgccgttctcgatggtgctgacttggtcatgctttccggtgagactaccaagggttcttaccccgttgaagccgttacctacatggctgagactgcccgtgttgctgaggcttccatcccttacggcagcctttaccaagagatgttcggcctcgtccgtcgtcctcttgagtgtgctaccgagaccactgctgtcgctgccatcggtgcctccattgagagtgatgccaaggccatcgttgtcttgtccaccagcggtaacactgctcgtctctgctccaagtaccgtccttctatccccattgttatggttactcgttgccctcaaagagctcgtcaatctcacctcaaccgtggtgtctaccccgtcatctacgagaaggagcctctttctgactggcaaaaggatgttgacgctcgtgttgcctacggttgccaacaagcttacaagatgaacatcctcaagaagggtgacaagatcattgtccttcaaggtgccgttggtggtaagggtcacacctccatcttccgtcttaccgttgccgagtaa

SEQ ID NO: 542 - protein, 509 aa, Schizosaccharomyces pombe
MSSSAVSPKQWVAGLNSELDIPAVNRRTSIICTIGPKSNNVETLCKLRDAGMNIVRMNFSHGSYEYHQSVIDNARKASATNPLFPLAIALDTKGPEIRTGLTVGGTDYPISSGHEMIFTTDDAYAEKCNDKVMYIDYKNITKVIQPGRIIYVDDGILSFTVIEKVDDKNLKVRVNNNGKISSKKGVNLPKTDVDLPALSEKDKADLRFGVKNGVDMIFASFIRRAEDVIHIREVLGEEGKNIKIICKIENQQGVNNFDSILDVTDGIMVARGDLGIEIPASQVFVAQKMMIAKCNIAGKPVACATQMLESMTYNPRPTRAEVSDVGNAVLDGADLVMLSGETTKGSYPVEAVTYMAETARVAEASIPYGSLYQEMFGLVRRPLECATETTAVAAIGASIESDAKAIVVLSTSGNTARLCSKYRPSIPIVMVTRCPQRARQSHLNRGVYPVIYEKEPLSDWQKDVDARVAYGCQQAYKMNILKKGDKIIVLQGAVGGKGHTSIFRLTVAE

SEQ ID NO: 543 - DNA, 1758 bp, Staphylococcus aureus
  CDS (1)..(1758): transl_table=11
atgagaaaaactaaaattgtatgtacaattggaccagcttcagaatcagaagaaatgattgagaaattaatcaatgctggtatgaacgttgcacgattaaacttttcacatggtagtcatgaagagcataaaggtagaattgatacaattcgtaaagtagctaaaagattagacaaaattgtagcaattttattagatacgaaaggtccagaaattcgtacgcataatatgaaagacggtatcattgaacttgaacgtggtaacgaagttattgttagcatgaatgaagttgaaggaacacctgaaaagttctctgtaacttatgaaaacttaattaacgatgttcaagtaggttcatacattttacttgatgatggcttaattgaattacaagttaaagatattgaccatgctaaaaaagaagttaaatgtgatattttaaactctggtgagcttaaaaacaaaaaaggtgttaacttacctggtgtaagagttagtttacctggtattacagaaaaagatgctgaagatatccgtttcggtattaaagaaaatgttgacttcattgcagcaagtttcgtacgtcgtcctagtgatgttttagaaattcgtgaaattttagaagaacaaaaagctaacatttcagtattccctaaaattgaaaaccaagaaggtattgataatattgaggaaattcttgaagtgtctgatggtttaatggttgcacgtggtgacatgggtgttgaaatcccacctgaaaaagtaccaatggttcaaaaagatttaatcagacaatgtaacaaattaggtaaaccagttattacagctacacaaatgttagattctatgcaacgtaacccacgtgctacacgtgcagaagctagtgacgttgccaacgcaatctatgatggtacagatgcagtaatgttatctggtgaaactgctgctggtttatatcctgaagaagctgttaaaacaatgagaaatattgctgtatcagctgaagcagcccaagattacaaaaagttattgtcagatcgtactaaattagttgaaacttcattagtgaatgctatcggtatttcggttgcacatacagctttaaacttaaatgttaaagcaattgtagctgctactgaaagtggttcaacggcacgtactatctctaaatatcgtccgcattcagacattattgcagtgactccaagtgaagaaactgcacgtcaatgttcaattgtttggggtgttcaacctgtagttaaaaaaggacgtaagagtacagatgcattgttaaacaatgcagttgcaacagctgttgaaactggtagagtaactaatggtgatttaatcattattactgctggtgtaccaactggtgaaactggaactactaatatgatgaaaatccacctagttggtgacgaaattgctaatggtcaaggtattggacgtggatcagttgttggtactacgttagttgctgaaactgttaaagatttagaaggtaaagatttatctgacaaagttatcgttacaaactcaatcgatgaaacgtttgtaccttatgtagaaaaagcgttaggcttaattacagaagaaaatggaattacatcaccaagtgcaattgttggtttagaaaaaggtattccaacagttgtaggtgtagaaaaagctgttaaaaacataagcaataacgtgttagttacgattgatgctgctcaaggtaaaatctttgaaggatatgcaaacgtactataa

SEQ ID NO: 544 - protein, 585 aa, Staphylococcus aureus
MRKTKIVCTIGPASESEEMIEKLINAGMNVARLNFSHGSHEEHKGRIDTIRKVAKRLDKIVAILLDTKGPEIRTHNMKDGIIELERGNEVIVSMNEVEGTPEKFSVTYENLINDVQVGSYILLDDGLIELQVKDIDHAKKEVKCDILNSGELKNKKGVNLPGVRVSLPGITEKDAEDIRFGIKENVDFIAASFVRRPSDVLEIREILEEQKANISVFPKIENQEGIDNIEEILEVSDGLMVARGDMGVEIPPEKVPMVQKDLIRQCNKLGKPVITATQMLDSMQRNPRATRAEASDVANAIYDGTDAVMLSGETAAGLYPEEAVKTMRNIAVSAEAAQDYKKLLSDRTKLVETSLVNAIGISVAHTALNLNVKAIVAATESGSTARTISKYRPHSDIIAVTPSEETARQCSIVWGVQPVVKKGRKSTDALLNNAVATAVETGRVTNGDLIIITAGVPTGETGTTNMMKIHLVGDEIANGQGIGRGSVVGTTLVAETVKDLEGKDLSDKVIVTNSIDETFVPYVEKALGLITEENGITSPSAIVGLEKGIPTVVGVEKAVKNISNNVLVTIDAAQGKIFEGYANVL

SEQ ID NO: 545 - DNA, 1758 bp, Staphylococcus epidermidis
  CDS (1)..(1758): transl_table=11
atgagaaagactaaaattgtatgtacaataggaccagcttcagaatcagaggaaatgctcgaaaaactaatgaatgcaggaatgaacgttgcgcgtttaaatttctcacatggtagtcatgaagaacataaagcaagaattgatacaattcgtaaagttgctaaacgtttaaataaaacaattggcttgttattggatactaaagggccagaaattcgtacgcacaatatgaaagatggacttattgttttagaaaaaggcaaagaagtcattgtcagtatgaatgaagttgaaggaacacctgaaaaattctctgtaacatatgaaaatctaatcaatgatgtcaatattggatcatatatactattagatgatggtttagttgaacttcaagtcaaagaaattaacaaagataaaggcgaagttaaatgtgatatcttaaatactggtgaattaaaaaataaaaaaggtgttaacttacctggtgttaaagttaatttacctggtatcactgataaagatgccgatgatatcagatttggtataaaggaaaatgtagactttatagctgcaagttttgtaagacgtccaagtgatgttttagatatccgtcaaattcttgaagaagaaaaagcagaaataacaattttccctaaaatcgaaaaccaagaaggtatcgataatattgaagaaattcttgaagtatctgatggattaatggtagcacgtggtgatatgggtgttgaaattccaccagaaagcgtaccaatggttcaaaaagatttaattagaaaatgtaataaattaggaaaacctgtaattactgcgactcaaatgcttgattctatgcaacgtaatccacgtgcgacacgtgcagaagcaagtgacgtagctaatgcaatatacgatggtactgacgcggtaatgttatcaggtgaaactgcagcaggtcaatatcctgaagaagctgttaaaactatgcgtaatattgcagtttctgctgaagcagcgcaagactataaaaaattattaagtgatcgtactaaattagttgaaacttcattagtaaatgcaattggtgtttctgttgcacatactgccttaaacttaaatgtaaaagctattgtagcagcaactgaaagtggttcaacagcacgtacgatttctaaatatcgtccacattcagatatcattgctgtaacacctagcgaaaaaactgctagacaatgtgcaattgtatggggagtaaatccggtcgttaaagaaggacgtaaaacaactgatgctttactaaataatgctgtagcaacagcagtagaaactggtagagtttcaaacggagatttaattattattactgctggtgtacctactggagaaaaaggaactacaaatatgatgaaaatccacttagtaggtgatgagattgctaaaggtcaaggtgttggtagaggatctgttgtaggccatgcaattgtcgcagatagtgctagtgatttagaaggtaaagatttatctgataaagttattattacaaattctgttgatgaaacattagtaccatatgttgaaaaagctataggtctaattacagaagaaaatggtattacttcaccaagcgcaattataggtttagaaaaaggcatacctactgttgttggtgtagaacaagcaaccaaagaaattaaaaatgatatgttagtgactttagatgcgtcacaaggtaaagtgtttgaaggttatgctaacgtcctttaa

SEQ ID NO: 546 - protein, 585 aa, Staphylococcus epidermidis
MRKTKIVCTIGPASESEEMLEKLMNAGMNVARLNFSHGSHEEHKARIDTIRKVAKRLNKTIGLLLDTKGPEIRTHNMKDGLIVLEKGKEVIVSMNEVEGTPEKFSVTYENLINDVNIGSYILLDDGLVELQVKEINKDKGEVKCDILNTGELKNKKGVNLPGVKVNLPGITDKDADDIRFGIKENVDFIAASFVRRPSDVLDIRQILEEEKAEITIFPKIENQEGIDNIEEILEVSDGLMVARGDMGVEIPPESVPMVQKDLIRKCNKLGKPVITATQMLDSMQRNPRATRAEASDVANAIYDGTDAVMLSGETAAGQYPEEAVKTMRNIAVSAEAAQDYKKLLSDRTKLVETSLVNAIGVSVAHTALNLNVKAIVAATESGSTARTISKYRPHSDIIAVTPSEKTARQCAIVWGVNPVVKEGRKTTDALLNNAVATAVETGRVSNGDLIIITAGVPTGEKGTTNMMKIHLVGDEIAKGQGVGRGSVVGHAIVADSASDLEGKDLSDKVIITNSVDETLVPYVEKAIGLITEENGITSPSAIIGLEKGIPTVVGVEQATKEIKNDMLVTLDASQGKVFEGYANVL

SEQ ID NO: 547 - DNA, 1635 bp, Thermoplasma acidophilum
  CDS (1)..(1635): transl_table=11
atgaagaccaagatagttgcgacaataggcccggctagcagttcgcccgagataatgaaacagatgatagacaacggtctttcgctggtaagaataaattctgcacatgcagatataaaggatgtatcgaagataacgcagatggttcgttctatcaacagggacgttggtataatgatagacctgaagggcccagagctcagaacgggcgaattcgcgggtggtacattgaaaatatcatccggtaaggactacgtcatgggcaaagacatagtcctgaacaacatgaacgtgctttcggctgttcaggttggcgacaggatactgatgagcgatggtgaagtatcattcgaggttgaatcaacagatccgttcacaatccgggctctaaacgatggcgttctaagggacaggagccgtgtgaatatccccggccgtttcatagagctcggaaccataacggacagggatcgtgccttcataagggagggcatagcggatggcgtggacttcttcgccctttcatttgtgcagaaatctgagaacgttgacagcctgcgcgacttcgttatagacagcggtggcgatcagtacataatatcgaagatagagacgaagagcggcctggataacatagaggagatagtgaagtcatccgatggcatcatggtggcgcgtggcgatctcggtgtggaacttcccttgaaagaggtcgtgctggctcagaagcacataataaagacagcgcatgaggatggcgatttcactatcgtagcgacccaggtgctggaatccatggtaaacaacagttcacccacaagggcagagatttcagacattacaaatgcgatcatagacaatgcagatgccttaatgctctccgaggagagtgcgataggaaagtatccggttcaggccgtccgtacgctcaaggaggtttcggattacgtggaggacaaggtgtcgttcgattcttcatattactttaagggaaacaccatagcatactcagtagcaagggcagcgaagatactctctgatgatatcaagagcgatgggatagtggcacttacgcatactggatcaaccgttaggatgatatcgtcgctgaggccaaaggccatggtctacgctgccactgtaagcgagagtcttgccagaaagctgaacatatacttcggcgtattgccattgcatatggagggcaacgcagaagatcttagtttttcagagattatggaatacatagtgcgttctggtaggttcgctgatggaagtaagctcgtgatgaccagcggcgatccgtacttcacgtttggagggacgaacgacgtcaaggtggccgttgtaggcaaattcataggaagaggctattcatttggagatagcttatccggtacggcaacttacggtacgaagggagacatactcatgtctgaggatggaagaattcctggaactgatttcagggcattcatattcacatctgatatcaagccatctcttatgtcttctttaaagggaaaaacggttgtaaccaaggcaagattggttcgtcagataaaggaaggcgagcgcatatacatcgatggaaatacgggaataatactcatggcttcgccggatcaaaaataa

SEQ ID NO: 548 - protein, 544 aa, Thermoplasma acidophilum
MKTKIVATIGPASSSPEIMKQMIDNGLSLVRINSAHADIKDVSKITQMVRSINRDVGIMIDLKGPELRTGEFAGGTLKISSGKDYVMGKDIVLNNMNVLSAVQVGDRILMSDGEVSFEVESTDPFTIRALNDGVLRDRSRVNIPGRFIELGTITDRDRAFIREGIADGVDFFALSFVQKSENVDSLRDFVIDSGGDQYIISKIETKSGLDNIEEIVKSSDGIMVARGDLGVELPLKEVVLAQKHIIKTAHEDGDFTIVATQVLESMVNNSSPTRAEISDITNAIIDNADALMLSEESAIGKYPVQAVRTLKEVSDYVEDKVSFDSSYYFKGNTIAYSVARAAKILSDDIKSDGIVALTHTGSTVRMISSLRPKAMVYAATVSESLARKLNIYFGVLPLHMEGNAEDLSFSEIMEYIVRSGRFADGSKLVMTSGDPYFTFGGTNDVKVAVVGKFIGRGYSFGDSLSGTATYGTKGDILMSEDGRIPGTDFRAFIFTSDIKPSLMSSLKGKTVVTKARLVRQIKEGERIYIDGNTGIILMASPDQK

SEQ ID NO: 549 - DNA, 1401 bp, Thermotoga maritima
  CDS (1)..(1401): transl_table=11
gtgcgaagtacaaagatcgtatgtacggtcggaccaagaacagacagctatgaaatgatagaaaagatgatagaccttggagtgaacgtcttcagaataaacacctcacatggtgactggaacgagcaggaacagaaaatactcaaaataaaagatctgagagagaaaaagaaaaaacccgtagccattctgatcgatcttgcggggccgaagatcagaaccggatacctcgaaaaagagtttgtggaattaaaagaaggccagatcttcactctcaccacaaaggaaatacttggaaacgaacacatagtctcggtgaatctcagctctcttccaaaggacgtgaagaaaggagacaccattctgctgagcgatggagagatagtgcttgaggtaattgaaacaaccgatacagaagtgaaaacagtggtgaaagtcggtggaaagatcacacacaggagaggtgtgaacgtaccgacggccgatctttcggtggaatccataacggacagagacagagaattcataaaactcggaacgttgcatgacgttgaatttttcgctctttcttttgtgagaaagccagaggacgtgctcaaggcaaaagaagagatcagaaaacacggaaaggaaatacctgtaatctccaaaatagaaacgaaaaaggctctggagcgtctcgaggagataataaaggtgagcgatggaatcatggtcgcacgcggtgacctgggagtggagatacccatagaagaagtccccatcgttcagaaagaaatcatcaaactctccaagtactactccaaaccagtcatagtcgcaactcagatactcgaatcgatgatagaaaatccgttccccacgagggcagaggtcaccgacatagccaacgccatcttcgatggagcggacgccctgctcctcacagcggaaacagcggttggaaaacatcccctggaagccataaaggtgctgagtaaagtagcaaaagaagccgaaaaaaaactggaatttttcagaacgatagaatacgataccagcgacatatctgaggctatatcacacgcctgctggcagctctctgaatctctgaacgcgaagctgatcatcacacctaccatatccgggagtaccgctgttcgtgtttcaaagtacaacgtttctcaacccattgtggccctgacaccagaagagaaaacctactacagactttctctcgtgaggaaggtgatacccgttctcgctgaaaaatgttcccaggaattagagtttatcgaaaaagggctgaagaaagtagaagaaatgggtttggcagaaaaaggggatctggtggttctcacttccggcgttccaggaaaggtgggaacgacaaacaccataagggtgttgaaggtggattga

SEQ ID NO: 550 - protein, 466 aa, Thermotoga maritima
MRSTKIVCTVGPRTDSYEMIEKMIDLGVNVFRINTSHGDWNEQEQKILKIKDLREKKKKPVAILIDLAGPKIRTGYLEKEFVELKEGQIFTLTTKEILGNEHIVSVNLSSLPKDVKKGDTILLSDGEIVLEVIETTDTEVKTVVKVGGKITHRRGVNVPTADLSVESITDRDREFIKLGTLHDVEFFALSFVRKPEDVLKAKEEIRKHGKEIPVISKIETKKALERLEEIIKVSDGIMVARGDLGVEIPIEEVPIVQKEIIKLSKYYSKPVIVATQILESMIENPFPTRAEVTDIANAIFDGADALLLTAETAVGKHPLEAIKVLSKVAKEAEKKLEFFRTIEYDTSDISEAISHACWQLSESLNAKLIITPTISGSTAVRVSKYNVSQPIVALTPEEKTYYRLSLVRKVIPVLAEKCSQELEFIEKGLKKVEEMGLAEKGDLVVLTSGVPGKVGTTNTIRVLKVD

SEQ ID NO: 551 - DNA, 1617 bp, Trichoderma reesei
  CDS (1)..(1617)
atgtcccagatctcccgcacgcagagcatcatggctaccacggcccaggagcacctggaaaccggcggccgcatcaattggctggcctcgctcaacacggcctttacgcctgcccgcaactttcgccgcacctccatcatctgcaccatcggccccaagaccaactcggtcgaggccctcaacaagctgcgtgatgccggcctcaacgtcgcccgcatgaacttctcccacggcagctacgagtaccaccagtccgtcatcgacaatgtgcgcgcctctgtcgccgcccaccctggccggcccgtcgccattgccctcgacaccaagggccccgagattcgaactggcaacacggccggcgacgtggacattcccatcagcgccggcaccgtcatgaacttcaccaccgacgagaagtacgcgacggcctgcgacactcagaacatgtacgtcgactacaagaacatcaccaaggtgatccagcctggccgtgtcatctacgtcgacgacggtgtcctcgcctttgacgtcctcagcatcaaggacgaccagaccgtcgaggtccgcgcccgcaacaacggcttcatctcctcccggaagggtgtcaacctgcccaacaccgatgtcgacctgcctgctctctccgagaaggacaaggccgatctccggtttggtgtcaagaacaatgtcgacatggtctttgcctcatttatccgccgtgcgcaggatatcaaggatatccgcgacgtgctgggccccgagggcaagcagatccagatcattgccaagatcgagaaccgacagggtctcaacaactttgccgagatccttgaggagaccgacggtgtcatggtcgcccgtggtgacctgggtattgagatccccgccgccgaggtgttcgccgcccagaagaagatgattgccatgtgcaacattgccggcaagcccgtcatctgcgctacccagatgctcgagtccatgatcaagaaccctcgacctacgcgtgccgagatcagcgatgtcggcaacgccgtcactgatggcgccgactgtgttatgctatctggcgagactgccaagggtaactaccctgccgagtccattcatgagatgcacgaggccagtctcaaggctgaaaacaccatcccctacgtctcccactttgaggagatgtgcactctggtcaagcgccccgtctcgaccgtcgagtcttgcgccatggctgccgtccgcgcctctctcgacctcggcgccggtggcatcattgtcctgtccacctctggcgactctgcccgcctgctgtccaagtaccgccccgtctgccccatcttcatggtgacccgaaaccccaccacctctcgattcagccacctgtaccgcggtgtctaccccttcctgtatcccgagcagaagcccgactttgatactgtcaactggcaggaggacgtcgacaagcgcatcaagtgggccgtcacccgcgccattgagctcaagacgctcactgccggcgacaccgttgtcgtcgtccagggctggaagggcggcatgggcaacacaaacaccctgcgcattgtccgcgctgaccccgaccacctgggcattggacagatggagtag

SEQ ID NO: 552 - protein, 538 aa, Trichoderma reesei
MSQISRTQSIMATTAQEHLETGGRINWLASLNTAFTPARNFRRTSIICTIGPKTNSVEALNKLRDAGLNVARMNFSHGSYEYHQSVIDNVRASVAAHPGRPVAIALDTKGPEIRTGNTAGDVDIPISAGTVMNFTTDEKYATACDTQNMYVDYKNITKVIQPGRVIYVDDGVLAFDVLSIKDDQTVEVRARNNGFISSRKGVNLPNTDVDLPALSEKDKADLRFGVKNNVDMVFASFIRRAQDIKDIRDVLGPEGKQIQIIAKIENRQGLNNFAEILEETDGVMVARGDLGIEIPAAEVFAAQKKMIAMCNIAGKPVICATQMLESMIKNPRPTRAEISDVGNAVTDGADCVMLSGETAKGNYPAESIHEMHEASLKAENTIPYVSHFEEMCTLVKRPVSTVESCAMAAVRASLDLGAGGIIVLSTSGDSARLLSKYRPVCPIFMVTRNPTTSRFSHLYRGVYPFLYPEQKPDFDTVNWQEDVDKRIKWAVTRAIELKTLTAGDTVVVVQGWKGGMGNTNTLRIVRADPDHLGIGQME

SEQ ID NO: 553 - DNA, 1752 bp, Oryza sativa
  CDS (1)..(1752)
atggcgcaggtggtggctgcggcagggacggcggcggcggtggcggcggtggggaggccgctgggtggcggcggatctggggccgacgcgctccgcccggcggcgaggctgtcgttcgcgccgcgctggtgcggtgggagcgcgggggcagcaagggcgcgccgcgagtccgccgtcacgtccgtgattagccgcgccccgcgtctcgacgccgaggtgctgccggtgtcggccgacgacgacgcggacgtgaaggaagaagaaaacttccagcatctcaaggccattcagcaacttgcaacatcagccaatggtgtgtggtctaaaccaaatgtgagacgcaagacaaagatcgtgtgcaccattggtccttcaactaacacaaaggagatgatatggaaacttgctgaggctggcatgaatgtggctcggcttaatatgtcacatggagaccatgcatcacaccagaaagttattgacttagtaaaggaatataatgctcaaacaaaggataacgtgattgctattatgcttgacacgaagggaccagaagttaggagtggagatttgcctcaaccaataatgttggaaactggccaggagttcactttcacaattaagagaggagttgggactgagacatgtgttagcgttaactatgatgactttgttaatgatgtagaagtgggtgacatgctcctcgtagatggtggaatgatgtcgttgttggtcaagtccaaaactgaagattcggtaaaatgtgaagttattgatggaggtgaactgaaatccaggcgtcacctgaatgttcgtggaaagagcgcaaccttgccatcaataactgacaaggattgggatgatattaagtttggtgtggagaatcaagttgactactatgccgtttcttttgtcaaagatgctcaagttgtgcatgaattgaaggattatctcagaagctccaatgccgatatacatgtaattgtaaagattgaaagtgcagattccattccaaacctacactcaatcatcacagcatcggatggggctatggttgccagaggtgacttgggagctgaactccctattgaggaggtaccgctgctgcaggaagaaattattagaatgtgcaggagcatgggaaaagctgttattgttgccactaatatgctagaaagtatgattgttcatccaactccaacccgagcagaagtttcagacattgctatagctgttcgagaaggttctgatggcattatgctttctggggaaactgcacacggaaagtttcctttgaaagctgttaaggtcatgcatactgttgccctgagaactgaagccactatgtctggtggggaaacaccggctaaccttggtcaggtgttcaagaatcacatgagtgaaatgtttgcataccattcaacaatgatgtccaacactcttggaacatcaattgtggttttcaccaggacaggatttatggctatcctacttagtcattaccgcccttctggcaccatttttgcctttacggaccaggagagagttagacaacgattggctttgtaccaaggtgtatgtccagtccagatggaattttctgatgatgctgagaagacatttggtgacgctttgtcatacttgctgaaacatggtatggtgaaggaaggcgaggaggttgcacttgttcaaagtggcaggcaacctatctggcggtcgcagtccacccataatattcaggtcaggaaggtttga

SEQ ID NO: 554 - protein, 583 aa, Oryza sativa
MAQVVAAAGTAAAVAAVGRPLGGGGSGADALRPAARLSFAPRWCGGSAGAARARRESAVTSVISRAPRLDAEVLPVSADDDADVKEEENFQHLKAIQQLATSANGVWSKPNVRRKTKIVCTIGPSTNTKEMIWKLAEAGMNVARLNMSHGDHASHQKVIDLVKEYNAQTKDNVIAIMLDTKGPEVRSGDLPQPIMLETGQEFTFTIKRGVGTETCVSVNYDDFVNDVEVGDMLLVDGGMMSLLVKSKTEDSVKCEVIDGGELKSRRHLNVRGKSATLPSITDKDWDDIKFGVENQVDYYAVSFVKDAQVVHELKDYLRSSNADIHVIVKIESADSIPNLHSIITASDGAMVARGDLGAELPIEEVPLLQEEIIRMCRSMGKAVIVATNMLESMIVHPTPTRAEVSDIAIAVREGSDGIMLSGETAHGKFPLKAVKVMHTVALRTEATMSGGETPANLGQVFKNHMSEMFAYHSTMMSNTLGTSIVVFTRTGFMAILLSHYRPSGTIFAFTDQERVRQRLALYQGVCPVQMEFSDDAEKTFGDALSYLLKHGMVKEGEEVALVQSGRQPIWRSQSTHNIQVRKV

SEQ ID NO: 555 - DNA, 1647 bp, Oryza sativa
  CDS (1)..(1647)
atggcaacctccgccgccgccgccgcgagcaccttgccttacctcgtcgccgccgcctcctcctccgcggcggcgcgccgccgcggggcccaccggatccgggcgtcgtcggcggcggcggaggtggagggggcgatggacgtggtgtcggaggcggagctgcgggagaaggggttcatggggctccggaagacgaagctggtgtgcacggtggggcccgcgtgcgtgggggctttgccggcgctggcgcgcggcgggatgggcgtggcgcgggtcaacctgtgccacgggggccgcggctggcaccgcgccgtgatgcgcgaggtgcggaggctcaacgaggaggaaggcttctgcgtctccctcatggtcgacaccgaggggtcccagctcctcgtcgccgaccacggcggcgccgcctccgtcaaggccgaggatggctctgaatggctatttacaagtaaaagaaccgatgaatctcatccattcacaatgcatgttaactttgataagttttctgaagacattctagttggtgatgagcttgtaattgatggaggaatggcaacatttgaagttattgagaaggtcggaaatgatttgcgctgtaagtgcacagacccaggtttgcttcttcctcgagccaaactgtcattctggaggaatggaaaattagttgaaaggaactttgggcttcctacattgtcagcaaaggattgggctgacattgaatttgggatagctgaaggagttgattgcatcgctctttcatttgtaaaagatgctaatgacatcaagtatctcaagacttacctctccagaaaatcattagaacacatcaaaatattcgcgaaggttgagagtcttgaatcactcaagaaccttaaagacatcatagaggcatctgatggagttatggtagcacgtggtgatcttggagttcagattcctttagaacaaatcccagccatccaagaggcaattgttgatctttgtcgacggttgaacaagccagtgatagttgcctctcagcttcttgaatcaatggttgagtatccaacaccaactcgtgcagaggtagcagacgtttctgaagcagtacggcaatatgctgatgccgtaatgttatcggcagagtcagctataggtgcatatccccagaaagctctagcagtcctccgtgctgctagtgagaggatggaatcatggagccgtgaggaaaacatgcagaaacttcttccacaacatcagcttgcaatagctttgcctgataggatctcagagcaaatttgcaccagtgctgcagaaatggcaaacaaccttgcggtggatgccatctttgtttacacaaagtatggtcacatggcgtcgcttctttcgcgcaaccggcccaaccctcccatttttgctttcactgataatgccaactcaagaaagagcatgaacctctactggggagtaattccacttcagctaccactgtcaaataacatggaagataacttcaatcaaaccatcaagcttatgaagtcgaagggttcagtgaaatctggagacacagtcttggtcgtcgccgactctgatctgaaccgaccccgtgctgctacctcagttttccaatccattcaagttcgaatagtggactag

SEQ ID NO: 556 - protein, 548 aa, Oryza sativa
MATSAAAAASTLPYLVAAASSSAAARRRGAHRIRASSAAAEVEGAMDVVSEAELREKGFMGLRKTKLVCTVGPACVGALPALARGGMGVARVNLCHGGRGWHRAVMREVRRLNEEEGFCVSLMVDTEGSQLLVADHGGAASVKAEDGSEWLFTSKRTDESHPFTMHVNFDKFSEDILVGDELVIDGGMATFEVIEKVGNDLRCKCTDPGLLLPRAKLSFWRNGKLVERNFGLPTLSAKDWADIEFGIAEGVDCIALSFVKDANDIKYLKTYLSRKSLEHIKIFAKVESLESLKNLKDIIEASDGVMVARGDLGVQIPLEQIPAIQEAIVDLCRRLNKPVIVASQLLESMVEYPTPTRAEVADVSEAVRQYADAVMLSAESAIGAYPQKALAVLRAASERMESWSREENMQKLLPQHQLAIALPDRISEQICTSAAEMANNLAVDAIFVYTKYGHMASLLSRNRPNPPIFAFTDNANSRKSMNLYWGVIPLQLPLSNNMEDNFNQTIKLMKSKGSVKSGDTVLVVADSDLNRPRAATSVFQSIQVRIVD

SEQ ID NO: 557 - DNA, 1737 bp, Oryza sativa
  CDS (1)..(1737)
atggccgccaccgccgccgcggcccacaccctcctccacctcgcggccccgaggaagccctccgcggggcccccactcccgcccgccaccctccgcctccccagccgccgcctcgcccgtctcacggccagctgcagcagcggctccgggaacaacagcgccgccgacttccccaaccccaacgggatcctcgtcgcgcccccgtccgccgcggcggtggcggcggcgtcgtcgcatatcgatgttgacgtggcgacggaggccgacctgagggagaacgggttccggagcacgcggcgcaccaagctcgtctgcaccgtggggcccgccacctgcggcgccgacgagctggaggcgctcgccgtcggcgggatgaacgtcgcgcgcgtcaacatgtgccacggggaccgggagtggcaccggggcgtcatccgcgcggtgcggaggctcaacgaggagaaggggttcgccgtcgccgtcatgatggacaccgaggggagcgagatccacatgggggacctcggcggcgccgccgccgccaaggcggaggatggagaaatatggacatttagcgtaagatcctttgaggcacctcccccagaacgaactattcatgtgaactacgaaggcttcgctgaagatgtgagagttggtgatgagcttcttgttgatggtggcatggctcggtttgaggtggttgagaaattaggaccagatgtcaagtgccgttgcacagatcctggtttgttgctgccacgtgccaatcttacattttggcgggatggtagtattgtccgtgagaggaacgctatgctacctaccatttcatcaaaggattggcttgacatagactttggaatttctgaaggcgtagattttattgcagtttcgtttgtcaaatctgcagaagtaattaaccatctgaaaagctatatagctgcaaggagccgtggcagcgatatagcagtcattgccaagatcgagagcattgactctttgaagaacttggaggagataatccgtgcttcagatggtgccatggtagcccgaggggatatgggtgcacaaattcccttggagcaagtcccctcagtacaacaaaagatagttaaactgtgcaggcagctcaacaagccagtcattgttgcgtcgcagcttcttgaatcgatgattgagtatcctacgcccaccagggccgaggttgctgatgtttctgaagcagttcgtcagcgtgcagatgcgcttatgctttcaggtgagtcagcaatggggagatatccagagaaagctcttagtgtcctccggagtgttagcctaaggattgagaagtggtggagagaggagaagcgccatgaggaactggaacttaaagatgtttcatcttccttctctgacaaaatatcagaagaaatctgcatttcggccgctaaaatggccaacaaattggaggtagatgccgttttcgtctacacaaacactggccacatggcctcactgctctcgcggtgccgtcctgactgcccgatcttcgccttcacgacctcgacatctgtgaggagacgattgaacctccaatggggcctcatccccttccgcctcagcttctcggacgacatggagagcaacctgaaccgtaccttctcgctgctcaaggccaggggcatgatccagtccggcgaccttgtcatcgcgctctccgacatgctgcagtccatccaggtcatgaacgtaccttga

SEQ ID NO: 558 - protein, 578 aa, Oryza sativa
MAATAAAAHTLLHLAAPRKPSAGPPLPPATLRLPSRRLARLTASCSSGSGNNSAADFPNPNGILVAPPSAAAVAAASSHIDVDVATEADLRENGFRSTRRTKLVCTVGPATCGADELEALAVGGMNVARVNMCHGDREWHRGVIRAVRRLNEEKGFAVAVMMDTEGSEIHMGDLGGAAAAKAEDGEIWTFSVRSFEAPPPERTIHVNYEGFAEDVRVGDELLVDGGMARFEVVEKLGPDVKCRCTDPGLLLPRANLTFWRDGSIVRERNAMLPTISSKDWLDIDFGISEGVDFIAVSFVKSAEVINHLKSYIAARSRGSDIAVIAKIESIDSLKNLEEIIRASDGAMVARGDMGAQIPLEQVPSVQQKIVKLCRQLNKPVIVASQLLESMIEYPTPTRAEVADVSEAVRQRADALMLSGESAMGRYPEKALSVLRSVSLRIEKWWREEKRHEELELKDVSSSFSDKISEEICISAAKMANKLEVDAVFVYTNTGHMASLLSRCRPDCPIFAFTTSTSVRRRLNLQWGLIPFRLSFSDDMESNLNRTFSLLKARGMIQSGDLVIALSDMLQSIQVMNVP

SEQ ID NO: 559 - DNA, 1713 bp, Oryza sativa
  CDS (1)..(1713)
atggcggcggcggcggctgagatcgtggggtccgcggcggcgcgcatggcggcgccggcagtgaggccggctccgcccgcggcggcggcggcggcggcgcccccgcagccgaggagggccgtggcggcgcgctccctcaggacctccacctccgacagggtggcggcggatctcgcgctcgggagcaacggctccctctccgctcagaacattgctgagaataccgctgacgctacttcgcaagtggtctctgcgaattcccgtaggaagacaaagattgtttgcaccataggcccctcaaccaacacacgcgagatgatatggaaacttgctgagactggaatgaacgtcgcacgcatgaatatgtcccatggtgaccaccagtcgcaccagaaggtgattgatttggtgaaggagtacaatgcgaagaatactgatggcaatgtcattgctattatgctggataccaagggtccagaagtgagaagtggggatgttccagaaccaatcatgctcgaggaaggtcaagagttcaattttactattaaaagaggggtgagcaccaaagacaccgtcagtgtgaattacgatgacttcataaacgatgttgaagttggggacatactgttggtggatggaggaatgatgtcactcgctgtcaagtctaaaacagctgatacggttaagtgtgaagtagttgatggtggggaactgaaatcaaggcgccacctaaatgtccgtggaaagagtgcgactttgccatctattacagagaaagattgggaggacataaagtttggtgttgaaaatggtgttgatttctatgccgtttcctttgtgaaggatgcaaaagttattcatgaactgaaggactaccttaaaagtgctaatgcagatatacatgtcattccaaagattgaaagtgcagattcaataccaaacctccagtccattattgctgcttcagatggggcgatggtggcaagaggggatcttggtgctgaacttccaattgaggaagttcctttgctgcaggaggagattgtcagaacatgccgaagcatgcagaaaccagttattgttgccacgaatatgttagagagcatgatagaccatcccactccaacaagagcagaagtttctgatatagcaattgcagttcgtgaaggttctgatgccatcatgctgtctggtgaaactgcccatggaaagttcccactgaaggcagtcaaggtgatgcacacagtggcacagagaacagaatccagcctgtataacccaactacatctcctagtcttgttgcacatcctcaggctctgctcaacgaggaattttcgcaaagccaactaagcaaaatgtttggatctcatgctacaatgatggcgaacaccctttgcaccccaattattgtgtttacacgaaccggctccatggcagtccttctcagccactaccggccctcgtctacaatttttgcatttacaaatgaggaacgagtgaagcaacgtctggcactctaccagggtgtggttcccatttacatgaagttttctgatgatgcagaggaaactttctctagagcaattagtagcttgctgaacgcccaattcgtgaaagaaggggactacgtgacccttgttcagagtggagtgaagtcgatctggagagaggagtctactcaccacattcaagtgaggaaagtccagggctaa

SEQ ID NO: 560 - protein, 570 aa, Oryza sativa
MAAAAAEIVGSAAARMAAPAVRPAPPAAAAAAAPPQPRRAVAARSLRTSTSDRVAADLALGSNGSLSAQNIAENTADATSQVVSANSRRKTKIVCTIGPSTNTREMIWKLAETGMNVARMNMSHGDHQSHQKVIDLVKEYNAKNTDGNVIAIMLDTKGPEVRSGDVPEPIMLEEGQEFNFTIKRGVSTKDTVSVNYDDFINDVEVGDILLVDGGMMSLAVKSKTADTVKCEVVDGGELKSRRHLNVRGKSATLPSITEKDWEDIKFGVENGVDFYAVSFVKDAKVIHELKDYLKSANADIHVIPKIESADSIPNLQSIIAASDGAMVARGDLGAELPIEEVPLLQEEIVRTCRSMQKPVIVATNMLESMIDHPTPTRAEVSDIAIAVREGSDAIMLSGETAHGKFPLKAVKVMHTVAQRTESSLYNPTTSPSLVAHPQALLNEEFSQSQLSKMFGSHATMMANTLCTPIIVFTRTGSMAVLLSHYRPSSTIFAFTNEERVKQRLALYQGVVPIYMKFSDDAEETFSRAISSLLNAQFVKEGDYVTLVQSGVKSIWREESTHHIQVRKVQG

SEQ ID NO: 561 - DNA, 1584 bp, Oryza sativa
  CDS (1)..(1584)
atgcattcgacgaatctgctgctggaggagcccatcaggatggcatccatcctggagccatccaagccgagctttttcccggcgatgaccaagatcgtggggacgctgggtcccaagtcgcgcgccgtcgacaccatctcctcctgcctcaaggccggcatgtcggttgccaggttcgatttctcgtggggagacgctgagtaccaccaggaaaccctcgaaaacctcaagctcgccatcaagtccaccaagaagctctgtgctgtcatgctcgacactgtcggcccggagttgcaggtggtgaacaagagtgaggctgcaatctcccttgaagcgaatggcactgttgttctcacccctgaccaggggcaggaggcctcctccgaattgctgcccatcaacttctccgggcttgctaaggctctgaaaccaggtgctacaatttttgtggggcaatacttgttcactggcagtgagactacttcagtttggttagaggtttctgaagttaaaggagatgatgtggtttgtgtgataaaaaattcggctactctggctggttcactgttcaccctgcattgttctcagattcatatcgacttacctacactgtctgatgaggacaaggaggttatcagaagatggggagctccaaacaagattgacttcctctctctgtcttatacaagacacgcggaagatgtgcgacaggcacgtgagttcctctcaaagttaggcgaccttagccaaactcagatttttgccaaaattgagaatgttgagggtttgaatcattttgatgaaatcctgcaagaggcggatggtatcattctgtcaagaggaaaccttggaattgatcttccacctgaaaaggtgtttttgtttcaaaagtctgctctgcacaagtgcaacatggctggaaagcctgctgttgttactcgtgttgtggacagtatgactgacaacctcaggcctactcgtgcggaggctactgatgtggcaaatgctgtacttgacgggagtgatgccattctccttggtgctgagactctccgtggtctgtacccagttgagactatctcaattgtgggcaaaatttgcgctgaggcagagaaggtattcaaccaagatttatacttcaagcggactgtgaaatatgttggggagcccatgacccacttggagtctatcgcttcttctgcggtgcgagctgctatcaaagtgaaggcttctgtcattatttgcttcacatcatctggacgcgctgcaagactaattgccaagtacaggcccaccatgcctgttctatctgttgtcattcctcgtctgaaaacaaaccaactgaggtggagtttcactggcgcatttgaagcaagacaatcactcatagttagaggtctctttccgatgcttgctgatcctcgccatccagctgaatcgaccagcgctaccaatgagtcagttttgaaggttgctcttgaccatggcaaagcttccggtgtgatcaagtcgcatgatcgcgttgttgtctgccagaaagtgggtgattcctcggttgtgaagatcattgagctggacgattag

SEQ ID NO: 562 - protein, 527 aa, Oryza sativa
MHSTNLLLEEPIRMASILEPSKPSFFPAMTKIVGTLGPKSRAVDTISSCLKAGMSVARFDFSWGDAEYHQETLENLKLAIKSTKKLCAVMLDTVGPELQVVNKSEAAISLEANGTVVLTPDQGQEASSELLPINFSGLAKALKPGATIFVGQYLFTGSETTSVWLEVSEVKGDDVVCVIKNSATLAGSLFTLHCSQIHIDLPTLSDEDKEVIRRWGAPNKIDFLSLSYTRHAEDVRQAREFLSKLGDLSQTQIFAKIENVEGLNHFDEILQEADGIILSRGNLGIDLPPEKVFLFQKSALHKCNMAGKPAVVTRVVDSMTDNLRPTRAEATDVANAVLDGSDAILLGAETLRGLYPVETISIVGKICAEAEKVFNQDLYFKRTVKYVGEPMTHLESIASSAVRAAIKVKASVIICFTSSGRAARLIAKYRPTMPVLSVVIPRLKTNQLRWSFTGAFEARQSLIVRGLFPMLADPRHPAESTSATNESVLKVALDHGKASGVIKSHDRVVVCQKVGDSSVVKIIELDD

SEQ ID NO: 563 - DNA, 1584 bp, Oryza sativa
  CDS (1)..(1584)
atgcagggcgccaacatgctcctggacgagcccgtccgcctcacctccgtcctcacccccgtcaagcccaaagtattcccatcactcaccaagattgttgggacccttgggcccaactcacactccgtcgaggttattcaagaatgcctcactgctgggatggcagtcgcacggtttgatttctcatggatggatgcttcatatcatcaggagacccttaacaatctgaggaaagctgcacaaaatgtcaataagctgtgccctgtaatgctggatacactgggtccagaaattcaggttcacaattcaactggtggaccaattgagttgaaagctggaaatcatgtcaccataacaccagatctttctaaagctccctcttctgaaatcttgccaattaagtttggtggtcttgcaaaagctgtcaagaagggtgatactctttttattggtcaatatctcttcacaggaagtgaaacaacatcttcgtggcttgaggttgtggaaacttctggagaaaatgttgaatgtcttgtgaccaatacagctacacttgcaggccccatgttcactttgcatgtttcaaaagcccatgtcagtttaccaactttgagtgattatgataaagaggtcatttcaacttggggattacataacagtgttgatattatatcactttcccatacccgctctgccgaggatgtcagggagcttagatcttttcttcaatctcatggccttcaggacacacagatatatgccaaggttgaaaatactgagggtttggatcattttgatgaaattctccaagaagctgatggcgtcattatttcacggggagacctgggaattgaccttccaccagaagatgtgttcatatcccaaaaaacagctattaagaaatgcaatcttgctggcaaacctgtgatcatcactagagttgtggacagcatgattgacaatctacgcccaacacgtgcagaggccactgatgttgcaaatgctgtcctagatggaacggatggcattttgcttggtgcggagactcatcgaggcccttatccagttgatgcagtgagtactgttgggagaatatgtgcagaagctgagtctgtgtataaccagttggttcacttcaagaaattagtgaagcatgtaggtgatccaatgccccatgaagaatctgtggcatcttcagcggttcgcactgcaatgaaggtaaaagctgctgcaatcgttgtgttcactttctcaggaagagctgccaggttagttgccaagtacaagccaccaatgccagtgttggccgttgtcttcccacgtgagggctctgatccaacaaagtggcgttcttacggcacaactcaggcaaggcaatgttttgctgcaagaggtgtctaccctttgatggcgagtactgaggaggctgaaactggtgggctcaccagggaagagtacgggataaaacttgcacagaactatggtcgctcggttggtatgctaaagccctatgacaggttgatcattttccagaagatcggcgattcatctgttgtcaagatcatcgagtgtgacagttcgtaa

SEQ ID NO: 564 - protein, 527 aa, Oryza sativa
MQGANMLLDEPVRLTSVLTPVKPKVFPSLTKIVGTLGPNSHSVEVIQECLTAGMAVARFDFSWMDASYHQETLNNLRKAAQNVNKLCPVMLDTLGPEIQVHNSTGGPIELKAGNHVTITPDLSKAPSSEILPIKFGGLAKAVKKGDTLFIGQYLFTGSETTSSWLEVVETSGENVECLVTNTATLAGPMFTLHVSKAHVSLPTLSDYDKEVISTWGLHNSVDIISLSHTRSAEDVRELRSFLQSHGLQDTQIYAKVENTEGLDHFDEILQEADGVIISRGDLGIDLPPEDVFISQKTAIKKCNLAGKPVIITRVVDSMIDNLRPTRAEATDVANAVLDGTDGILLGAETHRGPYPVDAVSTVGRICAEAESVYNQLVHFKKLVKHVGDPMPHEESVASSAVRTAMKVKAAAIVVFTFSGRAARLVAKYKPPMPVLAVVFPREGSDPTKWRSYGTTQARQCFAARGVYPLMASTEEAETGGLTREEYGIKLAQNYGRSVGMLKPYDRLIIFQKIGDSSVVKIIECDSS

SEQ ID NO: 565 - DNA, 1584 bp, Oryza sativa
  CDS (1)..(1584)
atgcattcgacgaatctgctgctggaggagcccatcaggatggcatccatcctggagccatccaagcccagcttcttcccggcgatgaccaagatcgtggggacgctggggccaaagtcgcgctccgtcgacaccatctcctcctgcctcaaggccggcatgtcggtggcccgatttgatttctcgtggggagacgccgagtaccaccaggaaacccttgagaacctcaaggtcgccatcaagtccaccaagaagctctgcgcggtcatgcttgacacggtcggcccagagttgcaggtggtgaacaagagcgaagcctccatctccctcgaggagaacggcactgttattctcacccctgaccaggggcaggaggcctcctcacaagtgctgccaattaacttcgctgggcttgctaaggctgtgaagccaggtgacacaatatttgttgggcaatacttgttcacaggcagtgagactacttcagtttggttagaggtttctcaaattaaaggagatgatgtggtctgtgtgataaaaaacacagcaactctggctgggtcgctcttcacattgcattgctcgcagattcacatcgacttacctaccctatctgatgaggacaaggaggttatcagaaaatggggtgccccaaacaagattgacttcctctctctttcttatacaagacatgtagaagatgtgcgacaggcacgtgaattcctctcaaagttaggtgaccttagccagacccagatttttgcaaaaatcgagaatgtggaggggttgaataattttgatgaaatcctccaagaagctgatggtatcatcctgtcaagaggaaaccttggaattgatcttccacctgaaaaggtgtttttatttcaaaagtctgctctgcacaagtgcaacatggctggaaagcctgctgttgttactcgtgttgtagacagtatgactgacaacctcaggcctactcgtgcagaggctacggatgtggcaaatgcagtgcttgacgggagtgatgccattctccttggtgctgagactctgcgtggtttatacccagttgagactatttcaatagtgggtaaaatttgtgctgaggctgagaaggtcttcaaccaagatttatacttcaagagaactgtgaaacatgtgggggagcccatgacccacttggagtctattgcttcctctgcggtgcgagctgctattaaagtgaaggcgtctgtcataatttgcttcacatcatctggacgtgctgcaaggctaattgccaagtataggccaaccatgcctgttctatctgttgtcattcctcgtctaaaaacaaatcaactgaggtggagtttcactggcgcatttgaagcaagacaatcgctcatagttagaggcctctttccgatgcttgctgatccgaggcatccagctgaatcaaccaacgctacaaatgaatccgttttgaaggttgctcttgaccacggtaaagtttctggtgtgataaagtcgcatgatcgcgttgttgtctgccagaaggtgggagattcctcggttgtgaagatcattgagctggacgattag

SEQ ID NO: 566 - protein, 527 aa, Oryza sativa
MHSTNLLLEEPIRMASILEPSKPSFFPAMTKIVGTLGPKSRSVDTISSCLKAGMSVARFDFSWGDAEYHQETLENLKVAIKSTKKLCAVMLDTVGPELQVVNKSEASISLEENGTVILTPDQGQEASSQVLPINFAGLAKAVKPGDTIFVGQYLFTGSETTSVWLEVSQIKGDDVVCVIKNTATLAGSLFTLHCSQIHIDLPTLSDEDKEVIRKWGAPNKIDFLSLSYTRHVEDVRQAREFLSKLGDLSQTQIFAKIENVEGLNNFDEILQEADGIILSRGNLGIDLPPEKVFLFQKSALHKCNMAGKPAVVTRVVDSMTDNLRPTRAEATDVANAVLDGSDAILLGAETLRGLYPVETISIVGKICAEAEKVFNQDLYFKRTVKHVGEPMTHLESIASSAVRAAIKVKASVIICFTSSGRAARLIAKYRPTMPVLSVVIPRLKTNQLRWSFTGAFEARQSLIVRGLFPMLADPRHPAESTNATNESVLKVALDHGKVSGVIKSHDRVVVCQKVGDSSVVKIIELDD

SEQ ID NO: 567 - DNA, 1584 bp, Oryza sativa
  CDS (1)..(1584)
atgcagtcgagtcctttgcttctggaggaacccataaggatggcctccatcctcgagccatccaagcctagtttctttccagcgatgacaaagattgttggcacacttggcccaaagtcacgatcggttgacgtgatttcccaatgtcttgaggcaggaatgtctgtggcaaggtttgatttttcatggggtgatcctgaataccaccaagagacgttggaaaatttaagggctgctatcaaaagtaccaagaaactttgtgcggttatgctagataccgtgggtccagaactacaagttgtcaacaaaactgagcacccaatttcccttcaggctgacacattggttgtcttaactcctgatcagaacaaagaagctacttcaaatcttttacctgtaaattttagtggactttcaaaggctgtgaagaatggtgatactatttttattggtcaatacctgtttactggaagtgaaacaacctcagtgtggctagaggtcagcgaagtgaatggtgatgatgtcacttgtgtcataaaaaattctgctactcttgctgggtcactgtatactttacatgtctctcaaattcatatcgaccttcccactcttgacaataaggataaggaggtaataagcacttggggtgctcaaaacaatatagacttcctttcattatcatacaccaggcacgctgaagatgttcgccatgctcgtgagtttctctctaaactaggtaacctcaaacagacccagatatttgcaaagattgaaaacatagaggggttgacacattttgatgagatattgcgagaagcggatggtatcatcctctcacgtggaaatttggggatagatcttccacccgagaaggtgtttttatttcaaaaagcagctatttacaaatgtaacatggctgggaaacctgctgttgtcacacgtgttgtggatactatgaccgataacctaagacctactcgtgctgaagcaactgatgttgccaatgcagtgttggatggcagtgatgcaattgttcttggggcagaaactttgcgggggttataccctgtagagactatttccactgttggaaaaatttgtgctgaggcagagaaagtttataatcaagatttgtatttcaagaaggctgtcaaatttgttggagagccgatgactcatttggaatcaatagcttcctctgcggtacgggcagccatcaaggttaaggcttctgttattatttgctttacttcatctggcagggctgcaaggttgattgctaagtaccgtccaaccatgcctgtgatatccgttgtcattcctcaactaaagacaaatcaacttcgatggactttcactggagcttttgaggcaaggcaatcacttattgtgagaggtcttttccctatgcttgcagatccacgacatccagctgagtctaaaagtgcaacaaatgaatcaattttgaaggttgctttagaccatggcaaggcttttggtatcataaaggcacatgatcgagttgttgtatgccagaaagttggtgactcctcagttgtgaagattattgagcttgacgaatag

SEQ ID NO: 568 - protein, 527 aa, Oryza sativa
MQSSPLLLEEPIRMASILEPSKPSFFPAMTKIVGTLGPKSRSVDVISQCLEAGMSVARFDFSWGDPEYHQETLENLRAAIKSTKKLCAVMLDTVGPELQVVNKTEHPISLQADTLVVLTPDQNKEATSNLLPVNFSGLSKAVKNGDTIFIGQYLFTGSETTSVWLEVSEVNGDDVTCVIKNSATLAGSLYTLHVSQIHIDLPTLDNKDKEVISTWGAQNNIDFLSLSYTRHAEDVRHAREFLSKLGNLKQTQIFAKIENIEGLTHFDEILREADGIILSRGNLGIDLPPEKVFLFQKAAIYKCNMAGKPAVVTRVVDTMTDNLRPTRAEATDVANAVLDGSDAIVLGAETLRGLYPVETISTVGKICAEAEKVYNQDLYFKKAVKFVGEPMTHLESIASSAVRAAIKVKASVIICFTSSGRAARLIAKYRPTMPVISVVIPQLKTNQLRWTFTGAFEARQSLIVRGLFPMLADPRHPAESKSATNESILKVALDHGKAFGIIKAHDRVVVCQKVGDSSVVKIIELDE

SEQ ID NO: 569 - DNA, 1716 bp, Brassica napus
  CDS (1)..(1716)
atggcggcgacaggtcaaatctcgacgagaatgacggtggatcgcactctgtcctcctccaggaacgctggactttccctttcaccatcaccccagagaacgctaatcggcgtcgccggtaggtctggtatcgctcaccgtcaactgtctctctccgtcagagcgattaacaccaatgaagatagccggaaagtcaaggtttatgcagagaacggcgctttcgatttgggagtgatggatccttcagtggagccatataaatttgcggagccaagaacaagtcataatgattcgaggaggaaaaccaagattgtgtgtaccattggaccttcctctagctctcgtgaaatgatttggaaactcgcggaagcaggaatgaatgtggctcgtttgaatatgtctcatggagatcatgcttctcatcagattactattgatcttgttaaagaatacaactctctctttgttgacaaagccattgctatcatgttggatacaaagggtcctgaggttcgaagtggggatgtacctcagccgatcttccttgaagagggtcaagagtttaattttaccatcaagagaggtgtctcaatgaaagacaccgtcagtgtcaactatgatgattttgttaacgatgtcgaagttggagacatacttttggtcgatggtggaatgatgtcactagctgttaagtccaagacgagcgatttggtgaaatgtgtagttattgacggtggagagcttcaatctagacgtcacttgaatgttcgaggaaagagtgctactcttccttccataacagacaaagattgggaagacatcaaatttggagtggacaaccaagttgatttctatgctgtctcttttgttaaggatgctaaagttgtccatgagttgaaaaactacctcaaaagctgcagtgcggatatctctgtgattgtgaaaattgaaagcgcagattctataaagaatcttccttccattatatctgcttgtgatggggcaatggttgctcgtggagatcttggagctgaacttcccattgaggaggttcccttgttacaggaggagataatcacaaggtgtaggaacattcataaaccagtgattgtcgccacaaacatgctagagagtatgattaatcatccaacacctacaagagctgaagtatctgacattgcaattgcagtgcgcgaaggagcagatgcaatcatgctttctggtgaaaccgcacacggaaagtttcctctgaaagctgttaacgtgatgcataccgtggctttgagaactgaggctagtctacctgttagaacctcagcaatccggaccactgcttacaagggtcgcatgggccaaatgtttgctttccatgcttctataatggcgaatacactgaacacaccgatcattgtgttcacaagaactggatccatggcagtgcttctgagtcactaccgcccgtcctcaacaattttcgccttcacaaaccagaggagaataatgcaaaggctggctctttaccaaggtgtcatgcctatatacatggagttttctgatgatgcagaagatacatatgcccgttccttgaaactcctacaggacgagaatatgcttaaggaaggacaacatgtaactcttgtccaaagtggtgcgcaacccatttggcgtgaagaatcaacacatctcatacaagtccgtaagattaagataggttga

SEQ ID NO: 570 - protein, 571 aa, Brassica napus
MAATGQISTRMTVDRTLSSSRNAGLSLSPSPQRTLIGVAGRSGIAHRQLSLSVRAINTNEDSRKVKVYAENGAFDLGVMDPSVEPYKFAEPRTSHNDSRRKTKIVCTIGPSSSSREMIWKLAEAGMNVARLNMSHGDHASHQITIDLVKEYNSLFVDKAIAIMLDTKGPEVRSGDVPQPIFLEEGQEFNFTIKRGVSMKDTVSVNYDDFVNDVEVGDILLVDGGMMSLAVKSKTSDLVKCVVIDGGELQSRRHLNVRGKSATLPSITDKDWEDIKFGVDNQVDFYAVSFVKDAKVVHELKNYLKSCSADISVIVKIESADSIKNLPSIISACDGAMVARGDLGAELPIEEVPLLQEEIITRCRNIHKPVIVATNMLESMINHPTPTRAEVSDIAIAVREGADAIMLSGETAHGKFPLKAVNVMHTVALRTEASLPVRTSAIRTTAYKGRMGQMFAFHASIMANTLNTPIIVFTRTGSMAVLLSHYRPSSTIFAFTNQRRIMQRLALYQGVMPIYMEFSDDAEDTYARSLKLLQDENMLKEGQHVTLVQSGAQPIWREESTHLIQVRKIKIG

SEQ ID NO: 571 - DNA, 1584 bp, Brassica napus
  CDS (1)..(1584)
atgcattcgagccatctccttctcgaggagccgatcaggatggcttctatcctcgagccatccaaatccagcttctttccggcgttaactaagatcgtcgggactctcggtcccaaatccagatccgttgagacactctccggctgtctcaaatccggcatgtctgtggctagattcgatttctcttggggagacgctgagtatcaccaagagacgcttgataatctgaagattgctgttaagagctccaagaagctttgtgctgttatgcttgatacagtgggacctgagcttcaagtgatcaacaagtctgagaaagctattactcttaaagctgatggacttgttactttgactcctaatcaagaccgagaagcctcttctgaagtccttcccattaactttgatggccttgccaaggcggtgaagaaaggagacactatctttgttgggcagtacctattcactggtagtgaaacaacttcagtttggctcgaggttgatgaagttaaaggagatgatgtcatttgcctttcaaggaatgctgctactctcgctggttctatgttcaccttgcacgcctctcaagttcacatcgatatgccaactcttactgagaaagataaagaggttataagcacatggggagttcaaaacaaaatcgactttctctcgttgtcctattgtcgccatgcagaggatgttcgccagacccgtgagatgcttaaaaagttgggtgacctctctcaaacacaaatatttgccaagattgagaacgttgagggactaaaccactttgatgagattctacaagaagctgatggaattattctttctcgtgggaacttgggtattgatctacccccggagaaggtgtttttgtttcaaaaggcggctctttacaagtgcaacatggcaggaaagccagccgttcttactcgtgttgttgatagtatgactgacaacttgcgaccaactcgtgcagaggcaacagatgttgctaatgctgttttagatggaagtgatgcaattcttctcggtgctgagactcttcgcggtctgtaccctgtggagactatatcaactgtcggaaggatctgtgctgaggcagagaaggttttcaatcaagatttgtacttcaagaagactgtcaagtatgttggagagccgatgtctcacctcgaatccattgcttcttcagctgtaagggcagcaatcaaggttaaggcatccgtcattatatgctttacctcttctggaagagcagccaggttgattgctaaatacaggccaacaatgccggttatttctgtagtcattccacgggttaagacaaatcagctaaaatggagcttcagtggagcctttgaggctaggcagtcacttattgtcaggggcctcttccccatgcttgctgaccctcgtcaccctgcggaatcaacaagtgcgacgaacgagtcagtcctgaaggttgcgttagaccacgggaagcaagcaggagtgatcaagtcgcacgacagagtagtggtgtgtcagaaagttggtgatgcatctgtggtcaagatcatcgagcttgaggattga

SEQ ID NO: 572 - protein, 527 aa, Brassica napus
MHSSHLLLEEPIRMASILEPSKSSFFPALTKIVGTLGPKSRSVETLSGCLKSGMSVARFDFSWGDAEYHQETLDNLKIAVKSSKKLCAVMLDTVGPELQVINKSEKAITLKADGLVTLTPNQDREASSEVLPINFDGLAKAVKKGDTIFVGQYLFTGSETTSVWLEVDEVKGDDVICLSRNAATLAGSMFTLHASQVHIDMPTLTEKDKEVISTWGVQNKIDFLSLSYCRHAEDVRQTREMLKKLGDLSQTQIFAKIENVEGLNHFDEILQEADGIILSRGNLGIDLPPEKVFLFQKAALYKCNMAGKPAVLTRVVDSMTDNLRPTRAEATDVANAVLDGSDAILLGAETLRGLYPVETISTVGRICAEAEKVFNQDLYFKKTVKYVGEPMSHLESIASSAVRAAIKVKASVIICFTSSGRAARLIAKYRPTMPVISVVIPRVKTNQLKWSFSGAFEARQSLIVRGLFPMLADPRHPAESTSATNESVLKVALDHGKQAGVIKSHDRVVVCQKVGDASVVKIIELED

SEQ ID NO: 573 - DNA, 1584 bp, Brassica napus
  CDS (1)..(1584)
atgcattcgagtcatctccttctcgaggaaccgatcaggatggcatcaatcctcgagccatccaaatctagcttctttccggcgttaactaagatcgtcgggactctcggtcccaaatccagatccgttgagactctctccggctgtctcaaatccggcatgtccgtggctcgattcgatttctcttggggagacgctgagtatcaccaagagacgctggataatctgaaaattgctgtgaagagcactaagaagctttgtgctgttatgcttgatacagtgggacctgagcttcaagtgatcaacaagtctgagaaagctattactcttaaagctgatggacttgttactttgactcctaatcaagaccaagaagcctcttctgaagtccttcccattaactttgatgggcttgccaaggcagtgaagaaaggagacactatctttgttgggcaatacctattcactggtagtgaaacaacttcagtttggctcgaggttgatgaagttaaaggagatgatgtcatttgcctgtcaaggaatgctgctactcttgctggtgctctcttcactttgcacgcctctcaagttcacatcgatctgccaactcttactgagaaagataaggaggttataagcacatggggagttcaaaacaaaattgattttctctcactgtcctattgtcgacatgcggaggatgttcgccagactcgcgaaatgcttaaaaagttgggtgacctctctcaaacacaaatatttgccaagattgagaatgtagagggactaacccactttgatgagattctacaagaagccgatggaattattctttctcgtgggaatttgggtatagatctacccccggaaaaggtgtttttgtttcaaaaggcggctctttacaagtgcaacatggctggaaagccagccgttcttacccgtgtggttgatagtatgactgacaacttgcgaccaactcgtgcagaggcaaccgatgttgctaatgctgttttagatggaagtgatgcaattcttcttggtgctgagacccttcgcgggttgtaccctgtcgagaccatatcaactgtcggaaggatctgtgctgaggcagaaaaggttttcaatcaagacttgtacttcaagaagactgtcaagtatgtaggagaaccgatgtctcacctggaatccattgcttcctcagctgtaagggcagcaatcaaggttaaggcatcagtcattatatgcttcacctcttctggaagagcagcaaggttaattgccaaatacaggcccacaatgcccgttatttctgttgtcattccccgggttaagacaaatcagctgaaatggagctttagtggagcctttgaggcgaggcagtcacttattgtcagaggccttttccccatgctcgctgatcctcgtcacccagcggaatcaacaagtgcgacgaacgagtcagtcctcaaggttgcactagaccatggaaagcaagcaggagtgatcaaatcgcatgacagagtagtggtgtgtcagaaagttggtgatgcatctgtggtgaagatcatcgagctagaggattaa

SEQ ID NO: 574 - protein, 527 aa, Brassica napus
MHSSHLLLEEPIRMASILEPSKSSFFPALTKIVGTLGPKSRSVETLSGCLKSGMSVARFDFSWGDAEYHQETLDNLKIAVKSTKKLCAVMLDTVGPELQVINKSEKAITLKADGLVTLTPNQDQEASSEVLPINFDGLAKAVKKGDTIFVGQYLFTGSETTSVWLEVDEVKGDDVICLSRNAATLAGALFTLHASQVHIDLPTLTEKDKEVISTWGVQNKIDFLSLSYCRHAEDVRQTREMLKKLGDLSQTQIFAKIENVEGLTHFDEILQEADGIILSRGNLGIDLPPEKVFLFQKAALYKCNMAGKPAVLTRVVDSMTDNLRPTRAEATDVANAVLDGSDAILLGAETLRGLYPVETISTVGRICAEAEKVFNQDLYFKKTVKYVGEPMSHLESIASSAVRAAIKVKASVIICFTSSGRAARLIAKYRPTMPVISVVIPRVKTNQLKWSFSGAFEARQSLIVRGLFPMLADPRHPAESTSATNESVLKVALDHGKQAGVIKSHDRVVVCQKVGDASVVKIIELED

SEQ ID NO: 575 - DNA, 1743 bp, Brassica napus
  CDS (1)..(1743)
atggctcaggtcgttgctacaaggtcgattcaaggctcgatgttgagtcccaacggtggatctgtttccacgagatccgacaagcttctgaagccggcgagtttcgcagtgaaggttcttggcaacgaatccaagaagagcggaagagtgtccgtaagaggaggaagaaaggttgataccactgtgagatccgctcgtgtggagaccgaagtcattccagtgtctcccgaggatgttccaaacagagaggagcaactggagcggtttttggaaatgcagaagtttagtgacacatcggtagggatgtggtcgaaaccgacagtgaggaggaagactaagattgtgtgcaccgttggtccttctaccaacacacgagagatgatatggaaactagctgaagctgggatgaatgttgcaaggatgaacatgtctcatggggatcatgcttctcataagaaggttattgatttggtcaaagagtacaatgcgcagtctaaggacaacaccattgctatcatgctggatactaagggtccagaagttaggagtggagatttaccccagccgattatgttagaccctggtcaagagtttacttttacaattgagagaggagtcagcacaccaagctgtgtcagtgttaactatgatgattttgtcaacgatgtggaggccggagacatgctccttgttgatggtggtatgatgtcgtttatggtgaagtctaagactaaagagactgtcatatgtgaggttgttgatggtggagagctaaagtcaaggagacacttgaatgtccgaaggaaaagtgcaacattaccttcaatcactgagaaggattgggaggatattaagttcggagtggagaacaaagttgacttctatgctgtttcttttgtcaaagatgcacaagtggtgcatgaactgaagaattacctccaaggttgtggtgctgatattcacgtgatagtaaaaattgaaagcgcagactccatacctaacttgcattccattatcaccgcatcagatggggcaatggttgcaagaggtgatcttggtgcagagcttcctattgaagaagtacccattcttcaggaaaagatcattaacctatgccgtagcatgggaaaagctgttattgttgcaactaacatgcttgagagtatgatagttcatccgactccaacccgagcggaggtttctgatattgctatagctgttagagaaggtgctgatgcagtcatgctttcaggagaaactgctcacggaaagttcccattgaaagctgctggagtgatgcatacagttgcactgcgaacagaagcaaccattactactagtactgaaatgccacctaatcttggtcaagccttcaagaaccatatgagtgagatgtttgcataccatgcaaccatgatgtcaaacacacttggaacttcaactgttgtcttcacaagaactggtttcatggccatactactaagtcactatcgcccttccggcacaatctacgccttcacgaacgagaaaaaaatacagcaaagattagccttgtatcaaggtgtatgccccatatatatggagttctcagatgatgcagaagacactttcactaaagctttggctacactactgaaacaaggaatggtgaagaagggagaggaaatagcgattgtacagagcgggtcacaaccaatctggcggtctcaatcgactcataacatccaagtccgcaaggtgtaa

SEQ ID NO: 576 - protein, 580 aa, Brassica napus
MAQVVATRSIQGSMLSPNGGSVSTRSDKLLKPASFAVKVLGNESKKSGRVSVRGGRKVDTTVRSARVETEVIPVSPEDVPNREEQLERFLEMQKFSDTSVGMWSKPTVRRKTKIVCTVGPSTNTREMIWKLAEAGMNVARMNMSHGDHASHKKVIDLVKEYNAQSKDNTIAIMLDTKGPEVRSGDLPQPIMLDPGQEFTFTIERGVSTPSCVSVNYDDFVNDVEAGDMLLVDGGMMSFMVKSKTKETVICEVVDGGELKSRRHLNVRRKSATLPSITEKDWEDIKFGVENKVDFYAVSFVKDAQVVHELKNYLQGCGADIHVIVKIESADSIPNLHSIITASDGAMVARGDLGAELPIEEVPILQEKIINLCRSMGKAVIVATNMLESMIVHPTPTRAEVSDIAIAVREGADAVMLSGETAHGKFPLKAAGVMHTVALRTEATITTSTEMPPNLGQAFKNHMSEMFAYHATMMSNTLGTSTVVFTRTGFMAILLSHYRPSGTIYAFTNEKKIQQRLALYQGVCPIYMEFSDDAEDTFTKALATLLKQGMVKKGEEIAIVQSGSQPIWRSQSTHNIQVRKV

SEQ ID NO: 577 - DNA, 1743 bp, Brassica napus
  CDS (1)..(1743)
atggctcaggtcgttgctacaaggtcgattcaaggctcgatgttgagtcccaacggtggatctgtttccacgagatccgacaagcttctgaagccggcgagtttcgcagtgaaggttcttggcaacgaatccaagaagagcggaagagtgtccgtaagaggaggaagaaaggttgataccactgtgagatccgctcgtgtggagaccgaagtcattccagtgtctcccgaggatgttccaaacagagaggagcaactggagcggtttttggaaatgcagaagtttagtgacacatcggtagggatgtggtcgaaaccgacagtgaggaggaagactaagattgtgtgcaccgttggtccttctaccaacacacgagagatgatatggaaactagctgaagctgggatgaatgttgcaaggatgaacatgtctcatggggatcatgcttctcataagaaggttattgatttggtcaaagagtacaatgcgcagtctaaggacaacaccattgctatcatgctggatactaagggtccagaagttaggagtggagatttaccccagccgattatgttagaccctggtcaagagtttacttttacaattgagagaggagtcagcacaccaagctgtgtcagtgttaactatgatgattttgtcaacgatgtggaggccggagacatgctccttgttgatggtggtatgatgtcgtttatggtgaagtctaagactaaagagactgtcatatgtgaggttgttgatggtggagagcttaagtcaaggagacacttgaatgtccgagggaaaagtgcaacattaccgtcaatcactgagaaggattgggaggatattaagttcggagtggagaacaaagttgacttttatgcagtttcttttgtcaaagatgcacaagtggtacacgaactcaagaattacctcaaaggttgtggtgctgatattcacgtgatagtaaaaattgaaagcgcagactccatacctaacttgaattccattatcaccgcatcagatggggcaatggttgcaagaggtgatcttggtgcagagcttcctattgaagaagtacccattcttcaggagaggatcattaacctatgccgtagcatgggaaaagctgttattgttgcaactaacatgcttgagagtatgatagttcatccgactccaacccgagcggaggtttctgatattgctatagctgttagagaaggtgctgatgcagtcatgctttcaggagaaactgctcacggaaagttcccactgaaagctgctggagtgatgcatacagtcgcactgcgaacagaagcaaccattactactagtactgaaatgccacctaatcttggtcaagccttcaagaaccatatgagtgagatgtttgcataccatgcaaccatgatgtcaaacacgcttggaacttcaactgttgtcttcaccagaactggtttcatggccatacttttaagtcactatcgcccttctggcaccatctacgccttcacgaatgagaaaaaaatacagcaaagattagccttgtatcaaggggtgtgccccatatatatggagttctcagatgatgcagaggacactttcactaaagctttggctacactactgaaacaaggaatggtgaagaagggagaggaaatagcgattgtacagagcgggtcacaaccaatctggcggtctcaatcgactcataacatccaagtccgcaaggtgtaa

SEQ ID NO: 578 - protein, 580 aa, Brassica napus
MAQVVATRSIQGSMLSPNGGSVSTRSDKLLKPASFAVKVLGNESKKSGRVSVRGGRKVDTTVRSARVETEVIPVSPEDVPNREEQLERFLEMQKFSDTSVGMWSKPTVRRKTKIVCTVGPSTNTREMIWKLAEAGMNVARMNMSHGDHASHKKVIDLVKEYNAQSKDNTIAIMLDTKGPEVRSGDLPQPIMLDPGQEFTFTIERGVSTPSCVSVNYDDFVNDVEAGDMLLVDGGMMSFMVKSKTKETVICEVVDGGELKSRRHLNVRGKSATLPSITEKDWEDIKFGVENKVDFYAVSFVKDAQVVHELKNYLKGCGADIHVIVKIESADSIPNLNSIITASDGAMVARGDLGAELPIEEVPILQERIINLCRSMGKAVIVATNMLESMIVHPTPTRAEVSDIAIAVREGADAVMLSGETAHGKFPLKAAGVMHTVALRTEATITTSTEMPPNLGQAFKNHMSEMFAYHATMMSNTLGTSTVVFTRTGFMAILLSHYRPSGTIYAFTNEKKIQQRLALYQGVCPIYMEFSDDAEDTFTKALATLLKQGMVKKGEEIAIVQSGSQPIWRSQSTHNIQVRKV

SEQ ID NO: 579 - DNA, 1764 bp, Brassica napus
  CDS (1)..(1764)
atgtctcagtctatccaattctcaactccttcacgcactcctcaccttctccacctccctaactcacgcttccaccgtcctctcacttccttatccttccgccaattccctctcaagtacacctcaatcagagcctcctcctctccagatctcggctcctcctcatcctcccaggtccttcactctcctaacggcactggcgctgccaaaccggaagagcgatccgtcgtagccaccgcggtctccacggatacggcagcgatagacgtagataccgtgacggaagcggagctgaaggagaatggattcaggagcacgaggaggacgaagctgatctgcacgatcgggcctgccacgtgcgggttcgagcaactggaagcgctcgcggagggaggcatgaacgtggcgaggctcaacatgtgccacggcacgcgcgagtggcaccgcgatgtgatacgcagcgttaggaagcttaacgaggagaaaggattcgcggttgctatcatgatggacactgaaggcagggagattcacatgggagatctgggcggtggtgaatcttctgctaaatctgaggatggtgaggttgggacattcactgttagagcctttgattcttctcgacctgcacgtaccatcagtgtgagctatgatggttttgcggaagatgtaagagttggtgatgagcttctggttgatggtggaatggtgagatttgaagtgattgagaagattggtcctgatgtcaagtgtctatgcaccgaccctgggttgttgcttcctcgagctaacttgactttctggagagatgggagtcttgttcgtgagcgtaacgctatgcttccaacaatttcctccaaggactggttggatattgattttggaattgctgaaggtgtggacttcattgctgtatcctttgtcaagtctgctgaagtaattaatcatcttaaaagttatcttgcagctcgtcccggtggaggggacataggagtgattgcaaagatcgagagtatcgattcactgacaaacttggaagaaatcatcctagcatcagatggagccatggttgcaagaggagacctgggagctcagatacctctcgagcaagttccagcagctcagcaaagaatcgtcaaagtctgcagagcgctgaacaaacccgtcatcgttgcttcgcagctactcgagtccatgatcgagtacccaactccaaccagagcagaagtagccgacgtttccgaagcagtaaggcagagatcagacgcgttgatgctctctggagaatcagctatgggtcagttcccggacaaggctctcacggttctcaggagtgtcagtctaagaatcgaaagatggtggagggaagagaaacgctacgaggctacaccacttcaagccataagctctgcttcttcagacaaaatctctgaagaaatctgcaactctgcttctaaaatggctaacaatcttggagtcgacgccgtcttcgtgtacacaaagaacggacacatggcgtctctagtctcccgatgccgccctgactgtccgatctttgctttcacgaacacaacctcggtgagaagacgcttaaacctacaatggggactgatcccgttccgtctaagcttctcagaggacatggagagcaacttgaacaaaacattctctttactgaaatcaagaggtatgatcaagtcgggtgacctggtgatcgctgtctctgacatgctgcaatccatccaggtcatgaacgttccgtag

SEQ ID NO: 580 - protein, 587 aa, Brassica napus
MSQSIQFSTPSRTPHLLHLPNSRFHRPLTSLSFRQFPLKYTSIRASSSPDLGSSSSSQVLHSPNGTGAAKPEERSVVATAVSTDTAAIDVDTVTEAELKENGFRSTRRTKLICTIGPATCGFEQLEALAEGGMNVARLNMCHGTREWHRDVIRSVRKLNEEKGFAVAIMMDTEGREIHMGDLGGGESSAKSEDGEVGTFTVRAFDSSRPARTISVSYDGFAEDVRVGDELLVDGGMVRFEVIEKIGPDVKCLCTDPGLLLPRANLTFWRDGSLVRERNAMLPTISSKDWLDIDFGIAEGVDFIAVSFVKSAEVINHLKSYLAARPGGGDIGVIAKIESIDSLTNLEEIILASDGAMVARGDLGAQIPLEQVPAAQQRIVKVCRALNKPVIVASQLLESMIEYPTPTRAEVADVSEAVRQRSDALMLSGESAMGQFPDKALTVLRSVSLRIERWWREEKRYEATPLQAISSASSDKISEEICNSASKMANNLGVDAVFVYTKNGHMASLVSRCRPDCPIFAFTNTTSVRRRLNLQWGLIPFRLSFSEDMESNLNKTFSLLKSRGMIKSGDLVIAVSDMLQSIQVMNVP

SEQ ID NO: 581 - DNA, 1533 bp, Brassica napus
  CDS (1)..(1533)
atgtcgaacatagacatagaagggatactgaaggagctacctaacgatgggaggatcccaaagaccaagatcgtttgcactctgggaccagcttctcgcactgttcctatgatcgaaaagcttctccgagccggtatgaacgtggctcgcttcaacttctctcatggaagccatgaataccaccaggacacactcaacaacctccgcaccgccatgcagaacaccggcattctcgctgctgtcatgctcgacacaaaggggcctgagattcgtactggtttcttgaaagatgggaaccctatacaactaaaggaaggccaggagatcaccatcaccaccgactacgacattcaaggagacgagacaacgatctccatgagctacaagaagcttcccttggatgtgaagcccggaaacaccatactatgtgcagatggaagcataagtctagctgtggtgtcatgcgatccagagtctggaactgttaggtgcaggtgcgaaaacacggcgatgcttggcgagagaaagaacgtgaatctccccggtgtcgttgttgatctccccactctgacagacaaggatattgaagatattatgggttggggtgttccgaacagcatcgatatgattgcgctttcgtttgtccgtaaaggctcggatcttgttaatgtcaggagggttcttggttctcatgctaaaagcataatgttgatgtcaaaggttgagaaccaggaaggagtggtgaactttgatgagatactgcgcgaaacagacgcattcatggttgctcgtggtgatctcgggatggagattcccatagagaagatcttcttagctcagaagctgatgatctacaagtgcaacctcgcaggcaaaccagtggtcacagccactcagatgcttgagtcaatgatcaaatcaccaaggccaacacgtgctgaagccacggacgttgcaaacgccgtcctcgacggcacagactgcgtgatgctcagcggagagagcgcagcaggagcttatccggagatagccgtgaaagtcatggccaagatctgcatcgaagcggagagctctcttgactacaacacgatcttcaaagagaggatcagagcaactccgcttccaatgagcccgctagagagtcttgcatcgtcagctgtaaggactgcgaacaaagcgcatgcgaaactcatcattgtgttgactcgtggaggctcaacagctaagcttgtggctaagtacagacctgctgttccgattctgtcggtggttgttccggttatgaccaccgatacctttgactggagttgtagcgacgagtcgcctgcgaggcacagtctgatatacagagggttgatccctatgttggctgaaggatctgcaaaggcgactgatagcgagtccacagaggttatcattgaatctgctttgaagtcagcgacacagagaggactgtgcaaccatggtgatgcagtcgtggcgctgcaccgtattggagctgcctcggttattaagatctgtgtggtgaagtaa

SEQ ID NO: 582 - protein, 510 aa, Brassica napus
MSNIDIEGILKELPNDGRIPKTKIVCTLGPASRTVPMIEKLLRAGMNVARFNFSHGSHEYHQDTLNNLRTAMQNTGILAAVMLDTKGPEIRTGFLKDGNPIQLKEGQEITITTDYDIQGDETTISMSYKKLPLDVKPGNTILCADGSISLAVVSCDPESGTVRCRCENTAMLGERKNVNLPGVVVDLPTLTDKDIEDIMGWGVPNSIDMIALSFVRKGSDLVNVRRVLGSHAKSIMLMSKVENQEGVVNFDEILRETDAFMVARGDLGMEIPIEKIFLAQKLMIYKCNLAGKPVVTATQMLESMIKSPRPTRAEATDVANAVLDGTDCVMLSGESAAGAYPEIAVKVMAKICIEAESSLDYNTIFKERIRATPLPMSPLESLASSAVRTANKAHAKLIIVLTRGGSTAKLVAKYRPAVPILSVVVPVMTTDTFDWSCSDESPARHSLIYRGLIPMLAEGSAKATDSESTEVIIESALKSATQRGLCNHGDAVVALHRIGAASVIKICVVK

SEQ ID NO: 583 - DNA, 1497 bp, Brassica napus
  CDS (1)..(1497)
atggcgatgatagagcaaaggccgaagacgaagatcgtgtgtacccttggtcccgcttccagatccgttgagatggtggagaagcttctcagggctggcatgaacgtcgctaggtttaacttctctcacggatctcatgagtaccaccaggagactctcgataacctccgtcaagctatgctcaacactggtatcctctgcgccgtcatgctcgataccaagggtccagaaatccgaaccggattcttgaaagatgggaaaccaatccagttgaaacaaggccaagagatcaccatctccactgactacgacttgcagggcgacgaggaaacaatctgcatgagttacaagaagttggctgaagatgtgaacccagggatggttatcctctgtgccgacggtacaatctcgttactggtcctctcttgtgacacagagaatggcacagtccgttgccgctgcgagaactctgccatgctcggtgagaggaagaatgttaatctcccaggtgttgttgtggacctcccaactctaactgagaaagacaaagaagacatcatgaagtggggagtcccgaatcagatcgacatgatcgctctgtcttttgtcagaaaaggttcagacttggttcaggtcaggaaactactaggaaatcacgccaagaacattcttctcatgtcaaaggttgagaaccaagaaggtgtggcgaacttcgatgacattctggtcaactccgacgcctttatgattgcaagaggagatctcggcatggagatcccgatagagaagatcttcttagctcacaaagtgatgatctacaaatgcaacatccaggggaaacctgcggtcacagcgactcagatgctccagtccatgatcaaatctcctcgacccacaagagccgaagccactgatgtagcaaacgctgtcctcgacggcacggactgcgtcatgctcagtggcgaaaccgcagctggagcgtaccctgagctagctgtgcgtaccatggctaagatctgcgttgaagccgagaacacgcttgactacggagacgtcttcaagaggatcatgaagtactctccggttccaatgagcccacttgagtcactcgcgtcctctgctgtcagaacagctaactcggctagagccacactcatcatggtcctaaccaggggaggaagcacggcgaggcttgtggctaagtacagaccagggatgccgattttatcagtcgtggttccggagatcaaaaccgacttgttcgactggtcttgcagcgacgagtcacccgcgaggcatagtcttatcttccgtggtttgatccctgtgctgtacgcagggtcggcaagagcctcgcacgatgaatcaacagaagaagctattgagtttgcgactcagcaggggaaagagaaagagctgtgcaagactggagactccgttgttgctctactccgagttgggaacgcttccctaatcaagatcttgaccgttaagtga

SEQ ID NO: 584 - protein, 498 aa, Brassica napus
MAMIEQRPKTKIVCTLGPASRSVEMVEKLLRAGMNVARFNFSHGSHEYHQETLDNLRQAMLNTGILCAVMLDTKGPEIRTGFLKDGKPIQLKQGQEITISTDYDLQGDEETICMSYKKLAEDVNPGMVILCADGTISLLVLSCDTENGTVRCRCENSAMLGERKNVNLPGVVVDLPTLTEKDKEDIMKWGVPNQIDMIALSFVRKGSDLVQVRKLLGNHAKNILLMSKVENQEGVANFDDILVNSDAFMIARGDLGMEIPIEKIFLAHKVMIYKCNIQGKPAVTATQMLQSMIKSPRPTRAEATDVANAVLDGTDCVMLSGETAAGAYPELAVRTMAKICVEAENTLDYGDVFKRIMKYSPVPMSPLESLASSAVRTANSARATLIMVLTRGGSTARLVAKYRPGMPILSVVVPEIKTDLFDWSCSDESPARHSLIFRGLIPVLYAGSARASHDESTEEAIEFATQQGKEKELCKTGDSVVALLRVGNASLIKILTVK

SEQ ID NO: 585 - DNA, 1584 bp, Brassica napus
  CDS (1)..(1584)
atgcattcgagccatctccttctcgaggagccgatcaggatggcttctatcctcgagccatccaaatccagcttctttccggcgttaactaagatcgtcgggactctcggtcccaaatccagatccgttgagacactctccggctgtctcaaatccggcatgtctgtggctagattcgatttctcttggggagacgctgagtatcaccaagagacgcttgataatctgaagattgctgttaagagcaccaagaagctttgtgctgttatgcttgatacagtgggacctgagcttcaagtgatcaacaagtctgagaaagctattactcttaaagctgatggacttgttactttgactcctaatcaagaccgagaagcctcttctgaagtccttcccattaactttgatggccttgccaaggcggtgaagaaaggagacactatctttgttgggcaatacctattcactggtagtgaaacaacttcagtttggctcgaggttgatgaagttaaaggagatgatgtcatttgcctttcaaggaatgctgctactctcgctggttctatgttcaccttgcacgcctctcaagttcacatcgatatgccaactcttactgagaaagataaagaggttataagcacatggggagttcaaaacaaaatcgattttctctcattgtcctattgtcgacatgcggaggatgttcgccagactcgcgaaatgcttaaaaagttgggtgacctctctcaaacacaaatatttgccaagattgagaatgtagagggactaacccactttgatgagattctacaagaagccgatggaattattctttctcgtgggaatttgggtattgatctacccccggaaaaggtgtttttgtttcaaaaggcggctctttacaagtgcaacatggctggaaagccagccgttcttacccgtgttgttgatagtatgactgacaacttgcgaccaactcgtgcagaggcaaccgatgttgctaatgctgttttagatggaagtgatgcaattcttctcggtgctgagacccttcgcggattgtaccctgtcgagaccatatcaactgtcggaaggatctgtgctgaggcagagaaggttttcaatcaagatttgtacttcaagaagactgtcaagtatgttggagagccgatgtctcacctggaatccattgcttcctcagctgtaagggcagcaatcaaggttaaggcatcagtcattatatgctttacctcttctggaagagcagccaggttgattgccaaatacaggccaacaatgccggtaatttctgtagtcattccccgggttaagacaaatcagctgaaatggagctttagtggagcctttgaggctaggcagtcacttattgtcagaggccttttccccatgctcgctgatcctcgtcacccagcggaatcaacaagtgcgacgaacgagtcagtcctgaaggttgcactagaccatgggaagcaagcaggagtgataaagtcgcatgacagagtagtggtgtgtcagaaagttggtgatgcatctgtggtgaagatcatcgagctagaggattaa

SEQ ID NO: 586 - protein, 527 aa, Brassica napus
MHSSHLLLEEPIRMASILEPSKSSFFPALTKIVGTLGPKSRSVETLSGCLKSGMSVARFDFSWGDAEYHQETLDNLKIAVKSTKKLCAVMLDTVGPELQVINKSEKAITLKADGLVTLTPNQDREASSEVLPINFDGLAKAVKKGDTIFVGQYLFTGSETTSVWLEVDEVKGDDVICLSRNAATLAGSMFTLHASQVHIDMPTLTEKDKEVISTWGVQNKIDFLSLSYCRHAEDVRQTREMLKKLGDLSQTQIFAKIENVEGLTHFDEILQEADGIILSRGNLGIDLPPEKVFLFQKAALYKCNMAGKPAVLTRVVDSMTDNLRPTRAEATDVANAVLDGSDAILLGAETLRGLYPVETISTVGRICAEAEKVFNQDLYFKKTVKYVGEPMSHLESIASSAVRAAIKVKASVIICFTSSGRAARLIAKYRPTMPVISVVIPRVKTNQLKWSFSGAFEARQSLIVRGLFPMLADPRHPAESTSATNESVLKVALDHGKQAGVIKSHDRVVVCQKVGDASVVKIIELED

SEQ ID NO: 587 - DNA, 1533 bp, Brassica napus
  CDS (1)..(1533)
atgtcgaacatagacattgaagggatattgaaggagctacctaacgatgggaggatcccaaagaccaagatcgtttgcactctgggaccagcttctcgcactgttcctatgatcgaaaagcttctccgagccggtatgaacgtcgctcgcttcaacttctctcatggcagccatgaataccaccaggacacactcaacaacctccgcaccgctatgcagaacaccggcattctcgccgctgtcatgctcgacacaaagggacctgagattcgtactggtttcttgaaagatgggaaccctatacaactcaaggaaggccaggagattaccatcaccaccgactacgaaattttaggagatgagacgacgatctccatgagctataagaagcttcccttagatgtgaagcccggaaacaccatactctgtgcagatggaagcataagtctagctgtcttgtcatgtgatccagagtctggaactgttaggtgcaggtgcgaaaacacggcgatgcttggcgagagaaagaacgtgaatctccccggtgtcgttgttgatctccccactctgacagacaaggatattgaagatattatgggttggggtgttcctaacagcatcgatatgattgcgctttcttttgtccgtaaaggctcagatcttgttaatgtcaggagggttcttggttctcatgctaaaagcataatgctgatgtcaaaggttgagaaccaggaaggagtggtgaactttgatgagatactgcgcgaaacagatgcattcatggtcgctcgtggtgatctcgggatggagattcccatagagaagatcttcttagctcagaagctgatgatctacaagtgcaacctcgcaggcaaaccagtggtcacagccactcagatgcttgagtcaatgatcaagtcaccaaggccaacacgtgctgaagccacggacgttgccaacgccgtccttgacggcacagactgcgtgatgctcagcggagagagcgcagcaggagcttatccggagatagccgtgaaagtcatggccaagatctgcattgaagcggagagctctcttgactacaacacgatctttaaagagaggatcagagcaactccggttccaatgagcccgttagagagtcttgcatcgtcagctgtgagggctgcgaacaaagcgcatgcgaagctcatcattgtgttgactcgtggaggctcaacagctaagcttgtagctaagtacagaccctctgttccgattctttcggtggttgtaccagttatgaccacggattcctttgactggacttgtagtgacgagtcgcctgcaaggcatagtttgatatacagaggtttgatccctatgttggctgaaggatctgcaaaggcgacagatagtgagtccacagaggttatcattgaatccgctttgaagtcagctgtgcagagaggactgtgcaaccatggtgatgctgttgtggcgctgcaccgtattggagtcgcctcggttattaagatctgtgtggttaagtaa

SEQ ID NO: 588 - protein, 510 aa, Brassica napus
MSNIDIEGILKELPNDGRIPKTKIVCTLGPASRTVPMIEKLLRAGMNVARFNFSHGSHEYHQDTLNNLRTAMQNTGILAAVMLDTKGPEIRTGFLKDGNPIQLKEGQEITITTDYEILGDETTISMSYKKLPLDVKPGNTILCADGSISLAVLSCDPESGTVRCRCENTAMLGERKNVNLPGVVVDLPTLTDKDIEDIMGWGVPNSIDMIALSFVRKGSDLVNVRRVLGSHAKSIMLMSKVENQEGVVNFDEILRETDAFMVARGDLGMEIPIEKIFLAQKLMIYKCNLAGKPVVTATQMLESMIKSPRPTRAEATDVANAVLDGTDCVMLSGESAAGAYPEIAVKVMAKICIEAESSLDYNTIFKERIRATPVPMSPLESLASSAVRAANKAHAKLIIVLTRGGSTAKLVAKYRPSVPILSVVVPVMTTDSFDWTCSDESPARHSLIYRGLIPMLAEGSAKATDSESTEVIIESALKSAVQRGLCNHGDAVVALHRIGVASVIKICVVK

SEQ ID NO: 589 - DNA, 1584 bp, Brassica napus
  CDS (1)..(1584)
atgcattcgagccatctccttctcgaggagccgatcaggatggcttctatcctcgagccatccaaatccagcttctttccggcgttaactaagatcgtcgggactctcggtcccaaatccagatccgttgagacactctccggctgtctcaaatccggcatgtctgtggctagattcgatttctcttggggagacgctgagtatcaccaagagacgcttgataatctgaagattgctgttaagagcaccaagaagctttgtgctgttatgcttgatacagtgggacctgagcttcaagtgatcaacaagtctgagaaagctattactcttaaagctgatggacttgttactttgactcctaatcaagaccgagaagcctcttctgaagtccttcccattaactttgatggccttgccaaggcggtgaagaaaggagacgctatctttgttgggcaatacctattcactggtagtgaaacaacttcagtttggctcgaggttgatgaagttaaaggagatgatgtcatttgcctttcaaggaatgctgctactctcgctggttctatgttcaccttgcacgcctctcaagttcacatcgatatgccaactcttactgagaaagataaagaggttataagcacatggggagttcaaaacaaaatcgactttctctcgttgtcctattgtcgacatgcggaggatgttcgccagactcgcgaaatgcttaaaaagttgggtgacctctctcaaacacaaatatttgccaagattgagaatgttgagggactaacccactttgatgagattctacaagaagccgatggaattattctttctcgtgggaatttgggtattgatctacccccggaaaaggtgtttttgtttcaaaaggcggctctttacaagtgcaacatggctggaaagccagccgttcttactcgtgttgttgatagtatgactgacaacttgcgaccaactcgtgcagaggcaaccgatgttgctaatgctgttttagatggaagtgatgcaattcttctcggtgctgagacacttcgcggattgtaccctgtggagactatatcaactgtcggaaggatctgtgctgaggcagagaaggttttcaatcaagatttgtacttcaagaagactgtcaagtatgttggagagccgatgtctcacctcgaatccattgcttcttcagctgtaagggcagcaatcaaggttaaggcatccgtcattatatgctttacctcttctggaagagcagccaggttgattgctaaatacaggccaacaatgccggttatttctgtagtcattccacgggttaagacaaatcagctaaaatggagcttcagtggagcctttgaggctaggcagtcacttattgtcaggggcctcttccccatgcttgctgaccctcgtcaccctgcggaatcaacaagtgcgacgaacgagtcagtcctgaaggttgcgttagaccacgggaagcaagcaggagtgataaagtcgcacgacagagtagtggtgtgtcagaaagttggtgatgcatctgtggtcaagatcatcgagcttgaggattga

SEQ ID NO: 590 - protein, 527 aa, Brassica napus
MHSSHLLLEEPIRMASILEPSKSSFFPALTKIVGTLGPKSRSVETLSGCLKSGMSVARFDFSWGDAEYHQETLDNLKIAVKSTKKLCAVMLDTVGPELQVINKSEKAITLKADGLVTLTPNQDREASSEVLPINFDGLAKAVKKGDAIFVGQYLFTGSETTSVWLEVDEVKGDDVICLSRNAATLAGSMFTLHASQVHIDMPTLTEKDKEVISTWGVQNKIDFLSLSYCRHAEDVRQTREMLKKLGDLSQTQIFAKIENVEGLTHFDEILQEADGIILSRGNLGIDLPPEKVFLFQKAALYKCNMAGKPAVLTRVVDSMTDNLRPTRAEATDVANAVLDGSDAILLGAETLRGLYPVETISTVGRICAEAEKVFNQDLYFKKTVKYVGEPMSHLESIASSAVRAAIKVKASVIICFTSSGRAARLIAKYRPTMPVISVVIPRVKTNQLKWSFSGAFEARQSLIVRGLFPMLADPRHPAESTSATNESVLKVALDHGKQAGVIKSHDRVVVCQKVGDASVVKIIELED

SEQ ID NO: 591 - DNA, 1497 bp, Brassica napus
  CDS (1)..(1497)
atggcgatgatagagcaaaagccgaagacgaagatcgtgtgtaccctgggtccagcttcgagatccgttgagatggtggagaagcttctgaaggcgggcatgaacgtggctaggtttaacttttcacacggatctcatgagtaccaccaagagactctcgataacctccgtcaagctatgctcaacactggcatcctttgcgccgtcatgctcgataccaagggtcctgaaatccgaaccgggttcttgaaagatgggaaaccaatacagttgaaacaaggccaagagatcaccatttcgactgattatgacttgcagggcgacgagaacactatttgcatgagttacaagaagctggctgtagatgtgaaccctgggatggtcattctctgtgccgatggtactatttccttactcgtcctctcttgtgacacagagaatggtaccgtccgttgccgctgcgagaactccgccatgctcggtgagaggaagaatgtcaatctccctggtgttgtcgtggatctccctactctcaccgagaaagacaaagaagacatcatgaagtggggagtccctaatcagatcgacatgattgctctgtcttttgttagaaaaggttcagacttggtgcaggtcaggaaactacttggaaaacacgccaagaacattcttctcatgtcaaaggttgagaaccaagaaggtgtggcgaacttcgatgacattctggtcaactccgacgcctttatgattgcaagaggagatctcggcatggagatcccgatcgagaagatcttcttagctcagaaagtgatgatctacaaatgcaacatccaggggaaacctgtggtcacagcgactcagatgctcgagtccatgatcaaatctcctcgacccacaagagccgaagccactgatgtagcaaacgctgtcctcgacggcacggactgcgtcatgctcagtggcgaaaccgcagctggagcgtaccctgagctagctgtgcgtaccatggctaagatctgcgttgaagccgagaacacgcttgactacggagacgtcttcaagaggatcatgaagtactctccggttccaatgagcccacttgagtcactcgcgtcctctgctgtcagaacagctaactcggctagagccacactgatcatggtcctaaccaggggaggaagcacggcgaggcttgtggctaagtacagaccagggatgccgattttatcagtcgtggttccggagatcaaaaccgacttgttcgactggtcttgcagcgacgagtcacccgcgaggcatagtcttatcttccgtggtttgatccctgtgctgtacgcagggtcggcaagagcctcgcacgatgaatcgacagaagaagctattgagtttgcgactcagcaggggaaagagaaagagctgtgcaagactggagactccgttgttgctctactccgagttggtaacgcttccctaatcaagatcttgaccgttaagtga

SEQ ID NO: 592 - protein, 498 aa, Brassica napus
MAMIEQKPKTKIVCTLGPASRSVEMVEKLLKAGMNVARFNFSHGSHEYHQETLDNLRQAMLNTGILCAVMLDTKGPEIRTGFLKDGKPIQLKQGQEITISTDYDLQGDENTICMSYKKLAVDVNPGMVILCADGTISLLVLSCDTENGTVRCRCENSAMLGERKNVNLPGVVVDLPTLTEKDKEDIMKWGVPNQIDMIALSFVRKGSDLVQVRKLLGKHAKNILLMSKVENQEGVANFDDILVNSDAFMIARGDLGMEIPIEKIFLAQKVMIYKCNIQGKPVVTATQMLESMIKSPRPTRAEATDVANAVLDGTDCVMLSGETAAGAYPELAVRTMAKICVEAENTLDYGDVFKRIMKYSPVPMSPLESLASSAVRTANSARATLIMVLTRGGSTARLVAKYRPGMPILSVVVPEIKTDLFDWSCSDESPARHSLIFRGLIPVLYAGSARASHDESTEEAIEFATQQGKEKELCKTGDSVVALLRVGNASLIKILTVK

SEQ ID NO: 593 - DNA, 1584 bp, Zea mays
  CDS (1)..(1584)
atgcattcgaccaacctgctgctggaggagcccatccggatggcctccatcctggagccatccaagaccagcttcttcccggcgatgaccaagatcgtcggcacgctcggccccaagtcgcgctccgtcgacaccatctcctcctgcctcaaggccggcatgtccgtcgcgcggttcgatttctcgtggggagacgccgcctaccaccaggagacgctcgagaacctcaagctcgccatcaagtccaccaagaagctgtgcgctgttatgcttgacacggttggaccggagctgcaggtggtcaacaagagtgaaacccccatctccctcgaggagaacgggactgtcgtgctcacgccgcatcagggccaagaagcctcctccaccttgctgcccatcaacttcgatggactcgccaaggctttgacaccaggtgcaacgatatttgtgggccaatacttgttcactggtagcgagactacttcagtttggttggaggtttctgaagttaaaggagatgatgtggtttgtatcatcaagaacacagctaccttggctgggtcgctcttcacgctgcattgttcccagattcatattgacttgcccacgctgtctgatgaggataaggatgttatcaaaaaatggggtgctccaaataagattgacttcctctctctgtcttacacaagacatgcagaagatgtgcggcaggcacgtgagttcctctcgaaattgggtgatcttagccaaactcagatctttgccaaaattgagaatgttgagggcttgaaccattttgatgaaatactggcagaggcagatggtatcattctgtcaagaggaaaccttggaattgaccttccacctgagaaggtctttttgtttcaaaagtctgcgcttcacaagtgcaacatggctggaaagcctgctgttgttactcgtgtcgtggacagcatgactgacaacctcagacctactcgcgcagaggcaactgatgtggcaaatgcagttcttgatgggagtgacgccattctccttggtgctgagactctccgtggtttatatccggtggagactatttcaacagtgggcagaatttgtgctgaggctgagaaggtattcaaccaagatttatactacaagcggactgtgaagtatgtgggagaacctatgacccacttggagtctattgcttcttcagcagtgcgagctgcaatcaaagttaaggcatcagtcatcatttgcttcacctcttctggacgagctgcaaggctcattgctaagtacaggcccagcatgcctgttctatctgttgtcattcctcgtctaaagacaaaccaactgaagtggagtttcacaggtgcttttgaggcaagacaatcactcatagttagaggcctcttccctatgcttgctgatccacgacacccagctgaatctaccagtgctacaaatgagtctgtgttgaaggttgctcttgaccatggcaaagcctcgggcgtgatcaagtcccacgaccgcgtcgtcgtttgccagaaagtgggtgattcctctgtggtgaagatcattgagctggatgattag

SEQ ID NO: 594 - protein, 527 aa, Zea mays
MHSTNLLLEEPIRMASILEPSKTSFFPAMTKIVGTLGPKSRSVDTISSCLKAGMSVARFDFSWGDAAYHQETLENLKLAIKSTKKLCAVMLDTVGPELQVVNKSETPISLEENGTVVLTPHQGQEASSTLLPINFDGLAKALTPGATIFVGQYLFTGSETTSVWLEVSEVKGDDVVCIIKNTATLAGSLFTLHCSQIHIDLPTLSDEDKDVIKKWGAPNKIDFLSLSYTRHAEDVRQAREFLSKLGDLSQTQIFAKIENVEGLNHFDEILAEADGIILSRGNLGIDLPPEKVFLFQKSALHKCNMAGKPAVVTRVVDSMTDNLRPTRAEATDVANAVLDGSDAILLGAETLRGLYPVETISTVGRICAEAEKVFNQDLYYKRTVKYVGEPMTHLESIASSAVRAAIKVKASVIICFTSSGRAARLIAKYRPSMPVLSVVIPRLKTNQLKWSFTGAFEARQSLIVRGLFPMLADPRHPAESTSATNESVLKVALDHGKASGVIKSHDRVVVCQKVGDSSVVKIIELDD

SEQ ID NO: 595 - DNA, 1728 bp, Glycine max
  CDS (1)..(1728)
atgtctcatgtagtggtcactcgatccattcacacctccctcacgcgccccacctcaggatctgcacaccacagagcccaaacgttgttgaagcctccaacttttgcttccaaagtgttcccacaacaaaggaacaacccctccaaagtttgctcccgaagttgcctcgtcaatgcgaggaaatctgcacccactgaagttgttcccgtctcacccgaggatgattcaaagattgaggaagagttgcagcactcgcgtggtatgcggcaacttggtgacacttctgttggaatgtggtcaaaacccacttttaggaggaagacaaaggttgtttgcaccattggtccttctaccaacaccagggaaatgatttggaagctggctgaggctgggatgaatgttgcccgattgaatatgtctcatggagaccatgcttctcatcagaaaattattgatttggttaaagaatataatgctcaatccaaggacaatgtaattgcaattatgcttgataccaagggtcctgaggttaggagtggggatttgccacaaccaatcaatttaacaactgggcaggaattcacatttaccatccggaggggtgttggaactgcagattgtgttagtgtgaactatgacgatttcgtcaatgatgtggatgtgggagacatgcttcttgttgatggtggtatgatgtctttggtggttaagtctaagacagaggattctgtgaaatgtgaagttgttgatggaggagagctcaagtcaaggagacatttgaacgttagaggaaaaagtgcaacactgccttcaatcactgagaaggattgggatgacatcaaatttggagtggataacaaagttgacttctatgctgtttcttttgttaaggatgcacaagtagttcatgaactgaagaattatttgaaaagctgtgatgctgatatacacgtcattgtaaaaattgaaagtgcagactctataccaaacttgcattcaattattacagcgtctgatggggccatggttgcaagaggagatcttggtgcagaactccctattgaagaggttccacttttgcaggaagaaataatcaccatatgtcgtagcatgggaaaggccgttattgtggcaacaaatatgctggaaagcatgattgttcacccgacaccaaccagagccgaggtatccgatattgcaattgctgttcgagaaggttctgatgcaataatgctttctggggaaactgctcatggaaagttcccactaaaagccgtgaaagtaatgcacaccgtagcattacggacagaagccactatacctggtggtcaaatgccaccaaatattggtcaagtattcaagaaccacatgagtgagatgtttgcttaccatgcaaccatgatgtctaatacccttggaacctcaactgttgtcttcactagatcaggcttcatggctatccttttgagccactatcgaccttcaggcaccatatttgcttttacagatcaaaagaggatacaacagaggttggctttgtatcaaggagtctgtcctatttacatggaattctctgaagatgctgaagagactttcacaagggccttggatttgctgcagaagcaaggaatggtgaaatcaggagaagaagtagcactagtacaaagtggcacgcaacccatatggaggttccaatccactcacaatatccaggtccgaacagtgtaa

SEQ ID NO: 596 - protein, 575 aa, Glycine max
MSHVVVTRSIHTSLTRPTSGSAHHRAQTLLKPPTFASKVFPQQRNNPSKVCSRSCLVNARKSAPTEVVPVSPEDDSKIEEELQHSRGMRQLGDTSVGMWSKPTFRRKTKVVCTIGPSTNTREMIWKLAEAGMNVARLNMSHGDHASHQKIIDLVKEYNAQSKDNVIAIMLDTKGPEVRSGDLPQPINLTTGQEFTFTIRRGVGTADCVSVNYDDFVNDVDVGDMLLVDGGMMSLVVKSKTEDSVKCEVVDGGELKSRRHLNVRGKSATLPSITEKDWDDIKFGVDNKVDFYAVSFVKDAQVVHELKNYLKSCDADIHVIVKIESADSIPNLHSIITASDGAMVARGDLGAELPIEEVPLLQEEIITICRSMGKAVIVATNMLESMIVHPTPTRAEVSDIAIAVREGSDAIMLSGETAHGKFPLKAVKVMHTVALRTEATIPGGQMPPNIGQVFKNHMSEMFAYHATMMSNTLGTSTVVFTRSGFMAILLSHYRPSGTIFAFTDQKRIQQRLALYQGVCPIYMEFSEDAEETFTRALDLLQKQGMVKSGEEVALVQSGTQPIWRFQSTHNIQVRTV

SEQ ID NO: 597 - DNA, 1584 bp, Glycine max
  CDS (1)..(1584)
atgccttccagtcacttgcttctcgaggaacctattaggatggtctccatccttgagccatccaagcctagttttttctctgcaatgacaaagattgttggtaccctgggacctaaatctagatccgtcgaaaccatttctggttgcctcaaggctggcatgtctgtggctcgttttgacttttcatggcatgaccctgagtaccaccaggagactttggagaatttgaaggctgctatcaagagtactaagaagctctgtgctgttatgctggacacagtgggcgctgagatgcaggttgttaacaaaagtgagagagcaatctcgctcgaggcaaatggtcaggttgttctaactcctgatcagggacaagaagcctcttcagagatattgcctatcaattttgatggactggctaaggcagtgaagaagggagacaccatttttattggtcaatacttgttcacgggaagtgaaactacttctgtatggctagaggtatctgaagtcaaagggcaagatgttgtttgtattataaagaacacagctacattggctgggtcattgttcactttgcatgcctctcaaattcatattgatttgcctactctcactgagaaagacaaggaggttataagcacctggggtgttaaaaacaaaattgattttctgtcattgtcatatactcgacacgccgaagatgttcgccaggctcgtgaatttctttcaaagttaggtgatctcagccaaactcaaatttttgcaaagattgaaaatgttgagggattgacccattttgatgagattctacaagaagctgatggtattatcctttcccgtgggaatttgggtattgatcttccaccagagaaggtgtttttgtttcaaaaatctgccctttacaagtgtaatatggctgggaaacctgctgtgcttacacgtgttgtggatagcatgactgacaacttgagaccaactcgtgctgaagccacagatgttgccaatgctgttttagatggaagtgatgccatacttctgggtgctgagactttacgtgggttgtaccctattgagactatttctactgttggcagaatttgttctgaggctgagaaagttttcaatcaagacctttattttaagaggacagtcaagtatgttggagaacccatgacccacttggaatctattgcatcctctgcggtacgggctgcaattaaggtgaaagcatctattataatttgtttcacttcatcaggaagggctgcaagattgatcgcaaagtataggccaacaatgccagtactatctgttgtgatcccccgactcaagacaaatcagctaaagtggagctttagtggagcttttgaggcaagacaatcacttatcgtgagaggtctctttcctatgcttgcagatccacgacatcctgctgagtcaacaagtgcaacaaatgagtctattcttaaggttgcccttgatcatggaaaatcattgggagttattaagtcacatgaccgggtagttgtttgccagaaacttggtgatgcatctgtggttaagattattgagcttgaagattaa

SEQ ID NO: 598 - protein, 527 aa, Glycine max
MPSSHLLLEEPIRMVSILEPSKPSFFSAMTKIVGTLGPKSRSVETISGCLKAGMSVARFDFSWHDPEYHQETLENLKAAIKSTKKLCAVMLDTVGAEMQVVNKSERAISLEANGQVVLTPDQGQEASSEILPINFDGLAKAVKKGDTIFIGQYLFTGSETTSVWLEVSEVKGQDVVCIIKNTATLAGSLFTLHASQIHIDLPTLTEKDKEVISTWGVKNKIDFLSLSYTRHAEDVRQAREFLSKLGDLSQTQIFAKIENVEGLTHFDEILQEADGIILSRGNLGIDLPPEKVFLFQKSALYKCNMAGKPAVLTRVVDSMTDNLRPTRAEATDVANAVLDGSDAILLGAETLRGLYPIETISTVGRICSEAEKVFNQDLYFKRTVKYVGEPMTHLESIASSAVRAAIKVKASIIICFTSSGRAARLIAKYRPTMPVLSVVIPRLKTNQLKWSFSGAFEARQSLIVRGLFPMLADPRHPAESTSATNESILKVALDHGKSLGVIKSHDRVVVCQKLGDASVVKIIELED

SEQ ID NO: 599 - DNA, 1584 bp, Glycine max
  CDS (1)..(1584)
atgcattccagtcacttacttctcgaagaacccattcgcatggtttccatcctcgaaccatccaagcccaatttctttcccgcaatgacgaagatcgttggtaccctgggtcctaaatctcggtcggtcgaggttatttctgcttgtcttaaagctggaatgtcagtggctcgtttcgacttctcttgggatgaccctgaatatcatcaggaaactttggagaatctgaagaatgctatcaagactactaagaaactctgtgctgttatgctggacaccgttggtgcagagatgcaggttgttaacaaaagtgagaaagcgatctcgcttgaggccgatggccaggttgttctgactcctgaccgaggacaagaagcatcgtcgcagatactgcctatcaactttgatggactggcaaagtcaatgaagaagggagacaccattttcattggtcaatacttgttcactggaagtgaaactacttctgtatggctagaggtatccgaagttaaagggcaggatgtcatttgtactataaagaattccgcaacattggctgggtcattgttcactttgcatgcctctcaagttcatattgacttgcctaccctcactgataaagacaaggaggttataagcacctggggagtaaaaaacaaaattgattttctatcattgtcatatactaggcatgctgaagatgttcgccaggcccgtgaattcctttctaagttaggtgatctaagccagactcaaatatttgcaaaaactgaaaatgttgagggattgacccattttgatgagattctacaagaagctgatggtattatcctttcccgtgggaatttgggcattgatcttcccccagagaaggtatttttctttcaaaaatctgccctttacaagtgtaatatggctgggaaacctgccgtgcttacacgtgttgtggatagcatgactgacaacttaagaccaactcgtgcagaagccactgatgttgccaatgctgttttagatggaagtgatgcaatacttctaggtgctgagaccttacgtgggttataccctgttgagactatttccacagttggaaaaatttgtgcagaagctgagaaagtttttaatcaagacctttattttaagaaaaccgtcaaatatgttggagaacccatgacccacttggaatctattgcatcctctgcggtacgagcagctattaaggtgaaggcttctgttattatttgcttcacttcttctggaagggctgcaagattaatagcaaaatataggccaaccatgccagttctctctgttgtgatcccccgactcaagacaaatcagctgaaatggagcttcagtggagcttttgaggctaggcaatcacttattgttagaggcctctttcccatgcttgccgatccccgacatcctgccgagtcgacaagtggcacaaacgagtctattctaaaggttgcccttgatcatggaaaagcatcaggagttataaagtcacacgaccgagtagttgtttgccagaaagttggtgatgcgtctgtggttaagattatcgagcttgaagattaa

SEQ ID NO: 600 - protein, 527 aa, Glycine max
MHSSHLLLEEPIRMVSILEPSKPNFFPAMTKIVGTLGPKSRSVEVISACLKAGMSVARFDFSWDDPEYHQETLENLKNAIKTTKKLCAVMLDTVGAEMQVVNKSEKAISLEADGQVVLTPDRGQEASSQILPINFDGLAKSMKKGDTIFIGQYLFTGSETTSVWLEVSEVKGQDVICTIKNSATLAGSLFTLHASQVHIDLPTLTDKDKEVISTWGVKNKIDFLSLSYTRHAEDVRQAREFLSKLGDLSQTQIFAKTENVEGLTHFDEILQEADGIILSRGNLGIDLPPEKVFFFQKSALYKCNMAGKPAVLTRVVDSMTDNLRPTRAEATDVANAVLDGSDAILLGAETLRGLYPVETISTVGKICAEAEKVFNQDLYFKKTVKYVGEPMTHLESIASSAVRAAIKVKASVIICFTSSGRAARLIAKYRPTMPVLSVVIPRLKTNQLKWSFSGAFEARQSLIVRGLFPMLADPRHPAESTSGTNESILKVALDHGKASGVIKSHDRVVVCQKVGDASVVKIIELED

SEQ ID NO: 601 - DNA, 1638 bp, Glycine max
  CDS (1)..(1638)
atggcaaccattaacctttcttccgctactacgtctctcttccaatccaaacaccgaacgaaacgcattccacgcctccctacaatcgccagaataacaaaccacatcgaaggaactcatcttaactcccccaacggctctcccatccttggcaacgcaaacaattcccttgaggttccctccaataactatatctcgctacactcttcagacgtgcgtaggaaaactaagatcgtgtgcacgataggtccttctacgagctcacgtgatatgatatggaacctggctcaagctggaatgaacgtggcgcgtttgaacatgtcgcatggggaccacgcctcgcacctccaaaccattgatttggtgaaagaatacaattctcagtttcaagataaggttgtagccatcatgctcgacaccaagggtcctgaagttagaagtggggatgtagctcaacctattttacttaaagagggacaagaattctgtttcaccactatgagaggggttagcacacatgacacggttagcgtgaactacgatggctttgtgaatgatgtggagttcggagatgtgttgctggttgatggaggaatgatgtctcttgctgttaagtcaaagacaaaagacttggttaaatgtgaagttattgatggtggtgaactgaaatctaggcgtcatttaaatgtccgtggaaaaagtgcaacacttccttccataactgacaaggactgggaagatatcaagtttggggtggacaatcaagtagacttctttgctgtctcatttgtcaaggatgctagagtggtgcacgagttaaaacactacctcaaaagtcataatgccgatatacacgtgattgtaaaaattgaaagtgcagattccataccaaatctccattcgatactttctgcttcagatggggccatggtcgctcgtggggatcttggagctgaacttccaatagaggaagttcctttattgcaggaagacatcattcgaagatgtcaaattatgcaaaagcctgttattgtggcaacaaatatgcttgaaagcatgattaatcatcccacaccaacaagggcagaagtttcagacatcgcaattgcagtaagacaaggtgctgatgctatcatgctttcaggagaaactgcacatggaaaatttccattgaaagctgttaaagttatgcacacggtggctcttaggaatgaatccagtgttcaaagtggtgtttcttatccgagtcaactgagttcccatgaaagtcatatgggagaaatgtttgctttccatgcgacaacaatgtctaacactcttaatactcctattattgttttcaccagaacaggatccatggcaattcttttgagccattataggccttactcaacaatctttgcattcacaaatgaagcaagaattaagcagaggttggcgctttatcatggggttatgtccatatacatgcaattttcaaatgatgtagaagagaccttctctagagccctcaagctactattgagtaagagtcatttacacgagggacaacatgtcacacttgttcaaagtggagcacaaccaatctggcgtgaggaatccactcaccacatacaagttcgcaaggttcatggataa

SEQ ID NO: 602 - protein, 545 aa, Glycine max
MATINLSSATTSLFQSKHRTKRIPRLPTIARITNHIEGTHLNSPNGSPILGNANNSLEVPSNNYISLHSSDVRRKTKIVCTIGPSTSSRDMIWNLAQAGMNVARLNMSHGDHASHLQTIDLVKEYNSQFQDKVVAIMLDTKGPEVRSGDVAQPILLKEGQEFCFTTMRGVSTHDTVSVNYDGFVNDVEFGDVLLVDGGMMSLAVKSKTKDLVKCEVIDGGELKSRRHLNVRGKSATLPSITDKDWEDIKFGVDNQVDFFAVSFVKDARVVHELKHYLKSHNADIHVIVKIESADSIPNLHSILSASDGAMVARGDLGAELPIEEVPLLQEDIIRRCQIMQKPVIVATNMLESMINHPTPTRAEVSDIAIAVRQGADAIMLSGETAHGKFPLKAVKVMHTVALRNESSVQSGVSYPSQLSSHESHMGEMFAFHATTMSNTLNTPIIVFTRTGSMAILLSHYRPYSTIFAFTNEARIKQRLALYHGVMSIYMQFSNDVEETFSRALKLLLSKSHLHEGQHVTLVQSGAQPIWREESTHHIQVRKVHG

SEQ ID NO: 603 - DNA, 1638 bp, Glycine max
  CDS (1)..(1638)
atggcaaccattaacctttcttccgctactacgtctctcttccaatccaaacaccgaacgaaacgcattccacgcctccctacaatcgccagaataacaaaccacatcgaaggaactcatcttaactcccccaacggctctcccatccttggcaacgcaaacaattcccttgaggttccctccaataactatatctcgctacactcttcagacgtgcgtaggaaaactaagatcgtgtgcacgataggtccttctacgagctcacgtgatatgatatggaacctggctcaagctggaatgaacgtggcgcgtttgaacatgtcgcatggggaccacgcctcgcacctccaaaccattgatttggtgaaagaatacaattctcagtttcaagataaggttgtagccatcatgctcgacaccaagggtcctgaagttagaagtggggatgtagctcaacctattttacttaaagagggacaagaattctgtttcaccactatgagaggggttagcacacatgacacggttagcgtgaactacgatggctttgtgaatgatgtggagttcggagatgtgttgctggttgatggaggaatgatgtctcttgctgttaagtcaaagacaaaagacttggttaaatgtgaagttattgatggtggtgaactgaaatctaggcgtcatttaaatgtccgtggaaaaagtgcaacacttccttccataactgacaaggactgggaagatatcaagtttggggtggacaatcaagtagacttctttgctgtctcatttgtcaaggatgctagagtggtgcacgagttaaaacactacctcaaaagtcataatgccgatatacacgtgattgtaaaaattgaaagtgcagattccataccaaatctccattcgatactttctgcttcagatggggccatggtcgctcgtggggatcttggagctgaacttccaatagaggaagttcctttattgcaggaagacatcattcgaagatgtcaaattatgcaaaagcctgttattgtggcaacaaatatgcttgaaagcatgattaatcatcccacaccaacaagggcagaagtttcagacatcgcaattgcagtaagacaaggtgctgatgctatcatgctttcaggagaaactgcacatggaaaatttccattgaaagctgttaaagttatgcacacggtggctcttaggaatgaatccagtgttcaaagtggtgtttcttatccgagtcaactgagttcccatgaaagtcatatgggagaaatgtttgctttccatgcgacaacaatgtctaacactcttaatactcctattattgttttcaccagaacaggatccatggcaattcttttgagccattataggccttactcaacaatctttgcattcacaaatgaagcaagaattaagcagaggttggcgctttatcatggggttatgtccatatacatgcaattttcaaatgatgtagaagagaccttctctagagccctcaagctactattgagtaagagtcatttacacgagggacaacatgtcacacttgttcaaagtggagcacaaccaatctggcgtgaggaatccactcactacatacaagttcgcaaggttcatggataa

SEQ ID NO: 604 - protein, 545 aa, Glycine max
MATINLSSATTSLFQSKHRTKRIPRLPTIARITNHIEGTHLNSPNGSPILGNANNSLEVPSNNYISLHSSDVRRKTKIVCTIGPSTSSRDMIWNLAQAGMNVARLNMSHGDHASHLQTIDLVKEYNSQFQDKVVAIMLDTKGPEVRSGDVAQPILLKEGQEFCFTTMRGVSTHDTVSVNYDGFVNDVEFGDVLLVDGGMMSLAVKSKTKDLVKCEVIDGGELKSRRHLNVRGKSATLPSITDKDWEDIKFGVDNQVDFFAVSFVKDARVVHELKHYLKSHNADIHVIVKIESADSIPNLHSILSASDGAMVARGDLGAELPIEEVPLLQEDIIRRCQIMQKPVIVATNMLESMINHPTPTRAEVSDIAIAVRQGADAIMLSGETAHGKFPLKAVKVMHTVALRNESSVQSGVSYPSQLSSHESHMGEMFAFHATTMSNTLNTPIIVFTRTGSMAILLSHYRPYSTIFAFTNEARIKQRLALYHGVMSIYMQFSNDVEETFSRALKLLLSKSHLHEGQHVTLVQSGAQPIWREESTHYIQVRKVHG

SEQ ID NO: 605 - DNA, 1728 bp, Glycine max
  CDS (1)..(1728)
atgtctcatgtagtggtcactcgatccattcacacctccctcacgcgccccacctcaggatctgcacaccacagagcccaaacgttgttgaagcctccaacttttgcttccaaagtgttcccacaacaaaggaacaacccctccaaagtttgctcccgaagttgcctcgtcaatgcgaggaaatctgcacccgctaaagttgttcccgtctcacccgaggatgattcaaagattgaggaagagttgcagcactcgcgtggtatgcagcaacttggcgacacttctgttggaatgtggtcaaaacccacgtttaggaggaagacaaaggttgtttgcaccattggtccttctaccaacaccagggaaatgatttggaagctggctgaggctgggatgaatgttgcccgattgaatatgtctcacggagaccatgcttctcatcagaaaattattgatttggttaaagaatataatgctcaatccaaggacaacgtaattgcaattatgcttgataccaagggtcctgaggttaggagtggggatttgccacaaccaatcaatttaacaactgggcaggaattcacatttaccatccggaggggtgttggaactgcagattgtgttagtgtgaactatgacgatttcgtcaatgatgtggatgtgggagacatgcttcttgttgatggtggtatgatgtctttggtggttaagtctaagacagaggattctgtgaaatgtgaagttgttgatggaggagagctcaagtcaaggagacatttgaatgttagaggaaaaagtgcaacactgccttccataactgagaaggattgggatgacatcaaatttggagtggataacaaagttgacttctatgctgtttcttttgttaaggatgcacaagtagttcatgaactgaagaattatttgaaaagctgtgatgctgatatacacgtcattgtaaaaattgaaagtgcagactctataccaaacttgcattcaattattacagcgtctgatggggccatggttgcaagaggagatcttggtgcagaactccctattgaagaggttccacttttgcaggaagaaataatcaccatatgtcgtagcatgggaaaggccgttattgtggcaacaaatatgctggaaagcatgattgttcacccgacaccaaccagagccgaggtatccgatattgcaattgctgttcgagaaggttctgatgcaataatgctttctggggaaactgctcatggaaagttcccactaaaagccgtgaaagtaatgcacaccgtagcattacggacagaagccactatacctggtggtcaaatgccaccaaatattggtcaagtattcaagaaccacatgagtgagatgtttgcttaccatgcaaccatgatgtctaatacccttggaacctcaactgttgtcttcactagatcaggcttcatggctatccttttgagccactatcgaccttcaggcaccatatttgcttttacagatcaaaagaggatacaacagaggttggctttgtatcaaggagtctgtcctatttacatggaattctctgaagatgctgaagagactttcacaagggccttggatttgctgcagaagcaaggaatggtgaaatcaggagaagaagtagcactagtacaaagtggcacgcaacccatatggaggttccaatccactcacaatatccaggtccgaacagtgtaa

SEQ ID NO: 606 - protein, 575 aa, Glycine max
MSHVVVTRSIHTSLTRPTSGSAHHRAQTLLKPPTFASKVFPQQRNNPSKVCSRSCLVNARKSAPAKVVPVSPEDDSKIEEELQHSRGMQQLGDTSVGMWSKPTFRRKTKVVCTIGPSTNTREMIWKLAEAGMNVARLNMSHGDHASHQKIIDLVKEYNAQSKDNVIAIMLDTKGPEVRSGDLPQPINLTTGQEFTFTIRRGVGTADCVSVNYDDFVNDVDVGDMLLVDGGMMSLVVKSKTEDSVKCEVVDGGELKSRRHLNVRGKSATLPSITEKDWDDIKFGVDNKVDFYAVSFVKDAQVVHELKNYLKSCDADIHVIVKIESADSIPNLHSIITASDGAMVARGDLGAELPIEEVPLLQEEIITICRSMGKAVIVATNMLESMIVHPTPTRAEVSDIAIAVREGSDAIMLSGETAHGKFPLKAVKVMHTVALRTEATIPGGQMPPNIGQVFKNHMSEMFAYHATMMSNTLGTSTVVFTRSGFMAILLSHYRPSGTIFAFTDQKRIQQRLALYQGVCPIYMEFSEDAEETFTRALDLLQKQGMVKSGEEVALVQSGTQPIWRFQSTHNIQVRTV

SEQ ID NO: 607 - DNA, 1749 bp, Glycine max
  CDS (1)..(1749)
atggtcttgaagtcaatggttgcttccgcgagcgatctaagtctcgtgtctgttgcagggaactctccccttgatttcaagaatcgggttttcggtggccgactcattagcctcggatttcgtttcaacaaaggtagtaaatgcaaggggaatgaaaggtttaactttgaggttcgtgcagctgtggaagtgggtgtggagagatcgaagagcaaggctttggagggtggttttgggttggatgtggtttcagaggcagagttaacggtgaagggttttgcggggttgaggaagaccaagctcgtgtgcactgttggtcctgcttgcagctctatggaggatcttgagaacttggctcttggaggcatgagtgttgccaggctcaacatgtgccatgggaccagggagtggcaccgtgatgtgattaggaagatcaagaagttgaatgaggagaaagggttctgtgtttctgtaatgattgacactgagggtagtcagattcatgttgttgatcatggagctccttcctccgttaaagttgaggaaggttcaaattgggtgtttactgctgaacattatgagggttctcgtccattcactgttcaaacgaactatagaggtttttctgaaggtaccgaagtgggtgatgaacttgtaattgatggtggaatggcatgctttgaagtcacagaaaagactggtaatgatttgcattgcaaatgcatagatgctggtcttttcctgcctggagccaaatttagtttttggagagatggaaagcttgtgagggggaataacaagctccccactctatcgacaaaggattgggctgacattgactttggtatagcagagggagttgatttttttgccttatcctttgtcaatcatgctgattctgttaaggatctaaagatgtacctctctacgaagtcaactaaatccattaaagttttggcaaagatagaaagcttagaatcccttcataaactggaggaaatagtgcaagcttctgatgggatcatggtggctcggggtgaccttggtgtcgaaataccacttgaacagattcctacagtccaagaggatataatttacgtatgcagacaattaaacaagccagtgattgtagcttctcagcttcttgagtcaatggtcgagtatccaacgccaacacgtgctgaggtagcagatgtttctgaagcagttcgacagtatgctgatgctttgatgttgtctggagagtcagctattggatcatatggacgaaaagctttggcagtcttggatatggctagcagtagaatggaatcatggagtcgggaggaaaatagacaaagtcttgttagccaccatcaacttggagaatcattgccagaatgcataactgagcaaatatgcaattgtgccgttgaaatggccaacaaccttggtgtggatgccatctttgtgtacacaaagtatggacacatggcatcgcttctatcgcgcaaccgcccgaatcctcccatctttgctttcaccaacgatgacagtacccgcatggctctgactttgcaatggggtgttgtgcccattctggttgatttgtccgatgatgctgaatctaacatctcaaagtctgtgcaacttatgaaatctagagggttgatcagccaaggagatgttgttctagtggtctcagatgttgctccgacacgtgcctctcctatggctttccagtctattcaggtgaagactattatctaa

SEQ ID NO: 608 - protein, 582 aa, Glycine max
MVLKSMVASASDLSLVSVAGNSPLDFKNRVFGGRLISLGFRFNKGSKCKGNERFNFEVRAAVEVGVERSKSKALEGGFGLDVVSEAELTVKGFAGLRKTKLVCTVGPACSSMEDLENLALGGMSVARLNMCHGTREWHRDVIRKIKKLNEEKGFCVSVMIDTEGSQIHVVDHGAPSSVKVEEGSNWVFTAEHYEGSRPFTVQTNYRGFSEGTEVGDELVIDGGMACFEVTEKTGNDLHCKCIDAGLFLPGAKFSFWRDGKLVRGNNKLPTLSTKDWADIDFGIAEGVDFFALSFVNHADSVKDLKMYLSTKSTKSIKVLAKIESLESLHKLEEIVQASDGIMVARGDLGVEIPLEQIPTVQEDIIYVCRQLNKPVIVASQLLESMVEYPTPTRAEVADVSEAVRQYADALMLSGESAIGSYGRKALAVLDMASSRMESWSREENRQSLVSHHQLGESLPECITEQICNCAVEMANNLGVDAIFVYTKYGHMASLLSRNRPNPPIFAFTNDDSTRMALTLQWGVVPILVDLSDDAESNISKSVQLMKSRGLISQGDVVLVVSDVAPTRASPMAFQSIQVKTII

SEQ ID NO: 609 - DNA, 1584 bp, Glycine max
  CDS (1)..(1584)
atgccttccagtcacttgcttctcgaggaacctattaggatggtctccatccttgagccatccaagcctagttttttctctgcaatgacaaagattgttggtaccctgggacctaaatctagatccgtcgaaaccatttctggttgcctcaaggctggcatgtctgtggctcgttttgacttttcatggcatgaccctgagtaccaccaggagactttggagaatttgaaggctgctatcaagagtactaagaagctctgtgctgttatgctggacacagtgggcgctgagatgcaggttgttaacaaaagtgagagagcaatctcgctcgaggcaaatggtctggttgttctaactcctgatcagggacaagaagcctcttcagagatattgcctatcaattttgatggactggctaaggcagtgaagaagggagacaccatttttattggtcaatacttgttcacgggaagtgaaactacttctgtatggctagaggtatctgaagtcaaagggcaagatgttgtttgtattataaagaacacagctacattggctgggtcattgttcactttgcatgcctctcaaattcatattgatttgcctactctcactgagaaagacaaggaggttataagcacctggggtgttaaaaacaaaattgattttctgtcattgtcatatactcgacacgccgaagatgttcgccaggctcgtgaatttctttcaaagttaggtgatctcagccaaactcaaatttttgcaaagattgaaaatgttgagggattgacccattttgatgagattctacaagaagctgacggtattatcctttcccgtgggaatttgggtattgatcttccaccagagaaggtgtttttgtttcaaaaatctgccctttacaagtgtaacatggctgggaaacctgctgtgcttacacgtgttgtggatagcatgactgacaacttgagaccaactcgtgctgaagccacagatgttgccaatgctgttttagatggaagtgatgccatacttctgggtgctgagactttacgtgggttgtaccctattgagactatttctactgttggcagaatttgttctgaggctgagaaagttttcaatcaagacctttattttaagaggacagtcaagtatgttggagaacccatgacccacttggaatctattgcatcctctgcggtacgggctgcaattaaggtgaaagcatctattataatttgtttcacttcatcaggaagggctgcaagattgatcgcaaagtataggccaacaatgccagtactatctgttgtgatcccccgactcaagacaaatcagctaaagtggagctttagtggagcttttgaggcaagacaatcacttatcgtgagaggtctctttcctatgcttgcagatccacgacatcctgctgagtcaacaagtgcaacaaatgagtctattcttaaggttgcccttgatcatggaaaatcattgggagttattaagtcacatgaccgggtagttgtttgccagaaacttggtgatgcatctgtggttaagattattgagcttgaagattaa

SEQ ID NO: 610 - protein, 527 aa, Glycine max
MPSSHLLLEEPIRMVSILEPSKPSFFSAMTKIVGTLGPKSRSVETISGCLKAGMSVARFDFSWHDPEYHQETLENLKAAIKSTKKLCAVMLDTVGAEMQVVNKSERAISLEANGLVVLTPDQGQEASSEILPINFDGLAKAVKKGDTIFIGQYLFTGSETTSVWLEVSEVKGQDVVCIIKNTATLAGSLFTLHASQIHIDLPTLTEKDKEVISTWGVKNKIDFLSLSYTRHAEDVRQAREFLSKLGDLSQTQIFAKIENVEGLTHFDEILQEADGIILSRGNLGIDLPPEKVFLFQKSALYKCNMAGKPAVLTRVVDSMTDNLRPTRAEATDVANAVLDGSDAILLGAETLRGLYPIETISTVGRICSEAEKVFNQDLYFKRTVKYVGEPMTHLESIASSAVRAAIKVKASIIICFTSSGRAARLIAKYRPTMPVLSVVIPRLKTNQLKWSFSGAFEARQSLIVRGLFPMLADPRHPAESTSATNESILKVALDHGKSLGVIKSHDRVVVCQKLGDASVVKIIELED

SEQ ID NO: 611 - DNA, 1749 bp, Glycine max
  CDS (1)..(1749)
atggttttgaaatcaatggttgcttccgcgagcgatctaagtctcgtgagtgttgcagggaaccctccccttgatttgaagaatcgggttttcggtagccgcgtcatcagcctcggatttcgtttcaacaaaggtagtaaatggaaggggaatgaaaggtttaactttaaggttcgtgcagctgtggaagtgggtgtggagagatcgaagagcaaggctttggagggtggttttgggttggatgtggtttcagaggcagagttaacggtgaagggttttgcggggttgaggaagaccaagctcgtgtgcactgttggtcctgcttgcagctctatggaggatcttgagaacttggctcttggaggcatgagtgttgccaggctcaacatgtgccatgggaccagggagtggcaccgtgatgtgattaggaagatcaagaagttgaatgaggagaaagggttctgtgtttctgtaatgattgacactgagggtagtcagattcatgttgttgatcatggagctccttcctccgttaaagttgaggaaggttcaaattgggtgtttactgctgaacattatgagggttctcgtccattcactgttcaaacgaactatagaggtttttctgaaggtaccgaagtgggtgatgaacttgtaattgatggtggaatggcatgctttgaagtcacagaaaagactggtaatgatttgcattgcaaatgcatagatgctggtcttttcctgcctggagccaaatttagtttttggagagatggaaagcttgtgagggggaataacaagctccccactctatcgacaaaggattgggctgacattgactttggtatagcagagggagttgatttttttgccttatcctttgtcaatcatgctgattctgttaaggatctaaagatgtacctctctacgaagtcaactaaatccattaaagttttggcaaagatagaaagcttagaatcccttcataaactggaggaaatagtgcaagcttctgatgggatcatggtggctcggggtgaccttggtgtcgaaataccacttgaacagattcctacagtccaagaggatataatttacgtatgcagacaattaaacaagccagtgattgtagcttctcagcttcttgagtcaatggtcgagtatccaacgccaacacgtgctgaggtagcagatgtttctgaagcagttcgacagtatgctgatgctttgatgttgtctggagagtcagctattggatcatatggacgaaaagctttggcagtcttggatatggctagcagtagaatggaatcatggagtcgggaggaaaatagacaaagtcttgttagccaccatcaacttggagaatcattgccagaatgcataactgagcaaatatgcaattgtgccgttgaaatggccaacaaccttggtgtggatgccatctttgtgtacacaaagtatggacacatggcatcgcttctatcgcgcaaccgcccgaatcctcccatctttgctttcaccaacgatgacagtacccgcatggctctgactttgcaatggggtgttgtgcccattctggttgatttgtccgatgatgctgaatctaacatctcaaagtctgtgcaacttatgaaatctagagggttgatcagccaaggagatgttgttctagtggtctcagatgttgctccgacacgtgcctctcctatggctttccagtctattcaggtgaagactattatctaa

SEQ ID NO: 612 - protein, 582 aa, Glycine max
MVLKSMVASASDLSLVSVAGNPPLDLKNRVFGSRVISLGFRFNKGSKWKGNERFNFKVRAAVEVGVERSKSKALEGGFGLDVVSEAELTVKGFAGLRKTKLVCTVGPACSSMEDLENLALGGMSVARLNMCHGTREWHRDVIRKIKKLNEEKGFCVSVMIDTEGSQIHVVDHGAPSSVKVEEGSNWVFTAEHYEGSRPFTVQTNYRGFSEGTEVGDELVIDGGMACFEVTEKTGNDLHCKCIDAGLFLPGAKFSFWRDGKLVRGNNKLPTLSTKDWADIDFGIAEGVDFFALSFVNHADSVKDLKMYLSTKSTKSIKVLAKIESLESLHKLEEIVQASDGIMVARGDLGVEIPLEQIPTVQEDIIYVCRQLNKPVIVASQLLESMVEYPTPTRAEVADVSEAVRQYADALMLSGESAIGSYGRKALAVLDMASSRMESWSREENRQSLVSHHQLGESLPECITEQICNCAVEMANNLGVDAIFVYTKYGHMASLLSRNRPNPPIFAFTNDDSTRMALTLQWGVVPILVDLSDDAESNISKSVQLMKSRGLISQGDVVLVVSDVAPTRASPMAFQSIQVKTII

SEQ ID NO: 613 - DNA, 1728 bp, Glycine max
  CDS (1)..(1728)
atgtctcaggtagtggccactcgatccattcactcctccctcacgcgccccacctcaggatctgcacaccacagggcccaaacgttgttgaagcctccaacttttgcttccaaattgttcggagcacaaaggaacaacccctccaaagtttgctcccgaagttgcctcgtcaatgcgaggaaatctgcacccgctaaagttgttcccgtgtcacccgaggatgattcaaagattgaggaagagttgcagcacttgcgtggtatgcagcaacttggcgacacttctgttggaatgtggtcaaaacccacgtttaggaggaagacaaaggttgtttgcaccattggtccttctaccaacaccagggaaatgatttggaagctggctgagactgggatgaatgttgcccgattgaatatgtctcacggagaccatgcttctcatcagaaaattattgatttggttaaagaatataatgctcaatccaaggacaacgtaattgcaattatgcttgataccaagggtcctgaggttaggagtggggatttgccacaaccaatcaatttaacaactgggcaggaattcacttttaccatccggaggggtgttggaactgcagattgtgttagtgtgaactatgacgatttcgtcaatgatgtggatgtgggagacatgcttcttgttgatggtggtatgatgtctttggtggttaagtctaagacagaggattctgtgaaatgtgaagttgttgatggaggagagctcaagtcaaggagacatttgaatgttagaggaaaaagtgcaacactgccttccataactgagaaggattgggatgacatcaaatttggagtggataacaaagttgacttctatgctgtttcttttgttaaggatgcacaagtagttcatgaactgaagaattatttgaaaagctgtgatgctgatatacacgtcattgtaaaaattgaaagtgcagactctataccaaacttgcattcaattattacagcgtctgatggggccatggttgcaagaggagatcttggtgcagaactccctattgaagaggttccacttttgcaggaagaaataatcaccatatgtcgtagcatgggaaaggccgttattgtggcaacaaatatgctggaaagcatgattgttcacccgacaccaaccagagccgaggtatccgatattgcaattgctgttcgagaaggttctgatgcaataatgctttctggggaaactgctcatggaaagttcccactaaaagccgtgaaagtaatgcacaccgtagcattacggacagaagccactatacctggtggtcaaatgccaccaaatattggtcaagtattcaagaaccacatgagtgagatgtttgcttaccatgcaaccatgatgtctaatacccttggaacctcaactgttgtcttcactagatcaggcttcatggctatccttttgagccactatcgaccttcaggcaccatatttgcttttacagatcaaaagaggatacaacagaggttggctttgtatcaaggagtctgtcctatttacatggaattctctgaagatgctgaagagactttcacaagggccttggatttgctgcagaagcaaggaatggtgaaatcaggagaagaagtagcactagtacaaagtggcacgcaacccatatggaggttccaatccactcacaatatccaggtccgaacagtgtaa

SEQ ID NO: 614 - protein, 575 aa, Glycine max
MSQVVATRSIHSSLTRPTSGSAHHRAQTLLKPPTFASKLFGAQRNNPSKVCSRSCLVNARKSAPAKVVPVSPEDDSKIEEELQHLRGMQQLGDTSVGMWSKPTFRRKTKVVCTIGPSTNTREMIWKLAETGMNVARLNMSHGDHASHQKIIDLVKEYNAQSKDNVIAIMLDTKGPEVRSGDLPQPINLTTGQEFTFTIRRGVGTADCVSVNYDDFVNDVDVGDMLLVDGGMMSLVVKSKTEDSVKCEVVDGGELKSRRHLNVRGKSATLPSITEKDWDDIKFGVDNKVDFYAVSFVKDAQVVHELKNYLKSCDADIHVIVKIESADSIPNLHSIITASDGAMVARGDLGAELPIEEVPLLQEEIITICRSMGKAVIVATNMLESMIVHPTPTRAEVSDIAIAVREGSDAIMLSGETAHGKFPLKAVKVMHTVALRTEATIPGGQMPPNIGQVFKNHMSEMFAYHATMMSNTLGTSTVVFTRSGFMAILLSHYRPSGTIFAFTDQKRIQQRLALYQGVCPIYMEFSEDAEETFTRALDLLQKQGMVKSGEEVALVQSGTQPIWRFQSTHNIQVRTV

SEQ ID NO: 615 - DNA, 1749 bp, Glycine max
  CDS (1)..(1749)
atggtcctgaagtcagtggttgcttccgcgagcgatctaagtctcgtgtctgttgcagggaactctccccttgatttcaagaatcgggttttcggtggccgactcattagcctcggatttcgtttcaacaaaggtagtaaatgcaaggggaatgaaaggtttaactttgaggttcgtgcagctgtggaagtgggtgtggagagatcgaagagtaaggctttggagggtggttttgggttggatgtggtttcagaggcagagttaacagtgaagggttttgcggggttgaggaagaccaaactcgtgtgcactgttggtcctgcttgcagctctatggaggatcttgagaacttggctcttggaggcatgagtgttgccaggctcaacatgtgccatgggaccagggagtggcaccgtgatgtgattaggaagatcaagaagttgaatgaggagaaagggttctgtgtttctgtaatgattgacactgagggtagtcagattcatgttgttgatcatggagctccttcctccgttaaagttgaggaaggttcaaattgggtgtttactgctgaacattatgagggttctcgtccattcactgttcaaacgaactatagaggtttttctgaaggtaccgaagtgggtgatgaacttgtaattgatggtggaatggcatgctttgaagtcacagaaaagactggtaatgatttgcattgcaaatgcatagatgctggtcttttcctgcctggagccaaatttagtttttggagagatggaaagcttgtgagggggaataacaagctccccactctatcgacaaaggattgggctgacattgactttggtatagcagagggagttgatttttttgccttatcctttgtcaatcatgctgattctgttaaggatctaaagatgtacctctctacgaagtcaactaaatccattaaagttttggcaaagatagaaagcttagaatcccttcataaactggaggaaatagtgcaagcttctgatgggatcatggtggctcggggtgaccttggtgtcgaaataccacttgaacagattcctacagtccaagaggatataatttacgtatgcagacaattaaacaagccagtgattgtagcttctcagcttcttgagtcaatggtcgagtatccaacgccaacacgtgctgaggtagcagatgtttctgaagcagttcgacagtatgctgatgctttgatgttgtctggagagtcagctattggatcatatggacgaaaagctttggcagtcttggatatggctagcagtagaatggaatcatggagtcgggaggaaaatagacaaagtcttgttagccaccatcaacttggagaatcattgccagaatgcataactgagcaaatatgcaattgtgccgttgaaatggccaacaaccttggtgtggatgccatctttgtgtacacaaagtatggacacatggcatcgcttctatcgcgcaaccgcccgaatcctcccatctttgctttcaccaacgatgacagtacccgcatggctctgactttgcaatggggtgttgtgcccattctggttgatttgtccgatgatgctgaatctaacatctcaaagtctgtgcaacttatgaaatctagagggttgatcagccaaggagatgttgttctagtggtctcagatgttgctccgacacgtgcctctcctatggctttccagtctattcaggtgaagactattatctaa

SEQ ID NO: 616 - protein, 582 aa, Glycine max
MVLKSVVASASDLSLVSVAGNSPLDFKNRVFGGRLISLGFRFNKGSKCKGNERFNFEVRAAVEVGVERSKSKALEGGFGLDVVSEAELTVKGFAGLRKTKLVCTVGPACSSMEDLENLALGGMSVARLNMCHGTREWHRDVIRKIKKLNEEKGFCVSVMIDTEGSQIHVVDHGAPSSVKVEEGSNWVFTAEHYEGSRPFTVQTNYRGFSEGTEVGDELVIDGGMACFEVTEKTGNDLHCKCIDAGLFLPGAKFSFWRDGKLVRGNNKLPTLSTKDWADIDFGIAEGVDFFALSFVNHADSVKDLKMYLSTKSTKSIKVLAKIESLESLHKLEEIVQASDGIMVARGDLGVEIPLEQIPTVQEDIIYVCRQLNKPVIVASQLLESMVEYPTPTRAEVADVSEAVRQYADALMLSGESAIGSYGRKALAVLDMASSRMESWSREENRQSLVSHHQLGESLPECITEQICNCAVEMANNLGVDAIFVYTKYGHMASLLSRNRPNPPIFAFTNDDSTRMALTLQWGVVPILVDLSDDAESNISKSVQLMKSRGLISQGDVVLVVSDVAPTRASPMAFQSIQVKTII

SEQ ID NO: 617 - DNA, 1542 bp, Hordeum vulgare
  CDS (1)..(1542)
atggtgtccaacggagagctgtcgcagccgcaggcgggggagtacggcaccgccgtgatgcggcgccggcccaagaccaagatcgtttgcacgctcggcccggcctcgcgctccgtcgatatgatcgagaagctgctgcgcgccgggatgtgcgtcgcccgcttcaacttctcccacggctcccacgaataccaccaggagacgctcgacaacctgcacgccgccatggagcgcaccgggatcctctgcgccgtcatgctcgacaccaagggtccagagatccgtactggatttttgaaagatgggaagcctatccagttgaaaaagggccaagaaattgtaatctccacagattataccataaagggggacgacaagatgatatcgatgagctataagaagctagcagttgatctgaagccaggcagtgttatattatgcgctgatggtactatcactcttactgtgcttcactgtgacaaagagcaaggtctcgttcgttgctgttgtgagaacactgctatgcttggtgagaggaagaatgtcaatcttccaggggtcgttgttgatctcccaacactcactgaaaaggacagggaggatatccttcaatggggtgtcccgaacaagattgacatgattgctttgtcgtttgttcgcaagggttcagatcttgtggaggtccggaaggtacttggggagcatgccaagtcaataatgctgatgtcaaaggttgagaaccaagaaggagtagctaactttgacgatatcctggcacagtctgatgcttttatggtggcaagaggtgatttgggaatggaaatccctgtagagaagatcttttatgcacagaaggtgatgattttcaagtgcaacattcagggcaagccagttgtgactgcaacccagatgttggagtctatgatcaagtctcctcgccctacccgagcggaagcaaccgacgtggccaacgcagttcttgatggcactgactgtgtcatgctcagtggcgagacagctgccggtgcttatccagaactggcagtgcaaactatggccaagatctgcttgcaggctgagtcatgcgtggactattctgctgtttttaaatcaatcatgtcatcagccccgattcccatgagcccattggagagccttgcctcatcagctgtccgcacagcgaactcagctaaggcgacgcttatcttggtactgaccaggggaggaacaactgcaaggcttgtagccaagtataggccatccatgccgatactgtctgtcgtggttcctgagctcaagacagtcgagtttgattggatctgcagcgacgaggggcctgccaggcaaagccttatcgtgaggggcgtgatcccaatgctgagtgctggcactgcgaaggcgtttgacagcgaagccacggaagaggcactgaggtttgccgtgaagagcgccaaggagacggggctttgcaacgctggtgagtccattgtggcccttcaccgcatcgggaatgcatctgtcatcaagctcttgaccgtgtaa

SEQ ID NO: 618 - protein, 513 aa, Hordeum vulgare
MVSNGELSQPQAGEYGTAVMRRRPKTKIVCTLGPASRSVDMIEKLLRAGMCVARFNFSHGSHEYHQETLDNLHAAMERTGILCAVMLDTKGPEIRTGFLKDGKPIQLKKGQEIVISTDYTIKGDDKMISMSYKKLAVDLKPGSVILCADGTITLTVLHCDKEQGLVRCCCENTAMLGERKNVNLPGVVVDLPTLTEKDREDILQWGVPNKIDMIALSFVRKGSDLVEVRKVLGEHAKSIMLMSKVENQEGVANFDDILAQSDAFMVARGDLGMEIPVEKIFYAQKVMIFKCNIQGKPVVTATQMLESMIKSPRPTRAEATDVANAVLDGTDCVMLSGETAAGAYPELAVQTMAKICLQAESCVDYSAVFKSIMSSAPIPMSPLESLASSAVRTANSAKATLILVLTRGGTTARLVAKYRPSMPILSVVVPELKTVEFDWICSDEGPARQSLIVRGVIPMLSAGTAKAFDSEATEEALRFAVKSAKETGLCNAGESIVALHRIGNASVIKLLTV

SEQ ID NO: 619 - DNA, 1584 bp, Oryza sativa
  CDS (1)..(1584)
atgcattcgacgaatctgctgctggaggagcccatcaggatggcatccatcctggagccatccaagcccagcttcttcccggcgatgaccaagatcgtggggacgctggggccaaagtcgcgctccgtcgacaccatctcctcctgcctcaaggccggcatgtcggtggcccgatttgatttctcgtggggagacgccgagtaccaccaggaaacccttgagaacctcaaggtcgccatcaagtccaccaagaagctctgcgcggtcatgcttgacacggtcggcccagagttgcaggtggtgaacaagagcgaagcctccatctccctcgaggagaacggcactgttattctcacccctgaccaggggcaggaggcctcctcacaagtgctgccaattaacttcgctgggcttgctaaggctgtgaagccaggtgacacaatatttgttgggcaatacttgttcacaggcagtgagactacttcagtttggttagaggtttctcaaattaaaggagatgatgtggtctgtgtgataaaaaacacagcaactctggctgggtcgctcttcacattgcattgctcgcagattcacatcgacttacctaccctatctgatgaggacaaggaggttatcagaaaatggggtgccccaaacaagattgacttcctctctctttcttatacaagacatgtagaagatgtgcgacaggcacgtgaattcctctcaaagttaggtgaccttagccagacccagatttttgcaaaaatcgagaatgtggaggggttgaataattttgatgaaatcctccaagaagctgatggtatcatcctgtcaagaggaaaccttggaattgatcttccacctgaaaaggtgtttttatttcaaaagtctgctctgcacaagtgcaacatggctggaaagcctgctgttgttactcgtgttgtagacagtatgactgacaacctcaggcctactcgtgcagaggctacggatgtggcaaatgcagtgcttgacgggagtgatgccattctccttggtgctgagactctgcgtggtttatacccagttgagactatttcaatagtgggcaaaatttgcgctgaggcagagaaggtattcaaccaagatttatacttcaagcggactgtgaaatatgttggggagcccatgacccacttggagtctatcgcttcttctgcggtgcgagctgctatcaaagtgaaggcttctgtcattatttgcttcacatcatctggacgcgctgcaagactaattgccaagtacaggcccaccatgcctgttctatctgttgtcattcctcgtctgaaaacaaaccaactgaggtggagtttcactggcgcatttgaagcaagacaatcactcatagttagaggtctctttccgatgcttgctgatcctcgccatccagctgaatcgaccagcgctaccaatgagtcagttttgaaggttgctcttgaccatggcaaagcttccggtgtgatcaagtcgcatgatcgcgttgttgtctgccagaaagtgggtgattcctcggttgtgaagatcattgagctggacgattag

SEQ ID NO: 620 - protein, 527 aa, Oryza sativa
MHSTNLLLEEPIRMASILEPSKPSFFPAMTKIVGTLGPKSRSVDTISSCLKAGMSVARFDFSWGDAEYHQETLENLKVAIKSTKKLCAVMLDTVGPELQVVNKSEASISLEENGTVILTPDQGQEASSQVLPINFAGLAKAVKPGDTIFVGQYLFTGSETTSVWLEVSQIKGDDVVCVIKNTATLAGSLFTLHCSQIHIDLPTLSDEDKEVIRKWGAPNKIDFLSLSYTRHVEDVRQAREFLSKLGDLSQTQIFAKIENVEGLNNFDEILQEADGIILSRGNLGIDLPPEKVFLFQKSALHKCNMAGKPAVVTRVVDSMTDNLRPTRAEATDVANAVLDGSDAILLGAETLRGLYPVETISIVGKICAEAEKVFNQDLYFKRTVKYVGEPMTHLESIASSAVRAAIKVKASVIICFTSSGRAARLIAKYRPTMPVLSVVIPRLKTNQLRWSFTGAFEARQSLIVRGLFPMLADPRHPAESTSATNESVLKVALDHGKASGVIKSHDRVVVCQKVGDSSVVKIIELDD

SEQ ID NO: 621 - DNA, 1803 bp, Zea mays
  CDS (1)..(1803)
atgggacctcgagccggcgggaccgcaccgcatctccctcccattccactccagtccaccaccgctcccattccccagccgccgtcggccgtcgccatggccaccgccgcccactccctcctgcacacaccggaggcccacagggccgccacccgctcgcccttctctcctcccgcgcccactcccttcctccatctccgccctcaccgcctccccctccgcctccgctccacctccccgaccgcctccgacctcaccgccttccccccgaacccgaacgggatcttcgcgtccgaccggcccatcgacgtggacgccgccacggaggccgagctgcgggagaacgggttccggagcacgcgccgcaccaagctcgtctgcaccgtgggccccgccacctcgcgcccggaccagctcgaggcgctcgccgtcggcgggatgaacgtggcccggctcaacatgtgccacggcgacagggagtggcatagggccgccatccgcgccgtcaggagcctcaacgaggagaagggcttcgccgtcgccgtcatgatggacaccgagggcagcgagatccacatgggggacctcggcggcgcatcctcggtcaaggcggaggatggagaagtatggacgttcagtgttagatcatttgaattgcctctcccagaacgaactattaatgtgaactatgatggatttgctgaagatgtgagagttggtgatgagctccttgtggatggtggaatggctcggtttgaggtgattgagaagataggaccagatgttaagtgccgttgcacagatcctggtttattgttgccacgtgccaatcttacattctggcgtgacggcagtatcgtccgtgagaggaatgctatgcttcctacaatttcatcaaaggattggcttgacatagactttgggattgccgaaggtgtagatttcatcgctgtttcatttgtcaagtctgcagaagtaattaggcacttgaaaagctacatagctgcaaggagccgtggaagtgacatggcagtcattgcgaaaatcgagagcatcgactctctaaagaacctggaggagatcatccgagcgtcagacggcgccatggtagccagaggggacatgggggcgcaggttcccctggagcaggtcccctcgatacagcaaaagatcgttcagctctgcaggcagctgaacaagccggtcatcgtcgcctcccagctcctcgagtcgatgatagagtaccccacgcccaccagggccgaggtcgcggacgtctccgaagccgtccgccagcgcgccgacgccctgatgctttccggcgagtcggcaatggggaggtacccggacaaggctctcagcgttctgaggagcgtcagcctgaggatcgagaagtggtggagggaggagaagcggcacgaggcgctggagctccggagcgtctcgtcctccttctccgacaagatatcggaggagatctgcaactcagcagctaaaatggctaatggcctgggagtggacgccgtctttgtgttcaccaagaccgggcacatggcctccctgctctcgcggtgccgccccgactgcccggtcttcgccttcacgacgtcgacgtccgtcaggaggcggctgaacctgcagtggggcctgatccccttccgcctcgccttctcggacgacatggagagcaacctgaaccgcaccttctccctgctcaaggccaggggcatgatccagtctggggacctcgtgatcgccctctcggacatgctgcagtccatccaggtgatgaacgtaccctga

SEQ ID NO: 622 - protein, 600 aa, Zea mays
MGPRAGGTAPHLPPIPLQSTTAPIPQPPSAVAMATAAHSLLHTPEAHRAATRSPFSPPAPTPFLHLRPHRLPLRLRSTSPTASDLTAFPPNPNGIFASDRPIDVDAATEAELRENGFRSTRRTKLVCTVGPATSRPDQLEALAVGGMNVARLNMCHGDREWHRAAIRAVRSLNEEKGFAVAVMMDTEGSEIHMGDLGGASSVKAEDGEVWTFSVRSFELPLPERTINVNYDGFAEDVRVGDELLVDGGMARFEVIEKIGPDVKCRCTDPGLLLPRANLTFWRDGSIVRERNAMLPTISSKDWLDIDFGIAEGVDFIAVSFVKSAEVIRHLKSYIAARSRGSDMAVIAKIESIDSLKNLEEIIRASDGAMVARGDMGAQVPLEQVPSIQQKIVQLCRQLNKPVIVASQLLESMIEYPTPTRAEVADVSEAVRQRADALMLSGESAMGRYPDKALSVLRSVSLRIEKWWREEKRHEALELRSVSSSFSDKISEEICNSAAKMANGLGVDAVFVFTKTGHMASLLSRCRPDCPVFAFTTSTSVRRRLNLQWGLIPFRLAFSDDMESNLNRTFSLLKARGMIQSGDLVIALSDMLQSIQVMNVP

SEQ ID NO: 623 - DNA, 1698 bp, Triticum aestivum
  CDS (1)..(1698)
atggcggcggcggcggcggagatggtgcgcgggttcgccgcgacggcgcgcgcggccaggccggccgcgacggtggcggcgcccccgcagcccaggcgggcggtcgccgcgcgggtgctgcggacctccgcctccgagaaggtggcggcggatctctccgtcgccgggaccaacggctccctctccgccctgagcaatactgatgtcagtactgacgccacctcacaagcagtggatgcgactcccaggaggaagacaaagatagtctgcaccataggcccctcgaccaacactcgtgagatgatatggaagcttgcagagactggaatgaatgttgcgcgtatgaatatgtcccatggagaccaccagtcacaccaaaaagtgattgatttggtcaaggagtacaacgcacagaacactgatggcaatactgttgctattatgctggacacaaagggtccggaagtgcgaagtggggatcttcctgagccaatcatgcttgcggaaggtcaagagttcaatttcacgattaaaagaggggtgagcaccgaagacactgtcagcgtgaattatgatgacttcataagcgatgttgaagctggtgacatactgttggtggatggaggaatgatgtcgcttgctgtgaagtcgaaaacagctgacacagtcaagtgtgtagtagtcgatggtggggagttgaaatcaaggcgccaccttaatgtgcgcggaaagagcgcaactctgccatctataacagagaaggattgggaagatatcaagtttggcgtcgaaaatggtgttgatttctatgctgtttcgtttgtgaaggatgccaaagttattcatgaactcaaggcttacctgaaaagtgctaatgcggatatacatgttattccaaaaattgagagtgctgattcaatcccaaacctccagtccattattgctgcttcagatggggcaatggtggctcgtggagatcttggtgctgaacttccaattgaggaagttcctttactacaggaggagattatcagaacatgccgaagcatgcagaaaccagtaattgttgcaacaaatatgttagaaagcatgatagatcatccaactccaacaagggctgaagtctctgatatagccattgctgttcgggaggctgctgatgccattatgctatctggtgaaactgcccatgggaagtacccattgaaggcagtgaaggtgatgcacactgtggcacttagaacagaatccagcctgtacgacccaactaaagctcccagtcttgttgcacgcccaaaggcgctgctcaatgatgacttctgcaaaagccaattaagtaaaatgtttggatctcatgctacaatgatggcgaacacccttcgtacaccgatcattgtgtttacacgtgtgggctccatggctgtccttctgagccactaccgtccctcgtccaccatatatgcattcactaatgaagtacgagtgaagcaacgactggcactctatcagggcgtggttcctattctcatggagttctcagatgacgcggaagagactttctcaagagcaattaccagcttgctggatgcgaaatacatgaatgaaggggactatgtcaccctcgttcagagcgggtcgcagtcgatctggagagaagaatctacccaccacatacaagtgaggaaagtccagtgctga

SEQ ID NO: 624 - protein, 565 aa, Triticum aestivum
MAAAAAEMVRGFAATARAARPAATVAAPPQPRRAVAARVLRTSASEKVAADLSVAGTNGSLSALSNTDVSTDATSQAVDATPRRKTKIVCTIGPSTNTREMIWKLAETGMNVARMNMSHGDHQSHQKVIDLVKEYNAQNTDGNTVAIMLDTKGPEVRSGDLPEPIMLAEGQEFNFTIKRGVSTEDTVSVNYDDFISDVEAGDILLVDGGMMSLAVKSKTADTVKCVVVDGGELKSRRHLNVRGKSATLPSITEKDWEDIKFGVENGVDFYAVSFVKDAKVIHELKAYLKSANADIHVIPKIESADSIPNLQSIIAASDGAMVARGDLGAELPIEEVPLLQEEIIRTCRSMQKPVIVATNMLESMIDHPTPTRAEVSDIAIAVREAADAIMLSGETAHGKYPLKAVKVMHTVALRTESSLYDPTKAPSLVARPKALLNDDFCKSQLSKMFGSHATMMANTLRTPIIVFTRVGSMAVLLSHYRPSSTIYAFTNEVRVKQRLALYQGVVPILMEFSDDAEETFSRAITSLLDAKYMNEGDYVTLVQSGSQSIWREESTHHIQVRKVQC

SEQ ID NO: 625 - DNA, 1584 bp, Zea mays
  CDS (1)..(1584)
atgcattccacgaacctcctgctcgaggagcccatccggatggcctccatcctcgagccctccaagcccagctacttcccggcgatgaccaagatcgtcggcactctcggccccaagtcgcgctccgtcgacacgatctccgcctgcctcaaggccggcatgtccgtcgcccggttcgatttctcgtggggggacgccgcgtaccaccaggagacgctggagaacctcaagctctccatcaagtccaccaagaagctctgcgctgtcatgctcgacaccgtgggcccggagctgcaggtggtgaacaagagcgagaccccgatctccctcgaggagaatggcacggtcgttctcacccctcaccggggccaagacgcctcctccagcttgctgcccatcaacttctctggactcgccaaggcggtgacaccaggggcaacaatattcgtgggacaatacttgttcactggcagtgagaccacctcagtttggttggaggtttctgaagtgaaaggagatgatgtggtgtgtataatcaagaacacagccaccttggctgggtcactgttcacgctgcattgctcccagattcacattgacttgcccaccctgtctgatgaggataaggatgtcattagaaaatggggtactcccaataagattgacttcctttctctgtcctacacaagacatgcagaggatgtgcgccaggcacgggaattcctgtcaaaattgggcgatctaagccagactctgatttttgccaaaattgagaatgtcgagggcttgaaccaatttgatgaaatactggctgaggcagatggtatcattttatcaagagggaacctgggaattgatcttccacctgagaaggtctttttgtttcaaaaatctgctcttcacaagtgcaacatggctggaaagcctgctgttgtcactcgtgttgtggacagtatgactgacaacctcaggcctactcgagcggaggcaactgatgtggcaaatgcagtacttgatgggagtgatgccattctccttggtgctgagactctccgaggtttatatccagttgagactatttcgacagtgggcagaatttgtgctgaggctgagaaggtattcaaccaagatttatacttcaagcaaactgtgaaatatgtcggagaacccatgacccatttggagtccattgcttcctcagctgtgcgagctgctatcaaagttaaggcttcggtgatcatttgcttcacctcttctgggagggctgcaaggctcatcgccaagtacaggcccaccatgcctgttctttctgttgtcattcctcgtctgaagacaaaccaactgagatggagtttcactggtgcttttgaggcaagacagtcgctgatagttagaggcctctttccgatgcttgcagatcctcggcatccagccgaatcaaccagtaatacaaatgagtcagttctgaaggttgctctagaccatggcaaggcatgtggtgtgatcaagtcccatgaccgtgttgtcgtttgccagaaggtgggagattcatcggttgtgaagatcattgagctggacgactag

SEQ ID NO: 626 - protein, 527 aa, Zea mays
MHSTNLLLEEPIRMASILEPSKPSYFPAMTKIVGTLGPKSRSVDTISACLKAGMSVARFDFSWGDAAYHQETLENLKLSIKSTKKLCAVMLDTVGPELQVVNKSETPISLEENGTVVLTPHRGQDASSSLLPINFSGLAKAVTPGATIFVGQYLFTGSETTSVWLEVSEVKGDDVVCIIKNTATLAGSLFTLHCSQIHIDLPTLSDEDKDVIRKWGTPNKIDFLSLSYTRHAEDVRQAREFLSKLGDLSQTLIFAKIENVEGLNQFDEILAEADGIILSRGNLGIDLPPEKVFLFQKSALHKCNMAGKPAVVTRVVDSMTDNLRPTRAEATDVANAVLDGSDAILLGAETLRGLYPVETISTVGRICAEAEKVFNQDLYFKQTVKYVGEPMTHLESIASSAVRAAIKVKASVIICFTSSGRAARLIAKYRPTMPVLSVVIPRLKTNQLRWSFTGAFEARQSLIVRGLFPMLADPRHPAESTSNTNESVLKVALDHGKACGVIKSHDRVVVCQKVGDSSVVKIIELDD

SEQ ID NO: 627 - DNA, 1728 bp, Zea mays
  CDS (1)..(1728)
atggcggcgcaggtggtcgcagcggcgggcaccccggtggccaggccgctgggcggcggatctggggccgacgcgctccggccagcggcaacgatgccaagggagagaaggaccggtgctgtggccgcgagaggacgccgcgagtctcaggtggtatccgtcataagccgcgccccacgccccgatgccggggtgctgccggtgtcgcccgacgacgacgcggccgtaaaggaagaagcaaacttccagcaccttaaggctatccagcaacttgcaactgcagcaaatggcgtgtggtctaaaccaaatgtaaggcgcaagacaaagattgtgtgtacaatcggtccttcaaccaacacaagggacatgatatggaaactcgctgagactggcatgaatgtggctcggcttaatatgtcacatggagaccatgcatcacaccagaaagttattgatctggtaaaggagtacaatgcatcacatgctgacaatgtgattgctatcatgcttgacacaaagggaccagaagttcgaagtggagatttgcctcaaccgatatttctggaaagcggacaagaatttacttttacaatcaaaaggggagttgggactgatacgtgtgttagcgttaactatgacgactttgttaatgatgttgaagtgggcgacatgctccttgtagatggaggaatgatgtcattcttggtcaaatcaaaaactgaagattctgtgaaatgtgaagttattgacggtggtgaattgaaatctaggcgccatctgaatgttcgtggaaagagtgcaaccttgccatcaataactgacaaggactgggacgacattaagtttggtgtggataatcaagttgattactatgctgtttcttttgtgaaggatgctcaagttgtccacgaactcaaggattatctaaaaagttgcaatgctgacatacatgttatcgtaaaaatagaaagtgcagactccatccccaacttacattcaatcatcacagcatctgatggggctatggttgccaggggtgaccttggagctgagctgcccattgaggaggtgccgctgttgcaggaagaaattattagaatgtgcaggagcatggggaaggctgttattgttgctacaaatatgctcgaaagtatgattgttcatccaactccaacccgagcagaagtttcagacattgctatagctgtccgagagggtgctgatgcagttatgctttcaggagaaactgcacatgggaaatttcccttgaaagctgttaaggtcatgcacactgttgccctgagaaccgaggcaactattcctggtggggaaacacctgcagaccttggtcaggctttcaagaaccacatgagcgaaatgttcgcataccatgcgacaatgatgtcaaatacccttcgaacatcaatagtggttttcactaggacgggatttatggctatactgcttagtcactaccgtccatctggcactatttttgccttcacagacgaggagagagttaggcaacgattggctttgtaccaaggtgtatgtccggttcaaatggaattttctgatgatgctgagaagacatttggcaatgctttgtcttatttgctgaaacatggtatggttaaggacggtaaggaggttgcacttgttcaaagtggtaaacatcccatctggagatcacaatcaacacacaacattcaggtgaggaagatctga

SEQ ID NO: 628 - protein, 575 aa, Zea mays
MAAQVVAAAGTPVARPLGGGSGADALRPAATMPRERRTGAVAARGRRESQVVSVISRAPRPDAGVLPVSPDDDAAVKEEANFQHLKAIQQLATAANGVWSKPNVRRKTKIVCTIGPSTNTRDMIWKLAETGMNVARLNMSHGDHASHQKVIDLVKEYNASHADNVIAIMLDTKGPEVRSGDLPQPIFLESGQEFTFTIKRGVGTDTCVSVNYDDFVNDVEVGDMLLVDGGMMSFLVKSKTEDSVKCEVIDGGELKSRRHLNVRGKSATLPSITDKDWDDIKFGVDNQVDYYAVSFVKDAQVVHELKDYLKSCNADIHVIVKIESADSIPNLHSIITASDGAMVARGDLGAELPIEEVPLLQEEIIRMCRSMGKAVIVATNMLESMIVHPTPTRAEVSDIAIAVREGADAVMLSGETAHGKFPLKAVKVMHTVALRTEATIPGGETPADLGQAFKNHMSEMFAYHATMMSNTLRTSIVVFTRTGFMAILLSHYRPSGTIFAFTDEERVRQRLALYQGVCPVQMEFSDDAEKTFGNALSYLLKHGMVKDGKEVALVQSGKHPIWRSQSTHNIQVRKI

SEQ ID NO: 629 - DNA, 1707 bp, Zea mays
  CDS (1)..(1707)
atggcggcagcggcggagatcggtggtttcgcggcggcgagagtggcggtggcgacgctcaggccggctgcgcacccagccccggcggcggcaccgcagcagcctaggagggcggtggcggcgcagtcgctgcggacgaccgccaccgaggcgctgacggcggatctcgccggcacgaccaacggcgctgtgcatgctcggatgaatagtaaggctacaagtgaaatcacttcacaggcagttactgcaaattctaggagaaagacaaagatagtctgcaccataggtccctcaaccaacactcgtgagatgatttggaagcttgcagagactggaatgaatgtagcacgccttaatatgtcccatggtgaccaccagtcgcaccagaaggttattgatttggtcaaggagtacaatgcacagaacactgatggcaatgttattgccattatgctggacacaaagggtcctgaagttagaagtggggatgttccagagccaatcatgctcaaggaaggtcaagagttcaacttcacgattaaaagaggggtgagcactgaagacactgtcagcgtgaactatgatgacttcataaatgatgttgaagctggcgacatactattagtggatggaggaatgatgtcgcttgctgtgaagtctaaaacagccgatacagtcaagtgtaaagtagttgatggtggggaattgaaatcacggcgccacctaaatgtccgtggaaagagtgctactttgccatctatcactgagaaggattgggaagacataaaatttggtgtcgaaaacggtgttgatttctatgcagtttcctttgtgaaggatgccaaagttatccatgaattaaaagactaccttaaaagtgctaatgccgatatacatgtcattccaaaaattgaaagtgcagattcaataccaaacctgcagtccattattgctgcttcagatggggcaatggtggcgcgtggagaccttggtgctgaacttccgattgaggatgttcctttgctacaggcagagattgtccaaacatgtcgaagcatggagaaaccagtcattgtcgctacaaatatgttggaaagcatgattgaccatcctactcccactagggcagaagtttctgacatagctattgcagttcgggaaggtgctgatgccatcatgttatctggcgaaactgctcatggaaagtatccactaaaggcagtcaaggtgatgcacactgtggcactcagaacagaatccagcctttataacccaactacttctcctagtcttgttgcatctgcacagggtctacagaatgaggacttctccccaagccagctaagtaaaatgttcggatctcatgcaacgatgatggccaacacccttcgcacaccaatcattgtatttacacagacaggctccatggctgtcctcctgagccattatcgtccctcgtctacactatttgcatttacaaacgaggaacgagtgaagcaacggctagcactctaccagggcgtcatccctattcacatgcagttctctgacgacgcagaagaaactttctccagagcaattagcagcttgctgaaagcacaatatgtgaagaagggagactacgtcactcttgttcagagcggagtgacttcaatctggagagaggaatccactcaccacatccaagtgaggaaagttcaggtctga

SEQ ID NO: 630 - protein, 568 aa, Zea mays
MAAAAEIGGFAAARVAVATLRPAAHPAPAAAPQQPRRAVAAQSLRTTATEALTADLAGTTNGAVHARMNSKATSEITSQAVTANSRRKTKIVCTIGPSTNTREMIWKLAETGMNVARLNMSHGDHQSHQKVIDLVKEYNAQNTDGNVIAIMLDTKGPEVRSGDVPEPIMLKEGQEFNFTIKRGVSTEDTVSVNYDDFINDVEAGDILLVDGGMMSLAVKSKTADTVKCKVVDGGELKSRRHLNVRGKSATLPSITEKDWEDIKFGVENGVDFYAVSFVKDAKVIHELKDYLKSANADIHVIPKIESADSIPNLQSIIAASDGAMVARGDLGAELPIEDVPLLQAEIVQTCRSMEKPVIVATNMLESMIDHPTPTRAEVSDIAIAVREGADAIMLSGETAHGKYPLKAVKVMHTVALRTESSLYNPTTSPSLVASAQGLQNEDFSPSQLSKMFGSHATMMANTLRTPIIVFTQTGSMAVLLSHYRPSSTLFAFTNEERVKQRLALYQGVIPIHMQFSDDAEETFSRAISSLLKAQYVKKGDYVTLVQSGVTSIWREESTHHIQVRKVQV

SEQ ID NO: 631 - DNA, 1629 bp, Zea mays
  CDS (1)..(1629)
atggctgcctccgccaggactaccagctcgttgccctacctagtcgccgtctcctcccccgcggctcaccgccacggggccagccacccgatccgcgcctcggtgggggaggcgacaatggacgtggtgtcggaggcggagctgcgggagaaagggttcttggggatgcggaaaacgaaactggtgtgcacggtggggcccgcctgcgtcgaggcgctgccggcgctggcgcgcggcgggatgggcgtggcgcggatcaacctctgccacggtggccgggagtggcatcgtgccgccatgcgctctgtgcggaggctcaacgaggagggaggattctgcgtgacgcttatggtcgacaccgagggttcccagctcctcgtcgcggaccacggaggcgccacctcagtcaaggccgaggatgggtcagagtggatatttacaaacaaaaaagctgatgaagcccatcagttcacaatgcatgtgaattttgataagttttctgaaggcattttggttggtgatgagcttgtaatagatggtggaatggcaacatttgaagttactgagaaaataggaaatgatttgcgctgtaagtgcacggacccaggtttgcttcttcctcgagccaaattgtcattctggaggaacggaaaaatagttcaaaggaactttggccttcctacattgtcaacaaaggattgggctgacatcgaatttgggatagctgaaggagttgattgcattgctctatcatttgtaaatgatgctaatgatataaagcagttgaaagcttacctctctagaagatcgttagagcacatcaaagtatttgcaaagattgagagtctagaatctctcaagaacctgaaagacatcatagaggcatctgatggagttatggtagcacgaggggatcttggagttcagattcctcttgaacagatcccagccattcaagaatcaattgttaaactatgtagacacctgaacaagcctgtgatagttgcttctcagcttctcgaatcaatggttgaatacccaacaccaactcgagcagaggtggccgatgtttcggaagcagtgcggcaatatgcagacgctgtgatgctatcagcagagtcagctataggtgcatatccccaaaaagcgctatctgtacttcgtgcagccagtgaaaggatggaatcatggagccgtgaggaaaacatgcagaaacttcttccacggcatcagcttgcaattgcattgcctgaccggatctcagagcagatttgcagctgtgctgtagaaatggcaaacaaccttgctgtggatgccatatttgtctacacaaagcatggtcacatggcatcacttctatcgcgcaaccgacccaaccctcccatattcgcgttcactgataatgccaattcaagaaagagcatgaacctctactggggagtgattccacttcatctaccattgtcaaatagcatggaggataacttcaacaaaaccatcagcctgatgaggtcgaagggttcagtgaaacccggagacacggtcttggtggtatcagattctgatctaaaccaaccttgtgctgccacctcggtgttccaatccattcaggtccggctagtggagtag

SEQ ID NO: 632 - protein, 542 aa, Zea mays
MAASARTTSSLPYLVAVSSPAAHRHGASHPIRASVGEATMDVVSEAELREKGFLGMRKTKLVCTVGPACVEALPALARGGMGVARINLCHGGREWHRAAMRSVRRLNEEGGFCVTLMVDTEGSQLLVADHGGATSVKAEDGSEWIFTNKKADEAHQFTMHVNFDKFSEGILVGDELVIDGGMATFEVTEKIGNDLRCKCTDPGLLLPRAKLSFWRNGKIVQRNFGLPTLSTKDWADIEFGIAEGVDCIALSFVNDANDIKQLKAYLSRRSLEHIKVFAKIESLESLKNLKDIIEASDGVMVARGDLGVQIPLEQIPAIQESIVKLCRHLNKPVIVASQLLESMVEYPTPTRAEVADVSEAVRQYADAVMLSAESAIGAYPQKALSVLRAASERMESWSREENMQKLLPRHQLAIALPDRISEQICSCAVEMANNLAVDAIFVYTKHGHMASLLSRNRPNPPIFAFTDNANSRKSMNLYWGVIPLHLPLSNSMEDNFNKTISLMRSKGSVKPGDTVLVVSDSDLNQPCAATSVFQSIQVRLVE

SEQ ID NO: 633 - DNA, 1548 bp, Zea mays
  CDS (1)..(1548)
atggcgaacatcgacatggcgaagatcctggcggacctggaccgcggcgccagcggcggcgacgcgcgggtgcccaagaccaagctagtctgcacgctcggcccggcctcccgcaccgtgcccatgctcgagaagctgctccgcgccggcatgaacgtcgcgcgcttcaacttctcccacggcacccacgagtaccaccaggagacgctcgacaacctccgccaggccatgcacaacaccggcatcctctgcgccgtcatgctcgacaccaagggtcctgagatccgtacagggtttttgaaggatggtaaaccaattaagctaaccaagggtcaagaaatcactgtcaccactgattatgatatcaagggtgacgaaaatatgattgctatgagttacaagaaactgcctgttgacgtgaagcctggaaatgtcatactctgcgcagatggtactatctctctggccgttctatcttgtgatcctgatgctggaactgtgaggtgtagatgcgagaacactgcaatgcttggtgagagaaagaactgcaatctgccaggaattgttgtggatcttcctacattgactgagaaagataaagaagacattttgggctggggtgttccaaatgatattgacatgattgctctatcctttgtccgtaaaggatcagatttggtgactgtgagacaggttcttgggcagcatgccaagcgcattaagttgatgtcaaaggttgaaaaccaagagggtgttgtaaactttgatgagatcttgagggagactgatgcttttatggttgctagaggtgatcttggaatggagattcctgttgagaagattttccttgcgcagaagatgatgatctacaagtgcaacattgctggcaaacctgttgttaccgctacccagatgctcgaatcgatgatcaaatcccctaggccaacccgcgcagaggccactgacgttgcaaatgctgttcttgatggaactgactgtgtcatgctcagtggtgaaagtgctgctggagcctaccccgaggtggctgtgaagatcatggctcgtatctgcatcgaggcagagtcttccctggaccacgaggcagttttcaaggccatgatcaggtccgcgcctcttccaatgagccctctggagtctcttgcgtcatctgctgtgcgaactgccaacaaggccaaggccgcactgatcgtcgtcttgactcgcggtggcaccacggccaagctggtcgccaagtaccgccccagggttcccatcctctctgttgtggtacccgtgctaacgacggattctttcgactggaccatcagctccgagggcccagccaggcacagcctgatctatagaggcctcattcccctcctcgctgagggctccgcgaaggctacggattcagagtcaaccgaggtgatcctggaggctgcgctcaagtcggccgtgcagaagcaactttgcaagcctggtgatgccattgtggctctccatcgtatcggcgtcgcctccgtcatcaagatctgcatcgtgaagtga

SEQ ID NO: 634 - protein, 515 aa, Zea mays
MANIDMAKILADLDRGASGGDARVPKTKLVCTLGPASRTVPMLEKLLRAGMNVARFNFSHGTHEYHQETLDNLRQAMHNTGILCAVMLDTKGPEIRTGFLKDGKPIKLTKGQEITVTTDYDIKGDENMIAMSYKKLPVDVKPGNVILCADGTISLAVLSCDPDAGTVRCRCENTAMLGERKNCNLPGIVVDLPTLTEKDKEDILGWGVPNDIDMIALSFVRKGSDLVTVRQVLGQHAKRIKLMSKVENQEGVVNFDEILRETDAFMVARGDLGMEIPVEKIFLAQKMMIYKCNIAGKPVVTATQMLESMIKSPRPTRAEATDVANAVLDGTDCVMLSGESAAGAYPEVAVKIMARICIEAESSLDHEAVFKAMIRSAPLPMSPLESLASSAVRTANKAKAALIVVLTRGGTTAKLVAKYRPRVPILSVVVPVLTTDSFDWTISSEGPARHSLIYRGLIPLLAEGSAKATDSESTEVILEAALKSAVQKQLCKPGDAIVALHRIGVASVIKICIVK

SEQ ID NO: 635 - DNA, 1542 bp, Zea mays
  CDS (1)..(1542)
atggcgaacatcgacatggcgaagatcctggcggactggacgcggcccaggggcgacgcgcgggtgcccaagaccaagctagtctgcacgctcggcccggcctcccgcaccgtgcccatgctcgagaagctgctccgcgccggcatgaacgtcgcgcgcttcaacttctcccacggcacccacgagtaccaccaggagacgctcgacaacctccgccaggccatgcacaacaccggcatcctctgcgccgtcatgctcgacaccaagggtcctgagatccgtacagggtttttgaaggatggtaaaccaattaagctaaccaagggtcaagaaatcactgtcaccactgattatgatatcaagggtgacgaaaatatgattgctatgagttacaagaaactgcctgttgacgtgaagcctggaaatgtcatactctgcgcagatggtactatctctctggccgttctatcttgtgatcctgatgctggaactgtgaggtgtagatgcgagaacactgcaatgcttggtgagagaaagaactgcaatctgccaggaattgttgtggatcttcctacattgactgagaaagataaagaagacattttgggctggggtgttccaaatgatattgacatgattgctctatcctttgtccgtaaaggatcagatttggtgactgtgagacaggttcttgggcagcatgccaagcgcattaagttgatgtcaaaggttgaaaaccaagagggtgttgtaaactttgatgagatcttgagggagactgatgcttttatggttgctagaggtgatcttggaatggagattcctgttgagaagattttccttgcgcagaagatgatgatctacaagtgcaacattgctggcaaacctgttgttactgctacccagatgctcgaatcgatgatcaaatctcctaggccaacccgtgcagaggccactgacgttgcaaatgctgttcttgatggaactgactgtgtcatgctcagtggtgaaagtgctgctggagcctaccccgaggtggctgtgaagatcatggctcgtatctgcatcgaggcagagtcttccctggaccacgaggcagttttcaaggccatgatcaggtccgcgcctcttccaatgagccctctggagtctcttgcgtcatctgctgtgcgaactgccaacaaggccaaggccgcactgatcgtcgtcttgactcgcggtggcaccacggccaagctggtcgccaagtaccgccccagggttcccatcctctctgttgtggtacccgtgctaacgacggattctttcgactggaccatcagctccgagggcccagccaggcacagcctgatctatagaggcctcattcccctcctcgctgagggctccgcgaaggctacggattcagagtctacggaggtgatcctggaggctgcgctcaagtcggccgtgcagaagcaactttgcaagcctggtgatgccattgtggctctccatcgtatcggcgtcgcctccgtcatcaagatctgcatcgtgaagtga

SEQ ID NO: 636 - protein, 513 aa, Zea mays
MANIDMAKILADWTRPRGDARVPKTKLVCTLGPASRTVPMLEKLLRAGMNVARFNFSHGTHEYHQETLDNLRQAMHNTGILCAVMLDTKGPEIRTGFLKDGKPIKLTKGQEITVTTDYDIKGDENMIAMSYKKLPVDVKPGNVILCADGTISLAVLSCDPDAGTVRCRCENTAMLGERKNCNLPGIVVDLPTLTEKDKEDILGWGVPNDIDMIALSFVRKGSDLVTVRQVLGQHAKRIKLMSKVENQEGVVNFDEILRETDAFMVARGDLGMEIPVEKIFLAQKMMIYKCNIAGKPVVTATQMLESMIKSPRPTRAEATDVANAVLDGTDCVMLSGESAAGAYPEVAVKIMARICIEAESSLDHEAVFKAMIRSAPLPMSPLESLASSAVRTANKAKAALIVVLTRGGTTAKLVAKYRPRVPILSVVVPVLTTDSFDWTISSEGPARHSLIYRGLIPLLAEGSAKATDSESTEVILEAALKSAVQKQLCKPGDAIVALHRIGVASVIKICIVK

SEQ ID NO: 637 - DNA, 1530 bp, Zea mays
  CDS (1)..(1530)
atggcggcgggcggtgagttggcgtggggggaggagcccgtggcgcggcgccggcctaagaccaagatcgtctgcacgctcggcccggcgtcgcgatccgtcgagatgatctcgcgcctgctgcgcgccgggatgtgcgtcgcgcgcttcaacttctcccatggctcccacgagtaccaccaggagacgctcgacaacctgcacgccgccatggagctcaccgggatcctctgcgccgttatgctcgacaccaagggtccagagattagaactggatttttgaaagatgggaagcctattcaattgataaaaggccaagaaatcacaatttctacagactatagcattcagggtgatgagaaaatgatatcaatgagctacaagaagcttgctgttgatctgaagccaggcagtgtcatattgtgtgctgatggtaccatcactcttactgttcttcactgtgataaagaacaaggcttggttcgctgccgctgtgagaacactttcaagcttggcgagaggaagaatgttaatcttccaggagttattgttgatctccccacactcacagacaaggacaaggaggacatccttaaatggggtgttccaaacaagattgacatgattgccttgtcatttgttcggaagggttcggatcttgtggaggttaggaaggtacttggtgagcatgccaagtccataatgctgatgtcaaaggttgagaatcaagagggagtagctaactttgatgatatcctggcaaactctgatgcttttatggtggcaagaggtgatttaggaatggaaattcctatagagaagattttctttgcacagaaggtgatgattttcaagtgcaatattcaaggcaagcctgttgtgactgcaacccagatgttggaatctatgatcaagtctcctcgccctactcgggcagaagcaacggatgttgcaaacgcagttcttgatggcacagactgtgttatgctcagtggtgagactgctgctggggcttatccagagttggcggtgcagactatggctaagatctgcctgcaagcagagtcttgcgtagaccatgctgctattttcaaatcaatcatggcttcagctccaattccaatgagtccattggagagccttgcatcatcagctgttcgcacagcaaactctgccagggcagcacttatcttggtcctgaccaggggaggaactactgctaggcttgtagccaagtataggccatccatgccgattctgtccgttgtggttcctgagctgaagacagactcgttcgactgggcctgcagtgacgagggtccggcaaggcacagcctcattgtgaggggtgtcatcccaatgctgagtgccgccactgccaaggcctttgacaacgaagccactgacgaagctattggttttgccattgaaaatgcgaagacgatggggctatgcaacaccgatcaatccgttgtggccctgcaccgcatcgggatttcatccgtcatcaagcttcttactgtgaagtag

SEQ ID NO: 638 - protein, 509 aa, Zea mays
MAAGGELAWGEEPVARRRPKTKIVCTLGPASRSVEMISRLLRAGMCVARFNFSHGSHEYHQETLDNLHAAMELTGILCAVMLDTKGPEIRTGFLKDGKPIQLIKGQEITISTDYSIQGDEKMISMSYKKLAVDLKPGSVILCADGTITLTVLHCDKEQGLVRCRCENTFKLGERKNVNLPGVIVDLPTLTDKDKEDILKWGVPNKIDMIALSFVRKGSDLVEVRKVLGEHAKSIMLMSKVENQEGVANFDDILANSDAFMVARGDLGMEIPIEKIFFAQKVMIFKCNIQGKPVVTATQMLESMIKSPRPTRAEATDVANAVLDGTDCVMLSGETAAGAYPELAVQTMAKICLQAESCVDHAAIFKSIMASAPIPMSPLESLASSAVRTANSARAALILVLTRGGTTARLVAKYRPSMPILSVVVPELKTDSFDWACSDEGPARHSLIVRGVIPMLSAATAKAFDNEATDEAIGFAIENAKTMGLCNTDQSVVALHRIGISSVIKLLTVK

SEQ ID NO: 639 - DNA, 1707 bp, Zea mays
  CDS (1)..(1707)
atggcggcagcggcggagatcggtggtttcgcggcggcgagagtggcggtggcgacgctcaggccggctgcgcacccagccccggcggcggcaccgcagcagcctaggagggcggtggcggcgcagtcgctgcggacgaccgccaccgaggcgctgacggcggatctcgccggcacgaccaacggcgctgtgcatgctcggatgaatagtaaggctacaagtgaaatcacttcacaggcagttactgcaaattctaggagaaagacaaagatagtctgcaccataggtccctcaaccaacactcgtgagatgatttggaagcttgcagagactggaatgaatgtagcacgccttaatatgtcccatggtgaccaccagtcgcaccagaaggttattgatttggtcaaggagtacaatgcacagaacactgatggcaatgttattgccattatgctggacacaaagggtcctgaagttagaagtggggatgttccagagccaatcatgctcaaggaaggtcaagagttcaacttcacgattaaaagaggggtgagcactgaagacactgtcagcgtgaactatgatgacttcataaatgatgttgaagctggcgacatactattagtggatggaggaatgatgtcgcttgctgtgaagtctaaaacaaccgatacagtcaagtgtaaagtagttgatggtggggaattgaaatcacggcgccacctaaatgtccgtggaaagagtgctactttgccatctatcactgagaaggattgggaagacataaaatttggtgtcgaaaacggtgttgatttctatgcagtttcctttgtgaaggatgccaaagttatccatgaattaaaagactaccttaaaagtgctaatgccgatatacatgtcattccaaaaattgaaagtgcagattcaataccaaacctgcagtccattattgctgcttcagatggggcaatggtggcgcgtggagaccttggtgctgaacttccgattgaggatgttcctttgctacaggcagagattgtccaaacatgtcgaagtatggagaaaccagtcattgtcgctacaaatatgttggaaagcatgattgaccatcctactcccactagggcagaagtttctgacatagctattgcagttcgggaaggtgctgatgccatcatgttatctggcgaaactgctcatggaaagtatccactaaaggcagtcaaggtgatgcacactgtggcactcagaacagaatccagcctttataacccaactacttctcctagtcttgttgcatctgcacagggtctacagaatgaggacttctccccaagccagctaagtaaaatgttcggatctcatgcaacgatgatggccaacacccttcgcacaccaatcattgtatttacacagacaggctccatggctgtcctcctgagccattatcgtccctcgtctacactatttgcatttacaaacgaggaacgagtgaagcaacggctagcactctaccagggcgtcatccctattcacatgcagttctctgacgacgcagaagaaactttctccagagcaattagcagcttgctgaaagcacaatatgtgaagaagggagactacgtcactcttgttcagagcggagtgacttcaatctggagagaggaatccactcaccacatccaagtgaggaaagttcaggtctga

SEQ ID NO: 640 - protein, 568 aa, Zea mays
MAAAAEIGGFAAARVAVATLRPAAHPAPAAAPQQPRRAVAAQSLRTTATEALTADLAGTTNGAVHARMNSKATSEITSQAVTANSRRKTKIVCTIGPSTNTREMIWKLAETGMNVARLNMSHGDHQSHQKVIDLVKEYNAQNTDGNVIAIMLDTKGPEVRSGDVPEPIMLKEGQEFNFTIKRGVSTEDTVSVNYDDFINDVEAGDILLVDGGMMSLAVKSKTTDTVKCKVVDGGELKSRRHLNVRGKSATLPSITEKDWEDIKFGVENGVDFYAVSFVKDAKVIHELKDYLKSANADIHVIPKIESADSIPNLQSIIAASDGAMVARGDLGAELPIEDVPLLQAEIVQTCRSMEKPVIVATNMLESMIDHPTPTRAEVSDIAIAVREGADAIMLSGETAHGKYPLKAVKVMHTVALRTESSLYNPTTSPSLVASAQGLQNEDFSPSQLSKMFGSHATMMANTLRTPIIVFTQTGSMAVLLSHYRPSSTLFAFTNEERVKQRLALYQGVIPIHMQFSDDAEETFSRAISSLLKAQYVKKGDYVTLVQSGVTSIWREESTHHIQVRKVQV

SEQ ID NO: 641 - DNA, 1584 bp, Zea mays
  CDS (1)..(1584)
atgctttcgaccaacctgctgctggaggagcccatccggagggcctccatcctggagccatccaagaccagcttcttcccggcgaagaccaagatcgtcggcacgctcggccccaagtcgcgctccgtcgacaccatctcctcctgcctcaaggccggcatgtccgtcgcgcggttcgatttctcgtggggagacgccgcctaccaccaggagacgctcgagaacctcaagctcgccatcaagtccaccaagaagctgtgcgctgttatgctcgacacggttggaccggagctgcaggtggtcaacaagagtgaaacccccatctccctcgaggagaacgggactgtcgtgctcacgccgcatcagggccaagaagcctcctccaccttgctgcccatcaacttcgatggactcgccaaggctttgacaccaggtgcaacgatatttgtgggccaatacttgttcactggtagcgagactacttcagtttggttggaggtttctgaagttaaaggagatgatgtggtttgtatcatcaagaacacagctaccttggctgggtcgctcttcacgcagcattgttcccagattcatattgacttgcccacgctgtctgatgaggataaggatgttatcaaaaaatggggtgctccaaataagattgacttcctctctctgtcttacacaagacatgcagaagatgtgcggcaggcacgtgagttcctctcgaaattgggtgatcttagccaaactcagatctttgccaaaattgagaatgttgagggcttgaaccattttgatgaaatactggcagaggcagatggtatcattctgtcaagaggaaaccttggaattgaccttccacctgagaaggtctttttgtttcaaaagtctgcgcttcacaagtgcaacatggctggaaagcctgctgttgttactcgtgtcgtggacagcatgactgacaacctcagacctactcgcgcagaggcaactgatgtggcaaatgcagttcttgatgggagtgacgccattctccttggtgctgagactctccgtggtttatatccggtggagactatttcaacagtgggcagaatttgtgctgaggctgagaaggtattcaaccaagatttatactacaagcggactgtgaagtatgtgggagaacctatgacccacttggagtctattgcttcttcagcagtgcgagctgcaatcaaagttaaggcatcagtcatcatttgcttcacctcttctggacgagctgcaaggctcattgctaagtacaggcccagcatgcctgttttgtctgttgtcattcctcgtctaaagacaaaccaactgaggtggagtttcacaggtgtttttgaggcaagacaatcactcatagttagaggcctcttccctatgcttgctgatccacgacacccagctgaatctaccagtgctacaaatgagtctgtgttgaaggttgctcttgaccatggcaaagcctcgggcgtgatcaagtcccacgaccgcgtcgtcgtttgccagaaagtgggtgattcctctgtggtgaagatcattgagctggatgattag

SEQ ID NO: 642 - protein, 527 aa, Zea mays
MLSTNLLLEEPIRRASILEPSKTSFFPAKTKIVGTLGPKSRSVDTISSCLKAGMSVARFDFSWGDAAYHQETLENLKLAIKSTKKLCAVMLDTVGPELQVVNKSETPISLEENGTVVLTPHQGQEASSTLLPINFDGLAKALTPGATIFVGQYLFTGSETTSVWLEVSEVKGDDVVCIIKNTATLAGSLFTQHCSQIHIDLPTLSDEDKDVIKKWGAPNKIDFLSLSYTRHAEDVRQAREFLSKLGDLSQTQIFAKIENVEGLNHFDEILAEADGIILSRGNLGIDLPPEKVFLFQKSALHKCNMAGKPAVVTRVVDSMTDNLRPTRAEATDVANAVLDGSDAILLGAETLRGLYPVETISTVGRICAEAEKVFNQDLYYKRTVKYVGEPMTHLESIASSAVRAAIKVKASVIICFTSSGRAARLIAKYRPSMPVLSVVIPRLKTNQLRWSFTGVFEARQSLIVRGLFPMLADPRHPAESTSATNESVLKVALDHGKASGVIKSHDRVVVCQKVGDSSVVKIIELDD

SEQ ID NO: 643 - DNA, 1554 bp, Zea mays
  CDS (1)..(1554)
atgcagggcgccagccacatgctcctggaggagcccttccgcctcgcctccgtcctctcccccgccaagcctaaagtattcccatcactcaccaagatagttgggacgctcgggcccaattcacactcggttgagattattcaggaatgcctcactgctggaatgtcagttgcacggtttgatttctcatggatggatgctgcgtatcaccaggagacccttgataatttgaggaaagcggcacagaatgtgaagaagttgtgccctgtaatgttggatactcttggtccagaaattcaggttcacaattccactggtgagccaattgagttgaaagctgggaatcatgttatcataactccagatatttgtaaagctctctctgctgagatcctaccaattaagtttggtgatcttgcaaaagctgtgaagaagggtgatactctttttatgggccaatatctcttcacaggaagtgaaacaacatctgtctggctagaagttgtggaaacttctggggaaaatgtaaattgtctagtgaagaatgcagctacacttgacggccccatattcactctgcatgcttcacaagttcacatcaatttgcccactttgagtgaatatgataaacatgtcatttcaacttggggttcatgtaacagtgttgacattatatcactttcccatacccgctctgctgaagatgtcagggagctcagggcctttttacaagcacacgcccttcccgacacacaaatatacgcgaagattgaaaattcagagggtttggatcattttgatgacattctcaacgcggcagatggtatcattatttctcgaggagacctgggtattgaccttcctccagaaaacgttttcatgttccaaaagacagctattcataaatgcaatttggagggtaaacctgtgatcatcactagagttgtggacagcatgattgacaatctacgccctacccgtgcagaggcaactgatgttgcaaatgctgtcctagatggcactgatggcattttgcttggtgcggagacacttcgagggctttatcctgttgatgcagctgagactgtgtataatcagccgcttcaattcaagaaagtaatgtggcatgtaggtgacccaatgccccacgaggaatctgtggcatcagcagcggttggttctgcaatcaaagtaaaagctgctgccattgttgtgttcacattctcagggagagctgcgaggttagttgccaagtataggccaacaatgccaattttagcagttatcttcccacgtgaaggatccgatccatcaaagtggcgttcttatggcacaacacaggcgagacaatgtttcgcagtgagaggcgtgtaccctttgatggggagtactgatgaggccgaaactggtgggctaacaaaggaagagtatgggataaaacttgcgatgagctatggtcggtcggtcggcatagtgaagcctttcgacagggtgataatctttgaaaagattggtgattcttctgttgtcaagatcattgagtgtgaaggttag

SEQ ID NO: 644 - protein, 517 aa, Zea mays
MQGASHMLLEEPFRLASVLSPAKPKVFPSLTKIVGTLGPNSHSVEIIQECLTAGMSVARFDFSWMDAAYHQETLDNLRKAAQNVKKLCPVMLDTLGPEIQVHNSTGEPIELKAGNHVIITPDICKALSAEILPIKFGDLAKAVKKGDTLFMGQYLFTGSETTSVWLEVVETSGENVNCLVKNAATLDGPIFTLHASQVHINLPTLSEYDKHVISTWGSCNSVDIISLSHTRSAEDVRELRAFLQAHALPDTQIYAKIENSEGLDHFDDILNAADGIIISRGDLGIDLPPENVFMFQKTAIHKCNLEGKPVIITRVVDSMIDNLRPTRAEATDVANAVLDGTDGILLGAETLRGLYPVDAAETVYNQPLQFKKVMWHVGDPMPHEESVASAAVGSAIKVKAAAIVVFTFSGRAARLVAKYRPTMPILAVIFPREGSDPSKWRSYGTTQARQCFAVRGVYPLMGSTDEAETGGLTKEEYGIKLAMSYGRSVGIVKPFDRVIIFEKIGDSSVVKIIECEG

SEQ ID NO: 645 - DNA, 1707 bp, Zea mays
  CDS (1)..(1707)
atggccagcgccgcccactcccttctgcacacaccggaggcccacagggccgccacccgctcgcccttctctcctcccgcgcccactcccttcctccatctccgccctcaccgcctccccctccgcctccgctccacctccccgaccgcctccgacctcaccgccttccccccgaacccgaacgggatctttgcgtccgaccggcccatcgacgtggacgccgccacggaggccgagctgcgggagaacgggttccggagcacgcgccgcaccaagctcgtctgcaccgtgggccccgccacctcgcgcccggaccagctcgaggcgctcgccgtcggcgggatgaacgtggcccggctcaacatgtgccacggcgacagggagtggcatagggccgccatccgcgccgtcaggagcctcaacgaggagaagggcttcgccgtcgccgtcatgatggacaccgagggcagcgagatccacatgggggacctcggcggcgcatcctcggtcaaggcggaggatggagaagtatggacgttcagtgttagatcatttgaattgcctctcccagaacgaactattaatgtgaactatgatggatttgctgaagatgtgagagttggtgatgagctccttgtggatggtggaatggctcggtttgaggtgattgagaagataggaccagatgttaagtgccgttgcacagatcctggtttattgttgccacgtgccaatcttacattctggcgtgacggcagtatcgtccgtgagaggaatgctatgcttcctacaatttcatcaaaggattggcttgacatagactttgggattgccgaaggtgtagatttcatcgctgtttcatttgtcaagtctgcagaagtaattaggcacttgaaaagctacatagctgcaaggagccgtggaagtgacatggcagtcattgcgaaaatcgagagcatcgactctctaaagaacctggaggagatcatccgagcgtcagacggcgccatggtagccagaggggacatgggggcgcaggttcccctggagcaggtcccctcgatacagcaaaagatcgttcagctctgcaggcagctgaacaagccggtcatcgtcgcctcccagctcctcgagtcgatgatagagtaccccacgcccaccagggccgaggtcgcggacgtctccgaagccgtccgccagcgcgccgacgccctgatgctttccggcgagtcggcaatggggaggtacccggacaaggccctcagcgttctgaggagcgtcagcctgaggatcgagaagtggtggagggaggagaagcggcacgaggcgctggagctccggagcgtctcgtcctccttctccgacaagatatcggaggagatctgcaactcagcagctaaaatggctaatggcctgggagtggacgccgtctttgtgttcaccaagaccgggcacatggcctccctgctctcgcggtgccgccccgactgcccggtcttcgccttcacgacgtcgacgtccgtcaggaggcggctgaacctgcagtggggcctgatccccttccgcctcgccttctcggacgacatggagagcaacctgaaccgcaccttctccctgctcaaggccaggggcatgatccagtctggggacctcgtgatcgccctctcggacatgctgcagtccatccaggtgatgaacgtaccctga

SEQ ID NO: 646 - protein, 568 aa, Zea mays
MASAAHSLLHTPEAHRAATRSPFSPPAPTPFLHLRPHRLPLRLRSTSPTASDLTAFPPNPNGIFASDRPIDVDAATEAELRENGFRSTRRTKLVCTVGPATSRPDQLEALAVGGMNVARLNMCHGDREWHRAAIRAVRSLNEEKGFAVAVMMDTEGSEIHMGDLGGASSVKAEDGEVWTFSVRSFELPLPERTINVNYDGFAEDVRVGDELLVDGGMARFEVIEKIGPDVKCRCTDPGLLLPRANLTFWRDGSIVRERNAMLPTISSKDWLDIDFGIAEGVDFIAVSFVKSAEVIRHLKSYIAARSRGSDMAVIAKIESIDSLKNLEEIIRASDGAMVARGDMGAQVPLEQVPSIQQKIVQLCRQLNKPVIVASQLLESMIEYPTPTRAEVADVSEAVRQRADALMLSGESAMGRYPDKALSVLRSVSLRIEKWWREEKRHEALELRSVSSSFSDKISEEICNSAAKMANGLGVDAVFVFTKTGHMASLLSRCRPDCPVFAFTTSTSVRRRLNLQWGLIPFRLAFSDDMESNLNRTFSLLKARGMIQSGDLVIALSDMLQSIQVMNVP

SEQ ID NO: 647 - DNA, 1728 bp, Zea mays
  CDS (1)..(1728)
atggcggcgcaggtggtcgcagcggcgggcaccccggtggccaggccgctgggcggtggatctggggccgacgcgctccggcccgcggcgaggatgccaagggagagaaggaccggtgctgtggccgcgagaggacgccgcgagtctcaggtggtatccgtcataagccgcgccccacgccccgatgccggggtgctgccggtgtcgcccgacgacgacgcggccgtaaaggaagaagcaaacttccagcaccttaaggctatccagcaacttgcaactgcagcaaatggcgtgtggtctaaaccaaatgtaaggcgcaagacaaagattgtgtgtacaatcggtccttcaaccaacacaagggacatgatatggaaactcgctgagactggcatgaatgtggctcggcttaatatgtcacatggagaccatgcatcacaccagaaagttattgatctggtaaaggagtacaatgcatcacatgctgacaatgtgattgctatcatgcttgacacaaagggaccagaagttcgaagtggagatttgcctcaaccgatatttctggaaagcggacaagaatttacttttacaatcaaaaggggagttgggactgatacgtgtgttagcgttaactatgacgactttgttaatgatgttgaagtgggcgacatgctccttgtagatggaggaatgatgtcattcttggtcaaatcaaaaactgaagattctgtgaaatgtgaagttattgacggtggtgaattgaaatctaggcgccatctgaatgttcgtggaaagagtgcaaccttgccatcaataactgacaaggactgggacgacattaagtttggtgtggataatcaagttgattactatgctgtttcttttgtgaaggatgctcaagttgtccacgaactcaaggattatctaaaaagttgcaatgctgacatacatgttatcgtaaaaatagaaagtgcagactccatccccaacttacattcaatcatcacagcatctgatggggctatggttgccaggggtgaccttggagctgagctgcccattgaggaggtgccgctgttgcaggaagaaattattagaatgtgcaggagcatggggaaggctgttattgttgctacaaatatgctcgaaagtatgattgttcatccaactccaacccgagcagaagtttcagacattgctatagctgtccgagagggtgctgatgcagttatgctttcaggagaaactgcacatgggaaatttcccttgaaagctgttaaggtcatgcacactgttgccctgagaaccgaggcaactattcctggtggggaaacacctgcagaccttggtcaggctttcaagaaccacatgagcgaaatgttcgcataccatgcaacaatgatgtcaaatacccttcgaacatcaatagtggttttcactaggacgggatttatggctatactgcttagtcactaccgtccatctggcactatttttgcctttacagatgaggagagggttaggcaacgattggctttgtaccaaggtgtatgtccggttcaaatggaattttctgatgatgctgagaagacatttggcaatgctttgtcttatttgctgaaacatggtatggttaaggacggtgaggaggttgcgctcgttcaaagtggtaaacatcccatctggagatcacaatcaacacacaacattcaggtgaggaagatctga

SEQ ID NO: 648 - protein, 575 aa, Zea mays
MAAQVVAAAGTPVARPLGGGSGADALRPAARMPRERRTGAVAARGRRESQVVSVISRAPRPDAGVLPVSPDDDAAVKEEANFQHLKAIQQLATAANGVWSKPNVRRKTKIVCTIGPSTNTRDMIWKLAETGMNVARLNMSHGDHASHQKVIDLVKEYNASHADNVIAIMLDTKGPEVRSGDLPQPIFLESGQEFTFTIKRGVGTDTCVSVNYDDFVNDVEVGDMLLVDGGMMSFLVKSKTEDSVKCEVIDGGELKSRRHLNVRGKSATLPSITDKDWDDIKFGVDNQVDYYAVSFVKDAQVVHELKDYLKSCNADIHVIVKIESADSIPNLHSIITASDGAMVARGDLGAELPIEEVPLLQEEIIRMCRSMGKAVIVATNMLESMIVHPTPTRAEVSDIAIAVREGADAVMLSGETAHGKFPLKAVKVMHTVALRTEATIPGGETPADLGQAFKNHMSEMFAYHATMMSNTLRTSIVVFTRTGFMAILLSHYRPSGTIFAFTDEERVRQRLALYQGVCPVQMEFSDDAEKTFGNALSYLLKHGMVKDGEEVALVQSGKHPIWRSQSTHNIQVRKI

SEQ ID NO: 649 - DNA, 20 bp, Artificial sequence
  primer
atggcgatgatagagcaaag

SEQ ID NO: 650 - DNA, 22 bp, Artificial sequence
  primer
tcacttgacggtcaagatcttg

SEQ ID NO: 651 - protein, 571 aa, Artificial sequence
  consensus sequence
  Variant (4)..(5): Xaa in position 4 to 5 is any amino acid
  Variant (7)..(7): Xaa in position 7 is any amino acid
  Variant (10)..(20): Xaa in position 10 to 20 is any amino acid
  Variant (21)..(44): Xaa in position 21 to 44 is any or no amino acid
  Variant (46)..(49): Xaa in position 46 to 49 is any amino acid
  Variant (50)..(50): Xaa in position 50 is any or no amino acid
  Variant (52)..(52): Xaa in position 52 is any amino acid
  Variant (58)..(58): Xaa in position 58 is any amino acid
  Variant (59)..(61): Xaa in position 59 to 61 is any or no amino acid
  Variant (63)..(80): Xaa in position 63 to 80 is any amino acid
  Variant (81)..(90): Xaa in position 81 to 90 is any or no amino acid
  Variant (92)..(93): Xaa in position 92 to 93 is any amino acid
  Variant (94)..(116): Xaa in position 94 to 116 is any or no amino acid
  Variant (119)..(120): Xaa in position 119 to 120 is any amino acid
  Variant (122)..(132): Xaa in position 122 to 132 is any amino acid
  Variant (133)..(140): Xaa in position 133 to 140 is any or no amino acid
  Variant (142)..(161): Xaa in position 142 to 161 is any amino acid
  Variant (162)..(178): Xaa in position 162 to 178 is any or no amino acid
  Variant (180)..(186): Xaa in position 180 to 186 is any amino acid
  Variant (187)..(191): Xaa in position 187 to 191 is any or no amino acid
  Variant (193)..(196): Xaa in position 193 to 196 is any amino acid
  Variant (197)..(197): Xaa in position 197 is any or no amino acid
  Variant (199)..(218): Xaa in position 199 to 218 is any amino acid
  Variant (219)..(226): Xaa in position 219 to 226 is any or no amino acid
  Variant (228)..(230): Xaa in position 228 to 230 is any amino acid
  Variant (231)..(242): Xaa in position 231 to 242 is any or no amino acid
  Variant (244)..(246): Xaa in position 244 to 246 is any amino acid
  Variant (247)..(247): Xaa in position 247 is any or no amino acid
  Variant (250)..(251): Xaa in position 250 to 251 is any amino acid
  Variant (253)..(261): Xaa in position 253 to 261 is any amino acid
  Variant (262)..(262): Xaa in position 262 is any or no amino acid
  Variant (264)..(267): Xaa in position 264 to 267 is any amino acid
  Variant (270)..(274): Xaa in position 270 to 274 is any amino acid
  Variant (276)..(290): Xaa in position 276 to 290 is any amino acid
  Variant (291)..(299): Xaa in position 291 to 299 is any or no amino acid
  Variant (301)..(301): Xaa in position 301 is any amino acid
  Variant (303)..(312): Xaa in position 303 to 312 is any amino acid
  Variant (313)..(315): Xaa in position 313 to 315 is any or no amino acid
  Variant (317)..(320): Xaa in position 317 to 320 is any amino acid
  Variant (322)..(323): Xaa in position 322 to 323 is any amino acid
  Variant (325)..(325): Xaa in position 325 is any amino acid
  Variant (332)..(332): Xaa in position 332 is any amino acid
  Variant (334)..(342): Xaa in position 334 to 342 is any amino acid
  Variant (345)..(346): Xaa in position 345 to 346 is any amino acid
  Variant (348)..(354): Xaa in position 348 to 354 is any amino acid
  Variant (356)..(356): Xaa in position 356 is any amino acid
  Variant (358)..(358): Xaa in position 358 is any amino acid
  Variant (359)..(359): Xaa in position 359 is any or no amino acid
  Variant (362)..(362): Xaa in position 362 is any amino acid
  Variant (364)..(365): Xaa in position 364 to 365 is any amino acid
  Variant (368)..(370): Xaa in position 368 to 370 is any amino acid
  Variant (372)..(372): Xaa in position 372 is any amino acid
  Variant (378)..(379): Xaa in position 378 to 379 is any amino acid
  Variant (385)..(386): Xaa in position 385 to 386 is any amino acid
  Variant (389)..(389): Xaa in position 389 is any amino acid
  Variant (391)..(392): Xaa in position 391 to 392 is any amino acid
  Variant (396)..(396): Xaa in position 396 is any amino acid
  Variant (398)..(398): Xaa in position 398 is any amino acid
  Variant (400)..(400): Xaa in position 400 is any amino acid
  Variant (402)..(402): Xaa in position 402 is any amino acid
  Variant (405)..(408): Xaa in position 405 to 408 is any amino acid
  Variant (409)..(410): Xaa in position 409 to 410 is any or no amino acid
  Variant (412)..(418): Xaa in position 412 to 418 is any amino acid
  Variant (420)..(440): Xaa in position 420 to 440 is any amino acid
  Variant (441)..(468): Xaa in position 441 to 468 is any or no amino acid
  Variant (470)..(471): Xaa in position 470 to 471 is any amino acid
  Variant (472)..(472): Xaa in position 472 is any or no amino acid
  Variant (474)..(475): Xaa in position 474 to 475 is any amino acid
  Variant (477)..(478): Xaa in position 477 to 478 is any amino acid
  Variant (480)..(486): Xaa in position 480 to 486 is any amino acid
  Variant (488)..(490): Xaa in position 488 to 490 is any amino acid
  Variant (491)..(491): Xaa in position 491 is any or no amino acid
  Variant (493)..(509): Xaa in position 493 to 509 is any amino acid
  Variant (510)..(528): Xaa in position 510 to 528 is any or no amino acid
  Variant (530)..(531): Xaa in position 530 to 531 is any amino acid
  Variant (533)..(555): Xaa in position 533 to 555 is any amino acid
  Variant (556)..(570): Xaa in position 556 to 570 is any or no amino acid
TKIXXTXGPXXXXXXXXXXXXXXXXXXXXXXXXXXXXXXXXXXXGXXXXXRXNFSHGXXXXHXXXXXXXXXXXXXXXXXXXXXXXXXXXXDXXXXXXXXXXXXXXXXXXXXXXXXXGPXXRXXXXXXXXXXXXXXXXXXXGXXXXXXXXXXXXXXXXXXXXXXXXXXXXXXXXXXXXXGXXXXXXXXXXXXGXXXXXVXXXXXXXXXXXXXXXXXXXXXXXXXXXXNXXXXXXXXXXXXXXXPXXXXKDXXDXXXXXXXXXXDXXXXSFXXXXXDXXXXXXXXXXXXXXXXXXXXXXXXKXEXXXXXXXXXXXXXIXXXXDXXMXARGDLGXEXXXXXXXXXQKXXIXXXXXXXKXVXXATXMXXSMXXXPXPTRAEXXDVANAXXDGXDXXMLSXEXAXGXYPXXXXXXMXXXXXXXEXXXXXXXXXXXXXXXXXXXXXXXXXXXXXXXXXXXXXXXXXXXXXXXXXIXXXTXXGXXAXXXXXXXPXXXXIXXXXXXXXXXXXXXXXXXXXXXXXXXXXXXXXXXXXGXXPXXXXXXXXXXXXXXXXXXXXXXXXXXXXXXXXXXXXXXG

SEQ ID NO: 652 - protein, 42 aa, Artificial sequence
  protein pattern
  Variant (2)..(3): Xaa in position 2 to 3 is any amino acid
  Variant (4)..(6): Xaa in position 4 to 6 is any or no amino acid
  Variant (9)..(13): Xaa in position 9 to 13 is any amino acid
  Variant (14)..(14): Xaa in position 14 is Ala or Pro
  Variant (19)..(20): Xaa in position 19 to 20 is any amino acid
  Variant (22)..(22): Xaa in position 22 is Ile, Leu or Val
  Variant (23)..(23): Xaa in position 23 is Ala, Glu, Gly, Ser or Thr
  Variant (24)..(24): Xaa in position 24 is any amino acid
  Variant (26)..(26): Xaa in position 26 is Ile or Val
  Variant (27)..(27): Xaa in position 27 is any amino acid
  Variant (28)..(28): Xaa in position 28 is Ala, Asp, Glu or Gln
  Variant (29)..(29): Xaa in position 29 is any amino acid
  Variant (30)..(30): Xaa in position 30 is Ala, Gly, Ser or Thr
  Variant (32)..(33): Xaa in position 32 to 33 is any amino acid
  Variant (37)..(37): Xaa in position 37 is Ala, Glu, Gly, Asn or Ser
  Variant (39)..(39): Xaa in position 39 is Ser, Thr or Val
  Variant (40)..(40): Xaa in position 40 is Ala, Ser or Thr
  Variant (41)..(41): Xaa in position 41 is any amino acid
AXXXXXSMXXXXXXTRAEXXDXXXAXXXXXDXXMLSXEXXXG

SEQ ID NO: 653 - protein, 21 aa, Artificial sequence
  protein pattern
  Variant (2)..(5): Xaa in position 2 to 5 is any amino acid
  Variant (6)..(8): Xaa in position 6 to 8 is any or no amino acid
  Variant (10)..(10): Xaa in position 10 is Ala, Gly, Ser or Val
  Variant (11)..(11): Xaa in position 11 is any amino acid
  Variant (13)..(13): Xaa in position 13 is Ile or Val
  Variant (18)..(18): Xaa in position 18 is Leu or Met
  Variant (19)..(19): Xaa in position 19 is Ala or Gly
  Variant (20)..(20): Xaa in position 20 is any amino acid
  Variant (21)..(21): Xaa in position 21 is Glu or Gln
IXXXXXXXDXXMXARGDXXXX

SEQ ID NO: 654 - DNA, 2634 bp, Arabidopsis thaliana
  CDS (1)..(2634)
atggtaccatcagagccgcctaatcctgttgggggtggtgaaaatgttccgccttcgatattaggaggacaaggaggagctcctcttccttctcaaccagcatttccttcacttgtctctccgcgtactcagtttggtaacaatatgagtatgagtatgcttgggaatgctccaaatatatcttctcttctcaataatcagtcttttgtaaatggtatccctggttctatgatttctatggatacaagtggtgctgagtctgacccgatgtctaacgtcgggtttagtggtttgtcgtcttttaatgcgtcgagtatggtgtctccgcgctcatcaggtcaagttcagggtcagcagttttcgaatgtttcggctaaccagttgttggctgagcaacaacggaataagaaaatggagacgcagagttttcaacatggtcagcagcagtcaatgcagcagcagttttcgacagtgcgtggtggtggattagcaggtgtgggacctgttaagatggagcctggtcaggtttcgaatgatcagcagcatggtcaagtacaacagcagcaacagaaaatgttgagaaacctagggtcagttaagttggaaccgcagcaaattcaggccatgagaaatttggcccaagtgaaaatggaacctcaacattctgagcagtcattgtttctccaacaacagcagaggcaacaacagcaacaacaacaacaacaatttcttcaaatgccggggcaatctccgcaggctcaaatgaacatatttcagcagcagagacttatgcaacttcaacaacagcaactcttgaaatctatgcctcaacagcgtcctcaattaccacagcagttccaacagcagaatttacctctaaggccacctctgaaaccagtgtatgaacctggcatgggtgctcagcgtcttacacagtatatgtacagacaacaacataggcctgaagacaataatatcgagttctggagaaaatttgtagctgagtactttgctcctaatgccaaaaagagatggtgcgtctctatgtatggcagtggcaggcaaacaacaggcgttttccctcaggatgtgtggcactgtgagatatgtaaccgaaagcctggacgtggttttgaggcaaccgccgaagtccttccgcggctgtttaagattaagtatgagagtgggacgttagaagaactgttatatgtagatatgccaagggagtcccagaattcatctggccaaattgtcctggagtatgcaaaagcaacacaagagagtgtctttgagcatcttcgggttgttcgtgatggccaacttcgaatagtcttctcgccagatcttaagatattctcctgggaattttgtgctcggcggcatgaagagcttattccacgaagacttttgataccgcaggttagtcagcttggatcggcagctcagaaatatcaacaagctgctcaaaatgcaacaacagattctgctcttccggagctacaaaataattgcaatatgtttgttgcatctgctagacaattggcaaaggccctggaagtaccacttgtgaatgatttgggatacacaaagagatatgttcggtgtttgcagatctcagaggtggtaaatagtatgaaggacctgatagattatagcagagaaacacgaacaggaccaatcgagagtttagccaagtttcctcggagaacaggcccttcatctgcactgcctggtccttctcctcagcaagccagcgaccagcttaggcagcagcagcaacaacaacagcagcagcagcaacagcaacaacaacaacaacaacaacagcagcagcagcaaacagtttcccagaatacaaacagtgatcaaagtagtaggcaagttgcactaatgcagggtaatccaagcaatggtgtaaattatgcctttaatgcagcctctgcatccacttccaccagcagcatcgcagggctcatccaccagaattcaatgaagggaagacatcagaatgctgcttacaatcctccaaacagcccctatggaggaaactctgttcagatgcaatcacctagttcctcgggtaccatggtgccatcatcatcgcagcaacaacacaacctgccaacatttcagtctccaacatcctcatctaataacaataatccctctcaaaacgggataccatctgttaatcacatgggttccacaaactcaccagcaatgcaacaggcaggtgaggttgatggaaacgagtctagctcggtgcagaagatactgaatgaaatcctgatgaacaaccaagctcataataatagctcaggaggaagcatggttgggcatgggtctttcgggaatgatgggaagggtcaagctaatgtaaatagttctggtgttttactgatgaatggccaagtgaacaacaacaacaacacaaatattggaggtgctggtgggtttggtggtgggattggtcaatccatggcagcaaacggaatcaataatataaacggtaacaatagtctcatgaacggaagagttgggatgatggtgcgggatccaaacggtcaacaggatttaggaaaccaacttttaggagcagtgaatggtttcaacaattttgattggaacgcgtga

SEQ ID NO: 655 - protein, 877 aa, Arabidopsis thaliana
MVPSEPPNPVGGGENVPPSILGGQGGAPLPSQPAFPSLVSPRTQFGNNMSMSMLGNAPNISSLLNNQSFVNGIPGSMISMDTSGAESDPMSNVGFSGLSSFNASSMVSPRSSGQVQGQQFSNVSANQLLAEQQRNKKMETQSFQHGQQQSMQQQFSTVRGGGLAGVGPVKMEPGQVSNDQQHGQVQQQQQKMLRNLGSVKLEPQQIQAMRNLAQVKMEPQHSEQSLFLQQQQRQQQQQQQQQFLQMPGQSPQAQMNIFQQQRLMQLQQQQLLKSMPQQRPQLPQQFQQQNLPLRPPLKPVYEPGMGAQRLTQYMYRQQHRPEDNNIEFWRKFVAEYFAPNAKKRWCVSMYGSGRQTTGVFPQDVWHCEICNRKPGRGFEATAEVLPRLFKIKYESGTLEELLYVDMPRESQNSSGQIVLEYAKATQESVFEHLRVVRDGQLRIVFSPDLKIFSWEFCARRHEELIPRRLLIPQVSQLGSAAQKYQQAAQNATTDSALPELQNNCNMFVASARQLAKALEVPLVNDLGYTKRYVRCLQISEVVNSMKDLIDYSRETRTGPIESLAKFPRRTGPSSALPGPSPQQASDQLRQQQQQQQQQQQQQQQQQQQQQQQQTVSQNTNSDQSSRQVALMQGNPSNGVNYAFNAASASTSTSSIAGLIHQNSMKGRHQNAAYNPPNSPYGGNSVQMQSPSSSGTMVPSSSQQQHNLPTFQSPTSSSNNNNPSQNGIPSVNHMGSTNSPAMQQAGEVDGNESSSVQKILNEILMNNQAHNNSSGGSMVGHGSFGNDGKGQANVNSSGVLLMNGQVNNNNNTNIGGAGGFGGGIGQSMAANGINNINGNNSLMNGRVGMMVRDPNGQQDLGNQLLGAVNGFNNFDWNA

SEQ ID NO: 656 - DNA, 4012 bp, Oryza sativa
  CDS (768)..(3512)
ggttttttttttcgttttcttttttcttcctcgctttctctctctctctctcctcctctccctcttcttcttcttctctgccaaatcccatcgcgaaggcgagagagagagagagagaagaaaaagtgaggggattaacaaactcgcgagtttttcttttttttttttgtttattgtgtgaatttggcccacgtcggcggcggcggcggaggagctaaaccctagccggaggtgaggtggtggtggtggtggtcgggaagtggcggcgccggtggtggggcgggggggcgatttggcgcgcgcggccgagctccggatcgccggatttgtgcgtgagcgcgtggagtttgtggcggtgtgctcgtgttgctgttggtggtgaggtgtgaggtgaggtggggtggtgtggcttctgctgctgctgctactgctgctgctggtgcttaattttgctcgggttcgtggggttgggaagcgagggatgcgatctgggaggtgttcgggagctcggtgttgcttaattccggtgctggtttgcggtggtgcgcgcgcggcttcttctcggggtggatttggtggtggttttttttgttgccctcgttgttgcgggtggatttcggggggagggagagtttgagggatgactgctcgttcttgctcaattccggtggatcttacggtggaaggatggcgagctgagtaaaggcgcgcgatatcttgctgcggtttgtgcggagcttcggagcactttgtcattgctggcaaggatgatgccgtcggggccgctcaacccgatgggtcccgggcagccggtgggcgccgccgcctcgctgctccggacgagctcaagcctgcttagtggtggtcagcaggggatgggcagtggcggaggcatgattccttcgcagtcgcccttctcatcccttgtgtcgccgcgcacgcagtttggtgctaatggcctgctgggaggtggctccaatgtttcctccctgctcaaccggccgtttgggaatggtggacatatgctcggtccggggttgatgccaggtggtggtgggattccaatgaataccctccagcagcagagaggagggcttgatggtgctggcgatttggttggcgtgggaggttctgatcctctctcgtttccttcatcgtcgcaagttagtttgggcaatcagctgggttcagataatctgcatcaaccaccgcaacatcagcaacaacaacagcagctggatgctatgcacgacttgcagcagcagcagcatcatcagcaactgccgatgtcttacaaccaacaacatttgccaccgcaaccaccacagcagccacaggctacagtgaagttggagaatggtggcagcacaggtggggtcaaattggaaccgcagatggggcagcctgaccagaacagctcagcccagatgatgcgccatgctagcaatgttaaaattgagcctcagcagttgcaagctctaagaagtttgagtgcggtgaagatggagcagccgacttcagacccatcagcattcctgcaacagcaacagcagcagcaacatttgctgcagctgacaaagcagaaccctcaagctgctgcggctgctcaactgaaccttttgcaacagcaacggatattgcaaatgcagcagcaacagcagcaacaacaacaacagattctaaagaatctgcctttgcagagaaaccaattacaacagcagcagctacttcgccaacagagtctaaacatgagaactccaggaaagtcggccccttatgagcccggaacctgcgcaaagagattgacccattacatgtatcatcaacagaacaggccacaggataacaatattgagtactggagaaattttgtcaatgagtatttttctccaaatgctaaaaagaggtggtgtgtatctctctatggaagtggtcgccaaactactggagttttccctcaggatgtatggcattgtgagatatgcaatcggaagcctgggcgaggctttgagaccacagttgaggtgttaccacggttgtgccaaatcaaatatgccagtggtacattggaagaattactatatgtggacatgccacgtgaatcgcagaatgcctctggccagattgttttggactataccaaagctgtccaggaaagtgtattcgagcaattgcgtgtggtacgcgaaggacatctaaggatagtttttaatccagatctcaagatcgcgtcttgggagttttgtgctaggcgacacgaggaacttattccacggagatcaataataccacaggttagtcaactgggcgcagttgtgcaaaaataccaaagcgctgttcaaaattcgacaaatctgtcaactcaagacatgcagaataattgcaactcgtttgttgcatgtgcccgccaattggctaaagcactggaggtgccattggttaatgatctgggatacacaaaacgatatgtgcgctgccttcagattgcagaggtggtaaactgtatgaaagatttaattgattacagcagacaaaatggatctggaccaattgctagtttgcatagctttcctcggaggacttcatcaggggtcagccctcaccagtcacagcagcaacagcctgaagagcagcaatctataccgcagagttcaaaccaaagcggtcaaaatgctgctcccatgaccggtgtgcaggcttctgcctctgcaaatgcagatgtgacatcaaataattctctcagctgtgcaccctcaacgtctgcaccttcaccatccgttgttgggctcctccaaggttcaatgaactctagacaagatcatccaatgagcagtgctaatggtccatataccagtggaaacagtgctgcaattcccaaggtgaactcgacaacctcactgcagtcaaatccatctacctcttttccttcacccatgccaacaacatccaataacaacatgatgcctgcccctcagagcacaaaccaactcagctccccaaccacatcatcaaacctaccgccaatgcagccacctgctactcggcctcaggagcctgagccaaatgagtcccaaagctcggttcagagaatattgcaagatttgatgatgtcaccgcagatgaatggtattggccagcttgggaatgacatgaaaagaccgaacggacttacatctagtgttaacggagttaattgtttagttggtaatgctgttacaaataactcaggaatgggaggaatggggtttggggccatgggtgggctaggtccaaatcatgcagctagtggattgagaactgcaatggtgaacaatgcgatggcaatcagtggtaggatgggaatgaatcacagtgcacatgacctatcacagttgggccaactacagcagcaacagcaacatcaacagcagcagcagcagcagcaacatgacttaggaaaccaactgttgaatggacttagagcagcaaacagcttcaataaccttcagtatgactggaaaccatctcaataaagatagaacattacaagttcgacaacacggctgctctcattggcctcattgcttatgaagcatcagtaagagtgccaacacctcgaactgtgtcaaagcatttggcctttgcaataatgctgtcatggaaaaaggtcattcgcgacagcaagcatctgagcctgtcaactgtatgttgtaattgttcgtttagctgcttgtgtgttgtgcaactatggcattttgctgcttgcttcagttgtcttaccgaaagatagagttaaaaggattagagccttgcctgcacctgttgctatcccttgatggtacggtgttacttcttacccggaaaagaagttttacctccctttttttccatgtcagatgacatccgatatgtaatttatcgtcccctccaccttccgcccttagcaagcatatgttctgatatctttctttgcctggggattctctctttgtagccttacttgactttgtataagctgccataatttagtagt

SEQ ID NO: 657 - protein, 914 aa, Oryza sativa
MMPSGPLNPMGPGQPVGAAASLLRTSSSLLSGGQQGMGSGGGMIPSQSPFSSLVSPRTQFGANGLLGGGSNVSSLLNRPFGNGGHMLGPGLMPGGGGIPMNTLQQQRGGLDGAGDLVGVGGSDPLSFPSSSQVSLGNQLGSDNLHQPPQHQQQQQQLDAMHDLQQQQHHQQLPMSYNQQHLPPQPPQQPQATVKLENGGSTGGVKLEPQMGQPDQNSSAQMMRHASNVKIEPQQLQALRSLSAVKMEQPTSDPSAFLQQQQQQQHLLQLTKQNPQAAAAAQLNLLQQQRILQMQQQQQQQQQQILKNLPLQRNQLQQQQLLRQQSLNMRTPGKSAPYEPGTCAKRLTHYMYHQQNRPQDNNIEYWRNFVNEYFSPNAKKRWCVSLYGSGRQTTGVFPQDVWHCEICNRKPGRGFETTVEVLPRLCQIKYASGTLEELLYVDMPRESQNASGQIVLDYTKAVQESVFEQLRVVREGHLRIVFNPDLKIASWEFCARRHEELIPRRSIIPQVSQLGAVVQKYQSAVQNSTNLSTQDMQNNCNSFVACARQLAKALEVPLVNDLGYTKRYVRCLQIAEVVNCMKDLIDYSRQNGSGPIASLHSFPRRTSSGVSPHQSQQQQPEEQQSIPQSSNQSGQNAAPMTGVQASASANADVTSNNSLSCAPSTSAPSPSVVGLLQGSMNSRQDHPMSSANGPYTSGNSAAIPKVNSTTSLQSNPSTSFPSPMPTTSNNNMMPAPQSTNQLSSPTTSSNLPPMQPPATRPQEPEPNESQSSVQRILQDLMMSPQMNGIGQLGNDMKRPNGLTSSVNGVNCLVGNAVTNNSGMGGMGFGAMGGLGPNHAASGLRTAMVNNAMAISGRMGMNHSAHDLSQLGQLQQQQQHQQQQQQQQHDLGNQLLNGLRAANSFNNLQYDWKPSQ

SEQ ID NO: 658 - DNA, 2328 bp, Oryza sativa (japonica cultivar-group)
  CDS (1)..(2328)
atgtctggggcgccatgctccaaccttggacttgttcccagggatatgcatggtagtatccctattagcactacaaattcctctgggccaagcattggtgttagctctttggtgacggatgctaactcatcgctctccggaggtgcccagttgcagccaattattgatggtcccattgtgcaacaaagtcctccccaagagcagatgcagaagcgaaggtcttctagtgtaacatcacaacctgttattgatgctgctggtgcattgcatgctcagaagaagtcaagggttgatattaggcaagatgatatcctgcaacacaatttaatccagcaactgctccaaggccagagttctcttcatctgcagggtcaacagaaccctcagattcaagccttgatccatcagcataaactggcacagattcagcagcaacagcagcatcagatgttgcaaccattttcacagatccaacaatctcaagttggcatacctcggcagccacagttgaggcctccactagcgcagcctggaatgcagctagctggacctgttaggactcctgtcgagaatgggctttgttctcgaaggttaaagcaatacttataccataagcgtcaccgaccagagaataatccaataacatactggaggaagcttattgatgaatattttgcaccacgagcaagagaaagatggtgtgtatcctcgtatgagaaaagaggaaatccttcaggtgctgttccacacacagctccggattcatggcgctgtgacatttgtaatacacatgggggcaaaggatatgaggctacctatgaaatacttcctagactctgtcaaattagatttgaccatggtgttatagatgaatacttattccttgacatggccaatgaattccggttgcccaatggactaatgctgctggaacatactaaagttgttcagaaaagcatttatgaacatatgcatgtgatacacgaggggcagttgagaatcatattcacaccagaactgaagataatgtcctgggagttctgttcacggcgacatgatgagtatatcactcgcaggtttctttcaccccaggttgctcatctgctgcaagttgcccagaaatatcaaactgttgccactgaaagtggtccagctggggtctcaaacagtgatgcacagaacatttgcaacatgtttgtgacggcgtcacgacagctagcgaaaaatatagaccaccacaccttaaatgagcatggtctatctaaaagatatgttcgctgcttgcagatatcagaggtggtgaatcacatgaaagacctgattgaattcagccacaagaacaagcttggtcctatagagggtctgaagagctatcccaagcaaactgcagcaaaacttccagtacaaaacatgcacgagccaaagcaactaatggcagctgctggccttcctaatgaccagactaacctcaaagccatgggtgtcaaaacagaaatgaacacccatgcgaatgagacgcacggtattggaccaattggaaatggtccgcagaatgctgctgcacttaacaattaccagaatcccattggaaatggtctgcagaatgctgctgcacttaacaattaccagaatatccttagaagttcagtcgcaaaccagagtttgcttcagcaggaggcatcaagcatgtttaaaggtcccacagcaatgcacaatggcattcagctggaagcatctagatccttccgtggaccaaaccaggtgcatctcgcgcagttccaacatccggcctcatttcagcagcctatgcctcagcagagcagcctccagggcttgggtgtgagcccacaatatcagcagcatgtgctccatcagttgctgcaagaggccaagaacactaacaaccgtgtcttggcgcagcagcagcagcaacaacaacttcaacatgctcctgctaacagtggtcttgcatcaggaggaacggctatcaccggcagcgccgctagcggggatcatatgaataacaacggcgcggtgaagggtgggactccaatggttacaacaggtcctagcagtgtgatcaacaatacagccagcatcctccccagcagaagtaacagcttcaagtcagtgagcagcaacccccaagttgcagctgctgcgggcggcggcattggcagcggcggccatgcggctacccccaaggctgatgctctgcatgagttggatgatcttgacaatcttgggaatctgatcagtactgaactggaggagagtgggctgttcctgggtgaccaggcaggtggtggctactcatggaacatgtga

SEQ ID NO: 659 - protein, 775 aa, Oryza sativa (japonica cultivar-group)
MSGAPCSNLGLVPRDMHGSIPISTTNSSGPSIGVSSLVTDANSSLSGGAQLQPIIDGPIVQQSPPQEQMQKRRSSSVTSQPVIDAAGALHAQKKSRVDIRQDDILQHNLIQQLLQGQSSLHLQGQQNPQIQALIHQHKLAQIQQQQQHQMLQPFSQIQQSQVGIPRQPQLRPPLAQPGMQLAGPVRTPVENGLCSRRLKQYLYHKRHRPENNPITYWRKLIDEYFAPRARERWCVSSYEKRGNPSGAVPHTAPDSWRCDICNTHGGKGYEATYEILPRLCQIRFDHGVIDEYLFLDMANEFRLPNGLMLLEHTKVVQKSIYEHMHVIHEGQLRIIFTPELKIMSWEFCSRRHDEYITRRFLSPQVAHLLQVAQKYQTVATESGPAGVSNSDAQNICNMFVTASRQLAKNIDHHTLNEHGLSKRYVRCLQISEVVNHMKDLIEFSHKNKLGPIEGLKSYPKQTAAKLPVQNMHEPKQLMAAAGLPNDQTNLKAMGVKTEMNTHANETHGIGPIGNGPQNAAALNNYQNPIGNGLQNAAALNNYQNILRSSVANQSLLQQEASSMFKGPTAMHNGIQLEASRSFRGPNQVHLAQFQHPASFQQPMPQQSSLQGLGVSPQYQQHVLHQLLQEAKNTNNRVLAQQQQQQQLQHAPANSGLASGGTAITGSAASGDHMNNNGAVKGGTPMVTTGPSSVINNTASILPSRSNSFKSVSSNPQVAAAAGGGIGSGGHAATPKADALHELDDLDNLGNLISTELEESGLFLGDQAGGGYSWNM

SEQ ID NO: 660 - DNA, 2745 bp, Oryza sativa (japonica cultivar-group)
  CDS (1)..(2745)
atgatgccgtcggggccgctcaacccgatgggtcccgggcagccggtgggcgccgccgcctcgctgctccggacgagctcaagcctgcttagtggtggtcagcaggggatgggcagtggcggaggcatgattccttcgcagtcgcccttctcatcccttgtgtcgccgcgcacgcagtttggtgctaatggcctgctgggaggtggctccaatgtttcctccctgctcaaccggccgtttgggaatggtggacatatgctcggtccggggttgatgccaggtggtggtgggattccaatgaataccctccagcagcagagaggagggcttgatggtgctggcgatttggttggcgtgggaggttctgatcctctctcgtttccttcatcgtcgcaagttagtttgggcaatcagctgggttcagataatctgcatcaaccaccgcaacatcagcaacaacaacagcagctggatgctatgcacgacttgcagcagcagcagcatcatcagcaactgccaatgtcttacaaccaacaacatttgccaccgcaaccaccacagcagccacaggctacagtgaagttggagaatggtggcagcacaggtggggtcaaattggaaccgcagatggggcagcctgaccagaacagctcagcccagatgatgcgccatgctagcaatgttaaaattgagcctcagcagttgcaagctctaagaagtttgagtgcggtgaagatggagcagccgacttcagacccatcagcattcctgcaacagcaacagcagcagcaacatttgctgcagctgacaaagcagaaccctcaagctgctgcggctgctcaactgaaccttttgcaacagcaacggatattgcaaatgcagcagcaacagcagcaacaacaacaacagattctaaagaatctgcctttgcagagaaaccaattacaacagcagcagctacttcgccaacagagtctaaacatgagaactccaggaaagtcggccccttatgagcccggaacctgcgcaaagagattgacccattacatgtatcatcaacagaacaggccacaggataacaatattgagtactggagaaattttgtcaatgagtatttttctccaaatgctaaaaagaggtggtgtgtatctctctatggaagtggtcgccaaactactggagttttccctcaggatgtatggcattgtgagatatgcaatcggaagcctgggcgaggctttgagaccacagttgaggtgttaccacggttgtgccaaatcaaatatgccagtggtacattggaagaattactatatgtggacatgccacgtgaatcgcagaatgcctctggccagattgttttggactataccaaagctatccaggaaagtgtattcgagcaattgcgtgtggtacgcgaaggacatctaaggatagtttttaatccagatctcaagatcgcgtcttgggagttttgtgctaggcgacacgaggaacttattccacggagatcaataataccacaggttagtcaactgggcgcagttgtgcaaaaataccaaagcgctgttcaaaattcgacaaatctgtcaactcaagacatgcagaataattgcaactcgtttgttgcatgtgcccgccaattggctaaagcactggaggtgccattggttaatgatctgggatacacaaaacgatatgtgcgctgccttcagattgcagaggtggtaaactgtatgaaagatttaattgattacagcagacaaaatggatctggaccaattgctagtttgcatagctttcctcggaggacttcatcaggggtcagccctcaccagtcacagcagcaacagcctgaagagcagcaatctataccgcagagttcaaaccaaagcggtcaaaatgctgctcccatgaccggtgtgcaggcttctgcctctgcaaatgcagatgtgacatcaaataattctctcagctgtgcaccctcaacgtctgcaccttcaccatccgttgttgggctcctccaaggttcaatgaactctagacaagatcatccaatgagcagtgctaatggtccatataccagtggaaacagtgctgcaattcccaaggtgaactcgacaacctcactgcagtcaaatccatctacctcttttccttcacccatgccaacaacatccaataacaacatgatgcctgcccctcagagcacaaaccaactcagctccccaaccacatcatcaaacctaccgccaatgcagccacctgctactcggcctcaggagcctgagccaaatgagtcccaaagctcggttcagagaatattgcaagatttgatgatgtcaccgcagatgaatggtattggccagcttgggaatgacatgaaaagaccgaacggacttacatctagtgttaacggagttaattgtttagttggtaatgctgttacaaataactcaggaatgggaggaatggggtttggggccatgggtgggctaggtccaaatcatgcagctagtggattgagaactgcaatggtgaacaatgcgatggcaatcagtggtaggatgggaatgaatcacagtgcacatgacctatcacagttgggccaactacagcagcaacagcaacatcaacagcagcagcagcagcagcaacatgacttaggaaaccaactgttgaatggacttagagcagcaaacagcttcaataaccttcagtatgactggaaaccatctcaataa

SEQ ID NO: 661 - protein, 914 aa, Oryza sativa (japonica cultivar-group)
MMPSGPLNPMGPGQPVGAAASLLRTSSSLLSGGQQGMGSGGGMIPSQSPFSSLVSPRTQFGANGLLGGGSNVSSLLNRPFGNGGHMLGPGLMPGGGGIPMNTLQQQRGGLDGAGDLVGVGGSDPLSFPSSSQVSLGNQLGSDNLHQPPQHQQQQQQLDAMHDLQQQQHHQQLPMSYNQQHLPPQPPQQPQATVKLENGGSTGGVKLEPQMGQPDQNSSAQMMRHASNVKIEPQQLQALRSLSAVKMEQPTSDPSAFLQQQQQQQHLLQLTKQNPQAAAAAQLNLLQQQRILQMQQQQQQQQQQILKNLPLQRNQLQQQQLLRQQSLNMRTPGKSAPYEPGTCAKRLTHYMYHQQNRPQDNNIEYWRNFVNEYFSPNAKKRWCVSLYGSGRQTTGVFPQDVWHCEICNRKPGRGFETTVEVLPRLCQIKYASGTLEELLYVDMPRESQNASGQIVLDYTKAIQESVFEQLRVVREGHLRIVFNPDLKIASWEFCARRHEELIPRRSIIPQVSQLGAVVQKYQSAVQNSTNLSTQDMQNNCNSFVACARQLAKALEVPLVNDLGYTKRYVRCLQIAEVVNCMKDLIDYSRQNGSGPIASLHSFPRRTSSGVSPHQSQQQQPEEQQSIPQSSNQSGQNAAPMTGVQASASANADVTSNNSLSCAPSTSAPSPSVVGLLQGSMNSRQDHPMSSANGPYTSGNSAAIPKVNSTTSLQSNPSTSFPSPMPTTSNNNMMPAPQSTNQLSSPTTSSNLPPMQPPATRPQEPEPNESQSSVQRILQDLMMSPQMNGIGQLGNDMKRPNGLTSSVNGVNCLVGNAVTNNSGMGGMGFGAMGGLGPNHAASGLRTAMVNNAMAISGRMGMNHSAHDLSQLGQLQQQQQHQQQQQQQQHDLGNQLLNGLRAANSFNNLQYDWKPSQ

SEQ ID NO: 662 - DNA, 2802 bp, Oryza sativa (japonica cultivar-group)
  CDS (1)..(2802)
atggtgccgtcggggccgccgaacccgatgggtcctgggcagccggttggcgcggcctcgttgctcaggacgagctccagcctgctcagcggcggccagcaggggatgggcagtggcggaggcatgcttccttcgcagtcgcccttctcgtccctcgtgtcgccgcgcacgcagtttggtgctaatggcctgctgggaggtggctccaatgtttcctccctgctcaaccggccgtttgggaatgggggacatatgctcggtccggggtcgatgccaggtggtggtgggcttccaatgaataccctccagcagcagagaggagggcttgatggtgctggcgatttggttggcgcgggaggttctgattctctctcgttcccttcatcgtcgcaagttagtttgggcaatcagctgggttcagataatctgcatccaccaccgcaacatcagcagcaacaacaacacctggatgctatgcaggacttgcagcaccagcatcagcatcagcagcaactgccaatgtcttacaaccaacaacagttgccaccgcaaccgccacagcagccgcaggctacagtgaagttggagaatggtggcagcacaggtggggtcaaattggaaccgcagatggggcagcctgaccagaatagcacagcccagatgatgcgcaatgctagcaatgttaaaattgagccgccgcagttgcaagctttgaggagtttgagtgcggtgaagatggagcagcagagttcagacccatcagcattcctgcaacagcaacagcagcagcaacatttgctgcagctgacaaagcagaatcctcaagctgctgcggcagctcaactgaaccttttgcaacagcaacggatattgcaaatgcagcaacaacagcagcaacaacaacagattctaaagaatctgcctttgcagagaaaccaattacaacagcaacaacagcagcagcagcaacagcagcagctacttcgccaacagagtctaaacatgagaactccaggaaaatcggctccttatgagccaggaacctgtgcaaagagattgactcattacatgtatcatcaacaaaacaggccacaggataacaatatcgagtactggagaaactttgtcaatgagtatttttctccaaatgctaaaaaaaggtggtgtgtatctctctatggaagtggtcgtcaaactactggagttttccctcaggatgtatggcattgtgagatatgcaatcggaagcctgggcgaggctttgagaccaccgttgaggtgttaccacgattatgccaaattaaatatgccagtggtacattggaagaattactatatgtcgacatgccacgtgaatcgcagaatgcctctggtcagattgttttggactataccaaagcaatccaggaaagtgtctttgagcagttgcgtgtggtacgcgaaggacatctaaggatagtttttaatcctgatctcaagatcgcttcttgggagttttgtgcaaggcgtcacgaggagcttattccacgtagatcaataatcccacaggttagtcaactgggcgcagttgtgcaaaaataccagagtgctgttcaaaattcgacaaatttgtcaactcaagacatgcagaataattgcaactcgtttgttgcatgtgcccgccaattggctaaagcactggaggtgcctttggtaaatgatctgggatacacaaaacgatatgtgcgctgccttcagattgctgaggtggtaaactgtatgaaagatttgattgattatagcaggcaaaatgggtctggaccaattgctagtttgcatagctttcctcggaggacttcatcaggaggggtaaaccctcaacagtcacagcagcaacagcctgaagaacagcaatctatcccgcagagttcaaaccagagtggtcaaaatgctgctcccatgactggtgtgcaggcttctgcctctgcaaatgcagatgtgacatcaaataattctctcagctgtgcaccctcaacgtctgcaccttcaccgtccgttgttgggctcctccaaggttcaatgaactctagacaagatcatccaatgagcagtgctaatggtccatataccagtggaaacagtgctgcaattcccaaggtgaactcgacaacctcactgcagtcaactccatctacctcttttccttcaccagtgccaacaacatccaataacaacatgatgcctgcccctcagaacacaaaccaactcagctccccaaccgcatcatcaaacctaccgccaatgcagccacctgctactcgacctcaggagcctgatccaaatgagtcccaaagctcggttcagagaatattgcaagatttgatgatgtcaccgcagatgaatggtgttggccagcttgggaatgacatgaaaagaccgaacggacttacatctagtgttaacggagttaattgtttagttggtaatgctgttacaaataactcaggaatgggaggaatggggtttggggccatgggtgggcttggtccaaatcatgcagctagtggattgagaactgcaatagcgaacaatgcgatggcaattagtggtaggatgggaatgaatcacagtgcacatgacctatcacagttgggccaactacagcagcaacagcaacatcaacatcaacatcaacatcaacatcaacagcaacagcagcagcagcagcagcagcaacatgacttaggaaaccaactgttgagtggacttagagcagcaaacagcttcaataaccttcagtatgactggaaaccatctcaataa

SEQ ID NO: 663 - protein, 933 aa, Oryza sativa (japonica cultivar-group)
MVPSGPPNPMGPGQPVGAASLLRTSSSLLSGGQQGMGSGGGMLPSQSPFSSLVSPRTQFGANGLLGGGSNVSSLLNRPFGNGGHMLGPGSMPGGGGLPMNTLQQQRGGLDGAGDLVGAGGSDSLSFPSSSQVSLGNQLGSDNLHPPPQHQQQQQHLDAMQDLQHQHQHQQQLPMSYNQQQLPPQPPQQPQATVKLENGGSTGGVKLEPQMGQPDQNSTAQMMRNASNVKIEPPQLQALRSLSAVKMEQQSSDPSAFLQQQQQQQHLLQLTKQNPQAAAAAQLNLLQQQRILQMQQQQQQQQQILKNLPLQRNQLQQQQQQQQQQQQLLRQQSLNMRTPGKSAPYEPGTCAKRLTHYMYHQQNRPQDNNIEYWRNFVNEYFSPNAKKRWCVSLYGSGRQTTGVFPQDVWHCEICNRKPGRGFETTVEVLPRLCQIKYASGTLEELLYVDMPRESQNASGQIVLDYTKAIQESVFEQLRVVREGHLRIVFNPDLKIASWEFCARRHEELIPRRSIIPQVSQLGAVVQKYQSAVQNSTNLSTQDMQNNCNSFVACARQLAKALEVPLVNDLGYTKRYVRCLQIAEVVNCMKDLIDYSRQNGSGPIASLHSFPRRTSSGGVNPQQSQQQQPEEQQSIPQSSNQSGQNAAPMTGVQASASANADVTSNNSLSCAPSTSAPSPSVVGLLQGSMNSRQDHPMSSANGPYTSGNSAAIPKVNSTTSLQSTPSTSFPSPVPTTSNNNMMPAPQNTNQLSSPTASSNLPPMQPPATRPQEPDPNESQSSVQRILQDLMMSPQMNGVGQLGNDMKRPNGLTSSVNGVNCLVGNAVTNNSGMGGMGFGAMGGLGPNHAASGLRTAIANNAMAISGRMGMNHSAHDLSQLGQLQQQQQHQHQHQHQHQQQQQQQQQQQHDLGNQLLSGLRAANSFNNLQYDWKPSQ

SEQ ID NO: 664 - DNA, 2247 bp, Arabidopsis thaliana
  CDS (1)..(2247)
atgaacagaacggtggtctcgggagctgttgaatcgagtttctcattgactgatgctgttggcacggaagctctaaatatgcagaggagcagtggcatcaataataatatgcgtatcccaacatcaccgatgtctttctcctcgaatagcgttaacataccgggttcattggttcttgatggctctgctgcttcaatgcaacacttacctcagcagcagcagcagcaactactacaacagcaaacaggacaaggttctgttccaatgagggagaacagttattcccatgtagataagaaacccagattagaagtgaagcaagaagatatgttgcagcagcagattttacagcagttgatccagcgtcaggaccccacggggaggaatccgcagatgcaagctttgcttcagcagcagagactgaggcaacatcagcagatgcttcaatccatgtcaccctctcagagactccaacttcagcaacagcagcagctgagacagcagttacagcaacaaggaacccaacagattcctcctaatgtacgtccttatgaagttggcgtctgtgctcggaaattgatgatgtacttgtatcatctgcagcaacggcctgctgaaaattgcattacctattggaggaaatttgtggcagaatacttttcacctcgtgcaaagcagagattgtgcttgtcacagtacgaaagtgctgggcaccatgcgcttggcatgttcccacaggcagctccggatatgtggcagtgtgatctttgcggcaccaagtctggaaagggatttgaggcaacgtttgatgtgcttgccagactaattgaaatcaaatttgcaagtggtattattgatgagctgttatatctggatcaccctcgagaaaacagatttcccaatggactgatgatgttagaatatagaaaagcagttcaggaaactgtacacgagcagtttcgtgttgtccgtgagggccatcttcgcatcatattttctcaagatttgaagatactttcttgggagttttgcgctcggcgtcatgaagagcttcttcttcgcagacttattgctccacaggtgaaccaattgcttcaggttgcacagaaatgccagagcacgatctcagagagtgggtcagagggggtttctcagcaggatttacagtcaaatagtaacatggtcttgggagcaggacggcaactggcaaagttcatggaactacagtcgctgaatgatcttggctatccaaaaagatatatcaggactctgcagatatctgaagttgtcaagagcatgaaggatctgatgaatttcactggcgagcaaaaaatcggtcctattgaggggttgaaacggcttttggaacagacggtgacagtgaagctacagaaacagaaaatgcaagagatggagcagtttgggaataatggagctataaatgggccagttcaagctcaaatggtgttaacttcaggaacgatgaatggctcaacgggcaataacaccaataatcaccatcaaattgttggtcgtggagctatgagtgggccagctgaaggtcaaatggtgatatcttcaggaacggtgagcggcgcaactgccaacaacaactccaataatcacaatcaaattgttggtcgtggagctatgaatggctctgctcaagccgcagcagctctgaccaactaccaaagcatgcttatgaggcaaaatgctatgaataacccaaactcaaatacgggtaaacaagaggggttctcgagtcagaacccaaccccaaactcaaaccagagtccatcttcttcatcccagcagaggcataacttagttacaggtggatttcccaactctcctcaaatgcaacagcagcagcgcaccatgaatggccctaccaacatacttccgcagaatcatcctcatcagttacaatcaccacattcacatggtaacactccggagcagcagatgcttcatcagctgttgcaggagatgtctgaaaatggagggagtgtgcaacagcaacaagccttttcgggtcaaagtggtagcaacagtaacgcagagagaaacacaactgcctctacttccaacatctcaggaggaggccgagctccaagtcgaaacaacagttttaaagcagcctcgaacaacaaccttcatttttcagaagatatatcgatcacagaccatgatttctcagaagatggcttcttcaacaacaatgatatctatggtggcttgtaa

SEQ ID NO: 665 - protein, 748 aa, Arabidopsis thaliana
MNRTVVSGAVESSFSLTDAVGTEALNMQRSSGINNNMRIPTSPMSFSSNSVNIPGSLVLDGSAASMQHLPQQQQQQLLQQQTGQGSVPMRENSYSHVDKKPRLEVKQEDMLQQQILQQLIQRQDPTGRNPQMQALLQQQRLRQHQQMLQSMSPSQRLQLQQQQQLRQQLQQQGTQQIPPNVRPYEVGVCARKLMMYLYHLQQRPAENCITYWRKFVAEYFSPRAKQRLCLSQYESAGHHALGMFPQAAPDMWQCDLCGTKSGKGFEATFDVLARLIEIKFASGIIDELLYLDHPRENRFPNGLMMLEYRKAVQETVHEQFRVVREGHLRIIFSQDLKILSWEFCARRHEELLLRRLIAPQVNQLLQVAQKCQSTISESGSEGVSQQDLQSNSNMVLGAGRQLAKFMELQSLNDLGYPKRYIRTLQISEVVKSMKDLMNFTGEQKIGPIEGLKRLLEQTVTVKLQKQKMQEMEQFGNNGAINGPVQAQMVLTSGTMNGSTGNNTNNHHQIVGRGAMSGPAEGQMVISSGTVSGATANNNSNNHNQIVGRGAMNGSAQAAAALTNYQSMLMRQNAMNNPNSNTGKQEGFSSQNPTPNSNQSPSSSSQQRHNLVTGGFPNSPQMQQQQRTMNGPTNILPQNHPHQLQSPHSHGNTPEQQMLHQLLQEMSENGGSVQQQQAFSGQSGSNSNAERNTTASTSNISGGGRAPSRNNSFKAASNNNLHFSEDISITDHDFSEDGFFNNNDIYGGL

SEQ ID NO: 666 - DNA, 2451 bp, Arabidopsis thaliana
  CDS (1)..(2451)
atggcttcttcaacttctgggattttctttcaaggagatgatgaatctcaaagcttcattaactctcacttgacttcctcttatgggaattcatctaactctgctcctggatgtggtggacctactggtggctatcacaatctcagtatggtttctggtgatatgcataatccggttatgatgagtgtttcaacacccggtccaagcgcaggagctagttcgcttgtcacagatgctaattcagggctctctggaggtggtcctcatttgcagcgtagtgctagtatcaataatgagtcatatatgcgtttaccggcgtctcctatgtcgttctcttctaataatatcagcatatctggttcatcagttgtagatgggtcgactgtggtacaacggcatgatcctagtgttcagctaggtggctctagtgctacatcactgcctacatcacaaactaatcaaatcccgctttctatggctcggcgtgcttctgaatcgttctttcaggatccaaacaacttaactcaagcacggaaaaaacctagattagattcaaagcaggatgatgctttgcagcagcagattttacgtcagtggcttcagagacaggatatattgcagcagcagcagcaacaacaacaacaaggccaaaatccacagttccaaatcttgcttcagcaacaaaagctgaggcaacagcaacaatatctccagtccctcccaccattgcaacgggttcaactgcagcagcagcaacaagtgcagcaacagcaacagttgcagcagcagcaccaacagcaacagcaacagttgcaacaacaaggaatgcaaatgcaactaaccggtgggccaagaccttatgaaaatagcgtttgcgctcgaagattgatgcagtacctatatcatcagcgacaaaggccttctgagagcagtattgtttactggaggaaatttgtgacggagtatttttctccccgggcaaagaaaagatggtgtctttctcattatgataatgtggggcatagtgcacttggtgtttctcctcaggcagccacggatgaatggcagtgtgatctatgtggttctaaatcgggaagaggatttgaagcaacttttgatgtcttgccaaggcttaacgaaatcaaattcgcaagtggtgtcctggacgagcttctttatctgggtgtaccgtctgaacgcagatatggatctggaattatggtgttagagtatggaaaagcagttcaggagagtgtgtacgaacatatccgtgttgttcgcgaaggccatcttcggattatattctcccaagagctgaagattctctcatgggagttctgtactcgtcgacatgaagaactacttcctcgtcgcctagtagctccacaggtgaaccaattgcttcaggttgcagagaaatgtcagagcacaattgatcaaagtggatcagatgggattcatcaacaagatttgcaagctaatagcaacatggtcatggctgctggacgtcaactagcaaaaagcttggagtcacattcactcaatgacttaggcttctcaaaacgatatgttcggtgtctgcagatttctgaggttgtcagcagcatgaaagatatgattgacttttgccgtgaccaaaaagtgggtccaatcgaggctttgaagagctatccatatcgaatgaaggctggtaaacctcagatgcaggagatggagcaactagcggctgcccgagggcttccacctgataggaacagtctcaacaagctaatggccttgcgcaattccgggataaacataccaatgaacaacatgagcggtcaaggatctcttcccggctctgcacaagctgccgcttttgcgcttaccaactaccagagcatgctcatgaaacaaaaccatctgaattcagacctaaacaacaccacaatccagcaagaaccatcaagaaaccggagtgcatccccgagctatcaaggaactagtcccttgttacctggttttgtgcatagcccatcaataagtggtgtatcttcccatctatctcctcagcggcaaatgccaagctccagttataatggctcaacccagcaataccaccaacagccaccttcctgtagtagcggtaaccaaacattggaacaacaaatgattcatcaaatatggcaacagatggcaaacagcaatggaggctccggtcaacaacaacagtcactttctggtcagaacatgatgaattgcaataccaacatgggaagaaacagaacagattatgttcccgcagcagctgaaacaccaagcacctccaacagattcagaggcatcaaggggttagaccaaagccaaaacctggaaggtattatctctaatacatcgctcaactttgggaataacggggtttttagcaatgaggttgatgaaagcatgggaggatattcttggaagtcatga

SEQ ID NO: 667 - protein, 816 aa, Arabidopsis thaliana
MASSTSGIFFQGDDESQSFINSHLTSSYGNSSNSAPGCGGPTGGYHNLSMVSGDMHNPVMMSVSTPGPSAGASSLVTDANSGLSGGGPHLQRSASINNESYMRLPASPMSFSSNNISISGSSVVDGSTVVQRHDPSVQLGGSSATSLPTSQTNQIPLSMARRASESFFQDPNNLTQARKKPRLDSKQDDALQQQILRQWLQRQDILQQQQQQQQQGQNPQFQILLQQQKLRQQQQYLQSLPPLQRVQLQQQQQVQQQQQLQQQHQQQQQQLQQQGMQMQLTGGPRPYENSVCARRLMQYLYHQRQRPSESSIVYWRKFVTEYFSPRAKKRWCLSHYDNVGHSALGVSPQAATDEWQCDLCGSKSGRGFEATFDVLPRLNEIKFASGVLDELLYLGVPSERRYGSGIMVLEYGKAVQESVYEHIRVVREGHLRIIFSQELKILSWEFCTRRHEELLPRRLVAPQVNQLLQVAEKCQSTIDQSGSDGIHQQDLQANSNMVMAAGRQLAKSLESHSLNDLGFSKRYVRCLQISEVVSSMKDMIDFCRDQKVGPIEALKSYPYRMKAGKPQMQEMEQLAAARGLPPDRNSLNKLMALRNSGINIPMNNMSGQGSLPGSAQAAAFALTNYQSMLMKQNHLNSDLNNTTIQQEPSRNRSASPSYQGTSPLLPGFVHSPSISGVSSHLSPQRQMPSSSYNGSTQQYHQQPPSCSSGNQTLEQQMIHQIWQQMANSNGGSGQQQQSLSGQNMMNCNTNMGRNRTDYVPAAAETPSTSNRFRGIKGLDQSQNLEGIISNTSLNFGNNGVFSNEVDESMGGYSWKS

SEQ ID NO: 668 - DNA, 2586 bp, Oryza sativa subsp
  CDS (1)..(2586)
atggcggtcaatgtgggcccggcccaccggctgcagccggtcgccaccgtcccgggcgccgcgaatctatttaaccggtttgctcgtcggcgaggacgccgcctacaggcgcaggaagaggaggagaagaagcggaagaggagagaaaaaaaaaattcgcagcaaaaaagaaaaaaaaatcgcagctgcaaggttcttcaaagtgatgattgggatcgaaccctggtaacctccatgtctggggcgccatgctccaaccttggacttgttcccagggatatgcatggtagtatccctattagcactacaaattcctctgggccaagcattggtgttagctctttggtgacggatgctaactcatcgctctccggaggtgcccagttgcagccaagtacgagcatgaatgctgattcattcatgcgccttcctgcttccccaatgtcgttttcatccaataacatctctggatcttcagttattgatggtcccattgtgcaacaaagtcctccccaagagcagatgcagaagcgaaggtcttctagtgtaacatcacaacctgttattgatgctgctggtgcattgcatgctcagaagaagtcaagggttgatattaggcaagatgatatcctgcaacacaatttaatccagcaactgctccaaggccagagttctcttcatctgcagggtcaacagaaccctcagattcaagccttgatccatcagcataaactggcacagattcagcagcaacagcagcatcagatgttgcaaccattttcacagatccaacaatctcaagttggcatacctcggcagccacagttgaggcctccactagcgcagcctggaatgcagctagctggacctgttaggactcctgtcgagaatgggctttgttctcgaaggttaaagcaatacttataccataagcgtcaccgaccagagaataatccaataacatactggaggaagcttattgatgaatattttgcaccacgagcaagagaaagatggtgtgtatcctcgtatgagaaaagaggaaatccttcaggtgctgttccacacacagctccggattcatggcgctgtgacatttgtaatacacatgggggcaaaggatatgatgaatacttattccttgacatggccaatgaattccggttgcccaatggactaatgctgctggaacatactaaagttgttcagaaaagcatttatgaacatatgcatgtgatacacgaggggcagttgagaatcatattcacaccagaactgaagataatgtcctgggagttctgttcacggcgacatgatgagtatatcactcgcaggtttctttcaccccaggttgctcatctgctgcaagttgcccagaaatatcaaactgttgccactgaaagtggtccagctggggtctcaaacagtgatgcacagaacatttgcaacatgtttgtgacggcgtcacgacagctagcgaaaaatatagaccaccacaccttaaatgagcatggtctatctaaaagatatgttcgctgcttgcagatatcagaggtggtgaatcacatgaaagacctgattgaattcagccacaagaacaagcttggtcctatagagggtctgaagagctatcccaagcaaactgcagcaaaacttccagtacaaaacatgcacgagccaaagcaactaatggcagctgctggccttcctaatgaccagactaacctcaaagccatgggtgtcaaaacagaaatgaacacccatgcgaatgagacgcacggtattggaccaattggaaatggtccgcagaatgctgctgcacttaacaattaccagaatcccattggaaatggtctgcagaatgctgctgcacttaacaattaccagaatatccttagaagttcagtcgcaaaccagagtttgcttcagcaggaggcatcaagcatgtttaaaggtcccacagcaatgcacaatggcattcagctggaagcatctagatccttccgtggaccaaaccaggtgcatctcgcgcagttccaacatccggcctcatttcagcagcctatgcctcagcagagcagcctccagggcttgggtgtgagcccacaatatcagcagcatgtgctccatcagttgctgcaagaggccaagaacactaacaaccgtgtcttggcgcagcagcagcagcaacaacaacttcaacatgctcctgctaacagtggtcttgcatcaggaggaacggctatcaccggcagcgccgctagcggggatcatatgaataacaacggcgcggtgaagggtgggactccaatggttacaacaggtcctagcagtgtgatcaacaatacagccagcatcctccccagcagaagtaacagcttcaagtcagtgagcagcaacccccaagttgcagctgctgcgggcggcggcattggcagcggcggccatgcggctacccccaaggctgatgctctgcatgagttggatgatcttgacaatcttgggaatctgatcagtactgaactggaggagagtgggctgttcctgggtgaccaggcaggtggtggctactcatggaacatgtga

SEQ ID NO: 669 - protein, 861 aa, Oryza sativa subsp
MAVNVGPAHRLQPVATVPGAANLFNRFARRRGRRLQAQEEEEKKRKRREKKNSQQKRKKNRSCKVLQSDDWDRTLVTSMSGAPCSNLGLVPRDMHGSIPISTTNSSGPSIGVSSLVTDANSSLSGGAQLQPSTSMNADSFMRLPASPMSFSSNNISGSSVIDGPIVQQSPPQEQMQKRRSSSVTSQPVIDAAGALHAQKKSRVDIRQDDILQHNLIQQLLQGQSSLHLQGQQNPQIQALIHQHKLAQIQQQQQHQMLQPFSQIQQSQVGIPRQPQLRPPLAQPGMQLAGPVRTPVENGLCSRRLKQYLYHKRHRPENNPITYWRKLIDEYFAPRARERWCVSSYEKRGNPSGAVPHTAPDSWRCDICNTHGGKGYDEYLFLDMANEFRLPNGLMLLEHTKVVQKSIYEHMHVIHEGQLRIIFTPELKIMSWEFCSRRHDEYITRRFLSPQVAHLLQVAQKYQTVATESGPAGVSNSDAQNICNMFVTASRQLAKNIDHHTLNEHGLSKRYVRCLQISEVVNHMKDLIEFSHKNKLGPIEGLKSYPKQTAAKLPVQNMHEPKQLMAAAGLPNDQTNLKAMGVKTEMNTHANETHGIGPIGNGPQNAAALNNYQNPIGNGLQNAAALNNYQNILRSSVANQSLLQQEASSMFKGPTAMHNGIQLEASRSFRGPNQVHLAQFQHPASFQQPMPQQSSLQGLGVSPQYQQHVLHQLLQEAKNTNNRVLAQQQQQQQLQHAPANSGLASGGTAITGSAASGDHMNNNGAVKGGTPMVTTGPSSVINNTASILPSRSNSFKSVSSNPQVAAAAGGGIGSGGHAATPKADALHELDDLDNLGNLISTELEESGLFLGDQAGGGYSWNM

SEQ ID NO: 670 - DNA, 3027 bp, Oryza sativa subsp
  CDS (1)..(3027)
atgggtcccgggcagccggtgggcgccgccgcctcgctgctccggacgagctcaagcctgcttagtggtggtcagcaggggatgggcagtggcggaggcatgattccttcgcagtcgcccttctcatcccttgtgtcgccgcgcacgcagtttggtgctaatggcctgctgggaggtggctccaatgtttcctccctgctcaaccggccgtttgggaatggtggacatatgctcggtccggggttgatgtcaggtggtggtgggattccaatgaataccctccagcagcagagaggagggcttgatggtgctggcgatttggttggcgtgggaggttctgatcctctctcgtttccttcatcgtcgcaagttagtttgggcaatcagctgggttcagataatctgcatcaaccaccgcaacatcagcaacaacaacagcagctggatgctatgcacgacttgcagcagcagcagcagcatcagcaactgccaatgtcttacaaccaacaacatttgccaccgcaaccaccacagcagccacaggctacagtgaagttggagaatggtggcagcacaggtggggtcaaattggaaccgcagatggggcagcctgaccagaacagctcagcccagatgatgcgccatgctagcaatgttaaaattgagcctcagcagttgcaagctctaagaagtttgagtgcggtgaagatggagcagccgacttcagacccatcagcattcctgcaacagcaacagcagcagcaacatttgctgcagctgacaaagcagaaccctcaagctgctgcggctgctcaactgaaccttttgcaacagcaacggatattgcaaatgcagcagcaacagcagcaacaacaacaacagattctaaagaatctgcctttgcagagaaaccaattacaacagcagcagctacttcgccaacagagtctaaacatgagaactccaggaaagtcggccccttatgagcccggaacctgcgcaaagagattgacccattacatgtatcatcaacagaacaggccacaggcaagtttttgggttattcctaacaagataacaatattgagtactggagaaattttgtcaatgagtatttttctccaaatgctaaaaagaggtggtgtgtatctctctatggaagtggtcgccaaactactggagttttccctcaggatgtatggcattgtgagatatgcaatcggaagcctgggcgaggctttgaatgcctctggccagattgttttggactataccaaagctatccaggaaagtgtattcgagcaattgcgtgtggtacgcgaaggacatctaaggatagtttttaatccagatctcaagatcgcgtcttgggagttttgtgctaggcgacacgaggaacttattccacggagatcaataataccacaggttagtcaactgggcgcagttgtgcaaaaataccaaagcgctgttcaaaattcgacaaatctgtcaactcaagacatgcagaataattgcaactccaatgcggcgccattactgagctctggccaccccgcatcaggaaggatgggaccaacgccgttgtgcacccaccgcacgccaccgcactctcccgatgaggacagctggcggcagagctccatgaggatattcgcgcacgagcatgatgaggttggtggcgtgcaatggagctggaggaggccactgctgcttgaggaggctgcggtggcgctgaaggaggccgctggtgcgagagcttggggaggacaccggcatggaagctggaaaaggccggtggtacgggcggcgatgcaggagcttgagttgttctcctctgtttctgcctcaatccatggcagaaaaaatatcagtgcaaagtattctggacctatgggtgtatggtttgttgcatgtgcccgccaattggctaaagcactggaggtgccattggttaatgatctgggatacacaaaacgatatgtgcgctgccttcagattgcagaggtggtaaactgtatgaaagatttaattgattacagcagacaaaatggatctggaccaattgctagtttgcatagctttcctcggaggacttcatcaggggtcagccctcaccagtcacagcagcaacagcctgaagagcagcaatctataccgcagagttcaaaccaaagcggtcaaaatgctgctcccatgaccggtgtgcaggcttctgcctctgcaaatgcagatgtgacatcaaataattctctcagctgtgcaccctcaacgtctgcaccttcaccatccgttgttgggctcctccaaggttcaatgaactctagacaagatcatccaatgagcagtgctaatggtccatataccagtggaaacagtgctgcaattcccaaggtgaactcgacaacctcactgcagtcaaatccatctacctcttttccttcacccatgccaacaacatccaataacaacatgatgcctgcccctcagagcacaaaccaactcagctccccaaccacatcatcaaacctaccgccaatgcagccacctgctactcggcctcaggagcctgagccaaatgagtcccaaagctcggttcagagaatattgcaagatttgatgatgtcaccgcagatgaatggtattggccagcttgggaatgacatgaaaagaccgaacggacttacatctagtgttaacggagttaattgtttagttggtaatgctgttacaaataactcaggaatgggaggaatggggtttggggccatgggtgggctaggtccaaatcatgcagctagtggattgagaactgcaatggtgaacaatgcgatggcaatcagtggtaggatgggaatgaatcacagtgcacatgacctatcacagttgggccaactacagcagcaacagcaacatcaacagcagcagcagcagcagcaacatgacttaggaaaccaactgttgaatggacttagagcagcaaacagcttcaataaccttcagtatgactggaaaccatctcaataa

SEQ ID NO: 671 - protein, 1008 aa, Oryza sativa subsp
MGPGQPVGAAASLLRTSSSLLSGGQQGMGSGGGMIPSQSPFSSLVSPRTQFGANGLLGGGSNVSSLLNRPFGNGGHMLGPGLMSGGGGIPMNTLQQQRGGLDGAGDLVGVGGSDPLSFPSSSQVSLGNQLGSDNLHQPPQHQQQQQQLDAMHDLQQQQQHQQLPMSYNQQHLPPQPPQQPQATVKLENGGSTGGVKLEPQMGQPDQNSSAQMMRHASNVKIEPQQLQALRSLSAVKMEQPTSDPSAFLQQQQQQQHLLQLTKQNPQAAAAAQLNLLQQQRILQMQQQQQQQQQQILKNLPLQRNQLQQQQLLRQQSLNMRTPGKSAPYEPGTCAKRLTHYMYHQQNRPQASFWVIPNKITILSTGEILSMSIFLQMLKRGGVYLSMEVVAKLLEFSLRMYGIVRYAIGSLGEALNASGQIVLDYTKAIQESVFEQLRVVREGHLRIVFNPDLKIASWEFCARRHEELIPRRSIIPQVSQLGAVVQKYQSAVQNSTNLSTQDMQNNCNSNAAPLLSSGHPASGRMGPTPLCTHRTPPHSPDEDSWRQSSMRIFAHEHDEVGGVQWSWRRPLLLEEAAVALKEAAGARAWGGHRHGSWKRPVVRAAMQELELFSSVSASIHGRKNISAKYSGPMGVWFVACARQLAKALEVPLVNDLGYTKRYVRCLQIAEVVNCMKDLIDYSRQNGSGPIASLHSFPRRTSSGVSPHQSQQQQPEEQQSIPQSSNQSGQNAAPMTGVQASASANADVTSNNSLSCAPSTSAPSPSVVGLLQGSMNSRQDHPMSSANGPYTSGNSAAIPKVNSTTSLQSNPSTSFPSPMPTTSNNNMMPAPQSTNQLSSPTTSSNLPPMQPPATRPQEPEPNESQSSVQRILQDLMMSPQMNGIGQLGNDMKRPNGLTSSVNGVNCLVGNAVTNNSGMGGMGFGAMGGLGPNHAASGLRTAMVNNAMAISGRMGMNHSAHDLSQLGQLQQQQQHQQQQQQQQHDLGNQLLNGLRAANSFNNLQYDWKPSQ

SEQ ID NO: 672 - DNA, 2673 bp, Oryza sativa subsp
  CDS (1)..(2673)
atggtgccgtcggggccgccgaacccgatgggtcctgggcagccggttggcgcggcctcgttgctcaggacgagctccagcctgctcagcggcggccagcaggggatgggcagtggcggaggcatgcttccttcgcagtcgcccttctcgtccctcgtgtcgccgcgcacgcagtttggtgctaatggcctgctgggaggtggctccaatgtttcctccctgctcaaccggccgtttgggaatgggggacatatgctcggtccggggtcgatgccaggtggtggtgggcttccaatgaataccctccagcagcagagaggagggcttgatggtgctgtcgatttggttggcgcgggaggttctgattctctctcgttcccttcatcgtcgcaagttagtttgggcaatcagctgggttcagataatctgcatccaccaccgcaacatcagcagcaacaacagcacctggatgctatgcaggacttgcagcaccagcatcagcatcagcagcaactgccaatgtcttacaaccaacaacagttgccaccgcaaccgccacagcagccgcaggctacagtgaagttggagaatggtggcagcacaggtggggtcaaattggaaccgcagatggggcagcctgaccagaatagcacagcccagatgatgcgcaatgctagcaatgttaaaattgagccgccgcagttgcaagctttgaggagtttgagtgcggtgaagatggagcagcagagttcagacccatcagcattcctgcaacagcaacagcagcagcaacatttgctgcagctgacaaagcagaatcctcaagctgctgcggcagctcaactgaaccttttgcaacagcaacggatattgcaaatgcagcaacaacagcagcaacaacaacagattctaaagaatctgcctttgcagagaaaccaattacaacagcaacaacagcagcagcagcaacagcagcagctacttcgccaacagagtctaaacatgagaactccaggaaaatcggctccttatgagccaggaacctgtgcaaagagattgactcattacatgtatcatcaacaaaacaggccacaggataacaatatcgagtactggagaaactttgtcaatgagtatttttctccaaatgctaaaaaaaggtggatgtatggcattgtgagatatgcaatcggaagcctgggcgaggctttgaatgcctctggtcagattgttttggactataccaaagcaatccaggaaagtgtctttgagcagttgcgtgtggtacgcgaaggacatctaaggatagtttttaatcctgatctcaagatcgcttcttgggagttttgtgcaaggcgtcacgaggagcttattccacgtagatcaataataccacaggttagtcaactgggcgcagttgtgcaaaaataccagagtgctgttcaaaattcgacaaatttgtcaactcaagacatgcagaataattgcaactcgtttgttgcatgtgcccgccaattggctaaagcactggaggtgcctttggtaaatgatctgggatacacaaaacgatatgtgcgctgccttcagattgctgaggtggtaaactgtatgaaagatttgattgattatagcaggcaaaatgggtctggaccaattgctagtttgcatagctttcctcggaggacttcatcaggaggggtaaaccctcaacagtcacagcagcaacagcctgaagaacagcaatctatcccgcagagttcaaaccagagtggtcaaaatgctgctcccatgactggtgtgcaggcttctgcctctgcaaatgcagatgtgacatcaaataattctctcagctgtgcaccctcaacgtctgcaccttcaccgtccgttgttgggctcctccaaggttcaatgaactctagacaagatcatccaatgagcagtgctaatggtccatataccagtggaaacagtgctgcaattcccaaggtgaactcgacaacctcactgcagtcaactccatctacctcttttccttcaccagtgccaacaacatccaataacaacatgatgcctgcccctcagaacacaaaccaactcagctccccaaccgcatcatcaaacctaccgccaatgcagccacctgctactcgacctcaggagcctgatccaaatgagtcccaaagctcggttcagagaatattgcaagatttgatgatgtcaccgcagatgaatggtgttggccagcttgggaatgacatgaaaagaccgaacggacttacatctagtgttaacggagttaattgtttagttggtaatgctgttacaaataactcaggaatgggaggaatgggaggaatggggtttggggccatgggtgggcttggtccaaatcatgcagctagtggattgagaactgcaatagcgaacaatgcgatggcaattagtggtaggatgggaatgaatcacagtgcacatgacctatcacagttgggccaactacagcagcaacagcaacagcaacatcaacatcaacatcaacatcaacatcaacatcaacagcaacagcagcagcagcagcagcagcaacatgacttaggaaaccaactgttgagtggacttagagcagcaaacagcttcaataaccttcagtatgactggaaaccatctcaataa

SEQ ID NO: 673 - protein, 890 aa, Oryza sativa subsp
MVPSGPPNPMGPGQPVGAASLLRTSSSLLSGGQQGMGSGGGMLPSQSPFSSLVSPRTQFGANGLLGGGSNVSSLLNRPFGNGGHMLGPGSMPGGGGLPMNTLQQQRGGLDGAVDLVGAGGSDSLSFPSSSQVSLGNQLGSDNLHPPPQHQQQQQHLDAMQDLQHQHQHQQQLPMSYNQQQLPPQPPQQPQATVKLENGGSTGGVKLEPQMGQPDQNSTAQMMRNASNVKIEPPQLQALRSLSAVKMEQQSSDPSAFLQQQQQQQHLLQLTKQNPQAAAAAQLNLLQQQRILQMQQQQQQQQQILKNLPLQRNQLQQQQQQQQQQQQLLRQQSLNMRTPGKSAPYEPGTCAKRLTHYMYHQQNRPQDNNIEYWRNFVNEYFSPNAKKRWMYGIVRYAIGSLGEALNASGQIVLDYTKAIQESVFEQLRVVREGHLRIVFNPDLKIASWEFCARRHEELIPRRSIIPQVSQLGAVVQKYQSAVQNSTNLSTQDMQNNCNSFVACARQLAKALEVPLVNDLGYTKRYVRCLQIAEVVNCMKDLIDYSRQNGSGPIASLHSFPRRTSSGGVNPQQSQQQQPEEQQSIPQSSNQSGQNAAPMTGVQASASANADVTSNNSLSCAPSTSAPSPSVVGLLQGSMNSRQDHPMSSANGPYTSGNSAAIPKVNSTTSLQSTPSTSFPSPVPTTSNNNMMPAPQNTNQLSSPTASSNLPPMQPPATRPQEPDPNESQSSVQRILQDLMMSPQMNGVGQLGNDMKRPNGLTSSVNGVNCLVGNAVTNNSGMGGMGGMGFGAMGGLGPNHAASGLRTAIANNAMAISGRMGMNHSAHDLSQLGQLQQQQQQQHQHQHQHQHQHQQQQQQQQQQQHDLGNQLLSGLRAANSFNNLQYDWKPSQ

SEQ ID NO: 674 - DNA, 2463 bp, Oryza sativa subsp
  CDS (1)..(2463)
atgcggctccgcggccgatccgacggcccggaggcctcccgtgggccccacggagaccggtcaatggcggttcttcaaagtgatgattgggatcgaaccctggtaacctccatgtctggggcgccatgctccaaccttggacttgttcccagggatatgcatggtagtatccctattagcactacaaattcctctgggccaagcattggtgttagctctttggtgacggatgctaactcatcgctctccggaggtgcccagttgcagccaagtacgagcatgaatgctgattcattcatgcgccttcctgcttccccaatgtcgttttcatccaataacatctctggatcttcagttattgatggtcccattgtgcaacaaagtcctccccaagagcagatgcagaagcgaaggtcttctagtgtaacatcacaacctgttattgatgctgctggtgcattgcatgctcagaagaagtcaagggttgatattaggcaagatgatatcctgcaacacaatttaatccagcaactgctccaaggccagagttctcttcatctgcagggtcaacagaaccctcagattcaagccttgatccatcagcataaactggcacagattcagcagcaacagcagcatcagatgttgcaaccattttcacagatccaacaatctcaagttggcatacctcggcagccacagttgaggcctccactagcgcagcctggaatgcagctagctggacctgttaggactcctgtcgagaatgggctttgttctcgaaggttaaagcaatacttataccataagcgtcaccgaccagagaataatccaataacatactggaggaagcttattgatgaatattttgcaccacgagcaagagaaagatggtgtgtatcctcgtatgagaaaagaggaaatccttcaggtgctgttccacacacagctccggattcatggcgctgtgacatttgtaatacacatgggggcaaaggatatgatgaatacttattccttgacatggccaatgaattccggttgcccaatggactaatgctgctggaacatactaaagttgttcagaaaagcatttatgaacatatgcatgtgatacacgaggggcagttgagaatcatattcacaccagaactgaagataatgtcctgggagttctgttcacggcgacatgatgagtatatcactcgcaggtttctttcaccccaggttgctcatctgctgcaagttgcccagaaatatcaaactgttgccactgaaagtggtccagctggggtctcaaacagtgatgcacagaacatttgcaacatgtttgtgacggcgtcacgacagctagcgaaaaatatagaccaccacaccttaaatgagcatggtctatctaaaagatatgttcgctgcttgcagatatcagaggtggtgaatcacatgaaagacctgattgaattcagccacaagaacaagcttggtcctatagagggtctgaagagctatcccaagcaaactgcagcaaaacttccagtacaaaacatgcacgagccaaagcaactaatggcagctgctggccttcctaatgaccagactaacctcaaagccatgggtgtcaaaacagaaatgaacacccatgcgaatgagacgcacggtattggaccaattggaaatggtccgcagaatgctgctgcacttaacaattaccagaatcccattggaaatggtctgcagaatgctgctgcacttaacaattaccagaatatccttagaagttcagtcgcaaaccagagtttgcttcagcaggaggcatcaagcatgtttaaaggtcccacagcaatgcacaatggcattcagctggaagcatctagatccttccgtggaccaaaccaggtgcatctcgcgcagttccaacatccggcctcatttcagcagcctatgcctcagcagagcagcctccagggcttgggtgtgagcccacaatatcagcagcatgtgctccatcagttgctgcaagaggccaagaacactaacaaccgtgtcttggcgcagcagcagcagcaacaacaacttcaacatgctcctgctaacagtggtcttgcatcaggaggaacggctatcaccggcagcgccgctagcggggatcatatgaataacaacggcgcggtgaagggtgggactccaatggttacaacaggtcctagcagtgtgatcaacaatacagccagcatcctccccagcagaagtaacagcttcaagtcagtgagcagcaacccccaagttgcagctgctgcgggcggcggcattggcagcggcggccatgcggctacccccaaggctgatgctctgcatgagttggatgatcttgacaatcttgggaatctgatcagtactgaactggaggagagtgggctgttcctgggtgaccaggcaggtggtggctactcatggaacatgtga

SEQ ID NO: 675 - protein, 820 aa, Oryza sativa subsp
MRLRGRSDGPEASRGPHGDRSMAVLQSDDWDRTLVTSMSGAPCSNLGLVPRDMHGSIPISTTNSSGPSIGVSSLVTDANSSLSGGAQLQPSTSMNADSFMRLPASPMSFSSNNISGSSVIDGPIVQQSPPQEQMQKRRSSSVTSQPVIDAAGALHAQKKSRVDIRQDDILQHNLIQQLLQGQSSLHLQGQQNPQIQALIHQHKLAQIQQQQQHQMLQPFSQIQQSQVGIPRQPQLRPPLAQPGMQLAGPVRTPVENGLCSRRLKQYLYHKRHRPENNPITYWRKLIDEYFAPRARERWCVSSYEKRGNPSGAVPHTAPDSWRCDICNTHGGKGYDEYLFLDMANEFRLPNGLMLLEHTKVVQKSIYEHMHVIHEGQLRIIFTPELKIMSWEFCSRRHDEYITRRFLSPQVAHLLQVAQKYQTVATESGPAGVSNSDAQNICNMFVTASRQLAKNIDHHTLNEHGLSKRYVRCLQISEVVNHMKDLIEFSHKNKLGPIEGLKSYPKQTAAKLPVQNMHEPKQLMAAAGLPNDQTNLKAMGVKTEMNTHANETHGIGPIGNGPQNAAALNNYQNPIGNGLQNAAALNNYQNILRSSVANQSLLQQEASSMFKGPTAMHNGIQLEASRSFRGPNQVHLAQFQHPASFQQPMPQQSSLQGLGVSPQYQQHVLHQLLQEAKNTNNRVLAQQQQQQQLQHAPANSGLASGGTAITGSAASGDHMNNNGAVKGGTPMVTTGPSSVINNTASILPSRSNSFKSVSSNPQVAAAAGGGIGSGGHAATPKADALHELDDLDNLGNLISTELEESGLFLGDQAGGGYSWNM

SEQ ID NO: 676 - DNA, 3027 bp, Oryza sativa subsp
  CDS (1)..(3027)
atgggtcccgggcagccggtgggcgccgccgcctcgctgctccggacgagctcaagcctgcttagtggtggtcagcaggggatgggcagtggcggaggcatgattccttcgcagtcgcccttctcatcccttgtgtcgccgcgcacgcagtttggtgctaatggcctgctgggaggtggctccaatgtttcctccctgctcaaccggccgtttgggaatggtggacatatgctcggtccggggttgatgccaggtggtggtgggattccaatgaataccctccagcagcagagaggagggcttgatggtgctggcgatttggttggcgtgggaggttctgatcctctctcgtttccttcatcgtcgcaagttagtttgggcaatcagctgggttcagataatctgcatcaaccaccgcaacatcagcaacaacaacagcagctggatgctatgcacgacttgcagcagcagcagcatcatcagcaactgccaatgtcttacaaccaacaacatttgccaccgcaaccaccacagcagccacaggctacagtgaagttggagaatggtggcagcacaggtggggtcaaattggaaccgcagatggggcagcctgaccagaacagctcagcccagatgatgcgccatgctagcaatgttaaaattgagcctcagcagttgcaagctctaagaagtttgagtgcggtgaagatggagcagccgacttcagacccatcagcattcctgcaacagcaacagcagcagcaacatttgctgcagctgacaaagcagaaccctcaagctgctgcggctgctcaactgaaccttttgcaacagcaacggatattgcaaatgcagcagcaacagcagcaacaacaacaacagattctaaagaatctgcctttgcagagaaaccaattacaacagcagcagctacttcgccaacagagtctaaacatgagaactccaggaaagtcggccccttatgagcccggaacctgcgcaaagagattgacccattacatgtatcatcaacagaacaggccacaggcaagtttttgggttattcctaacaagataacaatattgagtactggagaaattttgtcaatgagtatttttctccaaatgctaaaaagaggtggtgtgtatctctctatggaagtggtcgccaaactactggagttttccctcaggatgtatggcattgtgagatatgcaatcggaagcctgggcgaggctttgaatgcctctggccagattgttttggactataccaaagctatccaggaaagtgtattcgagcaattgcgtgtggtacgcgaaggacatctaaggatagtttttaatccagatctcaagatcgcgtcttgggagttttgtgctaggcgacacgaggaacttattccacggagatcaataataccacaggttagtcaactgggcgcagttgtgcaaaaataccaaagcgctgttcaaaattcgacaaatctgtcaactcaagacatgcagaataattgcaactccaatgcggcgccattactgagctctggccaccccgcatcaggaaggatgggaccaacgccgttgtgcacccaccgcacgccaccgcactctcccgatgaggacagctggcggcagagctccatgaggatattcgcgcacgagcatgatgaggttggtggcgtgcaatggagctggaggaggccactgctgcttgaggaggctgcggtggcgctgaaggaggccgctggtgcgagagcttggggaggacaccggcatggaagctggaaaaggccggtggtacgggcggcgatgcaggagcttgagttgttctcctctgtttctgcctcaatccatggcagaaaaaatatcagtgcaaagtattctggacctatgggtgtatggtttgttgcatgtgcccgccaattggctaaagcactggaggtgccattggttaatgatctgggatacacaaaacgatatgtgcgctgccttcagattgcagaggtggtaaactgtatgaaagatttaattgattacagcagacaaaatggatctggaccaattgctagtttgcatagctttcctcggaggacttcatcaggggtcagccctcaccagtcacagcagcaacagcctgaagagcagcaatctataccgcagagttcaaaccaaagcggtcaaaatgctgctcccatgaccggtgtgcaggcttctgcctctgcaaatgcagatgtgacatcaaataattctctcagctgtgcaccctcaacgtctgcaccttcaccatccgttgttgggctcctccaaggttcaatgaactctagacaagatcatccaatgagcagtgctaatggtccatataccagtggaaacagtgctgcaattcccaaggtgaactcgacaacctcactgcagtcaaatccatctacctcttttccttcacccatgccaacaacatccaataacaacatgatgcctgcccctcagagcacaaaccaactcagctccccaaccacatcatcaaacctaccgccaatgcagccacctgctactcggcctcaggagcctgagccaaatgagtcccaaagctcggttcagagaatattgcaagatttgatgatgtcaccgcagatgaatggtattggccagcttgggaatgacatgaaaagaccgaacggacttacatctagtgttaacggagttaattgtttagttggtaatgctgttacaaataactcaggaatgggaggaatggggtttggggccatgggtgggctaggtccaaatcatgcagctagtggattgagaactgcaatggtgaacaatgcgatggcaatcagtggtaggatgggaatgaatcacagtgcacatgacctatcacagttgggccaactacagcagcaacagcaacatcaacagcagcagcagcagcagcaacatgacttaggaaaccaactgttgaatggacttagagcagcaaacagcttcaataaccttcagtatgactggaaaccatctcaataa

SEQ ID NO: 677 - protein, 1008 aa, Oryza sativa subsp
MGPGQPVGAAASLLRTSSSLLSGGQQGMGSGGGMIPSQSPFSSLVSPRTQFGANGLLGGGSNVSSLLNRPFGNGGHMLGPGLMPGGGGIPMNTLQQQRGGLDGAGDLVGVGGSDPLSFPSSSQVSLGNQLGSDNLHQPPQHQQQQQQLDAMHDLQQQQHHQQLPMSYNQQHLPPQPPQQPQATVKLENGGSTGGVKLEPQMGQPDQNSSAQMMRHASNVKIEPQQLQALRSLSAVKMEQPTSDPSAFLQQQQQQQHLLQLTKQNPQAAAAAQLNLLQQQRILQMQQQQQQQQQQILKNLPLQRNQLQQQQLLRQQSLNMRTPGKSAPYEPGTCAKRLTHYMYHQQNRPQASFWVIPNKITILSTGEILSMSIFLQMLKRGGVYLSMEVVAKLLEFSLRMYGIVRYAIGSLGEALNASGQIVLDYTKAIQESVFEQLRVVREGHLRIVFNPDLKIASWEFCARRHEELIPRRSIIPQVSQLGAVVQKYQSAVQNSTNLSTQDMQNNCNSNAAPLLSSGHPASGRMGPTPLCTHRTPPHSPDEDSWRQSSMRIFAHEHDEVGGVQWSWRRPLLLEEAAVALKEAAGARAWGGHRHGSWKRPVVRAAMQELELFSSVSASIHGRKNISAKYSGPMGVWFVACARQLAKALEVPLVNDLGYTKRYVRCLQIAEVVNCMKDLIDYSRQNGSGPIASLHSFPRRTSSGVSPHQSQQQQPEEQQSIPQSSNQSGQNAAPMTGVQASASANADVTSNNSLSCAPSTSAPSPSVVGLLQGSMNSRQDHPMSSANGPYTSGNSAAIPKVNSTTSLQSNPSTSFPSPMPTTSNNNMMPAPQSTNQLSSPTTSSNLPPMQPPATRPQEPEPNESQSSVQRILQDLMMSPQMNGIGQLGNDMKRPNGLTSSVNGVNCLVGNAVTNNSGMGGMGFGAMGGLGPNHAASGLRTAMVNNAMAISGRMGMNHSAHDLSQLGQLQQQQQHQQQQQQQQHDLGNQLLNGLRAANSFNNLQYDWKPSQ

SEQ ID NO: 678 - DNA, 2760 bp, Oryza sativa subsp
  CDS (1)..(2760)
atggtgccgtcggggccgccgaacccgatgggtcctgggcagccggttggcgcggcctcgttgctcaggacgagctccagcctgctcagcggcggccagcaggggatgggcagtggcggaggcatgcttccttcgcagtcgcccttctcgtccctcgtgtcgccgcgcacgcagtttggtgctaatggcctgctgggaggtggctccaatgtttcctccctgctcaaccggccgtttgggaatgggggacatatgctcggtccggggtcgatgccaggtggtggtgggcttccaatgaataccctccagcagcagagaggagggcttgatggtgctggcgatttggttggcgcgggaggttctgattctctctcgttcccttcatcgtcgcaagttagtttgggcaatcagctgggttcagataatctgcatccaccaccgcaacatcagcagcaacaacaacacctggatgctatgcaggacttgcagcaccagcatcagcatcagcagcaactgccaatgtcttacaaccaacaacagttgccaccgcaaccgccacagcagccgcaggctacagtgaagttggagaatggtggcagcacaggtggggtcaaattggaaccgcagatggggcagcctgaccagaatagcacagcccagatgatgcgcaatgctagcaatgttaaaattgagccgccgcagttgcaagctttgaggagtttgagtgcggtgaagatggagcagcagagttcagacccatcagcattcctgcaacagcaacagcagcagcaacatttgctgcagctgacaaagcagaatcctcaagctgctgcggcagctcaactgaaccttttgcaacagcaacggatattgcaaatgcagcaacaacagcagcaacaacaacagattctaaagaatctgcctttgcagagaaaccaattacaacagcaacaacagcagcagcagcaacagcagcagctacttcgccaacagagtctaaacatgagaactccaggaaaatcggctccttatgagccaggaacctgtgcaaagagattgactcattacatgtatcatcaacaaaacaggccacaggataacaatatcgagtactggagaaactttgtcaatgagtatttttctccaaatgctaaaaaaaggtggatgtatggcattgtgagatatgcaatcggaagcctgggcgaggctttgaatgcctctggtcagattgttttggactataccaaagcaatccaggaaagtgtctttgagcagttgcgtgtggtacgcgaaggacatctaaggatagtttttaatcctgatctcaagatcgcttcttgggagttttgtgcaaggcgtcacgaggagcttattccacgtagatcaataatcccacagatgtctcattttgatattctgaattttgggcaaaacgggaaagggtttaatatattttgggaaccctcggtgttctatgcagtatgcgaaggagttgcacgaaacaaagtggtgggtataaccactgattttttgaagaaaaactataagcgtaaagcattctggatctatgggtgtatggttattcttactgttctagcaccgtttgttgcatgtgcccgccaattggctaaagcactggaggtgcctttggtaaatgatctgggatacacaaaacgatatgtgcgctgccttcagattgctgaggtggtaaactgtatgaaagatttgattgattatagcaggcaaaatgggtctggaccaattgctagtttgcatagctttcctcggaggacttcatcaggaggggtaaaccctcaacagtcacagcagcaacagcctgaagaacagcaatctatcccgcagagttcaaaccagagtggtcaaaatgctgctcccatgactggtgtgcaggcttctgcctctgcaaatgcagatgtgacatcaaataattctctcagctgtgcaccctcaacgtctgcaccttcaccgtccgttgttgggctcctccaaggttcaatgaactctagacaagatcatccaatgagcagtgctaatggtccatataccagtggaaacagtgctgcaattcccaaggtgaactcgacaacctcactgcagtcaactccatctacctcttttccttcaccagtgccaacaacatccaataacaacatgatgcctgcccctcagaacacaaaccaactcagctccccaaccgcatcatcaaacctaccgccaatgcagccacctgctactcgacctcaggagcctgatccaaatgagtcccaaagctcggttcagagaatattgcaagatttgatgatgtcaccgcagatgaatggtgttggccagcttgggaatgacatgaaaagaccgaacggacttacatctagtgttaacggagttaattgtttagttggtaatgctgttacaaataactcaggaatgggaggaatggggtttggggccatgggtgggcttggtccaaatcatgcagctagtggattgagaactgcaatagcgaacaatgcgatggcaattagtggtaggatgggaatgaatcacagtgcacatgacctatcacagttgggccaactacagcagcaacagcaacatcaacatcaacatcaacatcaacatcaacagcaacagcagcagcagcagcagcagcaacatgacttaggaaaccaactgttgagtggacttagagcagcaaacagcttcaataaccttcagtatgactggaaaccatctcaataa

SEQ ID NO: 679 - protein, 919 aa, Oryza sativa subsp
MVPSGPPNPMGPGQPVGAASLLRTSSSLLSGGQQGMGSGGGMLPSQSPFSSLVSPRTQFGANGLLGGGSNVSSLLNRPFGNGGHMLGPGSMPGGGGLPMNTLQQQRGGLDGAGDLVGAGGSDSLSFPSSSQVSLGNQLGSDNLHPPPQHQQQQQHLDAMQDLQHQHQHQQQLPMSYNQQQLPPQPPQQPQATVKLENGGSTGGVKLEPQMGQPDQNSTAQMMRNASNVKIEPPQLQALRSLSAVKMEQQSSDPSAFLQQQQQQQHLLQLTKQNPQAAAAAQLNLLQQQRILQMQQQQQQQQQILKNLPLQRNQLQQQQQQQQQQQQLLRQQSLNMRTPGKSAPYEPGTCAKRLTHYMYHQQNRPQDNNIEYWRNFVNEYFSPNAKKRWMYGIVRYAIGSLGEALNASGQIVLDYTKAIQESVFEQLRVVREGHLRIVFNPDLKIASWEFCARRHEELIPRRSIIPQMSHFDILNFGQNGKGFNIFWEPSVFYAVCEGVARNKVVGITTDFLKKNYKRKAFWIYGCMVILTVLAPFVACARQLAKALEVPLVNDLGYTKRYVRCLQIAEVVNCMKDLIDYSRQNGSGPIASLHSFPRRTSSGGVNPQQSQQQQPEEQQSIPQSSNQSGQNAAPMTGVQASASANADVTSNNSLSCAPSTSAPSPSVVGLLQGSMNSRQDHPMSSANGPYTSGNSAAIPKVNSTTSLQSTPSTSFPSPVPTTSNNNMMPAPQNTNQLSSPTASSNLPPMQPPATRPQEPDPNESQSSVQRILQDLMMSPQMNGVGQLGNDMKRPNGLTSSVNGVNCLVGNAVTNNSGMGGMGFGAMGGLGPNHAASGLRTAIANNAMAISGRMGMNHSAHDLSQLGQLQQQQQHQHQHQHQHQQQQQQQQQQQHDLGNQLLSGLRAANSFNNLQYDWKPSQ

SEQ ID NO: 680 - DNA, 2247 bp, Arabidopsis thaliana
  CDS (1)..(2247)
atgaacagaacggtggtctcgggagctgttgaatcgagtttctcattgactgatgctgttggcacggaagctctaaatatgcagaggagcagtggcatcaataataatatgcgtatcccaacatcaccgatgtctttctcctcgaatagcgttaacataccgggttcattggttcttgatggctctgctgcttcaatgcaacacttacctcagcagcagcagcagcaactactacaacagcaaacaggacaaggttctgttccaatgagggagaacaattattcccatgtggataagaaacccagattagaagtgaagcaagaagatatgttgcagcagcagattttacagcagttgatccagcgtcaggaccccacggggaggaatccgcagatgcaagctttgcttcagcagcagagactgaggcaacatcagcagatgcttcaatccatgtcaccctctcagagactccaacttcagcaacagcagcagctgagacagcagttacagcaacaaggaacccaacagattcctcctaatgtacgtccttatgaagttggcgtctgtgctcggaaattgatgatgtacttgtatcatctgcagcaacggcctgctgaaaattgcattacctattggaggaaatttgtggcagaatacttttcacctcgtgcaaagcagagattgtgcttgtcacagtacgaaagtgctgggcaccatgcgcttggcatgttcccacaggcagctccggatatgtggcagtgtgatctttgcggcaccaagtctggaaagggatttgaggcaacgtttgatgtgcttgccagactaattgaaatcaaatttgcaagtggtattattgatgagctgttatatctggatcaccctcgagaaaacagatttcccaatggactgatgatgttagaatatagaaaagcagttcaggaaactgtacacgagcagtttcgtgttgtccgtgagggccatcttcgcatcatattttctcaagatttgaagatactttcttgggagttttgcgctcggcgtcatgaagagcttcttcttcgcagacttattgctccacaggtgaaccaattgcttcaggttgcacagaaatgccagagcacgatctcagagagtgggtcagagggggtttctcagcaggatttacagtcaaatagtaacatggtcttgggagcaggacggcaactggcaaagttcatggaactacagtcgctgaatgatcttggctatccaaaaagatatatcaggactctgcagatatctgaagttgtcaagagcatgaaggatctgatgaatttcactggcgagcaaaaaatcggtcctattgaggggttgaaacggcttttggaacagacggtgacagtgaagctacagaaacagaaaatgcaagagatggagcagtttgggaataatggagctataaatgggccagttcaagctcaaatggtgttaacttcaggaacgatgaatggctcaacgggcaataacaccaataatcaccatcaaattgttggtcgtggagctatgagtgggccagctgaaggtcaaatggtgatatcttcaggaacggtgagcggcgcaactgccaacaacaactccaataatcacaatcaaattgttggtcgtggagctatgaatggctctgctcaagccgcagcagctctgaccaactaccaaagcatgcttatgaggcaaaatgctatgaataacccaaactcaaatacgggtaaacaagaggggttctcgagtcagaacccaaccccaaactcaaaccagagtccatcttcttcatcccagcagaggcataacttagttacaggtggatttcccaactctcctcaaatgcaacagcagcagcgcaccatgaatggccctaccaacatacttccgcagaatcatcctcatcagttacaatcaccacattcacatggtaacactccggagcagcagatgcttcatcagctgttgcaggagatgtctgaaaatggagggagtgtgcaacagcaacaagccttttcgggtcaaagtggtagcaacagtaacgcagagagaaacacaactgcctctacttccaacatctcaggaggaggccgagctccaagtcgaaacaacagttttaaagcagcctcgaacaacaaccttcatttttcagaagatatatcgatcacagaccatgatttctcagaagatggcttcttcaacaacaatgatatctatggtggcttgtaa

SEQ ID NO: 681 - protein, 748 aa, Arabidopsis thaliana
MNRTVVSGAVESSFSLTDAVGTEALNMQRSSGINNNMRIPTSPMSFSSNSVNIPGSLVLDGSAASMQHLPQQQQQQLLQQQTGQGSVPMRENNYSHVDKKPRLEVKQEDMLQQQILQQLIQRQDPTGRNPQMQALLQQQRLRQHQQMLQSMSPSQRLQLQQQQQLRQQLQQQGTQQIPPNVRPYEVGVCARKLMMYLYHLQQRPAENCITYWRKFVAEYFSPRAKQRLCLSQYESAGHHALGMFPQAAPDMWQCDLCGTKSGKGFEATFDVLARLIEIKFASGIIDELLYLDHPRENRFPNGLMMLEYRKAVQETVHEQFRVVREGHLRIIFSQDLKILSWEFCARRHEELLLRRLIAPQVNQLLQVAQKCQSTISESGSEGVSQQDLQSNSNMVLGAGRQLAKFMELQSLNDLGYPKRYIRTLQISEVVKSMKDLMNFTGEQKIGPIEGLKRLLEQTVTVKLQKQKMQEMEQFGNNGAINGPVQAQMVLTSGTMNGSTGNNTNNHHQIVGRGAMSGPAEGQMVISSGTVSGATANNNSNNHNQIVGRGAMNGSAQAAAALTNYQSMLMRQNAMNNPNSNTGKQEGFSSQNPTPNSNQSPSSSSQQRHNLVTGGFPNSPQMQQQQRTMNGPTNILPQNHPHQLQSPHSHGNTPEQQMLHQLLQEMSENGGSVQQQQAFSGQSGSNSNAERNTTASTSNISGGGRAPSRNNSFKAASNNNLHFSEDISITDHDFSEDGFFNNNDIYGGL

SEQ ID NO: 682 - DNA, 3683 bp, Antirrhinum majus
  CDS (320)..(3025)
  misc_feature (564)..(564): n is a, g, c or t
  misc_feature (1023)..(1023): n is a, g, c or t
  misc_feature (1038)..(1038): n is a, g, c or t
  misc_feature (1488)..(1488): n is a, g, c or t
  misc_feature (1806)..(1806): w is a or t
  misc_feature (2851)..(2851): m is a or c
  misc_feature (3311)..(3311): n is a, g, c or t
  misc_feature (3668)..(3668): n is a, g, c or t
aattgataccaagcttaagtaggatgttcagagataaagccagcttctttgattctgattttcacaatcagtttggtcgaacaaacgacactatcttcgtgcatgaggcctatcccgttctcctctttcatagtaaacattttagaaattcgaaaatttgttggttgtgtgtgtagattgtaacatttttctgaatttgtacctttgttcacactttccagtggtggggaatttagattaatgttatttagggggttcaatctgtagtgtataaagagttttgtgaactagtgtgttgataatttgatatcatctaataatggtgccccaagggcctcccactccacttggtgggggccagcctgttccggcttcgatgctgaggtcaaattctgggattttgggaagtcaaggcggtggaatggcttcacagaatggatttccttctctggtgtctcctcgcaatcagtttaatagtatgaacatgttggggaatgttcccaatgtttcgtcgttgctccatcagccattcggaaatgggggtcccaattctggattgtctgntcctgggagctcccagcgggggcttattgatggcggggcagagtctgatccgctttcaagcgtcggtaatgggatgggatttaacgctccttcctcatcttatatatcgtcgtccattacagccaaccagaactcatctggtcaagtacaagggcagcaacaattttcaaaccattctggcagccagatgttgacggaccagcaacatgctcaacaacttgattcgcagaattttcatcacaatcagcagcagtttactgtctccagcaactctcaacaacaacagcaaccgcagcagcagcagtatcaagcaatgcgagctggattaggaggtgtcggacctgttaagctagagcagcaagttactaatgagcaagtgcctcagcagctgcaagctttgcggaatcttggttccgtgaagttggaaccgcagcaactgcaaaatatgagaagcttggntcctgtcaaaatggnacctcagcattcagacccatctttgtttttgcagcaacaacagcaacaacagcaacaacagctcctcttgtcacggcagtcatcacaggctgctgcagccgctcagattttgcatcaacagaggcttatgcaaattcaacatcagcaacaacagcaactcatgaaatccatgcctcaacaaagatctccacttcaatcacagttccaatcacagaatttgtcaaatagagctccagtaaaaccggtttatgagcccgggatgtgtgctcgaaggctaacacattacatgtatcagcaacaaaatagacctgaagacaacaacatcgagttctggaggaaatttgtagccgagtattttgcacccaatgccaagaaaaagtggtgtgtttcattgtatggaagtggtcggcaaactaccggagttttccctcaggatgtttggcactgcgnaatttgcaaacgcaagcctggtcgtggttttgaggcaactgcggaggttcttcctagactcttcaaaataaaatatgaaagtggcactttagaagaattactctatgttgatatgccaagagagtatcagaattcctctggacaaattgttctggactatgcaaaagccatacaggagagtgtctttgagcaacttcgcgttgttcgtgacggtcagcttcgaattgtgttctctcctgacctcaagatatgttcctgggagttttgtgctcagcgtcatgaagagcttattcctagaagattgctgataccccaggwtggtcaacttggcgctgctgcccaaaagtaccaggctgctacccagaatgctggatccactgcctctgtctcagagctacaaaataattgcaatacgtttgttgcttctgctcgtcaacttgctaaagccttggaagttccactggtaaatgatttgggatatacaaagagatacgtgcggtgcctgcagatatcagaagtggtgaacagcatgaaagatcttattgattatagtcgtcacactagcacaggtcctatggagagcttggctaagtttcctcgaagaacaaatccttcacctgggtttcaaagtcagcctcaacaacctgagggtcagctgcagcagcaacaatatcaaacgccaggacaaaacccaaacaatgataattctgtccaggctgctgctatgcaacttgcttcgagtaacgggatgccaagtgttaataacactatgaactcattgcccacaacttcatctgctggtaccattgccggacttcttcatcaaaattcaatgaactcacgacaacaaaacccaatgtccaatgcaaacagcccttacggaggtagtagcgttcagatgccatctccaggtccttcaagcagtatgccacaagctcaaccctccccgtctcctttccagtccccaactccttcctcgtctaataataatccacagccaacacataatagtttatcaggagctcactttaattcggtgacttcaccaaatgtttcaatgcaacaaccagctctctctggtgatgcggatgcaaatgattcacagagttcggttcagaaaattatacacgacatgatgatgtcttcacagctcagtgggggtggtatgatgggcatgggcaatatgggcagtgacatgaaaaatgtgaatgtaatgctgtcgtctaacaataatgcgagtatgaatggcagcaatattcttgtaggaaatggaatggccaatggtaatatgagtggtccaggctttggtggcattggtggcgggcgtggtcaacctgccctggtaaacgggattccagcagcmcttgggaataataactcactgtcaatgaatgggagagtaggcatggcgatggcacgagagcagaccatgaatcatcagcagcaacaggatatgggtaaccaactgcttagtggacttggggcagtcaatggcttccaatacccttccaatttggattggaaaacgtctccctgaagatttccttctcctggtattgaccttggtagctgtttgtgcagcacagaaacttcgggagttccctttggacaggatgagtttgaagtgccttaaacgcgacaaagatgaatggtgtcatggttcataaaccactaagtgtttcttgatcttaaattcatctaacttgaacttgtcctggttcgtgcgaatctgcactgaaccgtctttgaggggagcagcaatagggacctggataaccaacgctatttctccccagctctgtcccctcctgagttctacatcncccaatatgtgagtgtatatagtctggattgccttctaagccaagtttactgtagcagttttaagagttgccagaattgttttatgctcattttgttcctataatcatcttttatttattacatgaagtgcttccttatggttatctccgaatcccacccccacccttgccccgtgcatttaaaaatagtctagctatagaaatcttactatttgaattattataatgggagtgcagttttttggtaattagaccgagttcaggggtgtacatgtaattattcgaaaaattgtaagcatcaagagccatgcaagtcgatctcatatataaatggattttccctaaaaaaaacctcgngccgaattcagcgtg

SEQ ID NO: 683 - protein, 901 aa, Antirrhinum majus
  misc_feature (82)..(82): The Xaa at location 82 stands for Ala, Asp, Gly, or Val.
  misc_feature (235)..(235): The Xaa at location 235 stands for Ala, Asp, Gly, or Val.
  misc_feature (240)..(240): The Xaa at location 240 stands for Ala, Glu, Gly, or Val.
  misc_feature (390)..(390): The Xaa at location 390 stands for Ala, Glu, Gly, or Val.
  misc_feature (496)..(496): The Xaa at location 496 stands for Asp, or Val.
MVPQGPPTPLGGGQPVPASMLRSNSGILGSQGGGMASQNGFPSLVSPRNQFNSMNMLGNVPNVSSLLHQPFGNGGPNSGLSXPGSSQRGLIDGGAESDPLSSVGNGMGFNAPSSSYISSSITANQNSSGQVQGQQQFSNHSGSQMLTDQQHAQQLDSQNFHHNQQQFTVSSNSQQQQQPQQQQYQAMRAGLGGVGPVKLEQQVTNEQVPQQLQALRNLGSVKLEPQQLQNMRSLXPVKMXPQHSDPSLFLQQQQQQQQQQLLLSRQSSQAAAAAQILHQQRLMQIQHQQQQQLMKSMPQQRSPLQSQFQSQNLSNRAPVKPVYEPGMCARRLTHYMYQQQNRPEDNNIEFWRKFVAEYFAPNAKKKWCVSLYGSGRQTTGVFPQDVWHCXICKRKPGRGFEATAEVLPRLFKIKYESGTLEELLYVDMPREYQNSSGQIVLDYAKAIQESVFEQLRVVRDGQLRIVFSPDLKICSWEFCAQRHEELIPRRLLIPQXGQLGAAAQKYQAATQNAGSTASVSELQNNCNTFVASARQLAKALEVPLVNDLGYTKRYVRCLQISEVVNSMKDLIDYSRHTSTGPMESLAKFPRRTNPSPGFQSQPQQPEGQLQQQQYQTPGQNPNNDNSVQAAAMQLASSNGMPSVNNTMNSLPTTSSAGTIAGLLHQNSMNSRQQNPMSNANSPYGGSSVQMPSPGPSSSMPQAQPSPSPFQSPTPSSSNNNPQPTHNSLSGAHFNSVTSPNVSMQQPALSGDADANDSQSSVQKIIHDMMMSSQLSGGGMMGMGNMGSDMKNVNVMLSSNNNASMNGSNILVGNGMANGNMSGPGFGGIGGGRGQPALVNGIPAALGNNNSLSMNGRVGMAMAREQTMNHQQQQDMGNQLLSGLGAVNGFQYPSNLDWKTSP

SEQ ID NO: 684 - DNA, 3495 bp, Antirrhinum majus
  CDS (660)..(3185)
  misc_feature (430)..(430): m is a or c
  misc_feature (431)..(431): y is t or c
  misc_feature (432)..(432): y is t or c
  misc_feature (434)..(434): k is g or t
  misc_feature (476)..(476): m is a or c
  misc_feature (502)..(502): k is g or t
  misc_feature (566)..(566): n is a, g, c or t
  misc_feature (3329)..(3329): n is a, g, c or t
  misc_feature (3351)..(3351): n is a, g, c or t
  misc_feature (3373)..(3373): n is a, g, c or t
  misc_feature (3399)..(3399): n is a, g, c or t
ggcaaagtttctcctaaaattaactctctctataaagttccacgtttgattagacgcgtaatctgagaaatttattaccatttttctttggagaaatttacttaattgaagtgggattggaggttgattcgctgtgtttttaaggcttcgattgagttgggttttggtttgcgaatcttgtcaggtcagtagattgctaattagtataaaattttaatcttatttagcttgtaattgttgtaaaaaatcgttctttataaagtttgggtttagtattgattgtttctgaattagggttttgttgctgaaattgggtagtaaagtaaatttcgcaacgaggttgttcttctgtctgtttgaagttgttctgtgtttttttcaaattcatttcttgtgttaattatggtcgatcttgagcttcattgggttmyytkctgatctgtttgtgatttaattagcagaactccgaacaagcmctcttttttttttccaagattgcagkgtgtttagtgaaaaaacaagtgggttttgcaagaagataatgggggaaaaagtagctgtacttncatatgacttggtgccaaggttattgtaggggaaagtaagtttttttgtgggacagctgtttcgatcccagtggccaagtatcactgccccccatggttccttctcgggtggttggtggcatagcacaatcatcttcaagctcaggaatcttttttcagggagacggacaaaaccaggttggagggaattctcagttaagttctaattttaggaactcgtctaattcagttcctggacaagcacgtgctaacttgggtctgctgtcgggagaagttagcaacactttattaaatagtgtggcgagttctggccccagtgtcggggcaagttctttggtaactgatgctaactctggactttcagctggtcctcatctacagaggagtgctagtataaatacagaatcttacatgcgcttgcctgcttcacccatgtcattctcatctaataacgttagcatttctggctcgtccgtcatcgatggatcctctggtatgcagcaaagctctaatcaagacccaggttcgcatcatgcccagcaaactcagcaacatcagggagcttctagtgtcacatctctggccgcatcacgtatggggccagctcagctccatggtggtccaaggatgcacaattctttgattcaggacccagctgctatatctcagcttcaaaagaaaccccgcttggacatcaagcaagaagatattgtccagcagcaagttttgcaacaactcttgcagagagaccccatgcaattgcagagccccaatctgcagttgcaagctctgatccagcaacagagacttaggcagccacagcaacaccaacagcaacaactcctgcagtctatgacgccaatgcagcgggcccagttattgcagcaacagcagcagcagcagcagcagcaacagcaacagcaacagcagcagcagttaagacagcagcttctgcagcagggtatgcagcctgggtctgggataaagcgtccctacgatggtggtgtatgctcgcgtcgattaatgcaatacttgtatcatcagagacagagacctgctgacaatacaattgcttattggagaaaatttgtggctgagtattactctccacgcgcaaagaagaggtggtgcctatccctatatgataatgttggacatcactcactcggggtattcccccaggcagcaatggatgcatggcagtgtgacatttgtggttcaaaatctggaagaggatttgaggcaacttttgaagtgctccctagacttaacgaaatcaaatttggtagtggtgttatcgatgaacttttgttcttggacttgcctcgcgaatgtcgtttcccatcaggaatgatgatgctggagtatgcaaaggcagttcaggaaagtatatatgaacaacttcgtgtggttcgggagcgtcagctccggatcattttcacccaggatttgaagattttgtcttgggaattttgtgctcggcgtcatgaagaacttcttcctcgtagagtggttgcaccacaggtgaatcacttgcttcaagttgcacagaaatgccaaagcacgatatcggaaagtgggccagagggcgtttctcaaccagatatacaggcaaacagtgctatggtcgtaacagctggacgccagcttgctaggagtttggaattacagtcgctaaatgatttaggcttctccaaacgatatgtgcggtgcctgcagatagctgaggttgtcaatagcatgaaggatgtcatgaatttttgcagagaccataaagtcggcccaattgaggccctgaaaacttttccacgacacgcatctgcaaccaaggtccagatgcaaaagatgcatgaactggagatgggaggtctccagggtctaccaactgatcgaaacatgctcaataaactaatggcattacatccaggaggactcaatagccctatgaacaataatcaacgtatggtcggccaaggagccatgaatggctcagctcaagctgctcttgcattaagtaactatcaaaatatgctaatgagacaaaattcaatgaactcaaaccaggagccgtcttctcctttcagtacttccagccaacctccatctactccaaggtcttcaggtattttatcaggaactgtgcaaaactcgcccggtcgtggctttcctagtcaccagggaccacatcagcaacagtatcaaagcgggaatggtttactactgcaaaatcagtctatgccttcccaaggcagccaatcattgcaacagcagatgatacagcaaatgctgcatgatatgagcaataagaataatggtcagggagttcaacaacagtccatatctgctcaaaattcaggtggtaatgtatctcgagctgggagtgggcctgggaatgttgcatcacagcctccaaacagaagcaatagtttcaaatctgcttccaatggtgaatctccgtctgctgttagcaatgttggatttagccaaaagggaacagatttgccacagaaccttcatatctctgatgagatggttcaagattttggacacgattttagtgagagtggtttttttagcagtgatcttgacgacagcatgaacttcagttggaagggatgagtggttaacagtgtcttaatgttgtattatgagaaagtggaatctgaggatgtctttgtacaggcagttataacttataagttgctctctttacgtttatgtattgggttactgactacggagtttattggccccgttcagtantctgccagttttgttttcttgnggggattcaaactttgaagttnccggtcttgcaattgtatctaatganacgaattggggacttcttgattggataacctgactggcctgaccagtggtgcgacattagactggttaagttgatgacctaaaaaaaaaaaaaaaa

SEQ ID NO: 685 - protein, 841 aa, Antirrhinum majus
MVPSRVVGGIAQSSSSSGIFFQGDGQNQVGGNSQLSSNFRNSSNSVPGQARANLGLLSGEVSNTLLNSVASSGPSVGASSLVTDANSGLSAGPHLQRSASINTESYMRLPASPMSFSSNNVSISGSSVIDGSSGMQQSSNQDPGSHHAQQTQQHQGASSVTSLAASRMGPAQLHGGPRMHNSLIQDPAAISQLQKKPRLDIKQEDIVQQQVLQQLLQRDPMQLQSPNLQLQALIQQQRLRQPQQHQQQQLLQSMTPMQRAQLLQQQQQQQQQQQQQQQQQQLRQQLLQQGMQPGSGIKRPYDGGVCSRRLMQYLYHQRQRPADNTIAYWRKFVAEYYSPRAKKRWCLSLYDNVGHHSLGVFPQAAMDAWQCDICGSKSGRGFEATFEVLPRLNEIKFGSGVIDELLFLDLPRECRFPSGMMMLEYAKAVQESIYEQLRVVRERQLRIIFTQDLKILSWEFCARRHEELLPRRVVAPQVNHLLQVAQKCQSTISESGPEGVSQPDIQANSAMVVTAGRQLARSLELQSLNDLGFSKRYVRCLQIAEVVNSMKDVMNFCRDHKVGPIEALKTFPRHASATKVQMQKMHELEMGGLQGLPTDRNMLNKLMALHPGGLNSPMNNNQRMVGQGAMNGSAQAALALSNYQNMLMRQNSMNSNQEPSSPFSTSSQPPSTPRSSGILSGTVQNSPGRGFPSHQGPHQQQYQSGNGLLLQNQSMPSQGSQSLQQQMIQQMLHDMSNKNNGQGVQQQSISAQNSGGNVSRAGSGPGNVASQPPNRSNSFKSASNGESPSAVSNVGFSQKGTDLPQNLHISDEMVQDFGHDFSESGFFSSDLDDSMNFSWKG

SEQ ID NO: 686 - DNA, 2271 bp, Arabidopsis thaliana
  CDS (1)..(2271)
atgagtgtttcaacacccggtccaagcgcaggagctagttcgcttgtcacagatgctaattcagggctctctggaggtggtcctcatttgcagcgtagtgctagtatcaataatgagtcatatatgcgtttaccggcgtctcctatgtcgttctcttctaataatatcagcatatctggttcatcagttgtagatgggtcgactgtggtacaacggcatgatcctagtgttcagctaggtggctctagtgctacatcactgcctacatcacaaactaatcaaatcccgctttctatggctcggcgtgcttctgaatcgttctttcaggatccaaacaacttaactcaagcacggaaaaaacctagattagattcaaagcaggatgatgctttgcagcagcagattttacgtcagtggcttcagagacaggatatattgcagcagcagcagcaacaacaacaacaaggccaaaatccacagttccaaatcttgcttcagcaacaaaagctgaggcaacagcaacaatatctccagtccctcccaccattgcaacgggttcaactgcagcagcagcaacaagtgcagcaacagcaacagttgcagcagcagcaccaacagcaacagcaacagttgcaacaacaaggaatgcaaatgcaactaaccggtgggccaagaccttatgaaaatagcgtttgcgctcgaagattgatgcagtacctatatcatcagcgacaaaggccttctgagagcagtattgtttactggaggaaatttgtgacggagtatttttctccccgggcaaagaaaagatggtgtctttctcattatgataatgtggggcatagtgcacttggtgtttctcctcaggcagccacggatgaatggcagtgtgatctatgtggttctaaatcgggaagaggatttgaagcaacttttgatgtcttgccaaggcttaacgaaatcaaattcgcaagtggtgtcctggacgagcttctttatctgggtgtaccgtctgaacgcagatatggatctggaattatggtgttagagtatggaaaagcagttcaggagagtgtgtacgaacatatccgtgttgttcgcgaaggccatcttcggattatattctcccaagagctgaagattctctcatgggagttctgtactcgtcgacatgaagaactacttcctcgtcgcctagtagctccacaggtgaaccaattgcttcaggttgcagagaaatgtcagagcacaattgatcaaagtggatcagatgggattcatcaacaagatttgcaagctaatagcaacatggtcatggctgctggacgtcaactagcaaaaagcttggagtcacattcactcaatgacttaggcttctcaaaacgatatgttcggtgtctgcagatttctgaggttgtcagcagcatgaaagatatgattgacttttgccgtgaccaaaaagtgggtccaatcgaggctttgaagagctatccatatcgaatgaaggctggtaaacctcagatgcaggagatggagcaactagcggctgcccgagggcttccacctgataggaacagtctcaacaagctaatggccttgcgcaattccgggataaacataccaatgaacaacatgagcggtcaaggatctcttcccggctctgcacaagctgccgcttttgcgcttaccaactaccagagcatgctcatgaaacaaaaccatctgaattcagacctaaacaacaccacaatccagcaagaaccatcaagaaaccggagtgcatccccgagctatcaaggaactagtcccttgttacctggttttgtgcatagcccatcaataagtggtgtatcttcccatctatctcctcagcggcaaatgccaagctccagttataatggctcaacccagcaataccaccaacagccaccttcctgtagtagcggtaaccaaacattggaacaacaaatgattcatcaaatatggcaacagatggcaaacagcaatggaggctccggtcaacaacaacagtcactttctggtcagaacatgatgaattgcaataccaacatgggaagaaacagaacagattatgttcccgcagcagctgaaacaccaagcacctccaacagattcagaggcatcaaggggttagaccaaagccaaaacctggaaggtattatctctaatacatcgctcaactttgggaataacggggtttttagcaatgaggttgatgaaagcatgggaggatattcttggaagtcatga

SEQ ID NO: 687 - protein, 756 aa, Arabidopsis thaliana
MSVSTPGPSAGASSLVTDANSGLSGGGPHLQRSASINNESYMRLPASPMSFSSNNISISGSSVVDGSTVVQRHDPSVQLGGSSATSLPTSQTNQIPLSMARRASESFFQDPNNLTQARKKPRLDSKQDDALQQQILRQWLQRQDILQQQQQQQQQGQNPQFQILLQQQKLRQQQQYLQSLPPLQRVQLQQQQQVQQQQQLQQQHQQQQQQLQQQGMQMQLTGGPRPYENSVCARRLMQYLYHQRQRPSESSIVYWRKFVTEYFSPRAKKRWCLSHYDNVGHSALGVSPQAATDEWQCDLCGSKSGRGFEATFDVLPRLNEIKFASGVLDELLYLGVPSERRYGSGIMVLEYGKAVQESVYEHIRVVREGHLRIIFSQELKILSWEFCTRRHEELLPRRLVAPQVNQLLQVAEKCQSTIDQSGSDGIHQQDLQANSNMVMAAGRQLAKSLESHSLNDLGFSKRYVRCLQISEVVSSMKDMIDFCRDQKVGPIEALKSYPYRMKAGKPQMQEMEQLAAARGLPPDRNSLNKLMALRNSGINIPMNNMSGQGSLPGSAQAAAFALTNYQSMLMKQNHLNSDLNNTTIQQEPSRNRSASPSYQGTSPLLPGFVHSPSISGVSSHLSPQRQMPSSSYNGSTQQYHQQPPSCSSGNQTLEQQMIHQIWQQMANSNGGSGQQQQSLSGQNMMNCNTNMGRNRTDYVPAAAETPSTSNRFRGIKGLDQSQNLEGIISNTSLNFGNNGVFSNEVDESMGGYSWKS

SEQ ID NO: 688 - DNA, 2412 bp, Oryza sativa subsp
  CDS (1)..(2412)
atgtctggggcgccatgctccaaccttggacttgttcccagggatatgcatggtagtatccctattagcactacaaattcctctgggccaagcattggtgttagctctttggtgacggatgctaactcatcgctctccggaggtgcccagttgcagccaagtacgagcatgaatgctgattcattcatgcgccttcctgcttccccaatgtcgttttcatccaataacatctctggatcttcagttattgatggtcccattgtgcaacaaagtcctccccaagagcagatgcagaagcgaaggtcttctagtgtaacatcacaacctgttattgatgctgctggtgcattgcatgctcagaagaagtcaagggttgatattaggcaagatgatatcctgcaacacaatttaatccagcaactgctccaaggccagagttctcttcatctgcagggtcaacagaaccctcagattcaagccttgatccatcagcataaactggcacagattcagcagcaacagcagcatcagatgttgcaaccattttcacagatccaacaatctcaagttggcatacctcggcagccacagttgaggcctccactagcgcagcctggaatgcagctagctggacctgttaggactcctgtcgagaatgggctttgttctcgaaggttaaagcaatacttataccataagcgtcaccgaccagagaataatccaataacatactggaggaagcttattgatgaatattttgcaccacgagcaagagaaagatggtgtgtatcctcgtatgagaaaagaggaaatccttcaggtgctgttccacacacagctccggattcatggcgctgtgacatttgtaatacacatgggggcaaaggatatgaggctacctatgaaatacttcctagactctgtcaaattagatttgaccatggtgttatagatgaatacttattccttgacatggccaatgaattccggttgcccaatggactaatgctgctggaacatactaaagttgttcagaaaagcatttatgaacatatgcatgtgatacacgaggggcagttgagaatcatattcacaccagaactgaagataatgtcctgggagttctgttcacggcgacatgatgagtatatcactcgcaggtttctttcaccccaggttgctcatctgctgcaagttgcccagaaatatcaaactgttgccactgaaagtggtccagctggggtctcaaacagtgatgcacagaacatttgcaacatgtttgtgacggcgtcacgacagctagcgaaaaatatagaccaccacaccttaaatgagcatggtctatctaaaagatatgttcgctgcttgcagatatcagaggtggtgaatcacatgaaagacctgattgaattcagccacaagaacaagcttggtcctatagagggtctgaagagctatcccaagcaaactgcagcaaaacttccagtacaaaacatgcacgagccaaagcaactaatggcagctgctggccttcctaatgaccagactaacctcaaagccatgggtgtcaaaacagaaatgaacacccatgcgaatgagacgcacggtattggaccaattggaaatggtccgcagaatgctgctgcacttaacaattaccagaatcccattggaaatggtctgcagaatgctgctgcacttaacaattaccagaatatccttagaagttcagtcgcaaaccagagtttgcttcagcaggaggcatcaagcatgtttaaaggtcccacagcaatgcacaatggcattcagctggaagcatctagatccttccgtggaccaaaccaggtgcatctcgcgcagttccaacatccggcctcatttcagcagcctatgcctcagcagagcagcctccagggcttgggtgtgagcccacaatatcagcagcatgtgctccatcagttgctgcaagaggccaagaacactaacaaccgtgtcttggcgcagcagcagcagcaacaacaacttcaacatgctcctgctaacagtggtcttgcatcaggaggaacggctatcaccggcagcgccgctagcggggatcatatgaataacaacggcgcggtgaagggtgggactccaatggttacaacaggtcctagcagtgtgatcaacaatacagccagcatcctccccagcagaagtaacagcttcaagtcagtgagcagcaacccccaagttgcagctgctgcgggcggcggcattggcagcggcggccatgcggctacccccaaggctgatgctctgcatgagttggatgatcttgacaatcttgggaatctgatcagtactgaactggaggagagtgggctgttcctgggtgaccaggcaggtggtggctactcatggaacatgtga

SEQ ID NO: 689 - protein, 803 aa, Oryza sativa subsp
MSGAPCSNLGLVPRDMHGSIPISTTNSSGPSIGVSSLVTDANSSLSGGAQLQPSTSMNADSFMRLPASPMSFSSNNISGSSVIDGPIVQQSPPQEQMQKRRSSSVTSQPVIDAAGALHAQKKSRVDIRQDDILQHNLIQQLLQGQSSLHLQGQQNPQIQALIHQHKLAQIQQQQQHQMLQPFSQIQQSQVGIPRQPQLRPPLAQPGMQLAGPVRTPVENGLCSRRLKQYLYHKRHRPENNPITYWRKLIDEYFAPRARERWCVSSYEKRGNPSGAVPHTAPDSWRCDICNTHGGKGYEATYEILPRLCQIRFDHGVIDEYLFLDMANEFRLPNGLMLLEHTKVVQKSIYEHMHVIHEGQLRIIFTPELKIMSWEFCSRRHDEYITRRFLSPQVAHLLQVAQKYQTVATESGPAGVSNSDAQNICNMFVTASRQLAKNIDHHTLNEHGLSKRYVRCLQISEVVNHMKDLIEFSHKNKLGPIEGLKSYPKQTAAKLPVQNMHEPKQLMAAAGLPNDQTNLKAMGVKTEMNTHANETHGIGPIGNGPQNAAALNNYQNPIGNGLQNAAALNNYQNILRSSVANQSLLQQEASSMFKGPTAMHNGIQLEASRSFRGPNQVHLAQFQHPASFQQPMPQQSSLQGLGVSPQYQQHVLHQLLQEAKNTNNRVLAQQQQQQQLQHAPANSGLASGGTAITGSAASGDHMNNNGAVKGGTPMVTTGPSSVINNTASILPSRSNSFKSVSSNPQVAAAAGGGIGSGGHAATPKADALHELDDLDNLGNLISTELEESGLFLGDQAGGGYSWNM

SEQ ID NO: 690 - DNA, 2337 bp, Zea mays
  CDS (1)..(2337)
atgaacggaactcatccctggacctccatgtccgggggtgcatgttctaaccttggatatgccagggacatgaatggtaatgttccaattagcactacaaattcctctggaccaagcattggagttagctcgttggtgactgacgccaactcgtcactttccggtggtgcccagttacagccaagtactagcatgaatggtgattcattgatgcgtgttcctgcatcaccaatgtcattttcatccaataacatctctggctcttcagtcattgatggttgcatcatgcagcaaagtccaccccaagaacagatgcagaaaaggaggtcttcaagtgtaacatcacaacatgtgatcgatgctggtggtgcattgcatgctcagaagaaatcaaggactgatgttagtcagggtgatatcatgcaacatcagctgattcagcatctgatccatggtcagaattctcttcatttccaggggcaacagaacccacagcttcaagcttttatccagcagcataaactagcacaacttcagcaacggcagcagcagcatttgttgcaaccattttctcagatgcaacaaccccaagttggtattcctcggcagccgcaacttaggccgccattggcacagactggaatgcagttaggtggtcctgttaggactcctatcgagaggggcgtttgttctcgcaggatactgcagtatctatttcacaagcgtcatcgcccagagaataactctataacatactggaggaagattgttgaagagtactttgcacctcgagcaagagaaaggtggtgtgtctcttcttatgaaaacagagggaattcttcagctgctgctccacagaaagctctggatacatggcgatgtggcatttgcaatacacatgctgggaaaggatatgaagctacctatgaaatacttcctaggctctgccaaattagatttgaccatggtgttattgatgaatacttatactttgactcacccaacgaatttgggttgcctaatggacaaatggtgctggagcatgcaaaagttgttcaaaaaagtgtttatgaacatctacatgttatacacgagggacatctgagaatcattttcacaccagaactgaagataatatcgtgggaattttgttcaagacgtcatgaggaatacaccactcgtaagactatagcaccacaggttaataatcttctgcaagttgtccagaaataccaagctgttgtcactgaaagtggatcagccgggatatcaaataatgatgcacaaaccatctgcaacatgtttgtcactgcatcacaacaactggcaaaaaatctagagcatcacaccttaaatgaacatgggctctctaaaagatatgtacgctccctgcagatatcggaggtggtgaatcacatgaaggacttgattgagttcagccacaagagcaagcttggtcctaaagagagcctgaacagctattctaaaaccacggcaaagtttgagaatatgcatgattcgagacaggccatggctgccgctaaccttgccaacaaccagagcaacaccaaattgatgggggtcaaacaagagacaagcacttctgcgaacaaccagactcctggtgccggagccattggcaacaacaatctaccgattgccgcacctctaaacacctaccagaacatgctcagaagctcaggtgccagtacgatttctctgcagcaggaggcgtcgagtgtcttcaaaggtcctacagcaatgcacaacggcatgcagctggaagcggccaggtccttcctgggacctaaccaagttcaattccagcaccacccaccgtcgtcgtcgtttcagcagcagcagcaaaacagtttccatggctttggtgtcaacccgcagtaccagcagcatgtcctcaaccagcttctgcaggaagttaagaacagtaacaaccgctcgaaagcgcagcaaccgcctctggatgcaccaccgccgaatgcgagcggcgggggtctcgcgccaggagttgctacccccaacgtcattgctgctactggggagcaggggcagcatgtcaataacagtagctctaaccataacggcacggtaaagggtgctgctggtactggccctagcaatgtcatcaacaatagcacagccagcatggcttcggccagaaacagcagcttcaagtcggtgagcagcagtccagctgctgctggcaatgccgtgagctcgaaggtcgatgactccttccatcaactggaggacctcgacgacatgatcgctaacgaactggtggagagcgggctgttcggtgcaggacacgggtggtag

SEQ ID NO: 691 - protein, 778 aa, Zea mays
MNGTHPWTSMSGGACSNLGYARDMNGNVPISTTNSSGPSIGVSSLVTDANSSLSGGAQLQPSTSMNGDSLMRVPASPMSFSSNNISGSSVIDGCIMQQSPPQEQMQKRRSSSVTSQHVIDAGGALHAQKKSRTDVSQGDIMQHQLIQHLIHGQNSLHFQGQQNPQLQAFIQQHKLAQLQQRQQQHLLQPFSQMQQPQVGIPRQPQLRPPLAQTGMQLGGPVRTPIERGVCSRRILQYLFHKRHRPENNSITYWRKIVEEYFAPRARERWCVSSYENRGNSSAAAPQKALDTWRCGICNTHAGKGYEATYEILPRLCQIRFDHGVIDEYLYFDSPNEFGLPNGQMVLEHAKVVQKSVYEHLHVIHEGHLRIIFTPELKIISWEFCSRRHEEYTTRKTIAPQVNNLLQVVQKYQAVVTESGSAGISNNDAQTICNMFVTASQQLAKNLEHHTLNEHGLSKRYVRSLQISEVVNHMKDLIEFSHKSKLGPKESLNSYSKTTAKFENMHDSRQAMAAANLANNQSNTKLMGVKQETSTSANNQTPGAGAIGNNNLPIAAPLNTYQNMLRSSGASTISLQQEASSVFKGPTAMHNGMQLEAARSFLGPNQVQFQHHPPSSSFQQQQQNSFHGFGVNPQYQQHVLNQLLQEVKNSNNRSKAQQPPLDAPPPNASGGGLAPGVATPNVIAATGEQGQHVNNSSSNHNGTVKGAAGTGPSNVINNSTASMASARNSSFKSVSSSPAAAGNAVSSKVDDSFHQLEDLDDMIANELVESGLFGAGHGW

SEQ ID NO: 692 - DNA, 2337 bp, Zea mays
  CDS (1)..(2337)
atgaacggaactcatccctggacctccatgtccgggggtgcatgttctaaccttggatatgccagagacatgaatggtaatgttccaattagcactacaaattcctctggaccaagcattggagttagctcgttggtgactgacgccaactcgtcactttccggtggtgcccagttacagccaagtactagcatgaatggtgattcattgatgcgtgttcctgcatcaccaatgtcattttcatccaataacatctctggctcttcagtcattgatggttccatcatgcagcaaagtccaccccaagaacagatgcagaaaaggaggtcttcaagtgtaacatcacaacatgtgatcgatgctggtggtgcattgcatgctcagaagaaatcaagggctgatgttagtcagggtgatatcatgcaacatcagctgattcagcatctgatccatggtcagaattctcttcatttccaggggcaacagaacccacagcttcaagcttttatccagcagcataaactagcacaacttcagcaacggcagcagcagaatttgttgcaaccattttctcagatgcaacaaccccaagttggtattcctcggcagccgcaacttaggccgccattggcacagactggaatgcagttaggtggtcctgttaggactcctatcgagaggggcgtttgttctcgcaggatactgcagtatctatatcacaagcgtcatcgcccagagaataaccctataacatactggaggaagcttgttgaagagtacttcgcacctcgagcaagagaaagatggtgtgtctcttcttatgaaaacagagggaattcttcagctgctgctccacagaaagctttggatacgtggcgatgtggcatttgcaatacacatggtgggaaaggatatgaagttacctatgaagtacttcctaggctctgccaaattagatttgaccatggtgttattgatgaatacttatactttgactcacccaacgaattccggttgcctaatggacaaatggtgctggagcatgcaaaagtagttcaaaaaagtgtttatgaacatctgcatgttatacacgagggacatctgagaataattttcacaccagaactgaagataatgtcttgggagttctgttcacgacgccatgaggagtacaccactcgcaagactatagcaccacaggttaataatcttctgcaagttgcccagaaattccaagctgttgtcagtgaaagtggatcagctgggatatcaaataatgatgcacaaaccatctgcaacatgtttgttaatgcatcacggcaactggcaaaaaatctagagcatcacaccttaaatgaacatgggctttctaaaagatatgtacgctgcctgcagatatcggaggtggtgaatcacatgaaggacttgatcgagttcagccacaagagcaagcttggtcctaaagagagcctgaacagttattctaaaaccacggcaaagtttgagaatatgcatgattcgagacaggccatggctgccgctaaccttgccaacaaccagagcaacaccaaattgatgggggtcaaacaagagacaagcacttctgcgaacaaccagactcctggtgccggagccattggcaacaacaatctaccgattgccgcacctctaaacacctaccagaacatgctcagaagctcaggtgccagtacgatttcgctgcagcaggaggcgtcgagtgtcttcaaaggtcctacagcaatgcacaacggcatgcagctggaagcggccaggtccttcctgggacctaaccaagttcaattccagcaccacccaccgtcgtcgtcgtttcagcagcagcagcaaaacagtttccatggctttggtgtcaacccgcagtaccagcagcatgtcctcaaccagcttctgcaggaagttaagaacagtaacaaccgctcgaaagcgcagcaaccgcctctggatgcaccaccgccgaatgcgagcggcgggggtctcgcgccaggagttgctacccccaacgtcattgctgctactggggagcaggggcagcatgtcaataacagtagctctaaccataacggcacggtaaagggtgctgctggtactggccctagcaatgtcatcaacaatagcacagccagcatggcttcggccagaaacagcagcttcaagtcggtgagcagcagtccagctgctgctggcaatgccgtgagctcgaaggtcgatgactccttccatcaactggaggacctcgacgacatgatcgctaacgaactggtggagagcgggctgttcggtgcaggacacgggtggtag

SEQ ID NO: 693 - protein, 778 aa, Zea mays
MNGTHPWTSMSGGACSNLGYARDMNGNVPISTTNSSGPSIGVSSLVTDANSSLSGGAQLQPSTSMNGDSLMRVPASPMSFSSNNISGSSVIDGSIMQQSPPQEQMQKRRSSSVTSQHVIDAGGALHAQKKSRADVSQGDIMQHQLIQHLIHGQNSLHFQGQQNPQLQAFIQQHKLAQLQQRQQQNLLQPFSQMQQPQVGIPRQPQLRPPLAQTGMQLGGPVRTPIERGVCSRRILQYLYHKRHRPENNPITYWRKLVEEYFAPRARERWCVSSYENRGNSSAAAPQKALDTWRCGICNTHGGKGYEVTYEVLPRLCQIRFDHGVIDEYLYFDSPNEFRLPNGQMVLEHAKVVQKSVYEHLHVIHEGHLRIIFTPELKIMSWEFCSRRHEEYTTRKTIAPQVNNLLQVAQKFQAVVSESGSAGISNNDAQTICNMFVNASRQLAKNLEHHTLNEHGLSKRYVRCLQISEVVNHMKDLIEFSHKSKLGPKESLNSYSKTTAKFENMHDSRQAMAAANLANNQSNTKLMGVKQETSTSANNQTPGAGAIGNNNLPIAAPLNTYQNMLRSSGASTISLQQEASSVFKGPTAMHNGMQLEAARSFLGPNQVQFQHHPPSSSFQQQQQNSFHGFGVNPQYQQHVLNQLLQEVKNSNNRSKAQQPPLDAPPPNASGGGLAPGVATPNVIAATGEQGQHVNNSSSNHNGTVKGAAGTGPSNVINNSTASMASARNSSFKSVSSSPAAAGNAVSSKVDDSFHQLEDLDDMIANELVESGLFGAGHGW

SEQ ID NO: 694 - DNA, 20 bp, Artificial sequence
  primer
atggtaccatcagagccgcc

SEQ ID NO: 695 - DNA, 22 bp, Artificial sequence
  primer
tcacgcgttccaatcaaaattg

SEQ ID NO: 696 - protein, 1020 aa, Artificial sequence
  consensus sequence
  Variant (2)..(2): Xaa in position 2 is any amino acid
  Variant (3)..(16): Xaa in position 3 to 16 is any or no amino acid
  Variant (18)..(26): Xaa in position 18 to 26 is any amino acid
  Variant (27)..(28): Xaa in position 27 to 28 is any or no amino acid
  Variant (30)..(39): Xaa in position 30 to 39 is any amino acid
  Variant (40)..(80): Xaa in position 40 to 80 is any or no amino acid
  Variant (82)..(82): Xaa in position 82 is any amino acid
  Variant (84)..(108): Xaa in position 84 to 108 is any amino acid
  Variant (109)..(110): Xaa in position 109 to 110 is any or no amino acid
  Variant (112)..(129): Xaa in position 112 to 129 is any amino acid
  Variant (130)..(137): Xaa in position 130 to 137 is any or no amino acid
  Variant (139)..(139): Xaa in position 139 is any amino acid
  Variant (141)..(145): Xaa in position 141 to 145 is any amino acid
  Variant (146)..(154): Xaa in position 146 to 154 is any or no amino acid
  Variant (156)..(162): Xaa in position 156 to 162 is any amino acid
  Variant (164)..(164): Xaa in position 164 is any amino acid
  Variant (165)..(167): Xaa in position 165 to 167 is any or no amino acid
  Variant (169)..(173): Xaa in position 169 to 173 is any amino acid
  Variant (174)..(175): Xaa in position 174 to 175 is any or no amino acid
  Variant (177)..(178): Xaa in position 177 to 178 is any amino acid
  Variant (180)..(184): Xaa in position 180 to 184 is any amino acid
  Variant (186)..(195): Xaa in position 186 to 195 is any amino acid
  Variant (197)..(198): Xaa in position 197 to 198 is any amino acid
  Variant (199)..(202): Xaa in position 199 to 202 is any or no amino acid
  Variant (204)..(212): Xaa in position 204 to 212 is any amino acid
  Variant (213)..(246): Xaa in position 213 to 246 is any or no amino acid
  Variant (248)..(248): Xaa in position 248 is any amino acid
  Variant (250)..(250): Xaa in position 250 is any amino acid
  Variant (252)..(252): Xaa in position 252 is any amino acid
  Variant (254)..(255): Xaa in position 254 to 255 is any amino acid
  Variant (258)..(259): Xaa in position 258 to 259 is any amino acid
  Variant (261)..(261): Xaa in position 261 is any amino acid
  Variant (264)..(266): Xaa in position 264 to 266 is any amino acid
  Variant (269)..(270): Xaa in position 269 to 270 is any amino acid
  Variant (272)..(272): Xaa in position 272 is any amino acid
  Variant (274)..(274): Xaa in position 274 is any amino acid
  Variant (278)..(281): Xaa in position 278 to 281 is any amino acid
  Variant (285)..(285): Xaa in position 285 is any amino acid
  Variant (287)..(287): Xaa in position 287 is any amino acid
  Variant (289)..(290): Xaa in position 289 to 290 is any amino acid
  Variant (294)..(294): Xaa in position 294 is any amino acid
  Variant (296)..(296): Xaa in position 296 is any amino acid
  Variant (298)..(298): Xaa in position 298 is any amino acid
  Variant (299)..(313): Xaa in position 299 to 313 is any or no amino acid
  Variant (315)..(315): Xaa in position 315 is any amino acid
  Variant (317)..(317): Xaa in position 317 is any amino acid
  Variant (319)..(319): Xaa in position 319 is any amino acid
  Variant (320)..(320): Xaa in position 320 is any or no amino acid
  Variant (322)..(325): Xaa in position 322 to 325 is any amino acid
  Variant (327)..(327): Xaa in position 327 is any amino acid
  Variant (329)..(329): Xaa in position 329 is any amino acid
  Variant (331)..(336): Xaa in position 331 to 336 is any amino acid
  Variant (337)..(346): Xaa in position 337 to 346 is any or no amino acid
  Variant (348)..(348): Xaa in position 348 is any amino acid
  Variant (349)..(350): Xaa in position 349 to 350 is any or no amino acid
  Variant (352)..(352): Xaa in position 352 is any amino acid
  Variant (354)..(359): Xaa in position 354 to 359 is any amino acid
  Variant (361)..(363): Xaa in position 361 to 363 is any amino acid
  Variant (364)..(365): Xaa in position 364 to 365 is any or no amino acid
  Variant (367)..(369): Xaa in position 367 to 369 is any amino acid
  Variant (371)..(373): Xaa in position 371 to 373 is any amino acid
  Variant (375)..(376): Xaa in position 375 to 376 is any amino acid
  Variant (378)..(378): Xaa in position 378 is any amino acid
  Variant (380)..(381): Xaa in position 380 to 381 is any amino acid
  Variant (383)..(385): Xaa in position 383 to 385 is any amino acid
  Variant (387)..(388): Xaa in position 387 to 388 is any amino acid
  Variant (391)..(391): Xaa in position 391 is any amino acid
  Variant (395)..(395): Xaa in position 395 is any amino acid
  Variant (397)..(399): Xaa in position 397 to 399 is any amino acid
  Variant (403)..(403): Xaa in position 403 is any amino acid
  Variant (409)..(409): Xaa in position 409 is any amino acid
  Variant (415)..(417): Xaa in position 415 to 417 is any amino acid
  Variant (420)..(422): Xaa in position 420 to 422 is any amino acid
  Variant (426)..(427): Xaa in position 426 to 427 is any amino acid
  Variant (429)..(430): Xaa in position 429 to 430 is any amino acid
  Variant (432)..(432): Xaa in position 432 is any amino acid
  Variant (435)..(435): Xaa in position 435 is any amino acid
  Variant (437)..(445): Xaa in position 437 to 445 is any amino acid
  Variant (446)..(464): Xaa in position 446 to 464 is any or no amino acid
  Variant (466)..(467): Xaa in position 466 to 467 is any amino acid
  Variant (469)..(469): Xaa in position 469 is any amino acid
  Variant (471)..(473): Xaa in position 471 to 473 is any amino acid
  Variant (475)..(476): Xaa in position 475 to 476 is any amino acid
  Variant (477)..(603): Xaa in position 477 to 603 is any or no amino acid
  Variant (605)..(607): Xaa in position 605 to 607 is any amino acid
  Variant (613)..(614): Xaa in position 613 to 614 is any amino acid
  Variant (616)..(619): Xaa in position 616 to 619 is any amino acid
  Variant (621)..(622): Xaa in position 621 to 622 is any amino acid
  Variant (624)..(625): Xaa in position 624 to 625 is any amino acid
  Variant (635)..(635): Xaa in position 635 is any amino acid
  Variant (640)..(640): Xaa in position 640 is any amino acid
  Variant (646)..(653): Xaa in position 646 to 653 is any amino acid
  Variant (657)..(658): Xaa in position 657 to 658 is any amino acid
  Variant (660)..(662): Xaa in position 660 to 662 is any amino acid
  Variant (664)..(665): Xaa in position 664 to 665 is any amino acid
  Variant (667)..(788): Xaa in position 667 to 788 is any amino acid
  Variant (789)..(837): Xaa in position 789 to 837 is any or no amino acid
  Variant (839)..(848): Xaa in position 839 to 848 is any amino acid
  Variant (849)..(852): Xaa in position 849 to 852 is any or no amino acid
  Variant (854)..(876): Xaa in position 854 to 876 is any amino acid
  Variant (877)..(885): Xaa in position 877 to 885 is any or no amino acid
  Variant (887)..(897): Xaa in position 887 to 897 is any amino acid
  Variant (898)..(910): Xaa in position 898 to 910 is any or no amino acid
  Variant (912)..(912): Xaa in position 912 is any amino acid
  Variant (913)..(915): Xaa in position 913 to 915 is any or no amino acid
  Variant (917)..(939): Xaa in position 917 to 939 is any amino acid
  Variant (940)..(949): Xaa in position 940 to 949 is any or no amino acid
  Variant (951)..(978): Xaa in position 951 to 978 is any amino acid
  Variant (979)..(1019): Xaa in position 979 to 1019 is any or no amino acid
QXXXXXXXXXXXXXXXSXXXXXXXXXXXSXXXXXXXXXXXXXXXXXXXXXXXXXXXXXXXXXXXXXXXXXXXXXXXXXXXPXQXXXXXXXXXXXXXXXXXXXXXXXXXXXQXXXXXXXXXXXXXXXXXXXXXXXXXXQXLXXXXXXXXXXXXXXPXXXXXXXQXXXXQXXXXXXXQXXQXXXXXQXXXXXXXXXXQXXXXXXQXXXXXXXXXXXXXXXXXXXXXXXXXXXXXXXXXXXXXXXXXXXPXEXGXCXXRLXXYXYHXXXRPXXNXIXYWRXXXXEYFXPXAXXRWCXSXYXXXXXXXXXXXXXXXXDXWXCXXCXXXXGXGXEXXXXXXXXXXXXXXXXGXXXEXLXXXXXXEXXXXXGXXXLXXXKXXQXSXXEXXXVXXEGXLRIXFXXXLKIXSWEFCXRRHEEXXXRRXXXPQVXXLXXVXQKXQXXXXXXXXXXXXXXXXXXXXXXXXXXXXSXXDXQXXXNXXXXXXXXXXXXXXXXXXXXXXXXXXXXXXXXXXXXXXXXXXXXXXXXXXXXXXXXXXXXXXXXXXXXXXXXXXXXXXXXXXXXXXXXXXXXXXXXXXXXXXXXXXXXXXXXXXXXXXXXXXXXXXXXXVXXXRQLAKXXEXXXXNXXGXXKRYVRCLQIXEVVNXMKDLIXXXXXXXXGPIXXLXXXPXXTXXXXXXXXXXXXXXXXXXXXXXXXXXXXXXXXXXXXXXXXXXXXXXXXXXXXXXXXXXXXXXXXXXXXXXXXXXXXXXXXXXXXXXXXXXXXXXXXXXXXXXXXXXXXXXXXXXXXXXXXXXXXXXXXXXXXXXXXXXXXXXXXXXXXXXXXXXXXXXXXXXXXXXXXXXXQXXXXXXXXXXXXXXQXXXXXXXXXXXXXXXXXXXXXXXXXXXXXXXXNXXXXXXXXXXXXXXXXXXXXXXXXGXXXXNXXXXXXXXXXXXXXXXXXXXXXXXXXXXXXXXXNXXXXXXXXXXXXXXXXXXXXXXXXXXXXXXXXXXXXXXXXXXXXXXXXXXXXXXXXXXXXXXXXXXXXXF

SEQ ID NO: 697 - protein, 61 aa, Artificial sequence
  protein pattern
  Variant (2)..(7): Xaa in position 2 to 7 is any amino acid
  Variant (8)..(9): Xaa in position 8 to 9 is any or no amino acid
  Variant (11)..(11): Xaa in position 11 is any amino acid
  Variant (12)..(13): Xaa in position 12 to 13 is any or no amino acid
  Variant (15)..(15): Xaa in position 15 is Glu or Lys
  Variant (16)..(16): Xaa in position 16 is Ser or Thr
  Variant (17)..(17): Xaa in position 17 is Ile or Val
  Variant (18)..(18): Xaa in position 18 is Phe, His or Tyr
  Variant (20)..(20): Xaa in position 20 is any amino acid
  Variant (21)..(21): Xaa in position 21 is Phe, Ile or Leu
  Variant (22)..(22): Xaa in position 22 is His or Arg
  Variant (24)..(24): Xaa in position 24 is Ile or Val
  Variant (25)..(25): Xaa in position 25 is His or Arg
  Variant (26)..(26): Xaa in position 26 is Asp or Glu
  Variant (27)..(28): Xaa in position 27 to 28 is any amino acid
  Variant (32)..(32): Xaa in position 32 is Ile or Val
  Variant (34)..(34): Xaa in position 34 is Asn, Ser or Thr
  Variant (35)..(35): Xaa in position 35 is Pro or Gln
  Variant (36)..(36): Xaa in position 36 is Asp or Glu
  Variant (40)..(40): Xaa in position 40 is any amino acid
  Variant (46)..(46): Xaa in position 46 is Ala, Ser or Thr
  Variant (47)..(47): Xaa in position 47 is Gln or Arg
  Variant (52)..(54): Xaa in position 52 to 54 is any amino acid
  Variant (56)..(56): Xaa in position 56 is Lys or Arg
  Variant (57)..(57): Xaa in position 57 is any amino acid
  Variant (58)..(58): Xaa in position 58 is Ile, Leu or Val
  Variant (59)..(59): Xaa in position 59 is Ala or Ile
GXXXXXXXXAXXXQXXXXEXXXVXXXXXLRIXFXXXLKIXSWEFCXXRHEEXXXRXXXXPQ

SEQ ID NO: 698 - protein, 58 aa, Artificial sequence
  protein pattern
  Variant (2)..(3): Xaa in position 2 to 3 is any or no amino acid
  Variant (5)..(5): Xaa in position 5 is any amino acid
  Variant (6)..(6): Xaa in position 6 is any or no amino acid
  Variant (12)..(12): Xaa in position 12 is Ala, Asn or Ser
  Variant (13)..(13): Xaa in position 13 is Ile or Leu
  Variant (14)..(14): Xaa in position 14 is Asp or Glu
  Variant (15)..(17): Xaa in position 15 to 17 is any amino acid
  Variant (18)..(18): Xaa in position 18 is Leu or Val
  Variant (20)..(20): Xaa in position 20 is Asp or Glu
  Variant (21)..(21): Xaa in position 21 is any amino acid
  Variant (23)..(23): Xaa in position 23 is any amino acid
  Variant (24)..(24): Xaa in position 24 is Ser or Thr
  Variant (34)..(34): Xaa in position 34 is Ala or Ser
  Variant (38)..(38): Xaa in position 38 is Asn or Ser
  Variant (39)..(39): Xaa in position 39 is any amino acid
  Variant (43)..(43): Xaa in position 43 is Leu or Met
  Variant (45)..(45): Xaa in position 45 is Asp or Glu
  Variant (46)..(46): Xaa in position 46 is Phe or Tyr
  Variant (47)..(47): Xaa in position 47 is Cys or Ser
  Variant (48)..(48): Xaa in position 48 is His or Arg
  Variant (49)..(49): Xaa in position 49 is any amino acid
  Variant (50)..(50): Xaa in position 50 is Asn, Gln, Ser or Thr
  Variant (51)..(52): Xaa in position 51 to 52 is any amino acid
  Variant (55)..(55): Xaa in position 55 is any amino acid
  Variant (56)..(56): Xaa in position 56 is Ala or Glu
  Variant (57)..(57): Xaa in position 57 is Ala, Gly or Ser
VXXAXXRQLAKXXXXXXXNXXGXXKRYVRCLQIXEVVXXMKDXIXXXXXXXXGPXXXL

SEQ ID NO: 699 - protein, 31 aa, Artificial sequence
  protein pattern
  Variant (2)..(4): Xaa in position 2 to 4 is any amino acid
  Variant (5)..(5): Xaa in position 5 is any or no amino acid
  Variant (7)..(7): Xaa in position 7 is any amino acid
  Variant (8)..(8): Xaa in position 8 is Asp or Glu
  Variant (9)..(9): Xaa in position 9 is any amino acid
  Variant (10)..(10): Xaa in position 10 is Gly or Ser
  Variant (11)..(11): Xaa in position 11 is any amino acid
  Variant (13)..(13): Xaa in position 13 is Ala or Ser
  Variant (14)..(14): Xaa in position 14 is Lys or Arg
  Variant (16)..(16): Xaa in position 16 is any or no amino acid
  Variant (18)..(18): Xaa in position 18 is any amino acid
  Variant (19)..(19): Xaa in position 19 is any or no amino acid
  Variant (21)..(21): Xaa in position 21 is Leu or Met
  Variant (22)..(22): Xaa in position 22 is Phe or Tyr
  Variant (24)..(24): Xaa in position 24 is any amino acid
  Variant (25)..(25): Xaa in position 25 is Gln or Arg
  Variant (26)..(26): Xaa in position 26 is any amino acid
  Variant (29)..(29): Xaa in position 29 is Ala, Glu, Gln or Ser
  Variant (30)..(30): Xaa in position 30 is Ala, Asp, Glu or Asn
  Variant (31)..(31): Xaa in position 31 is Asn or Ser
GXXXXPXXXXXCXXRXLXXYXXHXXXRPXXX

SEQ ID NO: 700 - protein, 21 aa, Artificial sequence
  protein pattern
  Variant (4)..(4): Xaa in position 4 is any amino acid
  Variant (5)..(5): Xaa in position 5 is Phe, Ile or Leu
  Variant (6)..(6): Xaa in position 6 is Ile or Val
  Variant (7)..(7): Xaa in position 7 is Ala, Asp, Glu, Asn or Thr
  Variant (10)..(10): Xaa in position 10 is Phe or Tyr
  Variant (11)..(11): Xaa in position 11 is Ala or Ser
  Variant (13)..(13): Xaa in position 13 is Asn or Arg
  Variant (15)..(15): Xaa in position 15 is Lys or Arg
  Variant (16)..(16): Xaa in position 16 is any amino acid
  Variant (18)..(20): Xaa in position 18 to 20 is any amino acid
  Variant (21)..(21): Xaa in position 21 is Gly or Ser
YWRXXXXEYXXPXAXXRXXXX

SEQ ID NO: 701 - protein, 18 aa, Artificial sequence
  protein pattern
  Variant (2)..(2): Xaa in position 2 is any amino acid
  Variant (4)..(4): Xaa in position 4 is any amino acid
  Variant (6)..(6): Xaa in position 6 is any amino acid
  Variant (7)..(7): Xaa in position 7 is Ile or Leu
  Variant (9)..(10): Xaa in position 9 to 10 is any amino acid
  Variant (11)..(11): Xaa in position 11 is His or Lys
  Variant (12)..(12): Xaa in position 12 is Ala, Gly, Pro or Ser
  Variant (14)..(14): Xaa in position 14 is Lys or Arg
  Variant (16)..(16): Xaa in position 16 is any amino acid
  Variant (17)..(17): Xaa in position 17 is any or no amino acid
DXWXCXXCXXXXGXGXXE

SEQ ID NO: 702 - protein, 20 aa, Artificial sequence
  protein pattern
  Variant (2)..(2): Xaa in position 2 is any amino acid
  Variant (3)..(3): Xaa in position 3 is any or no amino acid
  Variant (5)..(6): Xaa in position 5 to 6 is any or no amino acid
  Variant (9)..(9): Xaa in position 9 is any amino acid
  Variant (11)..(11): Xaa in position 11 is Ala, Gln, Ser or Thr
  Variant (12)..(12): Xaa in position 12 is Ala, Thr or Val
  Variant (13)..(13): Xaa in position 13 is any amino acid
  Variant (14)..(14): Xaa in position 14 is Gln, Ser or Thr
  Variant (15)..(15): Xaa in position 15 is Glu or Asn
  Variant (16)..(16): Xaa in position 16 is Ala or Ser
  Variant (17)..(17): Xaa in position 17 is Gly or Thr
  Variant (18)..(18): Xaa in position 18 is Asn, Pro, Ser or Thr
  Variant (19)..(19): Xaa in position 19 is any amino acid
  Variant (20)..(20): Xaa in position 20 is Ala, Gly or Ser
LXXAXXQKXQXXXXXXXXXX

SEQ ID NO: 703 - protein, 26 aa, Artificial sequence
  protein pattern
  Variant (2)..(4): Xaa in position 2 to 4 is any amino acid
  Variant (5)..(7): Xaa in position 5 to 7 is any or no amino acid
  Variant (9)..(9): Xaa in position 9 is Ala or Val
  Variant (10)..(10): Xaa in position 10 is Asn or Ser
  Variant (11)..(11): Xaa in position 11 is Cys or Ser
  Variant (14)..(14): Xaa in position 14 is Gly or Thr
  Variant (15)..(15): Xaa in position 15 is Asp or Asn
  Variant (17)..(17): Xaa in position 17 is Asn or Val
  Variant (18)..(18): Xaa in position 18 is Ser or Thr
  Variant (19)..(19): Xaa in position 19 is Gly, Asn or Ser
  Variant (20)..(20): Xaa in position 20 is any amino acid
  Variant (22)..(22): Xaa in position 22 is any or no amino acid
  Variant (24)..(25): Xaa in position 24 to 25 is any amino acid
  Variant (26)..(26): Xaa in position 26 is Gly, Leu or Pro
GXXXXXXGXXXLVXXAXXXXSXGXXX

SEQ ID NO: 704 - protein, 20 aa, Artificial sequence
  protein pattern
  Variant (2)..(2): Xaa in position 2 is Ile, Leu or Met
  Variant (3)..(3): Xaa in position 3 is Asn or Gln
  Variant (4)..(4): Xaa in position 4 is Ala or Leu
  Variant (5)..(5): Xaa in position 5 is Phe or Leu
  Variant (6)..(7): Xaa in position 6 to 7 is any amino acid
  Variant (9)..(10): Xaa in position 9 to 10 is any amino acid
  Variant (12)..(12): Xaa in position 12 is any or no amino acid
  Variant (14)..(14): Xaa in position 14 is any amino acid
  Variant (17)..(18): Xaa in position 17 to 18 is any or no amino acid
  Variant (20)..(20): Xaa in position 20 is Gln or Ser
QXXXXXXQXXLXQXQQXXQX

SEQ ID NO: 705 - protein, 18 aa, Artificial sequence
  protein pattern
  Variant (2)..(2): Xaa in position 2 is any amino acid
  Variant (3)..(3): Xaa in position 3 is Asp, Asn or Gln
  Variant (4)..(5): Xaa in position 4 to 5 is any amino acid
  Variant (8)..(9): Xaa in position 8 to 9 is any or no amino acid
  Variant (11)..(11): Xaa in position 11 is any amino acid
  Variant (13)..(13): Xaa in position 13 is any amino acid
  Variant (14)..(15): Xaa in position 14 to 15 is any or no amino acid
  Variant (17)..(17): Xaa in position 17 is Asn, Arg or Ser
  Variant (18)..(18): Xaa in position 18 is Asp, Pro, Gln or Ser
QXXXXQQXXLXQXXXQXX

SEQ ID NO: 706 - DNA, 1965 bp, Arabidopsis thaliana
  CDS (1)..(1965)
atgggtaacggaatcgggaagctaagtaaatgtttgaccggaggtgctggtcggaacaaaaaacccgagttatcaattctcgaaccagatcctttagacgaagggttaggacactctttctgttacgtcagaccagacccgacacgagtttcgtcttcaaaagttcactcagaagaagaaacgacgacgttccgtacaatctccggcgcttccgttagtgctaacaccgccacaccactctctacttctctctatgatccttacggacatatcgatagagccgccgcgttcgaaagcacgacgtcgttttcgtcgattcctttgcaaccgattccgagaagttccggtccgattgtacccggttcgggtcctttagaaagagggtttttatccggtccgattgaaagaggtttcatgtccggtccacttgatggttcttccggtccgattgatggtaaaaccggttctgatcaatttcagagaagtttctctcatggtttagctaatctccgggtcgggtcgagaaaaggatctttagttcgggttctccgtcgtgcaatttcgaagacgattactagaggacagaactctattgttgctccgatcaaaccggttaaagagcccgattgggtattcgggtcggataaaacccggatccatcagatcgagaataatctcactgttaatagcttgaattttagtagtgaaggaagtttactagacgacgacgtttcgttagagagccagaatcttcaatgggcacaaggtaaagccggtgaggatcgtgtacatgtggttgtatcggaagaacatggatggcttttcgttggaatctacgatggattcaacggtccagatgcgccggactatttactctctcatttatatccagccgttcatcgtgagcttaaaggattgttatgggacgatcccaaaacagatgcaaaatcttccgatgaagctgatgtagagaatcgtgactcgagttctgagaaaaagtcaaagaattgggaagaaagtcaacgacggtggagatgtgaatgggatcgagatcttgaccgtttactgaaagatcggagtaatgggttggatctagatccggatccgaattcgtctgatgtactgaaagctttgtcacaagctttgaggaagacggaagaagcttatttggagaatgcagatatgatgctcgacgaaaatcctgaactagctttaatgggttcttgtgttttggtaatgttgatgaaaggtgaagatgtttatttgatgaatgttggtgatagtagagctgttcttgggcaaaaagctgagagtgattattggattgggaagattaaacaagatttggaacgtatcaatgaagaaactatgaatgattttgatggttgtggtgatggtgaaggagctagtttggttccgactttatcagcttttcagcttactgttgatcatagcactaatgtagaagaggaagttaatagaattcgaaaggagcatcctgatgatgcgagcgcggtttcgaatgaacgggttaaaggttcgttgaaggtcactagagctttcggtgcgggtttccttaagcagcctaaatggaataacgcgcttctagagatgtttcaaatcgattacaaagggacgtcaccatacatcaattgtttgccatcactttaccatcatagattaggctcgaaagaccagtttctgatactatcatcggatggtctttaccaatatttcacaaacgaagaagcggtttcagaggttgaactattcatcacgttacagccggaaggtgacccggctcagcacttggttcaagagcttcttttccgtgctgctaagaaagctggtatggatttccatgaactgcttgagataccacaaggggaacggagacggtaccacgatgatgtttccattgtagtgatctctttagaaggaagaatgtggaaatcttgtgtataa

SEQ ID NO: 707 - protein, 654 aa, Arabidopsis thaliana
MGNGIGKLSKCLTGGAGRNKKPELSILEPDPLDEGLGHSFCYVRPDPTRVSSSKVHSEEETTTFRTISGASVSANTATPLSTSLYDPYGHIDRAAAFESTTSFSSIPLQPIPRSSGPIVPGSGPLERGFLSGPIERGFMSGPLDGSSGPIDGKTGSDQFQRSFSHGLANLRVGSRKGSLVRVLRRAISKTITRGQNSIVAPIKPVKEPDWVFGSDKTRIHQIENNLTVNSLNFSSEGSLLDDDVSLESQNLQWAQGKAGEDRVHVVVSEEHGWLFVGIYDGFNGPDAPDYLLSHLYPAVHRELKGLLWDDPKTDAKSSDEADVENRDSSSEKKSKNWEESQRRWRCEWDRDLDRLLKDRSNGLDLDPDPNSSDVLKALSQALRKTEEAYLENADMMLDENPELALMGSCVLVMLMKGEDVYLMNVGDSRAVLGQKAESDYWIGKIKQDLERINEETMNDFDGCGDGEGASLVPTLSAFQLTVDHSTNVEEEVNRIRKEHPDDASAVSNERVKGSLKVTRAFGAGFLKQPKWNNALLEMFQIDYKGTSPYINCLPSLYHHRLGSKDQFLILSSDGLYQYFTNEEAVSEVELFITLQPEGDPAQHLVQELLFRAAKKAGMDFHELLEIPQGERRRYHDDVSIVVISLEGRMWKSCV

SEQ ID NO: 708 - DNA, 2357 bp, Oryza sativa
  CDS (163)..(2082)
gatattccggcatttcaaccccacccactccgcacccccgcaagtcaactctcttccttcctcctccgtgcttaatgctctccgcattataaccacccacctctcctcctccccccacctcctctctctctatctccatctccaccgctacgcttcccagccatgggcaactccctcgcctgcttctgctgcggcggcggcgccggcggccgaggcggccgccacgtcgtccccgccgcgctcccctccgacccggcctacgacgagggcctgggccactcgttctgctacgtccgccccgacaagttcgtggttcccttctccgcggatgatttggtggctgacgcgaaggcggccgcggcggcggagggggaggcgaccacgttccgggcgatatccggggcggcgctcagtgccaacgtatccacgccgctgtccacgtccgtgctgctgctgatgccggaggagtcgtcggcgtccgccaccgcgtcgtcggggtttgagagctcggagtcgttcgctgctgtgccgctgcagccggtgccgaggttctcgtccgggccgatctccgcgcccttctccggcgggttcatgtcggggcccttggagagggggttccaatctgggccactcgacgccgcgctcctctcgggccctctccctggcaccgccacctccggtcgtatgggtggcgccgtccctgcgctccgccggagcctctcccacggtggccgccgcctccgcaatttcacccgcgcgctcctcgcgcgcaccgagaagtttcaggattctgcggatctaggctcgccggacgccgccgccgccgccgtcgccgcctgtgggggcgatccctgtggtctgcagtgggcgcaggggaaagccggcgaggaccgcgtccacgtcgtcgtgtcggaggagcgaggctgggtgttcgtcggcatctacgatgggttcaacggccccgacgccaccgacttcctggtatccaacctctacgccgccgtccaccgcgagctccgcggcctcctctgggatcagcgggagcagaacgtgcagcacgaccagcgccccgaccaacccggctcagccccaagcaccacggcctcagataaccaagaccagtggggtcgccgccgccgcacccgccgctcaagaccgccgcgtggcgccgacgacgaccagcggcggtggaagtgcgagtgggagcaggagcgggattgctccaacctgaagccaccaacgcagcagcgtcttcgttgcaacagcgagaacgaccacgtcgccgtgctcaaggcgctgacccgtgcgctgcacaggaccgaggaggcttacctggacatcgccgacaagatggtcggcgagttcactgagcttgcgctcatgggctcttgtgttcttgccatgctcatgaaaggagaggacatgtacatcatgaatgttggcgatagccgggctgtgttggcaacaatggacagcgtcgatctcgagcagatcagccagggttcattcgatggatcagtcggggattgcccgccatgcttgtcggccgtgcagctcacgtcggatcacagcacttcagtggaagaggaagtaatcagaatacgaaacgagcatcctgatgatccatctgccatctccaaggatcgcgtgaagggctcgctgaaggtgaccagagcatttggtgctgggtttttgaaacagcccaagtggaatgatgcactcctggagatgttcagaattgattacgttgggtcctccccatacatatcatgcaatccatccctttttcatcataagctcagcacaagggatagattcttgatattatcttcagatggactttaccagtatttcaccaacgaggaggcagttgctcaggtcgaaatgttcatcgcaacaacccctgaaggcgaccctgcccaacatcttgtggaggaagttcttttccgtgctgccaacaaagcaggaatggactttcatgaactgatcgagataccacatggtgatcgtcggcgataccatgacgatgtatctgtcatcgtcatctctttggagggcaggatttggagatcctgcgtgtaaatagaaacaatagtaggctagtgaaacaaaacgtatagagggggttcttcccatgccttccttgagctgagaggtgttcttgcggctactctactcctcttcccccagttgctactgtacaatatcaaccaagcactgtggggggttggattcggcttgggctctcggcacatccagctgaatcgccatgaatcgcccgcagggctggccgcgtggtataatatgttgatgtaaatgaggatttgttcaattattaataatttataaaatcgacc

SEQ ID NO: 709 - protein, 639 aa, Oryza sativa
MGNSLACFCCGGGAGGRGGRHVVPAALPSDPAYDEGLGHSFCYVRPDKFVVPFSADDLVADAKAAAAAEGEATTFRAISGAALSANVSTPLSTSVLLLMPEESSASATASSGFESSESFAAVPLQPVPRFSSGPISAPFSGGFMSGPLERGFQSGPLDAALLSGPLPGTATSGRMGGAVPALRRSLSHGGRRLRNFTRALLARTEKFQDSADLGSPDAAAAAVAACGGDPCGLQWAQGKAGEDRVHVVVSEERGWVFVGIYDGFNGPDATDFLVSNLYAAVHRELRGLLWDQREQNVQHDQRPDQPGSAPSTTASDNQDQWGRRRRTRRSRPPRGADDDQRRWKCEWEQERDCSNLKPPTQQRLRCNSENDHVAVLKALTRALHRTEEAYLDIADKMVGEFTELALMGSCVLAMLMKGEDMYIMNVGDSRAVLATMDSVDLEQISQGSFDGSVGDCPPCLSAVQLTSDHSTSVEEEVIRIRNEHPDDPSAISKDRVKGSLKVTRAFGAGFLKQPKWNDALLEMFRIDYVGSSPYISCNPSLFHHKLSTRDRFLILSSDGLYQYFTNEEAVAQVEMFIATTPEGDPAQHLVEEVLFRAANKAGMDFHELIEIPHGDRRRYHDDVSVIVISLEGRIWRSCV

SEQ ID NO: 710 - DNA, 2278 bp, Zea mays
  CDS (1)..(1899)
atgggaaactccctcgcctgcttctgctgcgggggcggcgccgccggccgccgccgccacgtggcgcccgcggcgctcccctcggaccccgcctacgacgagggcctcggccactccttctgctacgtccggccggataaggtgctggtgcccttctccgcggacgacgacgacctggtcgccgacgccaaggcggccgccgcggccgaggagcccaccacgttccgggccatatccggggccgcgctcagcgccaacgtctccacgcagctctccacctccgtcctcctcctgctgccggacgaatcctcctccgccgccgccgcctcctcctcctcctccgggttcgagagctccgaatcgttcgccgccgtgccgctgcagcccgtcccgaggttcccgtcgggccccatctgcgcgcacgggggcgggttcctctccgggcccatagagagggggttcctctcgggccccctcgacgcggcgctcatgtccggccctctcccttgcgccgccacatccgcccgcatgggaggaggcgccgtgcccgcgctccgccggagtctctcgcacggcggccgccgcctgcggaattttacccgcgcgcttctcgcgcgggcggataagtttcaggattcgatggatctcggctcggccgccgccgccgcctgtggcgccggttccgccgggctgcagtgggcgcaggggaaggccggcgaggaccgcgtccacatcgtggtgtccgaggagcggggctgggtgttcgtcggcatctacgacggcttcaacggtcccgacgccacggacttcctcgtctcccatctctacgccgccgtgcaccgcgagctccgcggcctgctctgggatcagtgcgagcaggaggagcagcgcgacacagatcccgaccagccgatgagcaccacggcctcatatcaccaggaccagcccgccaacggccgccgcgcccgccgatcaagaccgccgcgcggcgccgatgatgaccaacggcggtggaagtgcgagtgggagcgcgactgctccagcctcaagccgccaactcagcgccctcctaggagcagcagcgagaacgaccacctcgccgtgcttaaggcacttgcgcgcgcgcttcgcaagaccgaggaggcctacctggacgtcgccgacaagatggtcggcgagttcccggagcttgcgcttatgggctcttgcgttcttgccatgcttatgaaaggagaggacatgtacctcatgaatgtaggtgacagccgggctgtgctgggaacaatggacagtgttgatctcgaggagatcagtgggggttcattcgatggattggtcggggatggcactccgctcttgtcagctctgcagctcacctcagaacatagcacgtcagtgcgagaggaagtttgcagaatacggaacgagcatcccggagacccgtctgcaatctccaaggaccgtgtgaagggctcgcttaaggtgacgagagcgtttggagctggtttcttgaaacagcccaaatggaacgatgcgctgctggaggtgttcagaatagattacgtcgggtcatccccgtacatcacgtgcaatccttcgctctatcaccacaggctcagcacgagggacaggttcctgatactatcttcagacgggctctaccagtatttcaccaacgaggaggcggtcgctcaggttgagatgttcatcgcaacaacccctgagggcgaccctgcccagcatctggtggaggaagttcttttcagagctgcaaacaaagcaggaatggacttccacgaattgatcgagataccacatggcgaccgccggcggtaccacgacgacgtatctgtcattgtgatatctttggagggcaggatctggagatcatgcgtgtaaataggtcagccatactagtagtagattagagaaagaaacgtatagagagaaagagagagaggttcttgaaggcctacttcactcgtcccagctgctactgtacaatatcaatgaagcactgggtggtgggcttgggatctcaagttgaaccacgatgagattcacctggagcgtgccgatgccgacgcagtgccgtatgagatgtccatgcaaaagaggatttgttcaattattaataactcaatcaaatagcgaccaattggtcaactttctttgaccttttgttttgaaaaaaaacaacaaaaaataaataataaaaaaaaaaattggtcaaaaaaatttttgacctttttttgggggcaccctctgtgttcatacc

SEQ ID NO: 711 - protein, 632 aa, Zea mays
MGNSLACFCCGGGAAGRRRHVAPAALPSDPAYDEGLGHSFCYVRPDKVLVPFSADDDDLVADAKAAAAAEEPTTFRAISGAALSANVSTQLSTSVLLLLPDESSSAAAASSSSSGFESSESFAAVPLQPVPRFPSGPICAHGGGFLSGPIERGFLSGPLDAALMSGPLPCAATSARMGGGAVPALRRSLSHGGRRLRNFTRALLARADKFQDSMDLGSAAAAACGAGSAGLQWAQGKAGEDRVHIVVSEERGWVFVGIYDGFNGPDATDFLVSHLYAAVHRELRGLLWDQCEQEEQRDTDPDQPMSTTASYHQDQPANGRRARRSRPPRGADDDQRRWKCEWERDCSSLKPPTQRPPRSSSENDHLAVLKALARALRKTEEAYLDVADKMVGEFPELALMGSCVLAMLMKGEDMYLMNVGDSRAVLGTMDSVDLEEISGGSFDGLVGDGTPLLSALQLTSEHSTSVREEVCRIRNEHPGDPSAISKDRVKGSLKVTRAFGAGFLKQPKWNDALLEVFRIDYVGSSPYITCNPSLYHHRLSTRDRFLILSSDGLYQYFTNEEAVAQVEMFIATTPEGDPAQHLVEEVLFRAANKAGMDFHELIEIPHGDRRRYHDDVSVIVISLEGRIWRSCV

SEQ ID NO: 712 - DNA, 1791 bp, Oryza sativa (japonica cultivar-group)
  CDS (1)..(1791)
atgggcagcggcgcgtcacggctgctgaccgcgtgcacgtgctcgcggccggcgccggcgtccgtggacgcggagccgtgcctggacgacgctctcggccactccttctgctacgccgccgccgccacggccaccgcccactcctcgtcgttccgccacggcatctccggcgccgcgctctccgccaactcgtcggtgcccgtcccgctctacaacgcgtccgccgccgccggcggcgtggcgccggggtactcctcggcattccacacctcgtcgtccttttcctccgcgccgctgcagctgtccaacctctcctcgggcccgctgttcctctcgggtcccatcgaccgcgccggccagctctccggcccgctcgaccccgccgtgcccttctctggcccgctccccgcaaagcctcccaagcccgcgtcctcctcatcgagggggttctcgaggaggttccggaagccgtccttcggcagcctgcggcggagcgtgtcggagaagaaccgcccgtgcgccgtgccgctccgccgcgacgacggcgtgcagtgggcgcacggccgcgccggggaggaccgcgtccacgtggtggtctccgaggatcagcggtggctcttcgtcggcatctacgacggcttcaacggccccgaggcccccgacttcctcgtcaccaacctctaccgcttcctcctccgcgagctccgcgggatcttctacaaggaggccgacgcggacaacaagaagctctggcagtttctcgtggacggcgacgacgacgacagcgagctcgacttctcgggctctggccggttcgcgctgtcactcgacaggctcaaggagagtcggtttcacatgtgggcgcacgccgcggccgacgagagcggcagggaatggggttccaggaggttggcaccggcgcctgcggtgagggaccatgcggcggtgctagccgctctcacccgggccctggcctcgacggaagcggcgtacttggacatgaccgaccagtcaatgggaacccatccggagttggcggtcaccggggcgtgcctgctcgtggccctcgtgagggacgacaacgtgtacgtgatgaaccttggggacagccgtgccattgtggcgcagcgtccggacgatggcgacgatggctgtgtgtttggaaccatgcggcggatggaggacgtcggggtgggcttggagatcgagacaaggcccggcggatgcgccattattgggcttaagccactgcagctgtcgactgatcacagcaccagcatcgaagaggaagttcacaggatcaaacgtgaacatcctgatgatgatcagtgtattgtaaatgatagagtgaagggtcgcctaaaagttacccgggcttttggtgcaggctatctcaaacaggcaaaattgaacaatggattgttagagatgttccgcaatgattacattggtgatacaccgtatatatcatgcacaccatcgctttgccatcacaagctcactgcaagggatcagtttttggttctttcttccgatggcttatatcagtacctgagcaacgaggaggtagttttgcatgttgagaatttcatggagaggtttccagaaggtgatcctgcacaaagtttaattgaggagcttctctctcgtgcagcaaagaaggctggtatggatttttatgagttactagatatacctcaaggggaccgaagaaaataccatgatgatgtcactgtcatggttatttctctggaagggagaatctggaagtcgtccggaacatatgtgtga

SEQ ID NO: 713 - protein, 596 aa, Oryza sativa (japonica cultivar-group)
MGSGASRLLTACTCSRPAPASVDAEPCLDDALGHSFCYAAAATATAHSSSFRHGISGAALSANSSVPVPLYNASAAAGGVAPGYSSAFHTSSSFSSAPLQLSNLSSGPLFLSGPIDRAGQLSGPLDPAVPFSGPLPAKPPKPASSSSRGFSRRFRKPSFGSLRRSVSEKNRPCAVPLRRDDGVQWAHGRAGEDRVHVVVSEDQRWLFVGIYDGFNGPEAPDFLVTNLYRFLLRELRGIFYKEADADNKKLWQFLVDGDDDDSELDFSGSGRFALSLDRLKESRFHMWAHAAADESGREWGSRRLAPAPAVRDHAAVLAALTRALASTEAAYLDMTDQSMGTHPELAVTGACLLVALVRDDNVYVMNLGDSRAIVAQRPDDGDDGCVFGTMRRMEDVGVGLEIETRPGGCAIIGLKPLQLSTDHSTSIEEEVHRIKREHPDDDQCIVNDRVKGRLKVTRAFGAGYLKQAKLNNGLLEMFRNDYIGDTPYISCTPSLCHHKLTARDQFLVLSSDGLYQYLSNEEVVLHVENFMERFPEGDPAQSLIEELLSRAAKKAGMDFYELLDIPQGDRRKYHDDVTVMVISLEGRIWKSSGTYV

SEQ ID NO: 714 - DNA, 1896 bp, Oryza sativa (japonica cultivar-group)
  CDS (1)..(1896)
atgggcaatggcatcaccaagaatccgtgcttctccggcgacccgtacgccgccgccgtggcgtccgaccctctcccggacgacagccacggccactccttcacgtacgtgccgtcctccgcggccgccttcgaccactccccgaggtccgccgcggcgtcctccgagacgtcatacttctcgctctccggcgccgccatcagcgccaacccggcgacgtccgcgtcgatgccgtcgttccgcctctacaacgagctgacgtggccgccgtcgacggcctgcaccttcgagagctcccgctccttcgccgcggcgccgctcatccaggccgcgccgcccaggctgtccatgtccgggccgctccacgcgacgtcggggcgcttctccgaggcgtcgggatcggcctccaccgcctccgaccgcttctccgaccacccgttcatggacggcatgctcgaccgcgcctcgtcggcctcctccaccgccaggctcatgcccagcttctctcacctcatgtctgagccccgcgtcgcgcagtccggcctgagcaatgagcgatcgctcatccgatcccttgtcagggtcgcctccaagctccggtttggggtgccgctctccggccgccggtcgaatggacctgccgaaccgacgaccaagagcgacggcgactaccgctccacgcccaagggcaatgtggagtgggcgcagggcatggccggcgaggaccggttccacgtcgccgtctccgaggagcacggctgggtgttcgtcggaatctacgacggcttcaacggccccgacgcaaccgactacctcttcgccaacctctacgtcgccgtgcaccgcgagctcaagggcgtgctctgggacgacatacaaggcgtcgacgtcgtcacggacaacctcccggaccctgctctggccaatgccacacacctctgtttccttgacgcaggcggcgtcggcggcggtggcgacgacgaccccgacgcagagcgcaaggcgaagagggggcggatcgagcgcaatgccgatgacgacggcgcgtcgtcggtgcaccgcgacgtcctgaaggcgctggcgcgcgcgctggcgaggacggaggaggcgttcttcgcggcggcggaggagcgcgcggcgcagagccccgagctgggcctggtcgggtcgtgcgtgctggtgatgctgatgaagggcaaggacgtgtacctgatgaacgtcggcgacagccgcgccgtgctggcgcggcggcgcgagccggacttcaaggacatcttcttcaggcccgaccaggacttgcagctgctcaaggccgaggtgatgcgcgagctcgaggcgcacgacaggaatggcctccagtgcgtgcagctcactcccgagcatagcgccgccgccgaggaggaagtgaggaggatcaggtcccagcatctgactgatcggcaggccgtcgtcaacggcagggtgaaggggaagctcagtgttaccagagcatttggtgccggctacctgaagcagccaaaatggaacgacaggctgcttgaagccttcaaggttgattacatcggcgccgagccatacatcagctgcacgccgtcgctgcgccaccaccggatcagctccaacgacaggttcctcgtgctgtcttctgacgggctctaccagtacttcaccaacaaggaggtggtcgatcaggtcgccatgttcaccgccgagcagcccgacggcgacccggcgaagcacctcgttggagagctcgtcctccgcgccgcgaggaaagccggcatggattgccgcaggctgctcgagatcccgcatggcgacaggaggaactaccatgacgacgtgtccatcatcgtcatgtcgttcgaggggaggatatggagatcgtccgtttag

SEQ ID NO: 715 - protein, 631 aa, Oryza sativa (japonica cultivar-group)
MGNGITKNPCFSGDPYAAAVASDPLPDDSHGHSFTYVPSSAAAFDHSPRSAAASSETSYFSLSGAAISANPATSASMPSFRLYNELTWPPSTACTFESSRSFAAAPLIQAAPPRLSMSGPLHATSGRFSEASGSASTASDRFSDHPFMDGMLDRASSASSTARLMPSFSHLMSEPRVAQSGLSNERSLIRSLVRVASKLRFGVPLSGRRSNGPAEPTTKSDGDYRSTPKGNVEWAQGMAGEDRFHVAVSEEHGWVFVGIYDGFNGPDATDYLFANLYVAVHRELKGVLWDDIQGVDVVTDNLPDPALANATHLCFLDAGGVGGGGDDDPDAERKAKRGRIERNADDDGASSVHRDVLKALARALARTEEAFFAAAEERAAQSPELGLVGSCVLVMLMKGKDVYLMNVGDSRAVLARRREPDFKDIFFRPDQDLQLLKAEVMRELEAHDRNGLQCVQLTPEHSAAAEEEVRRIRSQHLTDRQAVVNGRVKGKLSVTRAFGAGYLKQPKWNDRLLEAFKVDYIGAEPYISCTPSLRHHRISSNDRFLVLSSDGLYQYFTNKEVVDQVAMFTAEQPDGDPAKHLVGELVLRAARKAGMDCRRLLEIPHGDRRNYHDDVSIIVMSFEGRIWRSSV

SEQ ID NO: 716 - DNA, 1920 bp, Oryza sativa (japonica cultivar-group)
  CDS (1)..(1920)
atgggcaactccctcgcctgcttctgctgcggcggcggcgccggcggccgaggcggccgccacgtcgcccccgccgcgctcccctccgacccggcctacgacgagggcctgggccactcgttctgctacgtccgccccgacaagttcgtggttcccttctccgcggatgatttggtggctgacgcgaaggcggccgcggcggcggagggggaggcgaccacgttccgggcgatatccggggcggcgctcagtgccaacgtatccacgccgctgtccacgtccgtgctgctgctgatgccggaggagtcgtcggcgtccgccaccgcgtcgtcggggtttgagagctcggagtcgttcgctgctgtgccgctgcagccggtgccgaggttctcgtccgggccgatctccgcgcccttctccggcgggttcatgtcggggcccttggagagggggttccaatctgggccactcgacgccgcgctcctctcgggccctctccctggcaccgccacctccggtcgtatgggtggcgccgtccctgcgctccgccggagcctctcccacggtggccgccgcctccgcaatttcacccgcgcgctcctcgcgcgcaccgagaagtttcaggattctgcggatctaggctcgccggacgccgccgccgccgccgtcgccgcctgtgggggcgatccctgtggtctgcagtgggcgcaggggaaagccggcgaggaccgcgtccacgtcgtcgtgtcggaggagcgaggctgggtgttcgtcggcatctacgatgggttcaacggccccgacgccaccgacttcctggtatccaacctctacgccgccgtccaccgcgagctccgcggcctcctctgggatcagcgggagcagaacgtgcagcacgaccagcgccccgaccaacccggctcagccccaagcaccacggcctcagataaccaagaccagtggggtcgccgccgccgcacccgccgctcaagaccgccgcgtggcgccgacgacgaccagcggcggtggaagtgcgagtgggagcaggagcgggattgctccaacctgaagccaccaacgcagcagcgtcttcgttgcaacagcgagaacgaccacgtcgccgtgctcaaggcgctgacccgtgcgctgcacaggaccgaggaggcttacctggacatcgccgacaagatggtcggcgagttccctgagcttgcgctcatgggctcttgtgttcttgccatgctcatgaaaggagaggacatgtacatcatgaatgttggcgatagccgggctgtgttggcaacaatggacagcgtcgatctcgagcagatcagccagggttcattcgatggatcagtcggggattgcccgccatgcttgtcggccgtgcagctcacgtcggatcacagcacttcagtggaagaggaagtaatcagaatacgaaacgagcatcctgatgatccatctgccatctccaaggatcgcgtgaagggctcgctgaaggtgaccagagcatttggtgctgggtttttgaaacagcccaagtggaatgatgcactcctggagatgttcagaattgattacgttgggtcctccccatacatatcatgcaatccatccctttttcatcataagctcagcacaagggatagattcttgatattatcttcagatggactttaccagtatttcaccaacgaggaggcagttgctcaggtcgaaatgttcatcgcaacaacccctgaaggcgaccctgcccaacatcttgtggaggaagttcttttccgtgctgccaacaaagcaggaatggactttcatgaactgatcgagataccacatggtgatcgtcggcgataccatgacgatgtatctgtcatcgtcatctctttggagggcaggatttggagatcctgcgtgtaa

SEQ ID NO: 717 - protein, 639 aa, Oryza sativa (japonica cultivar-group)
MGNSLACFCCGGGAGGRGGRHVAPAALPSDPAYDEGLGHSFCYVRPDKFVVPFSADDLVADAKAAAAAEGEATTFRAISGAALSANVSTPLSTSVLLLMPEESSASATASSGFESSESFAAVPLQPVPRFSSGPISAPFSGGFMSGPLERGFQSGPLDAALLSGPLPGTATSGRMGGAVPALRRSLSHGGRRLRNFTRALLARTEKFQDSADLGSPDAAAAAVAACGGDPCGLQWAQGKAGEDRVHVVVSEERGWVFVGIYDGFNGPDATDFLVSNLYAAVHRELRGLLWDQREQNVQHDQRPDQPGSAPSTTASDNQDQWGRRRRTRRSRPPRGADDDQRRWKCEWEQERDCSNLKPPTQQRLRCNSENDHVAVLKALTRALHRTEEAYLDIADKMVGEFPELALMGSCVLAMLMKGEDMYIMNVGDSRAVLATMDSVDLEQISQGSFDGSVGDCPPCLSAVQLTSDHSTSVEEEVIRIRNEHPDDPSAISKDRVKGSLKVTRAFGAGFLKQPKWNDALLEMFRIDYVGSSPYISCNPSLFHHKLSTRDRFLILSSDGLYQYFTNEEAVAQVEMFIATTPEGDPAQHLVEEVLFRAANKAGMDFHELIEIPHGDRRRYHDDVSVIVISLEGRIWRSCV

SEQ ID NO: 718 - DNA, 1953 bp, Arabidopsis thaliana
  CDS (1)..(1953)
atgggaaatggagtcgcgagttttagtggctgttgcgccggaaccaccgccggagaaatttccggtcgatacgtaaccggagtaggactggttcaagaaaacctcggccactctttctgctacgttcgtccagttctcaccggatcaaaatcttctttcccgccggaaccgcccctccgacccgacccgatacccggaaccaccaccactttccgatcaatctccggcgcctctgttagcgccaatacttcaaccgcgctctcaacttctctgtcaacagatacgtctggaatagcctccgcgttcgagagttccaatagattcgcttccttgcctctccagcctgtaccacgtagtcctattaagaaatcggatcacgggtcgggtctattcgaacgccggttcttatccggtccgattgaaagcggtttggtttcagggaagaagaccaaggagaaagcaaaactgaagaaaagtggaagcaaatcctttacgaaaccaaaactgaagaaaagtgaaagcaaaatctttacattcaaaaacgttttcaccaacttatcttgttcgaagaagagtgtgattaagccaatcaacggtttcgattcattcgatggatcatcagatactgatcgttacatacctgagatcaactccttaagcacgattgtgagcagccatgagaaacctagaatcaaagaagaagaagataagactgagtctgctttagaggagccaaagatacaatgggcacaggggaaagcaggtgaagatcgagtacacgtcatcctctccgaggaaaacggttggcttttcgtcggaatttacgacggattcagcggtccagatccaccggattatcttatcaaaaatctctacactgccgtgctcagagagctcaaagggttactatggatcgacaaaggtgaatcatataatagaaacggcgagtccaacatcgagaaacagagtacagtcgagcatgcatccgattcggatcaagaaaactgccctgtgatgaatggaaacgatgttgcttgtggatcaagaaacattacgagtgacgtgaagaagttgcaatggaggtgcgagtgggagcataactcaagcaacaagtctaataatattaaccacaaagacgttcttagagctcttcaacaagcgttggagaaaacagaagaatcgtttgatctgatggttaatgagaatccagaattagccttgatgggatcctgcgttcttgtgacattgatgaaaggagaagatgtttacgtgatgagcgttggagatagccgagcggttcttgctcgaagacctaatgtcgagaaaatgaagatgcaaaaggagcttgagagagtcaaagaagaaagtccattagagaccttgttcatcaccgaaagaggactgagtcttctggtccctgttcagctcaataaggaacatagcacaagtgttgaagaggaagtgagaagaatcaagaaggaacatcctgatgatatattagcgatagagaataatagagtgaaaggttatctcaaagtcactcgtgcatttggcgctggatttcttaaacagccaaaatggaacgaggcgcttctagagatgttcagaatagactacgtcggaacatcgccgtacatcacgtgctctccgtcgctacaccaccatagactctcatcacgtgacaaattcctaatcctctcatccgatggactatacgaatacttctcgaacgaggaagccatcttcgaggttgactcattcatctcagccttccctgaaggcgatcctgctcaacatctcattcaagaagtcctccttagagctgccaagaaatatggtatggactttcatgaattgctagagataccacaaggagatcgtcggaggtatcatgacgatgtttctgtgattgtgatttcacttgaaggaagaatttggagatcttccatgtga

SEQ ID NO: 719 - protein, 650 aa, Arabidopsis thaliana
MGNGVASFSGCCAGTTAGEISGRYVTGVGLVQENLGHSFCYVRPVLTGSKSSFPPEPPLRPDPIPGTTTTFRSISGASVSANTSTALSTSLSTDTSGIASAFESSNRFASLPLQPVPRSPIKKSDHGSGLFERRFLSGPIESGLVSGKKTKEKAKLKKSGSKSFTKPKLKKSESKIFTFKNVFTNLSCSKKSVIKPINGFDSFDGSSDTDRYIPEINSLSTIVSSHEKPRIKEEEDKTESALEEPKIQWAQGKAGEDRVHVILSEENGWLFVGIYDGFSGPDPPDYLIKNLYTAVLRELKGLLWIDKGESYNRNGESNIEKQSTVEHASDSDQENCPVMNGNDVACGSRNITSDVKKLQWRCEWEHNSSNKSNNINHKDVLRALQQALEKTEESFDLMVNENPELALMGSCVLVTLMKGEDVYVMSVGDSRAVLARRPNVEKMKMQKELERVKEESPLETLFITERGLSLLVPVQLNKEHSTSVEEEVRRIKKEHPDDILAIENNRVKGYLKVTRAFGAGFLKQPKWNEALLEMFRIDYVGTSPYITCSPSLHHHRLSSRDKFLILSSDGLYEYFSNEEAIFEVDSFISAFPEGDPAQHLIQEVLLRAAKKYGMDFHELLEIPQGDRRRYHDDVSVIVISLEGRIWRSSM

SEQ ID NO: 720 - DNA, 2025 bp, Arabidopsis thaliana
  CDS (1)..(2025)
atgggaaatggagtcaccactttgaccggttgctgtacaggaactctcgccggagaaatttcccggcgttacgacgtatctctcgttcacgatggacttggccactctttctgctatattcgaccagatctccccggagtagtattaccttcgccggagtctcctctccgatcagatcatatccaagaaaccactttccgttcaatctccggcgcatcggtcagcgcaaatccttcaacggcgctctccggagctctgtcatcggattctgattgtccgtacagctccgcagtctccgcctccgcattcgagagctccggtaattttgcctctttaccactccagcctgtgccgcgtggctccacgtggcaatcaggtccaattgttaacgagtcgggtctcgggtcagctccgtttgagcgacgatttttatcgggtccgattgaaagcgggttgtattcgggtccgattgaatcaacgaagaagacggagaaagagaaaccgaagaagatcagaaaaaaacctaaatcgaagaagaattttctcacattcaaaacactattcgcgaatctaatctctaacaacaataaacctcgcttgaagaagagtgtgatcgagccgatcaacggctctgattcatcagattctggtcgtcttcatcatgaacctgtgattacttcctcacgaagcaacgagaaccctaaatctgatcttgaagaagaagatgaaaaacagagcatgaactctgttttagatgttcaatgggctcaggggaaagcaggggaggatcgtgtacacgtggttgtatctgaagacaacggatgggtctttgtcggaatctatgacggattcagtggtccagatgcgccggattatctcctcaacaatctttacaccgccgtgcaaaaggagctcaatgggttactttggaacgacgaaaagcttagatctttaggagaaaacggcatgaccaaaaccggaaaatgttctgatgaggaagatcccgagtcaggaaaagagaattgtcccgtgataaacaatgatgatgcagttgcttccggtgcaagaaaccaagcgaagagtttgaaatggagatgtgaatgggagaagaagtcaaataacaagaccaaatctgataacaggtgtgatcagaaaggatcaaattcgacgacaacaaaccataaagatgttcttaaagctcttttacaagctttgaggaaaaccgaagacgcgtatttagagctagctgatcaaatggttaaagagaatccagagttagcattgatggggtcttgtgttctcgtgacattgatgaaaggagaagacgtttacgtgatgaatgtcggggatagccgagcggttttaggccggaaacctaatttagcaaccgggagaaagaggcaaaaagagttggagagaataagagaagatagttcattagaagataaagaaattttgatgaatggagcaatgcgtaatactttggttcctctacaacttaacatggaacatagcacaagaattgaagaggaagtgagaagaatcaagaaggaacatcctgacgatgattgtgccgtagagaatgatagagttaaaggttatcttaaggtcactcgtgcatttggagctggctttctcaaacagcctaaatggaacgatgcccttttagagatgttcaggatcgattatatcgggacatcaccatatattacatgttcaccatcattatgtcatcacaagctaacgtcacgtgacaaattcctaatcctatcttctgatggattgtatgaatatttctctaaccaagaagccattttcgaggttgaatctttcatctctgctttccctgaaggcgatccagctcaacacttaatccaagaagtcctccttcgtgctgccaacaagtttggtatggattttcatgaattgttggagataccgcaaggagatcgtaggaggtatcacgatgatgtctctgtgatagtgatctctcttgaaggaagaatatggagatcatcaatgtga

SEQ ID NO: 721 - protein, 674 aa, Arabidopsis thaliana
MGNGVTTLTGCCTGTLAGEISRRYDVSLVHDGLGHSFCYIRPDLPGVVLPSPESPLRSDHIQETTFRSISGASVSANPSTALSGALSSDSDCPYSSAVSASAFESSGNFASLPLQPVPRGSTWQSGPIVNESGLGSAPFERRFLSGPIESGLYSGPIESTKKTEKEKPKKIRKKPKSKKNFLTFKTLFANLISNNNKPRLKKSVIEPINGSDSSDSGRLHHEPVITSSRSNENPKSDLEEEDEKQSMNSVLDVQWAQGKAGEDRVHVVVSEDNGWVFVGIYDGFSGPDAPDYLLNNLYTAVQKELNGLLWNDEKLRSLGENGMTKTGKCSDEEDPESGKENCPVINNDDAVASGARNQAKSLKWRCEWEKKSNNKTKSDNRCDQKGSNSTTTNHKDVLKALLQALRKTEDAYLELADQMVKENPELALMGSCVLVTLMKGEDVYVMNVGDSRAVLGRKPNLATGRKRQKELERIREDSSLEDKEILMNGAMRNTLVPLQLNMEHSTRIEEEVRRIKKEHPDDDCAVENDRVKGYLKVTRAFGAGFLKQPKWNDALLEMFRIDYIGTSPYITCSPSLCHHKLTSRDKFLILSSDGLYEYFSNQEAIFEVESFISAFPEGDPAQHLIQEVLLRAANKFGMDFHELLEIPQGDRRRYHDDVSVIVISLEGRIWRSSM

SEQ ID NO: 722 - DNA, 1989 bp, Arabidopsis thaliana
  CDS (1)..(1989)
atgggtaacggagtaacaaaactgagtatatgtttcacaggcggtggaggagaacgtctccggccaaaagacatctccgttcttcttccggatcctttagacgaaggtttaggtcactccttctgctacgtccgaccagacccgactctaatcagttcctcaaaagtccattcagaggaagacacaacgacgacaacgttccgtacaatctccggcgcttccgttagcgccaacacagctactcctctctcaacttctctctacgatccctacggtcacatcgaccgcgccgccgcattcgaaagcacgacttcattttcgtcaatccctcttcaaccgatccccaaaagctccggtccgatcgttttaggctcgggtccgatcgaaagagggttcctttcaggtccgatcgaaagaggattcatgtcgggtcctcttgatcgggtcgggttattctcaggtccgcttgataagccaaactcagatcatcatcatcagttccaacgtagcttctctcatggtttagctttacgggtcgggtcaagaaaacgatctttggttcggatcctccgtagagcaatctcgaaaacgatgtcaagagggcaaaactcgatcgttgctccgatcaaatccgttaaagattccgataactggggaattaggtcagaaaagagccggaatttgcacaacgagaatctcacagtgaatagcttgaactttagcagcgaagttagcttagacgacgacgtttcactcgaaaaccagaatcttcagtgggctcagggaaaagccggtgaggatcgagtacacgtggttgtatcggaggagcacgggtggctcttcgtcggaatatacgacggattcaacggtccagatgcgccggattatcttctctctcatctctatcctgtcgttcatcgagagctcaaaggattgttatgggacgattcaaatgtcgaatccaaatctcaggatttagaaaggtctaacggagacgaatcttgttcaaatcaggaaaaggatgagacttgtgagcgatggtggagatgtgaatgggatcgtgaaagtcaagatcttgaccgtcgattaaaggaacagattagtcggagaagtgggtcggatcggttaacgaatcattcggaagtattagaggctctgtcacaagctctgaggaaaacagaggaagcgtatttagatactgcagataagatgctcgacgaaaatcctgaactagctttgatgggttcttgtgttttggtcatgttaatgaaaggtgaagatatttatgtgatgaatgttggtgatagtagagctgtgcttggtcagaaatcagaaccggattactggttagctaagattagacaggatttggaacggattaacgaggaaacgatgatgaatgatttggaaggttgtgaaggagatcaatcatctttagtcccgaatttatcggcttttcagctcactgttgatcacagcacaaatatagaagaagaagttgagagaatcagaaacgagcatcccgatgatgttaccgcggtaacgaatgaacgggttaaaggctccttaaaggtcacaagagcgtttggtgctggtttccttaagcagcctaaatggaacaatgcacttcttgagatgttccaaattgattacgttgggaagtctccatacatcaactgcttaccgtctctctaccaccacagattagggtccaaggaccggtttctaatactatcatcggatggtctctaccaatacttcacaaacgaagaagctgtttcagaggttgagctcttcatcacattacaacctgaaggggatccagctcaacaccttgtgcaagagcttttgtttagagctgctaagaaagctggtatggatttccatgaattgctagagataccacaaggtgaacgaagacggtatcacgatgatgtttcaatagtagtgatctctttagaaggaagaatgtggaaatcttgtgtatag

SEQ ID NO: 723 - protein, 662 aa, Arabidopsis thaliana
MGNGVTKLSICFTGGGGERLRPKDISVLLPDPLDEGLGHSFCYVRPDPTLISSSKVHSEEDTTTTTFRTISGASVSANTATPLSTSLYDPYGHIDRAAAFESTTSFSSIPLQPIPKSSGPIVLGSGPIERGFLSGPIERGFMSGPLDRVGLFSGPLDKPNSDHHHQFQRSFSHGLALRVGSRKRSLVRILRRAISKTMSRGQNSIVAPIKSVKDSDNWGIRSEKSRNLHNENLTVNSLNFSSEVSLDDDVSLENQNLQWAQGKAGEDRVHVVVSEEHGWLFVGIYDGFNGPDAPDYLLSHLYPVVHRELKGLLWDDSNVESKSQDLERSNGDESCSNQEKDETCERWWRCEWDRESQDLDRRLKEQISRRSGSDRLTNHSEVLEALSQALRKTEEAYLDTADKMLDENPELALMGSCVLVMLMKGEDIYVMNVGDSRAVLGQKSEPDYWLAKIRQDLERINEETMMNDLEGCEGDQSSLVPNLSAFQLTVDHSTNIEEEVERIRNEHPDDVTAVTNERVKGSLKVTRAFGAGFLKQPKWNNALLEMFQIDYVGKSPYINCLPSLYHHRLGSKDRFLILSSDGLYQYFTNEEAVSEVELFITLQPEGDPAQHLVQELLFRAAKKAGMDFHELLEIPQGERRRYHDDVSIVVISLEGRMWKSCV

SEQ ID NO: 724 - DNA, 1791 bp, Oryza sativa subsp
  CDS (1)..(1791)
atgggcagcggcgcgtcacggctgctgaccgcgtgcacgtgctcgcggccggcgccggcgtccgtggacgcggagccgtgcctggacgacgctctcggccactccttctgctacgccgccgccgccacggccaccgcccactcctcgtcgttccgccacggcatctccggcgccgcgctctccgccaactcgtcggtgcccgtcccgctctacaacgcgtccgccgccgccggcggcgtggcgccggggtactcctcggcattccacacctcgtcgtccttttcctccgcgccgctgcagctgtccaacctctcctcgggcccgctgttcctctcgggtcccatcgaccgcgccggccagctctccggcccgctcgaccccgccgtgcccttctctggcccgctccccgcaaagcctcccaagcccgcgtcctcctcatcgagggggttctcgaggaggttccggaagccgtccttcggcagcctgcggcggagcgtgtcggagaagaaccgcccgtgcgccgtgccgctccgccgcgacgacggcgtgcagtgggcgcacggccgcgccggggaggaccgcgtccacgtggtggtctccgaggatcagcggtggctcttcgtcggcatctacgacggcttcaacggccccgaggcccccgacttcctcgtcaccaacctctaccgcttcctcctccgcgagctccgcgggatcttctacaaggaggccgacgcggacaacaagaagctctggcagtttctcgtggacggcgacgacgacgacagcgagctcgacttctcgggctctggccggttcgcgctgtcactcgacgggctcaaggagagtcggtttcacatgtgggcgcacgccgctgccgacgagagcggcagggaatggggttccaggaggttggcaccggcgcctgcggtgagggaccatgcggcggtgctagccgctctcacccgggccctggcctcgacggaagcggcgtacttggacatgaccgaccagtcaatgggaacccatccggagttggcggtcaccggggcgtgcctgctcgtggccctcgtgagggacgacaacgtgtacgtgatgaaccttggggacagccgtgccattgtggcgcagcgtccggacgatggcgacgatggctgtgtgtttggaaccatgcggcggatggaggacgtcggggtgggcttggagatcgagacaaggcccggcggatgcgccattattgggcttaagccactgcagctgtcgactgatcacagcaccagcatcgaagaggaagttcacaggatcaaacgtgaacatcctgatgatgatcagtgtattgtaaatgatagagtgaagggtcgcctaaaagttacccgggcttttggtgcaggctatctcaaacaggcaaaattgaacaatggattgttagagatgttccgcaatgattacattggtgatacaccgtatatatcatgcacaccatcgctttgccatcacaagctcactgcaagggatcagtttttggttctttcttccgatggcttatatcagtacctgagcaacgaggaggtagttttgcatgttgagaatttcatggagaggtttccagaaggtgatcctgcacaaagtttaattgaggagcttctctctcgtgcagcaaagaaggctggtatggatttttatgagttactagatatacctcaaggggaccgaagaaaataccatgatgatgtcactgtcatggttatttctctggaagggagaatctggaagtcgtccggaacatatgtgtga

SEQ ID NO: 725 - protein, 596 aa, Oryza sativa subsp
MGSGASRLLTACTCSRPAPASVDAEPCLDDALGHSFCYAAAATATAHSSSFRHGISGAALSANSSVPVPLYNASAAAGGVAPGYSSAFHTSSSFSSAPLQLSNLSSGPLFLSGPIDRAGQLSGPLDPAVPFSGPLPAKPPKPASSSSRGFSRRFRKPSFGSLRRSVSEKNRPCAVPLRRDDGVQWAHGRAGEDRVHVVVSEDQRWLFVGIYDGFNGPEAPDFLVTNLYRFLLRELRGIFYKEADADNKKLWQFLVDGDDDDSELDFSGSGRFALSLDGLKESRFHMWAHAAADESGREWGSRRLAPAPAVRDHAAVLAALTRALASTEAAYLDMTDQSMGTHPELAVTGACLLVALVRDDNVYVMNLGDSRAIVAQRPDDGDDGCVFGTMRRMEDVGVGLEIETRPGGCAIIGLKPLQLSTDHSTSIEEEVHRIKREHPDDDQCIVNDRVKGRLKVTRAFGAGYLKQAKLNNGLLEMFRNDYIGDTPYISCTPSLCHHKLTARDQFLVLSSDGLYQYLSNEEVVLHVENFMERFPEGDPAQSLIEELLSRAAKKAGMDFYELLDIPQGDRRKYHDDVTVMVISLEGRIWKSSGTYV

SEQ ID NO: 726 - DNA, 1896 bp, Oryza sativa subsp
  CDS (1)..(1896)
atgggcaatggcatcaccaagaatccgtgcttctccggcgacccgtacgccgccgccgtggcgtccgaccctctcccggacgacagccacggccactccttcacgtacgtgccgtcctccgcggccgccttcgaccactccccgaggtccgccgcggcgtcctccgagacgtcctacttctcgctttccggcgccgccatcagcgccaacccggcgacgtccgcgtcgatgccgtcgttccgcctctacaacgagctgacgtggccgccatcgacggcctgcaccttcgagagctcccgctccttcgccgcggcgccgctcatccaggccgcgccgcccaggctgtccatgtccgggccgctccacgcgacgtcggggcgcttctccgaggcgtcgggatcggcctccaccgcctccgaccgcttctccgaccacccgttcatggacggcatgctcgaccgcgcctcttcggcctcctccaccgccaggctcatgcccagcttctctcacctcatgtctgagccccgcgtcgcgcagtccggcctgagcaatgagcgatcgctcatccgatcccttgtcagggtcgcctccaagctccggtttggggtgccgctctccggccgccggtcgaatggacctgccgagccgacgaccaagagcgacggcgactaccgctccacgcccaagggcaatgtggagtgggcgcagggcatggccggcgaggaccggttccacgtcgccgtctccgaggagcacggctgggtgttcgtcggaatctacgacggcttcaacggccccgacgcaaccgactacctcttcgccaacctctacgtcgccgtgcaccgcgagctcaagggcgtgctctgggacgacatacaaggcgtcgacgtcgtcacggacaacctcccggaccctgctctggccaatgccacacacctctgtttccttgacgcaggcggcgtcggcggcggcggcgacgacgaccccgacgcagagcgcaaggcgaagagggggcggatcgagcgcaatgccgatgacgacggcgcgtcgtcggtgcaccgcgacgtcctgaaggcgctggcgcgcgcgctggcgaggacggaggaggcgttcttcgcggcggcggaggagcgcgcggcgcagagccccgagctgggcctggtcgggtcgtgcgtgctggtgatgctgatgaagggcaaggacgtgtacctgatgaacgtcggcgacagccgcgccgtgctggcgcggcggcgcgagccggacttcaaggacatcttcttcaggcccgaccaggacttgcagctgctcaaggccgaggtgatccgcgagctcgaggcgcacgacaggaatggcctccagtgcgtgcagctcactcccgagcatagcgccgccgccgaggaggaagtgaggaggatcaggtcccagcatctgactgatcggcaggccgtcgtcaacggcagggtgaaggggaagctcagtgttaccagagcatttggtgccggctacctgaagcagccaaaatggaacgataggctgcttgaagccttcaaggttgattacatcggcgccgagccatacatcagctgcacgccgtcgctgcgccaccaccggatcagctccaacgacaggttcctcgtgctgtcttctgacgggctctaccagtacttcaccaacaaggaggtggtcgatcaggtcgccatgttcaccgccgagcagcccgacggcgacccggcgaagcacctcgttggagagctcgtcctccgcgccgcgaggaaagccggcatggattgccgcaggctgctcgagatcccgcatggcgacaggaggaactaccatgacgacgtgtccatcatcgtcatgtcgttcgaggggaggatatggagatcgtccgtttag

SEQ ID NO: 727 - protein, 631 aa, Oryza sativa subsp
MGNGITKNPCFSGDPYAAAVASDPLPDDSHGHSFTYVPSSAAAFDHSPRSAAASSETSYFSLSGAAISANPATSASMPSFRLYNELTWPPSTACTFESSRSFAAAPLIQAAPPRLSMSGPLHATSGRFSEASGSASTASDRFSDHPFMDGMLDRASSASSTARLMPSFSHLMSEPRVAQSGLSNERSLIRSLVRVASKLRFGVPLSGRRSNGPAEPTTKSDGDYRSTPKGNVEWAQGMAGEDRFHVAVSEEHGWVFVGIYDGFNGPDATDYLFANLYVAVHRELKGVLWDDIQGVDVVTDNLPDPALANATHLCFLDAGGVGGGGDDDPDAERKAKRGRIERNADDDGASSVHRDVLKALARALARTEEAFFAAAEERAAQSPELGLVGSCVLVMLMKGKDVYLMNVGDSRAVLARRREPDFKDIFFRPDQDLQLLKAEVIRELEAHDRNGLQCVQLTPEHSAAAEEEVRRIRSQHLTDRQAVVNGRVKGKLSVTRAFGAGYLKQPKWNDRLLEAFKVDYIGAEPYISCTPSLRHHRISSNDRFLVLSSDGLYQYFTNKEVVDQVAMFTAEQPDGDPAKHLVGELVLRAARKAGMDCRRLLEIPHGDRRNYHDDVSIIVMSFEGRIWRSSV

SEQ ID NO: 728 - DNA, 1920 bp, Oryza sativa subsp
  CDS (1)..(1920)
atgggcaactccctcgcctgcttctgctgcggcggcggcgccggcggccgaggcggccgccacgtcgcccccgccgcgctcccctccgacccggcctacgacgagggcctgggccactcgttctgctacgtccgccccgacaagttcgtggttcccttctccgcggatgatttggtggctgacgcgaaggcggccgcggcggcggagggggaggcgaccacgttccgggcgatatccggggcggcgctcagtgccaacgtatccacgccgctgtccacgtccgtgctgctgctgatgccggaggagtcgtcggcgtccgccaccgcgtcgtcggggtttgagagctcggagtcgttcgctgctgtgccgctgcagccggtgccgaggttctcgtccgggccgatctccgcgcccttctccggcgggttcatgtcggggcccttggagagggggttccaatctgggccactcgacgccgcgctcctctcgggccctctccctggcgccgccacctccggtcgtatgggtggcgccgtccctgcgctccgccggagcctctcccacggtggccgccgcctccgcaatttcacccgcgcgctcctcacgcgcaccgagaagtttcaggattctgcggatctaggctcgccggacgccgccgccgccgccgtcgccgcctgtgggggcgatccctgtggtctgcagtgggcgcaggggaaagccggcgaggaccgcgtccacgtcgtcgtgtcggaggagcgaggctgggtgttcgtcggcatctacgatgggttcaacggccccgacgccaccgacttcctggtatccaacctctacgccgccgtccaccgcgagctccgcggcctcctctgggatcagcgggagcagaacgtgcagcacgaccagcgccccgaccaacccggctcagccccaagcaccacggcctcagataaccaagaccagtggggtcgccgccgccgcacccgccgctcaagaccgccgcgtggcgccgacgacgaccagcggcggtggaagtgcgagtgggagcaggagcgggattgctccaacctgaagccaccaacgcagcagcgtcttcgttgcaacagcgagaacgaccacgtcgccgtgctcaaggcgctgacccgtgcgctgcacaggaccgaggaggcttacctggacatcgccgacaagatggtcggcgagttccctgagcttgcgctcatgggctcttgtgttcttgccatgctcatgaaaggagaggacatgtacatcatgaatgttggcgatagccgggctgtgttggcaacaatgggcagcgtcgatctcgagcagatcagccagggttcattcgatggatcagtcggggattgcccgccatgcttgtcggccgtgcagctcacgtcggatcacagcacttcagtggaagaggaagtaatcagaatacgaaacgagcatcctgatgatccatctgccatctccaaggatcgcgtgaagggctcgctgaaggtgaccagagcatttggtgctgggtttttgaaacagcccaagtggaatgatgcactcctggagatgttcagaattgattacgttgggtcctccccatacatatcatgcaatccatccctttttcatcataagctcagcacaagggatagattcttgatattatcttcagatggactttaccagtatttcaccaacgaggaggcagttgctcaggtcgaaatgttcatcgcaacaacccctgaaggcgaccctgcccaacatcttgtggaggaagttcttttccgtgctgccaacaaagcaggaatggactttcatgaactgatcgagataccacatggtgatcgtcggcgataccatgacgatgtatctgtcatcgtcatctctttggagggcaggatttggagatcctgcgtgtaa

SEQ ID NO: 729 - protein, 639 aa, Oryza sativa subsp
MGNSLACFCCGGGAGGRGGRHVAPAALPSDPAYDEGLGHSFCYVRPDKFVVPFSADDLVADAKAAAAAEGEATTFRAISGAALSANVSTPLSTSVLLLMPEESSASATASSGFESSESFAAVPLQPVPRFSSGPISAPFSGGFMSGPLERGFQSGPLDAALLSGPLPGAATSGRMGGAVPALRRSLSHGGRRLRNFTRALLTRTEKFQDSADLGSPDAAAAAVAACGGDPCGLQWAQGKAGEDRVHVVVSEERGWVFVGIYDGFNGPDATDFLVSNLYAAVHRELRGLLWDQREQNVQHDQRPDQPGSAPSTTASDNQDQWGRRRRTRRSRPPRGADDDQRRWKCEWEQERDCSNLKPPTQQRLRCNSENDHVAVLKALTRALHRTEEAYLDIADKMVGEFPELALMGSCVLAMLMKGEDMYIMNVGDSRAVLATMGSVDLEQISQGSFDGSVGDCPPCLSAVQLTSDHSTSVEEEVIRIRNEHPDDPSAISKDRVKGSLKVTRAFGAGFLKQPKWNDALLEMFRIDYVGSSPYISCNPSLFHHKLSTRDRFLILSSDGLYQYFTNEEAVAQVEMFIATTPEGDPAQHLVEEVLFRAANKAGMDFHELIEIPHGDRRRYHDDVSVIVISLEGRIWRSCV

SEQ ID NO: 730 - DNA, 1782 bp, Oryza sativa subsp
  CDS (1)..(1782)
atgggcaacagcttggcgagcctggcgacgccgtgcttcgcggacgccgccgccggtggtgggcgcgggcgcggtcaccacgccgccggcgacgacgccgttgcgttcgacgacgacgacgccgcggggggctgcaacagcatcggtcacattctgagcttcgatggacgcgatgcgccggcgttcgccatccatggcgtgttgctgccgtcgaacccgtcgacgatggcctccaccggcggcggcggcggcggcggcgcctccgtcctcaacgacggcgcgctgtccatcgggtcgtcgtcgttcgacagctccaactccttctcgttccggacgctccagccgcggcagtactccgggccactggagtactgcaccacgtcgccgtcgacgtcgggcgcgtcgtcgtcgcggcagctcggcccgcgcaccgacaagcagatcctcaacgacatctacgccaaccggcaacgccgccggtgtcaggggtccaaggggccgccgctcctcggccgcctccgcaaggcggtggcgtcgctgctgcgcgccgggccgtgcggcttccccgagcaggaggagcccgccgccatgatcaacggcgtcggcgtggtgaggaacggcgaggagagcatcagccggaacgtcgacgcggcggcggcggacgacggcgcggagagggtgcagtgggcgcgcggccaggccggggaggacagggtgcacgtggtggtgtcggaggagcacgggtggatgttcgtcggcatctacgacggcttcaatggccccgacgccaccgactacctcgccgacaacctgtacgcggccgtgtgccgcgagctcaacggcgtgctctcggaggacgagccggatccaccggaggcggcggcggcggcggggcggtgcaacgggtgcggcggagcggcgcggcaccgcgaggtgctcgacgcgatggcgcgggcgctgcggcggacggaggaggggtacttcgcggaggcggaggcgcgcgcggcggagtgcccggagctggcgatgatggggtcgtgcgtcctcgtcgtgctgatgaagggcgccgacgtgtacgccatgaacgtcggcgacagccgcgccgtgctggcgcaccaggccgagccggacctgtcccacgtcgtgctgccgcggggcagccaccacgatggcgacggcgacctcgccggcgtgaaggaggcgattaagcggcagttcgacgagtgcgagatgggggagctggcggcgctgcagctcaccatggatcatagcaccaatgtgtacaaggaggtgagaaggatcaggagtgagcacttggatgatcctggctgcatcaccaatggcagggtgaagggttgtttgaaggtgacaagagcgtttggagctggctacctaaaagagccccgttggaacaaggctctactagaggtgttccaggtggattatgtgggtagctcgccgtacatcagctgccgtccgtacatccgacaccaccggttaggggcgcaggacaacttcttgatcctctcgtcggatggtctgtatgactacttcacaaaagaggaggtggtggcacaagtggaggccttcaccgccagctaccccgacgaggaccctgccaagtacctcagccaccagattctccaccgggccgccaatcaagctgggatggggttccatgagttgctagagattcagcaaggagatcgacgacagtaccatgacgatgtctccatcattatcatctccttggagggaaaaatttggagatcatcacaatga

SEQ ID NO: 731 - protein, 593 aa, Oryza sativa subsp
MGNSLASLATPCFADAAAGGGRGRGHHAAGDDAVAFDDDDAAGGCNSIGHILSFDGRDAPAFAIHGVLLPSNPSTMASTGGGGGGGASVLNDGALSIGSSSFDSSNSFSFRTLQPRQYSGPLEYCTTSPSTSGASSSRQLGPRTDKQILNDIYANRQRRRCQGSKGPPLLGRLRKAVASLLRAGPCGFPEQEEPAAMINGVGVVRNGEESISRNVDAAAADDGAERVQWARGQAGEDRVHVVVSEEHGWMFVGIYDGFNGPDATDYLADNLYAAVCRELNGVLSEDEPDPPEAAAAAGRCNGCGGAARHREVLDAMARALRRTEEGYFAEAEARAAECPELAMMGSCVLVVLMKGADVYAMNVGDSRAVLAHQAEPDLSHVVLPRGSHHDGDGDLAGVKEAIKRQFDECEMGELAALQLTMDHSTNVYKEVRRIRSEHLDDPGCITNGRVKGCLKVTRAFGAGYLKEPRWNKALLEVFQVDYVGSSPYISCRPYIRHHRLGAQDNFLILSSDGLYDYFTKEEVVAQVEAFTASYPDEDPAKYLSHQILHRAANQAGMGFHELLEIQQGDRRQYHDDVSIIIISLEGKIWRSSQ

SEQ ID NO: 732 - DNA, 1920 bp, Oryza sativa subsp
  CDS (1)..(1920)
atgggcaactccctcgcctgcttctgctgcggctgctgcgccggcggccgaggcggccgccacgtcgcccccgccgcgctcccctccgacccggcctacgacgagggcctgggccactcgttctgctacgtccgccccgacaagttcgtggttcccttctccgcggatgatttggtggctgacgcgaaggcggccgcggcggcggagggggaggcgaccacgttccgggcgatatccggggcggcgctcagtgccaacgtatccacgccgctgtccacgtccgtgctgctgctgatgccggaggagtcgtcggcgtccgccaccgcgtcgtcggggtttgagagctcggagtcgttcgctgctgtgccgctgcagccggtgccgaggttctcgtccgggccgatctccgcgcccttctccggcgggttcatgtcggggcccttggagagggggttccaatctgggccactcgacgccgcgctcctctcgggccctctccctggcaccgccacctccggtcgtatgggtggcgccgtccctgcgctccgccggagcctctcccacggtggccgccgcctccgcaatttcacccgcgcgctcctcgcgcgcaccgagaagtttcaggattctgcggatctaggctcgccggacgccgccgccgccgccgtcgccgcctgtgggggcgatccctgtggtctgcagtgggcgcaggggaaagccggcgaggaccgcgtccacgtcgtcgtgtcggaggagcgaggctgggtgttcgtcggcatctacgatgggttcaacggccccgacgccaccgacttcctggtatccaacctctacgccgccgtccaccgcgagctccgcggcctcctctgggatcagcgggagcagaacgtgcagcacgaccagcgccccgaccaacccggctcagccccaagcaccacggcctcagataaccaagaccagtggggtcgccgccgccgcacccgccgctcaagaccgccgcgtggcgccgacgacgaccagcggcggtggaagtgcgagtgggagcaggagcgggattgctccaacctgaagccaccaacgcagcagcgtcttcgttgcaacagcgagaacgaccacgtcgccgtgctcaaggcgctgacccgtgcgctgcacaggaccgaggaggcttacctggacatcgccgacaagatggtcggcgagttccctgagcttgcgctcatgggctcttgtgttcttgccatgctcatgaaaggagaggacatgtacatcatgaatgttggcgatagccgggctgtgttggcaacaatggacagcgtcgatctcgagcagatcagccagggttcattcgatggatcagtcggggattgcccgccatgcttgtcggccgtgcagctcacgtcggatcacagcacttcagtggaagaggaagtaatcagaatacgaaacgagcatcctgatgatccatctgccatctccaaggatcgcgtgaagggctcgctgaaggtgaccagagcatttggtgctgggtttttgaaacagcccaagtggaatgatgcactcctggagatgttcagaattgattacgttgggtcctccccatacatatcatgcaatccatccctttttcatcataagctcagcacaagggatagattcttgatattatcttcagatggactttaccagtatttcaccaacgaggaggcagttgctcaggtcgaaatgttcatcgcaacaacccctgaaggcgaccctgcccaacatcttgtggaggaagttcttttccgtgctgccaacaaagcaggaatggactttcatgaactgatcgagataccacatggtgatcgtcggcgataccatgacgatgtatctgtcatcgtcatctctttggagggcaggatttggagatcctgcgtgtaa

SEQ ID NO: 733 - protein, 639 aa, Oryza sativa subsp
MGNSLACFCCGCCAGGRGGRHVAPAALPSDPAYDEGLGHSFCYVRPDKFVVPFSADDLVADAKAAAAAEGEATTFRAISGAALSANVSTPLSTSVLLLMPEESSASATASSGFESSESFAAVPLQPVPRFSSGPISAPFSGGFMSGPLERGFQSGPLDAALLSGPLPGTATSGRMGGAVPALRRSLSHGGRRLRNFTRALLARTEKFQDSADLGSPDAAAAAVAACGGDPCGLQWAQGKAGEDRVHVVVSEERGWVFVGIYDGFNGPDATDFLVSNLYAAVHRELRGLLWDQREQNVQHDQRPDQPGSAPSTTASDNQDQWGRRRRTRRSRPPRGADDDQRRWKCEWEQERDCSNLKPPTQQRLRCNSENDHVAVLKALTRALHRTEEAYLDIADKMVGEFPELALMGSCVLAMLMKGEDMYIMNVGDSRAVLATMDSVDLEQISQGSFDGSVGDCPPCLSAVQLTSDHSTSVEEEVIRIRNEHPDDPSAISKDRVKGSLKVTRAFGAGFLKQPKWNDALLEMFRIDYVGSSPYISCNPSLFHHKLSTRDRFLILSSDGLYQYFTNEEAVAQVEMFIATTPEGDPAQHLVEEVLFRAANKAGMDFHELIEIPHGDRRRYHDDVSVIVISLEGRIWRSCV

SEQ ID NO: 734 - DNA, 2212 bp, Arabidopsis thaliana
  CDS (93)..(2081)
attgatgaacaatcaatctcagctttgagttctcccaaatcctctattgactttgcgaatctaagaaaaaactgaaattaataacgtttttgatgggtaacggagtaacaaaactgagtatatgtttcacaggcggtggaggagaacgtctccggccaaaagacatctccgttcttcttccggatcctttagacgaaggtttaggtcactccttctgctacgtccgaccagacccgactctaatcagttcctcaaaagtccattcagaggaagacacaacgacgacaacgttccgtacaatctccggcgcttccgttagcgccaacacagctactcctctctcaacttctctctacgatccctacggtcacatcgaccgcgccgccgcattcgaaagcacgacttcattttcgtcaatccctcttcaaccgatccccaaaagctccggtccgatcgttttaggctcgggtccgatcgaaagagggttcctttcaggtccgatcgaaagaggattcatgtcgggtcctcttgatcgggtcgggttattctcaggtccgcttgataagccaaactcagatcatcatcatcagttccaacgtagcttctctcatggtttagctttacgggtcgggtcaagaaaacgatctttggttcggatcctccgtagagcaatctcgaaaacgatgtcaagagggcaaaactcgatcgttgctccgatcaaatccgttaaagattccgataactggggaattaggtcagaaaagagccggaatttgcacaacgagaatctcacagtgaatagcttgaactttagcagcgaagttagcttagacgacgacgtttcactcgaaaaccagaatcttcagtgggctcagggaaaagccggtgaggatcgagtacacgtggttgtatcggaggagcacgggtggctcttcgtcggaatatacgacggattcaacggtccagatgcgccggattatcttctctctcatctctatcctgtcgttcatcgagagctcaaaggattgttatgggacgattcaaatgtcgaatccaaatctcaggatttagaaaggtctaacggagacgaatcttgttcaaatcaggaaaaggatgagacttgtgagcgatggtggagatgtgaatgggatcgtgaaagtcaagatcttgaccgtcgattaaaggaacagattggtcggagaagtggatcggatcggttaacgaatcattcggaagtattagaggctctgtcacaagctctgaggaaaacagaggaagcgtatttagatactgcagataagatgctcgacgaaaatcctgaactagctttgatgggttcttgtgttttggtcatgttaatgaaaggtgaagatatttatgtgatgaatgttggtgatagtagagctgtgcttggtcagaaatcagaaccggattactggttagctaagattagacaggatttggaacggattaacgaggaaacgatgatgaatgatttggaaggttgtgaaggagatcaatcatctttagtcccgaatttatcggcttttcagctcactgttgatcacagcacaaatatagaagaagaagttgagagaatcagaaacgagcatcccgatgatgttaccgcggtaacgaatgaacgggttaaaggctccttaaaggtcacaagagcgtttggtgctggtttccttaagcagcctaaatggaacaatgcacttcttgagatgttccaaattgattacgttgggaagtctccatacatcaactgcttaccgtctctctaccaccacagattagggtccaaggaccggtttctaatactatcatcggatggtctctaccaatacttcacaaacgaagaagctgtttcagaggttgagctcttcatcacattacaaccggaaggggatccagctcaacaccttgtgcaagagcttttgtttagagctgctaagaaagctggtatggatttccatgaattgctagagataccacaaggtgaacgaagacggtatcacgatgatgtttcaatagtagtgatctctttagaaggaagaatgtggaaatcttgtgtatagaaaacaatccctatgagcatacacacaagaacaaattggtgtgttcatggagacagagatcgatctctcatcaactctgaatcatgtactatgttgatataaacaggaaataaaaaaagttttggcaactt

SEQ ID NO: 735 - protein, 662 aa, Arabidopsis thaliana
MGNGVTKLSICFTGGGGERLRPKDISVLLPDPLDEGLGHSFCYVRPDPTLISSSKVHSEEDTTTTTFRTISGASVSANTATPLSTSLYDPYGHIDRAAAFESTTSFSSIPLQPIPKSSGPIVLGSGPIERGFLSGPIERGFMSGPLDRVGLFSGPLDKPNSDHHHQFQRSFSHGLALRVGSRKRSLVRILRRAISKTMSRGQNSIVAPIKSVKDSDNWGIRSEKSRNLHNENLTVNSLNFSSEVSLDDDVSLENQNLQWAQGKAGEDRVHVVVSEEHGWLFVGIYDGFNGPDAPDYLLSHLYPVVHRELKGLLWDDSNVESKSQDLERSNGDESCSNQEKDETCERWWRCEWDRESQDLDRRLKEQIGRRSGSDRLTNHSEVLEALSQALRKTEEAYLDTADKMLDENPELALMGSCVLVMLMKGEDIYVMNVGDSRAVLGQKSEPDYWLAKIRQDLERINEETMMNDLEGCEGDQSSLVPNLSAFQLTVDHSTNIEEEVERIRNEHPDDVTAVTNERVKGSLKVTRAFGAGFLKQPKWNNALLEMFQIDYVGKSPYINCLPSLYHHRLGSKDRFLILSSDGLYQYFTNEEAVSEVELFITLQPEGDPAQHLVQELLFRAAKKAGMDFHELLEIPQGERRRYHDDVSIVVISLEGRMWKSCV

SEQ ID NO: 736 - DNA, 1782 bp, Oryza sativa
  CDS (1)..(1782)
atgggcaacagcttggcgagcctggcgacgccgtgcttcgcggacgccgccgccggtggtgggcgcgggcgcggtcaccacgccgccggcgacgacgccgttgcgttcgacgacgacgacgccgcggggggctgcaacagcatcggtcacattctgagcttcgatggacgcgatgcgccggcgttcgccatccatggcgtgttgctgccgtcgaacccgtcgacgatggcctccaccggcggcggcggcggcggcggcgcctccgtcctcaacgacggcgcgctgtccatcgggtcgtcgtcgttcgacagctccaactccttctcgttccggacgctccagccgcggcagtactccgggccactggagtactgcaccacgtcgccgtcgacgtcgggcgcgtcgtcgtcgcggcagctcggcccgcgcaccgacaagcagatcctcaacgacatctacgccaaccggcaacgccgccggtgtcaggggtccaaggggccgccgctcctcggccgcctccgcaaggcggtggcgtcgctgctgcgcgccgggccgtgcggcttccccgagcaggaggagcccgccgccatgatcaacggcgtcggcgtggtgaggaacggcgaggagagcatcagccggaacgtcgacgcggcggcggcggacgacggtgcggagagggtgcagtgggcgcgcggcaaggccggggaggacagggtgcacgtggtggtgtcggaggagcacgggtggatgttcgtcggcatctacgacggcttcaatggccccgacgccaccgactacctcgccgacaacctgtacgcggccgtgtgccgcgagctcaacggcgtgctctcggaggacgagccggatccaccggaggcggcggcggcggcggggcggtgcaacgggtgcggcggagcggcgcggcaccgcgaggtgctcgacgcgatggcgcgggcgctgcggcggacggaggaggggtacttcgcggaggcggaggcgcgcgcggcggagtgcccggagctggcgatgatggggtcgtgcgtcctcgtcgtgctgatgaagggcgccgacgtgtacgccatgaacgtcggcgacagccgcgccgtgctggcgcaccaggccgagccggacctgtcccacgtcgtgctgccgcggggcagccaccacgatggcgacggcgacctcgccggcgtgaaggaggcgatcaagcggcagttcgacgagtgcgagatgggggagctggcggcgctgcagctcaccatggatcacagcaccaatgtgtacaaggaggtgagaaggatcaggagtgagcacttggatgatcctggctgcatcaccaatggcagggtgaagggttgtttgaaggtgacaagagcgtttggagctggctacctaaaagagccccgttggaacaaggctctactagaggtgttccaggtggattatgtgggtagctcgccgtacatcagctgccgtccgtacatccgacaccaccggttaggggcgcaggacaagttcttgatcctctcgtcggatggtctgtatgactacttcacaaaagaggaggtggtggcacaagtggaggccttcaccgccggctaccccgacgaggaccctgccaagtacctcagccaccagattctcctccgggccgccaatcaagctgggatggggttccatgagttgctagagattcagcaaggagatcgacgacagtaccatgacgatgtctccatcattatcatctccttggagggaaaaatttggagatcatcacaatga

SEQ ID NO: 737 - protein, 593 aa, Oryza sativa
MGNSLASLATPCFADAAAGGGRGRGHHAAGDDAVAFDDDDAAGGCNSIGHILSFDGRDAPAFAIHGVLLPSNPSTMASTGGGGGGGASVLNDGALSIGSSSFDSSNSFSFRTLQPRQYSGPLEYCTTSPSTSGASSSRQLGPRTDKQILNDIYANRQRRRCQGSKGPPLLGRLRKAVASLLRAGPCGFPEQEEPAAMINGVGVVRNGEESISRNVDAAAADDGAERVQWARGKAGEDRVHVVVSEEHGWMFVGIYDGFNGPDATDYLADNLYAAVCRELNGVLSEDEPDPPEAAAAAGRCNGCGGAARHREVLDAMARALRRTEEGYFAEAEARAAECPELAMMGSCVLVVLMKGADVYAMNVGDSRAVLAHQAEPDLSHVVLPRGSHHDGDGDLAGVKEAIKRQFDECEMGELAALQLTMDHSTNVYKEVRRIRSEHLDDPGCITNGRVKGCLKVTRAFGAGYLKEPRWNKALLEVFQVDYVGSSPYISCRPYIRHHRLGAQDKFLILSSDGLYDYFTKEEVVAQVEAFTAGYPDEDPAKYLSHQILLRAANQAGMGFHELLEIQQGDRRQYHDDVSIIIISLEGKIWRSSQ

SEQ ID NO: 738 - DNA, 21 bp, Artificial sequence
  primer
atgggtaacggaatcgggaag

SEQ ID NO: 739 - DNA, 23 bp, Artificial sequence
  primer
ttatacacaagatttccacattc

SEQ ID NO: 740 - protein, 707 aa, Artificial sequence
  consensus sequence
  Variant (4)..(29): Xaa in position 4 to 29 is any amino acid
  Variant (30)..(37): Xaa in position 30 to 37 is any or no amino acid
  Variant (42)..(42): Xaa in position 42 is any amino acid
  Variant (44)..(59): Xaa in position 44 to 59 is any amino acid
  Variant (60)..(78): Xaa in position 60 to 78 is any or no amino acid
  Variant (83)..(84): Xaa in position 83 to 84 is any amino acid
  Variant (88)..(89): Xaa in position 88 to 89 is any amino acid
  Variant (91)..(92): Xaa in position 91 to 92 is any amino acid
  Variant (94)..(106): Xaa in position 94 to 106 is any amino acid
  Variant (107)..(116): Xaa in position 107 to 116 is any or no amino acid
  Variant (118)..(118): Xaa in position 118 is any amino acid
  Variant (121)..(121): Xaa in position 121 is any amino acid
  Variant (124)..(126): Xaa in position 124 to 126 is any amino acid
  Variant (130)..(140): Xaa in position 130 to 140 is any amino acid
  Variant (141)..(158): Xaa in position 141 to 158 is any or no amino acid
  Variant (160)..(160): Xaa in position 160 is any amino acid
  Variant (162)..(167): Xaa in position 162 to 167 is any amino acid
  Variant (168)..(168): Xaa in position 168 is any or no amino acid
  Variant (170)..(193): Xaa in position 170 to 193 is any amino acid
  Variant (194)..(220): Xaa in position 194 to 220 is any or no amino acid
  Variant (222)..(257): Xaa in position 222 to 257 is any amino acid
  Variant (258)..(284): Xaa in position 258 to 284 is any or no amino acid
  Variant (288)..(288): Xaa in position 288 is any amino acid
  Variant (290)..(290): Xaa in position 290 is any amino acid
  Variant (304)..(304): Xaa in position 304 is any amino acid
  Variant (307)..(307): Xaa in position 307 is any amino acid
  Variant (321)..(321): Xaa in position 321 is any amino acid
  Variant (323)..(323): Xaa in position 323 is any amino acid
  Variant (325)..(327): Xaa in position 325 to 327 is any amino acid
  Variant (330)..(331): Xaa in position 330 to 331 is any amino acid
  Variant (333)..(333): Xaa in position 333 is any amino acid
  Variant (337)..(337): Xaa in position 337 is any amino acid
  Variant (339)..(339): Xaa in position 339 is any amino acid
  Variant (341)..(365): Xaa in position 341 to 365 is any amino acid
  Variant (366)..(424): Xaa in position 366 to 424 is any or no amino acid
  Variant (426)..(427): Xaa in position 426 to 427 is any amino acid
  Variant (430)..(430): Xaa in position 430 is any amino acid
  Variant (433)..(434): Xaa in position 433 to 434 is any amino acid
  Variant (437)..(438): Xaa in position 437 to 438 is any amino acid
  Variant (444)..(446): Xaa in position 444 to 446 is any amino acid
  Variant (448)..(454): Xaa in position 448 to 454 is any amino acid
  Variant (459)..(460): Xaa in position 459 to 460 is any amino acid
  Variant (466)..(467): Xaa in position 466 to 467 is any amino acid
  Variant (472)..(472): Xaa in position 472 is any amino acid
  Variant (474)..(474): Xaa in position 474 is any amino acid
  Variant (476)..(476): Xaa in position 476 is any amino acid
  Variant (487)..(512): Xaa in position 487 to 512 is any amino acid
  Variant (513)..(529): Xaa in position 513 to 529 is any or no amino acid
  Variant (531)..(533): Xaa in position 531 to 533 is any amino acid
  Variant (536)..(538): Xaa in position 536 to 538 is any amino acid
  Variant (542)..(543): Xaa in position 542 to 543 is any amino acid
  Variant (548)..(548): Xaa in position 548 is any amino acid
  Variant (551)..(552): Xaa in position 551 to 552 is any amino acid
  Variant (555)..(555): Xaa in position 555 is any amino acid
  Variant (558)..(564): Xaa in position 558 to 564 is any amino acid
  Variant (569)..(569): Xaa in position 569 is any amino acid
  Variant (580)..(580): Xaa in position 580 is any amino acid
  Variant (588)..(589): Xaa in position 588 to 589 is any amino acid
  Variant (593)..(593): Xaa in position 593 is any amino acid
  Variant (595)..(596): Xaa in position 595 to 596 is any amino acid
  Variant (599)..(599): Xaa in position 599 is any amino acid
  Variant (601)..(602): Xaa in position 601 to 602 is any amino acid
  Variant (606)..(606): Xaa in position 606 is any amino acid
  Variant (608)..(608): Xaa in position 608 is any amino acid
  Variant (612)..(612): Xaa in position 612 is any amino acid
  Variant (615)..(615): Xaa in position 615 is any amino acid
  Variant (617)..(619): Xaa in position 617 to 619 is any amino acid
  Variant (621)..(621): Xaa in position 621 is any amino acid
  Variant (624)..(624): Xaa in position 624 is any amino acid
  Variant (632)..(632): Xaa in position 632 is any amino acid
  Variant (635)..(635): Xaa in position 635 is any amino acid
  Variant (639)..(639): Xaa in position 639 is any amino acid
  Variant (641)..(642): Xaa in position 641 to 642 is any amino acid
  Variant (645)..(645): Xaa in position 645 is any amino acid
  Variant (647)..(650): Xaa in position 647 to 650 is any amino acid
  Variant (652)..(652): Xaa in position 652 is any amino acid
  Variant (657)..(658): Xaa in position 657 to 658 is any amino acid
  Variant (660)..(661): Xaa in position 660 to 661 is any amino acid
  Variant (663)..(663): Xaa in position 663 is any amino acid
  Variant (665)..(665): Xaa in position 665 is any amino acid
  Variant (669)..(669): Xaa in position 669 is any amino acid
  Variant (676)..(676): Xaa in position 676 is any amino acid
  Variant (679)..(679): Xaa in position 679 is any amino acid
  Variant (683)..(683): Xaa in position 683 is any amino acid
  Variant (688)..(688): Xaa in position 688 is any amino acid
  Variant (695)..(696): Xaa in position 695 to 696 is any amino acid
  Variant (706)..(706): Xaa in position 706 is any amino acid
MGNXXXXXXXXXXXXXXXXXXXXXXXXXXXXXXXXXXGHSFXYXXXXXXXXXXXXXXXXXXXXXXXXXXXXXXXXXXXISGAXXSANXXTXXSXXXXXXXXXXXXXXXXXXXXXXXFXSSXSFXXXPLQXXXXXXXXXXXXXXXXXXXXXXXXXXXXXSXPXXXXXXXSXXXXXXXXXXXXXXXXXXXXXXXXXXXXXXXXXXXXXXXXXXXXXXXXXXXSXXXXXXXXXXXXXXXXXXXXXXXXXXXXXXXXXXXXXXXXXXXXXXXXXXXXXXXXXXXXXXXQWAXGXAGEDRVHVVVSEEXGWXFVGIYDGFNGPDAXDXLXXXLYXXVXRELXGXLXXXXXXXXXXXXXXXXXXXXXXXXXXXXXXXXXXXXXXXXXXXXXXXXXXXXXXXXXXXXXXXXXXXXXXXXXXXXXXXXXXXXHXXVLXALXXALXXTEEAYXXXAXXXXXXXPELAXXGSCVLXXLMKGXDXYXMNVGDSRAVLXXXXXXXXXXXXXXXXXXXXXXXXXXXXXXXXXXXXXXXXXXXLXXXQLXXXHSTXXEEEVXRIXXEHXDDXXXXXXXRVKGXLKVTRAFGAGXLKQPKWNXXLLEXFXXDYXGXXPYIXCXPSLXHHXLXXXDXFLXLSSDGLYXYFXNEEXVXXVEXFXXXXPXGDPAXXLXXEXLXRAAXKAGMDFXELXEIPXGDRRXYHDDVSXXVISLEGRIWXS

SEQ ID NO: 741 - protein, 60 aa, Artificial sequence
  protein pattern
  Variant (5)..(5): Xaa in position 5 is Phe or Tyr
  Variant (9)..(9): Xaa in position 9 is Ala or Pro
  Variant (11)..(11): Xaa in position 11 is any amino acid
  Variant (13)..(13): Xaa in position 13 is Asp or Asn
  Variant (14)..(14): Xaa in position 14 is any amino acid
  Variant (18)..(18): Xaa in position 18 is any amino acid
  Variant (20)..(21): Xaa in position 20 to 21 is any amino acid
  Variant (24)..(24): Xaa in position 24 is any amino acid
  Variant (26)..(26): Xaa in position 26 is any amino acid
  Variant (27)..(27): Xaa in position 27 is Glu, Ser or Thr
  Variant (31)..(31): Xaa in position 31 is Asn, Ser or Thr
  Variant (33)..(33): Xaa in position 33 is any amino acid
  Variant (37)..(37): Xaa in position 37 is any amino acid
  Variant (40)..(40): Xaa in position 40 is Lys or Arg
  Variant (41)..(41): Xaa in position 41 is Ile or Leu
  Variant (42)..(42): Xaa in position 42 is Gly, Ser or Thr
  Variant (43)..(43): Xaa in position 43 is Ala, Ser or Thr
  Variant (44)..(44): Xaa in position 44 is any amino acid
  Variant (46)..(46): Xaa in position 46 is any amino acid
  Variant (49)..(49): Xaa in position 49 is Ile or Val
  Variant (57)..(57): Xaa in position 57 is Glu or Gln
  Variant (59)..(59): Xaa in position 59 is Phe or Leu
  Variant (60)..(60): Xaa in position 60 is Ser or Thr
FGAGXLKQXKXNXXLLEXFXXDYXGXXPYIXCXPSLXHHXXXXXDXFLXLSSDGLYXYXX

SEQ ID NO: 742 - protein, 59 aa, Artificial sequence
  protein pattern
  Variant (3)..(3): Xaa in position 3 is any amino acid
  Variant (5)..(5): Xaa in position 5 is any amino acid
  Variant (11)..(11): Xaa in position 11 is Phe or Val
  Variant (14)..(14): Xaa in position 14 is any or no amino acid
  Variant (16)..(16): Xaa in position 16 is any or no amino acid
  Variant (19)..(19): Xaa in position 19 is Asp or Glu
  Variant (20)..(21): Xaa in position 20 to 21 is any amino acid
  Variant (23)..(23): Xaa in position 23 is Leu, Met or Val
  Variant (35)..(35): Xaa in position 35 is Asp or Glu
  Variant (37)..(37): Xaa in position 37 is Pro or Thr
  Variant (39)..(39): Xaa in position 39 is Phe or Tyr
  Variant (41)..(41): Xaa in position 41 is any amino acid
  Variant (42)..(42): Xaa in position 42 is Ala, Asp, Ser or Thr
  Variant (43)..(43): Xaa in position 43 is any amino acid
  Variant (46)..(47): Xaa in position 46 to 47 is any amino acid
  Variant (48)..(48): Xaa in position 48 is Leu or Val
  Variant (49)..(49): Xaa in position 49 is any amino acid
  Variant (53)..(53): Xaa in position 53 is any amino acid
  Variant (55)..(55): Xaa in position 55 is Ile, Leu or Val
  Variant (56)..(56): Xaa in position 56 is Phe or Leu
  Variant (57)..(57): Xaa in position 57 is any amino acid
  Variant (58)..(58): Xaa in position 58 is Asp, Glu or Lys
  Variant (59)..(59): Xaa in position 59 is Asp, Glu or Gln
WAXGXAGEDRXHVXVXSEXXXWXFVGIYDGFNGPXAXDXLXXXLYXXXXRELXGXXXXX

SEQ ID NO: 743 - protein, 59 aa, Artificial sequence
  protein pattern
  Variant (2)..(2): Xaa in position 2 is any or no amino acid
  Variant (4)..(4): Xaa in position 4 is any or no amino acid
  Variant (8)..(9): Xaa in position 8 to 9 is any amino acid
  Variant (11)..(12): Xaa in position 11 to 12 is any amino acid
  Variant (13)..(13): Xaa in position 13 is Glu or Gln
  Variant (14)..(14): Xaa in position 14 is Ile, Leu or Val
  Variant (16)..(16): Xaa in position 16 is any amino acid
  Variant (20)..(22): Xaa in position 20 to 22 is any amino acid
  Variant (25)..(25): Xaa in position 25 is Asp or Gly
  Variant (27)..(27): Xaa in position 27 is His or Tyr
  Variant (30)..(30): Xaa in position 30 is Ile or Leu
  Variant (31)..(31): Xaa in position 31 is Asp or Glu
  Variant (33)..(33): Xaa in position 33 is Pro or Gln
  Variant (34)..(34): Xaa in position 34 is any amino acid
  Variant (36)..(36): Xaa in position 36 is Asp or Glu
  Variant (39)..(39): Xaa in position 39 is any amino acid
  Variant (45)..(45): Xaa in position 45 is Ser or Thr
  Variant (46)..(46): Xaa in position 46 is Ile or Val
  Variant (47)..(47): Xaa in position 47 is Ile, Met or Val
  Variant (48)..(48): Xaa in position 48 is Ile or Val
  Variant (54)..(54): Xaa in position 54 is Lys or Arg
  Variant (55)..(55): Xaa in position 55 is Ile or Met
  Variant (57)..(57): Xaa in position 57 is Lys or Arg
  Variant (59)..(59): Xaa in position 59 is Cys or Ser
PXEXDPAXXLXXXXLXRAAXXXGMXFXELXXIXXGXRRXYHDDVXXXXISLEGXXWXSX

SEQ ID NO: 744 - protein, 39 aa, Artificial sequence
  protein pattern
  Variant (2)..(2): Xaa in position 2 is any amino acid
  Variant (3)..(6): Xaa in position 3 to 6 is any or no amino acid
  Variant (10)..(10): Xaa in position 10 is Ala or Gly
  Variant (11)..(11): Xaa in position 11 is Leu or Met
  Variant (12)..(12): Xaa in position 12 is Met or Val
  Variant (18)..(18): Xaa in position 18 is Ala or Val
  Variant (19)..(19): Xaa in position 19 is any amino acid
  Variant (24)..(24): Xaa in position 24 is any amino acid
  Variant (26)..(26): Xaa in position 26 is Ile, Met or Val
  Variant (28)..(28): Xaa in position 28 is Ala, Ile, Leu or Val
  Variant (30)..(30): Xaa in position 30 is Asn or Ser
  Variant (39)..(39): Xaa in position 39 is Ala or Gly
EXXXXXPELXXXGSCVLXXLMKGXDXYXMXVGDSRAVLX

SEQ ID NO: 745 - protein, 19 aa, Artificial sequence
  protein pattern
  Variant (2)..(3): Xaa in position 2 to 3 is any amino acid
  Variant (4)..(5): Xaa in position 4 to 5 is any or no amino acid
  Variant (9)..(9): Xaa in position 9 is Ala or Ser
  Variant (10)..(10): Xaa in position 10 is Ile, Leu or Val
  Variant (14)..(14): Xaa in position 14 is any amino acid
  Variant (15)..(15): Xaa in position 15 is Ala or Ser
  Variant (16)..(16): Xaa in position 16 is Thr or Val
  Variant (17)..(17): Xaa in position 17 is Ala, Pro or Ser
  Variant (18)..(18): Xaa in position 18 is Ala, Leu or Val
  Variant (19)..(19): Xaa in position 19 is Pro or Ser
FXXXXSGAXXSANXXXXXX

SEQ ID NO: 746 - protein, 16 aa, Artificial sequence
  protein pattern
  Variant (3)..(3): Xaa in position 3 is Asp, Glu or Lys
  Variant (5)..(5): Xaa in position 5 is Leu or Met
  Variant (6)..(6): Xaa in position 6 is any amino acid
  Variant (7)..(7): Xaa in position 7 is Gln or Arg
  Variant (10)..(10): Xaa in position 10 is any or no amino acid
  Variant (12)..(12): Xaa in position 12 is any or no amino acid
  Variant (15)..(15): Xaa in position 15 is Asp or Glu
  Variant (16)..(16): Xaa in position 16 is Ala or Gly
VLXAXXXALXRXTEXX

SEQ ID NO: 747 - protein, 17 aa, Artificial sequence
  protein pattern
  Variant (2)..(2): Xaa in position 2 is Glu or His
  Variant (3)..(4): Xaa in position 3 to 4 is Ser or Thr
  Variant (5)..(5): Xaa in position 5 is any amino acid
  Variant (6)..(6): Xaa in position 6 is Asn or Ser
  Variant (8)..(9): Xaa in position 8 to 9 is Ala or Ser
  Variant (10)..(10): Xaa in position 10 is Ala, Ile, Leu or Val
  Variant (13)..(13): Xaa in position 13 is any or no amino acid
  Variant (15)..(15): Xaa in position 15 is Ala, Leu or Pro
  Variant (16)..(16): Xaa in position 16 is any amino acid
  Variant (17)..(17): Xaa in position 17 is Asn or Pro
FXXXXXFXXXPLXQXXX

SEQ ID NO: 748 - protein, 14 aa, Artificial sequence
  protein pattern
  Variant (2)..(3): Xaa in position 2 to 3 is any amino acid
  Variant (4)..(4): Xaa in position 4 is any or no amino acid
  Variant (9)..(9): Xaa in position 9 is Cys or Thr
  Variant (11)..(11): Xaa in position 11 is Ala, Ile or Val
  Variant (12)..(12): Xaa in position 12 is any amino acid
  Variant (13)..(13): Xaa in position 13 is Ala, Pro or Ser
  Variant (14)..(14): Xaa in position 14 is Ala, Asp or Ser
DXXXGHSFXYXXXX

SEQ ID NO: 749 - protein, 11 aa, Artificial sequence
  protein pattern
  Variant (2)..(2): Xaa in position 2 is Glu or Lys
  Variant (4)..(4): Xaa in position 4 is Ala or Val
  Variant (5)..(5): Xaa in position 5 is Ile or Val
  Variant (6)..(7): Xaa in position 6 to 7 is any amino acid
  Variant (9)..(9): Xaa in position 9 is Ala, Asp or Glu
  Variant (10)..(10): Xaa in position 10 is any amino acid
NXEXXXXVXXF

SEQ ID NO: 750 - protein, 14 aa, Artificial sequence
  protein pattern
  Variant (2)..(2): Xaa in position 2 is Leu or Met
  Variant (3)..(3): Xaa in position 3 is Asp or Ser
  Variant (5)..(5): Xaa in position 5 is any amino acid
  Variant (6)..(6): Xaa in position 6 is Ile or Leu
  Variant (7)..(7): Xaa in position 7 is Asp or Glu
  Variant (8)..(8): Xaa in position 8 is Arg or Ser
  Variant (9)..(9): Xaa in position 9 is Ala or Gly
  Variant (10)..(12): Xaa in position 10 to 12 is any amino acid
  Variant (13)..(13): Xaa in position 13 is Gly or Ser
  Variant (14)..(14): Xaa in position 14 is Gly, Pro or Ser
FXXGXXXXXXXXXX

SEQ ID NO: 751 - DNA, 1533 bp, Arabidopsis thaliana; identical to SEQ ID NO: 95
  CDS (1)..(1533)

SEQ ID NO: 752 - protein, 510 aa, Arabidopsis thaliana; identical to SEQ ID NO: 96

SEQ ID NO: 753 - DNA, 1712 bp, Glycine max; identical to SEQ ID NO: 57
  CDS (25)..(1533)

SEQ ID NO: 754 - protein, 502 aa, Glycine max; identical to SEQ ID NO: 58

SEQ ID NO: 755 - DNA, 1984 bp, Sorghum bicolor; identical to SEQ ID NO: 59
  CDS (202)..(1710)

SEQ ID NO: 756 - protein, 502 aa, Sorghum bicolor; identical to SEQ ID NO: 60

SEQ ID NO: 757 - DNA, 1953 bp, Triticum aestivum
  CDS (152)..(1693)
aatccgccgactgctccgtttatttaaccgagccgtcccattcttggagagcaagaagcacgccaccacctcgcgtccccaaagaatccccatcccttcccctcccctcccctccccggccgcacacagatccggcgaccgacaacaagccatggtgtccaacggggagctgtcgcagccgcaggcgggggagtacggcctcgccgtcatgcgccgccggcccaagaccaagatcgtctgcacgctcggcccggcctcccgctccgtcgacatgatcgagaagctgctgcgcgccggcatgtgcgtcgcccgcttcaacttctcccacggctcccacgactaccaccaggagacgctcgacaacctgcacgccgccatggaccgcaccgggatcctctgcgccgtcatgctcgacaccaagggtccagagatccgtactggatttttgaaagatgggaagcctatccagttgaggaagggccaagaaattgtgatctccacagattatagcataaagggggacgacaagatgatatcgatgagctataagaagctagcagttgatctgaagccaggcagtgtcatattatgcgctgatggtaccatcactcttacagtgcttcattgtgacaaagagcaaggtctcgttcgctgctgttgtgagaacactgctatgcttggtgagaggaagaatgtcaatcttccaggggtcgttgttgatctgccaacactcactgaaaaggacagggaggatatccttcaatggggcgtcccgaacaagattgacatgattgctttgtcgtttgtccgcaaaggttcagatcttgtggaggtcaggaaggtacttggggagcatgccaagtcaataatgctgatgtcaaaggttgagaaccaggaaggagtagctaactttgacgatatcctggcacagtctgatgcttttatggtggcaagaggtgatttggggatggaaattcctgtagagaagatcttttatgcacagaaggtgatgattttcaagtgcaacattcagggcaagccagttgtgactgcaacccagatgttggagtctatgatcaagtctcctcggcctactcgagcggaagcaactgatgtggccaacgcagttcttgatggcactgactgtgtgatgctcagtggtgagacagcggctggggcttatccagaactggcagtgcaaactatggccaagatctgcttgcaggccgagtcatgcgtggactattctgctgtttttaaatcaatcatgtcatcagccccgattcccatgagcccattggagagccttgcctcatcagctgtccgcacagccaactcagccaaggcgacgcttatcttggtactgaccaggggaggaacaactgcaaggcttgtagccaagtacaggccatccatgccgatactgtctgtggtggttcctgagctcaagacggtcgagtttgactggatctgcagcgacgaggggcctgccaggcaaagcctcatcgtgaggggcgtgatccctatgctcagtgctggcactgccaaggcgtttgacagcgaagccacggaagaggcactgaggtttgccatgaagaacgccaaggagatgggcctttgcaacgctggtgactccattgtggcccttcaccgcatcgggaatgcatctgtcatcaagctcttgaccgtgtaagctagtggcagcgaagcgacaatgcaacaccattttgcccggggattttcccttctttctttttgcgaggctacgcatacccacagttttttgctgccaagattgcggcagtgcaacctggttaaaactttgtgttatcaagttgtggctgtttactctttatgagagggtttagccaccaaaactattatcgcagcagcttgttttgctactactactataacttatatgcaacgattgaactacctgatagttgctcc

SEQ ID NO: 758 - protein, 513 aa, Triticum aestivum
MVSNGELSQPQAGEYGLAVMRRRPKTKIVCTLGPASRSVDMIEKLLRAGMCVARFNFSHGSHDYHQETLDNLHAAMDRTGILCAVMLDTKGPEIRTGFLKDGKPIQLRKGQEIVISTDYSIKGDDKMISMSYKKLAVDLKPGSVILCADGTITLTVLHCDKEQGLVRCCCENTAMLGERKNVNLPGVVVDLPTLTEKDREDILQWGVPNKIDMIALSFVRKGSDLVEVRKVLGEHAKSIMLMSKVENQEGVANFDDILAQSDAFMVARGDLGMEIPVEKIFYAQKVMIFKCNIQGKPVVTATQMLESMIKSPRPTRAEATDVANAVLDGTDCVMLSGETAAGAYPELAVQTMAKICLQAESCVDYSAVFKSIMSSAPIPMSPLESLASSAVRTANSAKATLILVLTRGGTTARLVAKYRPSMPILSVVVPELKTVEFDWICSDEGPARQSLIVRGVIPMLSAGTAKAFDSEATEEALRFAMKNAKEMGLCNAGDSIVALHRIGNASVIKLLTV

SEQ ID NO: 759 - DNA, 1524 bp, Oryza sativa; identical to SEQ ID NO: 65
  CDS (1)..(1524)

SEQ ID NO: 760 - protein, 507 aa, Oryza sativa; identical to SEQ ID NO: 66

SEQ ID NO: 761 - DNA, 1883 bp, Brassica napus; identical to SEQ ID NO: 67
  CDS (119)..(1651)

SEQ ID NO: 762 - protein, 510 aa, Brassica napus; identical to SEQ ID NO: 68

SEQ ID NO: 763 - DNA, 1903 bp, Brassica napus
  CDS (122)..(1618)
ttccctagtccccaaggcccaagccagatctctctctctctctctataaatctctctcggtctctactaccatctctgatccaacctatttccccattgaactcgctgttttcttccaaagatggcgatgatagagcaaaggccgaagacgaagatcgtgtgtaccgttggtcccgcttccagatccgttgagatggtcgagaagcttctcagggctggcatgaacgtcgctaggtttaacttctctcacggatctcatgagtaccaccaggagactctcgataatctccgtcaagctatgctcaacactggtatcctctgcgccgtcatgctcgataccaagggtccagagatccgaaccggattcttgaaagatgggaaaccaatccagttgaaacaaggccaagagatcaccatctccactgactacgacttgcagggagacgaggaaacaatctgcatgagctacaagaagttggctgaggatgtgaacccagggatggttatcctctgtgctgacggtacaatctcgttactggtcctctcctgtgacacagagaacggcacagtccgttgccgctgcgagaactctgccatgcttggtgagaggaagaacgttaatctcccaggtgttgttgtggacctcccaactctaactgagaaagacaaagaagacatcatgaagtggggagtcccgaatcagatcgatatgatcactttgtcttttgtcagaaaaggttcggacttggttcaggtcaggaaactgttaggagatcatgccaagaacattcttctcatgtcaaaggttgagaaccaagaaggtgtggcgaacttcgatgacattcttgtcaactccgacgcgtttatgattgcaagaggagatctcggcatggagatcccaatcgagaagatcttcctagctcagaaagtgatgatctacaaatgcaacatccagggaaaaccagtggtcacagcgactcagatgctcgagtccatgatcaaatcccctcgacccacaagagctgaagccactgacgtagcaaacgcagtcctcgacggcaccgactgtgtcatgctcagcggagaaaccgcagctggagcttaccctgagctagctgtacgcacgatggccaagatctgcgttgaagccgagagcacgcttgactacggagacgtcttcaagaggatcatgcagtactctccggttccaatgtccccgctggagtcactggcctcctctgcagtcagaacagctaactcggctagagccacgctcatcatggtcctaaccaggggaggaagcacggcgaggcttgtggctaaatacagaccagggatgcctattttgtcagtcgttgttcccgagatgaaaacagacttctttgactggtcttgcagcgacgaatcgccggcgaggcacagtctcatcttccgtgggttgattccggtgctgtacgcagggtctgctagagcctcgcatgatgagtccacagaagaagctattgagtttgcgactcagcatgggaaagagaagcagctgtgtaagactggagactctgttgttgctctgctccgagttggtaatgcttctctaatcaagatcttgaccgtcaagtgatgattgatgattcacgatctttaaaaaggagtcccgtttttggcgtttggcggttgggggaaacgcaactataatcggtttttgttatgaattttttttattcaagattgtgattacatatcttgagataggaaactcaagttctctttcttgctaattacaactactgtggtgaccagtgaatccacttacggctctcttttgttttggattattggttgtatggaactaatcaatcatacacgtatctattatcatgattttcttctgaaaaaaaaaaaaaaa

SEQ ID NO: 764 - protein, 498 aa, Brassica napus; identical to SEQ ID NO: 54

SEQ ID NO: 765 - DNA, 2063 bp, Glycine max; identical to SEQ ID NO: 73
  CDS (192)..(1700)

SEQ ID NO: 766 - protein, 502 aa, Glycine max; identical to SEQ ID NO: 74

SEQ ID NO: 767 - DNA, 2067 bp, Triticum aestivum; identical to SEQ ID NO: 77
  CDS (115)..(1659)

SEQ ID NO: 768 - protein, 514 aa, Triticum aestivum; identical to SEQ ID NO: 78

SEQ ID NO: 769 - DNA, 1825 bp, Helianthus annuus; identical to SEQ ID NO: 81
  CDS (128)..(1624)

SEQ ID NO: 770 - protein, 498 aa, Helianthus annuus; identical to SEQ ID NO: 82

SEQ ID NO: 771 - DNA, 2075 bp, Zea mays; identical to SEQ ID NO: 83
  CDS (198)..(1739)

SEQ ID NO: 772 - protein, 513 aa, Zea mays; identical to SEQ ID NO: 84

SEQ ID NO: 773 - DNA, 1590 bp, Aedes aegypti; identical to SEQ ID NO: 85
  CDS (1)..(1590)

SEQ ID NO: 774 - protein, 529 aa, Aedes aegypti; identical to SEQ ID NO: 86

SEQ ID NO: 775 - DNA, 1560 bp, Aedes aegypti; identical to SEQ ID NO: 87
  CDS (1)..(1560)

SEQ ID NO: 776 - protein, 519 aa, Aedes aegypti; identical to SEQ ID NO: 88

SEQ ID NO: 777 - DNA, 1542 bp, Aedes aegypti; identical to SEQ ID NO: 89
  CDS (1)..(1542)

SEQ ID NO: 778 - protein, 513 aa, Aedes aegypti; identical to SEQ ID NO: 90

SEQ ID NO: 779 - DNA, 1413 bp, Klebsiella pneumoniae subsp. pneumoniae MGH 78578; identical to SEQ ID NO: 91
  CDS (1)..(1413): transl_table=11

SEQ ID NO: 780 - protein, 470 aa, Klebsiella pneumoniae subsp. pneumoniae MGH 78578; identical to SEQ ID NO: 92

SEQ ID NO: 781 - DNA, 1494 bp, Arabidopsis thaliana; identical to SEQ ID NO: 97
  CDS (1)..(1494)

SEQ ID NO: 782 - protein, 497 aa, Arabidopsis thaliana; identical to SEQ ID NO: 98

SEQ ID NO: 783 - DNA, 1533 bp, Arabidopsis thaliana; identical to SEQ ID NO: 99
  CDS (1)..(1533)

SEQ ID NO: 784 - protein, 510 aa, Arabidopsis thaliana; identical to SEQ ID NO: 100

SEQ ID NO: 785 - DNA, 1479 bp, Arabidopsis thaliana
  CDS (1)..(1479)
atggagatgttacttggtggccgagcaaccaatggagctctccgttcaaagacgaagatagtttgtactcttggaccggtttcaagatcggtggagatgattgagaagcttctcaaggctgaaactctcgataatctccgaactgccatgaacaacactggtatcctctgcgccgtcatgctcgatacaaagggtcctgagatacgaaccggttttctcaaagaaggcaaaccgatacagctaaaccaaggtcaagagatcaccatctcaattgattacaagatagaaggagattcaaacattatctccatgagctacaagaaacttgcagaggacgtcaaacctggtgatgtgattctctgttcagacggcacaatctctttaactgtcttgtcctgtgacaagtctttcggtcttgttcgttgccgttgcgagaactctacaattctaggagaaagaaaaaacgttaatcttcctggaattgtagttgatctcccaacacttactgagaaagataaagaagatatcatccaatggggagttccgaacaaaatcgacatcatcgctctttcttttgttcgtaaaggatctgacctaactgaagttaggaagttacttggagaacactcaaagaacatcatgctcatgtcaaaggtggagaatcaagaaggggtcatgaattgtgaaaagattctggagaattctgatgctttcatggtggctagaggagatcttggaatggagattcagatcgaaaagatgttccttgctcagaaaacaatgatcaagatggctaatgctcttgggaaaccagttgtcacagccacacagatgcttgaatccatgacagtatctcctcgtccgactagagctgaagccactgacgttgcaaacgctgttcttgacgggacagattgcgttatgcttagtggagaaaccgctgcaggagctcaccctgaggctgccgtgctaacaatgtcaaggatctgtaaagaagcagaggatttcatcgattacgacattctccacaagaaaaccctaggaatgctttcgttaccgttatctccgatcgagagcttagctgcttcagttgtttcgacggcacagagtgtttttgcgtcggctatcgtcgttctcaccaaaggcggttacacggcggagcttgtggctaaatacaggccgagcgttccgattttgtcggtgattgtgcctgagattgctcaagggaatgatatagagatgtcgtgctcggactcggtggctcatgtggcgagacgtggtttgatttaccgtgggattattccggtggtggcgacgggatcatcggctagggattcaaacaaagatgcaacggaggagatgattaatttggctatcggattcgcgaagacgaagggaatttgcaagaatggagattcgattgtggcgttgcacaagattgatggttcctctgttgtgaagatagtgagcgttgagtaa

SEQ ID NO: 786 - protein, 492 aa, Arabidopsis thaliana
MEMLLGGRATNGALRSKTKIVCTLGPVSRSVEMIEKLLKAETLDNLRTAMNNTGILCAVMLDTKGPEIRTGFLKEGKPIQLNQGQEITISIDYKIEGDSNIISMSYKKLAEDVKPGDVILCSDGTISLTVLSCDKSFGLVRCRCENSTILGERKNVNLPGIVVDLPTLTEKDKEDIIQWGVPNKIDIIALSFVRKGSDLTEVRKLLGEHSKNIMLMSKVENQEGVMNCEKILENSDAFMVARGDLGMEIQIEKMFLAQKTMIKMANALGKPVVTATQMLESMTVSPRPTRAEATDVANAVLDGTDCVMLSGETAAGAHPEAAVLTMSRICKEAEDFIDYDILHKKTLGMLSLPLSPIESLAASVVSTAQSVFASAIVVLTKGGYTAELVAKYRPSVPILSVIVPEIAQGNDIEMSCSDSVAHVARRGLIYRGIIPVVATGSSARDSNKDATEEMINLAIGFAKTKGICKNGDSIVALHKIDGSSVVKIVSVE

SEQ ID NO: 787 - DNA, 1533 bp, Arabidopsis thaliana; identical to SEQ ID NO: 101
  CDS (1)..(1533)

SEQ ID NO: 788 - protein, 510 aa, Arabidopsis thaliana; identical to SEQ ID NO: 102

SEQ ID NO: 789 - DNA, 1740 bp, Arabidopsis thaliana; identical to SEQ ID NO: 103
  CDS (1)..(1740)

SEQ ID NO: 790 - protein, 579 aa, Arabidopsis thaliana; identical to SEQ ID NO: 104

SEQ ID NO: 791 - DNA, 1497 bp, Arabidopsis thaliana; identical to SEQ ID NO: 105
  CDS (1)..(1497)

SEQ ID NO: 792 - protein, 498 aa, Arabidopsis thaliana; identical to SEQ ID NO: 106

SEQ ID NO: 793 - DNA, 1533 bp, Arabidopsis thaliana; identical to SEQ ID NO: 107
  CDS (1)..(1533)

SEQ ID NO: 794 - protein, 510 aa, Arabidopsis thaliana; identical to SEQ ID NO: 108

SEQ ID NO: 795 - DNA, 1413 bp, Vibrio cholerae O1 biovar eltor str. N16961; identical to SEQ ID NO: 109
  CDS (1)..(1413): transl_table=11

SEQ ID NO: 796 - protein, 470 aa, Vibrio cholerae O1 biovar eltor str. N16961; identical to SEQ ID NO: 110

SEQ ID NO: 797 - DNA, 1755 bp, Bacillus halodurans C-125; identical to SEQ ID NO: 111
  CDS (1)..(1755): transl_table=11

SEQ ID NO: 798 - protein, 584 aa, Bacillus halodurans C-125; identical to SEQ ID NO: 112

SEQ ID NO: 799 - DNA, 1443 bp, Escherichia coli O157:H7 EDL933; identical to SEQ ID NO: 121
  CDS (1)..(1443): transl_table=11
  misc_feature (850)..(850): r is g or a

SEQ ID NO: 800 - protein, 480 aa, Escherichia coli O157:H7 EDL933; identical to SEQ ID NO: 122
  misc_feature (284)..(284): The Xaa at location 284 stands for Ala, or Thr.

SEQ ID NO: 801 - DNA, 1440 bp, Agrobacterium tumefaciens str. C58; identical to SEQ ID NO: 131
  CDS (1)..(1440): transl_table=11

SEQ ID NO: 802 - protein, 479 aa, Agrobacterium tumefaciens str. C58; identical to SEQ ID NO: 132

SEQ ID NO: 803 - DNA, 1716 bp, Arabidopsis thaliana; identical to SEQ ID NO: 139
  CDS (1)..(1716)

SEQ ID NO: 804 - protein, 571 aa, Arabidopsis thaliana; identical to SEQ ID NO: 140

SEQ ID NO: 805 - DNA, 1584 bp, Arabidopsis thaliana; identical to SEQ ID NO: 141
  CDS (1)..(1584)

SEQ ID NO: 806 - protein, 527 aa, Arabidopsis thaliana; identical to SEQ ID NO: 142

SEQ ID NO: 807 - DNA, 1791 bp, Arabidopsis thaliana; identical to SEQ ID NO: 143
  CDS (1)..(1791)

SEQ ID NO: 808 - protein, 596 aa, Arabidopsis thaliana; identical to SEQ ID NO: 144

SEQ ID NO: 809 - DNA, 1584 bp, Arabidopsis thaliana; identical to SEQ ID NO: 145
  CDS (1)..(1584)

SEQ ID NO: 810 - protein, 527 aa, Arabidopsis thaliana; identical to SEQ ID NO: 146

SEQ ID NO: 811 - DNA, 1428 bp, Fusobacterium nucleatum subsp. nucleatum ATCC 25586; identical to SEQ ID NO: 147
  CDS (1)..(1428): transl_table=11

SEQ ID NO: 812 - protein, 475 aa, Fusobacterium nucleatum subsp. nucleatum ATCC 25586; identical to SEQ ID NO: 148

SEQ ID NO: 813 - DNA, 1665 bp, Drosophila melanogaster; identical to SEQ ID NO: 149
  CDS (1)..(1665)

SEQ ID NO: 814 - protein, 554 aa, Drosophila melanogaster; identical to SEQ ID NO: 150

SEQ ID NO: 815 - DNA, 1752 bp, Thermoanaerobacter tengcongensis MB4; identical to SEQ ID NO: 151
  CDS (1)..(1752): transl_table=11

SEQ ID NO: 816 - protein, 583 aa, Thermoanaerobacter tengcongensis MB4; identical to SEQ ID NO: 152

SEQ ID NO: 817 - DNA, 1437 bp, Streptomyces coelicolor A3(2); identical to SEQ ID NO: 153
  CDS (1)..(1437): transl_table=11

SEQ ID NO: 818 - protein, 478 aa, Streptomyces coelicolor A3(2); identical to SEQ ID NO: 154

SEQ ID NO: 819 - DNA, 1431 bp, Streptomyces coelicolor A3(2); identical to SEQ ID NO: 155
  CDS (1)..(1431): transl_table=11

SEQ ID NO: 820 - protein, 476 aa, Streptomyces coelicolor A3(2); identical to SEQ ID NO: 156

SEQ ID NO: 821 - DNA, 1761 bp, Oceanobacillus iheyensis HTE831; identical to SEQ ID NO: 163
  CDS (1)..(1761): transl_table=11

SEQ ID NO: 822 - protein, 586 aa, Oceanobacillus iheyensis HTE831; identical to SEQ ID NO: 164

SEQ ID NO: 823 - DNA, 1413 bp, Shigella flexneri 2a str. 301; identical to SEQ ID NO: 167
  CDS (1)..(1413): transl_table=11

SEQ ID NO: 824 - protein, 470 aa, Shigella flexneri 2a str. 301; identical to SEQ ID NO: 168

SEQ ID NO: 825 - DNA, 1539 bp, Drosophila melanogaster; identical to SEQ ID NO: 173
  CDS (1)..(1539)

SEQ ID NO: 826 - protein, 512 aa, Drosophila melanogaster; identical to SEQ ID NO: 174

SEQ ID NO: 827 - DNA, 1455 bp, Pseudomonas putida KT2440; identical to SEQ ID NO: 175
  CDS (1)..(1455): transl_table=11

SEQ ID NO: 828 - protein, 484 aa, Pseudomonas putida KT2440; identical to SEQ ID NO: 176

SEQ ID NO: 829 - DNA, 1416 bp, Pseudomonas putida KT2440; identical to SEQ ID NO: 177
  CDS (1)..(1416): transl_table=11

SEQ ID NO: 830 - protein, 471 aa, Pseudomonas putida KT2440; identical to SEQ ID NO: 178

SEQ ID NO: 831 - DNA, 1629 bp, Escherichia coli CFT073; identical to SEQ ID NO: 179
  CDS (1)..(1629): transl_table=11

SEQ ID NO: 832 - protein, 542 aa, Escherichia coli CFT073; identical to SEQ ID NO: 180

SEQ ID NO: 833 - DNA, 1413 bp, Vibrio vulnificus CMCP6; identical to SEQ ID NO: 181
  CDS (1)..(1413): transl_table=11

SEQ ID NO: 834 - protein, 470 aa, Vibrio vulnificus CMCP6; identical to SEQ ID NO: 182

SEQ ID NO: 835 - DNA, 1755 bp, Clostridium tetani E88; identical to SEQ ID NO: 183
  CDS (1)..(1755): transl_table=11

SEQ ID NO: 836 - protein, 584 aa, Clostridium tetani E88; identical to SEQ ID NO: 184

SEQ ID NO: 837 - DNA, 1413 bp, Vibrio parahaemolyticus RIMD 2210633; identical to SEQ ID NO: 189
  CDS (1)..(1413): transl_table=11

SEQ ID NO: 838 - protein, 470 aa, Vibrio parahaemolyticus RIMD 2210633; identical to SEQ ID NO: 190

SEQ ID NO: 839 - DNA, 1758 bp, Enterococcus faecalis V583; identical to SEQ ID NO: 191
  CDS (1)..(1758): transl_table=11

SEQ ID NO: 840 - protein, 585 aa, Enterococcus faecalis V583; identical to SEQ ID NO: 192

SEQ ID NO: 841 - DNA, 1410 bp, Photorhabdus luminescens subsp. laumondii TTO1; identical to SEQ ID NO: 209
  CDS (1)..(1410): transl_table=11

SEQ ID NO: 842 - protein, 469 aa, Photorhabdus luminescens subsp. laumondii TTO1; identical to SEQ ID NO: 210

SEQ ID NO: 843 - DNA, 1488 bp, Vibrio vulnificus YJ016; identical to SEQ ID NO: 211
  CDS (1)..(1488): transl_table=11

SEQ ID NO: 844 - protein, 495 aa, Vibrio vulnificus YJ016; identical to SEQ ID NO: 212

SEQ ID NO: 845 - DNA, 1758 bp, Bacillus cereus ATCC 10987; identical to SEQ ID NO: 221
  CDS (1)..(1758): transl_table=11

SEQ ID NO: 846 - protein, 585 aa, Bacillus cereus ATCC 10987; identical to SEQ ID NO: 222

SEQ ID NO: 847 - DNA, 1656 bp, Nasonia vitripennis; identical to SEQ ID NO: 225
  CDS (1)..(1656)

SEQ ID NO: 848 - protein, 551 aa, Nasonia vitripennis; identical to SEQ ID NO: 226

SEQ ID NO: 849 - DNA, 1587 bp, Magnaporthe grisea 70-15; identical to SEQ ID NO: 227
  CDS (1)..(1587)

SEQ ID NO: 850 - protein, 528 aa, Magnaporthe grisea 70-15; identical to SEQ ID NO: 228

SEQ ID NO: 851 - DNA, 1623 bp, Gibberella zeae PH-1
  CDS (1)..(1623)
atgcctcagaagtcagaaaaccaaaacaaaagcgtcatggctactaccgctcaggaccacctcgaattcggtggcaagatctcatggcttgcttccctcgacaccgctttccgacctgagcgcaactaccgccgctcttccatcatctgcaccattggccccaagaccaactctgtcgaggccatcaacaagctccgagattccggtcttaatgttgttcgcatgaacttttctcacggatcatacgagtaccacaagtccgtcattgaccatgctcgtgagtccgaggccacccacgctggccgcaacgtcgccattgccctcgacaccaagggtcccgagatccgaactggtaacactcccggcgatgaggacattcccatcagcgtcggacacgagatgaacatcaccaccgacgatgcttatgctaccgcttctgacgacaagaacatgtacgtcgactacaagaacattaccaatgtcattgagcccggccgtatcatctacgtcgacgatggtgtccttgctttcgatgttctcaagatcgttgacgagaagactatccttgtcaaggcccgcaacaacggtgctatctgctccaagaagggtgtcaacctgcccaacactgatgtcgatctgcctgccctttccgagaaggacaaggccgatctgaagttcggtgttgagaacaacgtcgacatggtctttgcttcatttatccgccgcgctcaggatatctacgacatccgtgacgtcctcggcgagcagggcaagcgcatccagatcatcgccaagatcgagaaccgacaaggtctcaacaacttccgcgagattctcgaggccacagacggtgtcatggtggcccgtggtgatctcggtattgagatccccgctgctgaggttttcgctgcccagaagaagctcattgccatgtgcaaccttgccggcaagcctgtcatctgcgccactcagatgctcgagtccatgatcaagaacccccgccccacccgtgccgaaatcagcgatgtcggtaacgccattactgacggtgctgactgtgtcatgctttccggtgagacggccaagggtagctacccctccgaggccgtcaaggagatgcacgaggcctgtctcaaggctgagaacaccatcccctatgtctctcacttcgaggagatgtgcactctcgtcaagcgccccgtcagcactgtcgagtcctgcgccatggccgctgtccgtgcctctctcgatcttggtgccggtggtatcattgttctctccacctctggcgagtctgcccgcatgctttccaagtaccgccccgtctgccctatcttcatggtcacccgaagccccacaacatctcgattcgctcacttgtaccgtggcgtctaccccttcctattccccgagcagaagcccgactttgctcaggtcaactggcaggaggatgttgaccgccgaatcaagtgggctgtcaacaacgctcttgagcttaacgtcctgacccccggcgacactgtcgtcgttgtccagggctggaagggcggcatgggtaacactaacaccctccgaattgtcaaggccgaccccgagcacctcggcattggccagcttcagtaa

SEQ ID NO: 852 - protein, 540 aa, Gibberella zeae PH-1
MPQKSENQNKSVMATTAQDHLEFGGKISWLASLDTAFRPERNYRRSSIICTIGPKTNSVEAINKLRDSGLNVVRMNFSHGSYEYHKSVIDHARESEATHAGRNVAIALDTKGPEIRTGNTPGDEDIPISVGHEMNITTDDAYATASDDKNMYVDYKNITNVIEPGRIIYVDDGVLAFDVLKIVDEKTILVKARNNGAICSKKGVNLPNTDVDLPALSEKDKADLKFGVENNVDMVFASFIRRAQDIYDIRDVLGEQGKRIQIIAKIENRQGLNNFREILEATDGVMVARGDLGIEIPAAEVFAAQKKLIAMCNLAGKPVICATQMLESMIKNPRPTRAEISDVGNAITDGADCVMLSGETAKGSYPSEAVKEMHEACLKAENTIPYVSHFEEMCTLVKRPVSTVESCAMAAVRASLDLGAGGIIVLSTSGESARMLSKYRPVCPIFMVTRSPTTSRFAHLYRGVYPFLFPEQKPDFAQVNWQEDVDRRIKWAVNNALELNVLTPGDTVVVVQGWKGGMGNTNTLRIVKADPEHLGIGQLQ

SEQ ID NO: 853 - DNA, 1554 bp, Apis mellifera; identical to SEQ ID NO: 229
  CDS (1)..(1554)

SEQ ID NO: 854 - protein, 517 aa, Apis mellifera; identical to SEQ ID NO: 230

SEQ ID NO: 855 - DNA, 1515 bp, Candida albicans SC5314; identical to SEQ ID NO: 231
  CDS (1)..(1515): transl_table=12

SEQ ID NO: 856 - protein, 504 aa, Candida albicans SC5314; identical to SEQ ID NO: 232

SEQ ID NO: 857 - DNA, 1587 bp, Ustilago maydis 521; identical to SEQ ID NO: 233
  CDS (1)..(1587)

SEQ ID NO: 858 - protein, 528 aa, Ustilago maydis 521; identical to SEQ ID NO: 234

SEQ ID NO: 859 - DNA, 1590 bp, Cryptococcus neoformans var. neoformans B-3501A; identical to SEQ ID NO: 235
  CDS (1)..(1590)

SEQ ID NO: 860 - protein, 529 aa, Cryptococcus neoformans var. neoformans B-3501A; identical to SEQ ID NO: 236

SEQ ID NO: 861 - DNA, 1719 bp, Cryptococcus neoformans var. neoformans B-3501A; identical to SEQ ID NO: 237
  CDS (1)..(1719)

SEQ ID NO: 862 - protein, 572 aa, Cryptococcus neoformans var. neoformans B-3501A; identical to SEQ ID NO: 238

SEQ ID NO: 863 - DNA, 1560 bp, Encephalitozoon cuniculi GB-M1; identical to SEQ ID NO: 239
  CDS (1)..(1560)

SEQ ID NO: 864 - protein, 519 aa, Encephalitozoon cuniculi GB-M1; identical to SEQ ID NO: 240

SEQ ID NO: 865 - DNA, 1539 bp, Tribolium castaneum; identical to SEQ ID NO: 241
  CDS (1)..(1539)

SEQ ID NO: 866 - protein, 512 aa, Tribolium castaneum; identical to SEQ ID NO: 242

SEQ ID NO: 867 - DNA, 1611 bp, Tribolium castaneum; identical to SEQ ID NO: 243
  CDS (1)..(1611)

SEQ ID NO: 868 - protein, 536 aa, Tribolium castaneum; identical to SEQ ID NO: 244

SEQ ID NO: 869 - DNA, 1674 bp, Tribolium castaneum; identical to SEQ ID NO: 245
  CDS (1)..(1674)

SEQ ID NO: 870 - protein, 557 aa, Tribolium castaneum; identical to SEQ ID NO: 246

SEQ ID NO: 871 - DNA, 1593 bp, Tribolium castaneum; identical to SEQ ID NO: 247
  CDS (1)..(1593)

SEQ ID NO: 872 - protein, 530 aa, Tribolium castaneum; identical to SEQ ID NO: 248

SEQ ID NO: 873 - DNA, 1761 bp, Clostridium difficile 630; identical to SEQ ID NO: 249
  CDS (1)..(1761): transl_table=11

SEQ ID NO: 874 - protein, 586 aa, Clostridium difficile 630; identical to SEQ ID NO: 250

SEQ ID NO: 875 - DNA, 1758 bp, Bacillus thuringiensis serovar konkukian str. 97-27; identical to SEQ ID NO: 261
  CDS (1)..(1758): transl_table=11

SEQ ID NO: 876 - protein, 585 aa, Bacillus thuringiensis serovar konkukian str. 97-27; identical to SEQ ID NO: 262

SEQ ID NO: 877 - DNA, 1413 bp, Erwinia carotovora subsp. atroseptica SCRI1043
  CDS (1)..(1413): transl_table=11
atgaaaaagacaaaaattgtttgtaccatcgggccgaaaacagagtcagaagaaatgcttggcaacctgctgtctgccggcatgaatgttatgcgcctgaacttctctcacggggattacgtagaacatggccaacgcatcaagaacctgcgtgccgtcatggaaaaaaccggtcagcaagcggcgatcctgcttgacaccaaaggcccagaaatccgcaccatgaagctggaaaacggcgctgacgtaacgttgaccgccggtcaaacgttcacgttcaccaccgatcagagcatcgtgggtaacaaagatcgtgtcgcagtcacttatgctggattcaccgaagacctcagcgtcggtaacaccgttctggttgatgacggtttgatcggtatgcaggttacagcggtcagcggtaacgacgtcgtttgtaaggtgctgaacaatggcgatctgggcgagaataaaggcgttaacctgccaggcgtttccatccagttacctgctctggctgaaaaagacaaacgcgacctgattttcggttgcgaacaaggtgtcgatttcgtcgcagcttcctttattcgtaaacgttccgacgttgaagaaattcgcgctcacctgaaagcacacggtggcgagcacatccagatcatttccaaaatcgaaaatcaggaaggtctgaacaatttcgacgaaattctggaagcgtctgacggcatcatggttgctcgtggcgacctgggcgttgagatcccagttgaagaagtgatcttcgcacagaaaatgatgatcgaaaaatgtaacctggctcgcaaagtggtgatcaccgcaacgcaaatgctggattcaatgatcaaaaacccacgtcctacccgtgctgaagctggcgacgtggctaacgccatcatcgacggtaccgatgccgttatgctgtctggcgaaagtgcgaaaggtaaatacccgctggaatccgttaccattatggcgacgatctgtcagcgcaccgattccgtgatgaaaagccgtctggataccatcaagacaccaggaatactgcgtatcactgaagccgtctgccgtggtgcagtagaaaccgcagaaaaactggatgcaccgctgattgtggttgcgaccagcggcggcaagtcagccaaatcgatccgtaaatacttcccgaatgcgcgcattctggcgctgacgactaacgaagtcaccgcgcgccagcttctgctgagcaaaggcattgatacgctgctggtgaaggaaatcgcctctactgatgatttctaccgcattggtaaagaagccgcgctgaagaccggtcatgcgcaagctggtgatgttgtggtgatggtatctggtgcactggtttccagcggcacaaccaacactgcttccgtacatcgtctctga

SEQ ID NO: 878 - protein, 470 aa, Erwinia carotovora subsp. atroseptica SCRI1043
MKKTKIVCTIGPKTESEEMLGNLLSAGMNVMRLNFSHGDYVEHGQRIKNLRAVMEKTGQQAAILLDTKGPEIRTMKLENGADVTLTAGQTFTFTTDQSIVGNKDRVAVTYAGFTEDLSVGNTVLVDDGLIGMQVTAVSGNDVVCKVLNNGDLGENKGVNLPGVSIQLPALAEKDKRDLIFGCEQGVDFVAASFIRKRSDVEEIRAHLKAHGGEHIQIISKIENQEGLNNFDEILEASDGIMVARGDLGVEIPVEEVIFAQKMMIEKCNLARKVVITATQMLDSMIKNPRPTRAEAGDVANAIIDGTDAVMLSGESAKGKYPLESVTIMATICQRTDSVMKSRLDTIKTPGILRITEAVCRGAVETAEKLDAPLIVVATSGGKSAKSIRKYFPNARILALTTNEVTARQLLLSKGIDTLLVKEIASTDDFYRIGKEAALKTGHAQAGDVVVMVSGALVSSGTTNTASVHRL

SEQ ID NO: 879 - DNA, 1755 bp, Symbiobacterium thermophilum IAM 14863; identical to SEQ ID NO: 271
  CDS (1)..(1755): transl_table=11

SEQ ID NO: 880 - protein, 584 aa, Symbiobacterium thermophilum IAM 14863; identical to SEQ ID NO: 272

SEQ ID NO: 881 - DNA, 1758 bp, Bacillus licheniformis ATCC 14580; identical to SEQ ID NO: 273
  CDS (1)..(1758): transl_table=11

SEQ ID NO: 882 - protein, 585 aa, Bacillus licheniformis ATCC 14580; identical to SEQ ID NO: 274

SEQ ID NO: 883 - DNA, 1755 bp, Bacillus clausii KSM-K16; identical to SEQ ID NO: 279
  CDS (1)..(1755): transl_table=11

SEQ ID NO: 884 - protein, 584 aa, Bacillus clausii KSM-K16; identical to SEQ ID NO: 280

SEQ ID NO: 885 - DNA, 1434 bp, Corynebacterium glutamicum ATCC 13032; identical to SEQ ID NO: 285
  CDS (1)..(1434): transl_table=11

SEQ ID NO: 886 - protein, 477 aa, Corynebacterium glutamicum ATCC 13032; identical to SEQ ID NO: 286

SEQ ID NO: 887 - DNA, 1752 bp, Carboxydothermus hydrogenoformans Z-2901; identical to SEQ ID NO: 297
  CDS (1)..(1752): transl_table=11

SEQ ID NO: 888 - protein, 583 aa, Carboxydothermus hydrogenoformans Z-2901; identical to SEQ ID NO: 298

SEQ ID NO: 889 - DNA, 1422 bp, Leuconostoc mesenteroides subsp. mesenteroides ATCC 8293; identical to SEQ ID NO: 341
  CDS (1)..(1422): transl_table=11

SEQ ID NO: 890 - protein, 473 aa, Leuconostoc mesenteroides subsp. mesenteroides ATCC 8293; identical to SEQ ID NO: 342

SEQ ID NO: 891 - DNA, 1428 bp, Fusobacterium nucleatum subsp. vincentii ATCC 49256; identical to SEQ ID NO: 351
  CDS (1)..(1428): transl_table=11

SEQ ID NO: 892 - protein, 475 aa, Fusobacterium nucleatum subsp. vincentii ATCC 49256; identical to SEQ ID NO: 352

SEQ ID NO: 893 - DNA, 1413 bp, Photobacterium sp. SKA34; identical to SEQ ID NO: 363
  CDS (1)..(1413): transl_table=11

SEQ ID NO: 894 - protein, 470 aa, Photobacterium sp. SKA34; identical to SEQ ID NO: 364

SEQ ID NO: 895 - DNA, 1416 bp, Pseudomonas putida GB-1
  CDS (1)..(1416): transl_table=11
atgacgcctgataaaaaagtaaagatcctcgccacccttggccctgcgatcaacggcatcgacgacatccgccagctggtcgaagccggggtgaacatcttccgcctcaacttcagccacggcgaacacgctgaccacgccctgcgttatcagtggatccgcgaagtcgagcagcaactgaactacccgctgggcatcctcatggacctgcaagggccaaagctgcgcgtgggccgcttcgctgagggcaaggtacagttgcaacgcggccaggccctgcgcctggacctggacaaaacccccggcgacaaccgccgggtcaacctgccgcaccccgaaatcatcgctgccctcgaacccggcatggacctgctgctggacgacggcaagctgcgcctgcgcgtcaccgccaagcacagcgatgccatcgacaccgaagtgctgaacggtggcgagctgtccgaccgcaaaggcgtcaacgtaccgcaagcggtgctcgacctctctccgctcaccgaaaaggaccgccgcgacctggccttcggcctggagttgggcgtggactgggtggccctgtcgttcgtccagcgccctgaagacatcgtcgaagcgcgccagcttatcggcgaccgcgcctacctgatggccaagatcgaaaaaccctcggcggtcgagcagctgcaagccatcgccgaactggcagacgcgatcatggtggcccgtggtgacctgggcgtggaagtgccggccgaaagcgtgccgcagatccagaagcgcatcatcggcacttgccgccaactgggcaaaccggtggtggtggccacgcagatgctcgaatccatgcgtttctcgccagcgcctacccgtgccgaagtcaccgacgtggccaatgccgtggccgaaggtgccgacgcggtgatgctgtcggccgagaccgcttcgggtgattacccgctggaagcggtgcagatgatgagcaagatcatccgccaggtggaaaacggcccggactaccaggcccagctcgacgttggccggccaaaagccgaagccaccgtgtcggatgccatcagctgcgctatccgccgtatcagcggcatcctgccggtggcggtgctggtcaactacagcgagtcgggcgcctcgaccctacgcgcggcgcgcgagcggccacgggcaccgatcctcaacctgacaccgaacctgaacaccgcacgccgcctgagcgtggcgtggggcgtgcactcggtggtcaacgaccgcctgcgccaggtcgacgaggtggtgtctacggcgctggaaattgcccaggcgcaaggtatggccagccgtggcgacacactgctgatcaccgccggtgtgcctttcggcaagccggggtcgactaacacgctgcggatcgagactttgatctga

SEQ ID NO: 896 - protein, 471 aa, Pseudomonas putida GB-1
MTPDKKVKILATLGPAINGIDDIRQLVEAGVNIFRLNFSHGEHADHALRYQWIREVEQQLNYPLGILMDLQGPKLRVGRFAEGKVQLQRGQALRLDLDKTPGDNRRVNLPHPEIIAALEPGMDLLLDDGKLRLRVTAKHSDAIDTEVLNGGELSDRKGVNVPQAVLDLSPLTEKDRRDLAFGLELGVDWVALSFVQRPEDIVEARQLIGDRAYLMAKIEKPSAVEQLQAIAELADAIMVARGDLGVEVPAESVPQIQKRIIGTCRQLGKPVVVATQMLESMRFSPAPTRAEVTDVANAVAEGADAVMLSAETASGDYPLEAVQMMSKIIRQVENGPDYQAQLDVGRPKAEATVSDAISCAIRRISGILPVAVLVNYSESGASTLRAARERPRAPILNLTPNLNTARRLSVAWGVHSVVNDRLRQVDEVVSTALEIAQAQGMASRGDTLLITAGVPFGKPGSTNTLRIETLI

SEQ ID NO: 897 - DNA, 1455 bp, Pseudomonas putida GB-1; identical to SEQ ID NO: 381
  CDS (1)..(1455): transl_table=11

SEQ ID NO: 898 - protein, 484 aa, Pseudomonas putida GB-1; identical to SEQ ID NO: 382

SEQ ID NO: 899 - DNA, 1761 bp, Bacillus sp. SG-1; identical to SEQ ID NO: 385
  CDS (1)..(1761): transl_table=11

SEQ ID NO: 900 - protein, 586 aa, Bacillus sp. SG-1; identical to SEQ ID NO: 386

SEQ ID NO: 901 - DNA, 1413 bp, Moritella sp. PE36; identical to SEQ ID NO: 389
  CDS (1)..(1413): transl_table=11

SEQ ID NO: 902 - protein, 470 aa, Moritella sp. PE36; identical to SEQ ID NO: 390

SEQ ID NO: 903 - DNA, 1503 bp, Vitis vinifera; identical to SEQ ID NO: 397
  CDS (1)..(1503)

SEQ ID NO: 904 - protein, 500 aa, Vitis vinifera; identical to SEQ ID NO: 398

SEQ ID NO: 905 - DNA, 1866 bp, Vitis vinifera; identical to SEQ ID NO: 401
  CDS (1)..(1866)

SEQ ID NO: 906 - protein, 621 aa, Vitis vinifera; identical to SEQ ID NO: 402

SEQ ID NO: 907 - DNA, 1515 bp, Pichia guilliermondii; identical to SEQ ID NO: 403
  CDS (1)..(1515)

SEQ ID NO: 908 - protein, 504 aa, Pichia guilliermondii; identical to SEQ ID NO: 404

SEQ ID NO: 909 - DNA, 1755 bp, Bacillus subtilis; identical to SEQ ID NO: 407
  CDS (1)..(1755): transl_table=11

SEQ ID NO: 910 - protein, 584 aa, Bacillus subtilis; identical to SEQ ID NO: 408

SEQ ID NO: 911 - DNA, 2100 bp, Ostreococcus tauri; identical to SEQ ID NO: 411
  CDS (1)..(2100)

SEQ ID NO: 912 - protein, 699 aa, Ostreococcus tauri; identical to SEQ ID NO: 412

SEQ ID NO: 913 - DNA, 1692 bp, Crassostrea gigas; identical to SEQ ID NO: 413
  CDS (1)..(1692)

SEQ ID NO: 914 - protein, 563 aa, Crassostrea gigas; identical to SEQ ID NO: 414

SEQ ID NO: 915 - DNA, 1584 bp, Phaeosphaeria nodorum
  CDS (1)..(1584)
atggccaacgctctcgaccacctcaatgccggccggaccaggattgagtggctcagccagctcaacaccgagtaccaccctgcgaaggagtaccgccgaacctccatcatcggcaccattggccccaagaccaactctgcggagaagatgaacgctctccgcagggctggcctcaacgtcgtccgcatgaacttctcccacggctcgtacgaataccaccagtccgtcatcgacaacgcgcgcgaagccgagaagcaacagtctggcaggccgctcgccatcgccctcgacaccaagggccccgaaatccgtacaggtaacactgtcggggatgcggacatcccgatcaaggctggcaccgagctcaacatcaccaccgatgatgcctatgccaccaagtgcgacgacaagaacatgtacgtcgactacaagaacatcacaaaggtcattgaggtcggccgcaccatctacgtcgatgacggtgtcctctcattcgaggtcctcgaggttgtcgacgaccagacactgagggtcaagtgcgtgaacaacggcaagatctcctccaagaagggtgttaacctgcccaagaccgacatcgatcttcccccgctgtccgagaaggacaaggccgacttgaagttcggtgtcaagaacaaggtcgacatggtctttgcttcgttcatccgccgcggcagcgacatcactgctatccgtgaggtgctcggcgaggagggcaaggacatccagatcattgccaaggtcgagaaccagcaaggtgtgaacaacttcgacgacatcctcaaggagaccgacggtgtcatggttgcccgtggtgacttgggtatcgagatcccgcccagccaggtcttcattgcgcagaagatgatgatcacaaagtgcaacattgccggaaagcctgtcatttgcgcgacccagatgctcgagtccatgacctacaaccctcgcccaacccgtgccgaagtcagcgatgtcggaaacgctgtccttgacggagccgactgcgtcatgttgtctggcgagactgctaagggagactaccccgtcgaggccgttaccatgatgcacgagacctgcttgctcgcagaggtcgctatcccatacgtaaacgcattcgatgagctgaggaaactggctcctgtcccttgccctaccacagagacctgcgccatggctgccgtcagcgccagtctggagcagaacgctggtgcgatcttggtcttgaccaccagtggtaccaccgcgcgcctcgtttccaagtaccgtcccgtgtgcccgatcatcatggtcacccgtaatgcttcggcttcaaggtactctcacctgtaccgtggtgtataccccttctacttcgcagaggagaagcccgacttcaaggccgcgccatggcaggaggatgttgaccgccgtttgaagtggggcatcatgaatgcgatcaagctcggcgtgctcgagaagggtgctcccgtcatctgcgtccagggctggagaggaggaatgggccacaccaacaccctccgcattgtacctgcgacggaagatcttggtttggaccaggaggcatga

SEQ ID NO: 916 - protein, 527 aa, Phaeosphaeria nodorum
MANALDHLNAGRTRIEWLSQLNTEYHPAKEYRRTSIIGTIGPKTNSAEKMNALRRAGLNVVRMNFSHGSYEYHQSVIDNAREAEKQQSGRPLAIALDTKGPEIRTGNTVGDADIPIKAGTELNITTDDAYATKCDDKNMYVDYKNITKVIEVGRTIYVDDGVLSFEVLEVVDDQTLRVKCVNNGKISSKKGVNLPKTDIDLPPLSEKDKADLKFGVKNKVDMVFASFIRRGSDITAIREVLGEEGKDIQIIAKVENQQGVNNFDDILKETDGVMVARGDLGIEIPPSQVFIAQKMMITKCNIAGKPVICATQMLESMTYNPRPTRAEVSDVGNAVLDGADCVMLSGETAKGDYPVEAVTMMHETCLLAEVAIPYVNAFDELRKLAPVPCPTTETCAMAAVSASLEQNAGAILVLTTSGTTARLVSKYRPVCPIIMVTRNASASRYSHLYRGVYPFYFAEEKPDFKAAPWQEDVDRRLKWGIMNAIKLGVLEKGAPVICVQGWRGGMGHTNTLRIVPATEDLGLDQEA

SEQ ID NO: 917 - DNA, 1533 bp, Arabidopsis thaliana
  CDS (1)..(1533)
atgtcgaacatagacatagaaggaatattgaaggagctacctaatgatgggaggactcctaagactaagatcgtttgtacattaggtcctgcgtctaggtctgtgacaatgattgagaagcttcttaaagcaggcatgaatgtagctcgattcaatttctctcacggaagccatgagtaccatcaggagactcttgacaatctccgcaccgctatgcagaataccggcattctcgctgctgttatgcttgatacaaaggggcctgagattcgtaccggtttcttgaaagatgggaaccctatacaactaaaggaaggccaagagatcacaattaccactgattatgacatcaagggcgatgagaaaacgatttccatgagctacaaaaagctcccagtggatgtgaagcccggaaataccatactatgtgcagatggaagcataagtcttgctgtcgtgtcatgtgatccaaacgctgggactgttatatgtcgatgtgaaaatacagccatgctaggtgaaagaaaaaatgtgaatctcccaggtgttgttgttgatctccccacattgactgacaaggatgtagaagatattcttaaatggggtgttccaaacaacatcgatatgattgctctttcatttgttcgcaaaggttcagatcttgttaatgtccggaaagtccttggatcacattccaagagtataatgttgatgtcgaaggttgagaaccaagaaggagtcctgaatttcgatgagattttgcgtgaaactgatgcattcatggttgctcgtggtgatcttgggatggagattccgatagagaagatcttcttggctcagaagattatgatctacaagtgtaaccttgcaggtaaaccggtggtcacagccactcaaatgctcgagtcgatgatcaaatcaccacggccaacacgagcagaagccacagatgtagcaaacgcagttctcgatggcactgactgtgtgatgcttagcggagaaagtgctgcaggagcttaccctgaaatagcagtgaaaacaatggctaaaatctgcatcgaggcggaatcatcgcttgactacaacacaatcttcaaggagatgattagagcaactccacttccaatgagcactcttgagagtcttgcatcatcagctgtacgaacggcaaacaaagccaaagccaaactcatcatcgtgttgaccagaggaggtacaacagctaaactggtggccaagtatagaccggctgttccaattctatcggtggttgttccggtcttcaccagcgatacgtttaactggagttgcagcgatgagtcaccggcgaggcatagtttgatatatagaggtctgataccggttttgggtgaaggatctgcaaaagcaactgatagtgaatccacagaggagattattgaatctgctttgaagtcagcgacagagaaaggactgtgtaaccatggtgatgctgtggtggctctgcaccgtattggagctgcttcggttatcaagatctgtgtggtgaagtga

SEQ ID NO: 918 - protein, 510 aa, Arabidopsis thaliana
MSNIDIEGILKELPNDGRTPKTKIVCTLGPASRSVTMIEKLLKAGMNVARFNFSHGSHEYHQETLDNLRTAMQNTGILAAVMLDTKGPEIRTGFLKDGNPIQLKEGQEITITTDYDIKGDEKTISMSYKKLPVDVKPGNTILCADGSISLAVVSCDPNAGTVICRCENTAMLGERKNVNLPGVVVDLPTLTDKDVEDILKWGVPNNIDMIALSFVRKGSDLVNVRKVLGSHSKSIMLMSKVENQEGVLNFDEILRETDAFMVARGDLGMEIPIEKIFLAQKIMIYKCNLAGKPVVTATQMLESMIKSPRPTRAEATDVANAVLDGTDCVMLSGESAAGAYPEIAVKTMAKICIEAESSLDYNTIFKEMIRATPLPMSTLESLASSAVRTANKAKAKLIIVLTRGGTTAKLVAKYRPAVPILSVVVPVFTSDTFNWSCSDESPARHSLIYRGLIPVLGEGSAKATDSESTEEIIESALKSATEKGLCNHGDAVVALHRIGAASVIKICVVK

SEQ ID NO: 919 - DNA, 1536 bp, Capsicum annuum; identical to SEQ ID NO: 417
  CDS (1)..(1536)

SEQ ID NO: 920 - protein, 511 aa, Capsicum annuum; identical to SEQ ID NO: 418

SEQ ID NO: 921 - DNA, 1731 bp, Medicago truncatula; identical to SEQ ID NO: 419
  CDS (1)..(1731)

SEQ ID NO: 922 - protein, 576 aa, Medicago truncatula; identical to SEQ ID NO: 420

SEQ ID NO: 923 - DNA, 1590 bp, Medicago truncatula; identical to SEQ ID NO: 421
  CDS (1)..(1590)

SEQ ID NO: 924 - protein, 529 aa, Medicago truncatula; identical to SEQ ID NO: 422

SEQ ID NO: 925 - DNA, 1620 bp, Phaeodactylum tricornutum; identical to SEQ ID NO: 425
  CDS (1)..(1620)

SEQ ID NO: 926 - protein, 539 aa, Phaeodactylum tricornutum; identical to SEQ ID NO: 426

SEQ ID NO: 927 - DNA, 1632 bp, Phaeodactylum tricornutum; identical to SEQ ID NO: 427
  CDS (1)..(1632)

SEQ ID NO: 928 - protein, 543 aa, Phaeodactylum tricornutum; identical to SEQ ID NO: 428

SEQ ID NO: 929 - DNA, 1542 bp, Phaeodactylum tricornutum; identical to SEQ ID NO: 429
  CDS (1)..(1542)

SEQ ID NO: 930 - protein, 513 aa, Phaeodactylum tricornutum; identical to SEQ ID NO: 430

SEQ ID NO: 931 - DNA, 1998 bp, Phaeodactylum tricornutum
  CDS (1)..(1998)
atgggtcgcgatcggcgtttgattacaatttccaggttcttttcctccgggatggactcacgtcaacacgacggaacacgcctccaaccagcacgccatcaagcttttcctctaaaattctccaaattcctttcgacgtcgcctctgtcccaaggagacaaaaaagtatctttgatagttggaattggtaccaactgtgctacaacaaaagcttttacaatcatgaacctttctcttctcgcgttgacgttcgctttaggccatgcgttcgttcctccttccttcttggcgtcgccgtcgtctcgtaaggtactgtcatcctcgcgatcggcgtcggtagcggccaacgctgcggatgtgttggcaaagacaacatcttcttccagcacacccagttctttgatgcccaaggaaacaacagtggcagcggttcccaaggtcgcgcagcgttggcgcaagtcgacgaaacaagtcgtcacgctgggaccggcttcgagcaacaaggaaatgattgaaaagttgtttctcgccggggccgatgtctttcgtctcaacttttcccacggatcgcaagaacaaaagaaagaactcctcatcatgattcgggaagtggaagaaaaatactcccatcctatcggtattttgggagatttgcagggtccgaaattgcgggttggtgaattctccaagccggagggtgagttcttggaactcggtcagagctttcgcctcgatctggacaacgccaagggtgacaacaaacgcgtccagctcccccaccccgaaatcatcaaggcatccgagctcgggcacgccttgctcgtggatgacggtaaggtcaagcttgtcgttacggccaagggcgatgactacctcgaatgccgcgtcgatgtcgccgggatgatcaaagatcgtaagggagtcaacacgcccgattcggtgctcgaaatcagtcctctcacacccaaggatcgcagtgacttggagtacatgcttggtattggcgtcgactgggttgcgctatcttttgtacagactccggcggatatggtggagatccacgccttgatcgacgaaaaactcccttccggacaattcaagcccgccgtcatggccaagattgaaaagcccagttgcttctacgacgacaatctgcaacgcattgtcggactctgcaacggcatcatggttgcccgtggtgatttgggtgtggagtgccctcccgaagacgtgcccttgctacaaaaggaaatcatcgacgaatgccgcaatcaaggacgtcccgtgattgtagctacacaaatgctcgaatccatgattgaagtaccaacaccgacccgtgcggaagccagtgatgtggccacggctatttacgatggcgccgatgcgatcatgctcagtgccgaatccgccgccggaaagttcccggaagaatccgtcgctatgcaacagcgcatcatcaaccgcgtcgagggtgacaagcactaccgttcttacttgaaacaaaacgagcccgatccggagaataccccgaccgatgctattatcacggcggcacgtcaagtcgcgaagactatcggtgccaaatcgattgtctgcttttcactacgaggttcgaccgttctgcgagcctccaaatctcgtccgggtgttccaattctagccctgtgtccgttcaaagaaacttcaagacagctagctctcagctggggcgtttactccgatctacccaaggccggctcgtacggatacaccgtttcggaagaagacatgttcaactacgaccgacccatggtggaaaagagcacggatgacttcgacctggtccttaaaaatgcctgccgtgcggcgttgaagaaaggattggtcagcgatccggacgatctgcttgttgtgacggctggccttcctttcggtaccccgggagcggcaaacatcattcgtgtggtccctgccgccggccccagttgttgggacggcgtttgccgtgtcgattaa

SEQ ID NO: 932 - protein, 665 aa, Phaeodactylum tricornutum
MGRDRRLITISRFFSSGMDSRQHDGTRLQPARHQAFPLKFSKFLSTSPLSQGDKKVSLIVGIGTNCATTKAFTIMNLSLLALTFALGHAFVPPSFLASPSSRKVLSSSRSASVAANAADVLAKTTSSSSTPSSLMPKETTVAAVPKVAQRWRKSTKQVVTLGPASSNKEMIEKLFLAGADVFRLNFSHGSQEQKKELLIMIREVEEKYSHPIGILGDLQGPKLRVGEFSKPEGEFLELGQSFRLDLDNAKGDNKRVQLPHPEIIKASELGHALLVDDGKVKLVVTAKGDDYLECRVDVAGMIKDRKGVNTPDSVLEISPLTPKDRSDLEYMLGIGVDWVALSFVQTPADMVEIHALIDEKLPSGQFKPAVMAKIEKPSCFYDDNLQRIVGLCNGIMVARGDLGVECPPEDVPLLQKEIIDECRNQGRPVIVATQMLESMIEVPTPTRAEASDVATAIYDGADAIMLSAESAAGKFPEESVAMQQRIINRVEGDKHYRSYLKQNEPDPENTPTDAIITAARQVAKTIGAKSIVCFSLRGSTVLRASKSRPGVPILALCPFKETSRQLALSWGVYSDLPKAGSYGYTVSEEDMFNYDRPMVEKSTDDFDLVLKNACRAALKKGLVSDPDDLLVVTAGLPFGTPGAANIIRVVPAAGPSCWDGVCRVD

SEQ ID NO: 933 - DNA, 1533 bp, Solanum tuberosum; identical to SEQ ID NO: 431
  CDS (1)..(1533)

SEQ ID NO: 934 - protein, 510 aa, Solanum tuberosum; identical to SEQ ID NO: 432

SEQ ID NO: 935 - DNA, 1533 bp, Citrus sinensis; identical to SEQ ID NO: 433
  CDS (1)..(1533)

SEQ ID NO: 936 - protein, 510 aa, Citrus sinensis; identical to SEQ ID NO: 434

SEQ ID NO: 937 - DNA, 1740 bp, Arabidopsis thaliana
  CDS (1)..(1740)
atggctcaagtggttgctaccaggtcaattcaaggctcgatgttatctcccaacggtggatctgtgtctacaagatccgagaagctattgaaaccagcgagttttgcagtgaaggttcttggcaacgaagcaaagagaagtggaagagtctctgtaagaagcagaagagtggttgatactactgtgagatccgctcgtgttgagactgaagtcattcctgtttctcctgaagatgtgcctaacagagaggagcagcttgagaggttgttggaaatgcagcagtttggtgatacatcggtagggatgtggtcgaagccgacagtgaggaggaagacaaagattgtttgcaccgttggtccgtcgaccaacacacgagaaatgatatggaaattggctgaagctgggatgaatgttgctaggatgaatatgtctcatggagatcatgcttcacataagaaggttattgatttggttaaagaatacaatgcacaaactaaagacaacactattgctatcatgcttgacaccaagggtccggaagttaggagtggagatttacctcagccaattatgttagatcctggtcaagagtttacctttacaattgagagaggagtcagcacaccaagttgtgtcagtgttaactatgatgatttcgttaatgacgtggaagcgggtgacatgcttcttgttgatggtggtatgatgtcgtttatggtgaagtcaaagaccaaagactctgtcaaatgtgaagttgttgatggtggagaacttaagtcaaggagacacctgaatgtccgaggaaagagtgcaactttaccttcaatcactgagaaggactgggaggatattaaatttggagtggagaacaaagttgacttttatgcagtttcctttgtcaaagatgctcaagttgtacacgagttgaagaaataccttcaaaatagtggtgctgatatacacgtgatagtgaaaattgagagtgcagactccatacctaacttgcactccattatcacagcatcagatggggcaatggttgcaagaggtgatcttggtgcagagcttccaattgaagaagtccccattcttcaggaggagatcattaacctgtgccgtagtatgggaaaagctgttattgttgcggctaacatgcttgagagtatgatagttcatccaactccaacccgggcagaggtctcagacattgctatcgctgttagagaaggtgctgatgcggtaatgctttcaggagaaactgctcacggaaagttcccattgaaagctgctggagtgatgcacactgttgcattgcgaacagaagcaaccattactagcggtgaaatgccacctaatcttggtcaagccttcaagaaccatatgagtgagatgtttgcataccatgcaaccatgatgtcaaacacacttggaacttcaactgttgtcttcaccagaaccggtttcatggccatattgttaagtcactatcgtccttccggcacaatctatgccttcacaaatgagaaaaaaatacaacaaagattagctttgtatcaaggtgtatgccccatatatatggagttcacagatgatgcagaagaaacttttgctaatgctttggctacattactgaaacaaggaatggtgaagaagggagaggaaatagcaatcgtacagagcggtacacagccaatctggcgatctcaatcgacacataacatccaagtccgcaaggtttaa

SEQ ID NO: 938 - protein, 579 aa, Arabidopsis thaliana
MAQVVATRSIQGSMLSPNGGSVSTRSEKLLKPASFAVKVLGNEAKRSGRVSVRSRRVVDTTVRSARVETEVIPVSPEDVPNREEQLERLLEMQQFGDTSVGMWSKPTVRRKTKIVCTVGPSTNTREMIWKLAEAGMNVARMNMSHGDHASHKKVIDLVKEYNAQTKDNTIAIMLDTKGPEVRSGDLPQPIMLDPGQEFTFTIERGVSTPSCVSVNYDDFVNDVEAGDMLLVDGGMMSFMVKSKTKDSVKCEVVDGGELKSRRHLNVRGKSATLPSITEKDWEDIKFGVENKVDFYAVSFVKDAQVVHELKKYLQNSGADIHVIVKIESADSIPNLHSIITASDGAMVARGDLGAELPIEEVPILQEEIINLCRSMGKAVIVAANMLESMIVHPTPTRAEVSDIAIAVREGADAVMLSGETAHGKFPLKAAGVMHTVALRTEATITSGEMPPNLGQAFKNHMSEMFAYHATMMSNTLGTSTVVFTRTGFMAILLSHYRPSGTIYAFTNEKKIQQRLALYQGVCPIYMEFTDDAEETFANALATLLKQGMVKKGEEIAIVQSGTQPIWRSQSTHNIQVRKV

SEQ ID NO: 939 - DNA, 1509 bp, Glycine max; identical to SEQ ID NO: 435
  CDS (1)..(1509)

SEQ ID NO: 940 - protein, 502 aa, Glycine max; identical to SEQ ID NO: 436

SEQ ID NO: 941 - DNA, 1530 bp, Zea mays; identical to SEQ ID NO: 437
  CDS (1)..(1530)

SEQ ID NO: 942 - protein, 509 aa, Zea mays; identical to SEQ ID NO: 438

SEQ ID NO: 943 - DNA, 1521 bp, Saccharomyces bayanus; identical to SEQ ID NO: 441
  CDS (1)..(1521)

SEQ ID NO: 944 - protein, 506 aa, Saccharomyces bayanus; identical to SEQ ID NO: 442

SEQ ID NO: 945 - DNA, 1584 bp, Arabidopsis thaliana; identical to SEQ ID NO: 445
  CDS (1)..(1584)

SEQ ID NO: 946 - protein, 527 aa, Arabidopsis thaliana; identical to SEQ ID NO: 446

SEQ ID NO: 947 - DNA, 1533 bp, Glycine max; identical to SEQ ID NO: 447
  CDS (1)..(1533)

SEQ ID NO: 948 - protein, 510 aa, Glycine max; identical to SEQ ID NO: 448

SEQ ID NO: 949 - DNA, 1536 bp, Glycine max; identical to SEQ ID NO: 449
  CDS (1)..(1536)

SEQ ID NO: 950 - protein, 511 aa, Glycine max; identical to SEQ ID NO: 450

SEQ ID NO: 951 - DNA, 1791 bp, Arabidopsis thaliana
  CDS (1)..(1791)
atgtctcagtctatccaattctccagtccttcacacactcctcaccttctccatctccctcactcacaattcaaccgtcctctctcctctatctccttccgtcgcttccctctaacaaccatcaaatacacttccatcagagcctcctcgtcaccatctccttcaccggatctcgattcatcgtcctcatcatcatcctcgcaagtacttctctcacctaacggtactggtgctgtgaagtctgatgagagatccgttgttgctacggcggttacgacggatacgtctgggattgaggttgatactgtgacggaagcggagcttaaggagaatggatttagaagtacgaggaggacgaagctgatctgtacgatcggaccggcgacttgtggatttgagcagcttgaggcgcttgctgtgggaggtatgaatgtggcgaggcttaatatgtgtcacggtacgcgtgattggcatcgcggtgtgattcgtagtgttcggaggcttaatgaggagaaaggctttgcggttgctattatgatggatactgaaggtagtgagattcatatgggagatcttggtggtgaagcttcagctaaagcagaggatggtgaggtttggactttcactgttagagcttttgattcttctcgtcctgaacgtaccattagtgttagctacgatggtttcgctgaagatgtaagagttggtgatgaacttctggttgatggtgggatggtgagatttgaagtgattgagaagattggtcctgatgttaagtgtctatgtaccgatcctggattgttgcttcctcgagctaacttgacgttttggagagatggaagtctagtacgagaacgtaatgccatgcttccaacaatttcttccaaggactggctggatattgattttggaattgctgaaggtgtagatttcattgctgtatcgtttgtcaagtcggctgaagtcattaatcatcttaaaagttatcttgctgctcgttcccgtggaggggaaattggagtgattgcaaagatcgagagtatcgattcattgaccaatttggaagaaattattctagcatcagatggagccatggttgcaagaggagatctgggagctcagatacctcttgagcaagttccagcagctcaacagagaatcgtgcaagtctgcagagcgctgaacaaacccgtcattgtcgcttctcagctacttgagtccatgattgagtacccaactccaaccagagcagaagtagccgacgtgtctgaagcagtaagacaaagatcagatgcattgatgctctctggagaatcagctatgggacaattcccagacaaggcgctcacggttctaaggacagtcagtttaagaatcgagagatggtggagagaagagaaacgtcatgagtctgtgccgcttcaagccataggctcttcattttcagacaaaatctcagaagagatctgtaactcagctgctaaaatggctaacaatcttggagtggacgcggttttcgtttacacaacgagcggacacatggcatcactggtctcccgatgtcgcccggactgcccgatctttgctttcacaaccacaacctcagtgagaagacgcttaaacctacaatggggacttatcccattccgtctcagcttctcagacgacatggaaagcaacttgaacaaaacattctcgttactgaaatcaagaggtatgatcaaatctggtgacctcgtgatcgcagtctcggacatgctgcaatcaatccaggtaatgaacgtcccgtaa

SEQ ID NO: 952 - protein, 596 aa, Arabidopsis thaliana
MSQSIQFSSPSHTPHLLHLPHSQFNRPLSSISFRRFPLTTIKYTSIRASSSPSPSPDLDSSSSSSSSQVLLSPNGTGAVKSDERSVVATAVTTDTSGIEVDTVTEAELKENGFRSTRRTKLICTIGPATCGFEQLEALAVGGMNVARLNMCHGTRDWHRGVIRSVRRLNEEKGFAVAIMMDTEGSEIHMGDLGGEASAKAEDGEVWTFTVRAFDSSRPERTISVSYDGFAEDVRVGDELLVDGGMVRFEVIEKIGPDVKCLCTDPGLLLPRANLTFWRDGSLVRERNAMLPTISSKDWLDIDFGIAEGVDFIAVSFVKSAEVINHLKSYLAARSRGGEIGVIAKIESIDSLTNLEEIILASDGAMVARGDLGAQIPLEQVPAAQQRIVQVCRALNKPVIVASQLLESMIEYPTPTRAEVADVSEAVRQRSDALMLSGESAMGQFPDKALTVLRTVSLRIERWWREEKRHESVPLQAIGSSFSDKISEEICNSAAKMANNLGVDAVFVYTTSGHMASLVSRCRPDCPIFAFTTTTSVRRRLNLQWGLIPFRLSFSDDMESNLNKTFSLLKSRGMIKSGDLVIAVSDMLQSIQVMNVP

SEQ ID NO: 953 - DNA, 1584 bp, Arabidopsis thaliana; identical to SEQ ID NO: 451
  CDS (1)..(1584)

SEQ ID NO: 954 - protein, 527 aa, Arabidopsis thaliana; identical to SEQ ID NO: 452

SEQ ID NO: 955 - DNA, 1665 bp, Drosophila melanogaster; identical to SEQ ID NO: 453
  CDS (1)..(1665)

SEQ ID NO: 956 - protein, 554 aa, Drosophila melanogaster; identical to SEQ ID NO: 454

SEQ ID NO: 957 - DNA, 1740 bp, Arabidopsis thaliana; identical to SEQ ID NO: 455
  CDS (1)..(1740)

SEQ ID NO: 958 - protein, 579 aa, Arabidopsis thaliana; identical to SEQ ID NO: 456

SEQ ID NO: 959 - DNA, 1581 bp, Aspergillus oryzae; identical to SEQ ID NO: 457
  CDS (1)..(1581)

SEQ ID NO: 960 - protein, 526 aa, Aspergillus oryzae; identical to SEQ ID NO: 458

SEQ ID NO: 961 - DNA, 1545 bp, Arabidopsis thaliana; identical to SEQ ID NO: 461
  CDS (1)..(1545)

SEQ ID NO: 962 - protein, 514 aa, Arabidopsis thaliana; identical to SEQ ID NO: 462

SEQ ID NO: 963 - DNA, 1704 bp, Arabidopsis thaliana; identical to SEQ ID NO: 463
  CDS (1)..(1704)

SEQ ID NO: 964 - protein, 567 aa, Arabidopsis thaliana; identical to SEQ ID NO: 464

SEQ ID NO: 965 - DNA, 1533 bp, Lilium longiflorum; identical to SEQ ID NO: 465
  CDS (1)..(1533)

SEQ ID NO: 966 - protein, 510 aa, Lilium longiflorum; identical to SEQ ID NO: 466

SEQ ID NO: 967 - DNA, 1413 bp, Vibrio marinus; identical to SEQ ID NO: 467
  CDS (1)..(1413): transl_table=11

SEQ ID NO: 968 - protein, 470 aa, Vibrio marinus; identical to SEQ ID NO: 468

SEQ ID NO: 969 - DNA, 1752 bp, Ricinus communis; identical to SEQ ID NO: 469
  CDS (1)..(1752)

SEQ ID NO: 970 - protein, 583 aa, Ricinus communis; identical to SEQ ID NO: 470

SEQ ID NO: 971 - DNA, 1782 bp, Nicotiana tabacum; identical to SEQ ID NO: 471
  CDS (1)..(1782)

SEQ ID NO: 972 - protein, 593 aa, Nicotiana tabacum; identical to SEQ ID NO: 472

SEQ ID NO: 973 - DNA, 1494 bp, Arabidopsis thaliana; identical to SEQ ID NO: 473
  CDS (1)..(1494)

SEQ ID NO: 974 - protein, 497 aa, Arabidopsis thaliana; identical to SEQ ID NO: 474

SEQ ID NO: 975 - DNA, 1533 bp, Solanum tuberosum; identical to SEQ ID NO: 475
  CDS (1)..(1533)

SEQ ID NO: 976 - protein, 510 aa, Solanum tuberosum; identical to SEQ ID NO: 476

SEQ ID NO: 977 - DNA, 1536 bp, Glycine max; identical to SEQ ID NO: 477
  CDS (1)..(1536)

SEQ ID NO: 978 - protein, 511 aa, Glycine max; identical to SEQ ID NO: 478

SEQ ID NO: 979 - DNA, 1527 bp, Nicotiana tabacum; identical to SEQ ID NO: 479
  CDS (1)..(1527)

SEQ ID NO: 980 - protein, 508 aa, Nicotiana tabacum; identical to SEQ ID NO: 480

SEQ ID NO: 981 - DNA, 1689 bp, Nicotiana tabacum; identical to SEQ ID NO: 481
  CDS (1)..(1689)

SEQ ID NO: 982 - protein, 562 aa, Nicotiana tabacum; identical to SEQ ID NO: 482

SEQ ID NO: 983 - DNA, 1506 bp, Candida glabrata; identical to SEQ ID NO: 483
  CDS (1)..(1506)

SEQ ID NO: 984 - protein, 501 aa, Candida glabrata; identical to SEQ ID NO: 484

SEQ ID NO: 985 - DNA, 1413 bp, Escherichia coli O157; identical to SEQ ID NO: 485
  CDS (1)..(1413): transl_table=11

SEQ ID NO: 986 - protein, 470 aa, Escherichia coli O157; identical to SEQ ID NO: 486

SEQ ID NO: 987 - DNA, 1413 bp, Salmonella typhi; identical to SEQ ID NO: 487
  CDS (1)..(1413): transl_table=11

SEQ ID NO: 988 - protein, 470 aa, Salmonella typhi; identical to SEQ ID NO: 488

SEQ ID NO: 989 - DNA, 1413 bp, Salmonella typhimurium; identical to SEQ ID NO: 489
  CDS (1)..(1413): transl_table=11

SEQ ID NO: 990 - protein, 470 aa, Salmonella typhimurium; identical to SEQ ID NO: 490

SEQ ID NO: 991 - DNA, 1503 bp, Saccharomyces cerevisiae; identical to SEQ ID NO: 491
  CDS (1)..(1503)

SEQ ID NO: 992 - protein, 500 aa, Saccharomyces cerevisiae; identical to SEQ ID NO: 492

SEQ ID NO: 993 - DNA, 1527 bp, Candida glabrata; identical to SEQ ID NO: 495
  CDS (1)..(1527)

SEQ ID NO: 994 - protein, 508 aa, Candida glabrata; identical to SEQ ID NO: 496

SEQ ID NO: 995 - DNA, 1443 bp, Escherichia coli; identical to SEQ ID NO: 497
  CDS (1)..(1443): transl_table=11

SEQ ID NO: 996 - protein, 480 aa, Escherichia coli; identical to SEQ ID NO: 498

SEQ ID NO: 997 - DNA, 1443 bp, Salmonella typhimurium; identical to SEQ ID NO: 499
  CDS (1)..(1443): transl_table=11

SEQ ID NO: 998 - protein, 480 aa, Salmonella typhimurium; identical to SEQ ID NO: 500

SEQ ID NO: 999 - DNA, 1521 bp, Saccharomyces cerevisiae; identical to SEQ ID NO: 501
  CDS (1)..(1521)

SEQ ID NO: 1000 - protein, 506 aa, Saccharomyces cerevisiae; identical to SEQ ID NO: 502

SEQ ID NO: 1001 - DNA, 1599 bp, Agaricus bisporus; identical to SEQ ID NO: 505
  CDS (1)..(1599)

SEQ ID NO: 1002 - protein, 532 aa, Agaricus bisporus; identical to SEQ ID NO: 506

SEQ ID NO: 1003 - DNA, 1506 bp, Ashbya gossypii; identical to SEQ ID NO: 507
  CDS (1)..(1506)

SEQ ID NO: 1004 - protein, 501 aa, Ashbya gossypii; identical to SEQ ID NO: 508

SEQ ID NO: 1005 - DNA, 1581 bp, Aspergillus niger; identical to SEQ ID NO: 509
  CDS (1)..(1581)

SEQ ID NO: 1006 - protein, 526 aa, Aspergillus niger; identical to SEQ ID NO: 510

SEQ ID NO: 1007 - DNA, 1758 bp, Bacillus licheniformis; identical to SEQ ID NO: 511
  CDS (1)..(1758): transl_table=11

SEQ ID NO: 1008 - protein, 585 aa, Bacillus licheniformis; identical to SEQ ID NO: 512

SEQ ID NO: 1009 - DNA, 1761 bp, Bacillus psychrophilus; identical to SEQ ID NO: 513
  CDS (1)..(1761): transl_table=11

SEQ ID NO: 1010 - protein, 586 aa, Bacillus psychrophilus; identical to SEQ ID NO: 514

SEQ ID NO: 1011 - DNA, 1764 bp, Bacillus stearothermophilus; identical to SEQ ID NO: 515
  CDS (1)..(1764): transl_table=11

SEQ ID NO: 1012 - protein, 587 aa, Bacillus stearothermophilus; identical to SEQ ID NO: 516

SEQ ID NO: 1013 - DNA, 1758 bp, Bacillus subtilis; identical to SEQ ID NO: 517
  CDS (1)..(1758): transl_table=11

SEQ ID NO: 1014 - protein, 585 aa, Bacillus subtilis; identical to SEQ ID NO: 518

SEQ ID NO: 1015 - DNA, 1428 bp, Corynebacterium glutamicum; identical to SEQ ID NO: 523
  CDS (1)..(1428): transl_table=11

SEQ ID NO: 1016 - protein, 475 aa, Corynebacterium glutamicum; identical to SEQ ID NO: 524

SEQ ID NO: 1017 - DNA, 1515 bp, Debaryomyces hansenii; identical to SEQ ID NO: 525
  CDS (1)..(1515)

SEQ ID NO: 1018 - protein, 504 aa, Debaryomyces hansenii; identical to SEQ ID NO: 526

SEQ ID NO: 1019 - DNA, 1602 bp, Drosophila melanogaster; identical to SEQ ID NO: 527
  CDS (1)..(1602)

SEQ ID NO: 1020 - protein, 533 aa, Drosophila melanogaster; identical to SEQ ID NO: 528

SEQ ID NO: 1021 - DNA, 1581 bp, Emericella nidulans; identical to SEQ ID NO: 529
  CDS (1)..(1581)

SEQ ID NO: 1022 - protein, 526 aa, Emericella nidulans; identical to SEQ ID NO: 530

SEQ ID NO: 1023 - DNA, 1506 bp, Kluyveromyces lactis; identical to SEQ ID NO: 531
  CDS (1)..(1506)

SEQ ID NO: 1024 - protein, 501 aa, Kluyveromyces lactis; identical to SEQ ID NO: 532

SEQ ID NO: 1025 - DNA, 1506 bp, Saccharomyces castellii; identical to SEQ ID NO: 537
  CDS (1)..(1506)

SEQ ID NO: 1026 - protein, 501 aa, Saccharomyces castellii; identical to SEQ ID NO: 538

SEQ ID NO: 1027 - DNA, 1506 bp, Saccharomyces kluyveri; identical to SEQ ID NO: 539
  CDS (1)..(1506)

SEQ ID NO: 1028 - protein, 501 aa, Saccharomyces kluyveri; identical to SEQ ID NO: 540

SEQ ID NO: 1029 - DNA, 1530 bp, Schizosaccharomyces pombe; identical to SEQ ID NO: 541
  CDS (1)..(1530)

SEQ ID NO: 1030 - protein, 509 aa, Schizosaccharomyces pombe; identical to SEQ ID NO: 542

SEQ ID NO: 1031 - DNA, 1758 bp, Staphylococcus aureus; identical to SEQ ID NO: 543
  CDS (1)..(1758): transl_table=11

SEQ ID NO: 1032 - protein, 585 aa, Staphylococcus aureus; identical to SEQ ID NO: 544

SEQ ID NO: 1033 - DNA, 1758 bp, Staphylococcus epidermidis; identical to SEQ ID NO: 545
  CDS (1)..(1758): transl_table=11

SEQ ID NO: 1034 - protein, 585 aa, Staphylococcus epidermidis; identical to SEQ ID NO: 546

SEQ ID NO: 1035 - DNA, 1617 bp, Trichoderma reesei; identical to SEQ ID NO: 551
  CDS (1)..(1617)

SEQ ID NO: 1036 - protein, 538 aa, Trichoderma reesei; identical to SEQ ID NO: 552

SEQ ID NO: 1037 - DNA, 1533 bp, Oryza sativa
  CDS (1)..(1533)
atggcggtgatggaggagcagcaggagggagccgcgggggtgatgcggcggaggcccaagacgaagatcgtgtgcacgctggggccggcgtcgaggtcggtggagatgatcgggcggctgctccgcgccgggatgtgcgtcgcgcgcttcaacttctcccacggatcccacgagtaccaccaggagacgctcgacaacctccgcgccgccatggagagcaccggcatcctctgcgccgtcatgctcgacaccaaggggccagagatccgaactggatttctgaaagatggaaaacccgtacagttgaagaagggtcaagaaatcacagtttcaactgattatagcataaagggtgatgacaacatgatatcaatgagctacaagaagctagcggtggatctgaagccaggcagtgtaatattatgtgctgatggcaccatcactcttactgtccttcactgtgataaagagcaaggcttggttcgctgccgttgtgagaacactgctatgcttggtgagaggaagaatgttaaccttccaggagttattgttgatctcccgacacttactgagaaggacaaggaggatattcttaaatggggtgtcccaaacaagattgacatgattgctctgtcttttgttcgtaaaggctcagaccttgtagaggtcaggaaggtgcttgggaagcatgcaaagtcaataatgctgatgtcaaaggttgagaatcaagagggagtggctaactttgatgatatcctggcacaatctgatgcttttatggttgcaaggggtgatttgggaatggaaattccgatagagaagatcttttatgcacagaaggtgatgattttcaagtgcaatattcagggcaagccagttgtgactgcaacccagatgttggaatctatgatcaagtctccccgccctactagagcagaagcgactgatgttgccaatgcagttcttgatggcactgactgtgtcatgctcagtggtgagacagctgctggggcttacccggaactggctgtacggaccatggccaagatctgcctgcaagcggagtcatgcgtcgaccatgccgctgttttcaagtccattaccgcatcagctccaattcccatgagcccattggagagccttgcatcatcagctgtgcgtacagcgaactctgccaaggcggcgctcatcttggtcctgactaggggaggaacaactgctaggctggtggccaagtacaggccatccatgccgattctgtccgtcgtggttcctgagctgaaacagaccgactccttcgactggacctgcagcgacgaagctcctgcgcggcacagcctcatcgtcaggggagtgatcccgatgctgagtgcagccactgccaaggccttcgacaacgaagccactgaagaagctctcgggttcgccatcagcaacgccaaggcgatggggctctgcaactccggtgagtccgtcgtcgccctccaccggatcggaactgcatctgtcatcaagctcctgacagcgaactag

SEQ ID NO: 1038 - protein, 510 aa, Oryza sativa
MAVMEEQQEGAAGVMRRRPKTKIVCTLGPASRSVEMIGRLLRAGMCVARFNFSHGSHEYHQETLDNLRAAMESTGILCAVMLDTKGPEIRTGFLKDGKPVQLKKGQEITVSTDYSIKGDDNMISMSYKKLAVDLKPGSVILCADGTITLTVLHCDKEQGLVRCRCENTAMLGERKNVNLPGVIVDLPTLTEKDKEDILKWGVPNKIDMIALSFVRKGSDLVEVRKVLGKHAKSIMLMSKVENQEGVANFDDILAQSDAFMVARGDLGMEIPIEKIFYAQKVMIFKCNIQGKPVVTATQMLESMIKSPRPTRAEATDVANAVLDGTDCVMLSGETAAGAYPELAVRTMAKICLQAESCVDHAAVFKSITASAPIPMSPLESLASSAVRTANSAKAALILVLTRGGTTARLVAKYRPSMPILSVVVPELKQTDSFDWTCSDEAPARHSLIVRGVIPMLSAATAKAFDNEATEEALGFAISNAKAMGLCNSGESVVALHRIGTASVIKLLTAN

SEQ ID NO: 1039 - DNA, 1752 bp, Oryza sativa; identical to SEQ ID NO: 553
  CDS (1)..(1752)

SEQ ID NO: 1040 - protein, 583 aa, Oryza sativa; identical to SEQ ID NO: 554

SEQ ID NO: 1041 - DNA, 1647 bp, Oryza sativa; identical to SEQ ID NO: 555
  CDS (1)..(1647)

SEQ ID NO: 1042 - protein, 548 aa, Oryza sativa; identical to SEQ ID NO: 556

SEQ ID NO: 1043 - DNA, 1536 bp, Oryza sativa
  CDS (1)..(1536)
atggcgaacatcgacatggggaagatcctggcggggctggagaacgacgacgcgcgggtgcccaagaccaagctggtctgcacgctcggcccggcctcccgctccgtccccatgctcgagaagctgctccgcgccgggatgaacgtcgcgcgcttcaacttctcccacggcacccacgagtaccaccaggagaccctcgacaacctccgccaggccatgcacaacaccggcgtcctctgcgccgtcatgctcgataccaagggtcctgagattcgtactggatttttgaaggatggcaagccaatcaagctaacaaagggtcaagaactcactgttaccaccgattatgagatcaagggtgatgagaacatgattaccatgagttacaagaaactgccagttgatgtgaagcctggaaatgtcattctctgcgccgatggtacaatctctttgactgttttgtcctgtgatccaaaggctggaactgtgaggtgtaggtgtgagaacacagcaatgcttggcgagagaaagaattgcaatctgccaggaattgttgtggaccttcctacactgactgagaaggataaagaagacattttgggatggggtgtgccaaatgacatagacatgattgctctgtcgtttgtccgtaaaggatcagatttggttaccgtcagacaacttcttggacagcatgcaaagcgcatcaagctgatgtcaaaggttgaaaaccaagagggtgttgtaaacttcgatgagatcttgagggaaacggatgcatttatggttgctagaggtgatcttggaatggagattccagttgagaagatattccttgcacagaagatgatgatttacaagtgcaaccttgctggaaagcctgttgtgactgctactcagatgcttgagtcgatgatcaaatcaccacgtccaactcgtgctgaggcaactgacgttgcaaatgcagttcttgatggaactgactgcgtcatgcttagtggagagagtgctgctggagcataccctgaagtagctgtgaagatcatggcacgtatatgtgttgaggcagagtcttcccttgacaacgaagctgtcttcaaggagatgatcaggtctgcgccccttccgatgagcccattggagtctctcgcatcctctgctgtacgcacagccaacaaggccaaggcagccctgattgttgtcttgactcgtggtggtaccacggcaaagctggttgccaagtatcgtcccagggttccaatcctctctgtggttgtccccgtgttgacaaccgattcattcgactggacaatcagctcggagggcccagcaaggcacagcctaatctacagaggtcttgttcctctcctggctgagggttctgccaaagccaccgattcggagtcgacagaggtcatccttgatgctgctctcaagtcagctgtacagaagcagttgtgcaagcctggtgatgctgttgttgctctgcaccgtattggcgtcgcatccgtgatcaagatctgcatcgtgaagtaa

SEQ ID NO: 1044 - protein, 511 aa, Oryza sativa
MANIDMGKILAGLENDDARVPKTKLVCTLGPASRSVPMLEKLLRAGMNVARFNFSHGTHEYHQETLDNLRQAMHNTGVLCAVMLDTKGPEIRTGFLKDGKPIKLTKGQELTVTTDYEIKGDENMITMSYKKLPVDVKPGNVILCADGTISLTVLSCDPKAGTVRCRCENTAMLGERKNCNLPGIVVDLPTLTEKDKEDILGWGVPNDIDMIALSFVRKGSDLVTVRQLLGQHAKRIKLMSKVENQEGVVNFDEILRETDAFMVARGDLGMEIPVEKIFLAQKMMIYKCNLAGKPVVTATQMLESMIKSPRPTRAEATDVANAVLDGTDCVMLSGESAAGAYPEVAVKIMARICVEAESSLDNEAVFKEMIRSAPLPMSPLESLASSAVRTANKAKAALIVVLTRGGTTAKLVAKYRPRVPILSVVVPVLTTDSFDWTISSEGPARHSLIYRGLVPLLAEGSAKATDSESTEVILDAALKSAVQKQLCKPGDAVVALHRIGVASVIKICIVK

SEQ ID NO: 1045 - DNA, 1737 bp, Oryza sativa; identical to SEQ ID NO: 557
  CDS (1)..(1737)

SEQ ID NO: 1046 - protein, 578 aa, Oryza sativa; identical to SEQ ID NO: 558

SEQ ID NO: 1047 - DNA, 1713 bp, Oryza sativa; identical to SEQ ID NO: 559
  CDS (1)..(1713)

SEQ ID NO: 1048 - protein, 570 aa, Oryza sativa; identical to SEQ ID NO: 560

SEQ ID NO: 1049 - DNA, 1584 bp, Oryza sativa; identical to SEQ ID NO: 561
  CDS (1)..(1584)

SEQ ID NO: 1050 - protein, 527 aa, Oryza sativa; identical to SEQ ID NO: 562

SEQ ID NO: 1051 - DNA, 1584 bp, Oryza sativa; identical to SEQ ID NO: 563
  CDS (1)..(1584)

SEQ ID NO: 1052 - protein, 527 aa, Oryza sativa; identical to SEQ ID NO: 564

SEQ ID NO: 1053 - DNA, 1584 bp, Oryza sativa; identical to SEQ ID NO: 565
  CDS (1)..(1584)

SEQ ID NO: 1054 - protein, 527 aa, Oryza sativa; identical to SEQ ID NO: 566

SEQ ID NO: 1055 - DNA, 1584 bp, Oryza sativa; identical to SEQ ID NO: 567
  CDS (1)..(1584)

SEQ ID NO: 1056 - protein, 527 aa, Oryza sativa; identical to SEQ ID NO: 568

SEQ ID NO: 1057 - DNA, 1716 bp, Brassica napus; identical to SEQ ID NO: 569
  CDS (1)..(1716)

SEQ ID NO: 1058 - protein, 571 aa, Brassica napus; identical to SEQ ID NO: 570

SEQ ID NO: 1059 - DNA, 1584 bp, Brassica napus
  CDS (1)..(1584)
atgcattcgagccatctccttctcgaggagccgatcaggatggcttctatcctcgagccatccaaatccagcttctttccggcgttaactaagatcgtcgggactctcggtcccaaatccagatccgttgagacactctccggctgtctcaaatccggcatgtctgtggctagattcgatttctcttggggagacgctgagtatcaccaagagacgcttgataatctgaagattgctgttaagagcaccaagaagctttgtgctgttatgcttgatacagtgggacctgagcttcaagtgatcaacaagtctgagaaagctattactcttaaagctgatggacttgttactttgactcctaatcaagaccgagaagcctcttctgaagtccttcccattaactttgatggccttgccaaggcggtgaagaaaggagacactatctttgttgggcagtacctattcactggtagtgaaacaacttcagtttggctcgaggttgatgaagttaaaggagatgatgtcatttgcctttcaaggaatgctgctactctcgctggttctatgttcaccttgcacgcctctcaagttcacatcgatatgccaactcttactgagaaagataaagaggttataagcacatggggagttcaaaacaaaatcgactttctctcgttgtcctattgtcgccatgcagaggatgttcgccagacccgtgagatgcttaaaaagttgggtgacctctctcaaacacaaatatttgccaagattgagaacgttgagggactaaaccactttgatgagattctacaagaagctgatggaattattctttctcgtgggaacttgggtattgatctacccccggagaaggtgtttttgtttcaaaaggcggctctttacaagtgcaacatggcaggaaagccagccgttcttactcgtgttgttgatagtatgactgacaacttgcgaccaactcgtgcagaggcaacagatgttgctaatgctgttttagatggaagtgatgcaattcttctcggtgctgagactcttcgcggtctgtaccctgtggagactatatcaactgtcggaaggatctgtgctgaggcagagaaggttttcaatcaagatttgtacttcaagaagactgtcaagtatgttggagagccgatgtctcacctcgaatccattgcttcttcagctgtaagggcagcaatcaaggttaaggcatccgtcattatatgctttacctcttctggaagagcagccaggttgattgctaaatacaggccaacaatgccggttatttctgtagtcattccacgggttaagacaaatcagctaaaatggagcttcagtggagcctttgaggctaggcagtcacttattgtcaggggcctcttccccatgcttgctgaccctcgtcaccctgcggaatcaacaagtgcgacgaacgagtcagtcctgaaggttgcgttagaccacgggaagcaagcaggagtgatcaagtcgcacgacagagtagtggtgtgtcagaaagttggtgatgcatctgtggtcaagatcatcgagcttgaggattga

SEQ ID NO: 1060 - protein, 527 aa, Brassica napus; identical to SEQ ID NO: 70

SEQ ID NO: 1061 - DNA, 1584 bp, Brassica napus; identical to SEQ ID NO: 571
  CDS (1)..(1584)

SEQ ID NO: 1062 - protein, 527 aa, Brassica napus; identical to SEQ ID NO: 572

SEQ ID NO: 1063 - DNA, 1581 bp, Glycine max
  CDS (1)..(1581)
atgcattccagccctttgcttcttgaggaacccattaggatggcatccattcttgagccatccaagcctactttctttccagctatgacaaaaattgttggcacacttggtctaaagtcacgatcagttgatacaatttcccgttgccttgatgcaggaatgtctgtggcaaggtttgacttctcatggggtgatccagaataccatcaagagacattggaaaatttgagagttgctatcaaaagtaccaagaaactctgtgcggttatgctagatactgtgggtcctgaattacagattgagaataagacagatcacccaatcacccttgaagcagacacattagttgtcttaactccagatcaaaccaaagaagctggttcaaatctcttaccagtaaattttaacggactatcaaaggctgtgaagaagggtgatactatttttatcggaaaatacctgtttactggaagtgaaacagcttccttatggctggaggtcagtgaggtgaaaggtgaggatgtcacctgtctggtaaaaaacactgctacactgtctggatcattgtttactgcacatgtctctcagatccacatcgatcttcctactcttgctgataaagataaggaggtaataagcacatggggtgttcgaaacaatattgacttcctttcattatatacccggcacgttgaagatattcgtcatgcgcgtgaatttctttctaaattgggtgaccttaagcagacacatatttatgcaaagattgaaaatatagagggactgaagcattttgatgaaatattgagagaagcagatggcatcatcctcgctcgtggaaatttagggatagaactcccacctgagaaggttttcttattccaaaaggctgctatttacaagtgcaacatggttggaaagccagttgttgttacacgtgttgtagactctatgactgataatctaagacctactcgtgctgaagcaacagatgttgccaatgcagtgctggatggaagtgatgcaattctccttggagcagagaccctgcggggacaataccctgtagagaccatttctatagttggaaaaatatgtgctgaggcagagaaagttcataatcaagatttgtattttaagaaggctgtcaaatatgtgggagagccaatgagccatttggaatcaattgcttcctctgcggttcgagcagctatcaaggttaaagcctctgttattatttgcttcacttcatctggaagagctgcaagattgattgctaagtacagaccaattatgcctgtcatatccgttgtcattcctcaactgaagacaaatcaactccgatggacattcaccggtgcttttgaggctaggcaatctcttattgtgaggggtctttttcctatgctggcagatccacgacacccggctgagtctaaaagtggaacaaatgaatcaattttgaaggttgctttagatcatggcaaggcttttggcatcataaagccacatgaccgagttgttgtctgccagaaagtagctgactcgtcagttgtgaagattcttgagctcgaagattga

SEQ ID NO: 1064 - protein, 526 aa, Glycine max; identical to SEQ ID NO: 62

SEQ ID NO: 1065 - DNA, 1581 bp, Glycine max
  CDS (1)..(1581)
atgcattccagccctttgcttcttgaggaacccattaggatggcatccatccttgagccatccaagcctactttttttccggctatgacgaaaattgttggcacacttggtccaaagtcacgatcagttgatataatttcccattgccttgatgcaggaatgtctgtggcaaggtttgacttttcatggggtgatccagaataccatcaagagacattggaaaatttgagagttgctatcaaaagtaccaagaaactctgtgcggttatgctagatactgtgggtccagaattacagattgagaataagactgatcacccaatcacccttgaagcagacacattagttgtcttaactccagatcaaaataaagaagctagttcaaatctcttaccattaaattttaccgggctatcaaaggctgtgaagaagggtgatactatttttattggaaaatacttgtttactggaagtgaaacagcttctgtatggctggaggtcagtgaggtggaaggtgaggatgtcacctgtctggtaaaaaacactgccacactctctggatcattgtttactgtacatgtctctcagattcacatcgatcttcctactcttgctgataaagataaggaggtaataagcacatggggtgttcaaaacaatattgacttcctttcattatatacccggcacgttgaagatattcgtcatgcacgtgaatttctctctaaattgggtgacctgaagcagacacatatttatgcaaagattgaaaatatagagggaatgaaacattttgatgaaatattgagagaagcagatggtatcatcctcgctcgtggaaatttagggatagaactcccacctgagaaggttttcttattccaaaaggctgctatttacaagtgtaacatggttggaaagccagttgttgttacacgtgttgtggactctatgactgataatctaagacctactcgtgctgaagcaacagatgttgccaatgcagtgttggatggaagtgacgcaattctccttggagcagagaccctgcggggacaataccctgtagagaccatttctatagttggaaaaatatgtgctgaggcagagaaagttcataatcaagatttgtattttaagaaggctgtaaaatatgtgggagagccaatgagccatttggaatcaattgcttcctctgcggttcgggcagctatcaaggttaaggcctctgttattatttgcttcacttcatctggaagagctgcaagattgattgctaagtacagaccaaccatgcctgtgatatctgttgtcattcctcaattgaagacaaatcaactccgatggacgttcaccggtgcttttgaggctaggcaatctcttattgtgagaggtctttttcctatgctggcagatccacgacacccagctgagtccagaagtggaacaaatgaatcaattttgaaggttgctttagaccatggcaaggcttttggcatcataaagccacatgaccgagttgttgtctgccagaaagtagctgactcgtcagttgtgaagattcttgagctcgaagattga

SEQ ID NO: 1066 - protein, 526 aa, Glycine max; identical to SEQ ID NO: 76

SEQ ID NO: 1067 - DNA, 1584 bp, Triticum aestivum
  CDS (1)..(1584)
atgcattccaccaatctgctcctcgaggagcccatccggatggtctccatcctcgagccatccaagccgaacttcttcccggcgatgacgaagattgtggggacgctgggtccgaagtcccggtccgttgaggccatctccgcctgtctaaaggccggcatgtctgtggcccgtttcgatttctcgtggggggatgccgcgtaccaccaggagacactcgagaacctcaagctcgccatcaaggccaccaagaagctatgtgctgttatgctcgacactgttggccctgagttgcaagtggtgaacaagagtgaagtcacaatctcgcttgaagagaacgagtctgttgttctcacccctcaccagggccaggaggcctcttccaagttgctccctatcaacttcgctggactcgccaaggctgtgaagcccggagccacaatattcgttgggcaatatttgttcacgggcagtgagactacatcagtttggctggaggtttctgaagttcaaggggatgacgtggtttgcgtgatcaagaactcagctaccctggctgggtcactcttcacattgcactgctcccagatccatatcgacatgcccacgctgtctgatgaggataaagatgttatgaaaaaatggggtgctccaaacaagattgacttcctctctctttcttatacaaggcatgcagaagatgtgcggcaagcacgggagttcctctctaagttaggtgatcttagccaaactctgatttttgccaaaattgagaatgtggagggcttgaaccattttgatgagatcctggaggaagcggatggtatcattctgtcaagagggaaccttggaattgatcttccacctgaaaaggtgttcttatttcagaagtctgctctgcacaagtgcaacatggctggaaagcctgctgttgttactcgtgttgtggacagtatgacggacaacctaaggcctactcgtgcggaggcaactgatgtggcaaatgcggtgctggacggtagtgatgccattctccttggtgctgagactctccgtgggttgtatccagtcgagactatttcaacagtgggcagaatttgtgctgaggctgagaaggtcttcaaccaagatttgtatttcaagcgaaccgtgaaatatgtgggagaacccatgacccacttggagtctattgcttcctctgcagtgcgggctgctattaaagttaaggcttcggtcatcatttgcttcacttcatctggacgggctgcaaggctaattgccaagtacaggcccaccatgcctgtcctgtccgttgtcattcctcgtctgaaaacaaatcaattgaagtggagcttcacaggtgcatttgaggcaagacaatcactcatagttagaggcctctttcccatgcttgctgatccacgtcatccggctgattctactagcactacaaatgaatcagtgttgaaggttgctcttgaccacggcaaagcatctggtgtgatcaagtcgcatgaccgtgtcgtcgtgtgccagaaagtgggagattcctctgtcgtgaagatcattgagctagacgactag

SEQ ID NO: 1068 - protein, 527 aa, Triticum aestivum; identical to SEQ ID NO: 80

SEQ ID NO: 1069 - DNA, 1584 bp, Brassica napus; identical to SEQ ID NO: 573
  CDS (1)..(1584)

SEQ ID NO: 1070 - protein, 527 aa, Brassica napus; identical to SEQ ID NO: 574

SEQ ID NO: 1071 - DNA, 1743 bp, Brassica napus; identical to SEQ ID NO: 575
  CDS (1)..(1743)

SEQ ID NO: 1072 - protein, 580 aa, Brassica napus; identical to SEQ ID NO: 576

SEQ ID NO: 1073 - DNA, 1743 bp, Brassica napus; identical to SEQ ID NO: 577
  CDS (1)..(1743)

SEQ ID NO: 1074 - protein, 580 aa, Brassica napus; identical to SEQ ID NO: 578

SEQ ID NO: 1075 - DNA, 1764 bp, Brassica napus; identical to SEQ ID NO: 579
  CDS (1)..(1764)

SEQ ID NO: 1076 - protein, 587 aa, Brassica napus; identical to SEQ ID NO: 580

SEQ ID NO: 1077 - DNA, 1533 bp, Brassica napus; identical to SEQ ID NO: 581
  CDS (1)..(1533)

SEQ ID NO: 1078 - protein, 510 aa, Brassica napus; identical to SEQ ID NO: 582

SEQ ID NO: 1079 - DNA, 1497 bp, Brassica napus; identical to SEQ ID NO: 583
  CDS (1)..(1497)

SEQ ID NO: 1080 - protein, 498 aa, Brassica napus; identical to SEQ ID NO: 584

SEQ ID NO: 1081 - DNA, 1584 bp, Brassica napus; identical to SEQ ID NO: 585
  CDS (1)..(1584)

SEQ ID NO: 1082 - protein, 527 aa, Brassica napus; identical to SEQ ID NO: 586

SEQ ID NO: 1083 - DNA, 1533 bp, Brassica napus; identical to SEQ ID NO: 587
  CDS (1)..(1533)

SEQ ID NO: 1084 - protein, 510 aa, Brassica napus; identical to SEQ ID NO: 588

SEQ ID NO: 1085 - DNA, 1584 bp, Brassica napus
  CDS (1)..(1584)
atgcattcgagtcatctccttctcgaggaaccgatcaggatggcatcaatcctcgagccatccaaatctagtttcttcccagcattgactaagatcgtcgggactctcggtcccaaatcccgatccgtcgagactctctccggttgcctcaaatccgggatgtccgtggctcgatttgatttctcttggggagatgctgagtatcaccaggagacgctggataatctgaaaattgctgtgaagagcactaagaagctttgtgctgttatgcttgatactgtgggacctgagctgcaagttatcaacaagtctgggaaagctattactcttaaagccgatggacttgttactttgacacccagtcaagatcgagaagcgtcttctgaagtccttccgattaactttaatgggcttgccaaggcagtgaagaaaggagacactatctttgttgggcaatacctattcactggtagtgaaacaacttcagtttggctcgaggttgatgaagttaaaggagatgatgtcatttgcctgtcaaggaatgctgctactcttgctggttctctcttcactctgcacgcctctcaagttcacatcgatctgccaactcttacggagaaagataaggaggttataagcacatggggagttcagaataaaatcgattttctctctttgtcttattgtcgtcatgcggaggatgttcgccagacccgcgaaatgcttaagaagttgggtgacctctctcaaacacaaatatttgccaagattgagaatgtagagggacttaaccactttgatgagattctacaagaagctgatggaattattctttctcgtgggaatttgggtattgatctacccccggaaaaggtgtttttgtttcaaaaggcggctctttacaagtgcaacatggctgggaaaccagccgttcttacccgtgtcgttgatagtatgactgacaacttgcgaccaactcgtgcagaggcaacagatgttgctaatgctgttctagatggaagtgatgcaattcttcttggtgctgagacccttcgcggtttataccctgttgagacaatatccactgtcggtaggatctgtgctgaggcagaaaaggttttcaatcaggacttgtacttcaagaagactgtcaagtatgtaggagaaccgatgtctcacttggaatccattgcttcttcagctgtacgggcagcaatcaaggttaaggcatctgtcattatatgcttcacctcttctggaagagcagcaaggttaattgccaaatacaggcccacaatgcccgttatttctgttgtcattccccgggttaagacaaatcagctgaaatggagctttagtggagcctttgaggcgaggcagtcacttattgtcagaggccttttccccatgctcgctgatcctcgtcacccagcggaatcaacaagtgcgacgaacgagtcagtcctcaaggttgcactagaccatggaaagcaagcaggagtgatcaaatcgcatgacagagtagtggtgtgtcagaaagttggtgatgcatctgtggtgaagatcatcgagctagaggattaa

SEQ ID NO: 1086 - protein, 527 aa, Brassica napus; identical to SEQ ID NO: 72

SEQ ID NO: 1087 - DNA, 1584 bp, Brassica napus; identical to SEQ ID NO: 589
  CDS (1)..(1584)

SEQ ID NO: 1088 - protein, 527 aa, Brassica napus; identical to SEQ ID NO: 590

SEQ ID NO: 1089 - DNA, 1497 bp, Brassica napus; identical to SEQ ID NO: 591
  CDS (1)..(1497)

SEQ ID NO: 1090 - protein, 498 aa, Brassica napus; identical to SEQ ID NO: 592

SEQ ID NO: 1091 - DNA, 1584 bp, Zea mays; identical to SEQ ID NO: 593
  CDS (1)..(1584)

SEQ ID NO: 1092 - protein, 527 aa, Zea mays; identical to SEQ ID NO: 594

SEQ ID NO: 1093 - DNA, 1728 bp, Glycine max; identical to SEQ ID NO: 595
  CDS (1)..(1728)

SEQ ID NO: 1094 - protein, 575 aa, Glycine max; identical to SEQ ID NO: 596

SEQ ID NO: 1095 - DNA, 1584 bp, Glycine max; identical to SEQ ID NO: 597
  CDS (1)..(1584)

SEQ ID NO: 1096 - protein, 527 aa, Glycine max; identical to SEQ ID NO: 598

SEQ ID NO: 1097 - DNA, 1584 bp, Glycine max; identical to SEQ ID NO: 599
  CDS (1)..(1584)

SEQ ID NO: 1098 - protein, 527 aa, Glycine max; identical to SEQ ID NO: 600

SEQ ID NO: 1099 - DNA, 1638 bp, Glycine max; identical to SEQ ID NO: 601
  CDS (1)..(1638)

SEQ ID NO: 1100 - protein, 545 aa, Glycine max; identical to SEQ ID NO: 602

SEQ ID NO: 1101 - DNA, 1638 bp, Glycine max; identical to SEQ ID NO: 603
  CDS (1)..(1638)

SEQ ID NO: 1102 - protein, 545 aa, Glycine max; identical to SEQ ID NO: 604

SEQ ID NO: 1103 - DNA, 1728 bp, Glycine max; identical to SEQ ID NO: 605
  CDS (1)..(1728)

SEQ ID NO: 1104 - protein, 575 aa, Glycine max; identical to SEQ ID NO: 606

SEQ ID NO: 1105 - DNA, 1749 bp, Glycine max; identical to SEQ ID NO: 607
  CDS (1)..(1749)

SEQ ID NO: 1106 - protein, 582 aa, Glycine max; identical to SEQ ID NO: 608

SEQ ID NO: 1107 - DNA, 1584 bp, Glycine max; identical to SEQ ID NO: 609
  CDS (1)..(1584)

SEQ ID NO: 1108 - protein, 527 aa, Glycine max; identical to SEQ ID NO: 610

SEQ ID NO: 1109 - DNA, 1749 bp, Glycine max; identical to SEQ ID NO: 611
  CDS (1)..(1749)

SEQ ID NO: 1110 - protein, 582 aa, Glycine max; identical to SEQ ID NO: 612

SEQ ID NO: 1111 - DNA, 1728 bp, Glycine max; identical to SEQ ID NO: 613
  CDS (1)..(1728)

SEQ ID NO: 1112 - protein, 575 aa, Glycine max; identical to SEQ ID NO: 614

SEQ ID NO: 1113 - DNA, 1749 bp, Glycine max; identical to SEQ ID NO: 615
  CDS (1)..(1749)

SEQ ID NO: 1114 - protein, 582 aa, Glycine max; identical to SEQ ID NO: 616

SEQ ID NO: 1115 - DNA, 1542 bp, Hordeum vulgare; identical to SEQ ID NO: 617
  CDS (1)..(1542)

SEQ ID NO: 1116 - protein, 513 aa, Hordeum vulgare; identical to SEQ ID NO: 618

SEQ ID NO: 1117 - DNA, 1584 bp, Oryza sativa; identical to SEQ ID NO: 619
  CDS (1)..(1584)

SEQ ID NO: 1118 - protein, 527 aa, Oryza sativa; identical to SEQ ID NO: 620

SEQ ID NO: 1119 - DNA, 1803 bp, Zea mays; identical to SEQ ID NO: 621
  CDS (1)..(1803)

SEQ ID NO: 1120 - protein, 600 aa, Zea mays; identical to SEQ ID NO: 622

SEQ ID NO: 1121 - DNA, 1698 bp, Triticum aestivum; identical to SEQ ID NO: 623
  CDS (1)..(1698)

SEQ ID NO: 1122 - protein, 565 aa, Triticum aestivum; identical to SEQ ID NO: 624

SEQ ID NO: 1123 - DNA, 1584 bp, Zea mays; identical to SEQ ID NO: 625
  CDS (1)..(1584)

SEQ ID NO: 1124 - protein, 527 aa, Zea mays; identical to SEQ ID NO: 626

SEQ ID NO: 1125 - DNA, 1728 bp, Zea mays; identical to SEQ ID NO: 627
  CDS (1)..(1728)

SEQ ID NO: 1126 - protein, 575 aa, Zea mays; identical to SEQ ID NO: 628

SEQ ID NO: 1127 - DNA, 1707 bp, Zea mays; identical to SEQ ID NO: 629
  CDS (1)..(1707)

SEQ ID NO: 1128 - protein, 568 aa, Zea mays; identical to SEQ ID NO: 630

SEQ ID NO: 1129 - DNA, 1629 bp, Zea mays; identical to SEQ ID NO: 631
  CDS (1)..(1629)

SEQ ID NO: 1130 - protein, 542 aa, Zea mays; identical to SEQ ID NO: 632

SEQ ID NO: 1131 - DNA, 1548 bp, Zea mays; identical to SEQ ID NO: 633
  CDS (1)..(1548)

SEQ ID NO: 1132 - protein, 515 aa, Zea mays; identical to SEQ ID NO: 634

SEQ ID NO: 1133 - DNA, 1542 bp, Zea mays; identical to SEQ ID NO: 635
  CDS (1)..(1542)

SEQ ID NO: 1134 - protein, 513 aa, Zea mays; identical to SEQ ID NO: 636

SEQ ID NO: 1135 - DNA, 1530 bp, Zea mays; identical to SEQ ID NO: 637
  CDS (1)..(1530)

SEQ ID NO: 1136 - protein, 509 aa, Zea mays; identical to SEQ ID NO: 638

SEQ ID NO: 1137 - DNA, 1707 bp, Zea mays; identical to SEQ ID NO: 639
  CDS (1)..(1707)

SEQ ID NO: 1138 - protein, 568 aa, Zea mays; identical to SEQ ID NO: 640

SEQ ID NO: 1139 - DNA, 1584 bp, Zea mays; identical to SEQ ID NO: 641
  CDS (1)..(1584)

SEQ ID NO: 1140 - protein, 527 aa, Zea mays; identical to SEQ ID NO: 642

SEQ ID NO: 1141 - DNA, 1554 bp, Zea mays; identical to SEQ ID NO: 643
  CDS (1)..(1554)

SEQ ID NO: 1142 - protein, 517 aa, Zea mays; identical to SEQ ID NO: 644

SEQ ID NO: 1143 - DNA, 1707 bp, Zea mays; identical to SEQ ID NO: 645
  CDS (1)..(1707)

SEQ ID NO: 1144 - protein, 568 aa, Zea mays; identical to SEQ ID NO: 646

SEQ ID NO: 1145 - DNA, 1728 bp, Zea mays; identical to SEQ ID NO: 647
  CDS (1)..(1728)

SEQ ID NO: 1146 - protein, 575 aa, Zea mays; identical to SEQ ID NO: 648

SEQ ID NO: 1147 - DNA, 20 bp, Artificial sequence
  primer
atggagaagttacttgctgg

SEQ ID NO: 1148 - DNA, 22 bp, Artificial sequence
  primer
ctactccacgttcaaaatcttg

SEQ ID NO: 1149 - protein, 433 aa, Artificial sequence
  consensus sequence
  Variant (2)..(2): Xaa in position 2 is any amino acid
  Variant (4)..(5): Xaa in position 4 to 5 is any amino acid
  Variant (7)..(7): Xaa in position 7 is any amino acid
  Variant (10)..(21): Xaa in position 10 to 21 is any amino acid
  Variant (22)..(23): Xaa in position 22 to 23 is any or no amino acid
  Variant (26)..(26): Xaa in position 26 is any amino acid
  Variant (28)..(28): Xaa in position 28 is any amino acid
  Variant (30)..(30): Xaa in position 30 is any amino acid
  Variant (32)..(32): Xaa in position 32 is any amino acid
  Variant (36)..(39): Xaa in position 36 to 39 is any amino acid
  Variant (41)..(57): Xaa in position 41 to 57 is any amino acid
  Variant (58)..(64): Xaa in position 58 to 64 is any or no amino acid
  Variant (66)..(67): Xaa in position 66 to 67 is any amino acid
  Variant (71)..(71): Xaa in position 71 is any amino acid
  Variant (75)..(88): Xaa in position 75 to 88 is any amino acid
  Variant (89)..(92): Xaa in position 89 to 92 is any or no amino acid
  Variant (94)..(109): Xaa in position 94 to 109 is any amino acid
  Variant (110)..(116): Xaa in position 110 to 116 is any or no amino acid
  Variant (118)..(126): Xaa in position 118 to 126 is any amino acid
  Variant (128)..(134): Xaa in position 128 to 134 is any amino acid
  Variant (135)..(139): Xaa in position 135 to 139 is any or no amino acid
  Variant (141)..(145): Xaa in position 141 to 145 is any amino acid
  Variant (147)..(169): Xaa in position 147 to 169 is any amino acid
  Variant (170)..(185): Xaa in position 170 to 185 is any or no amino acid
  Variant (188)..(191): Xaa in position 188 to 191 is any amino acid
  Variant (194)..(195): Xaa in position 194 to 195 is any amino acid
  Variant (197)..(205): Xaa in position 197 to 205 is any amino acid
  Variant (206)..(206): Xaa in position 206 is any or no amino acid
  Variant (208)..(211): Xaa in position 208 to 211 is any amino acid
  Variant (214)..(226): Xaa in position 214 to 226 is any amino acid
  Variant (228)..(234): Xaa in position 228 to 234 is any amino acid
  Variant (235)..(242): Xaa in position 235 to 242 is any or no amino acid
  Variant (244)..(244): Xaa in position 244 is any amino acid
  Variant (246)..(255): Xaa in position 246 to 255 is any amino acid
  Variant (256)..(258): Xaa in position 256 to 258 is any or no amino acid
  Variant (260)..(263): Xaa in position 260 to 263 is any amino acid
  Variant (265)..(266): Xaa in position 265 to 266 is any amino acid
  Variant (268)..(268): Xaa in position 268 is any amino acid
  Variant (275)..(275): Xaa in position 275 is any amino acid
  Variant (277)..(277): Xaa in position 277 is any amino acid
  Variant (279)..(279): Xaa in position 279 is any amino acid
  Variant (281)..(285): Xaa in position 281 to 285 is any amino acid
  Variant (288)..(292): Xaa in position 288 to 292 is any amino acid
  Variant (294)..(297): Xaa in position 294 to 297 is any amino acid
  Variant (301)..(301): Xaa in position 301 is any amino acid
  Variant (302)..(302): Xaa in position 302 is any or no amino acid
  Variant (305)..(306): Xaa in position 305 to 306 is any amino acid
  Variant (308)..(308): Xaa in position 308 is any amino acid
  Variant (311)..(313): Xaa in position 311 to 313 is any amino acid
  Variant (315)..(315): Xaa in position 315 is any amino acid
  Variant (321)..(322): Xaa in position 321 to 322 is any amino acid
  Variant (328)..(329): Xaa in position 328 to 329 is any amino acid
  Variant (332)..(332): Xaa in position 332 is any amino acid
  Variant (334)..(335): Xaa in position 334 to 335 is any amino acid
  Variant (339)..(339): Xaa in position 339 is any amino acid
  Variant (341)..(341): Xaa in position 341 is any amino acid
  Variant (343)..(343): Xaa in position 343 is any amino acid
  Variant (345)..(345): Xaa in position 345 is any amino acid
  Variant (348)..(348): Xaa in position 348 is any amino acid
  Variant (349)..(361): Xaa in position 349 to 361 is any or no amino acid
  Variant (363)..(371): Xaa in position 363 to 371 is any amino acid
  Variant (372)..(398): Xaa in position 372 to 398 is any or no amino acid
  Variant (400)..(409): Xaa in position 400 to 409 is any amino acid
  Variant (410)..(410): Xaa in position 410 is any or no amino acid
  Variant (412)..(414): Xaa in position 412 to 414 is any amino acid
  Variant (416)..(417): Xaa in position 416 to 417 is any amino acid
  Variant (419)..(420): Xaa in position 419 to 420 is any amino acid
  Variant (422)..(426): Xaa in position 422 to 426 is any amino acid
  Variant (430)..(432): Xaa in position 430 to 432 is any amino acid
TXIXXTXGPXXXXXXXXXXXXXXGMXVXRXNXSHGXXXXHXXXXXXXXXXXXXXXXXXXXXXXXAXXLDTXGPEXXXXXXXXXXXXXXXXXXGXXXXXXXXXXXXXXXXXXXXXXXYXXXXXXXXXGXXXXXXXXXXXXGXXXXXVXXXXXXXXXXXXXXXXXXXXXXXXXXXXXXXXXXXXXXXLPXXXXKDXXDXXXXXXXXXXDXXXXSFXXXXXXXXXXXXXLXXXXXXXXXXXXXXXKXEXXXXXXXXXXXXXIXXXXDXXMXARGDLGXEXPXEXXXXXQKXXXXXCXXXXKPVXXATXXLXSMXXXPXPTRAEXXDVANAXXDGXDXXMLSXEXAXGXYPXXXXXXXXXXXXXXEXXXXXXXXXXXXXXXXXXXXXXXXXXXXXXXXXXXXAXXXXXXXXXXXIXXXTXXGXXAXXXXXYRPXXXI

SEQ ID NO: 1150 - protein, 47 aa, Artificial sequence
  protein pattern
  Variant (2)..(12): Xaa in position 2 to 12 is any amino acid
  Variant (18)..(18): Xaa in position 18 is Ala, Ile or Val
  Variant (19)..(19): Xaa in position 19 is Gly, Asn, Ser or Thr
  Variant (21)..(21): Xaa in position 21 is Ile or Val
  Variant (22)..(22): Xaa in position 22 is Ala, Gly or Ser
  Variant (23)..(23): Xaa in position 23 is any amino acid
  Variant (25)..(25): Xaa in position 25 is Ile or Val
  Variant (26)..(26): Xaa in position 26 is any amino acid
  Variant (27)..(27): Xaa in position 27 is Asp, Glu or Gln
  Variant (29)..(29): Xaa in position 29 is Ala, Ser or Thr
  Variant (31)..(32): Xaa in position 31 to 32 is any amino acid
  Variant (33)..(33): Xaa in position 33 is Leu, Met or Val
  Variant (35)..(35): Xaa in position 35 is Gly or Ser
  Variant (36)..(36): Xaa in position 36 is Ala or Gly
  Variant (38)..(38): Xaa in position 38 is Ser or Thr
  Variant (39)..(40): Xaa in position 39 to 40 is any amino acid
  Variant (42)..(43): Xaa in position 42 to 43 is any amino acid
  Variant (45)..(46): Xaa in position 45 to 46 is any amino acid
  Variant (47)..(47): Xaa in position 47 is Ala, Cys, Ser, Thr or Val
TXXXXXXXXXXXPTRAEXXDXXXAXXXGXDXXXLXXEXXXGXXPXXX

SEQ ID NO: 1151 - protein, 55 aa, Artificial sequence
  protein pattern
  Variant (2)..(11): Xaa in position 2 to 11 is any amino acid
  Variant (13)..(13): Xaa in position 13 is Ala, Ile, Leu or Val
  Variant (14)..(16): Xaa in position 14 to 16 is any amino acid
  Variant (18)..(18): Xaa in position 18 is Ala, Gly, Ser or Val
  Variant (19)..(19): Xaa in position 19 is any amino acid
  Variant (21)..(21): Xaa in position 21 is any amino acid
  Variant (26)..(26): Xaa in position 26 is Leu or Met
  Variant (28)..(28): Xaa in position 28 is any amino acid
  Variant (29)..(29): Xaa in position 29 is Glu or Gln
  Variant (30)..(30): Xaa in position 30 is Ile, Leu, Met or Val
  Variant (31)..(34): Xaa in position 31 to 34 is any amino acid
  Variant (35)..(35): Xaa in position 35 is Ile, Leu, Met or Val
  Variant (36)..(38): Xaa in position 36 to 38 is any amino acid
  Variant (40)..(45): Xaa in position 40 to 45 is any amino acid
  Variant (46)..(46): Xaa in position 46 is Ala, Cys, Ser or Val
  Variant (47)..(50): Xaa in position 47 to 50 is any amino acid
  Variant (51)..(51): Xaa in position 51 is Lys or Arg
  Variant (52)..(52): Xaa in position 52 is any amino acid
  Variant (53)..(53): Xaa in position 53 is Ile or Val
  Variant (54)..(54): Xaa in position 54 is Ala, Ile or Val
  Variant (55)..(55): Xaa in position 55 is Cys, Thr or Val
EXXXXXXXXXXIXXXXDXXMXARGDXGXXXXXXXXXXXQXXXXXXXXXXXXXXXX

SEQ ID NO: 1152 - protein, 17 aa, Artificial sequence
  protein pattern
  Variant (2)..(2): Xaa in position 2 is any amino acid
  Variant (3)..(3): Xaa in position 3 is Cys, Asp, Asn or Ser
  Variant (4)..(4): Xaa in position 4 is Ala, Ile or Val
  Variant (5)..(5): Xaa in position 5 is any amino acid
  Variant (7)..(7): Xaa in position 7 is any amino acid
  Variant (9)..(9): Xaa in position 9 is Phe or Met
  Variant (10)..(10): Xaa in position 10 is Ala, Cys or Ser
  Variant (13)..(13): Xaa in position 13 is Asp, Glu, Asn, Ser or Thr
  Variant (14)..(16): Xaa in position 14 to 16 is any amino acid
GXXXXRXNXXHGXXXXH

SEQ ID NO: 1153 - protein, 10 aa, Artificial sequence
  protein pattern
  Variant (2)..(2): Xaa in position 2 is any or no amino acid
  Variant (5)..(5): Xaa in position 5 is any amino acid
  Variant (9)..(9): Xaa in position 9 is Ile, Leu or Val
  Variant (10)..(10): Xaa in position 10 is Gln or Arg
LXDTXGPEXX

SEQ ID NO: 1154 - protein, 11 aa, Artificial sequence
  protein pattern
  Variant (2)..(2): Xaa in position 2 is any amino acid
  Variant (3)..(3): Xaa in position 3 is Ile or Leu
  Variant (4)..(4): Xaa in position 4 is Ile or Val
  Variant (5)..(5): Xaa in position 5 is Ala, Cys or Gly
  Variant (7)..(7): Xaa in position 7 is Ile, Leu or Val
  Variant (10)..(10): Xaa in position 10 is any amino acid
  Variant (11)..(11): Xaa in position 11 is Cys, Ser or Thr
TXXXXTXGPXX

SEQ ID NO: 1155 - protein, 12 aa, Artificial sequence
  protein pattern
  Variant (3)..(3): Xaa in position 3 is Ala, Gly, Ser or Thr
  Variant (4)..(4): Xaa in position 4 is Ile, Leu, Met or Val
  Variant (5)..(5): Xaa in position 5 is Ala, Ser or Thr
  Variant (6)..(6): Xaa in position 6 is any amino acid
  Variant (9)..(10): Xaa in position 9 to 10 is any amino acid
  Variant (11)..(11): Xaa in position 11 is Asp or Val
  Variant (12)..(12): Xaa in position 12 is Ile or Leu
LPXXXXKDXXXX

SEQ ID NO: 1156 - DNA, 423 bp, Arabidopsis thaliana
  CDS (1)..(423)
atgggtagctgcgtctctaagggtaaaggagacgatgattccgtccataacgtcgagttttccggtggcaatgttcatctgattacaacaaaagagagttgggatgacaaattagctgaagctgatcgtgatggcaaaatcgtggttgcaaacttcagtgcgacatggtgtggtccgtgtaaaattgtggcaccatttttcatcgagctctcagagaaacattcttctcttatgttccttcttgtagatgttgatgaactcagcgattttagctcatcatgggacattaaggcgacaccaaccttcttcttcctaaagaatggacaacaaataggcaagcttgttggagcaaacaaaccggagctacagaagaaggttacttctatcattgattctgtgcctgaaagtcctcaacggccttga

SEQ ID NO: 1157 - protein, 140 aa, Arabidopsis thaliana
MGSCVSKGKGDDDSVHNVEFSGGNVHLITTKESWDDKLAEADRDGKIVVANFSATWCGPCKIVAPFFIELSEKHSSLMFLLVDVDELSDFSSSWDIKATPTFFFLKNGQQIGKLVGANKPELQKKVTSIIDSVPESPQRP

SEQ ID NO: 1158 - DNA, 414 bp, Glycine max
  CDS (1)..(414)
atggggaattgtttgcgcaaggctcatgcggatgatgattctgatcatattgtggagcttgcttctgggaatgtgcaacttattactaccaaagaatcttgggaccaaaagttggatcaagcgaggaaggagagtaaaattgtaattgcaaatttcagtgcaacatggtgtggtccttgtaaggtgattgcaccacattattgcgagttgtccgtgaaatacccgtctatcatcttcttattagtcgatgtggatgaactagctgacttcagcacttcgtgggacatcaaagccacaccaactttcttctttcttaaagatggaaaagaagttgacaaacttgtaggagccaacaagccagagctggagaagaagattgttgtggttaatgatgtagtgcctcataagcaatag

SEQ ID NO: 1159 - protein, 137 aa, Glycine max
MGNCLRKAHADDDSDHIVELASGNVQLITTKESWDQKLDQARKESKIVIANFSATWCGPCKVIAPHYCELSVKYPSIIFLLVDVDELADFSTSWDIKATPTFFFLKDGKEVDKLVGANKPELEKKIVVVNDVVPHKQ

SEQ ID NO: 1160 - DNA, 744 bp, Glycine max
  CDS (194)..(613)
ccacgaaaccgcgatagctctttccttatcttctccgaatccgaggagtggtagtaatttgtggtttttcacaatcactacctcgtttcatcttaattctgttaattgggtactaattaagctatctcaaacctcaatttttttgaggcttccattcattaaagtataaagtttgtggctttcaaacaattatatggggagttgtgtgtctaagaataaagctagggataatgattctgatcataatgtggattttgctgctgggaatgtgaaacttattaccaccaaagaagcgtgggaccaatatttggaagaagcaaggagggatggcaaaattgtgattgcaaatttcagtgcagcatggtgtggtccttgtaagatgattgcaccatattactgtgagttatctgagaaatacacttctatgatgttcttggtagttgatgtggatgaactaactgactttagcacttcatgggacatcaaagccacaccaactttcttctttcttaaagatggacaacaacttgacaaacttgtaggagccaacaagccagaactgcagaagaagattgttgccattaatgattcgcttcccgaatataagcagtgactgttttcttattcatgttgctgtgccctttgtcctttcacaagtcataactagtgttctacatttttttttcccgtgagtgtcgttgtattcttcctcggatgtaaatataagacatggcacatgaattt

SEQ ID NO: 1161 - protein, 139 aa, Glycine max
MGSCVSKNKARDNDSDHNVDFAAGNVKLITTKEAWDQYLEEARRDGKIVIANFSAAWCGPCKMIAPYYCELSEKYTSMMFLVVDVDELTDFSTSWDIKATPTFFFLKDGQQLDKLVGANKPELQKKIVAINDSLPEYKQ

SEQ ID NO: 1162 - DNA, 414 bp, Glycine max
  CDS (1)..(414)
atggggaattgtttgcgtaaggctcaagcggatgatgattctgatcataatgtggagtttgcttctgggaatgtgcaagttattactaccaaagaatcttgggaccaaaagttggaacaagcgaggagggacagtaaaattgttattgcaaatttcagtgccacatggtgtggtccttgtaagatgattgcaccatattattgcgagttgtccgagaaatacccatctatcatgttcttattagtcgatgtggatgaactagctgacttcagcactttatgggacatcaaagccacaccaactttcttctttcttaaagatggaaaagaggttgacaaacttgtaggagccaacaagccagagctggagaagaagattgttgtgattaatgatgcagtgcctcataagcaatag

SEQ ID NO: 1163 - protein, 137 aa, Glycine max
MGNCLRKAQADDDSDHNVEFASGNVQVITTKESWDQKLEQARRDSKIVIANFSATWCGPCKMIAPYYCELSEKYPSIMFLLVDVDELADFSTLWDIKATPTFFFLKDGKEVDKLVGANKPELEKKIVVINDAVPHKQ

SEQ ID NO: 1164 - DNA, 851 bp, Sorghum bicolor
  CDS (203)..(655)
gcacgagggcgggctctgctcgctgatccgatgattcatgataacttgacggatcgcacggccctcgtgcgtccgccacaaccccggcggcgcacggctccccgtctcccctccactctctccacccactccttccctttggcgccaagtccacccgcccctccgattccggccgtcgtccaggtgccgacagttgagcaggatgggactgaagcgcctgatgacatgctgctgctgcattgcaaagcagcacgctgatgacgaggacaagattgattttggaggtggcaatgttcatgttgttacaagcaaagaggactgggaccaaaaaattgccgaggcaaacaaggatgggaaaattgtggttgcaaacttcagtgcttcctggtgcggcccatgccgtgtcatttcacctgtttatgctgaaatgtcacagacataccctcagctcatgttcttgacgattgatgttgatgagttaatggagttcagctcgtcgtgggacatccgtgcgaccccgacgttcttcttcctcaagaacgggcagcaggtggacaagctggtcggcgccaacaagcctgagctggagaagaaagtcgccgccatcgctggggcgtcgtcacaggctgacgctgccagcagcaagacagtgtagtgtagtgtagtgtagtgtaggcaaggacccgccctgttgaccttgccccctgtatatggctgttccgatcctgtgtgtttcttgacagttgtcaccgcgcgcattgcgtctgccggcggcggttctgtctgtctctgtgtgatgtctcttcgtgccatgtgctgactgctgattgtacagttctccggtaatggta

SEQ ID NO: 1165 - protein, 150 aa, Sorghum bicolor
MGLKRLMTCCCCIAKQHADDEDKIDFGGGNVHVVTSKEDWDQKIAEANKDGKIVVANFSASWCGPCRVISPVYAEMSQTYPQLMFLTIDVDELMEFSSSWDIRATPTFFFLKNGQQVDKLVGANKPELEKKVAAIAGASSQADAASSKTV

SEQ ID NO: 1166 - DNA, 414 bp, Zea mays
  CDS (1)..(414)
ttggagtgcgcaatgggaggctgtgcgggaaaggtacgtcgtgatgacgaagaaaagcttgattttaaaggtggaaatgttcatattataacaagcaatgagggctgggaccagaagattgcagaagcaaacagagatgggaaaactgttgttgcaaatttcagcgcttcctggtgtgggccatgccgtgtcattgctcctgtctatgctgaaatgtcaaagacttatcctcaactcatgttcttgacaatagacgttgatgacctgatggacttcagctcttcatgggacatccgtgcaaccccgacattcttcttcctcaagaacgggcagcagatcgacaagctcgtgggcgcgaacaaacctgagctcgagaagaaagtgctagcagccgctgatgccagtacgtcctag

SEQ ID NO: 1167 - protein, 137 aa, Zea mays
LECAMGGCAGKVRRDDEEKLDFKGGNVHIITSNEGWDQKIAEANRDGKTVVANFSASWCGPCRVIAPVYAEMSKTYPQLMFLTIDVDDLMDFSSSWDIRATPTFFFLKNGQQIDKLVGANKPELEKKVLAAADASTS

SEQ ID NO: 1168 - DNA, 402 bp, Oryza sativa (japonica cultivar-group)
  CDS (1)..(402)
atggagatccagcagcagaagggggttggcaattccaaagttgtgaaggttgagaaggaggagtcatgggatctgttcgtcaatcaagcaagcaacgaaggccaccctgttgttgcccactttggggcttcatggtgtgtgacttcgctgtccatgaactacaagtttgaggagctagctcagacacaccctgagatactgttcctctatgtggatgttgatgatgtccagagtgtttcgtccaagcttggagtgaaggccatgccgacattttttctcatcaaggacaaggaggtggtgaacaagattgttggtgccaacccagatgaggtcaagaagatggtggacgcttctgctgagtcctttggagttactgctcctcctgatatagtggtggaatag

SEQ ID NO: 1169 - protein, 133 aa, Oryza sativa (japonica cultivar-group)
MEIQQQKGVGNSKVVKVEKEESWDLFVNQASNEGHPVVAHFGASWCVTSLSMNYKFEELAQTHPEILFLYVDVDDVQSVSSKLGVKAMPTFFLIKDKEVVNKIVGANPDEVKKMVDASAESFGVTAPPDIVVE

SEQ ID NO: 1170 - DNA, 366 bp, Oryza sativa (japonica cultivar-group)
  CDS (1)..(366)
atggcggcggcctcagcggcggcgcaggcggagggaacggtgatcgcgatccacagcctcgacgagtggaccatccagatcgaggaggccaacagcgccaagaagctggttgtgattgacttcactgcatcatggtgcggaccatgccgcatcattgctccagtttttgccgatctagcaaagaagcacacaaatgctgtttttctgaaggttgacgtcgatgaactgaagcctattgctgagcaattcagtgttgaggctatgccaacattcctgtttatgaaggagggagatgttaaagacagggttgtcggtgctatgaaggatgaactggcgagcaagcttgagctacatatggccatgtag

SEQ ID NO: 1171 - protein, 121 aa, Oryza sativa (japonica cultivar-group)
MAAASAAAQAEGTVIAIHSLDEWTIQIEEANSAKKLVVIDFTASWCGPCRIIAPVFADLAKKHTNAVFLKVDVDELKPIAEQFSVEAMPTFLFMKEGDVKDRVVGAMKDELASKLELHMAM

SEQ ID NO: 1172 - DNA, 321 bp, Bombyx mori
  CDS (1)..(321)
atgtccattcacatcaaggattccgacgacctgaagacaaggctggcggaggccggcgacaagctcgtcgtgatcgacttcatggcgacctggtgcggaccgtgcaagatgatcgggcctaaactggacgagatcgccgccgaaatgtcagattccatcgtcgttgtgaaggtggacgttgatgagtgcgaggacatcgccagcgagtacaacatcaactcgatgccgacgttcgtcttcgttaagaatggcaagaaactggacgaattctctggcgctaacgtcgacaaactcaaaacaactatccttaaacacaagtaa

SEQ ID NO: 1173 - protein, 106 aa, Bombyx mori
MSIHIKDSDDLKTRLAEAGDKLVVIDFMATWCGPCKMIGPKLDEIAAEMSDSIVVVKVDVDECEDIASEYNINSMPTFVFVKNGKKLDEFSGANVDKLKTTILKHK

SEQ ID NO: 1174 - DNA, 390 bp, Arabidopsis thaliana
  CDS (1)..(390)
atgggttccaatgtttcatctgtgcatgatgttcattcatcaatggaaattaccagtaatggatttgttgtggaaatcgaatcaagaagacaatggaaatctctctttgattccatgaaaggctcaaacaaattgctagtaattgatttcacagctgtatggtgtggaccttgtaaagcaatggaacctagagttagggagattgcttcaaagtactcagaagctgtgtttgctagggttgatgtggataggctaatggatgtggctgggacatatagagctattacacttccagcttttgtttttgtgaagagaggagaagagattgatagggttgttggagccaaacctgatgagctcgtgaagaagattgaacaacatagggtttaa

SEQ ID NO: 1175 - protein, 129 aa, Arabidopsis thaliana
MGSNVSSVHDVHSSMEITSNGFVVEIESRRQWKSLFDSMKGSNKLLVIDFTAVWCGPCKAMEPRVREIASKYSEAVFARVDVDRLMDVAGTYRAITLPAFVFVKRGEEIDRVVGAKPDELVKKIEQHRV

SEQ ID NO: 1176 - DNA, 465 bp, Arabidopsis thaliana
  CDS (1)..(465)
atggggaatcattgtacaagaattccttgttgtaaaaaggtgtgttcatgtatctgctgttgcaacagaaggaacaagactcaagctaggagccagaaagggtcctactttataaaagggaaggtccatccggtaagtagaatggagaagtgggaggagaagatcacagaagctaatagtcatggcaaaattcttgtagtgaatttcaaggcttcgtggtgtttacctagtaaaacaatattaccaatataccaggagcttgcatccacatacacctcaatgatatttgtcactatagacgtcgaagagctcgctgagtttagtcatgaatggaacgtggatgcaactccaacagtagtgttccttaaagatgggaggcaaatggataaacttgtaggtggagatgctgcagagcttcagaagaaaactgcagcagctgcaaatctccttcttagacaatcttaa

SEQ ID NO: 1177 - protein, 154 aa, Arabidopsis thaliana
MGNHCTRIPCCKKVCSCICCCNRRNKTQARSQKGSYFIKGKVHPVSRMEKWEEKITEANSHGKILVVNFKASWCLPSKTILPIYQELASTYTSMIFVTIDVEELAEFSHEWNVDATPTVVFLKDGRQMDKLVGGDAAELQKKTAAAANLLLRQS

SEQ ID NO: 1178 - DNA, 381 bp, Arabidopsis thaliana
  CDS (1)..(381)
atgagaaagcaagaatcagagggagcgaatcttgaattcgaatccaaatcaaatgacaatggaaatgtgaaaatcgcaccaaacgaccaaagtttcctcacaattcttgacgacataaagtcttccaaatctccggctgttattaactatggagcttcttggtgtggagtttgtagccagattcttcctgcattccgaaagctcagcaacagtttctcgaagctcaagtttgtttatgcagatatcgacgagtgccctgaaaccactcgtcacatccgttacacacccacgtttcagttttacagagacggcgagaaagtcgatgagatgtttggagctggtgaacagaggctccatgatcgtctttggcttcactcttga

SEQ ID NO: 1179 - protein, 126 aa, Arabidopsis thaliana
MRKQESEGANLEFESKSNDNGNVKIAPNDQSFLTILDDIKSSKSPAVINYGASWCGVCSQILPAFRKLSNSFSKLKFVYADIDECPETTRHIRYTPTFQFYRDGEKVDEMFGAGEQRLHDRLWLHS

SEQ ID NO: 1180 - DNA, 321 bp, Drosophila melanogaster
  CDS (1)..(321)
atggtgtaccaggtgaaagataaggccgatctcgatggacagctgaccaaggcatccggcaagctggtggtgctggatttcttcgccacttggtgcggaccctgcaagatgatctcgcccaaactggttgagctttccacgcagttcgccgacaacgtcgtcgtcctgaaggtcgatgtggacgaatgcgaagacattgcaatggaatacaacatctccagcatgcccaccttcgtgttcctcaagaacggcgtcaaggtcgaagagttcgccggagccaacgccaagcgtctggaggatgtcatcaaggccaatatctaa

SEQ ID NO: 1181 - protein, 106 aa, Drosophila melanogaster
MVYQVKDKADLDGQLTKASGKLVVLDFFATWCGPCKMISPKLVELSTQFADNVVVLKVDVDECEDIAMEYNISSMPTFVFLKNGVKVEEFAGANAKRLEDVIKANI

SEQ ID NO: 1182 - DNA, 315 bp, Bacteroides thetaiotaomicron VPI-5482
  CDS (1)..(315): transl_table=11
atggctttagaaattacagacagcaactataaggaaatccttgcagaaggaaagcctgttgtggtggatttttgggctccctggtgtggcccttgtaaaatggtggctcctattattgaagaattggccgcggagtttgaaggacaagtcatcatcggtaaatgcgatgtggatgataacagcgatgtggctgccgaatacggtatccgcaacattcctactgttttgttcttcaagaatggtgagattgtagacaagcaggtaggcgcagtcgccaaaccggtattcgtggaaaaagtgaagaaccttctctag

SEQ ID NO: 1183 - protein, 104 aa, Bacteroides thetaiotaomicron VPI-5482
MALEITDSNYKEILAEGKPVVVDFWAPWCGPCKMVAPIIEELAAEFEGQVIIGKCDVDDNSDVAAEYGIRNIPTVLFFKNGEIVDKQVGAVAKPVFVEKVKNLL

SEQ ID NO: 1184 - DNA, 315 bp, Porphyromonas gingivalis W83
  CDS (1)..(315): transl_table=11
atggcactgcaaattacagatgcaacatttgacggcttggtagctgaaggcaagccgatggtagtggatttctgggctacatggtgcggtccttgccgcatggtaggtccgatcatcgacgagctggctgcggaatatgaaggacgcgctatcataggaaaagtggatgtggatgcaaatacggaattgcccatgaagtatggcgtgcgtaatatccccaccattttgttcatcaagaacggcgaagtggtaaagaagctcgtgggtgctcagtccaaagacgtattcaagaaagaattggatgccttgttttaa

SEQ ID NO: 1185 - protein, 104 aa, Porphyromonas gingivalis W83
MALQITDATFDGLVAEGKPMVVDFWATWCGPCRMVGPIIDELAAEYEGRAIIGKVDVDANTELPMKYGVRNIPTILFIKNGEVVKKLVGAQSKDVFKKELDALF

SEQ ID NO: 1186 - DNA, 309 bp, Mycoplasma mycoides subsp. mycoides SC str. PG1
  CDS (1)..(309): transl_table=4
atggcagatataattaaaatcacttcaaaagaacaatttgacaaggaaattaaagagggaaaagtacttgtagattttaatgctacttgatgtggaccttgcaaaatgttagcaccaattcttcatgactttgctaaaaaagttgatggtgttaaattcttagatgtagatgttgatttaaatcgtcaagttgctgaaaaatttagaataatgtcaattcctacactaataacttttgaaaatgggaatcaagtaaataaacatataggatttgctactcctgaccaattaaaaaagctaattgattaa

SEQ ID NO: 1187 - protein, 102 aa, Mycoplasma mycoides subsp. mycoides SC str. PG1
MADIIKITSKEQFDKEIKEGKVLVDFNATWCGPCKMLAPILHDFAKKVDGVKFLDVDVDLNRQVAEKFRIMSIPTLITFENGNQVNKHIGFATPDQLKKLID

SEQ ID NO: 1188 - DNA, 324 bp, Magnaporthe grisea 70-15
  CDS (1)..(324)
atgactgtccacaaccttaccaacgcccaggatttcaaggacgccctcaagtcccacaagttcgtcctcgtcgactttttcgccacatggtgtggaccttgcagggccatcgcccccaagatcgccgagtggtccgatgcgttccccaacatccactacgtcaaggtcgacgtcgacgaggtccctgatgtcgcccaggagtacaacgtccgcgccatgccgacattcctgctcttcaaggatggagagaaggtggacgaggttgttggcgccaacccacccaagctgcaggccctcatcagcgcaaaccacccgtcgtcatag

SEQ ID NO: 1189 - protein, 107 aa, Magnaporthe grisea 70-15
MTVHNLTNAQDFKDALKSHKFVLVDFFATWCGPCRAIAPKIAEWSDAFPNIHYVKVDVDEVPDVAQEYNVRAMPTFLLFKDGEKVDEVVGANPPKLQALISANHPSS

SEQ ID NO: 1190 - DNA, 636 bp, Gibberella zeae PH-1
  CDS (1)..(636)
atgtccattgtccagatcgataccaaggctcagtttgatgatcttatcaagagccaccaactagtcatcctcgatgcctctgcagaatggtgtggtccctgcaaagccatggccccaattttcgaaaagctcagccacgaaaaccccgacagtgaaaaggtcgtatttgccaagttcgacacggatgatgtttctgatcttgctcaagagctcgggattcgctcaattccagctttcttcattttccgcgacggcgagcgggttgacaacttgaacggagctaatcctcctgcgctgacgaagcttgtcaaaggggcaattgaggattcaagcaggctagttgagtgctgttacaacaatttggatgatgggacactgcaaataatcagtcagttccatatctcccacaagcaactacaggccttgactaacccgatgtctatcaactcaagtataaatgcagatatgagacgtagggtagtggttgatcgtggtccacgtcatgccacagcggggtatacaaagacaattgatatgatgacctgcctcgagcatgacgtggacctcgatcagtttggtggaaatgtacggcatgtgggagagatacgacccatttgtgaagggggtaaaagttaa

SEQ ID NO: 1191 - protein, 211 aa, Gibberella zeae PH-1
MSIVQIDTKAQFDDLIKSHQLVILDASAEWCGPCKAMAPIFEKLSHENPDSEKVVFAKFDTDDVSDLAQELGIRSIPAFFIFRDGERVDNLNGANPPALTKLVKGAIEDSSRLVECCYNNLDDGTLQIISQFHISHKQLQALTNPMSINSSINADMRRRVVVDRGPRHATAGYTKTIDMMTCLEHDVDLDQFGGNVRHVGEIRPICEGGKS

SEQ ID NO: 1192 - DNA, 420 bp, Kluyveromyces lactis NRRL Y-1140
  CDS (1)..(420)
atgatctccagaactgcattgagaactgctacagcttcccgtgcaaccttcgtgagaccattggctttttcccaagttagattccaatctactgctggcgggaataccatcaaacatctaacgaatttgcatgaattcgaggtcgcaatgaaagctgacaatttgtcattagtcgatttctttgctacttggtgtggcccttgtaaagccgttgcccctcatgtacaaaagctaagtgaaaaatacaataacgtcaagttctacaaagtcgatgtcgatgaatcccctgatattgcgggtgctttgggtatctcttctatgccaacttttgtattattcaagaatgggaaaggattggggaaggtagtcggtgctgacccaagaggagtggaagaagcgattaaacacttcaacaaataa

SEQ ID NO: 1193 - protein, 139 aa, Kluyveromyces lactis NRRL Y-1140
MISRTALRTATASRATFVRPLAFSQVRFQSTAGGNTIKHLTNLHEFEVAMKADNLSLVDFFATWCGPCKAVAPHVQKLSEKYNNVKFYKVDVDESPDIAGALGISSMPTFVLFKNGKGLGKVVGADPRGVEEAIKHFNK

SEQ ID NO: 1194 - DNA, 312 bp, Debaryomyces hansenii CBS767
  CDS (1)..(312)
atggttgctgctatcacttctaaacaagaatttaccgatgctttatctcacgatggattagtcgttgttgactttttcgctacatggtgtggaccatgtaagatgattgctccattattggacaagttctcagccgaatacaaccaagctaagtttataaaggttgacgttgatgaatttggtgaaattgctcaagaatatgaagtcagttctatgccaactgttatcttcttcaagggaggtgaagtcgtcaacaaggtcatcggtgccaacccaggtgctttgaagcaagtcatttcggccaatgcttaa

SEQ ID NO: 1195 - protein, 103 aa, Debaryomyces hansenii CBS767
MVAAITSKQEFTDALSHDGLVVVDFFATWCGPCKMIAPLLDKFSAEYNQAKFIKVDVDEFGEIAQEYEVSSMPTVIFFKGGEVVNKVIGANPGALKQVISANA

SEQ ID NO: 1196 - DNA, 483 bp, Ustilago maydis 521
  CDS (1)..(483)
atggtcgtcaagactatcgagtcctacgaagaattccagacgctcatcaacggcgacaagccggtcgtcattgacttctgggctacctggtgcggtccctgcaaggtcatcggtcccattttcgaaaagatctccgacacccctgctggtgaaaagcttggcttctacaaggttgacgtcgacgctcaggacaagatcgccgccgaggtcggtatcaaggccatgccgacttttgtcttcttcaagggcggtcaagtcgttaagcaggttgtcggcgctaatccccaggctctccaggagcgacagagttgtagcgatcaaggtcgtgttcctggtctcgatgcctttttcagcagcttcgcactagagtattgccatcaaagccgcaaattggagaacgttctgaaaatatggtctacaccagtaaaagaagttgtgtgtcaaagtgggcatcgcagatacgctactgtcaggatgccttga

SEQ ID NO: 1197 - protein, 160 aa, Ustilago maydis 521
MVVKTIESYEEFQTLINGDKPVVIDFWATWCGPCKVIGPIFEKISDTPAGEKLGFYKVDVDAQDKIAAEVGIKAMPTFVFFKGGQVVKQVVGANPQALQERQSCSDQGRVPGLDAFFSSFALEYCHQSRKLENVLKIWSTPVKEVVCQSGHRRYATVRMP

SEQ ID NO: 1198 - DNA, 315 bp, Cryptococcus neoformans var. neoformans B-3501A
  CDS (1)..(315)
atggtcaaggctattgaatcttacgacgagtggaagactctcacttctggctccgatgtcgtcgtcgtcgactactgggcgacttggtgcggtccttgcaagatgatctctccccactttgccaagcttgagggcaagtttcccaatgtcaagtttgccaaggtcgatgttgaggagcaagaggacattgccaaggaggctcaaatcaaggccatgcctacttttgtcgcctacaaagacggcaaggtgattgagactgttactggtgctgtccccgcaaagatcaatgctttgctcgacaaggtcgcggcttaa

SEQ ID NO: 1199 - protein, 104 aa, Cryptococcus neoformans var. neoformans B-3501A
MVKAIESYDEWKTLTSGSDVVVVDYWATWCGPCKMISPHFAKLEGKFPNVKFAKVDVEEQEDIAKEAQIKAMPTFVAYKDGKVIETVTGAVPAKINALLDKVAA

SEQ ID NO: 1200 - DNA, 315 bp, Bacteroides fragilis NCTC 9343
  CDS (1)..(315): transl_table=11
atggctttagagattactgacaacaactttaaggaaatcctcgcagaaggatcaccggttgttattgacttttgggctccttggtgtggtccttgtaagatggtaggtcctatcatcgatgaactggctaaagaatatgaaggaaaagtgatcatgggtaaatgtgatgtagacgaaaacagtgatctacctgcagaatttggtatccgcaatattcctactgttctattttttaagaatggagaattggtagacaaacaagtcggtgccgtaggtaaacctgcatttgtagagaaagttgagaaattattataa

SEQ ID NO: 1201 - protein, 104 aa, Bacteroides fragilis NCTC 9343
MALEITDNNFKEILAEGSPVVIDFWAPWCGPCKMVGPIIDELAKEYEGKVIMGKCDVDENSDLPAEFGIRNIPTVLFFKNGELVDKQVGAVGKPAFVEKVEKLL

SEQ ID NO: 1202 - DNA, 327 bp, Alkalilimnicola ehrlichei MLHE-1
  CDS (1)..(327): transl_table=11
gtgagcggacagatcgtgcacgccaccgatcagaatttcgaagacgaagtgatcaaggccggcgagccggtactcgtggactactgggccgactggtgcggtccgtgcaagatgatcaccccgatcctggacgaggtcgcctccgaatacgcgggcaagctcaaggtggtcaagctgaacatcgacgagaacccggaaaccccgccgaagtacggcatccgtggtatccccacgctgatgctgttcaagaacggcggtgtggaggccaccaaggtgggtgccctgtccaagtcgcagctgacggcttttatcgacagcaacctgtaa

SEQ ID NO: 1203 - protein, 108 aa, Alkalilimnicola ehrlichei MLHE-1
MSGQIVHATDQNFEDEVIKAGEPVLVDYWADWCGPCKMITPILDEVASEYAGKLKVVKLNIDENPETPPKYGIRGIPTLMLFKNGGVEATKVGALSKSQLTAFIDSNL

SEQ ID NO: 1204 - DNA, 315 bp, Oenococcus oeni PSU-1
  CDS (1)..(315): transl_table=11
atggcaatctcagtattaaattctgattcgtttgaagaagcaaccaaatccggcgtgactgtgactgatttttgggccacttggtgtaccccttgtaaaatccaggcacctatcttggaaaaactttctaatgaaatgtcgagtgttaaattcggcaagattgatgtcgatcaaaaccaggaaacggcaaatggacttggaattaaagcgatccctaccttgatcgttaaaaaagacggtgaagtcgttgatcggatcgttggcgtacacaaccaaaaacagttgactgatattattgataaatacacaaaataa

SEQ ID NO: 1205 - protein, 104 aa, Oenococcus oeni PSU-1
MAISVLNSDSFEEATKSGVTVTDFWATWCTPCKIQAPILEKLSNEMSSVKFGKIDVDQNQETANGLGIKAIPTLIVKKDGEVVDRIVGVHNQKQLTDIIDKYTK

SEQ ID NO: 1206 - DNA, 330 bp, Desulfitobacterium hafniense DCB-2
  CDS (1)..(330): transl_table=11
atggcaggcgaaaatgttaagacctttacaacagcaaattggaatgaagaagttttgggttccgacaaagccgtattagtagatttctgggcggcttggtgcggaccctgccgtatggttgctcctatcattgaggagctggcagatgaaatggcaggaagagtcatcatcggcaagcttaatgtggatgaggaaccggcaattgccggacaataccaagtgatgagcattcccactttagctgtttttaaaaacggccaagtggtggataagagtgtagggttccgcggtaaggctgacctcgtcaaaatgattgaaaaacatgcctaa

SEQ ID NO: 1207 - protein, 109 aa, Desulfitobacterium hafniense DCB-2
MAGENVKTFTTANWNEEVLGSDKAVLVDFWAAWCGPCRMVAPIIEELADEMAGRVIIGKLNVDEEPAIAGQYQVMSIPTLAVFKNGQVVDKSVGFRGKADLVKMIEKHA

SEQ ID NO: 1208 - DNA, 333 bp, Cenarchaeum symbiosum
  CDS (1)..(333): transl_table=11
atgggaatcacacagatatccgatacaaagtcgtgggagagcgacgtgatgaactcgccgacacccgtctttgtggacttttgggccgaatggtgcgggccctgcaggatggtgacccctgtcgtagaggagctggcgtccgattacgagggcaaggtcagctttgtcaaggtcaatgtagacgaggcaaacgagcttgcctccagatacaacgtattcagcataccgaccctggcactcttcagcaagggcaagatcataggccagcaggtgggcgcagcatccaaggaagcctacaaaaagatgatcgactcggccctcgaaaaggcctag

SEQ ID NO: 1209 - protein, 110 aa, Cenarchaeum symbiosum
MGITQISDTKSWESDVMNSPTPVFVDFWAEWCGPCRMVTPVVEELASDYEGKVSFVKVNVDEANELASRYNVFSIPTLALFSKGKIIGQQVGAASKEAYKKMIDSALEKA

SEQ ID NO: 1210 - DNA, 354 bp, Medicago truncatula
  CDS (1)..(354)
atggcagcagaagagggacacgtgatcggagttcacactgtggaggcttggaaggaacacctcgagaagggaaatggatccaagaaactgattgtagttgatttcactgcttcttggtgtggcccgtgccgtttcattgccccaattttggcagagattgctaaaaagctgccaaatgtcaccttcctcaaggttgatgttgatgaattgaagactgttgctgaggagtgggcagttgatgctatgccaacattcctgttcttgaaagaaggaaaacttgtggacaaggttgttggtgctcagaaggatcagctgcaagcagcaataaccaagcatgcaactactgatgcttga

SEQ ID NO: 1211 - protein, 117 aa, Medicago truncatula
MAAEEGHVIGVHTVEAWKEHLEKGNGSKKLIVVDFTASWCGPCRFIAPILAEIAKKLPNVTFLKVDVDELKTVAEEWAVDAMPTFLFLKEGKLVDKVVGAQKDQLQAAITKHATTDA

SEQ ID NO: 1212 - DNA, 363 bp, Medicago truncatula
  CDS (1)..(363)
atggcagctgaagaaggacaggtgatcggtgttcataccgttgaacagtggaaggaggagatccagaagggaaatgactccaaaaaactgattgtggtggattttactgcttcatggtgtggtccatgccgttttattgctccaattctagctgagattgctaagaagatacctgaagtcatcttcctcaaggtggatattgatgaagtaaagagtgttgctaaggaatggtctgttgaggctatgccaacattcttgttcttgaaagaaggtaaggaagtggataaggtagttggtgctaggaaggaagagctggaaaatgcaatcaccaagcataaggatgcaactgttgctactgcttga

SEQ ID NO: 1213 - protein, 120 aa, Medicago truncatula
MAAEEGQVIGVHTVEQWKEEIQKGNDSKKLIVVDFTASWCGPCRFIAPILAEIAKKIPEVIFLKVDIDEVKSVAKEWSVEAMPTFLFLKEGKEVDKVVGARKEELENAITKHKDATVATA

SEQ ID NO: 1214 - DNA, 405 bp, Medicago truncatula
  CDS (1)..(405)
atgggatcatttctctcttccttagtcggcggcgactccgccaccgcctcacagtcatcagaatcatcggagaactcttccgtcaagactttccactcatctgctcgctggcaacttcacttcaacgaactcaaagattctcctcgtcttgtggtgattgatttctctgctacatggtgtggaccttgtaaaatgatggaaccgattcttcaagctatggctaatgaattcactgatgttgaattcatcaaaattgatgttgatgaattatcggatgtggcgcaggagtttaaggtgcaggctatgccaacgtttctgttgttgaagaatgggaaagaggttgacaaggttgttggagcaaagaaggatgaacttaaaaacaaggttcaaaagcacaaagcttag

SEQ ID NO: 1215 - protein, 134 aa, Medicago truncatula
MGSFLSSLVGGDSATASQSSESSENSSVKTFHSSARWQLHFNELKDSPRLVVIDFSATWCGPCKMMEPILQAMANEFTDVEFIKIDVDELSDVAQEFKVQAMPTFLLLKNGKEVDKVVGAKKDELKNKVQKHKA

SEQ ID NO: 1216 - DNA, 627 bp, Oryza sativa subsp
  CDS (1)..(627)
atgccggtccttgccttccccaatcccacctatggtgacgagcagaaggccgcgcgtgtcgaggcaggccaggcgactgcggctcgacaaggggacgagaggacgatgggctcttgtccaggcggtggcggcttatctggagcagaggacacttgcatcttgacgaattttctcaagtcgatgggttgctgtggcagcagcactgtagacgccgaggagcacctggactacagtggcggaaatgtgactttggtaactgatcaaaagaattgggacaatacaatggaagaagtagctgagcatggcaaaacagttgtgctaaaattcagtgcaatttggtgcactccgtgtaggaatgctgcccctctattcgctgaactttcactgaagtatcctgacattgttttcgtgtccgtggatgtagacgaaatgccgataacaaagatgaatggcatttttactttgattcgtcaggagctggtgacgcaatacgatgtgcgtgcaaccccaacgttcatcttcatgaaaaacaatgaggagattgataagcttgttggaggcaaccatgaagatcttcaggaaaagttcgaacagcttaaccggccaaagttatatgatgatgtataa

SEQ ID NO: 1217 - protein, 208 aa, Oryza sativa subsp
MPVLAFPNPTYGDEQKAARVEAGQATAARQGDERTMGSCPGGGGLSGAEDTCILTNFLKSMGCCGSSTVDAEEHLDYSGGNVTLVTDQKNWDNTMEEVAEHGKTVVLKFSAIWCTPCRNAAPLFAELSLKYPDIVFVSVDVDEMPITKMNGIFTLIRQELVTQYDVRATPTFIFMKNNEEIDKLVGGNHEDLQEKFEQLNRPKLYDDV

SEQ ID NO: 1218 - DNA, 381 bp, Oryza sativa subsp
  CDS (1)..(381)
atggcggcggcctcagcggcggcgcaggcggagggaacggtgatcgcgatccacagcctcgacgagtggaccatccagatcgaggaggccaacagcgccaagaagctgacttgcagtcctaaggttgtgattgacttcactgcatcatggtgcggaccatgccgcatcattgctccagtttttgccgatctagcaaagaagcacacaaatgctgtttttctgaaggttgacgtcgatgaactgaagcctattgctgagcaattcagtgttgaggctatgccaacattcctgtttatgaaggagggagatgttaaagacagggttgtcggtgctatgaaggatgaactggcgagcaagcttgagctacatatggccatgtag

SEQ ID NO: 1219 - protein, 126 aa, Oryza sativa subsp
MAAASAAAQAEGTVIAIHSLDEWTIQIEEANSAKKLTCSPKVVIDFTASWCGPCRIIAPVFADLAKKHTNAVFLKVDVDELKPIAEQFSVEAMPTFLFMKEGDVKDRVVGAMKDELASKLELHMAM

SEQ ID NO: 1220 - DNA, 345 bp, Vitis vinifera
  CDS (1)..(345)
atggcggaagagggacaagttgtcggttgccacagtgtggaatcgtggaaggagcaattccagcatggaatagagtccaagaaactggtggtggtggatttcactgcttcatggtgtgggccatgtcgtgtcattagcccatttctggcagagcttgccaagaagatgcctaatgtcatatttctcaaggtggatgtggatgaattggagactgttgctaaggagtgggaagtggaggccatgccaacctttctgttcctgaaagaaggaaacgtagtggacaaggttgtgggtgcaaaaagagaagaactggtgcagaagacagagaagcatgcaactgcttga

SEQ ID NO: 1221 - protein, 114 aa, Vitis vinifera
MAEEGQVVGCHSVESWKEQFQHGIESKKLVVVDFTASWCGPCRVISPFLAELAKKMPNVIFLKVDVDELETVAKEWEVEAMPTFLFLKEGNVVDKVVGAKREELVQKTEKHATA

SEQ ID NO: 1222 - DNA, 681 bp, Vitis vinifera
  CDS (1)..(681)
  misc_feature (477)..(477): y is t or c
atggacgaaacgcggagggaatttggggagtatagcaggggtattttgataatccgacacaggaaattggccactttgtcttcgtcttcgatctcctcaaagcggcaacgttccgtttctagggtttctccttccggcgatcgttctggtcttgggtcttgtggtggtgcattcaccttcggattgatcaaatccctccccaccaaagctattggctttattgaggtgaacaatggcaaccggatggaacaattgtataattttgtttttgaagctctggaacatcacaatgatgatgatgattccgatcacaatgctgcatttgctagtggaaatgtacaccttatcactaccaaagaaaattgggaggagaagttggcagaagcaagcaaagatggaaagattgtgattgcaaattttagtgcaacatggtgtggtccttgtaaaatgattgcaccattctactgcgaactatcygaggcacacccttctctgatgtttctaactgttgatgttgatgaactaagtgaattcagttcttcatgggatatcaaagccactccaacctttttcttcctcagagatgggcaacaggtagacaagcttgtgggggcgaacaaacctgagctacagaagaagataactgctattttagattccatgacccagtgtaataaatga

SEQ ID NO: 1223 - protein, 226 aa, Vitis vinifera
MDETRREFGEYSRGILIIRHRKLATLSSSSISSKRQRSVSRVSPSGDRSGLGSCGGAFTFGLIKSLPTKAIGFIEVNNGNRMEQLYNFVFEALEHHNDDDDSDHNAAFASGNVHLITTKENWEEKLAEASKDGKIVIANFSATWCGPCKMIAPFYCELSEAHPSLMFLTVDVDELSEFSSSWDIKATPTFFFLRDGQQVDKLVGANKPELQKKITAILDSMTQCNK

SEQ ID NO: 1224 - DNA, 411 bp, Vitis vinifera
  CDS (1)..(411)
atgggatctgttgtgtcgggtttgttgggaggaggagctgcagacgcatcagattcgactttggagggatctggagtcaatgtatttcactcatctgagagatggttgctccacttcaatgcttctaaagaatccaaccaattgatggtgattgacttcgctgcgacctggtgtgggccttgcaaattcatggagcctgcagtgaagtccatggcttccaagtacactgacgtcgacttcgtcaagatcgatgttgatgagttgcctgatgtggcgcaggagtttactgtgcaggccatgccgacgtttgtgttgttgaaaaaagggaaggaattggaaagggtgatcggggccaagaaggatgagctggagaagaagattcagaaacacagggcagtttccaatgcttaa

SEQ ID NO: 1225 - protein, 136 aa, Vitis vinifera
MGSVVSGLLGGGAADASDSTLEGSGVNVFHSSERWLLHFNASKESNQLMVIDFAATWCGPCKFMEPAVKSMASKYTDVDFVKIDVDELPDVAQEFTVQAMPTFVLLKKGKELERVIGAKKDELEKKIQKHRAVSNA

SEQ ID NO: 1226 - DNA, 366 bp, Vitis vinifera
  CDS (1)..(366)
  misc_feature (130)..(130): r is g or a
  misc_feature (260)..(260): s is g or c
  misc_feature (346)..(346): s is g or c
atgggagccagccactcgtcttcttcaaagtcatctcgtgtcctcaccttcaattcctcagcatcatggaagatacattttgaagaagccaaaagcactggcaaactgatggttatcgatttctcggctrcatggtgtggaccttgccgattcatggaacccgtcattaatgagtttgctgagaaatatacagacgtggagttcgtcaagattgatgtggacgagttgtcggatgtggctcaagaatttggagtgcaggsaatgccaacattcttactgatcaagagaggaacagaagttgataaagtggtgggagccaagaaggaagaactccagaagaagatcsaggctcacaggaaaaattga

SEQ ID NO: 1227 - protein, 121 aa, Vitis vinifera
  misc_feature (44)..(44): The Xaa at location 44 stands for Ala, or Thr.
  misc_feature (87)..(87): The Xaa at location 87 stands for Ala, or Gly.
MGASHSSSSKSSRVLTFNSSASWKIHFEEAKSTGKLMVIDFSAXWCGPCRFMEPVINEFAEKYTDVEFVKIDVDELSDVAQEFGVQXMPTFLLIKRGTEVDKVVGAKKEELQKKIZAHRKN

SEQ ID NO: 1228 - DNA, 312 bp, Pichia guilliermondii
  CDS (1)..(312)
atgatagtcgaggttaaatccaagcaacagctaatagatgctatacaataccatggcttagtggtggtagatttctatgcgcaatggtgtggtccttgtaaaaccgtctcacctattttggaaaaattatctgacgagtatgatgaagtgaaatttttaaaagttgatgttgatgcattgagcgagttgacactggaatatgaagtcactagtatgcctacaattttatttttcaaggaaggaaataaagaaggaagggtagttggtgccaatattcctgcgttgagacaagtaattgctgcacttgcttaa

SEQ ID NO: 1229 - protein, 103 aa, Pichia guilliermondii
MIVEVKSKQQLIDAIQYHGLVVVDFYAQWCGPCKTVSPILEKLSDEYDEVKFLKVDVDALSELTLEYEVTSMPTILFFKEGNKEGRVVGANIPALRQVIAALA

SEQ ID NO: 1230 - DNA, 393 bp, Triticum turgidum subsp
  CDS (1)..(393)
atggcggcggcggcgacggcgacgactacagcggcggcgacggcggcggcggtggggccgggggaggtgatctccgtccacagcctggagcagtggaccatgcagatcgaggaggccaacgccgccaagaagctggtggtgattgacttcactgcatcatggtgcggaccatgccgcatcatggctccaatttttgctgatctcgccaagaagttcccagctgctgttttcctcaaggtcgacgttgatgaactgaagcccattgctgagcaattcagcgtcgaggccatgccaaccttcctgttcatgaaggaaggagacgtcaaggacagggttgtcggagctatcaaggaggagctgacgaccaaggttgggctccacgcggctgcctag

SEQ ID NO: 1231 - protein, 130 aa, Triticum turgidum subsp
MAAAATATTTAAATAAAVGPGEVISVHSLEQWTMQIEEANAAKKLVVIDFTASWCGPCRIMAPIFADLAKKFPAAVFLKVDVDELKPIAEQFSVEAMPTFLFMKEGDVKDRVVGAIKEELTTKVGLHAAA

SEQ ID NO: 1232 - DNA, 354 bp, Eucalyptus grandis
  CDS (1)..(354)
atggcggaagagggccaggtgatcagttgccacagcgccgagtcgtggagcgagcagatcgccaagagcaacgaatccgacaagctggtggttgtcgatttcactgcttcatggtgcggaccatgccgtttcattgcaccattcctagctgagctggccaagagattccctaatgttctgtttctgaaagttgatgttgatgagctgaagacggtcgctcaagagtgggccgtggaggcgatgccgactttcatgtttgtgaagggaggaaagattgttgacagggtggtaggagcccagaaggatcagctgcagatgaccttagctaagcacatggcaaccgcttcggcttaa

SEQ ID NO: 1233 - protein, 117 aa, Eucalyptus grandis
MAEEGQVISCHSAESWSEQIAKSNESDKLVVVDFTASWCGPCRFIAPFLAELAKRFPNVLFLKVDVDELKTVAQEWAVEAMPTFMFVKGGKIVDRVVGAQKDQLQMTLAKHMATASA

SEQ ID NO: 1234 - DNA, 480 bp, Phaeosphaeria nodorum
  CDS (1)..(480)
atgcttgcgccttcatcagcccggctcactagatccatacttacaactacgcgcgtgcgaacagctgctaccaaccccacttcgaccgcaaacctctaccgatcgctcctcaccccaaagtttttcaccaccaccagcaaaatgagtgagagcaagcaaggcgttcacaacctccagacggtcgacgactacaggaaggccctggaggacaaggaccatttcatagtccttgactgcttcgccacatggtgcggaccctgcaaaatgattgcacccactattgtcaaattctccgagaagtaccctgagacgcgcttctacaagctcgacatcgacgaggtgcccgatattgcgcaggaactcggcatccgcgctatgcccaccttcgtcttcttcaagaacggcgagaaggttggcgaggtcgttggcgcaaaccccaaggccatcgaggccggcattcaggagcacgccagcgcatag

SEQ ID NO: 1235 - protein, 159 aa, Phaeosphaeria nodorum
MLAPSSARLTRSILTTTRVRTAATNPTSTANLYRSLLTPKFFTTTSKMSESKQGVHNLQTVDDYRKALEDKDHFIVLDCFATWCGPCKMIAPTIVKFSEKYPETRFYKLDIDEVPDIAQELGIRAMPTFVFFKNGEKVGEVVGANPKAIEAGIQEHASA

SEQ ID NO: 1236 - DNA, 381 bp, Medicago truncatula
  CDS (1)..(381)
atgggtggtcaacaacagcacaaaaagtctaaagttgtgaaaattgactcaaggaaatcatgggaacaccacatctttgaagctaccaataaaggttaccctgttatggttcatttttctgcttattggtgcgtgccttctatagctatggaccctttctttgaagaattggcatcgacctatcaagatgtcctctttctgaaggtggatgtggacgaagttaaggaagtagcctccaagttggaaatcaatgccatgcctacctttttattgatgagtggaggaactccagtggagaaagctgttggtgcaaatcctgatgaaattaggaaaaggatggaccattttattaaccaaactcattcctccaaatcactctga

SEQ ID NO: 1237 - protein, 126 aa, Medicago truncatula
MGGQQQHKKSKVVKIDSRKSWEHHIFEATNKGYPVMVHFSAYWCVPSIAMDPFFEELASTYQDVLFLKVDVDEVKEVASKLEINAMPTFLLMSGGTPVEKAVGANPDEIRKRMDHFINQTHSSKSL

SEQ ID NO: 1238 - DNA, 318 bp, Graphocephala atropunctata
  CDS (1)..(318)
atggttcatcacgtaaaggacgagaaagacctcgaagccaagctgaaggaggctggtaacaacttggttgttatcgatttcttcgccacctggtgcggaccctgcaagctgatcgctccccacattgagacgatggatgaagagttcccggatgtgatgttcctgaaagtggacgtagatgagtgtgagggcatcgctgcccaatatgagatctcctcaatgccaacctttgtattcataaagaatagcaaacaattggaaaactttgccggagcaaacgctgagaagctgaaagaaaccgtcaacaagcataaatga

SEQ ID NO: 1239 - protein, 105 aa, Graphocephala atropunctata
MVHHVKDEKDLEAKLKEAGNNLVVIDFFATWCGPCKLIAPHIETMDEEFPDVMFLKVDVDECEGIAAQYEISSMPTFVFIKNSKQLENFAGANAEKLKETVNKHK

SEQ ID NO: 1240 - DNA, 372 bp, Solanum berthaultii
  CDS (1)..(372)
atggctacttcatctgaggaaggacaagtgatcggctgccacaaggttgaggactgggaggtgcagccccagaagggcgtggagaccaaaaaactggtggtggtggattttactgcttcctggtgcggcccttgccgttttattgccccaattcttgctgacattgctaagaagatgcaccatgttatattcctcaaggttgatgttgatgaactgaagaaagttgcagaggattggaatgtggaggcaatgcctacctttgtcttcattaaagaggggaaagaagtggatagggtggttggtgccaataaagacggattgcttcagaccatagagaagcatggtgctgctcctgctattgtgactgcttga

SEQ ID NO: 1241 - protein, 123 aa, Solanum berthaultii
MATSSEEGQVIGCHKVEDWEVQPQKGVETKKLVVVDFTASWCGPCRFIAPILADIAKKMHHVIFLKVDVDELKKVAEDWNVEAMPTFVFIKEGKEVDRVVGANKDGLLQTIEKHGAAPAIVTA

SEQ ID NO: 1242 - DNA, 333 bp, Aspergillus oryzae
  CDS (1)..(333)
atgtctgagggcaatgttgtgaagatcgaatccaaaaaggattttcaggagaaggttatcgaatccaaggaccttgtcgttctcgactgcttcgctgagtggtgtggtccttgtaaggcaattgcccctcagcttgctaggctcagcgaggagtatactggcgccaaattctacaagatcgatgtcgacgatctctccgaagtcgctggcgagcttggtgtccgcgccatgcccacttttctcttcttcaaggatggtaagaaggtgaatgaagttgttggcgccaaccctcctgccctcgtggccggcgtccagtctctggtcaagcaataa

SEQ ID NO: 1243 - protein, 110 aa, Aspergillus oryzae
MSEGNVVKIESKKDFQEKVIESKDLVVLDCFAEWCGPCKAIAPQLARLSEEYTGAKFYKIDVDDLSEVAGELGVRAMPTFLFFKDGKKVNEVVGANPPALVAGVQSLVKQ

SEQ ID NO: 1244 - DNA, 327 bp, Aspergillus oryzae
  CDS (1)..(327)
atgggtgtcactgagatcaagactcctgctgaattccaggaaaaggtcatcgactccaacgagcctgtcgttgtcgatttcttcgctacctggtgcggtccttgcaggatgattaccccagccatcgaaaggctcagtaatgagaaccagggcgtcaagttctacaaggtagacgttgatgggcttaacacggtcgcggccgacttgggtattgccgccatgcctaccttcgtgttctttaaggacggccagcaaatcaaagagttaaccatccgcggtgccaaccctggtggtgttcagaacagtgtgaaagccctgctggcataa

SEQ ID NO: 1245 - protein, 108 aa, Aspergillus oryzae
MGVTEIKTPAEFQEKVIDSNEPVVVDFFATWCGPCRMITPAIERLSNENQGVKFYKVDVDGLNTVAADLGIAAMPTFVFFKDGQQIKELTIRGANPGGVQNSVKALLA

SEQ ID NO: 1246 - DNA, 330 bp, Aspergillus oryzae
  CDS (1)..(330)
atgcctgttacagctatcgaatcataccaacagttccaggagcttatcaccggtgataagcctgttttaattgatttctgggcaacatggtgtggaccttgcagagcaatctcccctgtttttgaggaaatgtcaaacgccgagggctttgataatgtcgggttttataaagttgatgtcgatgcacaagaacaaattgcccaagaagttggtattagagcaatgcctactttcatgctctttcgcaatggtgccaaagttggcgatctggttggagctaatagccaaggattgacagagcttgttaaaaaggcaactgctctcccctaa

SEQ ID NO: 1247 - protein, 109 aa, Aspergillus oryzae
MPVTAIESYQQFQELITGDKPVLIDFWATWCGPCRAISPVFEEMSNAEGFDNVGFYKVDVDAQEQIAQEVGIRAMPTFMLFRNGAKVGDLVGANSQGLTELVKKATALP

SEQ ID NO: 1248 - DNA, 624 bp, Arabidopsis thaliana
  CDS (1)..(624)
atggagaacatgtcgaatctaactagcaaatttttattaaacccgttgaatgttcataagcattgtgcagtttcagatgaaaatggtgatagaaaatctcatgttctgaaacaggtgtgttcatgtatctgctgttgcaacagaaggaacaagactcaagctaggagccagaaagggtcctactttataaaagggaaggtccatccggtaagtagaatggagaagtgggaggagaagatcacagaagctaatagtcatggcaaaattatagctcgacatgatctgattctttgtaacatggaacagcttgtagtgaatttcaaggcttcgtggtgtttacctagtaaaacaatattaccaatataccaggagcttgcatccacatacacctcaatgatatttgtcactatagacgtcgaagagctcgctatctcgaaactgagcgatttgggtgttaaaatatgtttgatacaggagtttagtcatgaatggaacgtggatgcaactccaacagtagtgttccttaaagatgggaggcaaatggataaacttgtaggtggagatgctgcagagcttcagaagaaaactgcagcagctgcaaatctccttcttagacaatcttaa

SEQ ID NO: 1249 - protein, 207 aa, Arabidopsis thaliana
MENMSNLTSKFLLNPLNVHKHCAVSDENGDRKSHVLKQVCSCICCCNRRNKTQARSQKGSYFIKGKVHPVSRMEKWEEKITEANSHGKIIARHDLILCNMEQLVVNFKASWCLPSKTILPIYQELASTYTSMIFVTIDVEELAISKLSDLGVKICLIQEFSHEWNVDATPTVVFLKDGRQMDKLVGGDAAELQKKTAAAANLLLRQS

SEQ ID NO: 1250 - DNA, 354 bp, Medicago sativa
  CDS (1)..(354)
atggccgcagaagagggacaagtgatcggagttcacactgtggaggcttggaaggaacacctcgagaagggaaatggatccaagaaactgattgtagttgatttcaccgcttcttggtgtggcccgtgccgtttcattgccccaattttggcagagattgctaaaaagctgcccaatgtcaccttcctcaaggttgatgttgatgaattgaagactgttgctgaggagtgggcagttgatgctatgccaacattcctgttcttgaaagaaggaaaactggtggacaaggttgttggtgctcagaaggagcagctgcaagcagcaataaccaagcatgcaactactgatgcttga

SEQ ID NO: 1251 - protein, 117 aa, Medicago sativa
MAAEEGQVIGVHTVEAWKEHLEKGNGSKKLIVVDFTASWCGPCRFIAPILAEIAKKLPNVTFLKVDVDELKTVAEEWAVDAMPTFLFLKEGKLVDKVVGAQKEQLQAAITKHATTDA

SEQ ID NO: 1252 - DNA, 375 bp, Codonopsis lanceolata
  CDS (1)..(375)
atggaacatcatcaaattagcatatcgaaagtagtgaaggtggactcaaagcaaacttgggattctcttgtaattcaagccattaatcaaagctcccctattgtggcacattttacagcatcatggtgcattccatcggttgtgatgaaccccttcttcgaagagttggcctcgacttacaaagacacaatgtttctcttggtggatgtggatgatgttcaggaggtcgcgagcaagtatgaagtcaaggcaatgccaacatttgtgctgatgaaggaaggagctcaggttgacaagctaattggtgcaaatccagatgagataaggaaaaggattgagtctcttatacagtccaatcccatttgtgtggcctaa

SEQ ID NO: 1253 - protein, 124 aa, Codonopsis lanceolata
MEHHQISISKVVKVDSKQTWDSLVIQAINQSSPIVAHFTASWCIPSVVMNPFFEELASTYKDTMFLLVDVDDVQEVASKYEVKAMPTFVLMKEGAQVDKLIGANPDEIRKRIESLIQSNPICVA

SEQ ID NO: 1254 - DNA, 459 bp, Nicotiana alata
  CDS (1)..(459)
atgggatcgtatctttcaagtttgctcggtggaggcgcggcggaagcggcagaggcagaatcaggatcgtcgtcagaaccgtcgcgtgtgattgcttttcattcttccaatcggtggcaacttcacttcaattcctccaagcaattaaataaactgatagttgtggattttgcggctacatggtgtgggccctgcaaaatgatggagccggttattaacgccatgtctgccaagtataccgacgttgacttcgtcaaaatcgacgtcgatgagctctcagatgtagcacaagagtttggagtacaagctatgccaacatttttgctgctgaagcaaggaaaggaagtagagagagtggttggggctaagaaagatgagctcgagaaaaagattctcaagcacagggaagctcctaaatttgctgctagtaattatcgaactaaatttcatgtccaataa

SEQ ID NO: 1255 - protein, 152 aa, Nicotiana alata
MGSYLSSLLGGGAAEAAEAESGSSSEPSRVIAFHSSNRWQLHFNSSKQLNKLIVVDFAATWCGPCKMMEPVINAMSAKYTDVDFVKIDVDELSDVAQEFGVQAMPTFLLLKQGKEVERVVGAKKDELEKKILKHREAPKFAASNYRTKFHVQ

SEQ ID NO: 1256 - DNA, 369 bp, Zea mays
  CDS (1)..(369)
atggcgtccgagcagggagtcgtgatcgcgtgccacagcaaggctgagtttgacgcccacatgaccaaggcccaggaagccggcaagctggtggtcatcgacttcactgccgcctggtgcggtccatgccgcgccatcgccccactgttcgtcgaacacgccaagaagttcactcaggtcgtgttcctgaaggtggacgtggacgaagtgaaggaagtcaccgcggcctacgaggtcgaggcgatgccgaccttccacttcgtcaagaacggcaagacggtcgcgaccatcgtgggtgccaagaaggacgagctcctggccctgatcgagaagcatgccgcgcctgcgcctgcgtctgcgtctgcctaa

SEQ ID NO: 1257 - protein, 122 aa, Zea mays
MASEQGVVIACHSKAEFDAHMTKAQEAGKLVVIDFTAAWCGPCRAIAPLFVEHAKKFTQVVFLKVDVDEVKEVTAAYEVEAMPTFHFVKNGKTVATIVGAKKDELLALIEKHAAPAPASASA

SEQ ID NO: 1258 - DNA, 387 bp, Zea mays
  CDS (1)..(387)
atggcggcttcggaggcggcggcggcggcggcgacaccggtggcgccgacagaggggacggtgatcgcgatccacagcctggaggagtggagcatccagatcgaggaggccaacagcgccaagaagctggtggtgattgacttcactgcaacatggtgtcctccgtgccgcgccatggctccaatttttgctgatatggccaagaagtccccaaatgttgttttcctgaaagttgatgtcgatgaaatgaagaccattgctgagcaattcagcgtagaggccatgccaacattcctgttcatgagggagggcgacgtcaaggacagggtcgttggcgcagcaaaggaagagctagcaaggaagcttgaactacacatggcctcgtag

SEQ ID NO: 1259 - protein, 128 aa, Zea mays
MAASEAAAAAATPVAPTEGTVIAIHSLEEWSIQIEEANSAKKLVVIDFTATWCPPCRAMAPIFADMAKKSPNVVFLKVDVDEMKTIAEQFSVEAMPTFLFMREGDVKDRVVGAAKEELARKLELHMAS

SEQ ID NO: 1260 - DNA, 429 bp, Plantago major
  CDS (1)..(429)
atgggctcgtttctctcttccgtgatcggaatcggaccggccgatgcggcggagacacctgccggagactcatcggagccttcgcgcgtcatggcgttccactcgtcgcaacgctggcagctccacttcaactcctccaagcagttaaacaaactgatggttgtggatttcacggcgacttggtgtggaccttgcaagttcatggcgcctgttttcgctgaactttctaccaagtacagtgatgttgattttgtcaaaatcgacgtcgatgagctcgctgatgtggcgcgggagtttggtgtgcaggcgatgccaacattcatgttactaaagcaaggaaaacaagttggtaccgttgtgggagctaagaaagatgaactggagaagaagatcctcgaacacagggaagcccctagatttgctgcatag

SEQ ID NO: 1261 - protein, 142 aa, Plantago major
MGSFLSSVIGIGPADAAETPAGDSSEPSRVMAFHSSQRWQLHFNSSKQLNKLMVVDFTATWCGPCKFMAPVFAELSTKYSDVDFVKIDVDELADVAREFGVQAMPTFMLLKQGKQVGTVVGAKKDELEKKILEHREAPRFAA

SEQ ID NO: 1262 - DNA, 408 bp, Glycine max
  CDS (1)..(408)
atgggcgctatactttctgccttaactggcggtgccgcaacggcggcgacgtcttcgccggagagttctgcttctagggtccagtctttccactcttcggcgcgctggcagctccacttcaacgagctcaaagaaaccaataagctcgttgtgatagatttctcggcgtcgtggtgcggcccttgcaaattcatagagccagcgattcacgccatgtccgaaaagttcaccgacgttgacttcgtcaagatcgacgtcgacgaattgccggatgtggcgaaggagtttaatgtggaggcgatgccgacgttcgtgttgtgtaagaaagggaaggaagtcgacaaggttgtgggcgcaaagaaggacgagctcgaaaagaagattgagaaacatcgatcgcaatcttag

SEQ ID NO: 1263 - protein, 135 aa, Glycine max
MGAILSALTGGAATAATSSPESSASRVQSFHSSARWQLHFNELKETNKLVVIDFSASWCGPCKFIEPAIHAMSEKFTDVDFVKIDVDELPDVAKEFNVEAMPTFVLCKKGKEVDKVVGAKKDELEKKIEKHRSQS

SEQ ID NO: 1264 - DNA, 375 bp, Capsicum annuum
  CDS (1)..(375)
atggctgctacttcatctgaagaaggacaagtttttggttgccacaacgttgaggagtgggatcagcacttcaagaagggtgtcgagactaagaaattggtggtggtggattttaccgcatcctggtgcggtccttgccgttttattgccccaattcttgctgacattgctaagaagatgccccatgtcatattcctcaaggttgatgttgatgaactaaagactgttgcagaggaatggaatgtggatgctatgccaacatttgtcttctttaaagatggcgaagaagtggatagggttgttggtgcccagaaagaggagttgcaggcggccatacttaagcatgttggtgctcctgctactgtgacagcttga

SEQ ID NO: 1265 - protein, 124 aa, Capsicum annuum
MAATSSEEGQVFGCHNVEEWDQHFKKGVETKKLVVVDFTASWCGPCRFIAPILADIAKKMPHVIFLKVDVDELKTVAEEWNVDAMPTFVFFKDGEEVDRVVGAQKEELQAAILKHVGAPATVTA

SEQ ID NO: 1266 - DNA, 351 bp, Paracoccidioides brasiliensis
  CDS (1)..(351)
atggttgtccacaatctgcaaaaccgcgcctccttcgtctccgccatctccaccacctccaccgccgacacctccaccgacaaaaagacatccctagtcgtcatagactgctatgcaacctggtgcggcccctgcaaagtgatcgcgcccaaactcgtcgagttttccgaaacctacccgaacgtcactttctacaaggtcgacgtcgacgagtgcccggacatcgcgcaggagctgggcgtcagggccatgccgactttcatcttctttaaggatgggcagaaggttgatgaggtgatgggcgcggtgccgcaagcggttgaggcggcgattaagaagcatgcgtcgtag

SEQ ID NO: 1267 - protein, 116 aa, Paracoccidioides brasiliensis
MVVHNLQNRASFVSAISTTSTADTSTDKKTSLVVIDCYATWCGPCKVIAPKLVEFSETYPNVTFYKVDVDECPDIAQELGVRAMPTFIFFKDGQKVDEVMGAVPQAVEAAIKKHAS

SEQ ID NO: 1268 - DNA, 372 bp, Ipomoea batatas
  CDS (1)..(372)
atggccgccgcgacttcttcggaggagggacaggtgatcgcctgccacaccgtggatcactggaaggagcagttcgctaagggcgttgagaccaaaagactggtggtggttgatttcactgcttcctggtgcggtccttgccgcatgattgctccaatactggctgaaattgcaaagaaaatggctcatgtgatattcgtcaaggttgatgttgatgaactgcaggctgtggctgcggaatacaaggtggaggcgatgccgactttcgtgttcctcaaggatggcaaggaagtggataggatggtgggtgcaaagaaggatgatctgcagaactgcataactaagcatgctgcagcagtcatgactgcttag

SEQ ID NO: 1269 - protein, 123 aa, Ipomoea batatas
MAAATSSEEGQVIACHTVDHWKEQFAKGVETKRLVVVDFTASWCGPCRMIAPILAEIAKKMAHVIFVKVDVDELQAVAAEYKVEAMPTFVFLKDGKEVDRMVGAKKDDLQNCITKHAAAVMTA

SEQ ID NO: 1270 - DNA, 432 bp, Ipomoea batatas
  CDS (1)..(432)
atgggaggggctctgtcgagtgtgctgggtggcgatgcggcggcggcggcggcatcagccgatgactcatcatcgtccgaaccctctcgggtcactgtatttcattcatctcaacgatggcagctgcacttcaacgcctccaaacaactcaataaattgatggtggtggattttgcggcagcatggtgtgggccctgcaagatgatggagccgatggtcaaacaaatggctaccaagttcaccgacgttgatttcataaagatagacgtcgatgagctctcggatgtggcccaggagttttcagtgcaggctatgccgacgttcttactgctgaagcaaggcaaggaggtgggtagggtagtgggagccaagaaagatgagcttgaaaggaagatcgtccagcataaggaagtccccaaatttgctgcttga

SEQ ID NO: 1271 - protein, 143 aa, Ipomoea batatas
MGGALSSVLGGDAAAAAASADDSSSSEPSRVTVFHSSQRWQLHFNASKQLNKLMVVDFAAAWCGPCKMMEPMVKQMATKFTDVDFIKIDVDELSDVAQEFSVQAMPTFLLLKQGKEVGRVVGAKKDELERKIVQHKEVPKFAA

SEQ ID NO: 1272 - DNA, 372 bp, Arabidopsis thaliana
  CDS (1)..(372)
atgcaggagcgagaagctcaggctgcactcaatgacggagaagtgattagcatccactcaacaagcgagctagaagcaaagacaaaggctgctaagaaggcatcacgtctgctcatcctttacttcacagccacatggtgtgggccatgccgatatatgtctcctctgtactcaaacctggccacacagcactcgagagtcgttttcttgaaagttgatatagacaaggccaatgacgtggctgcttcttggaacattagcagcgtcccgaccttttgcttcatcagagatggcaaagaggtggacaaagttgtcggagctgataaaggttcgcttgagcagaagattgcacagcactcttcttctaagtaa

SEQ ID NO: 1273 - protein, 123 aa, Arabidopsis thaliana
MQEREAQAALNDGEVISIHSTSELEAKTKAAKKASRLLILYFTATWCGPCRYMSPLYSNLATQHSRVVFLKVDIDKANDVAASWNISSVPTFCFIRDGKEVDKVVGADKGSLEQKIAQHSSSK

SEQ ID NO: 1274 - DNA, 369 bp, Hordeum vulgare var
  CDS (1)..(369)
atggcggcgtcggcaacggcggcggcagtggcggcggaggtgatctcggtccacagcctggagcagtggaccatgcagatcgaggaggccaacaccgccaagaagctggtggtgattgacttcactgcatcatggtgcggaccatgccgcatcatggctccagttttcgctgatctcgccaagaagttcccaaatgctgttttcctcaaggtcgacgtggatgaactgaagcccattgctgagcaattcagtgtcgaggccatgccaacgttcctgttcatgaaggaaggagacgtcaaggacagggttgtcggagctatcaaggaggaactgaccgccaaggttgggcttcacgcggcggcccagtaa

SEQ ID NO: 1275 - protein, 122 aa, Hordeum vulgare var
MAASATAAAVAAEVISVHSLEQWTMQIEEANTAKKLVVIDFTASWCGPCRIMAPVFADLAKKFPNAVFLKVDVDELKPIAEQFSVEAMPTFLFMKEGDVKDRVVGAIKEELTAKVGLHAAAQ

SEQ ID NO: 1276 - DNA, 357 bp, Hordeum vulgare var
  CDS (1)..(357)
atggccgccgaggagggagccgttatcgcgtgccacaccaagcaagagttcgatacccacatggccaatggcaaggacaccggcaagctggtgatcattgatttcactgcttcctggtgcggtccatgtcgtgtcatagccccagtctttgctgagtacgccaagaagttccctggggccatcttcctgaaggtggatgttgatgagctgaaggacgtcgctgaagcatacaatgttgaggcaatgccgaccttcctgtttatcaaggacggtgagaaggtggacagtgttgtcggtggcaggaaggatgacatccataccaagatagtggccctcatgggttctgcatccacctaa

SEQ ID NO: 1277 - protein, 118 aa, Hordeum vulgare var
MAAEEGAVIACHTKQEFDTHMANGKDTGKLVIIDFTASWCGPCRVIAPVFAEYAKKFPGAIFLKVDVDELKDVAEAYNVEAMPTFLFIKDGEKVDSVVGGRKDDIHTKIVALMGSAST

SEQ ID NO: 1278 - DNA, 372 bp, Citrus paradisi
  CDS (1)..(372)
atggccgaggagggacaagtgatcagctgccacactgttgaatcctggaacgagcagctccaaaagggcattgcggcaaagaaactgatagtggtggattttacggcttcatggtgcccgccatgcaagttgatgtctccaattttgagtgaattggcgaagaagctgcccgctgtcatattcttgaaggtggatgttgatgaattgcagtccgtcgctgaggaatgggctgtggaagccatgccgacctttgtactgacgaaagacggcaaagtcctggagaggattgtgggagcgaagaaagatgagctgcagctggctgtcgaaaagcacgcaacaactgttgagaatgcaactactgctaatgcttga

SEQ ID NO: 1279 - protein, 123 aa, Citrus paradisi
MAEEGQVISCHTVESWNEQLQKGIAAKKLIVVDFTASWCPPCKLMSPILSELAKKLPAVIFLKVDVDELQSVAEEWAVEAMPTFVLTKDGKVLERIVGAKKDELQLAVEKHATTVENATTANA

SEQ ID NO: 1280 - DNA, 396 bp, Leymus chinensis
  CDS (1)..(396)
atggggggctgtgtgggaaagggtcgtagcattgtggaagaaaagcttgatttcaaaggtggaaatgtgcatgtcataacaaccaaagaggactgggaccagaagattgaagaagcaaacaaggatgggaaaattgttgtagcaaacttcagtgcttcgtggtgtgggccatgccgtgtcattgcacctgtttatgctgagatgtccaagacttatcctcagctcatgttcttgacaattgatgttgatgacctaatggatttcagctcaacatgggacatccgtgcaaccccaacgttcttcttccttaaaaacggccagcagatcgacaagctcgtcggcgccaacaaacctgagctcgagaagaaagtacaagctcttggcgatggcagctga

SEQ ID NO: 1281 - protein, 131 aa, Leymus chinensis
MGGCVGKGRSIVEEKLDFKGGNVHVITTKEDWDQKIEEANKDGKIVVANFSASWCGPCRVIAPVYAEMSKTYPQLMFLTIDVDDLMDFSSTWDIRATPTFFFLKNGQQIDKLVGANKPELEKKVQALGDGS

SEQ ID NO: 1282 - DNA, 393 bp, Pisum sativum
  CDS (1)..(393)
atgggctcaattctctcttccctcatcggcggcgaaccagctgccgccttagaatcctccgatcacgccgtcaaaacattccactcatccgcacgctggcagctccacttcaacgaaatcaaagactcgcctcgtctcgttgtgattgatttctctgctacgtggtgtggaccgtgtaaaatgatggaaccgattgtttatgccatggctaacgaattcacggacgttgaattcatcaagatcgacgttgacgaattatcggatgtggcgcaggagtttaaggtgcaggctatgccgacgtttttgttgttgaagaatggggaagaggtggataagattgttggtgccaaaaaagatgaactcaaaaacaagattaaaaaatacagagcttag

SEQ ID NO: 1283 - protein, 130 aa, Pisum sativum
MGSILSSLIGGEPAAALESSDHAVKTFHSSARWQLHFNEIKDSPRLVVIDFSATWCGPCKMMEPIVYAMANEFTDVEFIKIDVDELSDVAQEFKVQAMPTFLLLKNGEEVDKIVGAKKDELKNKIKKYRA

SEQ ID NO: 1284 - DNA, 342 bp, Pisum sativum
  CDS (1)..(342)
atggcggaagagggacaagtgatcggtgttcacaccgtggatgcttggaaggaacagttagagaagggaaaagcctcaaagaaactgattgtagttgatttcactgcttcttggtgcggtccatgccgttttattgccccaattttggcagagattgctaaaaagcttacacatgtcactttccttaaggttgacgtggatgaattgaagactgtttccgaggagtggggaattgaagctatgccaacattcttgttcttgaaagatggtgaacttgtggacaaagttgtgggtgccaagaaggaggagctgcaattgaaaattgacaagcatgcagcttga

SEQ ID NO: 1285 - protein, 113 aa, Pisum sativum
MAEEGQVIGVHTVDAWKEQLEKGKASKKLIVVDFTASWCGPCRFIAPILAEIAKKLTHVTFLKVDVDELKTVSEEWGIEAMPTFLFLKDGELVDKVVGAKKEELQLKIDKHAA

SEQ ID NO: 1286 - DNA, 357 bp, Triticum aestivum
  CDS (1)..(357)
atggccgccgaggagggagccgtgatagcgtgccacaccaagcaagagttcgacacccacatggctaatggcaaggagaccggcaagctggtgatcattgacttcactgcttcctggtgcggtccttgtcgtgtcatagccccagtctttgctgagtacgccaagaagttccctggcgccattttcctgaaggtggacgttgacgagctgaaggacgtcgctgaagcatacaacgttgaggcaatgccgaccttcctgtttatcaaggatggtgcgaaggtggacactgttgtcggtggcaggaaggatgatatccataccaagatagtggccctcatgggttctgcatctgcctaa

SEQ ID NO: 1287 - protein, 118 aa, Triticum aestivum
MAAEEGAVIACHTKQEFDTHMANGKETGKLVIIDFTASWCGPCRVIAPVFAEYAKKFPGAIFLKVDVDELKDVAEAYNVEAMPTFLFIKDGAKVDTVVGGRKDDIHTKIVALMGSASA

SEQ ID NO: 1288 - DNA, 396 bp, Hordeum vulgare var
  CDS (1)..(396)
atgggaggctgtgtgggcaagggtcgtggcgttgtggaagaaaagcttgatttcaaaggtggaaatgtgcatgtcataacaaccaaagaggactgggaccagaagattgaagaagcaaacaaggatgggaaaattgttgtagcaaacttcagtgcttcgtggtgtgggccatgccgtgtcattgcacctgtttatgctgagatgtccaagacttatcctcaactcatgttcttgacaattgatgttgatgacctaatggatttcagctcaacatgggacatccgcgcaaccccgacgttcttcttcctcaaaaacggccagcagatcgacaagctcgtcggcgccaacaaacccgagctggagaagaaagtgcaagctcttggtgatggcagttga

SEQ ID NO: 1289 - protein, 131 aa, Hordeum vulgare var
MGGCVGKGRGVVEEKLDFKGGNVHVITTKEDWDQKIEEANKDGKIVVANFSASWCGPCRVIAPVYAEMSKTYPQLMFLTIDVDDLMDFSSTWDIRATPTFFFLKNGQQIDKLVGANKPELEKKVQALGDGS

SEQ ID NO: 1290 - DNA, 402 bp, Brassica campestris
  CDS (1)..(402)
atgggaggtgtattatcatctgtgttaggaggtggtggtggagatgaaccactcgcggggaatgaatccgaaagtcgcgtcatgaagtttagctcatcggctcggtggcagcttcacttcaacgagatcaaagaatcctcgaaactgctggtggttgacttctcagcatcctggtgtggaccttgcaggatgatagagcctgcgttcatcgccatgtctgccaagttcagtgatgttgaattcctcaaattggatgtcgatgaacttcccgatgtggctaaagagttcaatgtgacggggatgccaacttttgtgctggtgaaaaatggtaaagagattgaaaggatcgttggagcaaggaaagatgaacttgagaagaaagttctcaaacacagggcatag

SEQ ID NO: 1291 - protein, 133 aa, Brassica campestris
MGGVLSSVLGGGGGDEPLAGNESESRVMKFSSSARWQLHFNEIKESSKLLVVDFSASWCGPCRMIEPAFIAMSAKFSDVEFLKLDVDELPDVAKEFNVTGMPTFVLVKNGKEIERIVGARKDELEKKVLKHRA

SEQ ID NO: 1292 - DNA, 396 bp, Triticum aestivum
  CDS (1)..(396)
atggggggctgtgtgggcaaggatcgtagcattgtggaagaaaagcttgatttcaaaggtggaaatgtgcatgtcataacaaccaaagaggactgggaccagaagattgaagaagcaaacaaggatgggaaaattgttgtagcaaacttaagtgcttcgtggtgtgggccatgccgtgtcattgcacctgtttatgccgagatgtccaagacttatcctcaactcatgttcttgacaattgatgttgatgacctaatggatttcagctctacatgggacatccgtgcaaccccgacgttcttcttcctcaaaaacggccagcagatcgaaaagctcgtcggcgccaacaaacctgagctcgaaaagaaagtacaagctcttggcgatggcagttga

SEQ ID NO: 1293 - protein, 131 aa, Triticum aestivum
MGGCVGKDRSIVEEKLDFKGGNVHVITTKEDWDQKIEEANKDGKIVVANLSASWCGPCRVIAPVYAEMSKTYPQLMFLTIDVDDLMDFSSTWDIRATPTFFFLKNGQQIEKLVGANKPELEKKVQALGDGS

SEQ ID NO: 1294 - DNA, 459 bp, Nicotiana tabacum
  CDS (1)..(459)
atggggattactgatatggtacatagccttttctcttgtttcaagacacggtccacaaacaatgatgatgattcatcccataatgtcgagtttgctggtggaaatgtgtgccttattactacgaaagaaagttgggatcagaagttggcagaagcaaataaagagggcaaaattgttattgcgaatttcagtgcttcatggtgtggtccatgtagaatgattgccccattctactgtgagctgtctgagaaatatctttctctgatgtttctaacagtcgatgttgatgagcttacagaatttagttcatcctgggatatcaaagcaactccaactttctttttcctcaaggacagccagcagattgacaaacttgtaggggccaataaaccagagctgcagaagaaaataaccgcgattgcagacacacaggtagtatgtgagacgcaaccgcagtaa

SEQ ID NO: 1295 - protein, 152 aa, Nicotiana tabacum
MGITDMVHSLFSCFKTRSTNNDDDSSHNVEFAGGNVCLITTKESWDQKLAEANKEGKIVIANFSASWCGPCRMIAPFYCELSEKYLSLMFLTVDVDELTEFSSSWDIKATPTFFFLKDSQQIDKLVGANKPELQKKITAIADTQVVCETQPQ

SEQ ID NO: 1296 - DNA, 399 bp, Oryza sativa
  CDS (1)..(399)
atgggaggttgtgtgggcaagggacgacgacatattgaggaagacaagcttgatttcaaaggtggaaatgttcatgtcataacaagcaaagaggactgggataggaagattgaagaagcaaacaaggatgggaaaattgttgtggcaaatttcagtgcttcctggtgtggaccatgtcgtgttattgcacctatttatgctgagatgtcaaagacttatcctcaactcatgttcttgacaatagatgttgatgacctaatggatttcagctcatcatgggatatccgcgcaaagccgacctttttcttcataaaaaacgagaagcaggtcgacaagcttgtgggcgccaacaaacctgagctcgaaaagaaggttcaggcacttgctgatggcagctga

SEQ ID NO: 1297 - protein, 132 aa, Oryza sativa
MGGCVGKGRRHIEEDKLDFKGGNVHVITSKEDWDRKIEEANKDGKIVVANFSASWCGPCRVIAPIYAEMSKTYPQLMFLTIDVDDLMDFSSSWDIRAKPTFFFIKNEKQVDKLVGANKPELEKKVQALADGS

SEQ ID NO: 1298 - DNA, 402 bp, Zea mays
  CDS (1)..(402)
atgggaggctgtgcgggaaaggtacgtcgtgatgacgaagaaaagcttgattttaaaggtggaaatgttcatattataacaagcaatgagggctgggaccagaagattgcagaagcaaacagagatgggaaaactgttgttgcaaatttcagcgcttcctggtgtgggccatgccgtgtcattgctcctgtctatgctgaaatgtcaaagacttatcctcaactcatgttcttgacaatagacgttgatgacctgatggacttcagctcttcatgggacatccgtgcaaccccgacattcttcttcctcaagaacgggcagcagatcgacaagctcgtgggcgcgaacaaacctgagctcgagaagaaagtgctagcagccgctgatgccagtacgtcctag

SEQ ID NO: 1299 - protein, 133 aa, Zea mays
MGGCAGKVRRDDEEKLDFKGGNVHIITSNEGWDQKIAEANRDGKTVVANFSASWCGPCRVIAPVYAEMSKTYPQLMFLTIDVDDLMDFSSSWDIRATPTFFFLKNGQQIDKLVGANKPELEKKVLAAADASTS

SEQ ID NO: 1300 - DNA, 363 bp, Cucurbita maxima
  CDS (1)..(363)
atggctgttgaaggtcaagtgattccacttcgcgatgctgaagaattcgatgcgataatcgataaagagaaggaatctggcagactgattgtgatcgattttactgcttcctggtgcccgccatgccgtttcattgctccagtattcgcagagttggctaaggcgcacgtccatgtcactttcttgaaagtggacgtcgataatgtcaaggaaattgctaagaggttcgaggtgacagcgatgccgacctttgttttcctgaaaggaggaaacgaagttcacaggattgttggtgcggacaaggtggagctaggggttaaagtactggagttaagcgctgcacctgctacttgtgcttcttag

SEQ ID NO: 1301 - protein, 120 aa, Cucurbita maxima
MAVEGQVIPLRDAEEFDAIIDKEKESGRLIVIDFTASWCPPCRFIAPVFAELAKAHVHVTFLKVDVDNVKEIAKRFEVTAMPTFVFLKGGNEVHRIVGADKVELGVKVLELSAAPATCAS

SEQ ID NO: 1302 - DNA, 360 bp, Arabidopsis thaliana
  CDS (1)..(360)
atggcggcagaagagggtcaagtgattagttgtcacacgaacgatgtatggactgtgcaacttgataaagccaaagaatccaacaagctgattgtgattgatttcactgcttcatggtgtccaccatgccgcatgattgctccaattttcaacgatttggccaagaagttcatgtcaagtgccatcttcttcaaggtggatgttgatgaacttcagagtgttgctaaagagtttggtgtggaggcaatgccaacctttgtgttcattaaagccggcgaagttgtggataagctcgttggtgcgaataaagaagatcttcaggcgaaaatagtgaagcatactggtgttacaactgcgtaa

SEQ ID NO: 1303 - protein, 119 aa, Arabidopsis thaliana
MAAEEGQVISCHTNDVWTVQLDKAKESNKLIVIDFTASWCPPCRMIAPIFNDLAKKFMSSAIFFKVDVDELQSVAKEFGVEAMPTFVFIKAGEVVDKLVGANKEDLQAKIVKHTGVTTA

SEQ ID NO: 1304 - DNA, 405 bp, Arabidopsis thaliana
  CDS (1)..(405)
atgggaggagctttatcaactgtgtttggaagtggagaagatgcagcagctgcagggactgagtcttccgagccaagtcgcgtcctcaagtttagctcttccgctcggtggcaacttcatttcaacgagatcaaagaatcaaacaaactgctggtggttgatttctcggcttcatggtgtggaccatgtaggatgattgagcctgcgatccatgccatggctgataagttcaatgatgttgatttcgtcaaattagatgttgatgaacttcctgatgtggctaaagagtttaatgtgacggcaatgcctacctttgtgctggtgaaaaggggtaaagaaattgaaaggatcattggtgccaaaaaggacgaacttgagaagaaagttagcaaactcagagcataa

SEQ ID NO: 1305 - protein, 134 aa, Arabidopsis thaliana
MGGALSTVFGSGEDAAAAGTESSEPSRVLKFSSSARWQLHFNEIKESNKLLVVDFSASWCGPCRMIEPAIHAMADKFNDVDFVKLDVDELPDVAKEFNVTAMPTFVLVKRGKEIERIIGAKKDELEKKVSKLRA

SEQ ID NO: 1306 - DNA, 411 bp, Prunus persica
  CDS (1)..(411)
atggcggaggaaaatcaagtcatcggctgccacactactcaagcctgggaagagcagctccataagggaaacgagaacaagaaactggtggtggtggatttcacggcttcgtggtgtggaccgtgccggttgatcgccccaatcttggcggagttggctaagaagaccccagaagtgacgttcctaaaggtggacgtggatgaactgaggactgtttccgaggagtggggtgtggaggcaatgcctaccttcctcttcctcaaggaaggcaagatagtggacaaggttgtgggtgccaagaaagacgagttacagatcaaagttgccaagcatgtcgccgctgccgccgctgcctccgccacctctgcctctgccaccgctgctacagctactgctactgcatctgcttaa

SEQ ID NO: 1307 - protein, 136 aa, Prunus persica
MAEENQVIGCHTTQAWEEQLHKGNENKKLVVVDFTASWCGPCRLIAPILAELAKKTPEVTFLKVDVDELRTVSEEWGVEAMPTFLFLKEGKIVDKVVGAKKDELQIKVAKHVAAAAAASATSASATAATATATASA

SEQ ID NO: 1308 - DNA, 357 bp, Pisum sativum
  CDS (1)..(357)
atggcagcagaaaatgaggtgatcgctgttcattccgatgaatcatggaaggaacagatccagaaaggaaccgaatccaaaaaactgattgtggtggattttactgcttcgtggtgcggtccatgccgttttattgctccaattctagcagagattgctaagaagacacctcaagtcatcttcctcaaggtggacattgacgaattagagagtgttgccgaggaatggtctatcgaggctatgccaaccttcttgctcttgaaagaaggcatggaagtggataaggtagttggtgctaagaaggaagaactgcagctggcaataaccaagcatgcaacaactgttgctactgcttga

SEQ ID NO: 1309 - protein, 118 aa, Pisum sativum
MAAENEVIAVHSDESWKEQIQKGTESKKLIVVDFTASWCGPCRFIAPILAEIAKKTPQVIFLKVDIDELESVAEEWSIEAMPTFLLLKEGMEVDKVVGAKKEELQLAITKHATTVATA

SEQ ID NO: 1310 - DNA, 363 bp, Pisum sativum
  CDS (1)..(363)
atggcaggttcatcagaagagggacaagttatcagctgtcacagcgttgatgcatggaacgatatccttcacagaggcaatgaatccaagaaactgattgttgtggactttactgcttcttggtgtggaccatgccgtttcattgcaccattccttggtgaattggctaagaagtttacaaatgtcatattccttaaggtggacgtggacgaactaaagtctgttgctcaagattgggctgttgaggctatgccaacatttgtgtttgtgaaagaaggaacgattttgggcaaagtggttggagcaaagaaagaagaactgcagcagacaattgaaagacatgtggcttcatctaatgcttag

SEQ ID NO: 1311 - protein, 120 aa, Pisum sativum
MAGSSEEGQVISCHSVDAWNDILHRGNESKKLIVVDFTASWCGPCRFIAPFLGELAKKFTNVIFLKVDVDELKSVAQDWAVEAMPTFVFVKEGTILGKVVGAKKEELQQTIERHVASSNA

SEQ ID NO: 1312 - DNA, 324 bp, Neurospora crassa
  CDS (1)..(324)
atgactgtccacaacattgctaccgtcgccgagttcaaggaggccattgccaagcaccccatcgttgtccttgacgctttcgctacctggtgcggtccttgcaaggccatcgctcccactgtcgccaagtggtccgaggagcctcagttcaaggacaccgtctacttcgccaagttcgacgtcgacgcccttcccgacctcgcccaggagctcggcatccgcgccatgcccactttcgtcatcttcaagaacggcgacaaggctgacgagttcgtcggtgccaacccccctgctctcctggccaccatcaccaagcaactttga

SEQ ID NO: 1313 - protein, 107 aa, Neurospora crassa
MTVHNIATVAEFKEAIAKHPIVVLDAFATWCGPCKAIAPTVAKWSEEPQFKDTVYFAKFDVDALPDLAQELGIRAMPTFVIFKNGDKADEFVGANPPALLATITKQL

SEQ ID NO: 1314 - DNA, 366 bp, Oryza sativa subsp
  CDS (1)..(366)
atggcggcggcctcagcgacggcgcaggcggagggaacggtgatcgcgatccacagcctcgacgagtggaccatccagatcgaggaggccaacagcgccaagaagctggttgtgattgacttcactgcatcatggtgcggaccatgccgcatcattgctccagtttttgccgatctagcaaagaagcacacaaatgctgtttttctgaaggttgacgtcgatgaactgaagcctattgctgagcaattcagtgttgaggctatgccaacattcctgtttatgaaggagggagatgttaaagacagggttgtcggtgctatgaaggatgaactggcgagcaagcttgagctacatatggccatgtag

SEQ ID NO: 1315 - protein, 121 aa, Oryza sativa subsp
MAAASATAQAEGTVIAIHSLDEWTIQIEEANSAKKLVVIDFTASWCGPCRIIAPVFADLAKKHTNAVFLKVDVDELKPIAEQFSVEAMPTFLFMKEGDVKDRVVGAMKDELASKLELHMAM

SEQ ID NO: 1316 - DNA, 378 bp, Triticum aestivum
  CDS (1)..(378)
atggcggcgtcggcggcgacggcaacggcggcggcggtgggggcgggggaggtgatctccgtccacagcctggagcagtggaccatgcagatcgaggaggccaacgccgccaagaagctggtggtcattgacttcactgcatcgtggtgtggaccctgccgcattatggctccaattttcgctgatctcgccaagaagttcccagctgctgttttcctcaaggtcgatgttgatgaactgaagtccattgctgagcaattcagcgtggaggccatgccaaccttcctgttcatgaaggaaggagacgtcaaggacagggttgtcggagctatcaaggaggaactgacgaacaaggttgggctacacgcggcccagtaa

SEQ ID NO: 1317 - protein, 125 aa, Triticum aestivum
MAASAATATAAAVGAGEVISVHSLEQWTMQIEEANAAKKLVVIDFTASWCGPCRIMAPIFADLAKKFPAAVFLKVDVDELKSIAEQFSVEAMPTFLFMKEGDVKDRVVGAIKEELTNKVGLHAAQ

SEQ ID NO: 1318 - DNA, 396 bp, Phalaris coerulescens
  CDS (1)..(396)
atgggaggctgtgtgggcaaggatcgtggcattgtggaagacaagcttgatttcaaaggtgggaatgtgcatgtcataactaccaaagaggactgggaccagaaaattgcagaagcaaacaaggatgggaaaattgttgtggcaaatttcagtgcttcctggtgtgggccatgccgtgtcattgcacctgtttatgctgagatgtcaaagacgtatcctcaactcatgttcttgacaattgatgttgatgacctagtggatttcagctcaacatgggacatccgtgcaaccccaacgttcttcttcctcaagaatggccagcagatcgacaagctcgttggcgccaacaagcctgagctcgaaaagaaagtacaagctcttggcgatggcagttga

SEQ ID NO: 1319 - protein, 131 aa, Phalaris coerulescens
MGGCVGKDRGIVEDKLDFKGGNVHVITTKEDWDQKIAEANKDGKIVVANFSASWCGPCRVIAPVYAEMSKTYPQLMFLTIDVDDLVDFSSTWDIRATPTFFFLKNGQQIDKLVGANKPELEKKVQALGDGS

SEQ ID NO: 1320 - DNA, 396 bp, Lolium perenne
  CDS (1)..(396)
atgggaggctgtgtgggcaaggaccgtagcattgtggaagataagcttgatttcaaaggtggaaatgtgcatgtcatcacaaccaaagaggactgggaccaaaaggttgcagaagctaacaaagatgggaaaattgttgtggcgaatttcagcgcttcctggtgtggcccatgccgtgtcattgcacctgtttatgctgagatgtcaaagacttatccccaactcatgttcttgacaattgacgttgatgacctaatggatttcagctcaacatgggacatccgtgcaaccccgacgttcttcttcctcaagaacggccagctgattgacaagctcgtcggcgccaacagacctgagctcgaaaagaaagtacaagctattggcgatggcagctga

SEQ ID NO: 1321 - protein, 131 aa, Lolium perenne
MGGCVGKDRSIVEDKLDFKGGNVHVITTKEDWDQKVAEANKDGKIVVANFSASWCGPCRVIAPVYAEMSKTYPQLMFLTIDVDDLMDFSSTWDIRATPTFFFLKNGQLIDKLVGANRPELEKKVQAIGDGS

SEQ ID NO: 1322 - DNA, 396 bp, Secale cereale
  CDS (1)..(396)
atggggggctgtgtggggaagggtcgtagcattgtggaagaaaagcttgatttcaaaggtggaaatgtgcatgtcataacaaccaaagaggactgggaccagaagattgaagaagcaaacaaggatgggaaaattgttgtagcaaacttcagtgcttcgtggtgtgggccatgccgtgtcgttgcacctgtttatgctgggatgtccaagacttatcctcaactcatgttcttgacaattgatgttgatgacctaatggatttcagctcaacatgggacatccgtgcaaccccgacgttcttcttcctgaaaaacggccagcagatcgacaagctcgtcggcgccaacaaacctgagctcgagaagaaagtacaagctcttggtgatggcagttga

SEQ ID NO: 1323 - protein, 131 aa, Secale cereale
MGGCVGKGRSIVEEKLDFKGGNVHVITTKEDWDQKIEEANKDGKIVVANFSASWCGPCRVVAPVYAGMSKTYPQLMFLTIDVDDLMDFSSTWDIRATPTFFFLKNGQQIDKLVGANKPELEKKVQALGDGS

SEQ ID NO: 1324 - DNA, 396 bp, Hordeum bulbosum
  CDS (1)..(396)
atgggaggctgtgtgggcaaggaccgtagcattgtagaagataagcttgatttcaaaggtggaaatgtgcatgtcatcacaaccaaagaggactgggaccaaaaggttgcagaagcaaacaaggatgggaaaattgttgttgcaaacttcagtgcttcgtggtgtgggccatgccgcgtcattgcacctgtttatgctgagatgtccaagacttatcctcaactcatgttcttgacaattgatgttgatgacctaatggatttcggctcaacatgggacatccgcgcaacgccgacgtttttcttcctcaaaaacggccagcagatcgacaagctcgtcggcgccaacaaacctgagctcgagaagaaagtgcaagctcttggtgatggcagttga

SEQ ID NO: 1325 - protein, 131 aa, Hordeum bulbosum
MGGCVGKDRSIVEDKLDFKGGNVHVITTKEDWDQKVAEANKDGKIVVANFSASWCGPCRVIAPVYAEMSKTYPQLMFLTIDVDDLMDFGSTWDIRATPTFFFLKNGQQIDKLVGANKPELEKKVQALGDGS

SEQ ID NO: 1326 - DNA, 378 bp, Hevea brasiliensis
  CDS (1)..(378)
atggagacccaagagcagcaagctaagtcaagagtggtgaaggtggattcggtggagtcttgggacttctatgttacccaagccaataatcaaggctgccctattgttgtacactttactgcttcatggtgtatcccctctgtggccatgaacccttttttcgaggaattagcctcggcttatccagatgtcctgtttctagctgttgatgtcgatgaagtcaaggaggtggcttctaaactggaggtaaaggccatgcctacatttgtgctgatgaaggatggtgcacaaattgacaggctggtgggtgccaatccagaggagataaggaaaaggattggtgggtttgctcagtccattcgtgtggctgtagcctag

SEQ ID NO: 1327 - protein, 125 aa, Hevea brasiliensis
METQEQQAKSRVVKVDSVESWDFYVTQANNQGCPIVVHFTASWCIPSVAMNPFFEELASAYPDVLFLAVDVDEVKEVASKLEVKAMPTFVLMKDGAQIDRLVGANPEEIRKRIGGFAQSIRVAVA

SEQ ID NO: 1328 - DNA, 345 bp, Drosophila melanogaster
  CDS (1)..(345)
atgatgatattactcagagatagtactaatttacattttcatttgcaggccgatctcgatggacagctgaccaaggcatccggcaagctggtggtgctggatttcttcgccacttggtgtggaccctgcaagatgatctcgcccaaactggttgaactctccacgcagttcgccgacaacgtcgttgtcctgaaggtcgatgtggacgaatgcgaagacattgcaatggaatacaacatctccagcatgcccaccttcgtgttcctcaagaacggcgtcaaggtcgaagagttcgccggagccaacgccaagcgtctggaggatgtcatcaaggccaatatctaa

SEQ ID NO: 1329 - protein, 114 aa, Drosophila melanogaster
MMILLRDSTNLHFHLQADLDGQLTKASGKLVVLDFFATWCGPCKMISPKLVELSTQFADNVVVLKVDVDECEDIAMEYNISSMPTFVFLKNGVKVEEFAGANAKRLEDVIKANI

SEQ ID NO: 1330 - DNA, 321 bp, Coprinus comatus
  CDS (1)..(321)
atggtccaagttatatccaacctcgatgagttcaacaagctcaccaacagcgggaagatcatcatcattgatttctgggctacatggtgtggtccttgccgtgtcattagtcccatcttcgagaagttctcagaaaaatacggtgccaataacatcgtcttcgcaaaggtggatgtagacactgcctccgatatctctgaggaagcaaaaatccgtgctatgcccactttccaggtttataaggatggtcagaagatcgatgagctcgttggtgctaacccaactgcacttgagtcccttgtccagaagtctttagcgtga

SEQ ID NO: 1331 - protein, 106 aa, Coprinus comatus
MVQVISNLDEFNKLTNSGKIIIIDFWATWCGPCRVISPIFEKFSEKYGANNIVFAKVDVDTASDISEEAKIRAMPTFQVYKDGQKIDELVGANPTALESLVQKSLA

SEQ ID NO: 1332 - DNA, 333 bp, Emericella nidulans
  CDS (1)..(333)
atgggtgcctctgaacacgtcccccccattacctctaaggccgaattccaggagaaggtcctgaacgccaagggcttcgtcgtcgtcgactgcttcgcgacatggtgcggtccctgcaaggccattgcgcccaccgttgagaaattcgcccagacctacaccgacgcttcattctaccagattgatgttgacgagctctccgaggttgccgctgagctcggtattcgcgccatgcctactttccttctgttcaaggatggccagaaggttagcgatgtggttggtgccaaccccggtgcgctcgaggccggtatcaaggctctgcttgcttag

SEQ ID NO: 1333 - protein, 110 aa, Emericella nidulans
MGASEHVPPITSKAEFQEKVLNAKGFVVVDCFATWCGPCKAIAPTVEKFAQTYTDASFYQIDVDELSEVAAELGIRAMPTFLLFKDGQKVSDVVGANPGALEAGIKALLA

SEQ ID NO: 1334 - DNA, 312 bp, Saccharomyces cerevisiae
  CDS (1)..(312)
atggttactcaattcaaaactgccagcgaattcgactctgcaattgctcaagacaagctagttgtcgtagatttctacgccacttggtgcggtccatgtaaaatgattgctccaatgattgaaaaattctctgaacaatacccacaagctgatttctataaattggatgtcgatgaattgggtgatgttgcacaaaagaatgaagtttccgctatgccaactttgcttctattcaagaacggtaaggaagttgcaaaggttgttggtgccaacccagcggctattaagcaagccattgctgctaatgcttaa

SEQ ID NO: 1335 - protein, 103 aa, Saccharomyces cerevisiae
MVTQFKTASEFDSAIAQDKLVVVDFYATWCGPCKMIAPMIEKFSEQYPQADFYKLDVDELGDVAQKNEVSAMPTLLLFKNGKEVAKVVGANPAAIKQAIAANA

SEQ ID NO: 1336 - DNA, 315 bp, Saccharomyces cerevisiae
  CDS (1)..(315)
atggtcactcaattaaaatccgcttctgaatacgacagtgctttagcatctggcgacaagttagtcgttgttgacttttttgccacatggtgtgggccatgtaaaatgattgcaccaatgattgaaaagtttgcagaacaatattctgacgctgctttttacaagttggatgttgatgaagtctcagatgttgctcaaaaagctgaagtttcttccatgcctaccctaatcttctacaagggcggtaaggaggttaccagagtcgtcggtgccaacccagctgctatcaagcaagctattgcttccaacgtatag

SEQ ID NO: 1337 - protein, 104 aa, Saccharomyces cerevisiae
MVTQLKSASEYDSALASGDKLVVVDFFATWCGPCKMIAPMIEKFAEQYSDAAFYKLDVDEVSDVAQKAEVSSMPTLIFYKGGKEVTRVVGANPAAIKQAIASNV

SEQ ID NO: 1338 - DNA, 558 bp, Arabidopsis thaliana
  CDS (1)..(558)
atgcctctctctctccgacttgctccatctccgacgtctttccgttattctccgattacatctaccggcgccggaggattttcccccgtgaagcagcactgccggatcccgaattcgggcgtcgcgacgaaaattggattctgttctggtggtggtggtgttttagattccggtagaaggattggttcctgtgtggtgaggtgtagcttagaaacagtgaatgtcactgttggccaggtgacggaggttgataaggacacgttctggccaattgttaaagccgccggtgataagattgttgtcctcgacatgtacactcagtggtgtggtccttgcaaagtgattgctcccaaatacaaagagctatcggagaagtaccaggacatggtgtttcttaagcttgattgtaaccaagacaacaagccattggcgaaagagctaggaattagagtggttccaacttttaaaatcttgaaagacaacaaggtagtaaaggaagtgaccggggcaaaatatgaagacttacttgcagccattgaagcagcaaggtcaggctga

SEQ ID NO: 1339 - protein, 185 aa, Arabidopsis thaliana
MPLSLRLAPSPTSFRYSPITSTGAGGFSPVKQHCRIPNSGVATKIGFCSGGGGVLDSGRRIGSCVVRCSLETVNVTVGQVTEVDKDTFWPIVKAAGDKIVVLDMYTQWCGPCKVIAPKYKELSEKYQDMVFLKLDCNQDNKPLAKELGIRVVPTFKILKDNKVVKEVTGAKYEDLLAAIEAARSG

SEQ ID NO: 1340 - DNA, 549 bp, Brassica napus
  CDS (1)..(549)
atgcctctgtctctgcgtctcgctccatctcctacggctttatctccgaccaccggcggatttagtcctgcgaaaaagcagtgtcgtatcccttcttactccggcgtggcgacgacgacgaggaggattggtttgtgctcattggattatgtgaaaaggggagactcctctgtggtgaggtgtagcttacagaccgtgaatgtcagtgttggtcaagtgacggaagtggataaggataccttctggcccatcgttaaagccgccggtgaaaagattgtggtacttgacatgtacactcaatggtgtggtccatgtaaagtgattgctcccaagtacaaagctttatcagagaagtatgaggacgttgtgtttcttaagcttgactgcaaccctgaaaacaggccattggcaaaggagctagggataagagtggttccaacttttaaaatattgaaggataaccaagtggtgaaggaagttacgggtgccaaatatgatgatctggttgcagccattgaaacagctaggtctgctagttcttcgggatga

SEQ ID NO: 1341 - protein, 182 aa, Brassica napus
MPLSLRLAPSPTALSPTTGGFSPAKKQCRIPSYSGVATTTRRIGLCSLDYVKRGDSSVVRCSLQTVNVSVGQVTEVDKDTFWPIVKAAGEKIVVLDMYTQWCGPCKVIAPKYKALSEKYEDVVFLKLDCNPENRPLAKELGIRVVPTFKILKDNQVVKEVTGAKYDDLVAAIETARSASSSG

SEQ ID NO: 1342 - DNA, 345 bp, Arabidopsis thaliana
  CDS (1)..(345)
atggcttcggaagaaggacaagtgatcgcctgccacaccgttgagacatggaacgagcagcttcagaaggctaatgaatccaaaactcttgtggtggttgatttcacggcttcttggtgtggaccatgtcgtttcatcgctccattctttgctgatttggctaagaaacttcctaacgtgcttttcctcaaggttgatactgatgaattgaagtcggtggcaagtgattgggcgatacaggcgatgccaaccttcatgtttttgaaggaagggaagattttggacaaagttgttggagccaagaaagatgagcttcagtctaccattgccaaacacttggcttaa

SEQ ID NO: 1343 - protein, 114 aa, Arabidopsis thaliana
MASEEGQVIACHTVETWNEQLQKANESKTLVVVDFTASWCGPCRFIAPFFADLAKKLPNVLFLKVDTDELKSVASDWAIQAMPTFMFLKEGKILDKVVGAKKDELQSTIAKHLA

SEQ ID NO: 1344 - DNA, 372 bp, Brassica napus
  CDS (1)..(372)
atggccgcaacagcagaagtgatcccagcaggagaagtgatcgcttgccacaccgtcgaggactggaacaacaagttgaaggcagccaaagaatccaacaaactgattgtgatagacttcacagcagtgtggtgcccaccttgccgtttcattgcacctatctttgtcgagctcgctaagaagcaccttgatgttgtcttcttcaaggtcgacgtcgatgaattggctactgttgctcaggagttcgatgttcaggccatgccaacctttgtctacatgaaaggcgaagagaagctcgacaaggttgttggtgctgccaaggaggaaatcgaagccaagcttttgaagcactctcaagttgctgccgcttga

SEQ ID NO: 1345 - protein, 123 aa, Brassica napus
MAATAEVIPAGEVIACHTVEDWNNKLKAAKESNKLIVIDFTAVWCPPCRFIAPIFVELAKKHLDVVFFKVDVDELATVAQEFDVQAMPTFVYMKGEEKLDKVVGAAKEEIEAKLLKHSQVAAA

SEQ ID NO: 1346 - DNA, 381 bp, Nicotiana tabacum
  CDS (1)..(381)
atggctgctaacgatgctacttcatccgaggagggacaagtgttcggctgccacaaggttgaggaatggaacgagtacttcaagaaaggcgttgagactaagaaactggtggtggtcgattttactgcttcatggtgcggcccttgccgttttattgccccaattcttgctgacattgctaagaagatgccccatgttatattcctcaaggttgatgttgatgaactgaagactgtttcagcggaatggagtgtggaggcaatgccaacttttgtcttcattaaagatggaaaagaagtggacagagttgttggtgccaagaaagaggagttgcagcagaccatagtgaagcatgctgctcctgctactgtcactgcttga

SEQ ID NO: 1347 - protein, 126 aa, Nicotiana tabacum
MAANDATSSEEGQVFGCHKVEEWNEYFKKGVETKKLVVVDFTASWCGPCRFIAPILADIAKKMPHVIFLKVDVDELKTVSAEWSVEAMPTFVFIKDGKEVDRVVGAKKEELQQTIVKHAAPATVTA

SEQ ID NO: 1348 - DNA, 402 bp, Arabidopsis thaliana
  CDS (1)..(402)
atgggaggagctttatcaactgtgtttggaagtggagaagatgcaacagctgcagggaccgaatctgagccaagtcgcgtcctaaagtttagctcttccgctcggtggcaacttcatttcaacgagatcaaagaatcaaacaaactgctggtggttgatttctcggcctcatggtgcggaccatgtaggatgattgagcctgcgattcatgccatggctgataagttcaatgatgttgatttcgtcaaattagatgttgatgaacttcctgatgtggctaaagagtttaatgtgacggcaatgcctacctttgtgctggtgaaaaggggtaaagaaattgaaagaatcattggtgccaaaaaggacgaacttgagaagaaagttagcaaactcagagcataa

SEQ ID NO: 1349 - protein, 133 aa, Arabidopsis thaliana
MGGALSTVFGSGEDATAAGTESEPSRVLKFSSSARWQLHFNEIKESNKLLVVDFSASWCGPCRMIEPAIHAMADKFNDVDFVKLDVDELPDVAKEFNVTAMPTFVLVKRGKEIERIIGAKKDELEKKVSKLRA

SEQ ID NO: 1350 - DNA, 360 bp, Brassica napus
  CDS (1)..(360)
atggctgcagaagagggacaagtgatcggttgccacgagattgatgtatgggccgtgcagctcgacacagccaaacaatccaacaagctgattgtgatagatttcactgcttcatggtgcccaccatgccgcatgattgctccagttttcgcagatctggccaagaagttcatgtcaagtgccatcttcttcaaggtggacgtcgatgaactgcagaatgtagctcaagagtttggtgtggaggcaatgccgacctttgttctcatcaaagacggaaatgttgttgataaggtcgttggtgcaaggaaggaagatcttcatgccacaatagccaagcatactggtgttgctactgcttaa

SEQ ID NO: 1351 - protein, 119 aa, Brassica napus
MAAEEGQVIGCHEIDVWAVQLDTAKQSNKLIVIDFTASWCPPCRMIAPVFADLAKKFMSSAIFFKVDVDELQNVAQEFGVEAMPTFVLIKDGNVVDKVVGARKEDLHATIAKHTGVATA

SEQ ID NO: 1352 - DNA, 357 bp, Nicotiana tabacum
  CDS (1)..(357)
atggcagaggaaggacaagtcatcggcgtccacacggttgatgcatggaacgagcatctccaaaagggaattgatgacaaaaaactgatagttgtggacttcactgcttcttggtgcggtccctgtaagttcattgcctcattctatgcagagttggccaagaagatgcccactgttaccttcctgaaagtggatgtggatgaattgaagtcggtagctactgactgggctgtggaggcaatgccaactttcatgttcctcaaggagggaaagattgttgataaggtggtaggagccaaaaaagatgagctgcagcagaccattgccaagcacatcagtagtacctcaacagcctaa

SEQ ID NO: 1353 - protein, 118 aa, Nicotiana tabacum
MAEEGQVIGVHTVDAWNEHLQKGIDDKKLIVVDFTASWCGPCKFIASFYAELAKKMPTVTFLKVDVDELKSVATDWAVEAMPTFMFLKEGKIVDKVVGAKKDELQQTIAKHISSTSTA

SEQ ID NO: 1354 - DNA, 357 bp, Arabidopsis thaliana
  CDS (1)..(357)
atggccgcagaaggagaagttatcgcttgccacaccgttgaagattggaccgagaagctcaaagccgccaacgaatccaagaaactgattgtgatagacttcactgcaacatggtgcccaccttgccgtttcattgcacccgtctttgctgacttagccaagaagcacctcgacgtagtcttcttcaaggtcgatgttgacgaattgaacactgttgctgaggagtttaaagttcaggcaatgccaacgtttatcttcatgaaagaaggagagatcaaggagactgtggttggtgctgctaaagaagaaatcattgccaatctcgagaagcacaagacagttgttgctgctgcttga

SEQ ID NO: 1355 - protein, 118 aa, Arabidopsis thaliana
MAAEGEVIACHTVEDWTEKLKAANESKKLIVIDFTATWCPPCRFIAPVFADLAKKHLDVVFFKVDVDELNTVAEEFKVQAMPTFIFMKEGEIKETVVGAAKEEIIANLEKHKTVVAAA

SEQ ID NO: 1356 - DNA, 360 bp, Arabidopsis thaliana
  CDS (1)..(360)
atggcggcagaagagggtcaagtgattggttgtcacacgaacgatgtatggactgtgcaacttgataaagccaaagaatccaacaagctgattgtgattgatttcactgcttcatggtgtccaccatgccgcatgattgctccaattttcaacgatttggccaagaagttcatgtcaagtgccatcttcttcaaggtggatgttgatgaacttcagagtgttgctaaagagtttggtgtggaggcaatgccaacctttgtgttcattaaagccggcgaagttgtggataagctcgttggtgcgaataaagaagatcttcaggcgaaaatagtgaagcatactggtgttacaactgcgtaa

SEQ ID NO: 1357 - protein, 119 aa, Arabidopsis thaliana
MAAEEGQVIGCHTNDVWTVQLDKAKESNKLIVIDFTASWCPPCRMIAPIFNDLAKKFMSSAIFFKVDVDELQSVAKEFGVEAMPTFVFIKAGEVVDKLVGANKEDLQAKIVKHTGVTTA

SEQ ID NO: 1358 - DNA, 357 bp, Arabidopsis thaliana
  CDS (1)..(357)
atggccggtgaaggagaagtgattgcttgccataccctcgaagtttggaacgagaaggtcaaagacgccaatgaatccaagaaactgattgtgatagacttcacagcatcatggtgtccaccttgccgtttcattgcaccagtgtttgcagagatggctaagaagttcactaatgttgtcttcttcaagatcgatgttgatgaattgcaagctgttgctcaggaattcaaagttgaggcaatgcctacttttgttttcatgaaagaaggcaacatcattgatcgtgttgtcggtgctgcgaaagatgagatcaatgagaagctgatgaagcatggtggtcttgtagcttctgcttga

SEQ ID NO: 1359 - protein, 118 aa, Arabidopsis thaliana
MAGEGEVIACHTLEVWNEKVKDANESKKLIVIDFTASWCPPCRFIAPVFAEMAKKFTNVVFFKIDVDELQAVAQEFKVEAMPTFVFMKEGNIIDRVVGAAKDEINEKLMKHGGLVASA

SEQ ID NO: 1360 - DNA, 372 bp, Brassica rapa
  CDS (1)..(372)
atggccgcaacagcagaattgatcccagcaggagaagtgatcgcttgccacaccgtcgaggactggaacaacaagctcaaggcagccaaagaatccaacaaactgattgtgatagacttcacagcagtgtggtgcccaccttgccgtttcattgcacccatctttgtcgagctcgctaagaagcaccttgatgttgtcttcttcaaggtcgacgtcgatgaattggccactgttgctaaggagttcgatgttcaggccatgccgacctttgtctacatgaaaggcgaagagaagctcgacaaggttgttggtgctgcgaaggaggaaatcgaagccaagcttttgaagcactctcaagttgctgccgcttga

SEQ ID NO: 1361 - protein, 123 aa, Brassica rapa
MAATAELIPAGEVIACHTVEDWNNKLKAAKESNKLIVIDFTAVWCPPCRFIAPIFVELAKKHLDVVFFKVDVDELATVAKEFDVQAMPTFVYMKGEEKLDKVVGAAKEEIEAKLLKHSQVAAA

SEQ ID NO: 1362 - DNA, 342 bp, Chlamydomonas reinhardtii
  CDS (1)..(342)
atgggcggttctgttattgtgatcgactccaaggcggcttgggacgctcagctggccaagggcaaggaggagcacaagccgattgttgtcgacttcactgctacgtggtgcggtccttgcaagatgattgcgccgctgtttgagacgctgagcaacgactatgctggcaaggtcatcttcctgaaggtcgatgttgacgccgtcgcggctgttgccgaggctgccggcatcaccgccatgcccaccttccatgtgtacaaggatggcgtgaaggcggacgacctagtgggcgccagccaggacaagctcaaggccctggtcgccaagcacgccgccgcgtaa

SEQ ID NO: 1363 - protein, 113 aa, Chlamydomonas reinhardtii
MGGSVIVIDSKAAWDAQLAKGKEEHKPIVVDFTATWCGPCKMIAPLFETLSNDYAGKVIFLKVDVDAVAAVAEAAGITAMPTFHVYKDGVKADDLVGASQDKLKALVAKHAAA

SEQ ID NO: 1364 - DNA, 351 bp, Fagopyrum esculentum
  CDS (1)..(351)
atggcggaagaagcacaagttatcgcatgccacacggtccaggagtggaacgagaagttccagaaagccaaggattccggcaaattgattgtgatcgatttcaccgcatcatggtgcggtccctgccgcgtcataactccgtacgtgtctgagcttgccaagaagtttcctcatgtggccttcttcaaagtggatgttgatgatttgaaggatgtcgctgaggaatacaaggtggaggcaatgccgagctttgttatactgaaagaggggcaggaggttgaaaggattgtgggtgccaggaaggacgaactccttcataagatagcagttcatgccccaatcactgcttga

SEQ ID NO: 1365 - protein, 116 aa, Fagopyrum esculentum
MAEEAQVIACHTVQEWNEKFQKAKDSGKLIVIDFTASWCGPCRVITPYVSELAKKFPHVAFFKVDVDDLKDVAEEYKVEAMPSFVILKEGQEVERIVGARKDELLHKIAVHAPITA

SEQ ID NO: 1366 - DNA, 369 bp, Oryza sativa
  CDS (1)..(369)
atggccgccgaggagggagtcgtgatcgcctgccacaacaaggacgagttcgacgcccagatgaccaaggccaaggaggccggcaaagtggtcataattgacttcactgcttcctggtgtggcccttgccgcttcatcgccccagtgttcgctgaatacgccaaaaagttccctggtgctgtcttcctgaaggttgatgttgatgagctgaaggaagttgctgaaaagtacaatgtcgaggcaatgccgaccttcctattcatcaaggatggtgctgaggctgacaaggtcgttggcgccaggaaggatgacctccagaacaccatcgtgaagcacgtcggtgccactgctgcatctgcttctgcctaa

SEQ ID NO: 1367 - protein, 122 aa, Oryza sativa
MAAEEGVVIACHNKDEFDAQMTKAKEAGKVVIIDFTASWCGPCRFIAPVFAEYAKKFPGAVFLKVDVDELKEVAEKYNVEAMPTFLFIKDGAEADKVVGARKDDLQNTIVKHVGATAASASA

SEQ ID NO: 1368 - DNA, 357 bp, Ricinus communis
  CDS (1)..(357)
atggcagcagaagaagggcaagtgatcgggtgccacactgttgaggcatggaatgagcaattgcagaagggaaatgataccaagggactgatcgttgttgattttactgcttcatggtgtggaccatgccgtttcattgctcccttcttggctgagctggccaagaaactgccaaatgttaccttcctgaaggtggatgtggatgaactgaagactgttgctcacgagtgggctgtggagtcaatgccaacctttatgttcctgaaggaggggaagattatggacaaggtggttggagcaaagaaagacgaactgcagcaaactatagcgaaacacatggctactgcttccacttaa

SEQ ID NO: 1369 - protein, 118 aa, Ricinus communis
MAAEEGQVIGCHTVEAWNEQLQKGNDTKGLIVVDFTASWCGPCRFIAPFLAELAKKLPNVTFLKVDVDELKTVAHEWAVESMPTFMFLKEGKIMDKVVGAKKDELQQTIAKHMATAST

SEQ ID NO: 1370 - DNA, 384 bp, Triticum aestivum
  CDS (1)..(384)
atggcggcgtcggcggcgacggcgacggcgacggcggcggcggtaggggcgggggaggtgatctccgtccacagcctggagcagtggaccatgcagatcgaggaggccaacgccgccaagaagctggtggtgattgacttcactgcatcatggtgcggaccatgccgcattatggctccaattttcgctgatctcgccaagaagttcccagctgctgttttcctcaaggtcgacgttgatgaactgaagcccattgctgagcaattcagcgtggaggccatgccaaccttcctgttcatgaaggaaggagatgtcaaggacagggttgtcggagctatcaaggaggaactgacgaccaaggttgggctacacgcggcccagtaa

SEQ ID NO: 1371 - protein, 127 aa, Triticum aestivum
MAASAATATATAAAVGAGEVISVHSLEQWTMQIEEANAAKKLVVIDFTASWCGPCRIMAPIFADLAKKFPAAVFLKVDVDELKPIAEQFSVEAMPTFLFMKEGDVKDRVVGAIKEELTTKVGLHAAQ

SEQ ID NO: 1372 - DNA, 357 bp, Arabidopsis thaliana
  CDS (1)..(357)
atggcaagagttgttaaaatcgattctgcagagtcatggaatttctatgtgagtcaagccaagaatcagaattgtcccattgtggctcatttcactgcattatggtgtattccttctgtgtttatgaactccttcttcgaagagcttgcgtttaactataaggatgctctgtttctaatagttgatgttgatgaagttaaggaagtggcaagtcaactagaggtaaaggcgatgccaactttcttgttcttgaaggatggtaatgcgatggacaaactcgtgggcgccaaccctgatgagattaagaaacgggtcgatggtttcgttcagtcctcacgtgttgttcatattgcttaa

SEQ ID NO: 1373 - protein, 118 aa, Arabidopsis thaliana
MARVVKIDSAESWNFYVSQAKNQNCPIVAHFTALWCIPSVFMNSFFEELAFNYKDALFLIVDVDEVKEVASQLEVKAMPTFLFLKDGNAMDKLVGANPDEIKKRVDGFVQSSRVVHIA

SEQ ID NO: 1374 - DNA, 396 bp, Oryza sativa
  CDS (1)..(396)
atggggtcctgtgtgggaaaggaacgcagtgatgaagaagacaagattgacttcaaaggtggcaatgtgcatgtgattagtaacaaagagaattgggaccacaaaattgcagaggcaaacaaggatgggaaaattgtgattgcaaatttcagtgctgcatggtgtggaccatgccgtgtcattgcacctgtatatgctgagatgtcacagacatacccccagttcatgttcttgactatagatgtcgacgagttaatggacttcagctcatcatgggacatccgagcgacaccgacgttcttcttcctaaagaacggggagcaggtggacaagctcgtcggcgccaacaagccggagctggagaagaaagtggccgcgcttgctgacagcgcctga

SEQ ID NO: 1375 - protein, 131 aa, Oryza sativa
MGSCVGKERSDEEDKIDFKGGNVHVISNKENWDHKIAEANKDGKIVIANFSAAWCGPCRVIAPVYAEMSQTYPQFMFLTIDVDELMDFSSSWDIRATPTFFFLKNGEQVDKLVGANKPELEKKVAALADSA

SEQ ID NO: 1376 - DNA, 405 bp, Oryza sativa
  CDS (1)..(405)
atgggctccttcttctcgacgatgttcacgccgccgcccgccgccgacgacggcggcgactcgcgcgtggtggccgtccactccacggccacctgggacgagcagtggggcgcccacaagagcaaccccaacaagctgatcgtgatcgacttctccgccacctggtgcgggccctgccgcttcatcgagccggccttcaaggacatggccggacgcttcgccgacgccgtcttcttcaagatcgatgtcgacgaactttcggaagtggcgaggcaatggaaagtggaggccatgccgacctttgtgttaatcaagggcgggaaggaggttagtcgcgtggttggtgctaagaaggatgaactggagaggaaagtcaacatgttcatttcatcctcctcatcctaa

SEQ ID NO: 1377 - protein, 134 aa, Oryza sativa
MGSFFSTMFTPPPAADDGGDSRVVAVHSTATWDEQWGAHKSNPNKLIVIDFSATWCGPCRFIEPAFKDMAGRFADAVFFKIDVDELSEVARQWKVEAMPTFVLIKGGKEVSRVVGAKKDELERKVNMFISSSSS

SEQ ID NO: 1378 - DNA, 417 bp, Oryza sativa
  CDS (1)..(417)
atgggcggcgccttctcgacgtcgaagccgaagcccgccgccggcgaggagggcggcgagtccgccgtggtggccgtccactccaaggccaagtgggacgagctgtgggacgcccacaagaacaccacaaagctggtggtgatagacttctcggcgtcgtggtgtgggccgtgcaagatgatggagccggtgttcaaggagatggccggccgcttcaccgacgtcgccttcctcaaggtcgacgtcgacgagctcgcggaggtggcgcggacctggcgggtggaggcgatgccgacgttcgtgctggcgaggggcggcgaggaggtcggccgcatcgtcggcgccgacaaggacgagctcgagaagaccatcaacacgctcaggtcatcgtcgtcgtcgacggcgacgacgacgtga

SEQ ID NO: 1379 - protein, 138 aa, Oryza sativa
MGGAFSTSKPKPAAGEEGGESAVVAVHSKAKWDELWDAHKNTTKLVVIDFSASWCGPCKMMEPVFKEMAGRFTDVAFLKVDVDELAEVARTWRVEAMPTFVLARGGEEVGRIVGADKDELEKTINTLRSSSSSTATTT

SEQ ID NO: 1380 - DNA, 423 bp, Brassica napus
  CDS (1)..(423)
atgggaagctgtgtctctaagggcaaagaagacgatgattcaatccataacgttgatttttccggtggcaacgttcatctcatcacaactaaagaaagctgggatgagaaactagccgaagctggccgtgatggcaaaattgtgattgcaaacttcagcgcgacatggtgtgggccttgtaaggtcgtggcaccgttcttcatcgagctctcagagaaacatccttctatcatgttccttcttgtagatgttgatgaactcagcgattttagctcatcatgggacataaaggcaacaccaaccttcttctttcttaaaaacggtcagcaaataggcaagcttgttggtgctaacaagcctgagctacagaagaaggttacttccatccttgactctgtacctgagagtccacaacggccttga

SEQ ID NO: 1381 - protein, 140 aa, Brassica napus
MGSCVSKGKEDDDSIHNVDFSGGNVHLITTKESWDEKLAEAGRDGKIVIANFSATWCGPCKVVAPFFIELSEKHPSIMFLLVDVDELSDFSSSWDIKATPTFFFLKNGQQIGKLVGANKPELQKKVTSILDSVPESPQRP

SEQ ID NO: 1382 - DNA, 381 bp, Brassica napus
  CDS (1)..(381)
atggaagatcaagaactgcagaagagttcaagagttgttaaagtcgattctcctgagtcatggaacttttatgtgagtcaagccaagagtcaggcttgtcctattgtggctcatttcacagcatcttggtgtattccttctgtgtttatgaactcgttctttgaagatcttgcctctagctataaggatgctctgtttcttatagttgatgttgatgaagtcaaggaagtggcgagacggctaaaggtaaaggctatgcctacttttatgttcttgaaggatggtaatacgatggacaaactggtgggcgcaaatcctgatgagatcaagaaaagggtcgatggtttcgttcagtcctcacgccttgttcatattgcttag

SEQ ID NO: 1383 - protein, 126 aa, Brassica napus
MEDQELQKSSRVVKVDSPESWNFYVSQAKSQACPIVAHFTASWCIPSVFMNSFFEDLASSYKDALFLIVDVDEVKEVARRLKVKAMPTFMFLKDGNTMDKLVGANPDEIKKRVDGFVQSSRLVHIA

SEQ ID NO: 1384 - DNA, 456 bp, Brassica napus
  CDS (1)..(456)
atgggtgctaatgtttcttcgccagaccagaggtattcagtgacggccgacctcccttccaggaggccatggacacctcgcttcgagtcccatatttctccttacaaagtcaacatcccccttattgtggaaatcaagaacaagaatcagtggaaatctcggctcaacagtctcaaggacaccaacaagctgcttgtgatcgagttcacggccaaatggtgtggaccttgtaaatcccttgagccgaaggttgaagagttggcggctaagtacacagatgttgaattcgtgaagattgatgtcgatgtgttaatgagtgtgtggatggagtacaaccttcatactttgcctgcgattgtattcatgaagagaggccaagaagtagacagagttgtgggtgtgaagtttgatgaattagagaggaaactccacaaatacgcacaatccttcttttga

SEQ ID NO: 1385 - protein, 151 aa, Brassica napus
MGANVSSPDQRYSVTADLPSRRPWTPRFESHISPYKVNIPLIVEIKNKNQWKSRLNSLKDTNKLLVIEFTAKWCGPCKSLEPKVEELAAKYTDVEFVKIDVDVLMSVWMEYNLHTLPAIVFMKRGQEVDRVVGVKFDELERKLHKYAQSFF

SEQ ID NO: 1386 - DNA, 402 bp, Brassica napus
  CDS (1)..(402)
atgggaggtgtattatcatctgtgttaggaggtggtggtggagatgaagcagtcgcggggaatgattccgaaagccgcgtcatgaagtttagctcatcggctcggtggcagcttcacttcaacgagatcaaagaatcctcgaaactgctggtggttgacttctcagcatcctggtgtggaccttgtaggatgatcgagcctgcgttcatcgccatggctgccaagttcactgatgttgaattcgtcaaattggatgtcgatgaacttcccgatgtggctaaagagttcaatgtgacggggatgccaacttttgtgctggtgaaaaatggtaaagagattgaaaggatcgttggagcaaggaaagatgaactcgagaagaaagttctcaaacacagggcatag

SEQ ID NO: 1387 - protein, 133 aa, Brassica napus
MGGVLSSVLGGGGGDEAVAGNDSESRVMKFSSSARWQLHFNEIKESSKLLVVDFSASWCGPCRMIEPAFIAMAAKFTDVEFVKLDVDELPDVAKEFNVTGMPTFVLVKNGKEIERIVGARKDELEKKVLKHRA

SEQ ID NO: 1388 - DNA, 360 bp, Triticum aestivum
  CDS (1)..(360)
atggcggaggaggggaaggtgatcgcgatccacagccaggagcagtgggccgccaagatcgaggaggctggcagcagcacgaagctggtggtgatcgacttcactgcaacatggtgcggaccatgccgcttcatttctccaatcttagatgagattgccaagaagcttccaaatgttcttttcctcaaggtggatgttgatgaaatgaagtcaattgccgaggagttcagtgtcgaggccatgccgacgtttgtgcttatgaaggaaggaaaggtcgtggacaaggttgtgggagctgccaaggaggagctgattgggaagattgcgaagcacagtgcaactgcatgcatagtggagtag

SEQ ID NO: 1389 - protein, 119 aa, Triticum aestivum
MAEEGKVIAIHSQEQWAAKIEEAGSSTKLVVIDFTATWCGPCRFISPILDEIAKKLPNVLFLKVDVDEMKSIAEEFSVEAMPTFVLMKEGKVVDKVVGAAKEELIGKIAKHSATACIVE

SEQ ID NO: 1390 - DNA, 432 bp, Zea mays
  CDS (1)..(432)
atgggactgaggcgtctgatgagatgctgctgctgcattgcaaagcacgcggacgacggcgacaagatcgatttcggaggtggcaatgttcacgttgtcacaagcaaagaggactgggaccaaagaattgcggaggcaaacaaggatgggaaaaccgtggttgcaaacttcagcgcttcctggtgtgggccgtgccgtgtcatcgcacctgtctacgccgaaatgtcgcagacgtacccccagctcatgttcctgacgatcgatgttgatgacttgatggagttcagctcgtcgtgggacatccgcgcgacaccgacgttcttcttcctcaagaacgagcagcaggtggacaagctggtcggcgccaacaagcctgagctggagaagaaagtggccgccgtcgccgacgcggccggcagcaaggcagtgtag

SEQ ID NO: 1391 - protein, 143 aa, Zea mays
MGLRRLMRCCCCIAKHADDGDKIDFGGGNVHVVTSKEDWDQRIAEANKDGKTVVANFSASWCGPCRVIAPVYAEMSQTYPQLMFLTIDVDDLMEFSSSWDIRATPTFFFLKNEQQVDKLVGANKPELEKKVAAVADAAGSKAV

SEQ ID NO: 1392 - DNA, 372 bp, Brassica napus
  CDS (1)..(372)
atggccgcaacagcagaagtgatcccagcaggagaagtgatcgcttgccacaccgtcgatgactggaacaacaagttcaaggccgccaaagaatccaacaagctgattgtgatagacttcacagcaacatggtgcccaccttgccgtttcattgcacccatcttcgtcgagttggctaagaagcaccttgatgtcgttttcttcaaggtcgatgtcgatgaattgaattctgttgctaaggatttcgaagttgaggccatgccgacctttgtctacatgaagggtgaagagaaggtcgacaaggtggtcggtgctgcgaaagatgaaatcgtagccaagcttgagaagcactctcaagttgcttcggcttga

SEQ ID NO: 1393 - protein, 123 aa, Brassica napus
MAATAEVIPAGEVIACHTVDDWNNKFKAAKESNKLIVIDFTATWCPPCRFIAPIFVELAKKHLDVVFFKVDVDELNSVAKDFEVEAMPTFVYMKGEEKVDKVVGAAKDEIVAKLEKHSQVASA

SEQ ID NO: 1394 - DNA, 456 bp, Brassica napus
  CDS (1)..(456)
atgatgactcaaagtgaaagtgtcaataagaaagcaattattcaattaaaagtatcaaaatcaaagagagagagagagaaaacaatggccgcaacagcagaagtgatcccagcaggagaagtgatcgcttgccacaccgtcgaggactggaacaacaagttgaaggcagccaaagaatccaacaaactgattgtgatagacttcacagcagtgtggtgcccaccttgccgtttcattgcacccatctttgtcgagctcgctaagaagcaccttgatgttgtcttcttcaaggtcgacgtcgatgaattggctactgttgctcaggagttcgatgttcaggccatgccaacctttgtctacatgaaaggcgaagagaagctcgacaaggttgttggtgctgccaaggaggaaatcgaagccaagcttttgaagcactctcaagttgctgccgcttga

SEQ ID NO: 1395 - protein, 151 aa, Brassica napus
MMTQSESVNKKAIIQLKVSKSKREREKTMAATAEVIPAGEVIACHTVEDWNNKLKAAKESNKLIVIDFTAVWCPPCRFIAPIFVELAKKHLDVVFFKVDVDELATVAQEFDVQAMPTFVYMKGEEKLDKVVGAAKEEIEAKLLKHSQVAAA

SEQ ID NO: 1396 - DNA, 354 bp, Brassica napus
  CDS (1)..(354)
atggccggagaaggagaagtgatcgcttgccacaccatcgaagtctggaacgagaagatcaaagccgccaacgaatccaagaaactgatcgtgatagacttcactgctacatggtgcccaccttgccgcttcattgcaccagtcttcgtagacatggccaagaagttcctcaacgtcgtcttcttcaagatcgacgtggacgaactgcaatccgttgctaaagaattcaaagtcgaggcaatgcccacttttctcttcatgagagaaggtgagatcgtggaccgtgttgtcggtgcaaggaaggaggaaatccatcagacattgatgaagcacggtggtgttgcttctgcttaa

SEQ ID NO: 1397 - protein, 117 aa, Brassica napus
MAGEGEVIACHTIEVWNEKIKAANESKKLIVIDFTATWCPPCRFIAPVFVDMAKKFLNVVFFKIDVDELQSVAKEFKVEAMPTFLFMREGEIVDRVVGARKEEIHQTLMKHGGVASA

SEQ ID NO: 1398 - DNA, 546 bp, Brassica napus
  CDS (1)..(546)
atgcctctgtctctgcgtctcgctccatctccgactgctttagctccgacaaccggcggatttagtcctgcgagaaagcagtgtcgtatcccttactccggcgtggcgacgacaacgacgaggattggtttttgctcattggattatgtgaaaaggggagactcctctgtggtgaggtgtagcttagagaccgtgaatgtcagtgttggtcaagtgacggaagtggataaggataccttctggcccatcgttaaagccgccggtgaaaagattgtggtacttgacatgtacactcaatggtgtggtccatgcaaagtgattgctcctaaatacaaagctttatcggagaagtatgatgacgttgtgtttctaaagcttgactgcaacccagaaaacaggccattggcaaaggagctaggaataagagtggttccaacttttaaaatattgaaggataaccaagtggtgaaggaagttacgggtgccaaatatgatgatctggttgcagccattgaaacagcaaggtctgctagttcttcgggatga

SEQ ID NO: 1399 - protein, 181 aa, Brassica napus
MPLSLRLAPSPTALAPTTGGFSPARKQCRIPYSGVATTTTRIGFCSLDYVKRGDSSVVRCSLETVNVSVGQVTEVDKDTFWPIVKAAGEKIVVLDMYTQWCGPCKVIAPKYKALSEKYDDVVFLKLDCNPENRPLAKELGIRVVPTFKILKDNQVVKEVTGAKYDDLVAAIETARSASSSG

SEQ ID NO: 1400 - DNA, 540 bp, Brassica napus
  CDS (1)..(540)
atgcctctctctctccgtctcgctccatatcctacggctttagcttcaaccaccggtggatatggtcccgtgaagaagcagtgccgcatcccttactccggcgtcgccaccacgaggattggtttcttctcactggattatggaaaaagggtagaatcctctgtggtgaggtgtagcttagagacagtgaatgtaaatgttggtcaagtgaaggaagtggataaggacaccttctggcccatcgttaaagccgccggtgaaaagattattgtacttgacatgtacactcaatggtgtggaccatgtaaagtgattgctcccaagtacaaagctttatcagagaagtatgaggacgttgtgtttcttaagcttgactgcaaccctgaaaacaggccattggcaaaggagctaggaataagagtggttccaacttttaaaatattgaaggataaccaagtggtgaaggaagttacgggtgccaaatatgatgatctggttgcagccattgaaacagcgaggtctgctagttcttcgggatga

SEQ ID NO: 1401 - protein, 179 aa, Brassica napus
MPLSLRLAPYPTALASTTGGYGPVKKQCRIPYSGVATTRIGFFSLDYGKRVESSVVRCSLETVNVNVGQVKEVDKDTFWPIVKAAGEKIIVLDMYTQWCGPCKVIAPKYKALSEKYEDVVFLKLDCNPENRPLAKELGIRVVPTFKILKDNQVVKEVTGAKYDDLVAAIETARSASSSG

SEQ ID NO: 1402 - DNA, 423 bp, Brassica napus
  CDS (1)..(423)
atgggaagctgcgtctctaaggacacaggagacgatgattcggttcataacgttgatttctccggcggcaatgttcatctgatcacaacaaaagagagctgggatgagaaattagctgaagctggtcgcgatggcaaaatcgtgattgcaaacttcagcgcgacatggtgcggtccatgtaagattgtggcaccgttttacgtggagctctctgagaaacatccttctcttatgttccttctcgtagatgttgatgaacttagtgattttagctcaacatgggacataaaggcaacaccaaccttcttctttctaaagaacggggagcaaataggcaagcttgttggagctaacaagcctgagctacagaagaaggttacttctatcatcgactctgttcctgaaagtccacaacggccttga

SEQ ID NO: 1403 - protein, 140 aa, Brassica napus
MGSCVSKDTGDDDSVHNVDFSGGNVHLITTKESWDEKLAEAGRDGKIVIANFSATWCGPCKIVAPFYVELSEKHPSLMFLLVDVDELSDFSSTWDIKATPTFFFLKNGEQIGKLVGANKPELQKKVTSIIDSVPESPQRP

SEQ ID NO: 1404 - DNA, 564 bp, Brassica napus
  CDS (1)..(564)
atgactctctccctccgaatcgctccgtcaccggtatctctccgttactctccggctccgtccaccccctccggcggaggatttcgtccggcgaagcagcgctgccggatcccgaactcgggcgtcgcggcgaaaacaggatcctgttctggcgttggtggtgttttagatttaaggaagaggatcggcggttcctgtgtggcgaggtgtagcttacaaacggtgaatgtcagtgtcggcgaggtgactgaggttgacaaggacacgttttggccagttgtcaaagccgctggtgataagcttgttgtcctcgacatgtacactcagtggtgtggtccatgcaaagttatggctcctaaatacaaagagctatcagagaagtaccaggacatggtgtttcttaagcttgactgcaacgaagaaaacaagccagtggcacaggagctaggaattagagtggttccaacctttaagatcttgaaggacaacaaggtgataaaggaagtggtcggggcaaaatttgatgagttgcttgcagccattgaggcagcgaggtcaggctga

SEQ ID NO: 1405 - protein, 187 aa, Brassica napus
MTLSLRIAPSPVSLRYSPAPSTPSGGGFRPAKQRCRIPNSGVAAKTGSCSGVGGVLDLRKRIGGSCVARCSLQTVNVSVGEVTEVDKDTFWPVVKAAGDKLVVLDMYTQWCGPCKVMAPKYKELSEKYQDMVFLKLDCNEENKPVAQELGIRVVPTFKILKDNKVIKEVVGAKFDELLAAIEAARSG

SEQ ID NO: 1406 - DNA, 387 bp, Brassica napus
  CDS (1)..(387)
atgggttccaacgtttcatctgtgcatgatgttccttcatcagcggaaaccaagaatggtttggttgtggaaatggaatcaagaagacagtggagatctctctttgattccatgaaaggctcaaataaattgctagtgattgatttcactgctgcatggtgtggaccttgtaaagcaatggaacctagagttaaggagatcgtttctaggtatccagaagctgtttttgcgagggttgatgtggatagattcatagatgtggctggaacatatagagcaaatactcttccagcctttgtttttgtgaagagaggagaagagattgatagcgttgttggagccaaacctgatgaacttgtgtacaagattgaaaagcatacggcttaa

SEQ ID NO: 1407 - protein, 128 aa, Brassica napus
MGSNVSSVHDVPSSAETKNGLVVEMESRRQWRSLFDSMKGSNKLLVIDFTAAWCGPCKAMEPRVKEIVSRYPEAVFARVDVDRFIDVAGTYRANTLPAFVFVKRGEEIDSVVGAKPDELVYKIEKHTA

SEQ ID NO: 1408 - DNA, 456 bp, Brassica napus
  CDS (1)..(456)
atgatgactcaaagtgaaagtgtcaataaggcagcaattattcaattaaaagtatcaaaatcaaagagagagagagagaaaacaatggccgcaacagcagaattgatcccagcaggagaagtgatcgcttgccacaccgtcgaggactggaacaacaagctcaaggcagccaaagaatccaacaaactgattgtgatagacttcacagcagtgtggtgcccaccttgccgtttcattgcacccatctttgtcgagctcgctaagaagcaccttgatgttgtcttcttcaaggtcgacgtcgatgaattggctactgttgctcaggagttcgatgttcaggccatgccaacctttgtctacatgaaaggcgaagagaagctcgacaaggttgttggtgctgccaaggaggaaatcgaagccaagcttttgaagcactctcaagttgctgccgcttga

SEQ ID NO: 1409 - protein, 151 aa, Brassica napus
MMTQSESVNKAAIIQLKVSKSKREREKTMAATAELIPAGEVIACHTVEDWNNKLKAAKESNKLIVIDFTAVWCPPCRFIAPIFVELAKKHLDVVFFKVDVDELATVAQEFDVQAMPTFVYMKGEEKLDKVVGAAKEEIEAKLLKHSQVAAA

SEQ ID NO: 1410 - DNA, 564 bp, Brassica napus
  CDS (1)..(564)
atgactctctctctccgaatcgctccgccaccggtatctctccgttactctccggctccgtccaccccctccggcggaggattacgtccggcgaagcagcgctgccggatcccgaactcgggcgtcgcggcgaaaacaggatcctgttctggcgttggtggtgttttagatttaaggaagaggatcggcggttcctgtgtggcgaggtgtagcttagaaacggtgaatgtcagtgtcggcgaggtgactgaggttgacaaggacacgttttggccagttgtcaaagccgctggtgataagcttgttgtcctcgacatgtacactcagtggtgtggtccatgcaaagttatggctcctaaatacaaagagctatcagagaagtaccaggacatggtgtttcttaagcttgactgcaacgaagaaaacaagccagtggcacaggagctaggaattagagtggttccaacctttaagatcttgaaggacaacaaggtgataaaggaagtggtcggggctaaatttgatgagttgctttcagccattgaggcagcgaggtcaggctga

SEQ ID NO: 1411 - protein, 187 aa, Brassica napus
MTLSLRIAPPPVSLRYSPAPSTPSGGGLRPAKQRCRIPNSGVAAKTGSCSGVGGVLDLRKRIGGSCVARCSLETVNVSVGEVTEVDKDTFWPVVKAAGDKLVVLDMYTQWCGPCKVMAPKYKELSEKYQDMVFLKLDCNEENKPVAQELGIRVVPTFKILKDNKVIKEVVGAKFDELLSAIEAARSG

SEQ ID NO: 1412 - DNA, 354 bp, Brassica napus
  CDS (1)..(354)
atggccggagaaggagaagtgatcgcttgccacaccatcgaagtctggaacgagcagatcaaagccgccaacgactccaagaaactgatcgtgatagacttcactgctacatggtgcccaccttgccgtttcattgcaccagtcttcgtagagatggccaagaagttcctcaacgtcgtcttcttcaagatcgatgtggacgaattgcaatccgttgctaaagaattcaaagtggaggcaatgcccacttttctcttcatgagggaaggtgagatcgtggaccgtgttgtcggtgcaaggaaggaggaaatccatcagacattgatgaagcacggtggtgttgcttctgcttaa

SEQ ID NO: 1413 - protein, 117 aa, Brassica napus
MAGEGEVIACHTIEVWNEQIKAANDSKKLIVIDFTATWCPPCRFIAPVFVEMAKKFLNVVFFKIDVDELQSVAKEFKVEAMPTFLFMREGEIVDRVVGARKEEIHQTLMKHGGVASA

SEQ ID NO: 1414 - DNA, 546 bp, Brassica napus
  CDS (1)..(546)
atgcctctgtctctgcgtctcgctccatctccgactgctttagctccgacaaccggcggatttagtcctgcgaaaaagcagtgtcgtatcccttactccggcgtggcgacgacgacgacgaggattggtttctgctcattggattatgtgaaaaggggagactcctctgtggtgaggtgtagcttagagaccgtgaatgtcagtgttggtcaagtgacggaagtggataaggataccttctggcccatcgttaaagccgccggtgaaaagattgtggtacttgacatgtacactcaatggtgtggtccatgcaaagtgattgctcctaaatacaaagctttatcagagaagtatgaggacgttgtgtttctaaagcttgactgcaacccagagaacaggccattggcaaaggagctaggaataagagtggttccaacttttaaaatattgaaggataaccaagtggtgaaggaagttacgggtgccaaatatgatgatctggttgcagccattgaaacagcaaggtctgctagttcttcgggatga

SEQ ID NO: 1415 - protein, 181 aa, Brassica napus
MPLSLRLAPSPTALAPTTGGFSPAKKQCRIPYSGVATTTTRIGFCSLDYVKRGDSSVVRCSLETVNVSVGQVTEVDKDTFWPIVKAAGEKIVVLDMYTQWCGPCKVIAPKYKALSEKYEDVVFLKLDCNPENRPLAKELGIRVVPTFKILKDNQVVKEVTGAKYDDLVAAIETARSASSSG

SEQ ID NO: 1416 - DNA, 540 bp, Brassica napus
  CDS (1)..(540)
atgcctctctctctccgtctcgctccatctcctacggctttagcttcaaccaccggtggatatggtcctgttaagaagcagtgccgcatcccttactccggcgtcgccaccacgaggattggtttcttctcactggattatggaaaaagggtagaatcctctgtggtgaggtgtagcttagagacagtgaatgtaaatgttggtcaagtgaaggaagtggataaggacaccttctggcccatcgttaaagccgctggtgaaaagattattgtacttgacatgtacactcaatggtgtggaccatgtaaagtgattgcacctaagtacaaagctttatcagagaagtacgaggacgttgtgtttcttaagcttgactgcaaccctgaaaacaggccattggcaaaggagctaggaataagagtggttccaacttttaaaatattgaaggataatcaagtggtgaaggaagttacgggtgccaaatatgatgatctggttgcagccattgaaacagctaggtctgctagttcttcgggatga

SEQ ID NO: 1417 - protein, 179 aa, Brassica napus
MPLSLRLAPSPTALASTTGGYGPVKKQCRIPYSGVATTRIGFFSLDYGKRVESSVVRCSLETVNVNVGQVKEVDKDTFWPIVKAAGEKIIVLDMYTQWCGPCKVIAPKYKALSEKYEDVVFLKLDCNPENRPLAKELGIRVVPTFKILKDNQVVKEVTGAKYDDLVAAIETARSASSSG

SEQ ID NO: 1418 - DNA, 402 bp, Brassica napus
  CDS (1)..(402)
atgggaggtgtattatcatctgtgtttggaggtggtggagaagaagcagttgcagcgaatgaatccgagcaaagtcgcgtcatgaagtttagctcatcggctcggtggcagcttcacttcaacgagatcaaagaatcctcgaaactgctggtggttgacttctcagcatcctggtgtggaccttgtaggatgatcgagcctgcgttcatcgccatggctgccaagttcactgatgttgaattcgtcaaattggatgtcgatgaacttcccgatgtggctaaagagttcaatgtgacggggatgccaacttttgtgctggtgaaaaatggtaaagagattgaaaggatcgttggagcaaggaaagatgaacttgagaagaaagttctcaaacacagggcatag

SEQ ID NO: 1419 - protein, 133 aa, Brassica napus
MGGVLSSVFGGGGEEAVAANESEQSRVMKFSSSARWQLHFNEIKESSKLLVVDFSASWCGPCRMIEPAFIAMAAKFTDVEFVKLDVDELPDVAKEFNVTGMPTFVLVKNGKEIERIVGARKDELEKKVLKHRA

SEQ ID NO: 1420 - DNA, 561 bp, Brassica napus
  CDS (1)..(561)
atgactctctccctccgaatcgctccgtcaccggtatcgttccgttactctccggctccgtccaccccctccggcgtcggattacgtccggccaagcagcgctgccggatcccgaactcaggcgtcgcggcgaaaacaggatcatgttctagcggtggtgttttagatttaaggaagaggatcgccggttcctgtgtggcgaggtgtagcttagaaacggtgaatgtcagtgtcggcgaggtgacggaggttgacaaggacacgttttggccaatcgttaaagccgctggtgataagcttgttgtcctcgacatgtacactcagtggtgtggtccatgcaaagttatggctcctaaatacaaagagctatcagagaagtaccaggacatggtgtttcttaagcttgactgcaacgaagaaaacaagccagtggcacaggagctaggaattagagtggttccaacctttaagatcttgaaggacaacaaggtgataaaggaagtggtcggggcaaaatttgatgagttgcttgcagccattgaggcagcgaggtcaggctga

SEQ ID NO: 1421 - protein, 186 aa, Brassica napus
MTLSLRIAPSPVSFRYSPAPSTPSGVGLRPAKQRCRIPNSGVAAKTGSCSSGGVLDLRKRIAGSCVARCSLETVNVSVGEVTEVDKDTFWPIVKAAGDKLVVLDMYTQWCGPCKVMAPKYKELSEKYQDMVFLKLDCNEENKPVAQELGIRVVPTFKILKDNKVIKEVVGAKFDELLAAIEAARSG

SEQ ID NO: 1422 - DNA, 345 bp, Brassica napus
  CDS (1)..(345)
atggctggtgaagaaggacaagtgatcgcatgtcacaccgtggaggcatggaatgaacaactccaaaagggcaatgactctaaaactcttgtggtggttgatttcacggcgtcttggtgtgggccatgtcgtttcatagctccattctttgctgatttggctaagaaactccctaatgtgatgttcctcaaggttgatattgatgaactaaagtcagtggcgagtgactgggcgattgagtcgatgccaacattcatgttcatgaaagaagggaagattgtggacaaagttgttggagccaagaaagatgagcttcagtctactattgccaagcacttggcttaa

SEQ ID NO: 1423 - protein, 114 aa, Brassica napus
MAGEEGQVIACHTVEAWNEQLQKGNDSKTLVVVDFTASWCGPCRFIAPFFADLAKKLPNVMFLKVDIDELKSVASDWAIESMPTFMFMKEGKIVDKVVGAKKDELQSTIAKHLA

SEQ ID NO: 1424 - DNA, 360 bp, Glycine max
  CDS (1)..(360)
atggctgaagagggtcaggttgtcggcgtccacaccgttgatgcgtggaaccagcaactgcagaatggaaaagactcccaaaaattgattgtggtggattttactgcttcctggtgtggtccatgccgttttattgccccagttctggcagagattgctaggcatactcctcaagtgatcttcctcaaggtggatgtggatgaagtgaggcctgttgctgaggaatattccattgaggccatgccaaccttcctcttcttgaaagatggcaagatcgtggataaggttgttggtgctaagaaggaggagctgcaactcaccatagccaagcatgtatctgctgctgctgcttcttcttga

SEQ ID NO: 1425 - protein, 119 aa, Glycine max
MAEEGQVVGVHTVDAWNQQLQNGKDSQKLIVVDFTASWCGPCRFIAPVLAEIARHTPQVIFLKVDVDEVRPVAEEYSIEAMPTFLFLKDGKIVDKVVGAKKEELQLTIAKHVSAAAASS

SEQ ID NO: 1426 - DNA, 381 bp, Glycine max
  CDS (1)..(381)
atgaaaggtcaacaacagctaaaaaaatctaaggtggtgaaaattgactcaagaaaatcatgggaacaccacataactaatgcaaccaataaaggctaccctgttatggttcatttctctgcttattggtgcatgccttcaatagctatgaatcatttctttcaacaactggcctccacctatcaaaatgttctctttctgaatgttgatgttgatgaggtcaaggaagttgcttccaagttggaaattaaagcaattcctaccttttgtttgatgaatggaggagctccagtggataaaattgtgggtgcaaaccctgatgaattaaggaaaaggatcaattgttttattcaccagaaacattcacccaagtcagtgtga

SEQ ID NO: 1427 - protein, 126 aa, Glycine max
MKGQQQLKKSKVVKIDSRKSWEHHITNATNKGYPVMVHFSAYWCMPSIAMNHFFQQLASTYQNVLFLNVDVDEVKEVASKLEIKAIPTFCLMNGGAPVDKIVGANPDELRKRINCFIHQKHSPKSV

SEQ ID NO: 1428 - DNA, 402 bp, Glycine max
  CDS (1)..(402)
atgggcggtatactttctgggcttcttggcagcgacgcggcggcggcggcgtcttcgccggagagttctacttctagagtctcctccttccactcgtcgccgcgctggcagctctacttcaacgagatcaaagataccgataagctcgttgtgatagatttctcggcgtcgtggtgcggtccttgcaaattcatagagccagcgattcacgccatggccgacaagttcaacgacgttgacttcgtcaagatcgacgtcgacgaattacctgatgtggcgcaggagtttcaggtgcaggcgatgccgactttcgtgttgtggaagaaagggaaggaagtcgacaaggttgtgggcgcaaagaaggacgagctcgagaagaagattgagaaacatcgatcgtga

SEQ ID NO: 1429 - protein, 133 aa, Glycine max
MGGILSGLLGSDAAAAASSPESSTSRVSSFHSSPRWQLYFNEIKDTDKLVVIDFSASWCGPCKFIEPAIHAMADKFNDVDFVKIDVDELPDVAQEFQVQAMPTFVLWKKGKEVDKVVGAKKDELEKKIEKHRS

SEQ ID NO: 1430 - DNA, 354 bp, Glycine max
  CDS (1)..(354)
atggccgaagagggacaagtgattggtgtccacagcgtggaggagtgggaggaacatctcaagaagggacaagagtccaagaaattgattgtggtggattttactgcttcttggtgcggcccatgccgtttcattgccccaattcttgcggatatggctaaaaagttgccgaatgtcaccttcctcaaggtggatgtggatgaattggcgactgtttccagggagtgggaagttgaggctatgccaaccttcctattcttgaaagaaggcaagctggtgaagaagcttgtgggtgccaggaaagaggagctgcaagacataatagtcaaacttgctgcaattgatgctgcctga

SEQ ID NO: 1431 - protein, 117 aa, Glycine max
MAEEGQVIGVHSVEEWEEHLKKGQESKKLIVVDFTASWCGPCRFIAPILADMAKKLPNVTFLKVDVDELATVSREWEVEAMPTFLFLKEGKLVKKLVGARKEELQDIIVKLAAIDAA

SEQ ID NO: 1432 - DNA, 417 bp, Glycine max
  CDS (1)..(417)
atggctcccaccatctataatttttcgtattctaaaaggttttcagagtcattcaattcttcaaaatcaaaaagagagtcatccagttccaacatccttgctttccactccacagctcaatggaatgctcattataaagccaccaaagaaactaacaaactgatggtacttgatttcacagccacatggtgtggaccttgcaaactcatggacccagttatccaagagtttgctggaaattacacagatgttgacttcatcaagattgatgtggaggagttaacggaagtgtctcaagcactccaggtctaccaattgccaacattcatactcgttaagaaaggcaaagttgctgatagagtggtgggggtgaaaaaggaggagctgaaaaggtcgattgagaagcacagaaaataa

SEQ ID NO: 1433 - protein, 138 aa, Glycine max
MAPTIYNFSYSKRFSESFNSSKSKRESSSSNILAFHSTAQWNAHYKATKETNKLMVLDFTATWCGPCKLMDPVIQEFAGNYTDVDFIKIDVEELTEVSQALQVYQLPTFILVKKGKVADRVVGVKKEELKRSIEKHRK

SEQ ID NO: 1434 - DNA, 372 bp, Glycine max
  CDS (1)..(372)
atggctgaagtggaagagggacaggtcatcggcgtccacaccgttgatgagtggaagctgcaactccagaatgcaaaagactccaaaaaactgattgtggtggattttactgcttcctggtgtggtccatgccgttttatggccccagttcttgcagagattgcaaagaaaactcctgaattgatcttcctcaaagtggatgtggatgaagtgaggcctgttgctgaggaatattccattgaggccatgccaaccttcctcttcttgaaagatggcgagatcgtggacaaggtggttggtgctagtaaggatgaccttcaagccaccatagccaagcatgcatctgctgttgctgctgcttcttcttcttga

SEQ ID NO: 1435 - protein, 123 aa, Glycine max
MAEVEEGQVIGVHTVDEWKLQLQNAKDSKKLIVVDFTASWCGPCRFMAPVLAEIAKKTPELIFLKVDVDEVRPVAEEYSIEAMPTFLFLKDGEIVDKVVGASKDDLQATIAKHASAVAAASSS

SEQ ID NO: 1436 - DNA, 375 bp, Glycine max
  CDS (1)..(375)
atggaagcctcagagcagaacaattcaaaggtagtgttgattgattctttgcagtcatgggagttccacgtcaaccaagcctataatcagaatactcctgttgttgttcacttcactgcttcatggtgcatgccatcggtggctatgactcctgtttttgaagaactggcttcaagctatccggaagttctgtttctcactgttgatgttgatgaagtcaaggaggtagccaccaaaatggatgtaaaggcaatgccaacatttttgctgctgaaggacggtgctgcggtggacaaggtggttggtgccaatccagaagagataaagaaaaggatagatggggttgctgagtccactcgtgtctcactggcatag

SEQ ID NO: 1437 - protein, 124 aa, Glycine max
MEASEQNNSKVVLIDSLQSWEFHVNQAYNQNTPVVVHFTASWCMPSVAMTPVFEELASSYPEVLFLTVDVDEVKEVATKMDVKAMPTFLLLKDGAAVDKVVGANPEEIKKRIDGVAESTRVSLA

SEQ ID NO: 1438 - DNA, 423 bp, Glycine max
  CDS (1)..(423)
atgggctccttgttttcttcccccagcgccaccgaggcggagaatcctgacgtgaaagcggagaatcctgacgtgaaagcgaggagttctgatcacgtgaaagcgttcgactccgcggagagctggcagagctactggaaagagatcaaagactcccctaagccagttgtgatttttttcacggcgtcctggtgtggcccttgcaaattcatcactccactgtttcacgagatggccgcaaagtatccaaacgctgactacgtcaaaatcgacgtggaagaattatctggtgtggcgaaggagtataaggtgaaggcgatgccgacgttcgtggcgtggaaggaaggaaaggaagttgagagggttgtgggagccaataaggaagagctcgagaaaaagattaagcaactttctcaatcgtga

SEQ ID NO: 1439 - protein, 140 aa, Glycine max
MGSLFSSPSATEAENPDVKAENPDVKARSSDHVKAFDSAESWQSYWKEIKDSPKPVVIFFTASWCGPCKFITPLFHEMAAKYPNADYVKIDVEELSGVAKEYKVKAMPTFVAWKEGKEVERVVGANKEELEKKIKQLSQS

SEQ ID NO: 1440 - DNA, 414 bp, Glycine max
  CDS (1)..(414)
atggggaattgtttgcgcaaggctcatgcggatgatgattctgatcatattgtggagcttgcttctgggaatgtgcaacttattactaccaaagaatcttgggaccaaaagttggatcaagcgaggaaggagagtaaaattgtaattgcaaatttcagtgcaacatggtgtggtccttgtaaggtgattgcaccacattattgcgagttgtccgtgaaatacccgtctatcatgttcttattagtcgatgtggatgaactagctgacttcagcacttcgtgggacatcaaagccacaccaactttcttctttcttaaagatggaaaagaagttgacaaacttgtaggagccaacaagccagagctggagaagaagattgttgtggttaatgatgtagtgcctcataagcaatag

SEQ ID NO: 1441 - protein, 137 aa, Glycine max
MGNCLRKAHADDDSDHIVELASGNVQLITTKESWDQKLDQARKESKIVIANFSATWCGPCKVIAPHYCELSVKYPSIMFLLVDVDELADFSTSWDIKATPTFFFLKDGKEVDKLVGANKPELEKKIVVVNDVVPHKQ

SEQ ID NO: 1442 - DNA, 420 bp, Glycine max
  CDS (1)..(420)
atggggagttgtgtgtctaagaatcatgctaaggataatgattctgatcatgatgtggattttgctgctgggaatgtgaaacttattaccaccaaagaagcgtgggaccaatctttggaagaagcaaggaggggtggcaaaattgtgattgcaaatttcagtgcaacatggtgtggtccttgtaagatgattgcgccatattacagcgagttatctgagaaatacacatctatgatgttcttgttagttgatgtggatgatctaactgacttcagcacttcatgggacatcaaagccacaccaactttcttctttcttaaagatggacaacaacttgacaaacttgtaggagccaacaagccagaactgctgaagaagattgttgtcattaatgattcgcttcccgaatataagcagtga

SEQ ID NO: 1443 - protein, 139 aa, Glycine max
MGSCVSKNHAKDNDSDHDVDFAAGNVKLITTKEAWDQSLEEARRGGKIVIANFSATWCGPCKMIAPYYSELSEKYTSMMFLLVDVDDLTDFSTSWDIKATPTFFFLKDGQQLDKLVGANKPELLKKIVVINDSLPEYKQ

SEQ ID NO: 1444 - DNA, 423 bp, Glycine max
  CDS (1)..(423)
atgggctccttgttttcttcccccagcgccaccgaggcggagaatcctgacgtgaaagcggagaatcctgacgtgaaagcgaggagttctgatcacgtgaaagcgttcgactccgcggagagctggcagagctactggaaagagatcaaagactcccctaagccagttgtgatatttttcacggcgtcctggtgtggcccttgcaaattcatcactccagtgtttaaccagatagccgcagagtttgcaaacgctgacttcgtcaagatcgacgtggacgaattatctggtgtggcgaaggagtttaaggtggaggcgatgccgacgttcgtgttgtggaaggaaggaaaggaagttgagagggttgtgggagccaagaaggaagagctcgagaaaaagattaagcaactttctcaatcgtga

SEQ ID NO: 1445 - protein, 140 aa, Glycine max
MGSLFSSPSATEAENPDVKAENPDVKARSSDHVKAFDSAESWQSYWKEIKDSPKPVVIFFTASWCGPCKFITPVFNQIAAEFANADFVKIDVDELSGVAKEFKVEAMPTFVLWKEGKEVERVVGAKKEELEKKIKQLSQS

SEQ ID NO: 1446 - DNA, 363 bp, Glycine max
  CDS (1)..(363)
atggctggctcatcggaagagggacaagtcattagctgccacaccgttgaagaatggaacgatcaactccagaagggcaacgaatccaagaaactcattgttgtggattttactgcttcttggtgtggaccatgccgtttcattgcaccattcttggctgagctggctaagaagttcacaagtgtcatattcctaaaggtggatgtggacgaattaaagagtgtttctcaagattgggctattgaggctatgcccacttttgtgtttgtgaaagagggaacgcttctggacaaagtggtgggagcaaagaaggatgagctgcagcagaaaatacagaaacatgtggcttcagctagtgcttaa

SEQ ID NO: 1447 - protein, 120 aa, Glycine max
MAGSSEEGQVISCHTVEEWNDQLQKGNESKKLIVVDFTASWCGPCRFIAPFLAELAKKFTSVIFLKVDVDELKSVSQDWAIEAMPTFVFVKEGTLLDKVVGAKKDELQQKIQKHVASASA

SEQ ID NO: 1448 - DNA, 414 bp, Glycine max
  CDS (1)..(414)
atggggaattgtttgcgcaaggctcatgcggatgatgattctgatcatattgtggagtttgcttctgggaatgtgcaacttattactaccaaagaatcttgggaccaaaagttggatcaagcgaggaaggagagtaaaattgtaattgcaaatttcagtgcaacatggtgtggtccttgtaaggtgattgcaccacattattgcgagttgtccgtgaaatacccgtctatcatgttcttattagtcgatgtggatgaactagctgacttcagcacttcgtgggacatcaaagccacaccaactttcttctttcttaaagatggaaaagaagttgacaaacttgtaggagccaacaagccagagctggagaagaagattgttgtggttaatgatgtagtgcctcataagcaatag

SEQ ID NO: 1449 - protein, 137 aa, Glycine max
MGNCLRKAHADDDSDHIVEFASGNVQLITTKESWDQKLDQARKESKIVIANFSATWCGPCKVIAPHYCELSVKYPSIMFLLVDVDELADFSTSWDIKATPTFFFLKDGKEVDKLVGANKPELEKKIVVVNDVVPHKQ

SEQ ID NO: 1450 - DNA, 354 bp, Glycine max
  CDS (1)..(354)
atggcggaagagggacaagtgatcggtgtccacagcgtagaggagtggaaggaacatctcaagaagggagaagagtccaagaaattgattgtggtggattttactgcttcttggtgcggtccatgccgtttcattgccccaattcttgcagagtttgctaaaaagttgccgaatgtcaccttcctcaaggtggatgtggatgaattggagactgtttccaaggagtggggaattgaggctatgccaaccttcctgttcttgaaagaaggcaagctggtggacaaggttgtgggtgccaagaaagaggagctgcaattgacaatagccaaacatgccgcaattgctgctgcttga

SEQ ID NO: 1451 - protein, 117 aa, Glycine max
MAEEGQVIGVHSVEEWKEHLKKGEESKKLIVVDFTASWCGPCRFIAPILAEFAKKLPNVTFLKVDVDELETVSKEWGIEAMPTFLFLKEGKLVDKVVGAKKEELQLTIAKHAAIAAA

SEQ ID NO: 1452 - DNA, 363 bp, Glycine max
  CDS (1)..(363)
atggcaggctcctcggaggagggacaagtcattagctgtcacaccgttgacgcatggaacgatcaactccagaagggcaaccaatccaagaaactcattgttgtggattttactgcttcttggtgtggaccatgccgtttcattgcaccattcttggctgagctggctaagaagttcacaagtgtcgtattcctaaaggtggatgtggacgaattaaagagtgtttctcaagactgggctattgaggctatgcccacttttgtgtttgtgaaagagggaacacttctaagcaaagtggtgggagcaaagaaggatgagctgcagcagacaatagagaaatatgtggcttcagctagtgcttaa

SEQ ID NO: 1453 - protein, 120 aa, Glycine max
MAGSSEEGQVISCHTVDAWNDQLQKGNQSKKLIVVDFTASWCGPCRFIAPFLAELAKKFTSVVFLKVDVDELKSVSQDWAIEAMPTFVFVKEGTLLSKVVGAKKDELQQTIEKYVASASA

SEQ ID NO: 1454 - DNA, 417 bp, Glycine max
  CDS (1)..(417)
atggcacccacaatctataatttttcgtattctaaaaggttttcagagtcattcaattcttcaacatcaaaaaaggagtcatccagttccaacatccttgctttccactccatagctcaatggaatgctcattataaagccaccaaagaaactaacaagctgatggtacttgatttcacagccacatggtgtggaccttgcaaactcatggaccctgttatcctagagtttgctggaaattacacagatgttgagttcatcaagattgatgtggaggagttaacggaagtgtctcaagcactccaggtccaccaattgccaacattcatactcgttaagaaaggcaaagttgctgatagagtggtgggggtgaaaaaggaggagctgaaaaggtcgattgagaagcacagaaaataa

SEQ ID NO: 1455 - protein, 138 aa, Glycine max
MAPTIYNFSYSKRFSESFNSSTSKKESSSSNILAFHSIAQWNAHYKATKETNKLMVLDFTATWCGPCKLMDPVILEFAGNYTDVEFIKIDVEELTEVSQALQVHQLPTFILVKKGKVADRVVGVKKEELKRSIEKHRK

SEQ ID NO: 1456 - DNA, 420 bp, Glycine max
  CDS (1)..(420)
atggggagttgtgtgtctaagaatcatgctagggataatgattctgatcataatgtggattttgctgctgggaatgtgaaacttattaccaccaaagaagcgtgggaccaatatttggaagaagcaaggagggatggcaaaattgtgattgcaaatttcagtgcaacatggtgtggtccttgtaagatgattgcgccatattacagcgagttatctgagaaatacacatctatgatgttcttgttagttgatgtggatgatctaactgacttcagcacttcatgggacatcaaagccacaccaactttcttctttcttaaagatggacaacaacttgacaaacttgtaggagccaacaagccagaactgctgaagaagattgttgtcattaatgattcgcttcccgaatataagcagtga

SEQ ID NO: 1457 - protein, 139 aa, Glycine max
MGSCVSKNHARDNDSDHNVDFAAGNVKLITTKEAWDQYLEEARRDGKIVIANFSATWCGPCKMIAPYYSELSEKYTSMMFLLVDVDDLTDFSTSWDIKATPTFFFLKDGQQLDKLVGANKPELLKKIVVINDSLPEYKQ

SEQ ID NO: 1458 - DNA, 405 bp, Glycine max
  CDS (1)..(405)
atgggcgctatactttctgccttaactggcggtgccgcaacggcggcgacgtcttcgccggagagttctgcttctagggtccagtctttccactcttcggcgcgctggcagctccacttcaacgagctcaaagaaaccaataagctcgttgtgatagatttctcggcgtcgtggtgcggcccttgcaaattcatagagccagcgattcacgccatgtccgaaaagttcaccgacgttgacttcgtcaagatcgacgtcgacgaattgccggatgtggcgaaggagtttaatgtggaggcgatgccgacgttcgtgttgtgtaagaaagggaaggaagtcgacaagggagtgggcgcagagacggacgacctcgaaagaagattgaaaaatcggatcgaatcatag

SEQ ID NO: 1459 - protein, 134 aa, Glycine max
MGAILSALTGGAATAATSSPESSASRVQSFHSSARWQLHFNELKETNKLVVIDFSASWCGPCKFIEPAIHAMSEKFTDVDFVKIDVDELPDVAKEFNVEAMPTFVLCKKGKEVDKGVGAETDDLERRLKNRIES

SEQ ID NO: 1460 - DNA, 396 bp, Hordeum vulgare
  CDS (1)..(396)
atggggggctgtgtgggcaagggtcgtggcattgtggaagaaaagcttgatttcaaaggtggaaatgtgcatgtcataacaaccaaagaggactgggaccagaagattgaagaagcaaacaaggatgggaaaattgttgtagcaaacttcagtgcttcgtggtgtgggccatgccgtgtcattgcacctgtttatgctgagatgtccaagacttatcctcaactcatgttcttgacaattgatgttgatgacctaatggatttcagctcaacatgggacatccgcgcaaccccgacgttcttcttcctcaaaaacggccagcagatcgacaagctcgtcggcgccaacaaacccgagctggagaagaaagtgcaagctcttggtgatggcagttga

SEQ ID NO: 1461 - protein, 131 aa, Hordeum vulgare
MGGCVGKGRGIVEEKLDFKGGNVHVITTKEDWDQKIEEANKDGKIVVANFSASWCGPCRVIAPVYAEMSKTYPQLMFLTIDVDDLMDFSSTWDIRATPTFFFLKNGQQIDKLVGANKPELEKKVQALGDGS

SEQ ID NO: 1462 - DNA, 369 bp, Hordeum vulgare
  CDS (1)..(369)
atggccgccgaggagggagccgttatcgcgtgccacaccaagcaagagttcgatacccacatggccaatggcaaggacaccggcaagctggtgatcattgatttcactgcttcctggtgcggtccatgtcgtgtcatagccccagtctttgctgagtacgccaagaagttccctggggccatcttcctgaaggtggatgttgatgagctgaaggacgtcgctgaagcatacaatgttgaggcaatgccgaccttcctgtttatcaaggacggtgagaaggtggacagtgttgtcggtggcaggaaggatgacatccataccaaagataggggccctcatgggttctgcatccacctaacggaagagtga

SEQ ID NO: 1463 - protein, 122 aa, Hordeum vulgare
MAAEEGAVIACHTKQEFDTHMANGKDTGKLVIIDFTASWCGPCRVIAPVFAEYAKKFPGAIFLKVDVDELKDVAEAYNVEAMPTFLFIKDGEKVDSVVGGRKDDIHTKDRGPHGFCIHLTEE

SEQ ID NO: 1464 - DNA, 372 bp, Linum usitatissimum
  CDS (1)..(372)
atggcggaagaaggtcaggtgattagctgcactagcgttgaaatctggaaggagaagtttgatcatgcttccgagtcgaagaaactggctgtggtggatttcactgctacgtggtgcggaccgtgccgcttcatcgctccagtcctcgcagatttggccaagaagatgcctcatgtgattttcatgaaggtcgatgtggatgaattgaggactgttgctgcggagtatgaagtggaagctatgccgacattcatcttcttcaaggaggggaagattgtggacaaggtaattggtgcgaggaaggatgaattgactgctggcgttgagaagcacgcaataacagtaacccccccggttgtttctactgcttga

SEQ ID NO: 1465 - protein, 123 aa, Linum usitatissimum
MAEEGQVISCTSVEIWKEKFDHASESKKLAVVDFTATWCGPCRFIAPVLADLAKKMPHVIFMKVDVDELRTVAAEYEVEAMPTFIFFKEGKIVDKVIGARKDELTAGVEKHAITVTPPVVSTA

SEQ ID NO: 1466 - DNA, 363 bp, Linum usitatissimum
  CDS (1)..(363)
atggcagcggaggaaggattggtatttgcttgccacaccgttgaagagtgggaagctcagctacaaaaggccaacgaatctaagaagctggtggtggttgatttcacagccacatggtgcgggccatgccgcttcattacaccatacttggcagagctggctaagaagatgcctatggtaaccttcctgaaggttgatgtcgatgaaatgaaaaatgttgctcaagattgggctgtggaggcaatgccaacattcatgtttatgaaagagggcaagatcgtgggcaaagtcgttggagccaacaaggaagagctgctgcagactattaacaagaacttggacttggctaccacctctgcttaa

SEQ ID NO: 1467 - protein, 120 aa, Linum usitatissimum
MAAEEGLVFACHTVEEWEAQLQKANESKKLVVVDFTATWCGPCRFITPYLAELAKKMPMVTFLKVDVDEMKNVAQDWAVEAMPTFMFMKEGKIVGKVVGANKEELLQTINKNLDLATTSA

SEQ ID NO: 1468 - DNA, 357 bp, Zea mays
  CDS (1)..(357)
atggcggaggaggggaaggtgatcgcgatccacagccaggagcagtggagcaccaagatcgaggaggctggcagcagcacgaatctggtggtgatcgacttcactgcaacatggtgcggaccatgccgcttcatttctccaatcttagatgagattgccaagaagcttccaaatgttatgttcctgaaggtggatgttgatgaaatgaagtcaattgccgaggagttcagtgttgaggctatgccgacgtttgtgctcatgaaggaaggaaaggtggtggacaaggttgtgggagctgccaaggaggagctgagcgggaagattgccaagcacagtgcaactgcatgcgctaaataa

SEQ ID NO: 1469 - protein, 118 aa, Zea mays
MAEEGKVIAIHSQEQWSTKIEEAGSSTNLVVIDFTATWCGPCRFISPILDEIAKKLPNVMFLKVDVDEMKSIAEEFSVEAMPTFVLMKEGKVVDKVVGAAKEELSGKIAKHSATACAK

SEQ ID NO: 1470 - DNA, 396 bp, Zea mays
  CDS (1)..(396)
atgggctccttcctgtcgtcgttgtggacccctcccccgctcgccggcgacgaccccgactccgccgtcgtcgccgtccactccaagcccgcctgggacaagcactgggaggaacaccggaacgcgtccaagctgatggtgatcgacttctccgcctcctggtgcgggccctgccgcttcatcgagcccgccttcaaggagatggcctcccgcttcgccgacgcgctcttcgtcaagatcgacgtcgacgagctcgcggaggttgcaaagacattccgcgtagaggcgatgccgacctttgtactggtgaagggcgggcaggaggtgagtcgcgtggtcggggctaagaaggatgagcttgacaggaagatcaagacgttcatctcatctacctga

SEQ ID NO: 1471 - protein, 131 aa, Zea mays
MGSFLSSLWTPPPLAGDDPDSAVVAVHSKPAWDKHWEEHRNASKLMVIDFSASWCGPCRFIEPAFKEMASRFADALFVKIDVDELAEVAKTFRVEAMPTFVLVKGGQEVSRVVGAKKDELDRKIKTFISST

SEQ ID NO: 1472 - DNA, 405 bp, Zea mays
  CDS (1)..(405)
atgggctccttcttctcgaccttagtgacgccccctccgcccgccgccgacgacccgaactgcgccgtggtggccgcgcactccaaggccacctacgacgagcagtgggcggcccacaagagcagcagcaagctgatggtgatcgacttctcggcgtcctggtgcgggccctgccgcttcatcgagccggccttcaaggagctggcctcccgcttcaccgatgccatcttcatcaaggtcgacgtcgacgagctcgcggaggtcgcaaggacatggaaggtagaggcgatgccaacgttcgtgctggtcaaggatgggaaggaggtaggccgtgtgattggggctaagaaggacgagcttgagaggaagatcaggatgttcgtcacgtcatcttcctcgtcctaa

SEQ ID NO: 1473 - protein, 134 aa, Zea mays
MGSFFSTLVTPPPPAADDPNCAVVAAHSKATYDEQWAAHKSSSKLMVIDFSASWCGPCRFIEPAFKELASRFTDAIFIKVDVDELAEVARTWKVEAMPTFVLVKDGKEVGRVIGAKKDELERKIRMFVTSSSSS

SEQ ID NO: 1474 - DNA, 381 bp, Triticum aestivum
  CDS (1)..(381)
atggcggcgtcggcggcgacggcaacggcggcggcggtgggggcgggggaggtgatctccgtccacaccctggagcagtggaccatgcagatcgaggaggccaacgccgccaagaagctggtggtggttgacttcactgcatcatggtgtggaccatgccgcatcatggctccagttttcgctgatctcgccaagaagttcccaaatgctgttttcctcaaggtcgatgtcgatgaactgaagcccattgcggagcaattcagcgttgaggccatgccaaccttcctgttcattaaggaaggagatgtcaaggacagggttgtgggagctatcaaggaggaactgacgaacaaggttgggctacacgcggcggcccagtaa

SEQ ID NO: 1475 - protein, 126 aa, Triticum aestivum
MAASAATATAAAVGAGEVISVHTLEQWTMQIEEANAAKKLVVVDFTASWCGPCRIMAPVFADLAKKFPNAVFLKVDVDELKPIAEQFSVEAMPTFLFIKEGDVKDRVVGAIKEELTNKVGLHAAAQ

SEQ ID NO: 1476 - DNA, 357 bp, Triticum aestivum
  CDS (1)..(357)
atggcggaggaggggaaggtgatcgcgatccacagccaggagcagtggagcaccaagatcgaggaggctggcagcagcacgaatctggtggtgatcgacttcactgcaacatggtgcggaccatgccgcttcatttctccaatcttagatgagattgccaagaagcttccaagtgttactttcctgaaggtggatgttgatgaaatgaagtcaattgccgaggagttcagtgttgaggccatgccgacgtttgtgctcatgaaggaaggaaaggtggtggacaaggttgtgggagctgccaaggaggagctgagcgggaagattgccaagcacagtgcaactgcatgcgctaaataa

SEQ ID NO: 1477 - protein, 118 aa, Triticum aestivum
MAEEGKVIAIHSQEQWSTKIEEAGSSTNLVVIDFTATWCGPCRFISPILDEIAKKLPSVTFLKVDVDEMKSIAEEFSVEAMPTFVLMKEGKVVDKVVGAAKEELSGKIAKHSATACAK

SEQ ID NO: 1478 - DNA, 396 bp, Triticum aestivum
  CDS (1)..(396)
atgggctccttcctgtcgtccttgtggacccctcccccgctccccggcgacgaccccgactccgccgtcgtcgccgtccactccaagcccgcctgggacaagcactgggaggaacaccggaacgcgtccaagctgatggtgatcgacttctccgcctcctggtgcgggccctgccgcttcatcgagcccgccttcaaggagatggcctcccgcttcgccgacgcgctcttcgtcaagatcgacgtcgacgagctcgcggaggttgcaaagacattccgcgtagaggcgatgccgacctttgtactggtgaagggcgggcaggaggtgagtcgcgtggtcggggctaagaaggatgagcttgacaggaagatcaagacgttcatctcatctacctga

SEQ ID NO: 1479 - protein, 131 aa, Triticum aestivum
MGSFLSSLWTPPPLPGDDPDSAVVAVHSKPAWDKHWEEHRNASKLMVIDFSASWCGPCRFIEPAFKEMASRFADALFVKIDVDELAEVAKTFRVEAMPTFVLVKGGQEVSRVVGAKKDELDRKIKTFISST

SEQ ID NO: 1480 - DNA, 381 bp, Triticum aestivum
  CDS (1)..(381)
atggcggcgtcggcggcgacggcaacgccgacggcggtgggggcgggggaggtgatctccgtccacaccctggagcagtggaccatgcagatcgaggaggccaaccccgccaagaagctggtggtggttgacttcactgcatcatggtgtggaccatgccgcatcatggctccagttttcgctgatctcgccaagaagttcccaaatgctgttttcctcaaggtcgatgtcgatgaactgaagcccattgcggagcaattcagcgttgaggccatgccaaccttcctgttcattaaggaaggagatgtcaaggacagggttgtgggagctatcaaggaggaactgacgaacaaggttgggctacacgcggcggcccagtaa

SEQ ID NO: 1481 - protein, 126 aa, Triticum aestivum
MAASAATATPTAVGAGEVISVHTLEQWTMQIEEANPAKKLVVVDFTASWCGPCRIMAPVFADLAKKFPNAVFLKVDVDELKPIAEQFSVEAMPTFLFIKEGDVKDRVVGAIKEELTNKVGLHAAAQ

SEQ ID NO: 1482 - DNA, 357 bp, Triticum aestivum
  CDS (1)..(357)
atggccgccgaggagggagccgtgatagcgtgccacaccaagcaagagttcgacacccacatggctaatggcaaggagaccggcaagctggtgatcattgacttcactgcttcctggtgcggtccttgtcgtgtcatagccccagtctttgctgagtacgccaagaagttccctggcgccattttcctgaaggtggacgccgacgagctgaaggacgtcgctgaagcatacaacgttgaggcaatgccgaccttcctgtttatcaaggatggtgcgaaggtggacactgttgtcggtggcaggaaggatgatatccataccaagatagtggccctcatgggatctgcatctggctaa

SEQ ID NO: 1483 - protein, 118 aa, Triticum aestivum
MAAEEGAVIACHTKQEFDTHMANGKETGKLVIIDFTASWCGPCRVIAPVFAEYAKKFPGAIFLKVDADELKDVAEAYNVEAMPTFLFIKDGAKVDTVVGGRKDDIHTKIVALMGSASG

SEQ ID NO: 1484 - DNA, 369 bp, Zea mays
  CDS (1)..(369)
atggcgtccgagcagggagtcgtgatcgcgtgccacagcaaggctgagtttgacgcccacatgaccaaggcccaggaagccggcaagctggtggtcatcgacttcactgccgcctggtgcggtccatgccgcgccatcgccccactgttcgtcgaacacgccaagaagttcactcaggtcgtcttcctgaaggtggacgtggacgaagtgaaggaagtcaccgcggcctacgaggtcgaggcgatgccgaccttccacttcgtcaagaacggcaagacggtcgcgaccatcgtgggtgccaagaaggacgagctcctggcccagatcgagaagcatgccgcgcctgcgcctgcgtctgcgtctgcctaa

SEQ ID NO: 1485 - protein, 122 aa, Zea mays
MASEQGVVIACHSKAEFDAHMTKAQEAGKLVVIDFTAAWCGPCRAIAPLFVEHAKKFTQVVFLKVDVDEVKEVTAAYEVEAMPTFHFVKNGKTVATIVGAKKDELLAQIEKHAAPAPASASA

SEQ ID NO: 1486 - DNA, 432 bp, Zea mays
  CDS (1)..(432)
atgggactgaggcgcctgatgagatgctgctgctgcattgcaaagcacgcggacgacggcgacaagatcgatttcggaggtggcaatgttcatgttgtcacaagcaaagaggactgggaccaaagaattgccgaggcaaacaaggatgggaaaaccgtggttgcaaacttcagcgcttcctggtgtgggccgtgccgtgtcatcgcacttgtctacgccgaaatgtcgcagacgtaccctcagctcatgttcctgacgatcgatgttgatgacttgatggagttcagctcgtcgtgggacatccgcgcgaccccgaccttcttcttcctcaagaacgagcagcaggtggacaagctggtcggcgccaacaagcctgagctggagaagaaagtggccgccgtcgccgacgcggccggcagcaagacagtgtag

SEQ ID NO: 1487 - protein, 143 aa, Zea mays
MGLRRLMRCCCCIAKHADDGDKIDFGGGNVHVVTSKEDWDQRIAEANKDGKTVVANFSASWCGPCRVIALVYAEMSQTYPQLMFLTIDVDDLMEFSSSWDIRATPTFFFLKNEQQVDKLVGANKPELEKKVAAVADAAGSKTV

SEQ ID NO: 1488 - DNA, 384 bp, Zea mays
  CDS (1)..(384)
atggcggcttcggcggcagcggcggcggcaacaccggtgacgccgacagaggggacggtgatcgcgatccacagcctggaggagtggagcatccagatcgaggaggccaacagcgccaagaagctggtggtgattgacttcactgcaacatggtgtcctccgtgccgcgccatggctccaatttttgctgatatggccaagaagtccccaaatgttgttttcctgaaagttgatgtggatgaaatgaagaccattgctgagcaattcagcgtagaggccatgccaacattcctgttcatgagggagggcgacgtcaaggacagggtcgttggcgcagcaaaggaagagctagcaaggaagcttgaactacacatggcctcgtag

SEQ ID NO: 1489 - protein, 127 aa, Zea mays
MAASAAAAAATPVTPTEGTVIAIHSLEEWSIQIEEANSAKKLVVIDFTATWCPPCRAMAPIFADMAKKSPNVVFLKVDVDEMKTIAEQFSVEAMPTFLFMREGDVKDRVVGAAKEELARKLELHMAS

SEQ ID NO: 1490 - DNA, 399 bp, Zea mays
  CDS (1)..(399)
atgggctccttcctctcgagcttagtcacgccccctccggccgccgacgaccccaactgcgccgtggtggccgcccactccaaggccacctacgacgagcagtgggcggcccacaagagcagcagcaagctgatggtgatcgacttctcggcctcctggtgcgggccctgccgcttcatcgagccggccttcaaggagctggcctcccgcttctccgacgccatcttcgtcaaggtcgacgtcgacgagctcgcggaggtcgcaaggacatggaaggtagaggcgatgccaacgttcgtacttgtaaaggatgggaaggaggtaagccgtgtggttggggccaagaaggacgagcttgagaggaagatccggatgttcacgtcatcttcctcatcgtaa

SEQ ID NO: 1491 - protein, 132 aa, Zea mays
MGSFLSSLVTPPPAADDPNCAVVAAHSKATYDEQWAAHKSSSKLMVIDFSASWCGPCRFIEPAFKELASRFSDAIFVKVDVDELAEVARTWKVEAMPTFVLVKDGKEVSRVVGAKKDELERKIRMFTSSSSS

SEQ ID NO: 1492 - DNA, 402 bp, Zea mays
  CDS (1)..(402)
atgggctccttcttctcgaccttagtgacgccccctccggccgccgacgacccgaactgcgccgtggtggccgcgcactccaaggccacctacgacgagcagtgggcggcccacaagagcagcagcaagctgatggtgatcgacttctcggcgtcctggtgcgggccctgccgcttcatcgagccggccttcaaggagctggcctcccgcttcaccgatgccatcttcgtcaaggttgacgtcgacgagctcgcggaggtcgcaaggacatggaaggtagaggcgatgccaacgttcgtgctggtcaaggatgggaaggaggtaggccgtgtgattggggctaagaaggacgagcttgagaggaagatcaggatgttcgtcacgtcatcttcctcgtcctaa

SEQ ID NO: 1493 - protein, 133 aa, Zea mays
MGSFFSTLVTPPPAADDPNCAVVAAHSKATYDEQWAAHKSSSKLMVIDFSASWCGPCRFIEPAFKELASRFTDAIFVKVDVDELAEVARTWKVEAMPTFVLVKDGKEVGRVIGAKKDELERKIRMFVTSSSSS

SEQ ID NO: 1494 - DNA, 390 bp, Zea mays
  CDS (1)..(390)
atggagatccagcaccaccgggggctgggcaactccaaggttgtgaaggtgcagagcgaggaggcgtgggatctgttcactgatcaagcgagcaacgagggccggcccgttgttgcccatttcggggcgtcatggtgcgtgacgtccctgtccatgaactacaagtttgaggagctagcgcagacccaccccgaggtcttgttcctctacgtggacgtcgacgatgtccagagtgtttcatccaggtacggagtgaaggccatgccgacgttcttcctcatcaagagcaaggaggtggtggggaagatcgtcggggcgaacccagacgaggtgaagaagctggtggatgcttccgccgaacccttggagactcagatagtcgtggagtag

SEQ ID NO: 1495 - protein, 129 aa, Zea mays
MEIQHHRGLGNSKVVKVQSEEAWDLFTDQASNEGRPVVAHFGASWCVTSLSMNYKFEELAQTHPEVLFLYVDVDDVQSVSSRYGVKAMPTFFLIKSKEVVGKIVGANPDEVKKLVDASAEPLETQIVVE

SEQ ID NO: 1496 - DNA, 369 bp, Zea mays
  CDS (1)..(369)
atggcgtccgagcagggagtcgtgatcgcgtgccacagcaaggctgagttcgacgcccacatgaccaaggcccaggaagccggcaagctggtggtcatcgacttcactgccgcctggtgcggtccatgccgcgccatcgccccactgttcgtcgaacacgccaagaagttcactcaggtcgtcttcctgaaggtggacgtggacgaagtgaaggaagtcaccgcggcctacgaggtcgaggcgatgccgaccttccacttcgtcaagaacggcaagacggtcgcgaccatcgtgggtgccaggaaggacgagctcctggcccagatcgagaagcatgccgcgcctgcgcctgcgtctgcgtctgcctaa

SEQ ID NO: 1497 - protein, 122 aa, Zea mays
MASEQGVVIACHSKAEFDAHMTKAQEAGKLVVIDFTAAWCGPCRAIAPLFVEHAKKFTQVVFLKVDVDEVKEVTAAYEVEAMPTFHFVKNGKTVATIVGARKDELLAQIEKHAAPAPASASA

SEQ ID NO: 1498 - DNA, 369 bp, Zea mays
  CDS (1)..(369)
atggcgtcgaagcagggagtggtatgcgcgtgccacagcaagactgagttggacgcccacatgaccaaggcccaggaagccggcaagctggtggtcatcggcttcactgccgcctggtgcggtccatgccgcgccatcgccccactgttcgtcgaacacgccaagaagttcactcaggtcgtcttcctgaaggtgaacgtggacgaagtgaaggaagtcaccgcggcctacgaggtcgaggcgatgccgaccttccacttcgtcaagaacggcaagacggtcgcgaccatcgtgggtgccaggaaggacgagctcctggcccagatcgagaagcatgccgcgcctgcgcctgcgtctgcgtctgcctaa

SEQ ID NO: 1499 - protein, 122 aa, Zea mays
MASKQGVVCACHSKTELDAHMTKAQEAGKLVVIGFTAAWCGPCRAIAPLFVEHAKKFTQVVFLKVNVDEVKEVTAAYEVEAMPTFHFVKNGKTVATIVGARKDELLAQIEKHAAPAPASASA

SEQ ID NO: 1500 - DNA, 399 bp, Zea mays
  CDS (1)..(399)
atgggctccttcctctcgagcttagtcacgccccctccggccgccggcgaccccaaatgcaccgtggtggccgcccactccaaggccacctacgacgagcagtgggcggcccacaagagcagcagcaagctgatggtgatcgacttctcggcctcctggtgcgggccctgccgcttcatcgagccggccttcaaggagctggcctcccgcttctccgacgccatcttcgtcaaggtcgacgtcgacgagctcgcggaggtcgcaaggacatggaaggtagaggcgatgccaacgttcgtacttgtaaaggatgggaaggaggtaagccgtgtggttggggccaagaaggacgagcttgagaggaagatccggatgttcacgtcatcttcctcatcgtaa

SEQ ID NO: 1501 - protein, 132 aa, Zea mays
MGSFLSSLVTPPPAAGDPKCTVVAAHSKATYDEQWAAHKSSSKLMVIDFSASWCGPCRFIEPAFKELASRFSDAIFVKVDVDELAEVARTWKVEAMPTFVLVKDGKEVSRVVGAKKDELERKIRMFTSSSSS

SEQ ID NO: 1502 - DNA, 387 bp, Zea mays
  CDS (1)..(387)
atggcggcttcggaggcggcagcggcggcggcaacaccggtgacgccgacagaggggacggtgatcgcgatccacagcctggaggagtggagcatccagatcgaggaggccaacagcgccaagaagctggtggtgattgacttcactgcaacatggtgtcctccgtgccgcgccatggctccaatttttgctgatatggccaagaagtccccaaatgttgttttcctgaaagttgatgtggatgaaatgaagaccattgctgagcaattcagcgtagaggccatgccaacattcctgttcatgagggagggcgacgtcaaggacagggtcgttggcgcagcaaaggaagagctagcaaggaagcttgaactacacatggcctcgtag

SEQ ID NO: 1503 - protein, 128 aa, Zea mays
MAASEAAAAAATPVTPTEGTVIAIHSLEEWSIQIEEANSAKKLVVIDFTATWCPPCRAMAPIFADMAKKSPNVVFLKVDVDEMKTIAEQFSVEAMPTFLFMREGDVKDRVVGAAKEELARKLELHMAS

SEQ ID NO: 1504 - DNA, 387 bp, Zea mays
  CDS (1)..(387)
atggcggcttcgaaggcggcagcggcggcggcaacaccggtgacgccgacagaggggacggtgatcgcgatccacagcctggaggagtggagcatccagatcgaggaggccaacagcgccaagaagctggtggtgattgacttcactgcaacatggtgtcctccgtgccgcgccatggctccaatttttgctgatatggccaagaagtccccaaatgttgttttcctgaaagttgatgtggatgaaatgaagaccattgctgagcaattcagcgtagaggccatgccaacattcctgttcatgagggagggcgacgtcaaggacagggtcgttggcgcagcaaaggaagagctagcaaggaagcttgaactacacatggcctcgtag

SEQ ID NO: 1505 - protein, 128 aa, Zea mays
MAASKAAAAAATPVTPTEGTVIAIHSLEEWSIQIEEANSAKKLVVIDFTATWCPPCRAMAPIFADMAKKSPNVVFLKVDVDEMKTIAEQFSVEAMPTFLFMREGDVKDRVVGAAKEELARKLELHMAS

SEQ ID NO: 1506 - DNA, 21 bp, Artificial sequence
  primer
atgggtagctgcgtctctaag

SEQ ID NO: 1507 - DNA, 21 bp, Artificial sequence
  primer
tcaaggccgttgaggactttc

SEQ ID NO: 1508 - protein, 142 aa, Artificial sequence
  consensus sequence
  Variant (2)..(18): Xaa in position 2 to 18 is any amino acid
  Variant (19)..(53): Xaa in position 19 to 53 is any or no amino acid
  Variant (55)..(56): Xaa in position 55 to 56 is any amino acid
  Variant (58)..(58): Xaa in position 58 is any amino acid
  Variant (60)..(60): Xaa in position 60 is any amino acid
  Variant (66)..(69): Xaa in position 66 to 69 is any amino acid
  Variant (71)..(83): Xaa in position 71 to 83 is any amino acid
  Variant (84)..(86): Xaa in position 84 to 86 is any or no amino acid
  Variant (88)..(90): Xaa in position 88 to 90 is any amino acid
  Variant (94)..(105): Xaa in position 94 to 105 is any amino acid
  Variant (106)..(122): Xaa in position 106 to 122 is any or no amino acid
  Variant (126)..(128): Xaa in position 126 to 128 is any amino acid
  Variant (130)..(130): Xaa in position 130 is any amino acid
  Variant (132)..(137): Xaa in position 132 to 137 is any amino acid
  Variant (138)..(139): Xaa in position 138 to 139 is any or no amino acid
VXXXXXXXXXXXXXXXXXXXXXXXXXXXXXXXXXXXXXXXXXXXXXXXXXXXXVXXFXAXWCGPCXXXXPXXXXXXXXXXXXXXXXFXXXDVDXXXXXXXXXXXXXXXXXXXXXXXXXXXXXPTFXXXKXGXXXXXXXXVGA

SEQ ID NO: 1509 - protein, 24 aa, Artificial sequence
  protein pattern
  Variant (2)..(3): Xaa in position 2 to 3 is any amino acid
  Variant (4)..(4): Xaa in position 4 is any or no amino acid
  Variant (6)..(6): Xaa in position 6 is any amino acid
  Variant (8)..(8): Xaa in position 8 is any amino acid
  Variant (11)..(11): Xaa in position 11 is Gly, Pro or Thr
  Variant (14)..(14): Xaa in position 14 is Lys or Arg
  Variant (15)..(16): Xaa in position 15 to 16 is any amino acid
  Variant (17)..(17): Xaa in position 17 is Ala, Asp, Glu, Gly, Ser or Thr
  Variant (19)..(23): Xaa in position 19 to 23 is any amino acid
  Variant (24)..(24): Xaa in position 24 is Ala, Asp, Ser or Val
VXXXFXAXWCXPCXXXXPXXXXXX

SEQ ID NO: 1510 - DNA, 723 bp, Arabidopsis thaliana
  CDS (1)..(723)
atggggtccaaacaaccatacctaaacggcgcgtactacggaccatcaattccaccaccgcctaaggctcaccgcagctataactcacctggattcggatgctgttgcttcagctgcctcggaagctgtctacgttgctgcggttgctgcatcttaagcctgatctgcaacatcctcatagctgtagccgtaatcctcggagtcgccgctcttatcctctggctcatcttccgtccaaacgccgtcaaattctacgtcgccgacgctaatctgaaccgattcagcttcgatccaaacaacaacctccattacagtctcgatctcaatttcacaatccgtaaccctaatcaacgagtcggagtctactacgatgagttctcggttagtggctattacggagatcagagattcggatctgcgaacgtttcgtcgttttatcaagggcataagaatacgacggtgattttaaccaaaattgaaggacagaatctggtggtgctcggcgacggagcgagaacagatctaaaagatgatgagaaatctgggatttatcggattaatgcgaaattgaggctaagtgttaggtttaagttttggtttataaagtcgtggaagcttaaaccaaagattaagtgtgatgatcttaagattcctcttggttcctctaattctacaggagggtttaagtttcaaccggtgcagtgtgactttgacttatcttag

SEQ ID NO: 1511 - protein, 240 aa, Arabidopsis thaliana
MGSKQPYLNGAYYGPSIPPPPKAHRSYNSPGFGCCCFSCLGSCLRCCGCCILSLICNILIAVAVILGVAALILWLIFRPNAVKFYVADANLNRFSFDPNNNLHYSLDLNFTIRNPNQRVGVYYDEFSVSGYYGDQRFGSANVSSFYQGHKNTTVILTKIEGQNLVVLGDGARTDLKDDEKSGIYRINAKLRLSVRFKFWFIKSWKLKPKIKCDDLKIPLGSSNSTGGFKFQPVQCDFDLS

SEQ ID NO: 1512 - DNA, 1071 bp, Glycine max
  CDS (92)..(826)
acgaggaaacatcccttagaaaaaaataaaggttctctctcctttaataccctaacgttcccaagtttcagacttcaaggcagttcgcacaatgtcccatctaaacggcgcgtactacggcccctccgttccgccgccgaaatcctaccaccgcccctcccgcggcggccgcgacggctgctgctgcggctgcctgagctgcttctgcggctgcatcttcgactgcatcctgggcctcatctgcaagatcctcaccacaatcctcatcatcgtagcaatactcggctttctcttctggttcatcgtgcgccccaacgtgctcaaattccacgttaccgacgcgtccctcacgcgcttcgactacaccaccaacaacactctccactacgacctcgccctcaacgtctcgatccgcaacccgaaccgcagggtcggcgtctactacgaccacatcgaagcgcacgcgctgtaccaggatgttttgttcgggaaccagacattagggccgttcttccagcaccacaagaacaccaccttcgtgaatccccttttcaagggccagcgcgtgacgccactcgccgggaaccaggtcgaggtgtttgacaaggagaagggttcgggtgtttacaccatcgatttgaagctctttatggtggttcggttcaagttcttgctgttcaagagtgcgagcgtgaagcccaagattcggtgtgcgttgcacgtgccgctgaaatcgcgtaacgcaacaacaactatctcccccgatgctgcgtttcaacccacagagtgcggttgggattacgggaaaaaatggtggatccattagattaaaattccaccggtttttttttcccttagtatttcttgcgaaatttcttgttttgttctggctttattttaggtagtgtatattttcttgatgacattggttccctgactgaaacgtagccattctcctaggtggatcgatattacaaaaatattttttttttatatagccttatattcacttttgatacattttgatgtctattcgtattgttgaaattttatttttgtaaaacctcgtgc

SEQ ID NO: 1513 - protein, 244 aa, Glycine max
MSHLNGAYYGPSVPPPKSYHRPSRGGRDGCCCGCLSCFCGCIFDCILGLICKILTTILIIVAILGFLFWFIVRPNVLKFHVTDASLTRFDYTTNNTLHYDLALNVSIRNPNRRVGVYYDHIEAHALYQDVLFGNQTLGPFFQHHKNTTFVNPLFKGQRVTPLAGNQVEVFDKEKGSGVYTIDLKLFMVVRFKFLLFKSASVKPKIRCALHVPLKSRNATTTISPDAAFQPTECGWDYGKKWWIH

SEQ ID NO: 1514 - DNA, 726 bp, Oryza sativa (japonica cultivar-group)
  CDS (1)..(726)
atgggtgatcacgcaatggccaataatcacgagcacaaggtggaccacctcgaccagcccttctacggcccgcccgttctccctccggtcgagccgctgtccgccgccgccgcgcgccgccggtgcgtcgccgacccgtacgcgctctgctgcagggcgatccgcgtgctgacgatcgtggtcatcgccgtcggcgtggtggcgctggtgctctggctcgtgtccctgcccaacgccctcaaggcctacgtcgactccgccgagctcacccgcttcgagctcggcggcagcgacggcgccaagcggggccagctgctgcggtacaacctcaccgtggccgtgagcatccgcaacccgaaccgggaccaggccgtgctgtaccggcggctggaggcggtggtgctctacggcggcgagaggttcgggtacgtcgacttcccgcggacgcggcaggggcggaagagcacgatggtgatccggccgagcttcgtcgggcagggcgtcctcgccggcgcggcggcgttcggaagggagaaggaggaagggttcttcaacatcaacgtgaagctccacatgagggtgcgtctcaaggtgatggtcttcgtggacagcgtcgagtacaggccggacgtggactgctacatcagggtgcccgacccgagcaacgcgacggcggtggcgatggggttcacggcgacgcgctgccgtgtcgacgacttcatgtga

SEQ ID NO: 1515 - protein, 241 aa, Oryza sativa (japonica cultivar-group)
MGDHAMANNHEHKVDHLDQPFYGPPVLPPVEPLSAAAARRRCVADPYALCCRAIRVLTIVVIAVGVVALVLWLVSLPNALKAYVDSAELTRFELGGSDGAKRGQLLRYNLTVAVSIRNPNRDQAVLYRRLEAVVLYGGERFGYVDFPRTRQGRKSTMVIRPSFVGQGVLAGAAAFGREKEEGFFNINVKLHMRVRLKVMVFVDSVEYRPDVDCYIRVPDPSNATAVAMGFTATRCRVDDFM

SEQ ID NO: 1516 - DNA, 717 bp, Oryza sativa (japonica cultivar-group)
  CDS (1)..(717)
atggcagcctacgggaagccgcagccgccgctgaacgacgcgtactacggcccgccgatcccgccgccaccggcggcagcgtactacggcgcagcggcgcctccgcccgcgccacgccggagcggcgcgcaccgtctgttctgctgcctcttcagggtgctcgccgtcgccgtcatcgcgctcggcaccgccgtcctcgtcctctggctcatctaccgccccagcgtcgtcaaggcctacgccgacaccgctgcgctgtcccgcttcgacctcaccaacggcggcagcctcctcgtgtacaacctcaccgtgggcatgcgcgtgcgcaaccccaaccgcttcggcatcaacttcaggagcgtcgacgcgcaggcgtcctacgacggcgaccggttcgggtacgcgccgctgcagccgttatacgttggtcggaagagcgacgccaggttcgacgtgacgctgagcggctcggcggccatcgacgaccgcgacgtggagcgcacataccggagggagacggcgcaggggtcttacgaggttaaggtcagggtgtacgctagacaaggattcaaggtcaggggcttcaggctgaacaacaagagcaaattcacctgcacgctgaacctgccggcgcccaactccggcaacggcaccgcgagcgggacgccgacgacggtgttcacgaggaagcagccgaagtgcgacgtggactattga

SEQ ID NO: 1517 - protein, 238 aa, Oryza sativa (japonica cultivar-group)
MAAYGKPQPPLNDAYYGPPIPPPPAAAYYGAAAPPPAPRRSGAHRLFCCLFRVLAVAVIALGTAVLVLWLIYRPSVVKAYADTAALSRFDLTNGGSLLVYNLTVGMRVRNPNRFGINFRSVDAQASYDGDRFGYAPLQPLYVGRKSDARFDVTLSGSAAIDDRDVERTYRRETAQGSYEVKVRVYARQGFKVRGFRLNNKSKFTCTLNLPAPNSGNGTASGTPTTVFTRKQPKCDVDY

SEQ ID NO: 1518 - DNA, 618 bp, Oryza sativa (japonica cultivar-group)
  CDS (1)..(618)
atgggttcggcgagccgcgcggtgtcgtgcctgtgctgcccgtgcaagtgcctggcgtgcggcctcttcagctgcctctgcagcatcctcatctccctcctcgtcaccctcggcgtcctcgccctcatcttctacctcatcttccgcccccacatgatcgccgccaccgtcgactccgccgccctcacccagttcaccctctccaccaactccgccctcgcctacagcctcaccgtcgacctcaccgtccgcaaccccaacaagcgcgtcggcctctactacgacaacgtcgagtccctcgccctcttcgacggccagcgcttcggctacgcccccctcgactccttctaccagtccaccgaggcatccaccaagctctcccccgccttcaagggccagcagccgctccaaggcgacatcaccgccgccaacttcaggtcgcagcagaccgccggcaagttcgacatcgaggtcaagctcaacgccaagctcagggtcaaggtctgggccttcaaggttcccggacccaaggccaagatcagctgccccatcaccgtcccagcgtccgcccccaacgcccccgcattccagcgcaccgactgcaaagtctggttctga

SEQ ID NO: 1519 - protein, 205 aa, Oryza sativa (japonica cultivar-group)
MGSASRAVSCLCCPCKCLACGLFSCLCSILISLLVTLGVLALIFYLIFRPHMIAATVDSAALTQFTLSTNSALAYSLTVDLTVRNPNKRVGLYYDNVESLALFDGQRFGYAPLDSFYQSTEASTKLSPAFKGQQPLQGDITAANFRSQQTAGKFDIEVKLNAKLRVKVWAFKVPGPKAKISCPITVPASAPNAPAFQRTDCKVWF

SEQ ID NO: 1520 - DNA, 717 bp, Arabidopsis thaliana
  CDS (1)..(717)
atggcgaacggattaaacggcgccagttacggtccaccaatcaagccaccggtgaaaacttactacagtcatggccgacgcggctccgacgtaggttgcggtatctgtggttgtttctccagctgtctcctttgttgcggaggttgtctcgtaaacatcatctgcaacatcctcatcggtgtactcgtttgccttggagtcgttgctttaatcctctggtttatcctccgaccaaacgtcgtgaaattccaagttacggaagctgatttaacgcgatttgagttcgatccaagaagccataaccttcattacaatatctcgttgaacttttcgatacgtaatcctaatcaacgtcttgggatacactatgatcagttagaggtgagaggttactacggtgatcagcgtttttctgctgcgaatatgacgtcgttttatcagggacataagaacacgacggtggttggaacggagttaaacggacagaaactggttttgctcggtgccggtggacggagagattttagggaggatcggaggtctggggtttacaggatcgacgtgaagctcagatttaagttaaggtttaagtttgggtttttgaactcatgggccgttaggcccaagattaagtgtcatctcaaagtccccttgagcacctctagttcagatgaaagatttcagtttcatcccaccaagtgccacgttgacctctga

SEQ ID NO: 1521 - protein, 238 aa, Arabidopsis thaliana
MANGLNGASYGPPIKPPVKTYYSHGRRGSDVGCGICGCFSSCLLCCGGCLVNIICNILIGVLVCLGVVALILWFILRPNVVKFQVTEADLTRFEFDPRSHNLHYNISLNFSIRNPNQRLGIHYDQLEVRGYYGDQRFSAANMTSFYQGHKNTTVVGTELNGQKLVLLGAGGRRDFREDRRSGVYRIDVKLRFKLRFKFGFLNSWAVRPKIKCHLKVPLSTSSSDERFQFHPTKCHVDL

SEQ ID NO: 1522 - DNA, 684 bp, Arabidopsis thaliana
  CDS (1)..(684)
atggctgctgaacaacctctcaatggcgccttctacggtccatcagtcccaccaccagctcccaaaggctactaccgacgtgggcacggtcgtggctgtggctgctgcctcctcagcttattcgtcaaagtaatcatatcccttattgtcatcctcggcgtagccgctctcatcttctggctcatcgtccgacctcgtgccatcaagtttcacgtgaccgatgcgtcccttacccgctttgaccacacttccccggacaacattttaaggtataacctagccctcactgttcctgtccgtaacccaaacaagaggatcggactctactacgataggatcgaagctcatgcctactacgagggaaagcggtttagtaccatcacgttaactcctttctatcaaggacacaaaaacacaaccgttctcacaccaacgttccaaggccaaaaccttgttatttttaacgccggacagtctaggactttaaacgcggagaggatatccggtgtatacaatatagagatcaagttcaggcttagggttaggtttaagcttggggacttgaagtttaggaggattaagcctaaggttgattgcgatgatctaaggcttcctttaagtacctcaaacggaactacaactacctccactgttttcccgatcaagtgcgacttcgacttctga

SEQ ID NO: 1523 - protein, 227 aa, Arabidopsis thaliana
MAAEQPLNGAFYGPSVPPPAPKGYYRRGHGRGCGCCLLSLFVKVIISLIVILGVAALIFWLIVRPRAIKFHVTDASLTRFDHTSPDNILRYNLALTVPVRNPNKRIGLYYDRIEAHAYYEGKRFSTITLTPFYQGHKNTTVLTPTFQGQNLVIFNAGQSRTLNAERISGVYNIEIKFRLRVRFKLGDLKFRRIKPKVDCDDLRLPLSTSNGTTTTSTVFPIKCDFDF

SEQ ID NO: 1524 - DNA, 696 bp, Arabidopsis thaliana
  CDS (1)..(696)
atggcggacttaaacggtgcgtattacggaccatcgattccaccgccgaagaaagtctctcacagccacggcagacgcggcggtggatgcggttgtttaggtgactgtcttggctgctgcggctgctgtatcttaagcgtcatcttcaacatcctcataaccatagccgtcttattaggcatagctgctctaatcatctggctcattttcagacccaacgctatcaaattccacgtcaccgacgctaaactcaccgaattcacactcgacccaaccaacaacctccgatacaatctcgatctcaatttcacaatccgtaaccctaaccgccggatcggtgtttactatgatgaaatcgaagtcagaggatactacggtgatcagcgattcggtatgagtaacaacatctcgaagttttaccagggacataagaacacgacggtggttggaactaaactcgtgggacagcaattggtgctgcttgacggcggagagaggaaggatttgaacgaggatgtgaattctcagatctataggatcgatgccaagctgagacttaagattaggtttaagtttgggttgatcaagtcgtggaggttcaagcccaagatcaagtgcgatctcaaggttcctcttacctctaattcaaccagcgggtttgtttttcagccgaccaagtgtgacgttgacttttga

SEQ ID NO: 1525 - protein, 231 aa, Arabidopsis thaliana
MADLNGAYYGPSIPPPKKVSHSHGRRGGGCGCLGDCLGCCGCCILSVIFNILITIAVLLGIAALIIWLIFRPNAIKFHVTDAKLTEFTLDPTNNLRYNLDLNFTIRNPNRRIGVYYDEIEVRGYYGDQRFGMSNNISKFYQGHKNTTVVGTKLVGQQLVLLDGGERKDLNEDVNSQIYRIDAKLRLKIRFKFGLIKSWRFKPKIKCDLKVPLTSNSTSGFVFQPTKCDVDF

SEQ ID NO: 1526 - DNA, 711 bp, Oryza sativa subsp
  CDS (1)..(711)
atggccaataatcacgagcacaaggtggaccacctcgaccagcccttctacggcccgcccgttctccctccggtcgagccgctgtccgccgccgccgcgcgccgccggtgcgtcgccgacccgtacgcgctctgctgcagggcgatccgcgtgctgacgatcgtggtcatcgccgtcggcgtggtggcgctggtgctctggctcgtgtccctgcccaacgccctcaaggcctacgtcgactccgccgagctcacccgcttcgagctcggcggcagcgacggggccaagcggggccagctgctgcggtacaacctcaccgtggccgtgagcatccgcaacccgaaccgggaccaggccgtgctgtaccggcggctggaggcggtggtgctctacggcggcgagaggttcgggtacgtcgacttcccgcggacgcggcaggggcggaagagcacgatggtgatccggccgagcttcgtcgggcagggcgtcctcgccggcgcggcggcgttcggaagggagaaggaggaagggttcttcaacatcaacgtgaagctccacatgagggtgcgtctcaaggtgatggtcttcgtggacagcgtcgagtacaggccggacgtggactgctacatcagggtgcccgacccgagcaacgcgacggcggtggcgatggggttcacggcgacgcgctgccgtgtcgacgacttcatgtga

SEQ ID NO: 1527 - protein, 236 aa, Oryza sativa subsp
MANNHEHKVDHLDQPFYGPPVLPPVEPLSAAAARRRCVADPYALCCRAIRVLTIVVIAVGVVALVLWLVSLPNALKAYVDSAELTRFELGGSDGAKRGQLLRYNLTVAVSIRNPNRDQAVLYRRLEAVVLYGGERFGYVDFPRTRQGRKSTMVIRPSFVGQGVLAGAAAFGREKEEGFFNINVKLHMRVRLKVMVFVDSVEYRPDVDCYIRVPDPSNATAVAMGFTATRCRVDDFM

SEQ ID NO: 1528 - DNA, 717 bp, Oryza sativa subsp
  CDS (1)..(717)
atggcagcctacgggaagccgcagccgccgctgaacgacgcgtactacggcccgccgatcccgccgccaccggcggcagcgtactacggcgcagcggcgcctccgcccgcgccacgccggagcggcgcgcaccgtctgttctgctgcctcttcagggtgctcgccgtcgccgtcatcgcgctcggcaccgccgtcctcgtcctctggctcatctaccgccccagcggcgtcaaggcctacgccgacaccgctgcgctgtcccgcttcgacctcaccaacggcggcagcctcctcgtgtacaacctcaccgtgggcatgcgcgtgcgcaaccccaaccgcttcggcatcaacttcaggagcgtcgacgcgcaggcgtcctacgacggcgaccggttcgggtacgcgccgctgcagccgttctacgttggtcggaagagcgacgccaggttcgacgtgacgctgagcggctcggcggccatcgacgaccgcgacgtggagcgcacataccggagggagacggcgcaggggtcttacgaggttaaggtcagggtgtacgctagacaaggattcaaggtcaggggcttcaggctgaacaacaagagcaaattcacctgcacgctgaacctgccggcgcccagctccggcaacggcaccgcgagcgggacgccgacgacggtgttcacgaggaagcagccgaagtgcgacgtggactattga

SEQ ID NO: 1529 - protein, 238 aa, Oryza sativa subsp
MAAYGKPQPPLNDAYYGPPIPPPPAAAYYGAAAPPPAPRRSGAHRLFCCLFRVLAVAVIALGTAVLVLWLIYRPSGVKAYADTAALSRFDLTNGGSLLVYNLTVGMRVRNPNRFGINFRSVDAQASYDGDRFGYAPLQPFYVGRKSDARFDVTLSGSAAIDDRDVERTYRRETAQGSYEVKVRVYARQGFKVRGFRLNNKSKFTCTLNLPAPSSGNGTASGTPTTVFTRKQPKCDVDY

SEQ ID NO: 1530 - DNA, 618 bp, Oryza sativa
  CDS (1)..(618)
atgggttcggcgagccgcgcggtgtcgtgcctgtgctgcccgtgcaagtgcctggcgtgcggcctcttcagctgcctctgcagcatcctcatctccctcctcgtcaccctcggcgtcctcgccctcatcttctacctcatcttccgcccccacatgatcgccgccaccgtcgactccgccgccctcacccagttcaccctctccaccaactccgccctcgcctacagcctcaccgtcgacctcaccgtccgcaaccccaacaagcgcgtcggcctctactacgacaacgtcgagtccctcgccctcttcgacggccagcgcttcggctacgcccccctcgactccttctaccagtccaccgaggcatccaccaagctctcccccgccttcaagggccagcagccgctccaaggcgacatcaccgccgccaacttcaggtcgcaacagaccgccggcaagttcgacatcgaggtcaagctcaacgccaagctcagggtcaaggtctgggccttcaaggttcccggacccaagcccaagatcagctgccccatcaccgtcccagcgtccgcccccaacgcccccgcattccagcgcaccgactgcaaagtctggttctga

SEQ ID NO: 1531 - protein, 205 aa, Oryza sativa
MGSASRAVSCLCCPCKCLACGLFSCLCSILISLLVTLGVLALIFYLIFRPHMIAATVDSAALTQFTLSTNSALAYSLTVDLTVRNPNKRVGLYYDNVESLALFDGQRFGYAPLDSFYQSTEASTKLSPAFKGQQPLQGDITAANFRSQQTAGKFDIEVKLNAKLRVKVWAFKVPGPKPKISCPITVPASAPNAPAFQRTDCKVWF

SEQ ID NO: 1532 - DNA, 666 bp, Nicotiana tabacum
  CDS (1)..(666)
atggcccttccattccgccaccagcaaaatcctatcaccgccacggccgcggcagcagctgcaacccatgtagctgtctctttggctgcctctgcaattgttttttcaaaattatcttcacccttcacccttctaatcatcctcggagtgattgcattagttctatggctcgttcttcgacctaacaaagtcaagttctacgtgaccgatgctacgttgactcagttcgatttgtccaccacaaacaacactattttctatgatcttgctcttaatatgactattagaaaccccaacaaacgtattggaatttactacgattcaattgaagctagagctttgtatcaaggcgagaggtttgatagtacaaatttggaaccattttatcagggtcacaagaatactagcagcttgcgtccagtattcaaaggtcagagcttggttttattgggagatagagagaaatccaattacaataatgagaagaatttaggggtttatgagatggaagtgaagctttacatgcgtattaggcttaaggttggttggatcaaaacacataaaattaagccaaagattgagtgtgatttcaaggtacctctagggtctaatggcagatcatcatctgctaattttgaggaaaccagatgccatcttgattggtag

SEQ ID NO: 1533 - protein, 221 aa, Nicotiana tabacum
MALPFRHQQNPITATAAAAAATHVAVSLAASAIVFSKLSSPFTLLIILGVIALVLWLVLRPNKVKFYVTDATLTQFDLSTTNNTIFYDLALNMTIRNPNKRIGIYYDSIEARALYQGERFDSTNLEPFYQGHKNTSSLRPVFKGQSLVLLGDREKSNYNNEKNLGVYEMEVKLYMRIRLKVGWIKTHKIKPKIECDFKVPLGSNGRSSSANFEETRCHLDW

SEQ ID NO: 1534 - DNA, 744 bp, Medicago truncatula
  CDS (1)..(744)
atgatggccgatcatcaacttaatggcgctcactatggcccttccatcccaccgacgagaccacaaaggcgacgccacaatgccggctgcggcttctgcagttgcatcttgggctgctttagaagctgttgcggatgcatgttcaactgcattttaagcctaatttgcagaatcatagccacaatcatcatcttggtggcaatattcggtttcctcttctggcttatcgtgcgtcctaacgccctcaagttcaccgttatggaggcatcacttactcaattcaatttcacaaataacaacacacttcattatgatctttccgtcaatctcacaatcagaaaccctaatagaagagttagtgtctattacaatgacatcgaaacactttcattttataaagattttaggtttggttctcaaaccctaggaaaattctttcaacctcataagaatacaagccttttgaatcctgtttttaaaggtcaacaagtgattcctttgagttcaagtcagatttcggagttcaataaggagacgaacaatggggtttatggaattaatttgaaggttttgcttaatgttaggtttgccttgggtttgatcaagacagggaatctgaaacaaaaccatcattgtgatttgaaggttcctttcaagtcacacaatggaacttcttctttgggtaatggatttcaagccactcgttgtgaatgggattccaaatggtggttgttgttccgttag

SEQ ID NO: 1535 - protein, 247 aa, Medicago truncatula
MMADHQLNGAHYGPSIPPTRPQRRRHNAGCGFCSCILGCFRSCCGCMFNCILSLICRIIATIIILVAIFGFLFWLIVRPNALKFTVMEASLTQFNFTNNNTLHYDLSVNLTIRNPNRRVSVYYNDIETLSFYKDFRFGSQTLGKFFQPHKNTSLLNPVFKGQQVIPLSSSQISEFNKETNNGVYGINLKVLLNVRFALGLIKTGNLKQNHHCDLKVPFKSHNGTSSLGNGFQATRCEWDSKWWLLFR

SEQ ID NO: 1536 - DNA, 1013 bp, Nicotiana tabacum
  CDS (59)..(748)
cctatacatataccaaagaaacaaagtaatataatctgtactttatttttcttgagccatgccggaatccaacttgaacggagcatattatggcccttccattccgccaccagcaaaatcctatcaccgccacggccgcggcagcagctgcaacccatgtagctgtctctttggctgcctctgcaattgttttttcaaaattatcttcacccttctgatcatcctcggagtcattgcattagtactctggctcgttcttcgtcctaacaaagtcaaattctacgtgaccgatgccacgttgacacagttcgatttgtccaacacaaacaacactattttctatgatcttgctcttaatatgactattagaaaccccaacaagcgtattggaatttactatgattcaattgaagctagagctatgtatcaaggcgagaggtttcatagtacaaatttgaaaccattttatcagggtcacaagaatactagcagcttgcatccagtgttcaaaggtcaaagcttggttctattgggagacagagagaaatccaattacaataatgagaagaatttaggagtttatgagatggaagtgaagctttacatgcgtattaggctaaaggctggttggatcaaaacacacaaaattaagccaaagattgagtgtgatttcaaggttcctctggagtctaatggcagatcatcatctgctaatttcgaggaaactagatgccatcttgattggtagttttcttctatcatcgcaccattattgatcgtcttcacatttcgatggagtttgcttctgttttttcattatttttatatatttagatttgttctatttcctatattctttggatattagcagatattcttgattatgggatttctatcccttttgtttttccggcgtttagtgttcattgatatacatggtaccatcttgttatatttggatatggttgtatgtaaataaataatgagttcgtctaaaaaaaaaaaaaaaaaaa

SEQ ID NO: 1537 - protein, 229 aa, Nicotiana tabacum
MPESNLNGAYYGPSIPPPAKSYHRHGRGSSCNPCSCLFGCLCNCFFKIIFTLLIILGVIALVLWLVLRPNKVKFYVTDATLTQFDLSNTNNTIFYDLALNMTIRNPNKRIGIYYDSIEARAMYQGERFHSTNLKPFYQGHKNTSSLHPVFKGQSLVLLGDREKSNYNNEKNLGVYEMEVKLYMRIRLKAGWIKTHKIKPKIECDFKVPLESNGRSSSANFEETRCHLDW

SEQ ID NO: 1538 - DNA, 996 bp, Nicotiana tabacum
  CDS (82)..(771)
attgtaacctatagtacaccaaaggaacaaataaacagtataagttggtatttattttttcattcttgttttggttaagctatggcagaatcccacttgaacggagcatattatggcccttcaattccgccatcgtcgaaaacctatcaccaccatggccgcggcagcagctgcaacccatgtagctgtctctttggctgcctctgcaattgcattttccaaatattcttcaccattcttgtcatcattggagtcgctgcattagttctatggctcgttcttcgtcctaacaaagtcaaattctacgtgaccgatgcaacgttgacacagttcgatttgtccaccacaaacaacactataaactatgatcttgctcttaatatgactattagaaaccccaacaaacgtattggaatttactacgattcaattgaagctagagctatgtatcaaggtgaaagatttgctagtcaaaatttggaaccattttatcagggtcacaagaatactagtagcttacatccagtgttcaaaggtcagagcttggttctattgggagacagagagaaaaccaactacaataatgagaagaatgcaggggtttatgagatggaagtgaagctttccatgcgtataagactaaagtttggttggattaaaacacgcaaaattaagccaaagattgagtgtgatttcaaggttcctctggagtctaatggcagatcatcatctgctaatttcgaggaaactagatgccatcttgattggtagttttcttctatcatcgcaccattgttgatcatcttcacatttcgatggagtttatttttgttttttattatttattgtatttcctgtattctttggaatttcgatattagcggatattcttgattattggatttctatcacttttgattttccgtcattgacttagtgttcattaatgtaaataaataattacttttatttttgctgaaaaaaaaaaaaaaaaaa

SEQ ID NO: 1539 - protein, 229 aa, Nicotiana tabacum
MAESHLNGAYYGPSIPPSSKTYHHHGRGSSCNPCSCLFGCLCNCIFQIFFTILVIIGVAALVLWLVLRPNKVKFYVTDATLTQFDLSTTNNTINYDLALNMTIRNPNKRIGIYYDSIEARAMYQGERFASQNLEPFYQGHKNTSSLHPVFKGQSLVLLGDREKTNYNNEKNAGVYEMEVKLSMRIRLKFGWIKTRKIKPKIECDFKVPLESNGRSSSANFEETRCHLDW

SEQ ID NO: 1540 - DNA, 687 bp, Capsicum chinense
  CDS (1)..(687)
atgcctgaatcgaacttgaacggagcctattatggcccgtccatcccgcccccgtccaaatcttatcatcgtcacggacggggaagcagctgcaacccatgcagctgcctctttggttgcctatgcaattgcatcttccaaataatcttcactattctcatcgtccttggagtcattgcgttagtcctatggcttgtcctacgtcctaacaaggtcaaattctacgtgactgatgctacgttgacacaatttgatttgtccactgccaacaacaccctttactatgatcttgccctcaatatgactataaggaaccctaataaaagaatcgggatttactacgattcgattgaagctagaggtatgtataaaggtgagagatttgctagtcaaaatttggaaccgttttatcaaggtcacaagaatactagcagtttgcatccagtgcttaaaggacaaagtttggttctattgggggatagagagaaatcaaattacaataatgagaagaattctggagtttatgatattgaaatgaagctttatatgcgtataaggctaaagattggttggattaaaacacacaaaattaagcccaaaattgaatgtgacatcaaggttcctttggagtccaatggaagatcatctgctaattttgaggaaactagatgtcatcttgattggtag

SEQ ID NO: 1541 - protein, 228 aa, Capsicum chinense
MPESNLNGAYYGPSIPPPSKSYHRHGRGSSCNPCSCLFGCLCNCIFQIIFTILIVLGVIALVLWLVLRPNKVKFYVTDATLTQFDLSTANNTLYYDLALNMTIRNPNKRIGIYYDSIEARGMYKGERFASQNLEPFYQGHKNTSSLHPVLKGQSLVLLGDREKSNYNNEKNSGVYDIEMKLYMRIRLKIGWIKTHKIKPKIECDIKVPLESNGRSSANFEETRCHLDW

SEQ ID NO: 1542 - DNA, 889 bp, Solanum tuberosum
  CDS (36)..(713)
acttaattttgactttcttgtttttgttataagctatgtccaacttgaacggagcctattatggtccatccattccgcccccgtccaaatcctaccatcgacatggacggggaagcagctgcaacccttgcagctgcctcttcggttgcctatgcaactgcattttccaaatcatcttcaccatcctcatcgtcctcggagtcattgcattagtcctctggctagtccttcgtcctaacaaggtcaatttctacgtgacagatgccacattgacacaattcgattattccactacaaacaacaccctctactatgatcttgcactcaacatgactattaggaaccctaataaacgaatcgggatttactacgattcgatcgaagcaagaggtatgtatcaaggccagagatttgctagtcaaaatttggaacgattttatcaaggtcacaaaaatactagctatttgcatccagtatttaaaggacaaaatttggttctattgggagatagagagaaaacaaattataataatgagaagaatttagggatttatgagatggaaatgaagctttatatgcgtataaggctaaagattggttggattaaaactcacaaaattaagcccagaattgagtgtgattttaaggtacctttggagtccagtggcagatctgttaattttgaggaaactaggtgccatcttgattggtagattatttttttattattatttgtgatttgttgtatttcctttatttattggatcatattagtataatttcttgattaggggatttatctccttttttgttatttggatagatattatggttgttaataaataatgagtttgttttaaaaaaaaaaaaaaaaaaaaaaaaaaaaaaa

SEQ ID NO: 1543 - protein, 225 aa, Solanum tuberosum
MSNLNGAYYGPSIPPPSKSYHRHGRGSSCNPCSCLFGCLCNCIFQIIFTILIVLGVIALVLWLVLRPNKVNFYVTDATLTQFDYSTTNNTLYYDLALNMTIRNPNKRIGIYYDSIEARGMYQGQRFASQNLERFYQGHKNTSYLHPVFKGQNLVLLGDREKTNYNNEKNLGIYEMEMKLYMRIRLKIGWIKTHKIKPRIECDFKVPLESSGRSVNFEETRCHLDW

SEQ ID NO: 1544 - DNA, 612 bp, Glycine max
  CDS (1)..(612)
atggccgataagcacggaagaagctgctgttgctgcctctttggaatcttgtggaagattctggttgcactcatcgtcctcgttggcctcgtattcctcatattctggctggtggttcaaccccgctccttcaagttccaggtcacggaagcggacctaacccaatttgattactacaccaacaatcacactctccactacaacatggtgctcaacttcactgcacgcaaccccaacaagaagctcagcatatactacgacaaagttgaggcattagcattctacgaggatgccaggttcgccaattacgatgtcataactcacatgaactccttccgccagtacaagaagagcaccagccccatgagcgccgttttctcggggaagaaggtgttgatgctcaacagcgaacaagtctctaagttgaaccaagacaagagtgatggggtttatgacatctacgtgaagctcaacttcaggattcggttcaggctcggggactccatatccggtaacttgaagcccaaggtcaaatgtcacctcaaggttcccttcagtaaaagtggcacctttactctctttgagaccaccaaatgttctgtccatttctag

SEQ ID NO: 1545 - protein, 203 aa, Glycine max
MADKHGRSCCCCLFGILWKILVALIVLVGLVFLIFWLVVQPRSFKFQVTEADLTQFDYYTNNHTLHYNMVLNFTARNPNKKLSIYYDKVEALAFYEDARFANYDVITHMNSFRQYKKSTSPMSAVFSGKKVLMLNSEQVSKLNQDKSDGVYDIYVKLNFRIRFRLGDSISGNLKPKVKCHLKVPFSKSGTFTLFETTKCSVHF

SEQ ID NO: 1546 - DNA, 723 bp, Arabidopsis thaliana
  CDS (1)..(723)
atggggtccaaacaaccatacctaaacggcgcgtactacggaccatcaattccaccaccgcctaaggctcaccgcagctataactcacctggattcggatgctgttgcttcagctgcctcggaagctgtctacgttgctgcggttgctgcatcttaagcctgatctgcaacatcctcatagctgtagccgtaatcctcggagtcgccgctcttatcctctggctcatcttccgtccaaacgccgtcaaattctacgtcgccgacgctaatctgaaccgattcagcttcgatccaaacaacaacctccattacagtctcgatctcaatttcacaatccgtaaccctaatcaacgagtcggagtctactacgatgagttctcggttagtggctattacggagatcagagattcggatctgcgaacgtttcgtcgttttatcaagggcataagaatacgacggtgattttaaccaaaattgaaggacagaatctggtggtgctcggcgacggagcgagaacagatctaaaagatgatgagaaatctgggatatatcggattgatgcgaaattgaggctaagtgttaggtttaagttttggtttataaagtcgtggaagcttaaaccaaagattaagtgtgatgatcttaagattcctcttggttcctctaattctacaggagggtttaagtttcaaccggtgcagtgtgactttgacttatcttag

SEQ ID NO: 1547 - protein, 240 aa, Arabidopsis thaliana
MGSKQPYLNGAYYGPSIPPPPKAHRSYNSPGFGCCCFSCLGSCLRCCGCCILSLICNILIAVAVILGVAALILWLIFRPNAVKFYVADANLNRFSFDPNNNLHYSLDLNFTIRNPNQRVGVYYDEFSVSGYYGDQRFGSANVSSFYQGHKNTTVILTKIEGQNLVVLGDGARTDLKDDEKSGIYRIDAKLRLSVRFKFWFIKSWKLKPKIKCDDLKIPLGSSNSTGGFKFQPVQCDFDLS

SEQ ID NO: 1548 - DNA, 730 bp, Nicotiana tabacum
  CDS (22)..(711)
gaattcactagtgattgagccatgccggaatccaatttgaacggagcctattatggcccttccattccgccaccagcaaaatcctatcaccgccacggccgcggcagcagctgcaacccatgtagctgtctctttggctgcctctgcaattgttttttcaaaattatcttcacccttctaatcatcctcggagtcattgcattagttctatggctcgttcttcgtcctaacaaagtcaagttctacgtgaccgatgctacgttgactcagttcgatttgtccaccacaaacaacactattttctatgatcttgctcttaatatgactattagaaaccccaacaaacgtattggaatttactacgattcaattgaagctagagctttgtatcaaggcgagaggtttgatagtacaaatttggaaccattttatcagggtcacaagaatactagcagcttgcgtccagtattcaaaggtcagagcttggttttattgggagatagagagaaatccaattacaataatgagaagaatttaggggtttatgagatggaagtgaagctttacatgcgtattaggcttaaggttggttggatcaaaacacataaaattaagccaaagattgagtgtgatttcaaggtacctctagggtctaatggcagatcatcatctgctaattttgaggaaaccagatgccatcttgattggtagcaatcgaattcccgcggcc

SEQ ID NO: 1549 - protein, 229 aa, Nicotiana tabacum
MPESNLNGAYYGPSIPPPAKSYHRHGRGSSCNPCSCLFGCLCNCFFKIIFTLLIILGVIALVLWLVLRPNKVKFYVTDATLTQFDLSTTNNTIFYDLALNMTIRNPNKRIGIYYDSIEARALYQGERFDSTNLEPFYQGHKNTSSLRPVFKGQSLVLLGDREKSNYNNEKNLGVYEMEVKLYMRIRLKVGWIKTHKIKPKIECDFKVPLGSNGRSSSANFEETRCHLDW

SEQ ID NO: 1550 - DNA, 684 bp, Brassica napus
  CDS (1)..(684)
atggctgaacaacctctcaacggtgccttctacggtccatcagtcccgccaccggcccctaaaggctactttcgccgacgtgggcacagccgcggttgttgttgctgcctcctcagcttctttgtaaaagtcatcatagctcttattgtcatacttggcatagccgctcttatcttctggctcatcgtccgtcctcggtccatcaagtttcatgtgacccaagcaaccctttcccggtttgaacacacttcccccgacaaccttttaaggtataacctatcccttacggtccctgtccgtaaccctaacaagaggataggagtttactacgacaggatcgaagctcatgcatactacgatggaaagcggtttagttccaccaggttaactccgttctatcaaggacacaagaacactacggttctcagaccaatgttccaaggccaaaactttgttatctttaacgccggagagtcacggacttacaacgagcagacgatcgctggagtttacgatatagagatcaagtttaggcttagggttaggttcaagcttggggacttgaagactcggaggattaagcctaaggttaactgcgacgatctaaggcttcctttaagtaccttaaacggaactacaaccttctctaccattctccctctcaagtgcgacttcgatttttaa

SEQ ID NO: 1551 - protein, 227 aa, Brassica napus
MAEQPLNGAFYGPSVPPPAPKGYFRRRGHSRGCCCCLLSFFVKVIIALIVILGIAALIFWLIVRPRSIKFHVTQATLSRFEHTSPDNLLRYNLSLTVPVRNPNKRIGVYYDRIEAHAYYDGKRFSSTRLTPFYQGHKNTTVLRPMFQGQNFVIFNAGESRTYNEQTIAGVYDIEIKFRLRVRFKLGDLKTRRIKPKVNCDDLRLPLSTLNGTTTFSTILPLKCDFDF

SEQ ID NO: 1552 - DNA, 684 bp, Brassica napus
  CDS (1)..(684)
atggctgaacaacctctcaacggtgccttctacggtccatcagtcccaccaccggctcctaaaggctacttccgccgacccgggcacagccgcggttgtggctgctgcctcctcagcttcgttgtcaaagtcatcatagccattattgtcatccttggcatagccgctcttatcttctggctcatcgtccgtcctcgcgccatcaagtttcacgtgaccgaagcgtctcttacgcgctttgaacacacttccccggacaacattttaaggtataacctagccctcacagttcctgtccgcaaccctaacaagaggatcggagtctactacgacaggatcgacgctcatgcgtactacgatggaaagcggtttagttccaccacgttagctcctttctatcaaggacacaagaacacgaccgttctcagaccaatgttccaaggccaaaaccttgttatgttcaacgccggagagttacggacttacaacgaggagagtatcgccggagtttacaatattgagatcaaatttaggcttagggttaggtttaagcttggggacttgaagtctcggagggttaagcctaaggttaactgcgaggatataaggcttcctttaagtacgttcaacggaactacaacctccgctaccgttctccctctcaagtgcgacttcgatttttaa

SEQ ID NO: 1553 - protein, 227 aa, Brassica napus
MAEQPLNGAFYGPSVPPPAPKGYFRRPGHSRGCGCCLLSFVVKVIIAIIVILGIAALIFWLIVRPRAIKFHVTEASLTRFEHTSPDNILRYNLALTVPVRNPNKRIGVYYDRIDAHAYYDGKRFSSTTLAPFYQGHKNTTVLRPMFQGQNLVMFNAGELRTYNEESIAGVYNIEIKFRLRVRFKLGDLKSRRVKPKVNCEDIRLPLSTFNGTTTSATVLPLKCDFDF

SEQ ID NO: 1554 - DNA, 708 bp, Brassica napus
  CDS (1)..(708)
atgggggacagacaaccgcacttgaacggtgcctattacgggccatcgattcctccgccgacgaaaacctctcacagccacggcagacgcggcggtggatgctgctgtttaggcgactgtctcggctgttgcggctgctgcatcttaagcgtcatcttcaacatcctcataaccctagccatcgtcgtaggcatagccgctttgatcatctggctaattttccgaccaaacgccatcaagttccacgtcaccgacgccaaactcactcagttcacgctcggcacggacaacaaccttcgatacaatctcgacctaaacttcacgatccgaaaccctaatcgacgtatcggtgtttactatgatcagatcgaggtcagaggctactacggtgatcagcgttttggggtaagtaacgtctcgccgttctaccagggacacaagaacacgacggtggttggaactaatatagctggacagagcttggtggtgcttaacggcggagatatgagggatatggacgaggatgtgaagtcagggatctacaggatcgatgcgaagctgaggcttaagattaggtttaagtttgggttgatcaagtcgtggaagttcaagccgaagatcaggtgtgatctcaaagttcctctaagttcatctaacacaaccagcgggtttcagttccagcggaccaagtgtgacgttgacttttga

SEQ ID NO: 1555 - protein, 235 aa, Brassica napus
MGDRQPHLNGAYYGPSIPPPTKTSHSHGRRGGGCCCLGDCLGCCGCCILSVIFNILITLAIVVGIAALIIWLIFRPNAIKFHVTDAKLTQFTLGTDNNLRYNLDLNFTIRNPNRRIGVYYDQIEVRGYYGDQRFGVSNVSPFYQGHKNTTVVGTNIAGQSLVVLNGGDMRDMDEDVKSGIYRIDAKLRLKIRFKFGLIKSWKFKPKIRCDLKVPLSSSNTTSGFQFQRTKCDVDF

SEQ ID NO: 1556 - DNA, 921 bp, Brassica napus
  CDS (1)..(921)
atgggagacatgaaacaaccacgcctcaacgacggatacgacgagccacaacaaccacacctcaacggcggttacgacgggccacaacaaccacacctcaaccgcggattcgacgtgccaccacaaccacacctcaaccggggatacgacgggccaccaccaccacacctcaacggcggatactacggtccacaacaaccacacctcaacggcggatactacgggccaccgattcctccgccgccgcctaaacccaagcgccgatacaaagcccccggatgctgctgcttgagctgcatgtgcagctgcttcggaagctgcctacgctgctgcggctgctgcatcctcagcctggtctggaacatcctcatcgccgtcgccgtgatcctcggcgtaaccgccttgatcctctggctgatcttccgccccaacgccgtcaaattctacgtcgccgacgccaatctgaaccggttcagcctcgattcgagcgacaacagcaacctcctctacgacctcgacctcaatttcacgatccggaaccctaaccagcgtctcggaatctactacgacgtcgtccaggtcagtggatactacggggatcagcggttcggctccgtcgagatcgcgccgttctatcaggggcacaagaacacgacggtggtggtgacgaagatggaggggcagaacttggtggtgctcggggacggagcgaaggcggatctgaaggaggatgacttaaccggagtgtaccggatcaatgtgaggctggtgatgagtgttcggtttgagttttggattattaagtcgtggaaggttaaaccgaagattaggtgtgatgatctgaagatccctctcggttcctctagtttgaccagcgggtttaagtttcagactatgcagtgtaactttgacttccgttag

SEQ ID NO: 1557 - protein, 306 aa, Brassica napus
MGDMKQPRLNDGYDEPQQPHLNGGYDGPQQPHLNRGFDVPPQPHLNRGYDGPPPPHLNGGYYGPQQPHLNGGYYGPPIPPPPPKPKRRYKAPGCCCLSCMCSCFGSCLRCCGCCILSLVWNILIAVAVILGVTALILWLIFRPNAVKFYVADANLNRFSLDSSDNSNLLYDLDLNFTIRNPNQRLGIYYDVVQVSGYYGDQRFGSVEIAPFYQGHKNTTVVVTKMEGQNLVVLGDGAKADLKEDDLTGVYRINVRLVMSVRFEFWIIKSWKVKPKIRCDDLKIPLGSSSLTSGFKFQTMQCNFDFR

SEQ ID NO: 1558 - DNA, 714 bp, Brassica napus
  CDS (1)..(714)
atgggagacaggcaccaccaggacttaaacggcgcctactacggcccatcgatcccacctccaaggaaagtctctcacagccacggcagaggcggcggcggctgctgcggctgcataggcgactgcctcggctgctgcggatgctgcatcttgagcgtcatcttcaacatcctcatcaccatagccatcctcttaggcatagccgctctgatcatctggctaatcttccgaccaaacgccatcaagttccacgtcgccgacgccaagctcacgcagttcacgctcggcgcggacaacaacctccgctacaacctcgacctcaacttcacgatccggaaccctaaccgccgcatcggcgtctactacgaccagatcgaggtcagggggtactacggagatgaaagattcggtaacagtaacgtggcgccgttctaccaggggcacaagaacacgacggaggtggggagtaaactcgaggggcagggcttggtggtgcttaacggcggagatcggaaggatctggacgaggatttgaagtcgggggtatacaggatcgacgcgaagctgaggcttagggtgaggtttaagtttgggttgatcaagtcgtggaggttcaagcccaaggttaggtgtgatctcaaggttcctctcggttcctctaatgtaaccagcgggtttcagtttcagcggaccaagtgtgacattgacttttga

SEQ ID NO: 1559 - protein, 237 aa, Brassica napus
MGDRHHQDLNGAYYGPSIPPPRKVSHSHGRGGGGCCGCIGDCLGCCGCCILSVIFNILITIAILLGIAALIIWLIFRPNAIKFHVADAKLTQFTLGADNNLRYNLDLNFTIRNPNRRIGVYYDQIEVRGYYGDERFGNSNVAPFYQGHKNTTEVGSKLEGQGLVVLNGGDRKDLDEDLKSGVYRIDAKLRLRVRFKFGLIKSWRFKPKVRCDLKVPLGSSNVTSGFQFQRTKCDIDF

SEQ ID NO: 1560 - DNA, 690 bp, Glycine max
  CDS (1)..(690)
atggccgataagcaaccccacttgaacggcgcttattacggtcccgccattcctccggcggagcaaccacgctaccgccctcacagtcaccgcggaagaagctgctgttgctgcctcttcggaatcttgtggaagattctggttgcactcattgtcctcgttggcctcgcggtcctcatcttctggctggtggttcaaccccgttccttcaagttccacgtcacggaagccgacctaacacaatttgattactataccaacaacaacacccttcactacaacatggtcctcaacttcactgcacgcaaccccaacaagaagctcaacatatactacgacaaagttgaggcattagcattctacgaggatgtcaggttcgcaagttacgatgtcataacacacatgaactccttccgccagtacaagaagagctccagccccatgagcgccgttttcacagggcaacaattgctgatgctgaacaatgatcaagtctcagagttcaaccaagacaggaatactggtgtttatgacatctatgtgaagctctacttcaggatgaggttcaggctcggggactttatatccaatgactacaagcccaaggtcaaatgtcacctcaaggttcctttcagtaaaaatggcacctttactctgtttcagaccaccaaatgtgatgtcgatttctag

SEQ ID NO: 1561 - protein, 229 aa, Glycine max
MADKQPHLNGAYYGPAIPPAEQPRYRPHSHRGRSCCCCLFGILWKILVALIVLVGLAVLIFWLVVQPRSFKFHVTEADLTQFDYYTNNNTLHYNMVLNFTARNPNKKLNIYYDKVEALAFYEDVRFASYDVITHMNSFRQYKKSSSPMSAVFTGQQLLMLNNDQVSEFNQDRNTGVYDIYVKLYFRMRFRLGDFISNDYKPKVKCHLKVPFSKNGTFTLFQTTKCDVDF

SEQ ID NO: 1562 - DNA, 714 bp, Brassica napus
  CDS (1)..(714)
atgggagacaggcaccaccaagacttaaacggcgcctactacggcccatcgatcccacctccacggaaagtctctcacagccacggcagaggcggcggcggctgctgcggctgcataggcgactgcctcggctgctgcggatgctgcatcttgagcgtcatcttcaacatcctcataaccatagccatcctcttagccatagccgctctgatcatctggctaatcttccgaccaaacgccatcaagttccacgtcaccgacgccaagctcacgcagttcactctcggcgcggacaacaacctccgctacaacctcgacctcaacttcacgatccggaaccctaaccgccgcatcggcgtctactacgaccagatcgaggtcagaggatactacggagatgaaagattcggtagcagcaacgtggcgccgttctaccaggggcacaagaacacgacggaggtggggagtaagctcgagggacagggcttggtggtgcttaacggcggagatcggaaggatctggacgaggatttgaagtcggggatatacaggatcgacgcgaagctgaggcttagggtgaggtttaagtttgggttgatcaagtcgtggaggttcaagcctaaggttaggtgtgatctcaaggttcctctcggttcctctaatgtaaccagcgggtttcagtttcagcggaccaagtgtgacattgacttttga

SEQ ID NO: 1563 - protein, 237 aa, Brassica napus
MGDRHHQDLNGAYYGPSIPPPRKVSHSHGRGGGGCCGCIGDCLGCCGCCILSVIFNILITIAILLAIAALIIWLIFRPNAIKFHVTDAKLTQFTLGADNNLRYNLDLNFTIRNPNRRIGVYYDQIEVRGYYGDERFGSSNVAPFYQGHKNTTEVGSKLEGQGLVVLNGGDRKDLDEDLKSGIYRIDAKLRLRVRFKFGLIKSWRFKPKVRCDLKVPLGSSNVTSGFQFQRTKCDIDF

SEQ ID NO: 1564 - DNA, 612 bp, Glycine max
  CDS (1)..(612)
atggctcatcctccctcacaatcgaactctacagcagccaataagccaaaacgttccaaccttctccattacattgccatgtttatagtagccttgatcatccttgtaggcatagctgtgataataatttggctagttttgaagccaaaaaggttggagtacagtgtggagaatgctgcaatccacaacttcaacttaacggatgcaaatcacctctatgccaactttgatttcaccataagatcctacaatcccaactctagaatctccatatactatgacactgtggaggtgtcagtgcgttatgaggaccaaactctagccaccaatgctgttcagccattcttccagtcacataagaatgtgaccaggctgcacgtggccctcacggcgcaatccgtggccctgtatgagtctgtgcctaaggaccttaggcttgagagatcctctggggatattgagttggatgtgtgggtgagggcaaggataaggttcaaggttggtgcgtggaagtcaaggcatcgtgttttgaggattttttgttctcctgtgttggtgcacttttctaaaggaaagagtttcgaaagggcaccttgtgaagtagaactctaa

SEQ ID NO: 1565 - protein, 203 aa, Glycine max
MAHPPSQSNSTAANKPKRSNLLHYIAMFIVALIILVGIAVIIIWLVLKPKRLEYSVENAAIHNFNLTDANHLYANFDFTIRSYNPNSRISIYYDTVEVSVRYEDQTLATNAVQPFFQSHKNVTRLHVALTAQSVALYESVPKDLRLERSSGDIELDVWVRARIRFKVGAWKSRHRVLRIFCSPVLVHFSKGKSFERAPCEVEL

SEQ ID NO: 1566 - DNA, 621 bp, Triticum aestivum
  CDS (1)..(621)
atgggttcggggagccgcgcggcgtcgtgcctgtgctgcccgttcaagtgcctggcgtgcgggctcttcagctgcctctgcagcatcctcgtctccctcctcgtcaccgcgggggtcctcgccctcatcctctacttcgtcttccgcccgcagatgatcgccgccactgtcgactcggcctccctcgcccagttcgcgctcggcaccccggccagccccgcgctgctccagtacaacctcacgctcgccatgacggtgcgcaaccccaacaagcgggtgggcctctactacgacaacgtcgaggccctcgcgctctacgacggccagcgcttcgggttcgcgcccctcgaccccttcttccagggccaccaggcatccacggaggtgaagccggcgttcggcggccagcaggtgctggagggggacgtgacccagtccaacctcaggacgcagctggcgggaggcgcggtggaggtggaggtgaagctcaacgccaagctccgcgtcaaggtgtgggcgttcaaggtgcccgggccccgcgccaggatcagctgcccgctctccctccccgccgccggcgcccccgcattcaagcccaccgactgcaaagtctggttctga

SEQ ID NO: 1567 - protein, 206 aa, Triticum aestivum
MGSGSRAASCLCCPFKCLACGLFSCLCSILVSLLVTAGVLALILYFVFRPQMIAATVDSASLAQFALGTPASPALLQYNLTLAMTVRNPNKRVGLYYDNVEALALYDGQRFGFAPLDPFFQGHQASTEVKPAFGGQQVLEGDVTQSNLRTQLAGGAVEVEVKLNAKLRVKVWAFKVPGPRARISCPLSLPAAGAPAFKPTDCKVWF

SEQ ID NO: 1568 - DNA, 684 bp, Brassica napus
  CDS (1)..(684)
atggctgaacaacctctcaacggtgccttctacggtccatcagtcccaccaccggcccctaaaggctacttccgccgacccgggcacagccgcggttgtggctgctgcctcctcagcttcgttgtaaaagtcatcatagccattattgtcatacttggcatagccgctcttatcttctggctcatcgtccgtcctcgcgccatcaagtttcacgtgacccaagcaacccttacccgctttgaacacacttcccccgacaacattttaaggtataacctagccctcacagtccctgtccgcaaccctaacaagaggataggagtctactacgacaggatcgaagctcatgcatactacgatggaaagcggtttagttccaccacgttaactccgttctatcaaggacacaagaacacgaccgttctcagaccaatgttccaaggccaaaaccttgttatcttcaacgccggagagtcacggacttacaacgagcagacgatcgccggagtttacaatatagagatcaaatttaggcttagggttaggttcaagcttggggacttgaagactcggaggattaagcctaaggttaactgcgacgatataaggcttcctttaagtaccttaaacggaactacaacctccgctaccattctccctctcaagtgcgacttcgatttttaa

SEQ ID NO: 1569 - protein, 227 aa, Brassica napus
MAEQPLNGAFYGPSVPPPAPKGYFRRPGHSRGCGCCLLSFVVKVIIAIIVILGIAALIFWLIVRPRAIKFHVTQATLTRFEHTSPDNILRYNLALTVPVRNPNKRIGVYYDRIEAHAYYDGKRFSSTTLTPFYQGHKNTTVLRPMFQGQNLVIFNAGESRTYNEQTIAGVYNIEIKFRLRVRFKLGDLKTRRIKPKVNCDDIRLPLSTLNGTTTSATILPLKCDFDF

SEQ ID NO: 1570 - DNA, 708 bp, Brassica napus
  CDS (1)..(708)
atgggggacaggcaaccgcacttaaacggtgcgtattacgggccatcgattcctccgccgacgaaaacctctcacagccacggaagacgcggcggtggatgctgctgtttaggcgactgtctcggctgttgcggctgctgcatcttaagcgtcatcttcaacatcctcataaccctagccatcgtcgtaggcatagccgctctgatcatctggctaattttccgaccaaacgccatcaagttccacgtcaccgacgccaaactcactcagttcacactcggcacggacaacaaccttcgatacaacctcgacctcaacttcacgatccgaaaccctaaccgacgtatcggtgtttactatgatcagatcgaggtcagaggctactacggtgatcagcgttttggagcaagtaacatctcgccgttctaccagggacacaagaacacgacggtggttggaactaatatagttggacagagcttggtggtgcttaacggcggagataggggggattttgaggaggatgtgaagtcagggatctacaggatcgatgcgaagctgaggcttaagattaggtttaagtttgggttgatcaagtcgtggaagttcaagccgaagatcaggtgtgatctcaaagttcctctaagtacatctaacacaaccagcgggtttcagttccagcggaccaagtgtgacgttgacttttga

SEQ ID NO: 1571 - protein, 235 aa, Brassica napus
MGDRQPHLNGAYYGPSIPPPTKTSHSHGRRGGGCCCLGDCLGCCGCCILSVIFNILITLAIVVGIAALIIWLIFRPNAIKFHVTDAKLTQFTLGTDNNLRYNLDLNFTIRNPNRRIGVYYDQIEVRGYYGDQRFGASNISPFYQGHKNTTVVGTNIVGQSLVVLNGGDRGDFEEDVKSGIYRIDAKLRLKIRFKFGLIKSWKFKPKIRCDLKVPLSTSNTTSGFQFQRTKCDVDF

SEQ ID NO: 1572 - DNA, 714 bp, Brassica napus
  CDS (1)..(714)
atgggagacaggcaccaccaggacttaaacggcgcctactacggcccatcgatcccacctccaaggaaagtctctcacagccacggcagaggcggcggcggctgctgcggctgcataggcgactgcctcggctgctgcggatgctgcatcttgagcgtcatcttcaacatcctcatcaccatagccatcctcttaggcatagccgctctgatcatctggctaatcttccgaccaaacgccatcaagttccacgtcgccgacgccaagctcacgcagttcacgctcggcgcggacaacaacctccgctacaacctcgacctcaacttcacgatccggaaccctaaccgccgcatcggcgtctactacgaccagatcgaggtcagaggatactacggagatgaaagattcggtaacagtaacgtggcgccgttctaccaggggcacaagaacacgacggaggtggggagtaaactcgaggggcagggcttggtggtgcttaacggcggagatcggaaggatctggacgaggatttgaagtcggggatatacaggatcgacgcgaagctgaggcttagggtgaggtttaagtttgggctgatcaagtcgtggaggttcaagcctaaggttaggtgtgatctcaaggttcctctcggttcctctaatgtaaccagcgggtttcagtttcagcggaccaagtgtgacattgacttttga

SEQ ID NO: 1573 - protein, 237 aa, Brassica napus
MGDRHHQDLNGAYYGPSIPPPRKVSHSHGRGGGGCCGCIGDCLGCCGCCILSVIFNILITIAILLGIAALIIWLIFRPNAIKFHVADAKLTQFTLGADNNLRYNLDLNFTIRNPNRRIGVYYDQIEVRGYYGDERFGNSNVAPFYQGHKNTTEVGSKLEGQGLVVLNGGDRKDLDEDLKSGIYRIDAKLRLRVRFKFGLIKSWRFKPKVRCDLKVPLGSSNVTSGFQFQRTKCDIDF

SEQ ID NO: 1574 - DNA, 708 bp, Brassica napus
  CDS (1)..(708)
atgggggacagacaaccgcacttgaacggtgcctattacgggccatcgattcctccgccgacgaaaacctctcacagccacggcagacgcggcggtggatgctgctgtttaggcgactgtctcggctgttgcggctgctgcatcttaagcgtcatcttcaacatcctcataaccctagccatcgtcgtaggcatagccgctttgatcatctggctaattttccgaccaaacgccatcaagttccacgtcaccgacgccaaactcactcagttcacgctcggcacggacaacaaccttcgatacaatctcgacctcaacttcacgatccgaaaccctaaccgacgtatcggtgtttactatgatcagatcgaggtcagaggctactacggtgatcagcgttttggagcaagtaacgtctcgccgttctaccagggacacaagaacacgacggtggttggaactaatatagttggacagagcttggtggtgcttaacggcggagataggggggattttgaggaggatgtgaagtcagggatctacaggatcgatgcgaagctgaggcttaagattaggtttaagtttgggttgatcaagtcgtggaagttcaagccgaagatcaggtgtgatctcaaggttcctcttagtacttctaacacaaccagcgggtttcagttccagcggaccaagtgtgacgttgacttttga

SEQ ID NO: 1575 - protein, 235 aa, Brassica napus
MGDRQPHLNGAYYGPSIPPPTKTSHSHGRRGGGCCCLGDCLGCCGCCILSVIFNILITLAIVVGIAALIIWLIFRPNAIKFHVTDAKLTQFTLGTDNNLRYNLDLNFTIRNPNRRIGVYYDQIEVRGYYGDQRFGASNVSPFYQGHKNTTVVGTNIVGQSLVVLNGGDRGDFEEDVKSGIYRIDAKLRLKIRFKFGLIKSWKFKPKIRCDLKVPLSTSNTTSGFQFQRTKCDVDF

SEQ ID NO: 1576 - DNA, 621 bp, Zea mays
  CDS (1)..(621)
atgggctccgcgagccgtgccgtctcgtgcctgtgctgcccctgcaagtgcctggcgtgcgggctcctgagctgcctgtgcagcatcctcgtctcgctcgccgtcgtcctgggcgtcgtcgccctcatcctctacttcatcttcaagccgcacatgatcgcggccaccgtggactcggcctcgctctcccagttcgcgctgtcggcgtcctccacgctcgcctacgacctcaacgtcaccatgacggtgcgcaaccccaacacgcgggtggggctctactacgacgacgtccaggcgctggccctgttcagcgaccagcgcttcggctacgccccgctcgacgccttctaccagggcacccaggcgtccacccagctcagccccgggttccgcggcacgcagctcctccagggcgacgtcaccgccgccgagttcaggcaggagcagtccgcgggcaacttcgccgtcgacgtcgacctcaacgccaagctcagggtgaaggtctgggcgttcaaggtccgcgggcccaaggctaaggtcacctgcaagctctccgtccccgcacccggcgccgccaacgcctcgcccttccagcccaccgtttgcaaagtctggttctga

SEQ ID NO: 1577 - protein, 206 aa, Zea mays
MGSASRAVSCLCCPCKCLACGLLSCLCSILVSLAVVLGVVALILYFIFKPHMIAATVDSASLSQFALSASSTLAYDLNVTMTVRNPNTRVGLYYDDVQALALFSDQRFGYAPLDAFYQGTQASTQLSPGFRGTQLLQGDVTAAEFRQEQSAGNFAVDVDLNAKLRVKVWAFKVRGPKAKVTCKLSVPAPGAANASPFQPTVCKVWF

SEQ ID NO: 1578 - DNA, 690 bp, Glycine max
  CDS (1)..(690)
atggccgataagcaaccccacttgaacggcgcttattacggtcccgccattcctccggcggagcaaccacgctaccgccctcacagtcaccgcggaagaagctgctgttgctgcctcttcggaatcttgtggaagattctggttgcactcattgtcctcgttggcctcgcggtcctcatcttctggctggtggttcaaccccgttccttcaagttccacgtcacggaagccgacctaacacaatttgattactataccaacaacaacacccttcactacaacatggtcctcaacttcactgcacgcaaccccaacaagaagctcaacatatactacgacaaagttgaggcattagcattctacgaggatgtcaggttcgcaagttacgatgtcataacacacatgaactccttccgccagtacaagaagagcaccagccccatgagcgccgttttcacagggcaacaagtgctgatgctcaacaatgaacaagtctcagagttcaaccaagacaagaatactggggtttatgacatctatgtgaagctctacttcaggatgaggttcaggctcggggacgtcatatccaatgactacaagcccaaggtcaaatgtcacctcaaggtccctttcagtaaaaatggcacctttactctgtttcagaccaccaaatgtgatgtcgatttctag

SEQ ID NO: 1579 - protein, 229 aa, Glycine max
MADKQPHLNGAYYGPAIPPAEQPRYRPHSHRGRSCCCCLFGILWKILVALIVLVGLAVLIFWLVVQPRSFKFHVTEADLTQFDYYTNNNTLHYNMVLNFTARNPNKKLNIYYDKVEALAFYEDVRFASYDVITHMNSFRQYKKSTSPMSAVFTGQQVLMLNNEQVSEFNQDKNTGVYDIYVKLYFRMRFRLGDVISNDYKPKVKCHLKVPFSKNGTFTLFQTTKCDVDF

SEQ ID NO: 1580 - DNA, 738 bp, Glycine max
  CDS (1)..(738)
atgatggctgcagatcagcaaagaattcatcctgttcatgatgttgaggcaccacacagacctttggtgcctgaaaactatgcaaaatctgataagggtattcctcagcgcacttttcctgtgatgcattcaaagccacctaagagaagaagaagctgttgctgtaggttcatgtgttggacactaagcatattgctgattttgatcattgctattgccatcacaatagggatcctataccttgtgttcagaccaaagctccccaaatactcagtggaccaactgaggataagccagttcaatgtttcagacaacaacaccctctatgccaccttcaatgtggcaatcactgcaagaaaccctaacaagaagattggaatatactatgagggtggaagccacataagtgcttggtacatggaaacaaaattgtgtgaagggtccttgccaaaattctaccagggtcacaggaacaccacagtgcttgatctgcctctaactggtcaagcacatgatgcaaatggcttggtgaatagaattcaggagcagctgcaacagaccaacaatgttcctctcaatcttaaggtgaatcagcctgtgagggttaagcttggtaagttgaagctcttcaaagtcaagttcagggttaggtgcaagcttgaggtggataatattcttggggctagtaatgatattagaatttctagaagtagttgtaagttcaggcttaggctgtga

SEQ ID NO: 1581 - protein, 245 aa, Glycine max
MMAADQQRIHPVHDVEAPHRPLVPENYAKSDKGIPQRTFPVMHSKPPKRRRSCCCRFMCWTLSILLILIIAIAITIGILYLVFRPKLPKYSVDQLRISQFNVSDNNTLYATFNVAITARNPNKKIGIYYEGGSHISAWYMETKLCEGSLPKFYQGHRNTTVLDLPLTGQAHDANGLVNRIQEQLQQTNNVPLNLKVNQPVRVKLGKLKLFKVKFRVRCKLEVDNILGASNDIRISRSSCKFRLRL

SEQ ID NO: 1582 - DNA, 690 bp, Glycine max
  CDS (1)..(690)
atggccgataagcaaccccacttgaacggcgcttattacggtcccgccattcctccggcggagcaaccacgctaccgccctcacagtcaccgcggaagaagctgctgttgctgcctcttcggaatcttgtggaagattctggttgcactcattgtcctcgttggcctcgcggtcctcatcttctggctggtggttcaaccccgttccttcaagttccacgtcacggaagccgacctaacacaatttgattactataccaacaacaacacccttcactacaacatggtcctcaacttcactgcacgcaaccccaacaagaagctcagcatatactacgacaaagttgaggcattagcattctacgaggatgtcaggttcgcaagttacgatgtcataacacacatgaactccttccgccagtacaagaagagctccagccccatgagcgccgttttcacagggcaacaattgctgatgctgaacaatgatcaagtctcagagttcaaccaagacaggaatactggtgtttatgacatctatgtgaagctctacttcaggatgaggttcaggctcggggactttatatccaatgactacaagcccaaggtcaaatgtcacctcaaggttcctttcagtaaaaatggcacctttactctgtttcagaccaccaaatgtgatgtcgatttctag

SEQ ID NO: 1583 - protein, 229 aa, Glycine max
MADKQPHLNGAYYGPAIPPAEQPRYRPHSHRGRSCCCCLFGILWKILVALIVLVGLAVLIFWLVVQPRSFKFHVTEADLTQFDYYTNNNTLHYNMVLNFTARNPNKKLSIYYDKVEALAFYEDVRFASYDVITHMNSFRQYKKSSSPMSAVFTGQQLLMLNNDQVSEFNQDRNTGVYDIYVKLYFRMRFRLGDFISNDYKPKVKCHLKVPFSKNGTFTLFQTTKCDVDF

SEQ ID NO: 1584 - DNA, 666 bp, Glycine max
  CDS (1)..(666)
atgtcccagttgaacggagcctactacggcccctccatcccgccgccgaaaacttcctaccaccgtcctgggcgcggcggaggcctcggctgctgctgcgggtgcctcttcagcctcatcttcaagctcatcctaaccgtgatcatcatcattggcatcgccgtgttccttttctggctcatagtccgtcccaacgtggtgaaattccacgtcaccgaggccaccctgacgcagttcaactacacccccaacaacacgctccactacgacctcgccctcaacatcacggtccgaaaccccaacaagaggctcggaatctactacgaccgcatcgaggcgcgtgcaatgttccacgacgcgaggtttgattcccagttcccggaaccattctaccagggccacaagagcaccaacgtgctgaacccggtgtttaagggtcagcaattggtgccactcaacgctgaccaatccgcggaactgaagaaggagaacgccactggggtgtacgagatcgatgtgaagatgtaccttagggtcaggttcaagttgggtgtcttcaagaccaagacgcttaagcccaaagtatcatgcgacttacgtgttcctttgaaaggaagcgccggtgctggtgtctttcagaccaccaagtgcgactgggatcgctga

SEQ ID NO: 1585 - protein, 221 aa, Glycine max
MSQLNGAYYGPSIPPPKTSYHRPGRGGGLGCCCGCLFSLIFKLILTVIIIIGIAVFLFWLIVRPNVVKFHVTEATLTQFNYTPNNTLHYDLALNITVRNPNKRLGIYYDRIEARAMFHDARFDSQFPEPFYQGHKSTNVLNPVFKGQQLVPLNADQSAELKKENATGVYEIDVKMYLRVRFKLGVFKTKTLKPKVSCDLRVPLKGSAGAGVFQTTKCDWDR

SEQ ID NO: 1586 - DNA, 651 bp, Glycine max
  CDS (1)..(651)
atgtcccagttgaacggagcctactatggcccctccatcccgccgccgaaaacctcctaccaccgcccagggcgcggcggaggctgctgctgcggctgcctcttcagcctcatcttcaagctcatcttaaccgtgataatcatcgttggcatcgccgggttcgtgttctggctcatagtccgtccgaacgtggtgaaattccacgtgaccgacgccaccctgacgcagttcaactacaccgccaacaacactctccactacgacctcgccctaaacatcacggtccgaaaccccaacaagaggctcggaatctactacgaccgcatcgaggcgcgtgcaatgttccacgacgcaaggttcgattcacagttcccggagccgttctaccagggccacaagagcacgaaggtgctgaacccagtcttcaagggtcagcaagtggtgccactcaacgctgagcaaagcgcggaactgaagaaggagaacgccactggggtgtacgagatcgacgtgaagatgtaccttagggtgaggttcaagctgggggtgttgaagaccaagacgctcaagcccaaagtatcatgcgacttgcgtgttcctttcaaaggaagcgccgcctttgagaccaccaagtgccactgggatcgctga

SEQ ID NO: 1587 - protein, 216 aa, Glycine max
MSQLNGAYYGPSIPPPKTSYHRPGRGGGCCCGCLFSLIFKLILTVIIIVGIAGFVFWLIVRPNVVKFHVTDATLTQFNYTANNTLHYDLALNITVRNPNKRLGIYYDRIEARAMFHDARFDSQFPEPFYQGHKSTKVLNPVFKGQQVVPLNAEQSAELKKENATGVYEIDVKMYLRVRFKLGVLKTKTLKPKVSCDLRVPFKGSAAFETTKCHWDR

SEQ ID NO: 1588 - DNA, 651 bp, Glycine max
  CDS (1)..(651)
atgtcccagttgaacggagcctactatggcccctccatcccgccgccgaaaacctcctaccaccgcccagggcgcggcggaggctgctgctgcggctgcctcttcagcctcatcttcaagctcatcttaaccgtgataatcatcgttggcatcgccgggttcgtgttctggctcatagtccgtccgaacgtggtgaaattccacgtgaccgacgccaccctgacgcagttcaactacaccgtcaacaacactctccactacgacctcgccctaaacatcacggtccgaaaccccaacaagaggctcggaatctactacgaccgcatcgaggcgcgtgcaatgttccacgacgcaaggttcgattcacagttcccggagccgttctaccagggccacaagagcacgaaggtgctgaacccagtcttcaagggtcagcaagtggtgccactcaacgctgagcaaagcgcggaactgaagaaggagaacgccactggggtgtacgagatcgacgtgaagatgtaccttagggtgaggttcaagctgggggtgttgaagaccaagacgctcaagcccaaagtatcatgcgtcttgcgtgttcctttcaaaggaagcgccgcctttgagaccaccaagtgccactgggatcgctga

SEQ ID NO: 1589 - protein, 216 aa, Glycine max
MSQLNGAYYGPSIPPPKTSYHRPGRGGGCCCGCLFSLIFKLILTVIIIVGIAGFVFWLIVRPNVVKFHVTDATLTQFNYTVNNTLHYDLALNITVRNPNKRLGIYYDRIEARAMFHDARFDSQFPEPFYQGHKSTKVLNPVFKGQQVVPLNAEQSAELKKENATGVYEIDVKMYLRVRFKLGVLKTKTLKPKVSCVLRVPFKGSAAFETTKCHWDR

SEQ ID NO: 1590 - DNA, 621 bp, Zea mays
  CDS (1)..(621)
atgggctccgcgagccgtgccgtctcgtgcctgtgctgcccctgcaagtgcctggcgtgcgggctcctgagctgcctgtgcagcatcctcgtctcgctcgccgtcgtcctgggcgtcgtcgccctcatcctctacttcatcttcaagccgcacatgatcgcggccaccgtggactcggcctcgctctcccagttcgcgctgtcggcgtcctccacgctctcctacgacctcaacgtcaccatgacggtgcgcaaccccaacacgcgggtggggctctactacgacgacgtccaggcgctggccctgttcagcgaccagcgcttcggctacgccccgctcgacgccttctaccagggcacccaggcgtccacccagctcagccccgggttccgcggcacgcagctcctccagggcgacgtcaccgccgccgagttcaggcaggagcagtccgcgggcaacttcgccgtcgacgtcgacctcaacgccaagctcagggtcaaggtctgggcgttcaaggtccgcgggcccaaggctaaggtcacctgcaagctctccgtccccgcacccggcgccgccaacgcctcgcccttccagcccaccgtttgcaaagtctggttctga

SEQ ID NO: 1591 - protein, 206 aa, Zea mays
MGSASRAVSCLCCPCKCLACGLLSCLCSILVSLAVVLGVVALILYFIFKPHMIAATVDSASLSQFALSASSTLSYDLNVTMTVRNPNTRVGLYYDDVQALALFSDQRFGYAPLDAFYQGTQASTQLSPGFRGTQLLQGDVTAAEFRQEQSAGNFAVDVDLNAKLRVKVWAFKVRGPKAKVTCKLSVPAPGAANASPFQPTVCKVWF

SEQ ID NO: 1592 - DNA, 21 bp, Artificial sequence
  primer
atggggtccaaacaaccatac

SEQ ID NO: 1593 - DNA, 20 bp, Artificial sequence
  primer
ctaagataagtcaaagtcac

SEQ ID NO: 1594 - protein, 251 aa, Artificial sequence
  consensus sequence
  Variant (2)..(11): Xaa in position 2 to 11 is any amino acid
  Variant (13)..(35): Xaa in position 13 to 35 is any amino acid
  Variant (36)..(63): Xaa in position 36 to 63 is any or no amino acid
  Variant (65)..(67): Xaa in position 65 to 67 is any amino acid
  Variant (69)..(70): Xaa in position 69 to 70 is any amino acid
  Variant (73)..(75): Xaa in position 73 to 75 is any amino acid
  Variant (77)..(79): Xaa in position 77 to 79 is any amino acid
  Variant (81)..(82): Xaa in position 81 to 82 is any amino acid
  Variant (84)..(85): Xaa in position 84 to 85 is any amino acid
  Variant (87)..(87): Xaa in position 87 is any amino acid
  Variant (89)..(90): Xaa in position 89 to 90 is any amino acid
  Variant (92)..(98): Xaa in position 92 to 98 is any amino acid
  Variant (99)..(104): Xaa in position 99 to 104 is any or no amino acid
  Variant (106)..(106): Xaa in position 106 is any amino acid
  Variant (108)..(108): Xaa in position 108 is any amino acid
  Variant (110)..(115): Xaa in position 110 to 115 is any amino acid
  Variant (120)..(121): Xaa in position 120 to 121 is any amino acid
  Variant (122)..(122): Xaa in position 122 is any or no amino acid
  Variant (124)..(124): Xaa in position 124 is any amino acid
  Variant (128)..(134): Xaa in position 128 to 134 is any amino acid
  Variant (135)..(135): Xaa in position 135 is any or no amino acid
  Variant (137)..(139): Xaa in position 137 to 139 is any amino acid
  Variant (142)..(148): Xaa in position 142 to 148 is any amino acid
  Variant (149)..(152): Xaa in position 149 to 152 is any or no amino acid
  Variant (154)..(154): Xaa in position 154 is any amino acid
  Variant (156)..(157): Xaa in position 156 to 157 is any amino acid
  Variant (159)..(168): Xaa in position 159 to 168 is any amino acid
  Variant (171)..(185): Xaa in position 171 to 185 is any amino acid
  Variant (186)..(189): Xaa in position 186 to 189 is any or no amino acid
  Variant (191)..(195): Xaa in position 191 to 195 is any amino acid
  Variant (196)..(196): Xaa in position 196 is any or no amino acid
  Variant (198)..(202): Xaa in position 198 to 202 is any amino acid
  Variant (204)..(204): Xaa in position 204 is any amino acid
  Variant (206)..(213): Xaa in position 206 to 213 is any amino acid
  Variant (214)..(215): Xaa in position 214 to 215 is any or no amino acid
  Variant (217)..(217): Xaa in position 217 is any amino acid
  Variant (219)..(220): Xaa in position 219 to 220 is any amino acid
  Variant (222)..(225): Xaa in position 222 to 225 is any amino acid
  Variant (226)..(226): Xaa in position 226 is any or no amino acid
  Variant (228)..(238): Xaa in position 228 to 238 is any amino acid
  Variant (239)..(250): Xaa in position 239 to 250 is any or no amino acid
LXXXXXXXXXXPXXXXXXXXXXXXXXXXXXXXXXXXXXXXXXXXXXXXXXXXXXXXXXXXXXXGXXXLXXWLXXXPXXXKXXVXXAXLXXFXXXXXXXXXXXXXLXYXLXXXXXXRNPNXXXGXYYDXXXXXXXXYXXXRFXXXXXXXXXXXFXQXXKXXXXXXXXXXGQXXXXXXXXXXXXXXXXXXXGXXXXXXKXXXXXRXKXXXXXXXXXXKXKXXCXXXXXPXXXXXXXXXXXXXXXXXXXXXXXC

SEQ ID NO: 1595 - protein, 21 aa, Artificial sequence
  protein pattern
  Variant (2)..(2): Xaa in position 2 is Phe or Leu
  Variant (3)..(3): Xaa in position 3 is Ile or Val
  Variant (4)..(5): Xaa in position 4 to 5 is any amino acid
  Variant (7)..(7): Xaa in position 7 is Asn, Arg or Ser
  Variant (8)..(8): Xaa in position 8 is any amino acid
  Variant (9)..(9): Xaa in position 9 is Phe, Ile, Leu or Val
  Variant (11)..(12): Xaa in position 11 to 12 is any amino acid
  Variant (13)..(13): Xaa in position 13 is Ala or Val
  Variant (14)..(14): Xaa in position 14 is any amino acid
  Variant (15)..(15): Xaa in position 15 is Asp, Glu, Gln, Ser or Thr
  Variant (17)..(17): Xaa in position 17 is any amino acid
  Variant (19)..(19): Xaa in position 19 is Asn, Ser or Thr
  Variant (20)..(20): Xaa in position 20 is Glu, Gln or Arg
WXXXXPXXXKXXXXXAXLXXF

SEQ ID NO: 1596 - protein, 15 aa, Artificial sequence
  protein pattern
  Variant (3)..(3): Xaa in position 3 is any amino acid
  Variant (4)..(4): Xaa in position 4 is Phe, Ile, Leu or Val
  Variant (5)..(5): Xaa in position 5 is Asp, Glu, Gln or Ser
  Variant (6)..(6): Xaa in position 6 is Ala, Ser or Val
  Variant (7)..(7): Xaa in position 7 is any amino acid
  Variant (8)..(8): Xaa in position 8 is Ala or Gly
  Variant (9)..(9): Xaa in position 9 is any amino acid
  Variant (10)..(10): Xaa in position 10 is Phe or Tyr
  Variant (11)..(11): Xaa in position 11 is any amino acid
  Variant (12)..(12): Xaa in position 12 is Asp or Gly
  Variant (13)..(13): Xaa in position 13 is any amino acid
YDXXXXXXXXXXXRF

SEQ ID NO: 1597 - protein, 18 aa, Artificial sequence
  protein pattern
  Variant (2)..(2): Xaa in position 2 is any amino acid
  Variant (4)..(6): Xaa in position 4 to 6 is any amino acid
  Variant (7)..(7): Xaa in position 7 is Ala, Asn or Ser
  Variant (8)..(8): Xaa in position 8 is Ser or Thr
  Variant (9)..(10): Xaa in position 9 to 10 is any amino acid
  Variant (11)..(11): Xaa in position 11 is Ile, Leu, Met or Val
  Variant (12)..(14): Xaa in position 12 to 14 is any amino acid
  Variant (15)..(15): Xaa in position 15 is Phe, Ile, Leu or Met
  Variant (16)..(16): Xaa in position 16 is any amino acid
FXQXXXXXXXXXXXXXGQ

SEQ ID NO: 1598 - DNA, 1173 bp, Arabidopsis thaliana
  CDS (1)..(1173)
atgtccgatggatacatcaattcgaagaagactgatgatatttgcgaagatgtttgtggacagggatcaaaagcagcaaaaacaatctcaaggctaaaatgtgtgcttaaaggttttgatttaagaacatacttgttcctctttgtgttgatgccatttggtatcttagcaatttatctacacggccaaaagttcacttatttctttagacctctttgggaatcacctccgaagccatttcaaaccattcctcattactataatgagaatgttactatggaatctctctgtagtcttcatggttggggaattagagactcgcccagacgggttttcgacgcggttttgtttagtaatgagaaagatcttttaactgttagatggaatgagctttatccttacgtgacacagtttgtgattcttgaatctaattctacgtttactggtttgcctaaaccattggtgtttaagagtaataaggatcagtttaagtttgtggagccgcggctaacttatgggacgattggtggacggtttaggaaaggcgagaatccgtttgtcgaagaagcgtatcagcgagttgcgttggatcagttgcttaggattgctggtattcaagaagatgatttgttgataatgtctgatgttgatgagattcctagtgctcatactatcaatcttttgagatggtgtgatgatattcctccagttcttcaccttcagttgaagaattatttgtattctttcgaatactatgtcgatagcaagagctggagagcgtctatacaccgttacagtccagggaaaacgcggtatgctcatttccgtcagagtaatgttatgttagctgattctggatggcattgtagcttctgtttccgttatataagtgagtttatattcaagatgaaagcttatagtcattcagaccgtgtcagattctctcattacctgaatccaaggaggattcaagatgttatttgcaaaggaactgatttgtttgatatgttacctgaagaatacacattcaaggagattataggcaaaatgggacctgtacctcggtcttattcagcggttcatcttccttcgtacctactgtataacgccgagcagtacaaatacttgttgcctggtaattgcataagagaaaaacagacagggtttatatga

SEQ ID NO: 1599 - protein, 390 aa, Arabidopsis thaliana
MSDGYINSKKTDDICEDVCGQGSKAAKTISRLKCVLKGFDLRTYLFLFVLMPFGILAIYLHGQKFTYFFRPLWESPPKPFQTIPHYYNENVTMESLCSLHGWGIRDSPRRVFDAVLFSNEKDLLTVRWNELYPYVTQFVILESNSTFTGLPKPLVFKSNKDQFKFVEPRLTYGTIGGRFRKGENPFVEEAYQRVALDQLLRIAGIQEDDLLIMSDVDEIPSAHTINLLRWCDDIPPVLHLQLKNYLYSFEYYVDSKSWRASIHRYSPGKTRYAHFRQSNVMLADSGWHCSFCFRYISEFIFKMKAYSHSDRVRFSHYLNPRRIQDVICKGTDLFDMLPEEYTFKEIIGKMGPVPRSYSAVHLPSYLLYNAEQYKYLLPGNCIREKQTGFI

SEQ ID NO: 1600 - DNA, 1921 bp, Zea mays subsp. mays
  CDS (375)..(1541)
ctctcgctcttgcgccggcgaccccgcggattcgagccaatcaccgccaagtcctcgactccagcgccctttccttgccagcccggcccccgctaccacggagctgcaaataacctgcggtcccgaggaccggacagcaaaagtgcccaaccgctggagctccgccccggcgatcagccgccgggaacgtcgcgcccggctccacagccacagccgcgccattcgagctgctgctcgcgcgcggctggttcttctcggggggattttctttttgcgggcaccctcccctccccctcaccgccctgccgtcagccgtctcgttttcggattcgtttgctccggcggtgggcgttcctgccgtgcggggcgcagtgatgccggaggtggtgcagtacgggtacaagaagaccgacggcatctgcgacagcgtgtgcggcgagcctgtgtcaaagacagttctgacgatgtcaaggctaaagtgcgcgctccggggatttgatttaagggcacttatggtcctcttgattggtgtgccaattctaatcctaatgatatatgcgcatggtcagaaggtcacatacttcctgcggcccatctgggaatctcctcccaagcccttcaagacaattcctcactactaccatgagaacgtcaccatggataacctgtgcaagttacatggttggaaagtccgtgacttcccgcgtcgtgtctttgatgctgtactcttcagcaatgagcttgatatcctggagatccgctggaatgagcttagtccctatgtgtccgagtttgtgcttcttgaatccaactcaacctttactggcataaaaaagccccttcacttcaaggaaaacaagcaccgatttgggttcgctaaatcacggctgacatacggtaatattgggggaaggttcgtgaagggggagaacccatttgttgaggagtcatatcagagggttgcccttgaccggcttcttaagcttgcaagaatagaagacgatgacctgctgatcatgtcggacgttgatgaaatcccgagcggccacacaattgatctcttaaggtggtgcgacggcattccagacatacttcaccttcagctcaggaattatctctactcgttcgagtttttcctggacgacaagagctggagggcatcgatacacaagtaccaagctggaaagacgaggtacgcgcacttccggcaggcagacgagctcctcgccgattcagggtggcattgcagcttttgcttccgctacataagcgatttcgcattcaagatgcaagcgtatagccacgtcgaccggatcaggttcaagtacttcctgaaccctgagaggatccaagatgtcatctgcagaggggcggaccttttcgatatgcttccagaagagtacacgttccaagagatcatcgccaagctggggccgatcccgagcacgtattctggcgttcatcttcctagctatctgctaaggaatgtcgaccggtttagataccttctaccgggcaactgcaggagagaaagtggctaggttttatggcctactaccctgcaacctgttgtgcgtgcgtgggtgggtgccagtgccacaactgcccgctgcaaagctgctgtccatgggatatctgtggcagttcacctggtacggttgcctaacgtagttgaacaaatgctttggtgaagaattggttcatggataggggtgagcacatgattctctaatgtgtaatagaatatgggaggaggatctaacggcatagcgcacgcttggtcctggctgggtgtgcctgcctgatgagctgagcggtttgtgctttacatccgggatgtcatcgtcatccattacttccctgattgatatatataaactcaaaagggctgttgtagattgcaattcaagtggtatttcag

SEQ ID NO: 1601 - protein, 388 aa, Zea mays subsp. mays
MPEVVQYGYKKTDGICDSVCGEPVSKTVLTMSRLKCALRGFDLRALMVLLIGVPILILMIYAHGQKVTYFLRPIWESPPKPFKTIPHYYHENVTMDNLCKLHGWKVRDFPRRVFDAVLFSNELDILEIRWNELSPYVSEFVLLESNSTFTGIKKPLHFKENKHRFGFAKSRLTYGNIGGRFVKGENPFVEESYQRVALDRLLKLARIEDDDLLIMSDVDEIPSGHTIDLLRWCDGIPDILHLQLRNYLYSFEFFLDDKSWRASIHKYQAGKTRYAHFRQADELLADSGWHCSFCFRYISDFAFKMQAYSHVDRIRFKYFLNPERIQDVICRGADLFDMLPEEYTFQEIIAKLGPIPSTYSGVHLPSYLLRNVDRFRYLLPGNCRRESG

SEQ ID NO: 1602 - DNA, 2105 bp, Sorghum bicolor
  CDS (436)..(1602)
tactggatcgcatctcatcgcatcgcatcgcagcaactccccccttcgcaccgttaccccctttgcgctccctcccagcaaatcaccaccgcgccccgcgtctcgcccacgctccctctctcaccaggagggaggagaggagaggagaggagaccggggccgagacgcgaacgcgcggacccctcgagggcgaggacgcgcacgcagccaccggccaggcgactacggctcccggcggccaggttcgggctctgctcccggggaccggggagccgatcgtgcgcgccattgggcccgcgcggggaagcggcaggcgcgtgctgtcttgacccgctccgcacccctcccggcggcggcggcggcgggcgtggtgctcctttgcctttgcggcaggtgcctgcttgtctgtgattctcctcctgcgtcctcggcgccatggaggccggctactgcaaccgcaagaagaccgacggcatctgcgagggcgtctgcgacagcgagcttggttcaaagtcagtcctgagcatgtcaaggttgaagtgtgcactgcgaggatttgatctgagggttctcttgattctgctgattggtgtgccaattctgatctttgccatatatgtgcatggccagaaggtgacttacttcctccgaccaatctgggaaaagcccccgaagcccttcacaatacgccctcactactatcatgaaaatgtctcgatggccaacctctgcaagttgcatggatggaaagtcagggagactccacgccgtgtcttcgatgctgtgctcttcagcaatgagcttgacatccttgatatccgttggcacgagcttagcccatatgtgtcagaatttgtgctgcttgaatccaattcaaccttcactggcataaagaaggaccttcacttcaaggaaaaccgccaacggtttgactttgctgaatcacggttgacctatggtatgataggcggaaggtttgtgaagggagaaaacccatttgttgaggaatcatatcaaagggttgctctcgaccagctcattaagattgcaggcatccaagatgacgacctgttgatcatgtccgatgttgatgagatcccaagtggtcataccatcaacctcttgagatggtgtgatgacattcctgagatacttcacctccagctgaggaactatctctactcattccagtttttactcgatgacaagagctggagggcttcagtacacagatacagagctggaaagacgaggtatgcacatttccggcaaacagatgaacttctggctgattcagggtggcactgcagcttctgcttccgctacataaatgacttcatcttcaagatgaaagcctacagccacgtcgatcggatcagattcaagtacttcctaaacccgaagaggattcagcacgtgatttgcgaaggggctgatcttttcgacatgctccctgaagaatacacattccaagagatcattgccaagctggggcctattccaagtacattctctgctgttcatctccctgcctatctgctggagcagaatgatcggtacagatatctccttccaggcaactgcattagagagagtggctaggcagctgctactgtctgcatcatgaccctgaggcgcacagacgtcgctcgcggatgtcccccgcactggaggagcgccctgccgtggtggggttgtatttctcatccgattggctgacttagttgagtgatcgcttggctgatggtggagttcatatgagattttgtaccgtgtaatggaaaccatggaaggcctgacagcagcataggggcatgctttgatcgcagctgcgttcttgttttgcagaggagctcagcagtgtgtgtgtgcttttataccacctgagtttttattcattgcttccatgattgatatatgaactcaaactatttgtagatctcataccgagcgacattcagattctttcctctttttttttctttgctctcgcccttgtgatgtacattgccattcacttaccctagttacctcttacctgagtcatgtcatgtgtatgctttcattccaatttctgattattgattgacagcggctctatatca

SEQ ID NO: 1603 - protein, 388 aa, Sorghum bicolor
MEAGYCNRKKTDGICEGVCDSELGSKSVLSMSRLKCALRGFDLRVLLILLIGVPILIFAIYVHGQKVTYFLRPIWEKPPKPFTIRPHYYHENVSMANLCKLHGWKVRETPRRVFDAVLFSNELDILDIRWHELSPYVSEFVLLESNSTFTGIKKDLHFKENRQRFDFAESRLTYGMIGGRFVKGENPFVEESYQRVALDQLIKIAGIQDDDLLIMSDVDEIPSGHTINLLRWCDDIPEILHLQLRNYLYSFQFLLDDKSWRASVHRYRAGKTRYAHFRQTDELLADSGWHCSFCFRYINDFIFKMKAYSHVDRIRFKYFLNPKRIQHVICEGADLFDMLPEEYTFQEIIAKLGPIPSTFSAVHLPAYLLEQNDRYRYLLPGNCIRESG

SEQ ID NO: 1604 - DNA, 1974 bp, Zea mays
  CDS (435)..(1601)
gtgcctgctgactgcctccctttggccgccttgcctgccacgcccacgcgcaatcagaagcaggccaccaccccaccctcccaaacggctataattacgcgggtgccctcgagcccggccggggcatcgcatagcagcaattccctcccccccgctccggcccctcgcaccgtttccctttccccgccgctcctccgaagccaccaccgcgccccgccccgcgagggcacgaaagaggaggaacgcggccaccggcggcgagggttcgggctcttgctcccgacggtttgcaacccgggagggagccgaccgtgcgcgcgcattgggcccgcgcgggggaagcggcaggcgcgtgccgtttttatttagcccgctccgctccgcgcccggcggctgcggggtgtggtgctcctgctgattttcttctcggcgccatggaggccggctactgcaaccgcaagaagaccgacggcatctgcgacggcgtctgcgacagcgagcttggttcaaagtcagtcctgagcatgtcgaggctgaagtgcgcgctgcggacattcgatctgagggttctcttgattctgctgatcggtgtgccaatcctgctcttcgccatctacgtgcacggccagaaggtgacctacttcctccggccgatctgggagaagcccccaaagcccttcaaagtactcccccactactaccacgagaacgtctcgatggccaacctctgcaagctgcacggatggagagtcagggagaccccgcgccgcgtcttcgacgccgtgctcttcagcaacgagctcgacatccttgacatccgctggcacgagctgagcccctacgtgtcggagttcgtgctgctggagtccaactcgaccttcaccggcataaggaaggacctccacttcagggagaaccggcagcggttcggcttcgccgagtcgcggctgacctacggcaccataggcgggaggttcgtgaagggagagaacccgttcgtggaggagtcgtaccagagggtcgccctcgaccagctgatcaagatcgcgggcatcgcggacgacgacctgctgatcatgtcggacgtggacgagatcccgagcgggcacaccgtgaacctcctgagatggtgcgacgacgtccccgaggtactccacctccagctccggaactacctctactcgttcgagttcctgctcgacgacaggagctggcgggcctcggtgcacaggtacagggccgggaggacgaggtacgcgcacttccggcagacggacgacctcctggccgattccgggtggcactgcagcttctgcttccgccgcatagacgacttcgtcttcaagatgaaggcctacagccacgtggaccggatcaggttcgggtacttcctgaacccgaggaggatccagcacgtgatctgcgagggggccgatctcttcgacatgctccccgaggagtacacgttccaggagatcatcgccaagctggggcctatcccgagcacgttctccgctgtccatctccccgcctatctgctggagcacaacgagcggtacaggtaccttctcccgggcaactgcgttagagagagtggctagtagctaaggctgtaaggcagctagctgtgttgctgtctgcatcgccatggcctgaggcgcaccgacgtcgctcgcggatgcatgcatgcgtggaggagcgccctgccgttgccggggttgttgtatctggatatacgactggctgggctgacttatatatttagatgatgaatgaatggtcgcttgaccgctgctggttcagttcgtatgagattttgtaccatggaaggccttcacagcagcatagcatgcttggtcgctgcttccttgttgttttgcaggcctgggtttttattcattgcttccatgattgatgtatgtatgaatgaactcaaactatttgtaggtgtcataccgagcgacattcatcccc

SEQ ID NO: 1605 - protein, 388 aa, Zea mays
MEAGYCNRKKTDGICDGVCDSELGSKSVLSMSRLKCALRTFDLRVLLILLIGVPILLFAIYVHGQKVTYFLRPIWEKPPKPFKVLPHYYHENVSMANLCKLHGWRVRETPRRVFDAVLFSNELDILDIRWHELSPYVSEFVLLESNSTFTGIRKDLHFRENRQRFGFAESRLTYGTIGGRFVKGENPFVEESYQRVALDQLIKIAGIADDDLLIMSDVDEIPSGHTVNLLRWCDDVPEVLHLQLRNYLYSFEFLLDDRSWRASVHRYRAGRTRYAHFRQTDDLLADSGWHCSFCFRRIDDFVFKMKAYSHVDRIRFGYFLNPRRIQHVICEGADLFDMLPEEYTFQEIIAKLGPIPSTFSAVHLPAYLLEHNERYRYLLPGNCVRESG

SEQ ID NO: 1606 - DNA, 2087 bp, Zea mays
  CDS (535)..(1701)
agagtacatatatttattttaaacgtcattatgtaaactgtatagtctaaaaaacaaaaggagtttttatgtggccatatacacatatcctacgaattgggggccgcagcgacaagcgtgaggacaaaatcgtacatctctcgatcgcggccgggccgggccactctctcgctcttgcgccggcgaccccgcggtttcgagccaatcaccgccaagtcctcgactccagcgcccttgccttgccaccccggccccagctaccacggggagctgcaaataacctgcggccccgaggaccggacagcaaaagcgcccaaccgctggagctccgccccggcgatcacccgccgggaacgtagcgcccggctccacagccgcgccattcgagctgctgctcgcgcgcggctggttcttctcggggggattttctttttgcgggcaccctccgctccccctcaccgccctgccgtcagccgtctcgttttcggattcgtttgctccggcggtggccgacctgccgtgcggggcgcggtgatgccggaggtggggcagtacgggtacaagaagaccgacggcatctgcgacagcgtgtgcggcgagcctgtgtcaaagacagctctgacgatgtcaaggctaaagtgcgctctccggggatttgatttaagggcacttatggtcctcttgattggtgtgccaattctaatcctaatgatatatgcgcatggtcagaaggtcacatacttcctgcggcccatctgggaatctcctcccaagcccttcaagacaatccctcactactaccatgagaacgtcaccatggagaacctgtgcaagttacatggttggaaagtccgtgacttcccgcgtcgtgtctttgatgctgtactcttcagcaatgagcttgatatcctggagatccgctggaatgagcttagtccctatgtgtccgagtttgtgcttcttgaatccaactcaacctttactggcataaaaaagcccctccacttcaaggaaaacaagcaccgttttgggttcgctaaatcacggctgacatatggtaatattgggggaaggttcgtgaagggggagaacccatttgttgaggagtcatatcagagggttgccctggaccggcttcttaagcttgcaagaatagaagacgatgacctgctgatcatgtcggacgttgatgaaatcccgagcggccacacaatcgatctcttaaggtggtgcgacggcattccagacatacttcaccttcagctcaggaattatctctactcgttcgagtttttcctggacgacaagagctggagggcatcgatacacaagtaccaagctggaaagacgaggtacgcgcacttccggcaggcagacgagctcctcgccgattcagggtggcattgcagcttctgcttccgctacataagcgatttcgcattcaagatgcaagcgtatagccacgtcgaccggatcaggttcaagtacttcctgaaccctgagaggatccaagatgtcatctgcagaggggcggaccttttcgatatgcttccagaagagtacacgttccaagagatcatcgccaagctggggccgatcccgagcacgtattctggcgttcatcttcctagctatctgctaaggaatgtcgaccggtttagataccttctaccgggcaactgcaggagagaaagtggctaggttttatggcccactaccctgcaacctgttgtgcgtgggtgggtgggtgccagtgccacactgccccgctgcaaagctgctgtccatgggatatctgtggcagttcacctggtacggttgcctaacgtagttgaacaaatgctttggggaagaattggttcatggatgggggtgagcacatgattctctaatgtgtaatagaacatgggaggaggatctaacggcatagcgcacgcttggtcctggctgggtgtgcatgagctgagcggtttgtcattgtcattcattacttccctgattgatatatataaactcaaaaaggctgttgtagattgcaatccaagtggtatttcagaattacaaatagtaaaaaaaaaaaagcggcc

SEQ ID NO: 1607 - protein, 388 aa, Zea mays
MPEVGQYGYKKTDGICDSVCGEPVSKTALTMSRLKCALRGFDLRALMVLLIGVPILILMIYAHGQKVTYFLRPIWESPPKPFKTIPHYYHENVTMENLCKLHGWKVRDFPRRVFDAVLFSNELDILEIRWNELSPYVSEFVLLESNSTFTGIKKPLHFKENKHRFGFAKSRLTYGNIGGRFVKGENPFVEESYQRVALDRLLKLARIEDDDLLIMSDVDEIPSGHTIDLLRWCDGIPDILHLQLRNYLYSFEFFLDDKSWRASIHKYQAGKTRYAHFRQADELLADSGWHCSFCFRYISDFAFKMQAYSHVDRIRFKYFLNPERIQDVICRGADLFDMLPEEYTFQEIIAKLGPIPSTYSGVHLPSYLLRNVDRFRYLLPGNCRRESG

SEQ ID NO: 1608 - DNA, 1173 bp, Oryza sativa
  CDS (1)..(1173)
atggaggccggcgggtactacaactgcaagaagacggacggcatctgcgaggacgtctgcgacagcgagcagcatggttcaaaggcagtttttagtatgtcaaggctgaagtgcgcacttcgggggtttgatttaagagcacttttgatcctcttgattggtctgccaattctgatctttgttatataccttcatggccagaaagtcacttacttcctcagaccaatctgggaaaagcccccaaagcccttcaaagtacttcctcactactacaacgaaaatgtctcaatggccaacttatgcaagttacatggatggaaagtcagggaaacgccgcggcgtgtttttgatgctgtgcttttcagcaacgagcttgatattcttgatatccgttggcatgagcttagcccttatgtgtcagagtttgtgttgcttgagtccaactcaaccttcactggccttaaaaaggatctccacttcaaggaaaaccgtcaacgttttgaatttgctgaatcacggttgacctatggtatgataggtggtcggtttgtgaagggggagaacccatttgtcgaggagtcatatcagagggttgctcttgaccagcttattaaaattgccgggatcacagatgatgacctgttgatcatgtctgatgttgatgagattccaagtgggcatacgatcaacctcttgagatggtgtgatgacatacctgaagtactccatctccagctcaggaactatctgtactcatttgaatttttccttgatgacaaaagttggagggcttcaattcacagataccgggctggaaagacgaggtatgcacatttccggcaaacagatgaccttctggctgattcaggatggcactgcagcttttgttttcgctacattagtgattttgtcttcaaaatgcaagcttatagccatgttgatcggattagatttaagtacttcctgaaccccaaaagaattcagcatgtgatatgccgaggagccgatcttttcgacatgcttcctgaagaatacacattccaagaaatcattgccaagctgggtccaatcccaagcacattttctgccgttcatcttcctgcttatttgctagagaaagtagatcagtacagttatcttcttccagggcgatgcatgagagagagtggctag

SEQ ID NO: 1609 - protein, 390 aa, Oryza sativa
MEAGGYYNCKKTDGICEDVCDSEQHGSKAVFSMSRLKCALRGFDLRALLILLIGLPILIFVIYLHGQKVTYFLRPIWEKPPKPFKVLPHYYNENVSMANLCKLHGWKVRETPRRVFDAVLFSNELDILDIRWHELSPYVSEFVLLESNSTFTGLKKDLHFKENRQRFEFAESRLTYGMIGGRFVKGENPFVEESYQRVALDQLIKIAGITDDDLLIMSDVDEIPSGHTINLLRWCDDIPEVLHLQLRNYLYSFEFFLDDKSWRASIHRYRAGKTRYAHFRQTDDLLADSGWHCSFCFRYISDFVFKMQAYSHVDRIRFKYFLNPKRIQHVICRGADLFDMLPEEYTFQEIIAKLGPIPSTFSAVHLPAYLLEKVDQYSYLLPGRCMRESG

SEQ ID NO: 1610 - DNA, 1176 bp, Oryza sativa (japonica cultivar-group)
  CDS (1)..(1176)
atggaggcggcgggctactacaactgcaagaagaacgacggcggcatctgcgggggcgtctgcggcggcagcgagcatggttcaaaggcaattctgagcatgtcaaggttgaagtgtgcgcttcgggggtttgatttgagggcacttctgatcctcttgattggtgtgccagctctaatattcattatatatgttcatggccagaaggtgacttactttcttcgaccgatctgggaaaaaccgccaaagcccttcaatgtgcttcctcactactatcatgaaaatgtctcgatggcaaacctatgcaagttgcatggatggaaagtcagggaaactccacgccgtgtttttgatgctgtgcttttcagcaatgagcttgacattcttgatatccgttggcatgagcttagcccatatgtgtcagaatttgtgctgctcgagtccaactcaaccttcactggcctgaaaaaggatctccacttcaaggaaaaccgtcaacgctttgaatttgctgaatcacggttgacctatggtatgataggtggaagatttgtgaagggggagaacccatttgtcgaggagtcatatcaaagggttgctcttgaccagcttatcaaaattgctggaatcacagatgatgaccttttgatcatgtctgatgttgatgagatccccagtggccatacaatcaacctcttgaggtggtgtgatgacactcctgaagtgcttcatctccagctcaggaactatctttactcatttcagtttctccttgacgacaagagttggagggcttcaatacacagataccgggctggaaagacgaggtatgcgcatttccggcaaacagacgaccttctggccgactcagggtggcactgcagcttttgcttccggcacataaatgattttgtcttcaaaatgcaagcttacagccatgttgaccggattagatttaagtacttcttgaaccccaaaaggattcagcatgtgatatgccaaggagctgatctttttgacatgcttcccgaagagtatacattccaagagatcattgccaagttggggccaatccctagcacattttcagctgttcaccttcctgcttatctgttggagaaaatggaccagtaccgctatcttcttccgggcaactgcatgcgagaaagtggctag

SEQ ID NO: 1611 - protein, 391 aa, Oryza sativa (japonica cultivar-group)
MEAAGYYNCKKNDGGICGGVCGGSEHGSKAILSMSRLKCALRGFDLRALLILLIGVPALIFIIYVHGQKVTYFLRPIWEKPPKPFNVLPHYYHENVSMANLCKLHGWKVRETPRRVFDAVLFSNELDILDIRWHELSPYVSEFVLLESNSTFTGLKKDLHFKENRQRFEFAESRLTYGMIGGRFVKGENPFVEESYQRVALDQLIKIAGITDDDLLIMSDVDEIPSGHTINLLRWCDDTPEVLHLQLRNYLYSFQFLLDDKSWRASIHRYRAGKTRYAHFRQTDDLLADSGWHCSFCFRHINDFVFKMQAYSHVDRIRFKYFLNPKRIQHVICQGADLFDMLPEEYTFQEIIAKLGPIPSTFSAVHLPAYLLEKMDQYRYLLPGNCMRESG

SEQ ID NO: 1612 - DNA, 1077 bp, Oryza sativa (japonica cultivar-group)
  CDS (1)..(1077)
atgtcaaggctgaagtgcgcacttcgggggtttgatttaagagcacttttgatcctcttgattggtctgccaattctgatctttgttatataccttcatggccagaaagtcacttacttcctcagaccaatctgggaaaagcccccaaagcccttcaaagtacttcctcactactacaacgaaaatgtctcaatggccaacttatgcaagttacatggatggaaagtcagggaaacgccgcggcgtgtttttgatgctgtgcttttcagcaacgagcttgatattcttgatatccgttggcatgagcttagcccttatgtgtcagagtttgtgttgcttgagtccaactcaaccttcactggccttaaaaaggatctccacttcaaggaaaaccgtcaacgttttgaatttgctgaatcacggttgacctatggtatgataggtggtcggtttgtgaagggggagaacccatttgtcgaggagtcatatcagagggttgctcttgaccagcttattaaaattgccgggatcacagatgatgacctgttgatcatgtctgatgttgatgagattccaagtgggcatacgatcaacctcttgagatggtgtgatgacatacctgaagtactccatctccagctcaggaactatctgtactcatttgaatttttccttgatgacaaaagttggagggcttcaattcacagataccgggctggaaagacgaggtatgcacatttccggcaaacagatgaccttctggctgattcaggatggcactgcagcttttgttttcgctacattagtgattttgtcttcaaaatgcaagcttatagccatgttgatcggattagatttaagtacttcctgaaccccaaaagaattcagcatgtgatatgccgaggagccgatcttttcgacatgcttcctgaagaatacacattccaagaaatcattgccaagctgggtccaatcccaagcacattttctgccgttcatcttcctgcttatttgctagagaaagtagatcagtacagttatcttcttccagggcgatgcatgagagagagtggctag

SEQ ID NO: 1613 - protein, 358 aa, Oryza sativa (japonica cultivar-group)
MSRLKCALRGFDLRALLILLIGLPILIFVIYLHGQKVTYFLRPIWEKPPKPFKVLPHYYNENVSMANLCKLHGWKVRETPRRVFDAVLFSNELDILDIRWHELSPYVSEFVLLESNSTFTGLKKDLHFKENRQRFEFAESRLTYGMIGGRFVKGENPFVEESYQRVALDQLIKIAGITDDDLLIMSDVDEIPSGHTINLLRWCDDIPEVLHLQLRNYLYSFEFFLDDKSWRASIHRYRAGKTRYAHFRQTDDLLADSGWHCSFCFRYISDFVFKMQAYSHVDRIRFKYFLNPKRIQHVICRGADLFDMLPEEYTFQEIIAKLGPIPSTFSAVHLPAYLLEKVDQYSYLLPGRCMRESG

SEQ ID NO: 1614 - DNA, 1167 bp, Oryza sativa (japonica cultivar-group)
  CDS (1)..(1167)
atgccggagaccgggccctacggccacaagaagaccgacggcatctgcgacggcgtgtgcggcgagcctgcgtcaaaggcagttctgaccatgtcgaggctgagatgtgcacttcggggatttgatttcagagcactattggccctattgataggagtgccaattctaattttaatgatatatgctcatggtcagaaggtcacatacttcctcaggccaatatgggagtctcctcccaagcccttcaaaactatccctcattactaccatgagaatgtcaccatggcgaaactctgcaagttgcatgggtggaaagtccgggagaccccacgacgtgtcttcgatgctgtactattcagcaatgagctcgatattcttgaaatacgttggaatgaactaagcccctatgtctcagagtttgtgctgcttgagtcgaactcaaccttcactggattgaaaaagcccctgcacttcaaggaaaatcgtcatcgatttggatttgctgaatcacggctgacatatggtatgattgggggaaggttcgtgaagggagaaaacccatttgttgaggagtcatatcagagggttgccctggaccagcttattaagattgcaaaaatagaagatgatgacctgttgatcatgtcagatgttgatgaaatcccaagtggccacacaattgatctcctgagatggtgcgacgacattcctgagatccttcatcttcagcttaggaattacctctactcatttgaatttttcctggatgacaaaagttggagggcatcgatacacaggtacaggtctgggaagacaagatatgcacacttccggcagacagatgagcttcttgctgattcagggtggcactgcagtttttgctttcgctacattagtgattttgccttcaaaatgcaagcttacagccatgtcgatcggattagatttaagtacttcctgaaccctgaaaggattcaagatgttatatgcagaggggcggatctttttgacatgcttcctgaagagtacacgttccaagagatcattgccaagttggggccgattccaagcacattttctgctgttcatcttcctagctatctgctacagaatgttgatcggtacagataccttctcccagggtactgcaggagagaaagtgggtag

SEQ ID NO: 1615 - protein, 388 aa, Oryza sativa (japonica cultivar-group)
MPETGPYGHKKTDGICDGVCGEPASKAVLTMSRLRCALRGFDFRALLALLIGVPILILMIYAHGQKVTYFLRPIWESPPKPFKTIPHYYHENVTMAKLCKLHGWKVRETPRRVFDAVLFSNELDILEIRWNELSPYVSEFVLLESNSTFTGLKKPLHFKENRHRFGFAESRLTYGMIGGRFVKGENPFVEESYQRVALDQLIKIAKIEDDDLLIMSDVDEIPSGHTIDLLRWCDDIPEILHLQLRNYLYSFEFFLDDKSWRASIHRYRSGKTRYAHFRQTDELLADSGWHCSFCFRYISDFAFKMQAYSHVDRIRFKYFLNPERIQDVICRGADLFDMLPEEYTFQEIIAKLGPIPSTFSAVHLPSYLLQNVDRYRYLLPGYCRRESG

SEQ ID NO: 1616 - DNA, 1095 bp, Oryza sativa (japonica cultivar-group)
  CDS (1)..(1095)
atggctagaacctctccttttccacctctaactagacggaaaatcgcttccctcaagttgctgataccatgtgttctagttctttcagtggctgttattgttgttacgcagtatttccataatatctcttaccttctgcggccactgtgggacacaccacctaagccatttatccgcatcccacactactatgcccccaacatctccatgccgcagctctgtcagctccatggttggggtatcctccccacccctcgccgtgtctttgacgccgtcctcttcagtaatgaacttgatattctagaaattcgctacggtgagctccttccgtatgttgacaggtttgtcatccttgaagctaatgccacattcactggcatcccgaagtcactctctttcttggaaaatatcaatcgctttgcattcgctggctccaagattgtgtatgacatgcttcctgtcatggaaatggatcccggttctcaccgtcagcccttccatgttgaggccggccaccgtcgtgcgcttaatatgctgctgcgaagatcaggcattgctgtgggggatgtattgatcatggctgatgctgatgagatccctagccctgagacggtgcagttgctcaagtggtgtgatggaataccgcaagtcatgcatctcgagctgaagaactatatgtactcctttgaatttcctatagactacaacagctggagggccacagcacatgtgttcactgagcatacattgtaccgccactcccgtcagagcaaccttctgctggctgatgcaggctggcattgtagcttctgcttcaaggacatcaaggagtttgctttcaagatgaaggcatatagccacgcagaccgggtgaagcaggacagcttcctaaatccagacagaatccagagggtcatatgtaatggggaggacctgtttgacatgctgcctgaagagtacacattcaaggatctcttcaagaagatgggacccataccaaagtcaggatctgctgttcatctgccttcctatttgatcaagaacgcagacaagttcagattcttgctccctggtggatgcttgagaccaggctaa

SEQ ID NO: 1617 - protein, 364 aa, Oryza sativa (japonica cultivar-group)
MARTSPFPPLTRRKIASLKLLIPCVLVLSVAVIVVTQYFHNISYLLRPLWDTPPKPFIRIPHYYAPNISMPQLCQLHGWGILPTPRRVFDAVLFSNELDILEIRYGELLPYVDRFVILEANATFTGIPKSLSFLENINRFAFAGSKIVYDMLPVMEMDPGSHRQPFHVEAGHRRALNMLLRRSGIAVGDVLIMADADEIPSPETVQLLKWCDGIPQVMHLELKNYMYSFEFPIDYNSWRATAHVFTEHTLYRHSRQSNLLLADAGWHCSFCFKDIKEFAFKMKAYSHADRVKQDSFLNPDRIQRVICNGEDLFDMLPEEYTFKDLFKKMGPIPKSGSAVHLPSYLIKNADKFRFLLPGGCLRPG

SEQ ID NO: 1618 - DNA, 1179 bp, Arabidopsis thaliana
  CDS (1)..(1179)
atgtggtggatgatgggagaagctggtgggcattactgttctaagaagactgatgatatctgcggcggtgtttgtagtcaggaacctggaagattcttcagcttttctagactttgttgtgctcttcgtggtgttgatatgaagacttatatcttcttattagtgattgttcccacatgtgtactcgctggctatgtccacggtcagaagatttcttactttctccggcctttatgggaatcaccacctaaaccttttcatgacattcctcattactaccacgagaacgcttctatggagactctttgtaaactccatggctggggtgttcgagactaccctagacgagtttatgatgcggttttgttcagtaacgagcttgatatcctcgctgttcgttggagagaattgtttccttacatcactcagtttgtcctccttgaatcaaacacgacgttcactggcttgcctaagcctcttgtctttgctgctcaccgagatgagttcaagtttattgagtcacgcttgacttatggtactgttggtggaagatttgtcaaagggcagaatccgttttacgaagaggcgtatcagcgggtagctcttgatcagcttctgagaatcgctgggattactgatgatgacttgttgttaatgtctgatgtcgatgagattccaagtagacacaccattaaccttttgagatggtgcgatgagatcccgaagatacttcatctgcgcctcaagaactatctttactcgtttgaattccttgttgataacaaaagctggagagcttccatccacagatatgagacgggtaagacacggtatgctcattatcgacagtctgatgaaatcttggcggatgcaggatggcattgtagcttttgcttccgacgaatcagtgagtttatattcaagatgaaagcttatagccataatgacagagtgaggtttggtcatttcttgaatcctaagagagttcaaagagttatatgcaaaggagctgatcttttcgatatgctccctgaagagtataccttcaaggagataataggaaaaatgggtccaatcccgcattctttctcagctgttcatcttccttcgtatctcctggaaaacgcggataagtacagatttctcttgccgggaaattgcataagagaaagcgaatga

SEQ ID NO: 1619 - protein, 392 aa, Arabidopsis thaliana
MWWMMGEAGGHYCSKKTDDICGGVCSQEPGRFFSFSRLCCALRGVDMKTYIFLLVIVPTCVLAGYVHGQKISYFLRPLWESPPKPFHDIPHYYHENASMETLCKLHGWGVRDYPRRVYDAVLFSNELDILAVRWRELFPYITQFVLLESNTTFTGLPKPLVFAAHRDEFKFIESRLTYGTVGGRFVKGQNPFYEEAYQRVALDQLLRIAGITDDDLLLMSDVDEIPSRHTINLLRWCDEIPKILHLRLKNYLYSFEFLVDNKSWRASIHRYETGKTRYAHYRQSDEILADAGWHCSFCFRRISEFIFKMKAYSHNDRVRFGHFLNPKRVQRVICKGADLFDMLPEEYTFKEIIGKMGPIPHSFSAVHLPSYLLENADKYRFLLPGNCIRESE

SEQ ID NO: 1620 - DNA, 1173 bp, Arabidopsis thaliana
  CDS (1)..(1173)
atgtggtggatgatgggagaaaacggtggtcactactgttctaaaaagtccgatgatttatgcggaactcaggaatcagatcgaggctttggtatttcaagactctgttgtatcttgcgtggtgtggatttaaaatcggttctgtttctgttagtaatcatgccaatgtgtgttcttggtgtatacattaacgctctcaagatttcatatttcttgagacctttatgggaatcaccaccaaaaccattccatgagataccgcattatcaccacgagaacgcttctatggaatctctctgtaaactccacggttggagaacccgtgagtaccctcgtcgtgtctacgacgctgttttgttcagtactgaagttgaactcctcacgatacggtggaaagaactgtacccatatgttactcagtttgttctacttgaatctaactcgactttcaccggattaccaaaaccgcttgttttcgcggggcatagggatgagtttaagtttatcgagccacggttgacttacgggtcgataggaggaaggtttaagaaaggtgagaagaatcctttttacgaagaggcttatcaaagaatcgcattggatcagctattgagaatagctggtatcactgatgatgacttgttgattatgtctgatgttgatgagattccgagtagacatacgataaatcttctccgttggtgcgatgacataccacaaattcttcatcttagactgaagaattacttgtactcttttgagttccctgttgatgataagagctggagagcatcggtgcatagataccagacgggtaaaacaaggtatgcgcattatcgacagtctgatgttatcttggcggattcagggtggcattgcagtttctgttttagacgtataagcgagtttgtgtttaagatgaaagcttatagtcattatgatcgagtgagattcgcgcattacttgaacccgaaaagggttcaaagagttatatgcagcggatcggatttgttcgatatgattcccgaggaatacacgtttaaagacatcattggtaaaatgggaccgatcccgcattcttactccgcggttcatcttccggcgtaccttttagagaacgcggagaggtacaagtttcttcttccggggaactgtttgagagatgaggaatga

SEQ ID NO: 1621 - protein, 390 aa, Arabidopsis thaliana
MWWMMGENGGHYCSKKSDDLCGTQESDRGFGISRLCCILRGVDLKSVLFLLVIMPMCVLGVYINALKISYFLRPLWESPPKPFHEIPHYHHENASMESLCKLHGWRTREYPRRVYDAVLFSTEVELLTIRWKELYPYVTQFVLLESNSTFTGLPKPLVFAGHRDEFKFIEPRLTYGSIGGRFKKGEKNPFYEEAYQRIALDQLLRIAGITDDDLLIMSDVDEIPSRHTINLLRWCDDIPQILHLRLKNYLYSFEFPVDDKSWRASVHRYQTGKTRYAHYRQSDVILADSGWHCSFCFRRISEFVFKMKAYSHYDRVRFAHYLNPKRVQRVICSGSDLFDMIPEEYTFKDIIGKMGPIPHSYSAVHLPAYLLENAERYKFLLPGNCLRDEE

SEQ ID NO: 1622 - DNA, 1086 bp, Arabidopsis thaliana
  CDS (1)..(1086)
atgacgattcgatcgttgcgtaaaccaccgccggttaaacttgtgtttcctactctgattatactcttcttgacatgtttgttatgtatcttaacaaatttccaaaccatatcgtatcttttccgtccgctttgggataaaccgccaccgccttttaaacggataccgcattactatgcggagaatgtttccatgggacatctttgtgagcttcacggctggacaccgcggttagaaccgaggcgagtgtttgatgccatcattttcagtaatgagcttgatcttcttgaagtcagatggcgggaattggagccttatgtgtcgaagtttgtgatattggagtcaaacactacgtttaccgggatcccgaagccgcttttcttcgattccaataaggagagatttgcgtttgcggaggggaagattgtacatggagtgtttcctgggaagaaacggtctacggggcagccgtatgaggatccgtttttgcttgaggggcaacagcgagttgcgatgaactggttgcttagagaagctggtgtatcggatggagatgcggtgataatgtcagatgcagacgagattccgagtcctcatactgtgaagtttctacagtggtgtgatgggataccagatgtaatgcatttggagatgagggaatacatgtactcctttgagtttccggttgattacagtagctggagagcctctgttcatatatatagtaggaagtggactcaataccggcactcacgacaaacggacttgatattatccgacgcagggtggcattgcagcttctgtttcagacgactcaacgagtttgttttcaagatgaaaggttatagtcatgcagatagagtcaaacgcaaggagtttttggattatcagaggatacaaaaacatatttgcaaaggttatgatctctttgacatgcttcctgaaaaatacagcttccaagagttgattagcaaaatcggacccatcccgccttctgcgtctgcggtacatctaccagcctttttgattcagaacgctgctcgctttcggtttctcctcccgggaggttgtctccgagaaccctag

SEQ ID NO: 1623 - protein, 361 aa, Arabidopsis thaliana
MTIRSLRKPPPVKLVFPTLIILFLTCLLCILTNFQTISYLFRPLWDKPPPPFKRIPHYYAENVSMGHLCELHGWTPRLEPRRVFDAIIFSNELDLLEVRWRELEPYVSKFVILESNTTFTGIPKPLFFDSNKERFAFAEGKIVHGVFPGKKRSTGQPYEDPFLLEGQQRVAMNWLLREAGVSDGDAVIMSDADEIPSPHTVKFLQWCDGIPDVMHLEMREYMYSFEFPVDYSSWRASVHIYSRKWTQYRHSRQTDLILSDAGWHCSFCFRRLNEFVFKMKGYSHADRVKRKEFLDYQRIQKHICKGYDLFDMLPEKYSFQELISKIGPIPPSASAVHLPAFLIQNAARFRFLLPGGCLREP

SEQ ID NO: 1624 - DNA, 1167 bp, Arabidopsis thaliana
  CDS (1)..(1167)
atgtccgatggttatcgtagttctaagaagacggatactatctgcgaagatgtttgtggacaggaaggttctcgagcaggcaaggccatttcaaggcttagatgtgttctaagaggactcgatttcaaaacattcctgtttctcttcactctcctgccactcttcatcttcggcatctatctacacggccagaagatcacatatttcttgagacctctatgggaatcacctcctaaaccttttaacatccttccgcattactatcacgagaacacttccatggaattgctctgcaatcttcatggctggaaactccgcgaatctccaagaagagtctttgatgctgccttgttcagtaacgagatcgatatgctcactctccgttggaatgagttaaatccttacattactcagtttgtgcttctcgaatctaactcaactttcaccggactgtcaaaacagttggctttcgcagacaacagggagaagaatttcaaattcgttgagccaaggctgacttatgggaacgttggaggaaggttcaagaaaggcgaaaacccctttgtggaggaatcattccaaaggcttgcacttgaccagttgatcaagctcgcaggtataaaagaagatgatcttttgataatgtcggatgtcgatgagatcccgagcggccataccatcaatctgcttagatggtgtgacgggttcccaccgatccttcatcttcagttgagaaactacctctactcatatgagtactatgtcgatagcaaaagctggagagcttcggttcatctctacaagcctgggaaaactcggtgcgctcatttccggcaaagcaacaatcttttgacagattcaggttggcattgcagtttctgtttcagacacatcaatgacttcgtgttcaagatgaaagcttatagccatactgaccgggttagattcttacattatctgaacccgagacgaatccaagacattatctgcaaaggaactgatcttttcgatatgcttcctgaagaacacacattcagggagattatcggcaaacttggtccgattccacggtcttattcagctgttcatctccctggatacttgattcagaatgctgatagctacaagtacttattacctgggaactgcaaacgagaatctggctga

SEQ ID NO: 1625 - protein, 388 aa, Arabidopsis thaliana
MSDGYRSSKKTDTICEDVCGQEGSRAGKAISRLRCVLRGLDFKTFLFLFTLLPLFIFGIYLHGQKITYFLRPLWESPPKPFNILPHYYHENTSMELLCNLHGWKLRESPRRVFDAALFSNEIDMLTLRWNELNPYITQFVLLESNSTFTGLSKQLAFADNREKNFKFVEPRLTYGNVGGRFKKGENPFVEESFQRLALDQLIKLAGIKEDDLLIMSDVDEIPSGHTINLLRWCDGFPPILHLQLRNYLYSYEYYVDSKSWRASVHLYKPGKTRCAHFRQSNNLLTDSGWHCSFCFRHINDFVFKMKAYSHTDRVRFLHYLNPRRIQDIICKGTDLFDMLPEEHTFREIIGKLGPIPRSYSAVHLPGYLIQNADSYKYLLPGNCKRESG

SEQ ID NO: 1626 - DNA, 1164 bp, Arabidopsis thaliana
  CDS (1)..(1164)
atgtccgatggatactatagttctaagaagacagacgatatctgcgatgatgtttgtggacaggatggttctcgagcagccaaggccttctctagggttagatgtgtactacgaggatttgatttcaagacatatatcttcttcttcaccattgtccctattttcatctttggagtctatttgcatggtcagaagctcacatatttcttgagaccgctttgggaatctccaccaaagccgtttcaaacgctaccccattactaccatgagaacgcctccatggcaacactctgcagtcttcatggctggaaacaccgtgaatctccgagaagggtctttgatgctgtgttgttcagcaatgaagttgatatgcttactatccggtggaaagagctttatccttacataacacagtttgtgatccttgaatcaaactctactttcactggtttgcctaaacctttggttttcaatgggaatcgagcgaagttcgagtttgctgagccgaggctgagttatgggaacattgcaggacgattcaagaaaggagaaaacccgtttgtggaagaagcttaccagaggattgcattggatcagctgatcagactggctggtatagaagaagatgatctgttgataatgtctgatgttgatgagattcctagcgctcataccatcaatctgcttagatggtgcgatggatacccaccgattcttcatcttcagttgaaaaactacttatactcattcgagtacttcgttgacaacaaaagctggagagcttctattcatcagtacaagcctgggaagactcgatacgctcatttccgtcaaggcaacactcttttagcagattctggttggcattgcagtttctgtttcaggcacatcagtgagtttatattcaagatgaaagcgtacagtcacaatgaccgggtcagattctctcattatctaaacccaaaaagaatacaagatgtgatctgtaaaggaactgatctgttcgatatgcttcctgaagagtatacgttcagggaaatcatcgggaaactaggtccaatcccgcggtcttattccgcagttcatctaccagctcatctgatagaaaaagctgagagttacaaatacttgttacctgggaactgcataagggaaagtggctga

SEQ ID NO: 1627 - protein, 387 aa, Arabidopsis thaliana
MSDGYYSSKKTDDICDDVCGQDGSRAAKAFSRVRCVLRGFDFKTYIFFFTIVPIFIFGVYLHGQKLTYFLRPLWESPPKPFQTLPHYYHENASMATLCSLHGWKHRESPRRVFDAVLFSNEVDMLTIRWKELYPYITQFVILESNSTFTGLPKPLVFNGNRAKFEFAEPRLSYGNIAGRFKKGENPFVEEAYQRIALDQLIRLAGIEEDDLLIMSDVDEIPSAHTINLLRWCDGYPPILHLQLKNYLYSFEYFVDNKSWRASIHQYKPGKTRYAHFRQGNTLLADSGWHCSFCFRHISEFIFKMKAYSHNDRVRFSHYLNPKRIQDVICKGTDLFDMLPEEYTFREIIGKLGPIPRSYSAVHLPAHLIEKAESYKYLLPGNCIRESG

SEQ ID NO: 1628 - DNA, 1176 bp, Oryza sativa subsp
  CDS (1)..(1176)
atggaggcggcgggctactacaactgcaagaagaacgacggcggcatctgcgggggcgtctgcggcggcagcgagcatggttcaaaggcaattctgagcatgtcaaggttgaagtgtgcgcttcgggggtttgatttgagggcacttctgatcctcttgattggtgtgccagctctaatattcattatatatgttcatggccagaaggtgacttactttcttcgaccgatctgggaaaaaccgccaaagcccttcaatgtgcttcctcactactatcatgaaaatgtctcgatggcaaacctatgcaggttgcatggatggaaagtcagggaaactccacgccgtgtttttgatgctgtgcttttcagcaatgagcttgacattcttgatatccgttggcatgagcttagcccatatgtgtcagaatttgtgctgctcgagtccaactcaaccttcactggcctgaaaaaggatctccacttcaaggaaaaccgtcaacgttttgaatttgctgaatcacggttgacctatggtatgataggtggaagatttgtgaagggggagaacccatttgtcgaggagtcatatcaaagggttgctcttgaccagcttatcaaaattgctggaatcacagatgatgaccttttgatcatgtctgatgttgatgagatccccagtggccatacaatcaacctcttgaggtggtgtgatgacactcctgaagtgcttcatctccagctcaggaactatctttactcatttcagtttctccttgacgacaagagttggagggcttcaatacacagataccgggctggaaagacgaggtatgcgcatttccggcaaacagacgaccttctggccgactcagggtggcactgcagcttttgcttccggcacataaatgattttgtcttcaaaatgcaagcttacagccatgttgaccggattagatttaagtacttcttgaaccccaaaaggattcagcatgtgatatgccaaggagctgatctttttgacatgcttcccgaagagtatacattccaagagatcattgccaagttggggccaatccctagcacattttcagctgttcaccttcctgcttatctgttggagaaaatggaccagtaccgctatcttcttccgggcaactgcatgcgagaaagtggctag

SEQ ID NO: 1629 - protein, 391 aa, Oryza sativa subsp
MEAAGYYNCKKNDGGICGGVCGGSEHGSKAILSMSRLKCALRGFDLRALLILLIGVPALIFIIYVHGQKVTYFLRPIWEKPPKPFNVLPHYYHENVSMANLCRLHGWKVRETPRRVFDAVLFSNELDILDIRWHELSPYVSEFVLLESNSTFTGLKKDLHFKENRQRFEFAESRLTYGMIGGRFVKGENPFVEESYQRVALDQLIKIAGITDDDLLIMSDVDEIPSGHTINLLRWCDDTPEVLHLQLRNYLYSFQFLLDDKSWRASIHRYRAGKTRYAHFRQTDDLLADSGWHCSFCFRHINDFVFKMQAYSHVDRIRFKYFLNPKRIQHVICQGADLFDMLPEEYTFQEIIAKLGPIPSTFSAVHLPAYLLEKMDQYRYLLPGNCMRESG

SEQ ID NO: 1630 - DNA, 1533 bp, Oryza sativa subsp
  CDS (1)..(1533)
atggaggccggcgggtactacaactgcaagaagacggacggcatctgcgaggacgtctgcgacagcgaggactatattcataagcatctttgccaaaatcctcaattctgccatacacaacctgcatcgtttgtaactgtcatctctgataggactacattcataagcatctttgccaaaatcctcaattctgccatacaacctgcatcttttcatggttcaaaggcagtttttagtatgtcaaggctgaagtgcgcacttcgggggtttgatttaagagcacttttgatcctcttgattggtctgccaattctgatctttgttatataccttcatggccagaaagtcacttacttcctcagaccaatctgggaaaagcccccaaagcccttcaaagtacttcctcactactacaacgaaaatgtctcaatggccaacttatgcaagttacatggatggaaagtcagggaaacgccgcggcgggtttttgatgctgtgcttttcagcaacgagcttgatattcttgatatccgttggcatgagcttagcccttatgtgtcagagtttgtgttgcttgagtccaactcaaccttcactggccttaaaaaggatctccacttcaaggaaaaccgtcaacgttttgaatttgctgaatcacggttgacctatggtatgataggtggtcggtttgtgaagggggagaacccatttgtcgaggagtcatatcagagggttgctcttgaccagcttattaaaattgccgggatcacagatgatgacctgttgatcatgtctgatgttgatgagattccaagtgggcatacgatcaacctcttgagatggtgtgatgacatacctgaagtactccatctccagctcaggaactatctgtactcatttgaatttttccttgatgacaaaagttggagggcttcaattcacagataccgggctggaaagacgagatatgcacatttccggcaaacagatgaccttctggctgattcaggatggcactgcagcttttgttttcgctacattagtgattttgtcttcaaaatgcaagcttatagccatgttgatcggattagatttaagtacttcctgaaccccaaaagaattcagcatgtgatatgccgaggagccgatcttttcgacatgcttcctgaagaatacacattccaagaaatcattgccaagctgggtccaatcccaagcacattttctgccgttcatcttcctgcttatttgctagagaaaatgagttaccctgcattgattctccgggcaataatcatcctcctgtcatttgatatatttgctgtgcactacagaaagcacatgtataatgcagttggtgtttggtctcagctaactgtttgcaaacaaccagagcaaacaaccagagtcgttgcagttattgtgagggttcgtctgttcgtgccgttaagcgacatgttaaggcggcattttgtgggacgaagtgggttggaacaggctgttcttgtcggacgtccgcttcagccagattga

SEQ ID NO: 1631 - protein, 510 aa, Oryza sativa subsp
MEAGGYYNCKKTDGICEDVCDSEDYIHKHLCQNPQFCHTQPASFVTVISDRTTFISIFAKILNSAIQPASFHGSKAVFSMSRLKCALRGFDLRALLILLIGLPILIFVIYLHGQKVTYFLRPIWEKPPKPFKVLPHYYNENVSMANLCKLHGWKVRETPRRVFDAVLFSNELDILDIRWHELSPYVSEFVLLESNSTFTGLKKDLHFKENRQRFEFAESRLTYGMIGGRFVKGENPFVEESYQRVALDQLIKIAGITDDDLLIMSDVDEIPSGHTINLLRWCDDIPEVLHLQLRNYLYSFEFFLDDKSWRASIHRYRAGKTRYAHFRQTDDLLADSGWHCSFCFRYISDFVFKMQAYSHVDRIRFKYFLNPKRIQHVICRGADLFDMLPEEYTFQEIIAKLGPIPSTFSAVHLPAYLLEKMSYPALILRAIIILLSFDIFAVHYRKHMYNAVGVWSQLTVCKQPEQTTRVVAVIVRVRLFVPLSDMLRRHFVGRSGLEQAVLVGRPLQPD

SEQ ID NO: 1632 - DNA, 1143 bp, Oryza sativa subsp
  CDS (1)..(1143)
atgggattaggtgaagttcaagcttggatgcttctggcgccgcatggttcaaaggcaattctgagcatgtcaaggttgaagtgtgcgcttcgggggtttgatttgagggcacttctgatcctcttgattggtgtgccagctctaatattcattatatatgttcatggccagaaggtgacttactttcttcgaccgatctgggaaaaaccgccaaagcccttcaatgtgcttcctcactactatcatgaaaatgtctcgatggcaaacctatgcaagttgcatggatggaaagtcagggaaactccacgccgtgtttttgatgctgtgcttttcagcaatgagcttgacattcttgatatccgttggcatgagcttagcccatatgtgtcagaatttgtgctgctcgagtccaactcaaccttcactggcctgaaaaaggatctccacttcaaggaaaaccgtcaacgctttgaatttgctgaatcacggttgacctatggtatgataggtggaagatttgtgaagggggagaacccatttgtcgaggagtcatatcaaagggttgctcttgaccagcttatcaaaattgctggaatcacagatgatgaccttttgatcatgtctgatgttgatgagatccccagtggccatacaatcaacctcttgaggtggtgtgatgacactcctgaagtgcttcatctccagctcaggaactatctttactcatttcagtttctccttgacgacaagagttggagggcttcaatacacagataccgggctggaaagacgaggtatgcgcatttccggcaaacagacgaccttctggccgactcagggtggcactgcagcttttgcttccggcacataaatgattttgtcttcaaaatgcaagcttacagccatgttgaccggattagatttaagtacttcttgaaccccaaaaggattcagcatgtgatatgccaaggagctgatctttttgacatgcttcccgaagagtatacattccaagagatcattgccaagttggggccaatccctagcacattttcagctgttcaccttcctgcttatctgttggagaaaatggaccagtaccgctatcttcttccgggcaactgcatgcgagaaagtggctag

SEQ ID NO: 1633 - protein, 380 aa, Oryza sativa subsp
MGLGEVQAWMLLAPHGSKAILSMSRLKCALRGFDLRALLILLIGVPALIFIIYVHGQKVTYFLRPIWEKPPKPFNVLPHYYHENVSMANLCKLHGWKVRETPRRVFDAVLFSNELDILDIRWHELSPYVSEFVLLESNSTFTGLKKDLHFKENRQRFEFAESRLTYGMIGGRFVKGENPFVEESYQRVALDQLIKIAGITDDDLLIMSDVDEIPSGHTINLLRWCDDTPEVLHLQLRNYLYSFQFLLDDKSWRASIHRYRAGKTRYAHFRQTDDLLADSGWHCSFCFRHINDFVFKMQAYSHVDRIRFKYFLNPKRIQHVICQGADLFDMLPEEYTFQEIIAKLGPIPSTFSAVHLPAYLLEKMDQYRYLLPGNCMRESG

SEQ ID NO: 1634 - DNA, 1533 bp, Oryza sativa subsp
  CDS (1)..(1533)
atggaggccggcgggtactacaactgcaagaagacggacggcatctgcgaggacgtctgcgacagcgaggactatattcataagcatctttgccaaaatcctcaattctgccatacacaacctgcatcgtttgtaactgtcatctctgataggactacattcataagcatctttgccaaaatcctcaattctgccatacaacctgcatcttttcatggttcaaaggcagtttttagtatgtcaaggctgaagtgcgcacttcgggggtttgatttaagagcacttttgatcctcttgattggtctgccaattctgatctttgttatataccttcatggccagaaagtcacttacttcctcagaccaatctgggaaaagcccccaaagcccttcaaagtacttcctcactactacaacgaaaatgtctcaatggccaacttatgcaagttacatggatggaaagtcagggaaacgccgcggcgtgtttttgatgctgtgcttttcagcaacgagcttgatattcttgatatccgttggcatgagcttagcccttatgtgtcagagtttgtgttgcttgagtccaactcaaccttcactggccttaaaaaggatctccacttcaaggaaaaccgtcaacgttttgaatttgctgaatcacggttgacctatggtatgataggtggtcggtttgtgaagggggagaacccatttgtcgaggagtcatatcagagggttgctcttgaccagcttattaaaattgccgggatcacagatgatgacctgttgatcatgtctgatgttgatgagattccaagtgggcatacgatcaacctcttgagatggtgtgatgacatacctgaagtactccatctccagctcaggaactatctgtactcatttgaatttttccttgatgacaaaagttggagggcttcaattcacagataccgggctggaaagacgaggtatgcacatttccggcaaacagatgaccttctggctgattcaggatggcactgcagcttttgttttcgctacattagtgattttgtcttcaaaatgcaagcttatagccatgttgatcggattagatttaagtacttcctgaaccccaaaagaattcagcatgtgatatgccgaggagccgatcttttcgacatgcttcctgaagaatacacattccaagaaatcattgccaagctgggtccaatcccaagcacattttctgccgttcatcttcctgcttatttgctagagaaaacgagttaccctgcattgattctccgggcaataatcatcctcctgtcatttgatatatttgctgtacactacagaaagcacatgtataatgcagttggtgtttggtctcagctaactgtttgcaaacaaccagagcaaacaaccagagtcgttgcagttattgtgagggttcgtctgttcgtgccgttaagcgacatgttaaggcggcattttgtgggacgaagtgggttggaacaggctgttcttgtcggacgtccgcttcagccagattga

SEQ ID NO: 1635 - protein, 510 aa, Oryza sativa subsp
MEAGGYYNCKKTDGICEDVCDSEDYIHKHLCQNPQFCHTQPASFVTVISDRTTFISIFAKILNSAIQPASFHGSKAVFSMSRLKCALRGFDLRALLILLIGLPILIFVIYLHGQKVTYFLRPIWEKPPKPFKVLPHYYNENVSMANLCKLHGWKVRETPRRVFDAVLFSNELDILDIRWHELSPYVSEFVLLESNSTFTGLKKDLHFKENRQRFEFAESRLTYGMIGGRFVKGENPFVEESYQRVALDQLIKIAGITDDDLLIMSDVDEIPSGHTINLLRWCDDIPEVLHLQLRNYLYSFEFFLDDKSWRASIHRYRAGKTRYAHFRQTDDLLADSGWHCSFCFRYISDFVFKMQAYSHVDRIRFKYFLNPKRIQHVICRGADLFDMLPEEYTFQEIIAKLGPIPSTFSAVHLPAYLLEKTSYPALILRAIIILLSFDIFAVHYRKHMYNAVGVWSQLTVCKQPEQTTRVVAVIVRVRLFVPLSDMLRRHFVGRSGLEQAVLVGRPLQPD

SEQ ID NO: 1636 - DNA, 1179 bp, Arabidopsis thaliana
  CDS (1)..(1179)
atgtggtggatgatgggagaagctggtgggcattactgttctaagaagactgatgatatctgcggcggtgtttgtagtcaggaacctggaagattcttcagcttttctagactttgttgtgctcttcgtggtgttgatatgaagacttatatcttcttattagtgattgttcccacatgtgtactcgctggctatgtccacggtcagaagatttcttactttctccggcctttatgggaatcaccacctaaaccttttcatgacattcctcattactaccacgagaacgcttctatggagactctttgtaaactccatggctggggtgttcgagactaccctagacgagtttatgatgcggttttgttcagtaacgagcttgatatcctcgctgttcgttggagagaattgtttccttacatcactcagtttgtcctccttgaatcaaacacgacgttcactggcttgcctaagcctcttgtctttgctgctcaccgagatgagttcaagtttattgagtcacgcttgacttatggtactgttggtggaagatttgtcaaagggcagaatccgttttacgaagaggcgtatcagcgggtagctcttgatcagcttctgagaatcgctgggattactgatgatgacttgttgttaatgtctgatgtcgatgagattccaagtagacacaccattaaccttttgagatggtgcgatgagatcccgaagatacttcatctgcgcctcaagaactatctttactcgtttgaattccttgttgataacaaaagctggagagcttccatccacagatatgagacgggtaagacacggtatgctcattatcgacagtctgatgaaatcttggcggatgcaggatggcattgtagcttttgcttccgacgaatcagtgagtttatattcaagatgaaagcttatagccataatgacagagtgaggtttggtcatttcttgaatcctaagagagttcaaagagttatatgcaaaggagctgatcttttcgatatgctccctgaagagtataccttcaaggagataataggaaaaatgggtccaatcccgcattctttctcagctgttcatcttccttcgtatctcctgaaaaacgcggataagtacagatttctcttgccgggaaattgcataagagaaagcgaatga

SEQ ID NO: 1637 - protein, 392 aa, Arabidopsis thaliana
MWWMMGEAGGHYCSKKTDDICGGVCSQEPGRFFSFSRLCCALRGVDMKTYIFLLVIVPTCVLAGYVHGQKISYFLRPLWESPPKPFHDIPHYYHENASMETLCKLHGWGVRDYPRRVYDAVLFSNELDILAVRWRELFPYITQFVLLESNTTFTGLPKPLVFAAHRDEFKFIESRLTYGTVGGRFVKGQNPFYEEAYQRVALDQLLRIAGITDDDLLLMSDVDEIPSRHTINLLRWCDEIPKILHLRLKNYLYSFEFLVDNKSWRASIHRYETGKTRYAHYRQSDEILADAGWHCSFCFRRISEFIFKMKAYSHNDRVRFGHFLNPKRVQRVICKGADLFDMLPEEYTFKEIIGKMGPIPHSFSAVHLPSYLLKNADKYRFLLPGNCIRESE

SEQ ID NO: 1638 - DNA, 1167 bp, Populus tremula x Populus alba
  CDS (1)..(1167)
atgaatgaaaatggcggccattactgctccaagaagagtgatgatatctgtaactccattaatttgcaggactcagggcgaattttgagcatgtccagaatccggtgtattcttcgtggcatggatttaaagacatatttgcttctgtttatactcgtgccaacctgtgtctatggtatttacatgcatggacagaagatctcatcctttttccggccattatgggaatccccaccaaaaacgttcaatgaaatcccacactattatcatgagaatgtgtcgatggagaacctctgcaaactccatggttggggaattcgtgagttcccaagacgtgtttatgatgcagtgttattcagtaatgaattggacatccttgctttgcgatggaaagaattgtacccttacattacacagtttgttctccttgaatctaattcaaccttcactgggaaagaaaagcttctctcttttgccaaccatcgagatcagtttaaatttgttgagcccaggttgacctatggaactatcggagggaggtttaagaaaggagagaacccatttatcgaagaggcataccagcgagtagcattggaccaacttatcaaagtagcagggatttctgatgatgacttgcttataatgtcagatgttgatgagataccgagcagacacactatcaatctcttgaggtggtgtgatgacactccttcagttcttcatctccggctgaaaaattatctttactcttttgagtttctcaaggacattaaaagttggagagcttcagtccacagatatcagacaggcaagacgcggtatgcacattatcgccaggcagatgacattttggcagatgcagggtggcactgcagcttttgtttccgccgaataagcgagtttatatttaaggatgaagcttacagtcatgtggataaaagcagggtccaacgttacttgaaccctaaaaggatccagagagtaatttgcaagggtgctgatttatttgatatgcttccagaggagtacacattcaaggaaattattgggaaaatgggaccaattcctcattcctactcagctgttcatcttccatcatatcttctggagaaggcggacaagtataaatttctcttgcctgggaactgcttaagagaaagtgggtga

SEQ ID NO: 1639 - protein, 388 aa, Populus tremula x Populus alba
MNENGGHYCSKKSDDICNSINLQDSGRILSMSRIRCILRGMDLKTYLLLFILVPTCVYGIYMHGQKISSFFRPLWESPPKTFNEIPHYYHENVSMENLCKLHGWGIREFPRRVYDAVLFSNELDILALRWKELYPYITQFVLLESNSTFTGKEKLLSFANHRDQFKFVEPRLTYGTIGGRFKKGENPFIEEAYQRVALDQLIKVAGISDDDLLIMSDVDEIPSRHTINLLRWCDDTPSVLHLRLKNYLYSFEFLKDIKSWRASVHRYQTGKTRYAHYRQADDILADAGWHCSFCFRRISEFIFKDEAYSHVDKSRVQRYLNPKRIQRVICKGADLFDMLPEEYTFKEIIGKMGPIPHSYSAVHLPSYLLEKADKYKFLLPGNCLRESG

SEQ ID NO: 1640 - DNA, 2192 bp, Cucumis sativus
  CDS (601)..(1779)
ggaccctttacaaagagaaagaaaattcccaaagccctttacaattaacattatattttctctctcttttgtaaaacaacgacgacagacaaagagaaacggctctctttttccttttcttattgctttgctttgctttcattttatttcattccattcatctctatgttgtaatttgtgtatgtaaaagagagtggcagcaatcattgtccaagacagatagatagagaaggcctttgttcttggccctcgaattcttagccctcgattttggcctctttcttttactctctctctctcttcctcaattattcccatttttttctctattcatttcggtaattcttagggatctctctctgcatatttagccactgcaaaaagggttgagggaaacgcctttcgcttcttcttttttctgattctggtttaactctgccctcgccgccgccgccgccgccaccgccgctgtttctctccatttttgctaatccttcacttcactgtttgtttaatccttcacgacccaatttcgtaccccacgaaaggagaagacccagtttgttgttttttggttttctgtttctttcgcatctacaaatgtggtggatgatgggtgaaggtggaggccattactgttccaagaaatctgatgatatttgtggcgatgtttgtgatcaggaatccaatcgagtattggggatgtctagacttcgctgcatttttcgtggatatgatgtgaaaaccttccttattctttttgcactggtgccaacatgcatcttgatcatttacttgcacggacagaagatttcatacttcttacggccgctatgggaatccccacctaaagaattcaatatgattactcactactatgatgggaatgtatctatgaagaacctatgcaaactccatggttggaaagtccgtgaatttccacgacgtgtttatgatgctgtgctgttcagtaatgagattgagatgctcaccttgcgatggaaagaactctacccttacattacacagtttgttcttctggaggcaaattcaacatttactgggaagccaaagccattatacttctgctcgtatagggacaaattcaagtttgtggagtcaagatttacttatggcactgttggagggagatttaagaaaggggaaaacccgtttgtcgaagaggcatttcagcgggttgcacttgatcagcttctcagaattgctggtatcactgatgatgacttgttgataatgtctgatgttgacgaaattccaagcaggcacacaattaatctcttgagatggtgtgatgacataccagaagttcttcatttacaacttaagaactatttgtactcttttgagttccatgttgatgacaatagttggagggcttcagtccatagatacaaatctggtaagacaaggtatgttcattatcgccaatcggatgacctgttggcagattcggggtggcactgtagcttctgtttccgacgtatcagcgactttgtctttaagatgaaagcatacagccataatgacagagttaggttctctagttacttaaatcccaaaagaattcagaagattatttgcaagggttcggacctatttgacatgcttcctgaggagtacactttcaaagaaattattgggaaaatgggaccagttcctcattccttctcagcagttcacttgccatcgtatctgctggaaaatgcagaagactacaaattccttttgcctgggaattgcatacgagagagtggctgatctctaacttcggcgtctacctccctgtgaaggttagttgcaatgtggcttgtctgacacctcgtggaccttccatcccgatagttgttgaccgatatacaggcaaccgtggtgatcttttgcctccagataagctaatgttaattcttttggaagttgtaactgcttgggcggttgaactaattccatgggtggaagttatgtgtagatatctgctttctttgggttggtttggttcaagaagtttgatattcattgggtgggcgaacttgctgttataggagccgcagcatattttagagaaaaaccccttgcattgccattgtatttgaggctgttgtgctttcttccctttactgggaaattttgtatacacgactattatttatatcatgtattcatatttgcggttg

SEQ ID NO: 1641 - protein, 392 aa, Cucumis sativus
MWWMMGEGGGHYCSKKSDDICGDVCDQESNRVLGMSRLRCIFRGYDVKTFLILFALVPTCILIIYLHGQKISYFLRPLWESPPKEFNMITHYYDGNVSMKNLCKLHGWKVREFPRRVYDAVLFSNEIEMLTLRWKELYPYITQFVLLEANSTFTGKPKPLYFCSYRDKFKFVESRFTYGTVGGRFKKGENPFVEEAFQRVALDQLLRIAGITDDDLLIMSDVDEIPSRHTINLLRWCDDIPEVLHLQLKNYLYSFEFHVDDNSWRASVHRYKSGKTRYVHYRQSDDLLADSGWHCSFCFRRISDFVFKMKAYSHNDRVRFSSYLNPKRIQKIICKGSDLFDMLPEEYTFKEIIGKMGPVPHSFSAVHLPSYLLENAEDYKFLLPGNCIRESG

SEQ ID NO: 1642 - DNA, 2035 bp, Arabidopsis thaliana
  CDS (346)..(1512)
ccacccatttccagagaggacacagccttttctttcttcctctttctctcttactcattcgtttttttttccttcttctgattcaaatttatttgtttcttctctctgaaaacgtttttttttttgtttgctcttctttttggtagtttctgtttttgttaagctgagtttgaggagtgtgagtgatttgaattttgtctgattttccgggataaaagagcgtcgtcggagataggcgacggatattttggacttatcgtcgccgaaaagaagcgagtttttgaatttgaaaaggtggttggcattttggtaatcggtggatctgagtttgggatgtggtggatgatgggagaagctggtgggcattactgttctaagaagactgatgatatctgcggcggtgtttgtagtcaggaacctggaagattcttcagcttttctagactttgttgtgctcttcgtggtgttgatatgaagacttatatcttcttattagtgattgttcccacatgtgtactcgctggctatgtccacggtcagaagatttcttactttctccggcctttatgggaatcaccacctaaaccttttcatgacattcctcattactaccacgagaacgcttctatggagactctttgtaaactccatggctggggtgttcgagactaccctagacgagtttatgatgcggttttgttcagtaacgagcttgatatcctcgctgttcgttggagagaattgtttccttacatcactcagtttgtcctccttgaatcaaacacgacgttcactggcttgcctaagcctcttgtctttgctgctcaccgagatgagttcaagtttattgagtcacgcttgacttatggtactgttggtggaagatttgtcaaagggcagaatccgttttacgaagaggcgtatcagcgggtagctcttgatcagcttctgagaatcgctgggattactgatgatgacttgttgttaatgtctgatgtcgatgagattccaagtagacacaccattaaccttttgagatggtgcgatgagatcccgaagatacttcatctgcgcctcaagaactatctttactcgtttgaattccttgttgataacaaaagctggagagcttccatccacagatatgagacgggtaagacacggtatgctcattatcgacagtctgatgaaatcttggcggatgcaggatggcattgtagcttttgcttccgacgaatcagtgagtttatattcaagatgaaagcttatagccataatgacagagtgaggtttggtcatttcttgaatcctaagagagttcaaagagttatatgcaaaggagctgatcttttcgatatgctccctgaagagtataccttcaaggagataataggaaaaatgggtccaatcccgcattctttctcagctgttcatcttccttcgtatctcctggaaaacgcggataagtacagatttctcttgccgggaaattgcataagagaaagcgaatgatcgttcgaatcttcaccacatagagtcttacttctcattcatcttaagacctctacattgagaggaaacaaaggctggcttgaatcctcctcgggactaataacacttacacaactgatatataatctctgcaattttgtctgaggcgtatcggtgtcggtgaatgctgcagagtttttcatcaggcacttcgagaggattattaaagggtgaaagattattgtatatagatagacctctttgtttcttcaggattctgatttcgcatcaggcatgaaaaccttcattctctgtgactgtgcatcatcaaacatgagtttctattcttctgagtttcccctttagggaagttttgcatcaagacactctttacttacccttttttgtacatctctttctctcttgatttcagtgggtttgttaagtatacgaggattgttgtttttcatgtattcgttattaagagaattgttctcatatataaagcttccttgttaatgagtaaatgagaaatttccaaaaa

SEQ ID NO: 1643 - protein, 388 aa, Arabidopsis thaliana
MGEAGGHYCSKKTDDICGGVCSQEPGRFFSFSRLCCALRGVDMKTYIFLLVIVPTCVLAGYVHGQKISYFLRPLWESPPKPFHDIPHYYHENASMETLCKLHGWGVRDYPRRVYDAVLFSNELDILAVRWRELFPYITQFVLLESNTTFTGLPKPLVFAAHRDEFKFIESRLTYGTVGGRFVKGQNPFYEEAYQRVALDQLLRIAGITDDDLLLMSDVDEIPSRHTINLLRWCDEIPKILHLRLKNYLYSFEFLVDNKSWRASIHRYETGKTRYAHYRQSDEILADAGWHCSFCFRRISEFIFKMKAYSHNDRVRFGHFLNPKRVQRVICKGADLFDMLPEEYTFKEIIGKMGPIPHSFSAVHLPSYLLENADKYRFLLPGNCIRESE

SEQ ID NO: 1644 - DNA, 1170 bp, Oryza sativa
  CDS (1)..(1170)
atggaggccggcgggtactacaactgcaagaagacggacggcatctgcgaggacgtctgcgacagcgagcatggttcaaaggcagtttttagtatgtcaaggctgaagtgcgcacttcgggggtttgatttaagagcacttttgatcctcttgattggtctgccaattctgatctttgttatataccttcatggccagaaagtcacttacttcctcagaccaatctgggaaaagcccccaaagcccttcaaagtacttcctcactactacaacgaaaatgtctcaatggccaacttatgcaagttacatggatggaaagtcagggaaacgccgcggcgtgtttttgatgctgtgcttttcagcaacgagcttgatattcttgatatccgttggcatgagcttagcccttatgtgtcagagtttgtgttgcttgagtccaactcaaccttcactggccttaaaaaggatctccacttcaaggaaaaccgtcaacgttttgaatttgctgaatcacggttgacctatggtatgataggtggtcggtttgtgaagggggagaacccatttgtcgaggagtcatatcagagggttgctcttgaccagcttattaaaattgccgggatcacagatgatgacctgttgatcatgtctgatgttgatgagattccaagtgggcatacgatcaacctcttgagatggtgtgatgacatacctgaagtactccatctccagctcaggaactatctgtactcatttgaatttttccttgatgacaaaagttggagggcttcaattcacagataccgggctggaaagacgaggtatgcacatttccggcaaacagatgaccttctggctgattcaggatggcactgcagcttttgttttcgctacattagtgattttgtcttcaaaatgcaagcttatagccatgttgatcggattagatttaagtacttcctgaaccccaaaagaattcagcatgtgatatgccgaggagccgatcttttcgacatgcttcctgaagaatacacattccaagaaatcattgccaagctgggtccaatcccaagcacattttctgccgttcatcttcctgcttatttgctagagaaagtagatcagtacagttatcttcttccagggcgatgcatgagagagagtggctag

SEQ ID NO: 1645 - protein, 389 aa, Oryza sativa
MEAGGYYNCKKTDGICEDVCDSEHGSKAVFSMSRLKCALRGFDLRALLILLIGLPILIFVIYLHGQKVTYFLRPIWEKPPKPFKVLPHYYNENVSMANLCKLHGWKVRETPRRVFDAVLFSNELDILDIRWHELSPYVSEFVLLESNSTFTGLKKDLHFKENRQRFEFAESRLTYGMIGGRFVKGENPFVEESYQRVALDQLIKIAGITDDDLLIMSDVDEIPSGHTINLLRWCDDIPEVLHLQLRNYLYSFEFFLDDKSWRASIHRYRAGKTRYAHFRQTDDLLADSGWHCSFCFRYISDFVFKMQAYSHVDRIRFKYFLNPKRIQHVICRGADLFDMLPEEYTFQEIIAKLGPIPSTFSAVHLPAYLLEKVDQYSYLLPGRCMRESG

SEQ ID NO: 1646 - DNA, 1164 bp, Brassica napus
  CDS (1)..(1164)
atgtcagatgggtactatagttgtaaaaagacggacgatatctgcgaagatgtttgtggtcaggatggttcacgagcagcgaaggccttctcaagagtcagatgcgtactacgcggactcgatttcaagacatacatcatcttcctcaccatcatccccatcttcatcctcggagtctacttgcacggacaaaagctcacttacttcctgagacccctctgggaatcaccgcccaagccctttcaaaccctcccgcattactaccaccacaacgcctccatggagactctctgcagcctccacgggtggacacaccgcgagtctcctcgacgagtcttcgacgccgtcctgttcagcaacgaggtcgacatgctcaccatccgctggaaagagctttacccttacgtcacgcagttcgtgatcctcgaatctaactcgacgttcaccggtttgcctaaaccgctggttttcgccgcgaaccgagagaagttcgagttcgtggagccgaggctgacgtacgggaacataggaggaaggttcaagagaggggagaaccctttcgttgaagaagcttaccagaggattgcgttagatcagttaataggactcgcggggattcaagaagatgatctgttgataatgtctgatgtagatgagatccccagcgctcacaccatcaacctccttagatggtgcgatggttacccgcccgttctccatctccagctcaagaactacctctactcgttcgagtattacgtcgacaacaaaagctggagagcttctgttcatcggtacaagcccgggaagacgcggtacgctcatttccgacgaggggatactcttttggcggattctggttggcattgcagtttctgtttcaggcgtataagcgagtttgtgttcaagatgaaagcgtatagccacaacgatagggtgagattctctcattatctaaatccgaagaggatacaagatgtgatatgtagagggactgatctgtttgacatgattcctgaagagcatacgtttagggagatcatcgggaagctggggccgatccctaggtcttactcggctgttcatctcccggggcatttgattgagaaagctgagagttataagtacttgttgcctgggaactgcgttagagacagtggctga

SEQ ID NO: 1647 - protein, 387 aa, Brassica napus
MSDGYYSCKKTDDICEDVCGQDGSRAAKAFSRVRCVLRGLDFKTYIIFLTIIPIFILGVYLHGQKLTYFLRPLWESPPKPFQTLPHYYHHNASMETLCSLHGWTHRESPRRVFDAVLFSNEVDMLTIRWKELYPYVTQFVILESNSTFTGLPKPLVFAANREKFEFVEPRLTYGNIGGRFKRGENPFVEEAYQRIALDQLIGLAGIQEDDLLIMSDVDEIPSAHTINLLRWCDGYPPVLHLQLKNYLYSFEYYVDNKSWRASVHRYKPGKTRYAHFRRGDTLLADSGWHCSFCFRRISEFVFKMKAYSHNDRVRFSHYLNPKRIQDVICRGTDLFDMIPEEHTFREIIGKLGPIPRSYSAVHLPGHLIEKAESYKYLLPGNCVRDSG

SEQ ID NO: 1648 - DNA, 1092 bp, Brassica napus
  CDS (1)..(1092)
atgaaaatcagatcgttgcgtcaaccgccacctaaacttgttctattgccaactcttgttattatcgtttcctcaacatgtttgtttggtatcctcacaaacctccaaaccttatcatatcttctccgtcctctctgggacaaaccgccaccacctttcagacgaatccctcattactacgccgagaacgtctccatggcccacctctgcaatctccacggatggactcccaggacggaaccaaggcgagtcttcgacgccatcatcttcagcaacgagctcgacctcctagagctcaggtggcaggagctaggaccatacgtttcaaaattcgtaattcttgaatccaataccaccttcacaggcatcccaaagcctctcttcttcgactccaacaaggagaggttcgccttcgccgagggtaagatagtgcacggagtcttccccgggaagaagcgtttgcaccacgaccaacaacaacaagaccctttcttgctcgaaggccggcaacgcgtggctatgaactggctcctcagagaagctaatgtatccgatggagacgcggtgataatgtcggatgcagatgagatccccagtcctcacaccgtgaagttcttacagtggtgcgacgggataccggatgtgatgcatctggagatgagggattacatgtattccttcgagttcccggtcgattacagcagctggagagcgtccgtgcatatatacagcaggaaatggactcactaccgccactcacgacagaccgacttgatactgtccgacgccgggtggcattgcagcttctgtttcagacgtctcggcgagttcgtgttcaagatgaaagggtatagccacgcggatagagtgaagcgcaaggagtttttggactactccaggatacagaaacacatatgtaaaggatatgatctctttgacatgcttcctgaggaatacagcttcaaagatttgattagcaaaatcggacccatcccgccttctgcatccgctgtacatctgcctgcgtttttgattcagaatgctgcccgctttcggtttctcctaccaggaggctgtctcagagagccttag

SEQ ID NO: 1649 - protein, 363 aa, Brassica napus
MKIRSLRQPPPKLVLLPTLVIIVSSTCLFGILTNLQTLSYLLRPLWDKPPPPFRRIPHYYAENVSMAHLCNLHGWTPRTEPRRVFDAIIFSNELDLLELRWQELGPYVSKFVILESNTTFTGIPKPLFFDSNKERFAFAEGKIVHGVFPGKKRLHHDQQQQDPFLLEGRQRVAMNWLLREANVSDGDAVIMSDADEIPSPHTVKFLQWCDGIPDVMHLEMRDYMYSFEFPVDYSSWRASVHIYSRKWTHYRHSRQTDLILSDAGWHCSFCFRRLGEFVFKMKGYSHADRVKRKEFLDYSRIQKHICKGYDLFDMLPEEYSFKDLISKIGPIPPSASAVHLPAFLIQNAARFRFLLPGGCLREP

SEQ ID NO: 1650 - DNA, 1170 bp, Brassica napus
  CDS (1)..(1170)
atgtccgatggttattacaattcgaagaagaccgatgatatctgcgacgatgtttgtggacagcagggctctaaagcagcagcaacaatctcacgcctcaaatgcgtcctccgaggcttcgacgtcagaactctcctctgcctcttcatcctcatgcccttcgccatcttcgcaatctacctccacggccaaaagctcacttacttcttcagacccctctgggaatcccctccaaagcccttccacaccatcccccactaccacaccgagaacgcaaccatgcaatctctctgccgcctccacggctggggagtcagagactcacctcgccgcgtttacgacgcggttctcttcagcaacgagatagacctcttgaccgtccgctggaaagagctttacccttacgttacacagttcgtcctcctcgagtcaaactccaccttcaccggtttgcctaaaccgtttgtcttcaaaagcaacaaagaccagttcgccttcgtggaggagcggctgacctacgggaacatcggaggacggtttagaaaaggagagaaccctttcgtcgaggaggcctttcagcgtgtggcgttggataagcttcttagaatcgctggcattgaagaggatgatcttctgatcatgtcggacgtcgatgagattcccagcgttcacaccatcaacctcttgagatggtgcgacgatatccctccggtccttcacctccagcttaagaattatttatactctttcgagtactacgtcgacagcaagagctggagagcttctgtgcaccgttacagtccggggaagactcggtacgcgcattttcgacagagcgatgtgatgttatctgactctggatggcactgcagcttctgtttccgctatataaatgattttgtgttcaagatgaaggcttacagtcactcggaccgtgtcagattttctcattacctgaatcccattaggattcaggatgttatatgcaaaggaactgatttgtttgacatgttgcctgaggagtacacgttcaaggagatgattggtaaaatggggcctgtgcctcgctcttattcggctgttcatctaccttcttacctgctggagaacgctgagaagtataagtacttgttacctggtaattgcgtgagagaaagacagacatggtaa

SEQ ID NO: 1651 - protein, 389 aa, Brassica napus
MSDGYYNSKKTDDICDDVCGQQGSKAAATISRLKCVLRGFDVRTLLCLFILMPFAIFAIYLHGQKLTYFFRPLWESPPKPFHTIPHYHTENATMQSLCRLHGWGVRDSPRRVYDAVLFSNEIDLLTVRWKELYPYVTQFVLLESNSTFTGLPKPFVFKSNKDQFAFVEERLTYGNIGGRFRKGENPFVEEAFQRVALDKLLRIAGIEEDDLLIMSDVDEIPSVHTINLLRWCDDIPPVLHLQLKNYLYSFEYYVDSKSWRASVHRYSPGKTRYAHFRQSDVMLSDSGWHCSFCFRYINDFVFKMKAYSHSDRVRFSHYLNPIRIQDVICKGTDLFDMLPEEYTFKEMIGKMGPVPRSYSAVHLPSYLLENAEKYKYLLPGNCVRERQTW

SEQ ID NO: 1652 - DNA, 1179 bp, Glycine max
  CDS (1)..(1179)
atgtggtgtgcggtgagagattccggtggccattactgccctaagaagaccgatgatttatgcggcgacgtttgtggccaggagtcaagtcaagtatcgggcatgtcaagagtgcgctgcattttacgcggcgtggatgtaaaaacctgcatatttctttttgctgttgtgccaatgtgcatctttggaatatacttgcatggacagaaaatctcctacttcctgcggccactatgggagaaaccacccaagcctttccatgtcattccacattactacaacgaaaatgtgtcgatggagaatctctgcagacttcacggctggggagtccgtgagttcccgagacgtgtgtatgacgctgtgttgttcagtaacgaattggaaatactaaacttgcgctggagagagttgtatccttacataacacagtttgttctccttgagtcaaattccacatttactggtaggccaaaaccttttgttttcaaaggcaatcgggagcagttcaaattcgtggagtctcggttaacttatggaactattggtgggaggttcaagaaaggagaaaacccgtttgttgaggaggcatatcagcgggtggcattggatcaactccttaagatagctggtattactgatgatgacttgttgattatgtctgatgttgacgagattccgagtgctcacactattaacctcttgaggtggtgtgatgatgtgccttcagtccttcatcttcagctgaagaactatctatactcctttgagtttctcttggatgataacagctggagagcttctgttcacagatatcagagtggtaagacaaggtatgctcattaccgccagtctgatgacttattggcggatgctggttggcattgcagcttttgcttccgctatatcagcgatttcgtctttaagatgaaagcctacagtcataatgacagagtcagattctctcattatttaaatcccaaaagaattcaagatgtaatctgcaaaggggctgatttatttgacatgctaccagaggagtacaccttcaaggaaatcattggtaaaatggggccgataccccattcctattctgcagttcatcttcctgcttatctactggaaaatgctgagaagtataaatttctgttgcctggaaattgcttgagagagtccagatga

SEQ ID NO: 1653 - protein, 392 aa, Glycine max
MWCAVRDSGGHYCPKKTDDLCGDVCGQESSQVSGMSRVRCILRGVDVKTCIFLFAVVPMCIFGIYLHGQKISYFLRPLWEKPPKPFHVIPHYYNENVSMENLCRLHGWGVREFPRRVYDAVLFSNELEILNLRWRELYPYITQFVLLESNSTFTGRPKPFVFKGNREQFKFVESRLTYGTIGGRFKKGENPFVEEAYQRVALDQLLKIAGITDDDLLIMSDVDEIPSAHTINLLRWCDDVPSVLHLQLKNYLYSFEFLLDDNSWRASVHRYQSGKTRYAHYRQSDDLLADAGWHCSFCFRYISDFVFKMKAYSHNDRVRFSHYLNPKRIQDVICKGADLFDMLPEEYTFKEIIGKMGPIPHSYSAVHLPAYLLENAEKYKFLLPGNCLRESR

SEQ ID NO: 1654 - DNA, 1167 bp, Hordeum vulgare
  CDS (1)..(1167)
atgcccgaggccagccgctacacccacaagaaggacgacggcatctgcagcagcgtctgcggcgagcccacctcaaaggcagttatggccatgtcaaggctcaagtgtgcgcttcgggggtttgatatcagggcacttctggctctcttcattggtgtgccgctggtaatgttaataatatataagcatggccagaaggtcacatacttcctccggccaatctgggaatctccgcccgagcccttcaagataatccctcactactacaatgagaatgtcaccatggagaacctctgcaagttacatgggtggaaagtcagggagaccccacgccgtgttttcgatgctgtgctcttcagtaatgagcttgatatccttgaacttcgttggaatgaactcagcccctatgtgtcagagttcgtcctgcttgagtccaactcaactttcactggcgtgataaagccactcttcttcaaggaaaaccgccatcgatttagatttgctgaatcgcggctgacctatggcacatatgggggaagattcatgaagggcgaaaatccatttgttgaggagtcgtatcagagggttgccctggaccagcttcttaggattgcaagaattgaagatgacgacatattgatcatgtcagatgttgatgaaatcccaagtggccacaccatcaatctcttgagatggtgcgacgacacgcctaagatagtccatcttcagctcaggaattatctgtactcatttgagttttttctggatgacaagagttggagggcgtcaattcacaggtacgtatctgggaagacaagatatgcgcattttcggcagacagatgtgcttcttgccgattcagggtggcactgcagtttttgtttccggcacatcagtgattttgtcttcaagatgcaagcttatagccatgtggataggatcagattcaagtacttcctgaaccatgagaggattcaagatgtcatctgcagaggggcggatctttttgacatgcttcctgaagagcatacgttccaagaaatcattgcgaagttgggccccattccaagcacattctctgctgttcatcttcctagttatctgcttcagaattttgaccggtaccggtatcttctcccagggaactgcaggagagaaagtggctag

SEQ ID NO: 1655 - protein, 388 aa, Hordeum vulgare
MPEASRYTHKKDDGICSSVCGEPTSKAVMAMSRLKCALRGFDIRALLALFIGVPLVMLIIYKHGQKVTYFLRPIWESPPEPFKIIPHYYNENVTMENLCKLHGWKVRETPRRVFDAVLFSNELDILELRWNELSPYVSEFVLLESNSTFTGVIKPLFFKENRHRFRFAESRLTYGTYGGRFMKGENPFVEESYQRVALDQLLRIARIEDDDILIMSDVDEIPSGHTINLLRWCDDTPKIVHLQLRNYLYSFEFFLDDKSWRASIHRYVSGKTRYAHFRQTDVLLADSGWHCSFCFRHISDFVFKMQAYSHVDRIRFKYFLNHERIQDVICRGADLFDMLPEEHTFQEIIAKLGPIPSTFSAVHLPSYLLQNFDRYRYLLPGNCRRESG

SEQ ID NO: 1656 - DNA, 1167 bp, Brassica napus
  CDS (1)..(1167)
atgtccgatggttattacaattcgaagaagaccgatgatatctgcgacgatgtttgtggacagggatctaaagcaggagcaacaatctcacgcctcaaatgcgtcctccgaggcttcgacgtaagaacgctcctatgcctcttcatcctcgtgccattttccatcttcgcaatctacctccacggccagaagctcacttacttcttcagacccctctgggaatcccctccaaagcccttccacaccatccctcactaccacaccgagaacgcaacgatgcaatctctctgctccctccacggctggggagtcagagactcacctcgccgcgtttacgacgccgtcctcttcagcaacgagaaagatctcttgacagtccgctggaaagagctctacccttatgtgactcagttcgtcctcctcgagtcaaactccaccttcaccggtttgcctaaaccgtttgtcttcaaaagcaacaaggaacagttcagcttcgtggaggagcggctgacgtacgggaacatcggaggacggtttagaaaaggagagaatcctttcgttgaagaggcgtttcagcgtgttgcgttggataagcttcttagaatcgctggcattgaagaggatggtttgttgattatgtctgatgttgatgagatccccagcgctcacaccatcaacctcttgagatggtgtgacgatatccctccggtccttcacctccagcttaagaattatttatactctttcgagtactacgtcgatagcaagagctggagagcttctatacaccgttacaacccagggaagactcggtacgcgcattttcgacagagcgatgtgatgttatctgactctggatggcactgcagcttctgtttccgttatataaatgattttgtgttcaagatgaaggcttacagtcactcggaccgtgtgaggttctctcattacctgaatcctgttaggattcaagatgttatatgcaaagggactgatttgtttgacatgttgcctgaggagtacactttcaaggagatgattggtaaaatgggacctgtgcctcgttcttattcagctgttcatctgccttcttacctgctggagaacgctgagaagtataaatacttgttacctggtaactgcgtgagagaaagacagactgggtga

SEQ ID NO: 1657 - protein, 388 aa, Brassica napus
MSDGYYNSKKTDDICDDVCGQGSKAGATISRLKCVLRGFDVRTLLCLFILVPFSIFAIYLHGQKLTYFFRPLWESPPKPFHTIPHYHTENATMQSLCSLHGWGVRDSPRRVYDAVLFSNEKDLLTVRWKELYPYVTQFVLLESNSTFTGLPKPFVFKSNKEQFSFVEERLTYGNIGGRFRKGENPFVEEAFQRVALDKLLRIAGIEEDGLLIMSDVDEIPSAHTINLLRWCDDIPPVLHLQLKNYLYSFEYYVDSKSWRASIHRYNPGKTRYAHFRQSDVMLSDSGWHCSFCFRYINDFVFKMKAYSHSDRVRFSHYLNPVRIQDVICKGTDLFDMLPEEYTFKEMIGKMGPVPRSYSAVHLPSYLLENAEKYKYLLPGNCVRERQTG

SEQ ID NO: 1658 - DNA, 1173 bp, Triticum aestivum
  CDS (1)..(1173)
atggagtccgccggctactacaccaactgcaagaagaccgacggaatctgcgagggcatctgcgacggcgagcatggttcaaaggctgttctgagcatgtcaaggctgaagtgtgcacttcgggggtttgatttaaaggcccttctgttcctgctgattggtgtgccgattataatctttgtcatatatgttcatggccagaaggtcacttatttcctcagaccaatctgggagaagcccccgaagcctttcacagtacttcctcactactatcatgaaaatgcttcgatggcaaacctctgcaagttgcatggatggaaggtccgggaggctccacggcgtgtctttgacgcggtgcttttcagcaacgagctcgacattcttgatatccgttggcacgagcttagcccgtatgtgtcagaatttgtgctgctcgagtccaattcaacatttactggccttgaaaagaagctccacttcaaggaaaaccgccaaaagtttgagtttgctgaatcacggttgacctatggtatgataggggggaggtttgtgaagggtgagaacccatttgtggaggaatcatatcagagagtcgcgcttgaccagcttctaaagatcgccgggatcaccgacgatgacctgttgattatgtctgatgttgatgagatcccaagtggtcatacaatcaacctgttgagatggtgcgatgatacgcctgagatacttcaccttcagctgaagaactatctctactcgtttcaatttatgcttgatgataagagttggagggcttcggtacacagataccgagcggggaagacgaggtatgcccattaccggcaaactgacgaccttctggcagactcagggtggcactgcagcttttgctttcggtacataaatgattttgtcttcaaaatgaaagcctacagccatgtggaccggatcagattcagctacttcttgaaccccaaaagaattcagcatgtgatatgccaaggggctgatctctttgatatgcttccggaggagtacacgttccaagagatcatcgccaagcttgggccgatcccaagtacgtattcggcggttcatcttcccgcctatctgctcgagaaggttgatcagtacaggtatcttcttcctggcaactgcatgagagaaagtgggtag

SEQ ID NO: 1659 - protein, 390 aa, Triticum aestivum
MESAGYYTNCKKTDGICEGICDGEHGSKAVLSMSRLKCALRGFDLKALLFLLIGVPIIIFVIYVHGQKVTYFLRPIWEKPPKPFTVLPHYYHENASMANLCKLHGWKVREAPRRVFDAVLFSNELDILDIRWHELSPYVSEFVLLESNSTFTGLEKKLHFKENRQKFEFAESRLTYGMIGGRFVKGENPFVEESYQRVALDQLLKIAGITDDDLLIMSDVDEIPSGHTINLLRWCDDTPEILHLQLKNYLYSFQFMLDDKSWRASVHRYRAGKTRYAHYRQTDDLLADSGWHCSFCFRYINDFVFKMKAYSHVDRIRFSYFLNPKRIQHVICQGADLFDMLPEEYTFQEIIAKLGPIPSTYSAVHLPAYLLEKVDQYRYLLPGNCMRESG

SEQ ID NO: 1660 - DNA, 23 bp, Artificial sequence
  primer
atgtccgatggatacatcaattc

SEQ ID NO: 1661 - DNA, 24 bp, Artificial sequence
  primer
tcatataaaccctgtctgtttttc

SEQ ID NO: 1662 - protein, 492 aa, Artificial sequence
  consensus sequence
  Variant (3)..(3): Xaa in position 3 is any amino acid
  Variant (5)..(6): Xaa in position 5 to 6 is any amino acid
  Variant (7)..(7): Xaa in position 7 is any or no amino acid
  Variant (9)..(9): Xaa in position 9 is any amino acid
  Variant (10)..(72): Xaa in position 10 to 72 is any or no amino acid
  Variant (75)..(75): Xaa in position 75 is any amino acid
  Variant (76)..(76): Xaa in position 76 is any or no amino acid
  Variant (78)..(78): Xaa in position 78 is any amino acid
  Variant (82)..(82): Xaa in position 82 is any amino acid
  Variant (84)..(89): Xaa in position 84 to 89 is any amino acid
  Variant (91)..(93): Xaa in position 91 to 93 is any amino acid
  Variant (94)..(94): Xaa in position 94 is any or no amino acid
  Variant (96)..(101): Xaa in position 96 to 101 is any amino acid
  Variant (103)..(103): Xaa in position 103 is any amino acid
  Variant (108)..(109): Xaa in position 108 to 109 is any amino acid
  Variant (115)..(115): Xaa in position 115 is any amino acid
  Variant (118)..(118): Xaa in position 118 is any amino acid
  Variant (124)..(126): Xaa in position 124 to 126 is any amino acid
  Variant (131)..(131): Xaa in position 131 is any amino acid
  Variant (134)..(135): Xaa in position 134 to 135 is any amino acid
  Variant (137)..(138): Xaa in position 137 to 138 is any amino acid
  Variant (141)..(141): Xaa in position 141 is any amino acid
  Variant (146)..(147): Xaa in position 146 to 147 is any amino acid
  Variant (149)..(150): Xaa in position 149 to 150 is any amino acid
  Variant (155)..(155): Xaa in position 155 is any amino acid
  Variant (164)..(164): Xaa in position 164 is any amino acid
  Variant (166)..(166): Xaa in position 166 is any amino acid
  Variant (168)..(169): Xaa in position 168 to 169 is any amino acid
  Variant (172)..(172): Xaa in position 172 is any amino acid
  Variant (175)..(175): Xaa in position 175 is any amino acid
  Variant (178)..(180): Xaa in position 178 to 180 is any amino acid
  Variant (193)..(194): Xaa in position 193 to 194 is any amino acid
  Variant (196)..(196): Xaa in position 196 is any amino acid
  Variant (198)..(198): Xaa in position 198 is any amino acid
  Variant (200)..(201): Xaa in position 200 to 201 is any amino acid
  Variant (203)..(205): Xaa in position 203 to 205 is any amino acid
  Variant (206)..(206): Xaa in position 206 is any or no amino acid
  Variant (208)..(208): Xaa in position 208 is any amino acid
  Variant (210)..(210): Xaa in position 210 is any amino acid
  Variant (212)..(212): Xaa in position 212 is any amino acid
  Variant (218)..(219): Xaa in position 218 to 219 is any amino acid
  Variant (224)..(224): Xaa in position 224 is any amino acid
  Variant (228)..(228): Xaa in position 228 is any amino acid
  Variant (229)..(232): Xaa in position 229 to 232 is any or no amino acid
  Variant (236)..(236): Xaa in position 236 is any amino acid
  Variant (239)..(240): Xaa in position 239 to 240 is any amino acid
  Variant (247)..(247): Xaa in position 247 is any amino acid
  Variant (249)..(251): Xaa in position 249 to 251 is any amino acid
  Variant (255)..(256): Xaa in position 255 to 256 is any amino acid
  Variant (271)..(271): Xaa in position 271 is any amino acid
  Variant (282)..(283): Xaa in position 282 to 283 is any amino acid
  Variant (285)..(286): Xaa in position 285 to 286 is any amino acid
  Variant (290)..(290): Xaa in position 290 is any amino acid
  Variant (292)..(292): Xaa in position 292 is any amino acid
  Variant (301)..(302): Xaa in position 301 to 302 is any amino acid
  Variant (304)..(304): Xaa in position 304 is any amino acid
  Variant (311)..(311): Xaa in position 311 is any amino acid
  Variant (313)..(313): Xaa in position 313 is any amino acid
  Variant (315)..(315): Xaa in position 315 is any amino acid
  Variant (316)..(316): Xaa in position 316 is any or no amino acid
  Variant (324)..(324): Xaa in position 324 is any amino acid
  Variant (327)..(327): Xaa in position 327 is any amino acid
  Variant (329)..(330): Xaa in position 329 to 330 is any amino acid
  Variant (334)..(334): Xaa in position 334 is any amino acid
  Variant (344)..(344): Xaa in position 344 is any amino acid
  Variant (346)..(347): Xaa in position 346 to 347 is any amino acid
  Variant (349)..(349): Xaa in position 349 is any amino acid
  Variant (353)..(353): Xaa in position 353 is any amino acid
  Variant (358)..(358): Xaa in position 358 is any amino acid
  Variant (361)..(361): Xaa in position 361 is any amino acid
  Variant (364)..(366): Xaa in position 364 to 366 is any amino acid
  Variant (370)..(370): Xaa in position 370 is any amino acid
  Variant (374)..(374): Xaa in position 374 is any amino acid
  Variant (378)..(378): Xaa in position 378 is any amino acid
  Variant (380)..(380): Xaa in position 380 is any amino acid
  Variant (393)..(393): Xaa in position 393 is any amino acid
  Variant (397)..(397): Xaa in position 397 is any amino acid
  Variant (399)..(399): Xaa in position 399 is any amino acid
  Variant (404)..(406): Xaa in position 404 to 406 is any amino acid
  Variant (413)..(413): Xaa in position 413 is any amino acid
  Variant (417)..(424): Xaa in position 417 to 424 is any amino acid
  Variant (425)..(483): Xaa in position 425 to 483 is any or no amino acid
  Variant (488)..(488): Xaa in position 488 is any amino acid
  Variant (490)..(490): Xaa in position 490 is any amino acid
KKXDXXXCXXXXXXXXXXXXXXXXXXXXXXXXXXXXXXXXXXXXXXXXXXXXXXXXXXXXXXXXXXXXXXXXSRXXCXLRGXDXXXXXXLXXXXPXXXXXXYXHGQKXXYFLRPXWEXPPKPFXXXPHYYXENXXMXXLCXLHGWXXRXXPRRVXDAVLFSNEXDXLXXRWXELXPYXXXFVLLESNSTFTGXXKXLXFXXNXXXXFXFXEXRLTYGXXGGRFXKGEXXXXXNPFXEEXXQRVALDXLXXXAGIXXDDLLIMSDVDEIPSXHTINLLRWCDXXPXXLHLXLXNYLYSFEFXXDXKSWRASXHXYXXGKTRYAHXRQXDXXLADXGWHCSFCFRXIXXFXFKMXAYSHXDRXRFXXXLNPXRIQXVICXGXDLFDMLPEEYTFXEIIXKXGPIPXXXSAVHLPXYLLXXXXXXXXXXXXXXXXXXXXXXXXXXXXXXXXXXXXXXXXXXXXXXXXXXXXXXXXXXXXXXXXXXXLLPGXCXRE

SEQ ID NO: 1663 - protein, 60 aa, Artificial sequence
  protein pattern
  Variant (2)..(2): Xaa in position 2 is any amino acid
  Variant (12)..(12): Xaa in position 12 is any amino acid
  Variant (14)..(14): Xaa in position 14 is Asn or Ser
  Variant (15)..(15): Xaa in position 15 is Asp or Glu
  Variant (17)..(17): Xaa in position 17 is Ala, Ile or Val
  Variant (21)..(21): Xaa in position 21 is any amino acid
  Variant (26)..(26): Xaa in position 26 is any amino acid
  Variant (29)..(29): Xaa in position 29 is Ile or Val
  Variant (32)..(33): Xaa in position 32 to 33 is any amino acid
  Variant (34)..(34): Xaa in position 34 is Phe or Tyr
  Variant (38)..(38): Xaa in position 38 is any amino acid
  Variant (40)..(40): Xaa in position 40 is Ile or Val
  Variant (42)..(42): Xaa in position 42 is Asp, His, Lys or Arg
  Variant (43)..(43): Xaa in position 43 is Ile or Val
  Variant (46)..(46): Xaa in position 46 is any amino acid
  Variant (48)..(48): Xaa in position 48 is Ala, Ser or Thr
  Variant (54)..(54): Xaa in position 54 is Ile or Leu
  Variant (58)..(58): Xaa in position 58 is His or Tyr
DXGWHCSFCFRXIXXFXFKMXAYSHXDRXRFXXXLNPXRXQXXICXGXDLFDMXPEEXTF

SEQ ID NO: 1664 - protein, 60 aa, Artificial sequence
  protein pattern
  Variant (2)..(2): Xaa in position 2 is any amino acid
  Variant (5)..(5): Xaa in position 5 is Phe, Ile, Leu or Val
  Variant (6)..(6): Xaa in position 6 is Ser or Thr
  Variant (9)..(9): Xaa in position 9 is Phe or Leu
  Variant (12)..(12): Xaa in position 12 is Ile or Leu
  Variant (15)..(15): Xaa in position 15 is any amino acid
  Variant (19)..(19): Xaa in position 19 is Glu or Pro
  Variant (21)..(23): Xaa in position 21 to 23 is any amino acid
  Variant (24)..(24): Xaa in position 24 is Pro or Thr
  Variant (27)..(27): Xaa in position 27 is His or Tyr
  Variant (28)..(29): Xaa in position 28 to 29 is any amino acid
  Variant (31)..(31): Xaa in position 31 is Ala, Thr or Val
  Variant (32)..(32): Xaa in position 32 is Ser or Thr
  Variant (34)..(35): Xaa in position 34 to 35 is any amino acid
  Variant (38)..(38): Xaa in position 38 is any amino acid
  Variant (43)..(44): Xaa in position 43 to 44 is any amino acid
  Variant (46)..(46): Xaa in position 46 is Asp or Glu
  Variant (47)..(47): Xaa in position 47 is any amino acid
  Variant (52)..(52): Xaa in position 52 is Phe or Tyr
  Variant (55)..(55): Xaa in position 55 is Ala or Val
HXQKXXYFXRPXWEXPPKXFXXXXHYXXXNXXMXXLCXLHGWXXRXXPRRVXDAXLFSNE

SEQ ID NO: 1665 - protein, 57 aa, Artificial sequence
  protein pattern
  Variant (3)..(3): Xaa in position 3 is any or no amino acid
  Variant (6)..(6): Xaa in position 6 is Ile or Leu
  Variant (16)..(16): Xaa in position 16 is any amino acid
  Variant (20)..(20): Xaa in position 20 is Asp or Asn
  Variant (27)..(27): Xaa in position 27 is Asp, Glu or Gly
  Variant (28)..(28): Xaa in position 28 is any amino acid
  Variant (30)..(30): Xaa in position 30 is any amino acid
  Variant (31)..(31): Xaa in position 31 is Ile or Val
  Variant (35)..(35): Xaa in position 35 is Gln or Arg
  Variant (37)..(37): Xaa in position 37 is Lys or Arg
  Variant (43)..(43): Xaa in position 43 is Phe or Tyr
  Variant (44)..(44): Xaa in position 44 is Glu or Gln
  Variant (45)..(45): Xaa in position 45 is Phe or Tyr
  Variant (46)..(47): Xaa in position 46 to 47 is any amino acid
  Variant (49)..(50): Xaa in position 49 to 50 is any amino acid
  Variant (56)..(56): Xaa in position 56 is Ile or Val
DDXLLXMSDVDEIPSXHTIXLLRWCDXXPXXLHLXLXNYLYSXXXXXDXXSWRASXH

SEQ ID NO: 1666 - protein, 36 aa, Artificial sequence
  protein pattern
  Variant (4)..(4): Xaa in position 4 is Ala or Gly
  Variant (6)..(6): Xaa in position 6 is Leu or Met
  Variant (9)..(9): Xaa in position 9 is Ile or Val
  Variant (11)..(11): Xaa in position 11 is any or no amino acid
  Variant (13)..(13): Xaa in position 13 is any amino acid
  Variant (14)..(14): Xaa in position 14 is any or no amino acid
  Variant (16)..(16): Xaa in position 16 is Ala or Gly
  Variant (21)..(21): Xaa in position 21 is Ala, Gly or Ser
  Variant (22)..(22): Xaa in position 22 is His or Tyr
  Variant (24)..(24): Xaa in position 24 is Ile or Leu
  Variant (25)..(27): Xaa in position 25 to 27 is any amino acid
  Variant (28)..(28): Xaa in position 28 is Asp, Glu or Ser
  Variant (29)..(32): Xaa in position 29 to 32 is any amino acid
  Variant (33)..(33): Xaa in position 33 is Ile or Leu
  Variant (35)..(35): Xaa in position 35 is any amino acid
  Variant (36)..(36): Xaa in position 36 is Ala or Gly
EIIXKXGPXPXSXXSXVHLPXXLXXXXXXXXXXLXX

SEQ ID NO: 1667 - protein, 22 aa, Artificial sequence
  protein pattern
  Variant (4)..(4): Xaa in position 4 is any amino acid
  Variant (7)..(7): Xaa in position 7 is Ala or Ser
  Variant (8)..(8): Xaa in position 8 is Phe or Tyr
  Variant (11)..(11): Xaa in position 11 is Ile or Val
  Variant (15)..(15): Xaa in position 15 is any amino acid
  Variant (17)..(18): Xaa in position 17 to 18 is any or no amino acid
  Variant (20)..(21): Xaa in position 20 to 21 is any or no amino acid
NPFXEEXXQRXALDXLXXIXXA

SEQ ID NO: 1668 - protein, 21 aa, Artificial sequence
  protein pattern
  Variant (2)..(2): Xaa in position 2 is any amino acid
  Variant (4)..(4): Xaa in position 4 is Ala, Ile or Val
  Variant (5)..(5): Xaa in position 5 is Glu or Lys
  Variant (6)..(6): Xaa in position 6 is Glu, Pro or Ser
  Variant (12)..(13): Xaa in position 12 to 13 is any amino acid
  Variant (18)..(18): Xaa in position 18 is any amino acid
  Variant (21)..(21): Xaa in position 21 is Glu or Gln
FXFXXXRLTYGXXGGRFXKGX

SEQ ID NO: 1669 - protein, 15 aa, Artificial sequence
  protein pattern
  Variant (2)..(2): Xaa in position 2 is any amino acid
  Variant (3)..(3): Xaa in position 3 is Ala, Pro, Ser or Thr
  Variant (11)..(11): Xaa in position 11 is Phe or Tyr
  Variant (13)..(13): Xaa in position 13 is Gln or Arg
  Variant (14)..(14): Xaa in position 14 is Ala, Gly, Ser or Thr
  Variant (15)..(15): Xaa in position 15 is Asp or Asn
YXXGKTRYAHXRXXX

SEQ ID NO: 1670 - DNA, 1809 bp, Arabidopsis thaliana
  CDS (1)..(1809)
atggcgagtgttgaaggtgatgatgatttcggaagttcttcgtcaaggtcttatcaagatcaactatacacagagctatggaaagtttgtgcaggtccattagtggaagttcctcgtgctcaagagagagttttctacttccctcagggtcacatggaacaacttgtggcgtcaactaatcaaggaatcaattcagaagaaatacctgtttttgatcttcctccaaagatactttgtcgagttcttgatgtcactttaaaggcggagcatgaaacagatgaggtttacgctcagatcacattacaaccagaggaagatcaaagtgaaccaacaagtcttgatccacctattgttggaccaactaagcaagagtttcattcgtttgttaagattttaacggcttcagatacaagcactcatggtggattctctgttcttcgtaaacacgccactgaatgcttgccttctttggatatgacacaagctactcctactcaagaacttgtgactagagatcttcatggctttgaatggaggtttaagcatatattcagaggacaaccacggaggcatttgcttactacgggttggagtacatttgtatcctcgaaaagacttgtagctggagatgcttttgtgttcttgaggggtgagaatggggatttacgggttggagtgagacgattagctcggcatcaaagcacaatgcctacttcggttatttcaagtcagagcatgcatttgggagttcttgctacagcttctcatgctgtgcgtacaacaacaatctttgttgtcttttacaagcctaggataagccaattcatagttggggtgaacaagtatatggaagctataaagcatggattttctctcggtacccgattcagaatgaggtttgaaggagaagagtctcctgagagaatatttactggtacgattgtgggaagtggagatctatcttcacaatggccagcttctaaatggaggtcattgcaggtacaatgggatgagccaacaacagttcagagaccagataaagtctcaccatgggagatagagcctttcttggcaacttccccaatttcaactcctgctcaacaaccacaatcgaaatgcaagcggtcaagacccatcgagccatcagttaaaacaccagccccacctagtttcttgtacagcctccctcagagccaagattccattaatgcatcccttaaactgtttcaagatccatcacttgagagaatttcaggtggatactcctcaaacaacagcttcaaacccgagactcctcctcctccaacgaattgtagctataggttgtttggatttgatctcacaagcaattctcctgctccaatccctcaagacaagcaaccgatggatacttgtggagctgccaagtgtcaagaacccatcactccaacctcaatgagtgagcagaagaagcaacaaacatcaagaagtcgaactaaagtgcaaatgcaaggcattgcggttggtcgtgcggttgatttaacactgttgaaatcttacgatgaactgattgatgagcttgaggagatgtttgagattcaaggacagcttcttgcccgagacaaatggatcgttgtcttcactgatgatgaaggagatatgatgcttgctggtgatgatccgtggaatgagttttgcaagatggcaaagaagatatttatatattcgagcgatgaggttaagaaaatgacaacgaaactgaagatttcttcgtcgttagagaatgaggaatatggtaatgaatcattcgaaaatcgtagtagggggtga

SEQ ID NO: 1671 - protein, 602 aa, Arabidopsis thaliana
MASVEGDDDFGSSSSRSYQDQLYTELWKVCAGPLVEVPRAQERVFYFPQGHMEQLVASTNQGINSEEIPVFDLPPKILCRVLDVTLKAEHETDEVYAQITLQPEEDQSEPTSLDPPIVGPTKQEFHSFVKILTASDTSTHGGFSVLRKHATECLPSLDMTQATPTQELVTRDLHGFEWRFKHIFRGQPRRHLLTTGWSTFVSSKRLVAGDAFVFLRGENGDLRVGVRRLARHQSTMPTSVISSQSMHLGVLATASHAVRTTTIFVVFYKPRISQFIVGVNKYMEAIKHGFSLGTRFRMRFEGEESPERIFTGTIVGSGDLSSQWPASKWRSLQVQWDEPTTVQRPDKVSPWEIEPFLATSPISTPAQQPQSKCKRSRPIEPSVKTPAPPSFLYSLPQSQDSINASLKLFQDPSLERISGGYSSNNSFKPETPPPPTNCSYRLFGFDLTSNSPAPIPQDKQPMDTCGAAKCQEPITPTSMSEQKKQQTSRSRTKVQMQGIAVGRAVDLTLLKSYDELIDELEEMFEIQGQLLARDKWIVVFTDDEGDMMLAGDDPWNEFCKMAKKIFIYSSDEVKKMTTKLKISSSLENEEYGNESFENRSRG

SEQ ID NO: 1672 - DNA, 2808 bp, Arabidopsis thaliana
  CDS (1)..(2808)
atgagattatcttcagctgggtttaatcctcaacctcatgaagttacaggagagaaaagagttcttaattctgagctctggcatgcttgtgctggtcctcttgtctcactacctcctgttggaagcagagttgtgtattttcctcaaggtcacagtgaacaggttgctgcttcgaccaacaaagaagtagatgctcatataccaaattatccgagcttgcatccgcagcttatctgtcagcttcataatgttacaatgcatgctgatgtggagactgatgaagtctatgcacagatgactttgcaaccgttgaatgcgcaagagcaaaaagatccttaccttcccgcggaattaggtgtcccaagtagacagcctacaaactatttctgtaaaactctgactgctagtgatacaagcactcacggaggtttttctgtacctcgccgagctgctgagaaagttttccctcccttggattactcgcagcagccaccagctcaagagttaatggcgagggatctgcatgataatgaatggaagttcaggcatattttccgaggccaaccaaagagacatctccttaccacgggttggagcgtatttgtgagtgctaaaaggcttgttgctggtgactctgttcttttcatctggaacgataagaatcaattacttcttggtataagacgagccaaccgaccacaaactgtcatgccttcatctgttttgtcaagtgacagtatgcatttaggccttcttgctgcagcagctcatgctgccgctacaaacagccgattcaccatcttctataacccgagggcgagtccatcagagtttgttatacccctggctaagtatgtgaaagcggtttatcacactcgcgtctctgttggtatgcggtttaggatgctgtttgaaactgaagaatctagtgttcgtcggtacatgggtacaataactggcatttgtgatctagatcctactcgttgggctaattcgcattggcgatctgtcaaggttgggtgggacgaatctactgcaggagagagacagccaagggtttcattgtgggagattgagcctttaacaacattccctatgtatccatctccttttcctctcaggcttaaacggccgtggcctcctggtctcccatctttccatggccttaaagaagatgatatgggtatgagtatgagttcaccgcttatgtgggatcgaggactccaatctctaaactttcaaggtatgggagtaaacccgtggatgcagccgagacttgatacgtcgggcttgcttggtatgcaaaatgatgtgtaccaagcaatggctgcagctgcccttcaagacatgagaggcattgatcctgcaaaagctgctgcttcacttcttcagttccaaaattcgccggggttctcaatgcaatctccgtccttagtgcagccgcagatgctgcagcagcaactctctcagcagcagcaacaactctctcagcagcagcagcagcagcaacagctctcccaacagcagcagcaacagctctctcaacagcagcagcagcagctctctcaacagcagcagcaacaactctctcagcagcagcagcaacaggcgtatcttggcgttcctgaaacccaccagcctcagtctcaggctcaatcacagtcaaacaatcatctttctcagcagcagcagcaagtagtggataatcataatccgtctgcgtccagtgctgctgttgtttccgctatgtctcaatttggttctgcttctcagcccaacacgtcaccactccagtccatgacctctctgtgtcatcagcaaagcttctccgataccaacggaggaaacaatcctatttctccacttcacactcttctcagtaacttctctcaagacgaatcttctcaactgctccacctcactagaacaaactctgcaatgacttcatccggttggccatcaaagcgtcctgcagttgattcatcgttccagcactctggagccggtaataataacactcaatccgtattggagcaactgggacagtcccacacaagcaacgttcctccaaacgctgtctcgttgcctccatttcccggtggtagagagtgctcgatcgagcaagaaggaagcgcctcagacccgcatagccatcttctctttggagtcaatatagattcatcttctcttttgatgccgaacggaatgtcaaaccttagaagcattggtattgaaggtggtgactccacgactttacccttcacatcatctaatttcaacaatgatttctcgggtaatcttgcaatgacaacaccttctagttgcatagatgaatcgggttttctacaatcctcagaaaacctcggttccgagaacccacaatctaacacctttgtgaaggtgtacaagtcagggtcttttggaagatcgttagatatatcaaagtttagcagctaccacgagctgcgaagcgagcttgctcgcatgtttggcctcgaaggccaattagaagaccctgtgagatcaggctggcagcttgtatttgttgaccgagagaacgacgttcttctcctcggcgatgacccttggccggagtttgtgagcagcgtgtggtgcattaagatactgtcaccacaagaagtgcaacaaatgggaaaaagaggccttgagcttctcaactccgcgccatcttccaacaatgtcgataagctcccgagcaacgggaactgtgacgactttgggaaccggtcagacccgaggaatctcggtaacggtatcgcatcagttgggggttcattcaactactag

SEQ ID NO: 1673 - protein, 935 aa, Arabidopsis thaliana
MRLSSAGFNPQPHEVTGEKRVLNSELWHACAGPLVSLPPVGSRVVYFPQGHSEQVAASTNKEVDAHIPNYPSLHPQLICQLHNVTMHADVETDEVYAQMTLQPLNAQEQKDPYLPAELGVPSRQPTNYFCKTLTASDTSTHGGFSVPRRAAEKVFPPLDYSQQPPAQELMARDLHDNEWKFRHIFRGQPKRHLLTTGWSVFVSAKRLVAGDSVLFIWNDKNQLLLGIRRANRPQTVMPSSVLSSDSMHLGLLAAAAHAAATNSRFTIFYNPRASPSEFVIPLAKYVKAVYHTRVSVGMRFRMLFETEESSVRRYMGTITGICDLDPTRWANSHWRSVKVGWDESTAGERQPRVSLWEIEPLTTFPMYPSPFPLRLKRPWPPGLPSFHGLKEDDMGMSMSSPLMWDRGLQSLNFQGMGVNPWMQPRLDTSGLLGMQNDVYQAMAAAALQDMRGIDPAKAAASLLQFQNSPGFSMQSPSLVQPQMLQQQLSQQQQQLSQQQQQQQQLSQQQQQQLSQQQQQQLSQQQQQQLSQQQQQQAYLGVPETHQPQSQAQSQSNNHLSQQQQQVVDNHNPSASSAAVVSAMSQFGSASQPNTSPLQSMTSLCHQQSFSDTNGGNNPISPLHTLLSNFSQDESSQLLHLTRTNSAMTSSGWPSKRPAVDSSFQHSGAGNNNTQSVLEQLGQSHTSNVPPNAVSLPPFPGGRECSIEQEGSASDPHSHLLFGVNIDSSSLLMPNGMSNLRSIGIEGGDSTTLPFTSSNFNNDFSGNLAMTTPSSCIDESGFLQSSENLGSENPQSNTFVKVYKSGSFGRSLDISKFSSYHELRSELARMFGLEGQLEDPVRSGWQLVFVDRENDVLLLGDDPWPEFVSSVWCIKILSPQEVQQMGKRGLELLNSAPSSNNVDKLPSNGNCDDFGNRSDPRNLGNGIASVGGSFNY

SEQ ID NO: 1674 - DNA, 1440 bp, Arabidopsis thaliana
  CDS (1)..(1440)
atggaaaataatggagaaatgaatgcacagcctgaattatcagttgatataaccaagacttatatgtatgagaaattatggaacatatgtgctggacctttgtgtgttcttccgaaacctggagaaaaagtttattactttcctcaagggcacatcgagctcattgagaattctacaagagatgaattggatcatatcaggccaatttttgatcttccatctaagcttcgatgtcgtgttgtggctattgatcgtaaggtagacaaaaatacagatgaagtctatgctcagatttcgttaatgcctgatacaacagaagttatgacccataatactactatggatactcgaagaccaatagtttatttttttagtaaaattttaacggcgtctgacgtcagtttaagtggtggattaattattcccaaacaatatgccattgagtgttttcctccgctggatatgtcccaaccaatatccacacaaaatcttgttgcaaaggatctctatggtcaagaatggagtttcaaacatgtctttagaggtacaccgcagagacatatgtttactagcggcggcggctggagcgtatttgcaacaacaaaaagattgattgttggggatatatttgtactccttagaggagagaatggggagttacgatttggtattaggcgagcaaagcatcaacaaggccacataccttcatcagtaatatcagcaaattgtatgcaacatggagtaatagcttcagtagtgaatgcttttaaaaccaaatgcatgttcaatgtggtttataagccaaggatgcagtttgagggtaaggatttttctgaaaaaagatacgatgggacgattattggtgtaaatgacatgtctcctcattggaaggattcagaatggcgaagcctaaaagtgcaatgggacgagctttcaccatttctaagacctaatcaggtttcaccttgggacatcgagcatctaattccttcgtcagatatctctcaatcaagtttgaaaaagaaaaaacattggcttcaattgaatgaaattggtgcaacattatcgaatctttggacatgccaagaaattggacaacggagcatgaattctcctataagtgttcctgagtttagttatcccaatgcaattgaagattcaaagtttctttctggtttgctactgaatcactcactcctagccatacctaatgaaaactataacagcgaccaaatgattcaaccaaggaaagaagatataacaactgaagcaaccactagttgcctcttgtttggagttgatctgaccaaagtatcaaagagcaaagattccatctgtccaattgaatcatgcaaaaaatcagaaatttcaaaactcaaaaatcaaaaagcaaccactagttgcctcaagataaaaagtttgaccaaacccaacctctga

SEQ ID NO: 1675 - protein, 479 aa, Arabidopsis thaliana
MENNGEMNAQPELSVDITKTYMYEKLWNICAGPLCVLPKPGEKVYYFPQGHIELIENSTRDELDHIRPIFDLPSKLRCRVVAIDRKVDKNTDEVYAQISLMPDTTEVMTHNTTMDTRRPIVYFFSKILTASDVSLSGGLIIPKQYAIECFPPLDMSQPISTQNLVAKDLYGQEWSFKHVFRGTPQRHMFTSGGGWSVFATTKRLIVGDIFVLLRGENGELRFGIRRAKHQQGHIPSSVISANCMQHGVIASVVNAFKTKCMFNVVYKPRMQFEGKDFSEKRYDGTIIGVNDMSPHWKDSEWRSLKVQWDELSPFLRPNQVSPWDIEHLIPSSDISQSSLKKKKHWLQLNEIGATLSNLWTCQEIGQRSMNSPISVPEFSYPNAIEDSKFLSGLLLNHSLLAIPNENYNSDQMIQPRKEDITTEATTSCLLFGVDLTKVSKSKDSICPIESCKKSEISKLKNQKATTSCLKIKSLTKPNL

SEQ ID NO: 1676 - DNA, 1869 bp, Arabidopsis thaliana
  CDS (1)..(1869)
atgagccaaacaagcttagagccacttataatttctattataaagcttcaaattttgcaactttggttgaaattgatagctgttggttggaatttagggtctaatgatgatgaattgtacacggagctatggaaagcttgtgcagggccacttgtggaagttcctcgttatggtgaaagagttttctacttccctcaaggtcacatggaacaattggttgcttcgactaatcaaggagttgttgatcaagagataccagtgtttaatcttcctccaaagatactttgtcgtgttcttagtgttacgttaaaagcagaacatgagaccgatgaggtttacgctcagatcacattacaaccagaagaagatcaaagtgaaccaacaagtcttgacccacctttagtagaaccagctaaaccaacggttgattcttttgtgaagattctaacagcttcagatacaagcacacatggtggattctctgttcttcgtaaacacgccactgagtgtttaccttcacttgatatgacacaacctacaccgactcaagaacttgtagctagagatcttcacggctatgaatggaggtttaagcatatatttagagggcaaccgaggaggcatttacttacaaccggttggagtacatttgtaacctcgaaaagacttgtagctggagatgcatttgtgttcttgaggggtgaaaccggggatttacgggttggtgtgaggcgtttagctaagcagcaaagcacgatgcccgcatccgttatttcgagtcagagtatgcgtttgggagttcttgctacagcttctcatgctgttaccacaacaactatatttgttgtcttctataaaccaaggataagccagtttataattagtgtgaacaagtatatgatggcgatgaagaacgggttttctctcggtatgcggtataggatgagattcgaaggagaagagtctcctgagagaatatttacaggtaccattattggcagtggagatctatcttctcaatggccagcttccaaatggaggtcattgcagatccaatgggacgagccatcttctatacagagaccaaacaaggtctcaccgtgggagatcgagcctttctcaccatccgcgcttacaccaacccctactcaacaacaatcaaagtccaaacggtccagaccaatctcagaaatcacagggagtcctgtagcttctagtttcttgagtagtttctcgcagagccacgagtctaatccatcggtcaaactgttgtttcaagatccagcaaccgagagaaactcaaacaaatcagtgttttcaagtggattacaatgcaagataaccgaggctccggtcacaagtagttgtaggttattcggattcgatctcacgagcaagcctgcttctgctacaattcctcatgacaagcagctaataagtgtggattcaaatatatctgattctaccaccaagtgtcaagatcctaactcttcaaactcaccaaaagagcagaaacaacaaacatccacaagaagccgaatcaaggtgcaaatgcaaggaacagcggttggacgcgcggttgatttaacattgttgagatcatacgatgaactaataaaagagctagagaaaatgtttgagattgaaggagaacttagtcctaaagacaaatgggctatcgtgtttacagacgatgaaggagataggatgcttgtaggagatgatccatggaatgagttctgtaaaatggcaaagaagttattcatatatccgagtgatgaggtcaagaaaatgaggtcgaagtcgttgttgggtgataaaggtacgatcgtaaatcttgaatcagatcagaggacagttcacgtttaa

SEQ ID NO: 1677 - protein, 622 aa, Arabidopsis thaliana
MSQTSLEPLIISIIKLQILQLWLKLIAVGWNLGSNDDELYTELWKACAGPLVEVPRYGERVFYFPQGHMEQLVASTNQGVVDQEIPVFNLPPKILCRVLSVTLKAEHETDEVYAQITLQPEEDQSEPTSLDPPLVEPAKPTVDSFVKILTASDTSTHGGFSVLRKHATECLPSLDMTQPTPTQELVARDLHGYEWRFKHIFRGQPRRHLLTTGWSTFVTSKRLVAGDAFVFLRGETGDLRVGVRRLAKQQSTMPASVISSQSMRLGVLATASHAVTTTTIFVVFYKPRISQFIISVNKYMMAMKNGFSLGMRYRMRFEGEESPERIFTGTIIGSGDLSSQWPASKWRSLQIQWDEPSSIQRPNKVSPWEIEPFSPSALTPTPTQQQSKSKRSRPISEITGSPVASSFLSSFSQSHESNPSVKLLFQDPATERNSNKSVFSSGLQCKITEAPVTSSCRLFGFDLTSKPASATIPHDKQLISVDSNISDSTTKCQDPNSSNSPKEQKQQTSTRSRIKVQMQGTAVGRAVDLTLLRSYDELIKELEKMFEIEGELSPKDKWAIVFTDDEGDRMLVGDDPWNEFCKMAKKLFIYPSDEVKKMRSKSLLGDKGTIVNLESDQRTVHV

SEQ ID NO: 1678 - DNA, 1911 bp, Arabidopsis thaliana
  CDS (1)..(1911)
atggcaaatcgcggaggtgaatatctgtacgatgagttatggaaattatgcgcgggacctcttgttgatgttcctcaagctcaagaaagagtttattattttcctcaaggtcacatggaacaactcgaagcgtcaacgcaacaagtcgacttaaatacgatgaagcctctttttgttcttcctcctaagattctctgcaatgttatgaacgttagtcttcaggcggagaaagatacggatgaggtctatgctcagattactttgatccctgttggaactgaagttgatgaacctatgagtcctgatccctctcctcctgagttgcaaaggccgaaagttcactctttcagcaaggttttgacagcgtctgatacaagcacccatggtggcttttctgttctaaggaaacatgccacggaatgtcttcctccgctggatatgactcagcaaaccccgacccaggagttagtagccgaagatgtgcacggttatcagtggaaattcaagcatatttttagaggccaaccacggaggcatctattgacgacagggtggagcacctttgttacatcaaagagattggttgctggggacacctttgtattcctgagaggggagaacggagagttgcgagttggagtcagacgtgctaatcttcaacagagcagtatgccttcatccgttatatcaagtcatagtatgcatctgggagtgcttgctactgcacgccatgctactcaaacgaaaactatgttcattgtatactataaaccaaggacaagccaattcatcattagcttgaacaaatatctagaagccatgagcaataagttctctgtagggatgagatttaagatgcgttttgagggagaggattcccctgaaagaagatattctggcacggttattggtgtgaaagactgctcccctcactggaaagactcaaaatggcgatgcttagaagttcattgggatgagcctgcatcgatttcaagacccaataaggtttcaccatgggaaattgaaccgtttgtaaattcagaaaacgttcccaaatcagttatgctgaagaacaaaaggccccgtcaagttagtgaagtatctgcacttggcataacagcttcaaacctttggagctctgttttgacgcaaccccatgagtttgcacaatcgtgcatcacctcacagtggagttctcctcagcaatgtcatcgtgatgcaaatgaggatgctaagaaatctgactggctaaataactcttactctgtgtcaaatgtagcaaaagactcaacactgaacgaccaaatggtttccccagtcgagcagaagaagcctgagacaaccgctaattatagattatttggaattgatctgatgagttcctccctagcggttcctgaggagaaaactgcacccatgcgaccaatcaacatatccaaaccgactatggacagccactcagacccaaaatcagagatttcaaaagtatcagaagagaaaaagcaggaacctgcggagggatcaccaaaagaggtccaaagcaagcaaagcagttctacaagaagccgtaccaaggtgcagatgcaaggcgtacctgtgggcagggctgtggatttaaatgcgctaaaggggtacaacgagctcatagatgacattgagaagctgtttgacataaaaggggaactgcggagtcgcaatcaatgggaaatagtgttcacagacgatgagggagatatgatgcttgtcggtgatgacccatggcctgagttctgcaacatggtgaagagaatattcatatggtcgaaagaggaagtgaagaaaatgacgcctgggaaccaactccggatgctgttaagggaagttgaaacaacactaacaacaacttccaaaacagataatcattccaactaa

SEQ ID NO: 1679 - protein, 636 aa, Arabidopsis thaliana
MANRGGEYLYDELWKLCAGPLVDVPQAQERVYYFPQGHMEQLEASTQQVDLNTMKPLFVLPPKILCNVMNVSLQAEKDTDEVYAQITLIPVGTEVDEPMSPDPSPPELQRPKVHSFSKVLTASDTSTHGGFSVLRKHATECLPPLDMTQQTPTQELVAEDVHGYQWKFKHIFRGQPRRHLLTTGWSTFVTSKRLVAGDTFVFLRGENGELRVGVRRANLQQSSMPSSVISSHSMHLGVLATARHATQTKTMFIVYYKPRTSQFIISLNKYLEAMSNKFSVGMRFKMRFEGEDSPERRYSGTVIGVKDCSPHWKDSKWRCLEVHWDEPASISRPNKVSPWEIEPFVNSENVPKSVMLKNKRPRQVSEVSALGITASNLWSSVLTQPHEFAQSCITSQWSSPQQCHRDANEDAKKSDWLNNSYSVSNVAKDSTLNDQMVSPVEQKKPETTANYRLFGIDLMSSSLAVPEEKTAPMRPINISKPTMDSHSDPKSEISKVSEEKKQEPAEGSPKEVQSKQSSSTRSRTKVQMQGVPVGRAVDLNALKGYNELIDDIEKLFDIKGELRSRNQWEIVFTDDEGDMMLVGDDPWPEFCNMVKRIFIWSKEEVKKMTPGNQLRMLLREVETTLTTTSKTDNHSN

SEQ ID NO: 1680 - DNA, 2100 bp, Oryza sativa (japonica cultivar-group)
  CDS (1)..(2100)
atgtcgtcgcaaggagcaggaggaggggtaggggacccggagctgttcgcggagctgtggcgggcctgcgcggggccgctggtggaggtgccgcagcgggacgagcgggtgttctacttcctccagggccacctcgagcagctgcaagagccgacggacccggcgctgctggcggagcaaatcaagatgttccaggtgccgtacaagatcctctgcaaggtcgtcaacgtcgagctcaaggccgagacggaaaccgacgaggtgttcgcgcagattaccctgcagcctgacccggatcaagagaatctgccaacattacctgacccgcccctgccggagcagccgaggcctgtggtgcactccttctgcaagatcctgaccccatccgacaccagcacccatggcgggttctccgtgctccgacggcatgccaacgagtgcctcccgccactggatatgtccatggcgacaccaacccaagagctcatcacaaaggaccttcatggatctgagtggaggtttaagcacatctacaggggccaaccccgtaggcatcttctgactactggatggagcacgtttgtgacatcgaagaagctgatttctggcgacgcgtttgtctacttgaggagtgagacaggagagcagcgtgtcggagtgaggcgtcttgtgcagaaacagagcacaatgccggcatctgttatatcaagccaaagcatgcatcttggtgtgcttgcaagtgcatctcatgctatcaagactaattcaattttcctagtgtactacaggccaaggttaagccaaagccaatatattgttagtgtgaataagtaccttgcggctagtaaggttggatttaatgtgggcatgaggttcaagatgagttttgaaggggaagacgtcccggttaaaaagttttctggaactatagttggtgaaggtgatctttctctgcagtggtcaggttctgaatggaagtccttgaaggtccaatgggatgaagtcacaaatgttaatggccctgagagggtttccccttgggaaattgaaacatgtgatggcactgcacctgccatcaatgtacccctgcagtcagcaacgaaaaacaagcggcctagggagccaagtgaaactattgaccttcaatcactggaaccagctcaagagttttggctatctggaatgccacaacagcatgagaagacaggtattggttccagtgaacctaattgtatctctggacatcaagttgtttggccaggcgagcatccaggatatggtgccgtgagtagttcagtttgtcagaatccgctagtacttgaaagttggttgaaggatttcaactcttcaaacaagggtgtctcccctaccttgtcagagatttctcagaaaatttttcaggttaccagcaatgaagcaagaattgctacatggcctgcacgttctgcttaccaagctgaggagcccacttccaagttgtcttcgaacaccgctgcctgtggttaccgaactgaagaagttgctccaaatgcgtccaaggttgttgaaggaaaaaaggaacctgccatgtttcgtctgtttggtgtggatttgatgaaatgtaccagcatatctactaccactgatgacaagtcaagtgtgggagcaggagaagcttcagccaaaggtactggttctcacgaagactctggtcagctgtcagcattctcaaaagtgacaaaagagcatattgctgcggatgaaagcccccaagagatccaaagccatcagaattacaccgctagaactcgcataaaggttcaaatgcatggaaatgctgtgggcagagctgtggatctagctaatctagacggatatgagcaactgatgaatgagctggaagagatgttcaatataaaggacctcaaacaaaaatggaaggtggctttcactgatgatgagggtgacacaatggaagttggagatgatccttggctggaattttgccagatggtcagaaagattgtgctctatcccattgaagacgagaagaagatcgagcctcacccgaagttactgtcttcagctaatccagagcaggatcagaagactgggttttag

SEQ ID NO: 1681 - protein, 699 aa, Oryza sativa (japonica cultivar-group)
MSSQGAGGGVGDPELFAELWRACAGPLVEVPQRDERVFYFLQGHLEQLQEPTDPALLAEQIKMFQVPYKILCKVVNVELKAETETDEVFAQITLQPDPDQENLPTLPDPPLPEQPRPVVHSFCKILTPSDTSTHGGFSVLRRHANECLPPLDMSMATPTQELITKDLHGSEWRFKHIYRGQPRRHLLTTGWSTFVTSKKLISGDAFVYLRSETGEQRVGVRRLVQKQSTMPASVISSQSMHLGVLASASHAIKTNSIFLVYYRPRLSQSQYIVSVNKYLAASKVGFNVGMRFKMSFEGEDVPVKKFSGTIVGEGDLSLQWSGSEWKSLKVQWDEVTNVNGPERVSPWEIETCDGTAPAINVPLQSATKNKRPREPSETIDLQSLEPAQEFWLSGMPQQHEKTGIGSSEPNCISGHQVVWPGEHPGYGAVSSSVCQNPLVLESWLKDFNSSNKGVSPTLSEISQKIFQVTSNEARIATWPARSAYQAEEPTSKLSSNTAACGYRTEEVAPNASKVVEGKKEPAMFRLFGVDLMKCTSISTTTDDKSSVGAGEASAKGTGSHEDSGQLSAFSKVTKEHIAADESPQEIQSHQNYTARTRIKVQMHGNAVGRAVDLANLDGYEQLMNELEEMFNIKDLKQKWKVAFTDDEGDTMEVGDDPWLEFCQMVRKIVLYPIEDEKKIEPHPKLLSSANPEQDQKTGF

SEQ ID NO: 1682 - DNA, 2427 bp, Oryza sativa (japonica cultivar-group)
  CDS (1)..(2427)
atgccgccggccgccatggctccccctcccccgccgcagggctcctccacaggggatccgctctacgacgagctgtggcacgcctgcgcggggccgctcgtcaccgtgccgcgggtgggcgacctcgtcttctacttcccgcaggggcacatcgagcaggtggaggcgtccatgaaccaggttgccgacagccagatgcgcctctacgatctgccctccaagctgctttgccgtgtcctcaacgtcgagctcaaggcggagcaagacaccgacgaggtctacgcgcaggtcatgctcatgccggagcccgagcaaaatgagatggcggtggagaagacgactcctacgtccggccctgtgcaggcaaggccgccggtgaggtccttctgcaagacgctcaccgcgtctgacaccagcacgcacggcggcttctctgtactccgccgccacgctgatgagtgcctccctcccctggatatgacccagtcgccacccacacaggagctcgtggccaaggatctgcacagcatggactggcgcttccgtcacatctttcgcgggcaaccgaggaggcatctccttcagagtggttggagtgtgtttgtcagttccaaaaggcttgttgctggggatgctttcattttcctcagaggagagaatggtgaactccgtgttggtgttagacgagctatgaggcagctgtccaatgtgccttcttcagtcatatctagccaaagcatgcacctgggagtccttgctactgcatggcatgctatcaacacgaagagtatgttcaccgtctactacaaacctaggacgagcccttcagagttcattataccatatgatcagtatatggagtccgtcaaaaacaattactctgttgggatgaggttcaggatgaggtttgaaggagaagaggcaccagagcagaggtttactggtactataattggcagtgagaatctcgacccagtgtggcctgaatcaagttggagatccctgaaggtgcggtgggatgaaccatcaactattccgcggccagatagagtctctccttggaaaatagagcctgcttcatcacctcctgttaacccccttcctctttctagggttaaaagacctaggccaaatgctcctccagcatctcctgaatctcctattcttacgaaagaagctgctactaaggttgacactgatcctgctcaagcacaacgaagtcaaaacagtacggtcttgcaaggtcaagaacaaatgaccttgaggagcaaccttactgagagtaatgactctgatgtcactgctcataagccaatgatgtggtctccatccccaaatgctgcaaaagcccaccccttgacatttcagcagagaccccctatggataattggatgcagttgggaaggcgtgaaactgactttaaggatgtccgttctggctctcaatcttttggtgattccccaggcttctttatgcagaattttgatgaggctcctaaccgtcttacttctttcaagaaccagtttcaggatcaaggttctgctcggcacttctctgacccatactactatgtatctccacagccttccctaactgttgaatcaagcacacagatgcacacagacagtaaggagttacatttctggaatggccagagtactgtgtatggtaattcgagagaccgaccacagaatttcagattcgaacagaactcatcaagttggttaaatcagtcatttgcccgacctgaacagccaagagtgattagaccgcatgcatcaatagctccagttgagttggaaaaaacagaaggcagtgggtttaagatttttgggtttaaagttgatacaaccaatgctcctaacaatcacttgagctccccgatggctgcaacacatgagcctatgcttcaaactccatcatcattgaatcagttgcaacctgtacaaactgattgcattcctgaggtatcagtaagcacagctggaacggcgactgagaatgagaaaagcggtcagcaagctcaacagagttcaaaagatgttcaaagcaagactcaggttgcttcgacgaggagttgtacaaaggtccataagcaaggcgttgcacttggcagatctgtggatctttcaaagttcagtaactatgatgaactcaaagctgagctagacaagatgtttgaattcgatggtgaattggtgtcttcaaacaaaaactggcaaattgtttatactgataatgagggtgatatgatgcttgttggagacgacccatgggaagaattctgcagcattgtgcggaagatttatatttacaccaaggaggaggtccagaagatgaattcgaaatcaaatgccccaaggaaagatgactcttcagaaaatgagaaaggtcatctgccgatgcccaacaaatcagataactag

SEQ ID NO: 1683 - protein, 808 aa, Oryza sativa (japonica cultivar-group)
MPPAAMAPPPPPQGSSTGDPLYDELWHACAGPLVTVPRVGDLVFYFPQGHIEQVEASMNQVADSQMRLYDLPSKLLCRVLNVELKAEQDTDEVYAQVMLMPEPEQNEMAVEKTTPTSGPVQARPPVRSFCKTLTASDTSTHGGFSVLRRHADECLPPLDMTQSPPTQELVAKDLHSMDWRFRHIFRGQPRRHLLQSGWSVFVSSKRLVAGDAFIFLRGENGELRVGVRRAMRQLSNVPSSVISSQSMHLGVLATAWHAINTKSMFTVYYKPRTSPSEFIIPYDQYMESVKNNYSVGMRFRMRFEGEEAPEQRFTGTIIGSENLDPVWPESSWRSLKVRWDEPSTIPRPDRVSPWKIEPASSPPVNPLPLSRVKRPRPNAPPASPESPILTKEAATKVDTDPAQAQRSQNSTVLQGQEQMTLRSNLTESNDSDVTAHKPMMWSPSPNAAKAHPLTFQQRPPMDNWMQLGRRETDFKDVRSGSQSFGDSPGFFMQNFDEAPNRLTSFKNQFQDQGSARHFSDPYYYVSPQPSLTVESSTQMHTDSKELHFWNGQSTVYGNSRDRPQNFRFEQNSSSWLNQSFARPEQPRVIRPHASIAPVELEKTEGSGFKIFGFKVDTTNAPNNHLSSPMAATHEPMLQTPSSLNQLQPVQTDCIPEVSVSTAGTATENEKSGQQAQQSSKDVQSKTQVASTRSCTKVHKQGVALGRSVDLSKFSNYDELKAELDKMFEFDGELVSSNKNWQIVYTDNEGDMMLVGDDPWEEFCSIVRKIYIYTKEEVQKMNSKSNAPRKDDSSENEKGHLPMPNKSDN

SEQ ID NO: 1684 - DNA, 2727 bp, Oryza sativa (japonica cultivar-group)
  CDS (1)..(2727)
atgaagctctcgccgtcggccggcggcgtctccgaccagccgccgtcgccgccggaagttgcagaggagcagaagtgcctaaattctgagttgtggcatgcatgcgccggccctctcgtttcgctgcctgcggtcggtagtcgggtggtttattttcctcaaggccacagtgagcaggtagctgcatcaacaaataaggaaatggagtctcagatccccaactatcctaacctgccgccgcagcttatatgccagctacataatgtgaccatgcacgccgatgcagagacggatgaagtctatgcgcaaatgacgctgcagccactcagcccgcaagagctcaaggatccattcctacccgccgagctaggcactgccagcaagcagccaacaaattatttctgcaaaacgttaactgctagtgacacaagtacacatggtggattctctgttccccgtcgagcagcagagaaagtatttcctccgctggatttcactcagcagcctccagctcaagagttgatggcgaaagacctccatggaaatgaatggaaattccgtcatatctttcgtggccaaccgaagcggcatcttctgactacgggttggagcgtctttgtaagtgcaaagagactggttgctggagactctgtcctttttatctggaatgacagtaatcagctgcttctgggaattcgtcgggcaaataggccacaaacggtcatgccatcatcagtattgtctagtgacagcatgcatattggtctgcttgctgcagctgctcacgccgcatcaacaaatagccggtttactattttctataatccaagagcaagcccttcggagtttgttataccactggctaaatatgtaaaggctgtctaccatacccgcatatcggtgggcatgcgtttccggatgctttttgaaacagaagaatccagtgttaggagatacatggggacaataacaggaataagtgatcttgatcctgttcgttggatgaactcacactggcgctctgtcaaggttggatgggatgagtcgactgctggagagagacagccaagggtgtctctttgggagatcgagcctctgacaactttcccgatgtatccatctccttttcctctcagactaaagcgtccatggccaacaggcttaccttctttatatggcggaaaggaggatgacttggcttcttctcttatgtggcttcgagatagtcaaaacacaggtttccaatctctgaattttggaggacttggtatgagtccgtggatgcagccaaggctggatagttccctacttggtctgcaacctgacatgtaccaaacgatagcggcggcggcggctttacagaacaccactaagcaagtatcacctgccatgctgcagttccagcagccgcaaaacattgtcggtagatcttctcttctatccagtcagattctgcagcaagcacagcctcaatttcagcagatgtaccaccaaaacatcaatggcaactcaatccaaggccatagtcagcctgagtacctccagcaaccgcttcaacattgccaatcatttaacgaacagaagcctcagttgcagccgcagcaacagcagcaagaatcacaccagcagcaacctcagcatcaacaaatgcaacaacagaaacacttgtccaactttcagactgtaccaaatgcattgtcggttttttcacagctttcctccacccctcagtctacaccctccacattgcagacagtttcaccattctcacagcaacataatttccctgacacaaatatcagttgtctctctccatccaatgtctcatccatgcacgatacactgagatcattcccttcagaagctgcttcagacctcccaggtgtgccaagaatcacccctgtacctgtctctgacccatggtcatctaagcgagttgcagtggaatctacgatcacttctcgcccacatgacatttcatcacagatagagaacttcgacttgacaccttctagtattcctcaaaactccacgttagcaccactgcctggaagggaatgcctggtggatcaagatgggagctctgatcctcaaaatcacttcttgtttggtgtaaatatagactcacagtcacttttgatgcaagatggcattccaagccttcacaatgaaaacagttcaagcacaattccatattccacatccaacttccttagcccttctcaagatgattatccattgagtcaaacactaactactccgggctgcttagatgaatcaggatatgttccatgttcagataatgctgatcaagtgaagcgaccgcatgcaacctttgtgaaggtttacaaatctggaaccgttggaaggttgctcgacatcactagatttagcagttatcatgaacttcgtagtgaggtagggcgcctttttggccttgagggccagttggaagaccctttgagatcaggctggcagcttgtatttgttgaccgagaggacgacgttcttctagttggcgatgatccgtggcaggaatttgtgaacagtgtgtcttgcataaagatactttcgccgcaggaggttcagcagatgggcaagccgggcattgaactcttctcgacttctgcaaggagacttggcaacagctgtgacaactacatgagcaggcaggaatcaagaagcctaagcactggaatcgcgtcggtgggctcagttgagttctga

SEQ ID NO: 1685 - protein, 908 aa, Oryza sativa (japonica cultivar-group)
MKLSPSAGGVSDQPPSPPEVAEEQKCLNSELWHACAGPLVSLPAVGSRVVYFPQGHSEQVAASTNKEMESQIPNYPNLPPQLICQLHNVTMHADAETDEVYAQMTLQPLSPQELKDPFLPAELGTASKQPTNYFCKTLTASDTSTHGGFSVPRRAAEKVFPPLDFTQQPPAQELMAKDLHGNEWKFRHIFRGQPKRHLLTTGWSVFVSAKRLVAGDSVLFIWNDSNQLLLGIRRANRPQTVMPSSVLSSDSMHIGLLAAAAHAASTNSRFTIFYNPRASPSEFVIPLAKYVKAVYHTRISVGMRFRMLFETEESSVRRYMGTITGISDLDPVRWMNSHWRSVKVGWDESTAGERQPRVSLWEIEPLTTFPMYPSPFPLRLKRPWPTGLPSLYGGKEDDLASSLMWLRDSQNTGFQSLNFGGLGMSPWMQPRLDSSLLGLQPDMYQTIAAAAALQNTTKQVSPAMLQFQQPQNIVGRSSLLSSQILQQAQPQFQQMYHQNINGNSIQGHSQPEYLQQPLQHCQSFNEQKPQLQPQQQQQESHQQQPQHQQMQQQKHLSNFQTVPNALSVFSQLSSTPQSTPSTLQTVSPFSQQHNFPDTNISCLSPSNVSSMHDTLRSFPSEAASDLPGVPRITPVPVSDPWSSKRVAVESTITSRPHDISSQIENFDLTPSSIPQNSTLAPLPGRECLVDQDGSSDPQNHFLFGVNIDSQSLLMQDGIPSLHNENSSSTIPYSTSNFLSPSQDDYPLSQTLTTPGCLDESGYVPCSDNADQVKRPHATFVKVYKSGTVGRLLDITRFSSYHELRSEVGRLFGLEGQLEDPLRSGWQLVFVDREDDVLLVGDDPWQEFVNSVSCIKILSPQEVQQMGKPGIELFSTSARRLGNSCDNYMSRQESRSLSTGIASVGSVEF

SEQ ID NO: 1686 - DNA, 2037 bp, Oryza sativa (japonica cultivar-group)
  CDS (1)..(2037)
atggctggctccgtcgttgctgctgctgccgccgccggcggtggcacagggagctcttgcgatgcgttgtacagggagctatggcatgcttgcgctgggccgttggtcacagtgcctcgccaaggcgaattggtttactacttcccccagggccatatggaacagcttgaggcatctacagaccaacagcttgaccagcatctgcctttgtttaacctgccatctaagatcctctgcaaagtggtcaatgtagaacttagggctgaaaccgattcagatgaggtttatgctcaaattatgctgcaaccagaagcagatcaaaatgaactcaccagcccaaaacctgagccacatgaacctgaaaaatgcaatgtccattccttctgcaagactttgactgcttcagatacaagcacccatggtggattttcagttcttaggaggcatgcagaagaatgtcttcctcccctggacatgactcagaatccaccatggcaagagcttgtggctagagatctccatggaaacgagtggcatttccgtcacatctttcgaggacaacctaggaggcatctgcttacaactggctggagtgtttttgttagctcaaaaagattagttgccggtgacgcattcatctttctgagaggtgagaatggagagctacgagttggtgtcaggaggctcatgaggcaactaaataacatgccatcatcagtaatatcaagtcatagtatgcatcttggagtcctagcaactgcatcacatgctatatccaccggaactctcttttctgttttctacaaaccaagaacaagtcagtctgagtttgttgtgagtgctaacaagtaccttgaagctaaaaacagcaagatatctgttggaatgaggtttaagatgagattcgagggcgatgaagctcctgaaagaaggtttagtggaacaattattggtgttgggagcatgtcaacgtctccatgggcaaattctgactggagatctttgaaggtccaatgggatgagccttctgtggttcctcgtccagatagagtttcaccatgggaactagagccacttgctgtgagtaattcacagccatcacctcagccaccggcaagaaataagcgggctcggcctcctgcttcgaattcaattgctccagaactacctccggtcttcggtttgtggaaatcttcagctgagtccacacaaggcttctcattttcgggactacagcgaacacaggaactatatccttcaagccccaatccgatcttctcaacatcattaaatgttggattcagtacaaagaatgagccatctgctctaagcaacaagcatttttactggccaatgagagagacaagagccaactcttactctgctagcatcagcaaagttccatctgaaaagaagcaagagcctagttcggctggctgcagattgtttggaatcgagataagctctgctgtggaagctacatctccactggctgctgtttctggtgttggtcaagaccaaccagctgcctcagtagatgctgagtctgatcagctctcacaaccatcacatgccaacaaatctgatgctccagcggcaagcagtgagccatctcctcatgagactcagagtcggcaagtgaggagctgcaccaaggtcatcatgcaaggaatggcagttggaagggcagtggacctgacaaggctccatggatatgatgatcttcgctgcaagttagaagagatgtttgatatccaaggagagctctctgctagcctaaagaaatggaaggttgtttacacagatgatgaggatgatatgatgctggttggggatgacccttggcctgaattttgcagcatggtgaaaaggatatacatctacacctacgaggaagccaagcaacttactcccaagtcgaagctgccgatcattggcgacgccatcaagccaaacccaaacaaacaatcgcccgagtctgacatgcctcacagtgacctggacagcaccgcccccgtcaccgataaggattgctga

SEQ ID NO: 1687 - protein, 678 aa, Oryza sativa (japonica cultivar-group)
MAGSVVAAAAAAGGGTGSSCDALYRELWHACAGPLVTVPRQGELVYYFPQGHMEQLEASTDQQLDQHLPLFNLPSKILCKVVNVELRAETDSDEVYAQIMLQPEADQNELTSPKPEPHEPEKCNVHSFCKTLTASDTSTHGGFSVLRRHAEECLPPLDMTQNPPWQELVARDLHGNEWHFRHIFRGQPRRHLLTTGWSVFVSSKRLVAGDAFIFLRGENGELRVGVRRLMRQLNNMPSSVISSHSMHLGVLATASHAISTGTLFSVFYKPRTSQSEFVVSANKYLEAKNSKISVGMRFKMRFEGDEAPERRFSGTIIGVGSMSTSPWANSDWRSLKVQWDEPSVVPRPDRVSPWELEPLAVSNSQPSPQPPARNKRARPPASNSIAPELPPVFGLWKSSAESTQGFSFSGLQRTQELYPSSPNPIFSTSLNVGFSTKNEPSALSNKHFYWPMRETRANSYSASISKVPSEKKQEPSSAGCRLFGIEISSAVEATSPLAAVSGVGQDQPAASVDAESDQLSQPSHANKSDAPAASSEPSPHETQSRQVRSCTKVIMQGMAVGRAVDLTRLHGYDDLRCKLEEMFDIQGELSASLKKWKVVYTDDEDDMMLVGDDPWPEFCSMVKRIYIYTYEEAKQLTPKSKLPIIGDAIKPNPNKQSPESDMPHSDLDSTAPVTDKDC

SEQ ID NO: 1688 - DNA, 2022 bp, Oryza sativa (japonica cultivar-group)
  CDS (1)..(2022)
atggccgccgcgatggagatggcggcgaatccaggtggttcaggaacctgcagcgatgcactattccgggagctatggcatgcttgtgctggtccgttggtcacggtcccgaagcgcggcgagcgcgtctactactttccccagggtcatatggaacagcttgaggcgtctacaaaccagcagcttgaccagtacctgccgatgttcaatctaccatccaagatcctatgcagcgtggtcaacgtagaactccgggcggaggctgattcagatgaagtttatgctcaaattatgctgcaaccagaagctgatcaaagtgaactcaccagtctggatcctgagcttcaagatcttgagaaatgcacagctcattccttttgcaagacattaacagcttcagatacaagcacacatggcggtttctctgttcttaggaggcatgctgaagaatgccttcctcagctggacatgtctcagaatccaccatgtcaagaactggttgccaaagatctccatggaactgagtggcatttccgtcacatctttcgtggacaacctaggaggcatctgcttacaaccggttggagtgtctttgttagctcaaaaagattggttgctggcgatgcatttatcttcctgaggggcgaaagtggtgagctacgggttggagtaaggagacttatgagacaagtaaataacatgccatcatctgtcatatcaagccacagcatgcatcttggagtccttgcaacagcttcccatgctatctccactggaaccctcttttctgttttctacaaacccagaacaagccggtctgagtttgttgtgagcgttaacaagtaccttgaagctaagaagcagaacttgtctgttggaatgaggtttaagatgagatttgaaggtgatgaagctcctgaaagaaggtttagtggaacaattattggtattgggagtgtgccagcaatgtcaaaatctccatgggcagattctgactggaaatctctgaaggtccaatgggatgaaccttcggctattgtccgtccagatagagtttcaccatgggaactggaaccattggatgcgagtaatccacaaccacctcagcctccattgaggaataagcgtgcaaggcctccagcttcaccttctgtggttgcggaacttcctccaagtttcggactatggaaacccccatctgaagcagcccaaactctctcattttcggaaccacaacgggctcgagagatatttccttcaattcctgcatcaatcttctcagcatcatcacatgttgaattcaattcaaagaacgagccatccatactaagcaatcagttctactggtcaatgagggattcaaaaactgattctttttctgctagcactaacaaaacaagagttgaaagaaagcaagaaccaactactatgggttgcagattatttggaattgaaataagctcagctgtagaagaagccctgcctgcagctactgtttcaggtgtcggttatgatcaaactgttctctctgtagatgtggactctgatcagatctcacagccatctaatggcaataaatccgatgcccctggaacaagcagtgaacgttctcctcttgagtcccaaagtcgtcaagtgaggagctgcacaaaggtaattatgcaaggtatggcagttgggagggctgtggacttgacaaaactaaatggttatggtgatcttcgcagcaagttggaggagatgtttgatatacagggggacttgtgtcccaccctgaagagatggcaagttgtttacaccgatgatgaggatgacatgatgcttgtcggggatgatccttgggatgaattttgtagcatggtgaaacggatttatatttactcctacgaggaggccaagctgctggctccaaagtctaagctgccagtcataggtgacaccatcaaattgagcagtatgaactcatcacatgaatccgtcgacctggacaatcatgcctcagttactaacagggactgctaa

SEQ ID NO: 1689 - protein, 673 aa, Oryza sativa (japonica cultivar-group)
MAAAMEMAANPGGSGTCSDALFRELWHACAGPLVTVPKRGERVYYFPQGHMEQLEASTNQQLDQYLPMFNLPSKILCSVVNVELRAEADSDEVYAQIMLQPEADQSELTSLDPELQDLEKCTAHSFCKTLTASDTSTHGGFSVLRRHAEECLPQLDMSQNPPCQELVAKDLHGTEWHFRHIFRGQPRRHLLTTGWSVFVSSKRLVAGDAFIFLRGESGELRVGVRRLMRQVNNMPSSVISSHSMHLGVLATASHAISTGTLFSVFYKPRTSRSEFVVSVNKYLEAKKQNLSVGMRFKMRFEGDEAPERRFSGTIIGIGSVPAMSKSPWADSDWKSLKVQWDEPSAIVRPDRVSPWELEPLDASNPQPPQPPLRNKRARPPASPSVVAELPPSFGLWKPPSEAAQTLSFSEPQRAREIFPSIPASIFSASSHVEFNSKNEPSILSNQFYWSMRDSKTDSFSASTNKTRVERKQEPTTMGCRLFGIEISSAVEEALPAATVSGVGYDQTVLSVDVDSDQISQPSNGNKSDAPGTSSERSPLESQSRQVRSCTKVIMQGMAVGRAVDLTKLNGYGDLRSKLEEMFDIQGDLCPTLKRWQVVYTDDEDDMMLVGDDPWDEFCSMVKRIYIYSYEEAKLLAPKSKLPVIGDTIKLSSMNSSHESVDLDNHASVTNRDC

SEQ ID NO: 1690 - DNA, 2763 bp, Oryza sativa (japonica cultivar-group)
  CDS (1)..(2763)
atggcgtcctcgcaggagaaggccaagacgggtgttctgagaaatgccgcagcgctgctcgacgaaatgcagctcatgggagaaacacagggtgccaagaaggtgatcaactcggagctctggcacgcttgtgccgggccgcttgtgtgcttgccgcagcgggggagcctcgtgtactacttccctcaggggcacagtgaacaggttgcagcgacaactagaaagattccaaattcccgcattccgaactacccaaacctgccatctcagttgctgtgtcaagttcacaacatcaccttgcatgccgacaaggacactgatgaagtttatgcacagatgacccttcagccagtaaactctgaaacggatgtattccctattccaactcttggtgcttataccaaaagcaagcaccccactgaatatttctgcaagaatttaaccgcaagtgatacgagtacacatggtggtttctcggtgccacgaagggctgcagagaagttgttcccacaactggattactcaatgcaacctcctaaccaggagcttattgttcgagatttgcatgataacatgtggacattccgtcacatttatcgtggacagccaaaacgacatcttctaacaactggatggagtctctttgttggggcaaagcgtctaaaagcaggggactctgtcttatttataagggatgagaagtcacaacttcttttgggtgttaggcgagccacgcgacaacaaacaatgttgtcatcttctgttctatctactgatagcatgcacattggcgttcttgctgctgcagctcatgccgcatcaagtggtagttcatttactatctactacaatcctaggacaagtccttcgccatttgtaattcctgtagcaaggtacaacaaggcaacatatatgcaaccatcagttggaatgagatttgcgatgatgtttgagacagaggagtcaagcaagcgcagatacacaggtacagttgtgggaataagtgactacgaccccatgagatggcccaattctaaatggcgcaacttacaggtcgaatgggatgaacatgggtatggagaaagacctgagcgtgtgagcatatgggatattgaaactccagaaaacactcttgtgttcccttcgtcgaccttgaattcaaagcggcaatgtcttcctggttatggagtttcagtgcctgggatggaaattggatcagcaaatatgtcatcatttccaagggctcagggtaatccctatggcagtttgcagcacattccagctgttggatcagaattggctatcatgcttctcaaccaatctggtcaaacccttgggagtccccttagttttcaccagtcctcatattctagtattatccaaaatgtgaagcaaaattatatccctcctctaacagttagcacttcagcttgtttgacaaagcaagaaagcctgccttcagatgatgcccagcaccagttccatatggcaaatatgcagaatggtgatcttgaaggctctgaagtccagcctgtcattgattcgatttctgagtcaaagttgaatgctacatcaagagatccaagaaacacagattcatacacaagtcgaagtacttcggagcaaaacagtaagggtgagcctagaggcaagactcgtaggagtaagaagggcttgcctcacaaaaccgtttcagagaaatctgacctttcttcagccccttcttggatctgtgacaatcagcaggttggtttagaatcgaaactggttggttgtgatgaacaagtaaactgtggaaatattgaagattcatcaggtgcacttactcaaggtaattttgttggacagccgcatggccatcaggttgaacaaaagggagtgctgtcgccaccaaaggtagaatcatcaaaatcacctgatggaggaaagtctgtcaattcgtttccaaaccaagggtgtttttcgcagttcattgatggtcttgattggatgactcagccttcctactaccaagactccaatgtaattcaaccagccggtgtgtcagagaacattttcagttcttctgcagatatacctccctcaatgattgctgatactatggagacttttcaggcttcatgtctttctgattgccttcctaattccatacaagaattcatctccagcccagatctgaattcactaacctttctttcacctgacatgcaaaatttggaggtccaactccagcatgatggaagcaatttgccaagcacgtccaactcgtttgtacagatgagtttttctgaagagagtgcaagtcagagtgcaaacttaagtggacttcacatggaatctacacacagaagcataaacaccacttcatgctctcaaccaatgtctactgggggctttgatgcagggatgtactcaaagttgccacgtttaaaagaatcccaaatcttgtctttgccagagattcataccaattccatgggaacatcagcttgcagtatggatgcaaccgagtacagccttgaccgaagtgcgaagccgatgaaaccaccagtgcggacatatacaaaggttcaaaagcaaggatcagttggaagatctatcgatgttacagggtttagaaattaccatgagttgagatctgccatcgcttgcatgtttggtctccaggggaaattggagcatcctggcagttcagagtggaagcttgtatatgtcgactacgaaaatgatgttcttcttgtcggagatgatccatgggagtaa

SEQ ID NO: 1691 - protein, 920 aa, Oryza sativa (japonica cultivar-group)
MASSQEKAKTGVLRNAAALLDEMQLMGETQGAKKVINSELWHACAGPLVCLPQRGSLVYYFPQGHSEQVAATTRKIPNSRIPNYPNLPSQLLCQVHNITLHADKDTDEVYAQMTLQPVNSETDVFPIPTLGAYTKSKHPTEYFCKNLTASDTSTHGGFSVPRRAAEKLFPQLDYSMQPPNQELIVRDLHDNMWTFRHIYRGQPKRHLLTTGWSLFVGAKRLKAGDSVLFIRDEKSQLLLGVRRATRQQTMLSSSVLSTDSMHIGVLAAAAHAASSGSSFTIYYNPRTSPSPFVIPVARYNKATYMQPSVGMRFAMMFETEESSKRRYTGTVVGISDYDPMRWPNSKWRNLQVEWDEHGYGERPERVSIWDIETPENTLVFPSSTLNSKRQCLPGYGVSVPGMEIGSANMSSFPRAQGNPYGSLQHIPAVGSELAIMLLNQSGQTLGSPLSFHQSSYSSIIQNVKQNYIPPLTVSTSACLTKQESLPSDDAQHQFHMANMQNGDLEGSEVQPVIDSISESKLNATSRDPRNTDSYTSRSTSEQNSKGEPRGKTRRSKKGLPHKTVSEKSDLSSAPSWICDNQQVGLESKLVGCDEQVNCGNIEDSSGALTQGNFVGQPHGHQVEQKGVLSPPKVESSKSPDGGKSVNSFPNQGCFSQFIDGLDWMTQPSYYQDSNVIQPAGVSENIFSSSADIPPSMIADTMETFQASCLSDCLPNSIQEFISSPDLNSLTFLSPDMQNLEVQLQHDGSNLPSTSNSFVQMSFSEESASQSANLSGLHMESTHRSINTTSCSQPMSTGGFDAGMYSKLPRLKESQILSLPEIHTNSMGTSACSMDATEYSLDRSAKPMKPPVRTYTKVQKQGSVGRSIDVTGFRNYHELRSAIACMFGLQGKLEHPGSSEWKLVYVDYENDVLLVGDDPWE

SEQ ID NO: 1692 - DNA, 2457 bp, Oryza sativa (japonica cultivar-group)
  CDS (1)..(2457)
atgagctcgtcgtcggcggccagcatcgggccgccgcagccgccgccgccccccgcgccgcccgaggaagagaagaagtgcctcaactcggagctatggcacgcctgcgccggcccgctcgtctgcctccccaccgtcggcacgcgcgtcgtctacttcccgcaaggccacagcgagcaggtggcggcgtcgacgaacaaggaggtggagggtcacatcccgaactaccccaacctgccggcgcagctgatctgccagctccacgatgtcacaatgcatgcggatgtggagactgacgaggtgtacgcgcagatgacgctccagccactgaacccacaggagcagaacgatgcgtaccttcccgcggagatggggataatgagcaagcagccgacgaattacttctgcaagacattgacggcgagcgacaccagcacgcacggggggttctccgtgccccgccgtgctgctgagcgcgtcttccctcctttggatttcacacagcagcctccagcccaggagctaattgcacgggatattcatgacatcgagtggaagttcaggcacatctttcgaggccaacccaaacgacacctgctaaccactggctggagcgtttttgtcagtgctaagagacttgttgctggagattctgtgcttttcatatggaacgagaaaaaccagcttttacttggaataagacgtgccagtcggccacagactgtgatgccttcctctgttctttcaagcgatagcatgcacataggtctccttgcagcagcagctcatgctgctgctacaaacagccgtttcactattttctacaacccccgggcaagtccatcagaatttgtcataccactgtcaaaatacatcaaggctgtttttcacacccggatatcggttgggatgcggttcaggatgttgtttgagactgaggaatcaagcgttcgcaggtatatggggactataactgaagttagtgatgcagacccagtccgttggcctagttcctattggagatctgtgaaggttggttgggatgaatcaactgcaggggaaagaccaccaagagtttctttatgggaaattgaaccattgacaacctttccaatgtatccatctctgttcccactgagagttaagcatccttggtattcaggagttgcttccctgcatgatgacagcaatgctttaatgtggctgagaggagttgctggtgagggaggttttcagtctctgaactttcagtcacctggtattggctcctggggacaacagaggctccatccatccttactgagcagcgatcacgatcagtaccaagcagtagttgctgctgctgctgcttcccaatctggtggttacttaaaacagcaattcttgcaccttcagcaacctatgcagtcccctcaagaacactgcaacctcaacccattattgcagcaacaaattctgcagcaagcaagccagcaacagataattaatcctgatgcccaaaatatccaaacgatgttgagcccaagtgctatacaacagcaactccagcaactacagcaaatgcagcaagttcagaatgatcagaagcagaagattcaaccagatcaaagctaccaagttcctacaagtgcagttctcccaagtccaacatcattaccgagtcatttgcgagaaaaatttggcttctctgatcctaatgcgaattcttcaagcttcatcacctctagcagtagtgataacatgttggattcgagcttccttcagggaagttcgaaagctgtggacttatctcgatttaatcagcctgtagctagtgagcagcagcagcagcagcaacaggcatggaagcagaagtttatgggttcacagtcagtgtcttttgggggctcggttttgcataactcacccacaagcaaagatggttctgttgaaaacaaaattggtcgtgatgtgcaaaaccagtccctttttagtccacaagttgactcttcatccctcctgtacaacatggttcctaatctgacttcgaatgtttcggatggcaacttatcaacgatcccttctggatcaacttatctgcagaatgcaatgtatggttgcttggacgactcttctggtttattgcaaaatacaggagagaacgatccagcaaccagaacatttgtgaaggtttacaagtcaggttcggttgggaggtcgttggacataacccggttctctaattatgctgaacttcgagaagaactgggtcagatgttcggcattaagggtcaattggacgaccctgatagatcaggctggcagcttgtattcgtcgacagggagaatgatgtgcttctccttggagacgacccttgggagtcctttgtgaatagtgtatggtacatcaagatactttcacctgaggatgtgcataagatgggaaagcaaggaaatgatccacggtatctgtcctga

SEQ ID NO: 1693 - protein, 818 aa, Oryza sativa (japonica cultivar-group)
MSSSSAASIGPPQPPPPPAPPEEEKKCLNSELWHACAGPLVCLPTVGTRVVYFPQGHSEQVAASTNKEVEGHIPNYPNLPAQLICQLHDVTMHADVETDEVYAQMTLQPLNPQEQNDAYLPAEMGIMSKQPTNYFCKTLTASDTSTHGGFSVPRRAAERVFPPLDFTQQPPAQELIARDIHDIEWKFRHIFRGQPKRHLLTTGWSVFVSAKRLVAGDSVLFIWNEKNQLLLGIRRASRPQTVMPSSVLSSDSMHIGLLAAAAHAAATNSRFTIFYNPRASPSEFVIPLSKYIKAVFHTRISVGMRFRMLFETEESSVRRYMGTITEVSDADPVRWPSSYWRSVKVGWDESTAGERPPRVSLWEIEPLTTFPMYPSLFPLRVKHPWYSGVASLHDDSNALMWLRGVAGEGGFQSLNFQSPGIGSWGQQRLHPSLLSSDHDQYQAVVAAAAASQSGGYLKQQFLHLQQPMQSPQEHCNLNPLLQQQILQQASQQQIINPDAQNIQTMLSPSAIQQQLQQLQQMQQVQNDQKQKIQPDQSYQVPTSAVLPSPTSLPSHLREKFGFSDPNANSSSFITSSSSDNMLDSSFLQGSSKAVDLSRFNQPVASEQQQQQQQAWKQKFMGSQSVSFGGSVLHNSPTSKDGSVENKIGRDVQNQSLFSPQVDSSSLLYNMVPNLTSNVSDGNLSTIPSGSTYLQNAMYGCLDDSSGLLQNTGENDPATRTFVKVYKSGSVGRSLDITRFSNYAELREELGQMFGIKGQLDDPDRSGWQLVFVDRENDVLLLGDDPWESFVNSVWYIKILSPEDVHKMGKQGNDPRYLS

SEQ ID NO: 1694 - DNA, 2754 bp, Oryza sativa (japonica cultivar-group)
  CDS (1)..(2754)
atgaggctttcgtcgtcgtccggcagcgtcctcccggctcaggcggcgtcgccggaagctgtagaagaacaaaaatgcctgaattcggagctctggcatgcgtgtgccggtccccttgtttcgttgcctgcagtgggtagccgagtggtttatttcccacagggtcacagcgaacaggtagctgcatcaacaaataaagaaatggagtctcagatccccaattatcctaacttgcctccacaacttatttgccaacttcacaatgtgacgatgcatgcagatgcagaaacagatgaggtttacgctcagatgacgctacaaccacttagcccgcaagagctcaaggacccatatctaccagctgaattaggttctgccaacaaacagccaacgaattatttttgcaaaacattaacggcaagtgacacaagtacgcatggcggattctctgttccccgtcgagcagctgagaaagtgttccctccgctggattttactcagcagcctccagcacaggagttaattgcaaaagatcttcatggcaatgagtggaagtttcgtcatatctttcgtggtcagccaaagcgacaccttctaactacaggctggagcgtctttgtaagtgcaaagagacttgtcgccggggattctgtcctatttatctggaatgacaacaaccagcttcttctgggaattcgtcgagctaaccgcccacaaactgttatgccatcttcagtcctatctagtgatagcatgcatattggtcttcttgctgcggctgctcatgctgcttcaacaaatagccggtttacaattttttataacccaagagcaagcccttcagagtttgttatcccactttctaaatatgttaaggctgtatatcatacccgtatatctgtgggcatgcgtttcaggatgctttttgagacagaagagtcaagtgtacggagatacatgggcacgataacaggaattagtgatcttgatgctgctcgttggccaaactcacattggcgttctgtaaaggttggctgggatgaatcaactgccggagagaggcagccaagggtgtcgctttgggagattgagcccttgacaactttcccaatgtacccatctccttttccactcagactgaagcgtccatggccaacaggcttgccttcattacatggtggtaaggatgacgacttgacttcttctctcatgtggctccgagacagcgcaaatcctggtttccaatcattgaatttcgggggtctcggtatgaatccttggatgcagccaaggtttgatgcttccttacttggtctgcaacctgacatgtatcaaacgatagctgcgactgctttccaggacccaacaaagcaggtctctcccacgatattgcagttccagcagccgcagaacataggtggcagagctaatacacttctgccaagtcagattttgcagcaagtgcagcctcagtttcagcagcagcaatacctccaaaacatcaacgagaccacaatccaagggcatgctcagtctgagttccttcagcagcagctccaacgctgccagtcgtttactgagcagaagccacagctgcaaacccagcaacaacagcaagaatcacagcaacaacagcagcagcaatcgcagtgtatgcaagtcccacaacatcagcaaatgcaacagcagaagaacatgaccaactatcagtctgtacctaatgcattgtcaccgttttctcaactctcctctccttctcagtcttcacctatgacactgcaaacagtattaccattctcccagccacagagctatccagacacgagtatgagctcattgtcaccatccaacacatccaccatgcataatgcattgaggccattttcatcggaagcaccttcgcacctaagcatgccaagaccgactgcagtacctgtccctgacccatggtcatcgaagcgagttgcagtggagtctttgcttccctctcgtcctcaggttacatcgcagatggagcagttggactcaacagcacctagtataccacaaagctctgcgttggcgccgcttcctggaagaggatgcttggtggatcaagatgggaactctgatcctcaaaaccatctgttatttggcgttaacatagattcacagtcacttctaatgcaaggtggcatcccaagcctccagggtgagaatgattcgacggcaattccttattccacctccaatttcctgagcccgtcgcagaatgatttccccttggatcaaacactaagtagtgcagactgcttagatgaatcaggatatgtgccgtgttcacagaattctgatcaagtgattaatcgaccacctgcgacctttgtgaaggtttacaaatcgggaacctatggaaggtcacttgatatcactagatttagtagctatcatgaacttcgtagagaactagggcgcctatttggccttgagggccagttggaaaaccctttgagatcaggctggcagcttgtattcgtcgaccgagaggatgatgtcctcctcgttggcgacgacccttggcaggaattcgtgaatagcgtctcctgcataaagatactttcaccacaggaggtgcagcagatgggcaagccctttgagcttttgagctcggctcccggaaagaggctaggtagcagctgtgatgactatgtgagcaggcaggaatcaagaagcctgagcacaggaattgcatctgtcggctcagttgaattctga

SEQ ID NO: 1695 - protein, 917 aa, Oryza sativa (japonica cultivar-group)
MRLSSSSGSVLPAQAASPEAVEEQKCLNSELWHACAGPLVSLPAVGSRVVYFPQGHSEQVAASTNKEMESQIPNYPNLPPQLICQLHNVTMHADAETDEVYAQMTLQPLSPQELKDPYLPAELGSANKQPTNYFCKTLTASDTSTHGGFSVPRRAAEKVFPPLDFTQQPPAQELIAKDLHGNEWKFRHIFRGQPKRHLLTTGWSVFVSAKRLVAGDSVLFIWNDNNQLLLGIRRANRPQTVMPSSVLSSDSMHIGLLAAAAHAASTNSRFTIFYNPRASPSEFVIPLSKYVKAVYHTRISVGMRFRMLFETEESSVRRYMGTITGISDLDAARWPNSHWRSVKVGWDESTAGERQPRVSLWEIEPLTTFPMYPSPFPLRLKRPWPTGLPSLHGGKDDDLTSSLMWLRDSANPGFQSLNFGGLGMNPWMQPRFDASLLGLQPDMYQTIAATAFQDPTKQVSPTILQFQQPQNIGGRANTLLPSQILQQVQPQFQQQQYLQNINETTIQGHAQSEFLQQQLQRCQSFTEQKPQLQTQQQQQESQQQQQQQSQCMQVPQHQQMQQQKNMTNYQSVPNALSPFSQLSSPSQSSPMTLQTVLPFSQPQSYPDTSMSSLSPSNTSTMHNALRPFSSEAPSHLSMPRPTAVPVPDPWSSKRVAVESLLPSRPQVTSQMEQLDSTAPSIPQSSALAPLPGRGCLVDQDGNSDPQNHLLFGVNIDSQSLLMQGGIPSLQGENDSTAIPYSTSNFLSPSQNDFPLDQTLSSADCLDESGYVPCSQNSDQVINRPPATFVKVYKSGTYGRSLDITRFSSYHELRRELGRLFGLEGQLENPLRSGWQLVFVDREDDVLLVGDDPWQEFVNSVSCIKILSPQEVQQMGKPFELLSSAPGKRLGSSCDDYVSRQESRSLSTGIASVGSVEF

SEQ ID NO: 1696 - DNA, 2103 bp, Oryza sativa (japonica cultivar-group)
  CDS (1)..(2103)
atgataactttcgtggattccgcggcgaaggagcgggagcgggagagtgacaagtgcttggacccgcagctgtggcacgcctgcgccggcggcatggtccagatgccgccggtgagctccaaggtgtactacttcccgcaaggccacgccgagcacgcgcaggggcatggccccgtcgagttcccgggcgggcgcgtcccggcgctcgtgctctgccgcgtcgcgggcgtcaggttcatggccgatccggacaccgacgaggtgttcgccaagatccgcctcgtccccgtccgcgccaacgagcagggctacgccggtgacgccgacgacggcattggcgccgccgcggccgcggcggcgcaggaggagaagcccgcgtcgttcgccaagacgctcacgcagtccgacgccaacaacggcggggggttctccgtgccgcgctactgcgccgagaccatcttcccgcgtctcgactactccgccgatccccccgtccagaccgtcctcgccaaggacgtccatggcgtggtctggaagttccgccacatctaccgcggcacgccgaggcgccacctcctcaccacggggtggagcaccttcgtgaaccagaagaagctcgtcgccggcgactccatcgtgttcatgcgcaccgagaacggggatctctgcgtcggcatccgccgcgccaagaaagggggcgtgggaggcccggagttcctgccgccgccgccgccgccgccgccgacacctgccgccggcggcaattacggcgggttctccatgttcctgaggggcgacgacgacggcaacaagatggcggcggcggccaggggcaaggtcagagcccgtgtccggccagaggaggtcgtcgaggcggccaatctcgccgtgagcgggcaaccattcgaggtcgtctactacccgagggcgagcacgccggagttctgcgtgaaggccggggcggtcagagcggcgatgcggacgcagtggttcgccggcatgaggttcaagatggcattcgagacggaggactcatcaaggatcagctggttcatgggcactgtatcggccgtgcaggttgctgaccccattagatggcctaattcaccatggaggcttcttcaggtttcatgggatgaaccggacttgttacagaatgtgaagagggtgagcccatggttggttgagcttgtgtcaaacatgccggccatccaccttgctccattctcgcctccacggaagaagctttgcgtgccgttgtaccccgagcttcccatcgacggccaatttccgacaccgatgttccatggaaacccgctcgcccgtggggttggtcctatgtgctatttcccggatggcactcctgcaggcatacagggagccaggcatgctcaatttggtatatctttatcagatctccaccttaacaaactgcagtcgagtctatcgccccacggccttcaccagcttgatcacggcatgcagccgaggatcgccgctggtctaattatcggtcatccggctgctcgggatgatatctcatgcttgttgaccattggtagcccccagaacaacaagaaatcagatggcaagaaggcgccagcccagctgatgcttttcggaaaacccatactcacagagcagcagatatccttgggtgatgctgcttcggtggatgttaagaagagctcttctgatggtaatgctgaaaatacggtgaataagagtaactccgatgtttcaagcccgagaagtaatcagaatggcaccacagataatttgtcatgtggaggagttccattgtgccaagacaacaaggtacttgatgttgggctggaaacagggcactgcaaggtattcatgcagtcggaggatgtcgggcgcacacttgatctctctgttgttggttcatatgaggaattataccggcggcttgctgacatgttcggcatcgagaaagctgagctgatgagtcatgttttctaccgtgatgcggctggggcactcaagcacactggagatgaacctttcagcgagttcacgaagacggcgcgtaggctgaatatactaacagatacaagcggcgataacttagcgaggtag

SEQ ID NO: 1697 - protein, 700 aa, Oryza sativa (japonica cultivar-group)
MITFVDSAAKERERESDKCLDPQLWHACAGGMVQMPPVSSKVYYFPQGHAEHAQGHGPVEFPGGRVPALVLCRVAGVRFMADPDTDEVFAKIRLVPVRANEQGYAGDADDGIGAAAAAAAQEEKPASFAKTLTQSDANNGGGFSVPRYCAETIFPRLDYSADPPVQTVLAKDVHGVVWKFRHIYRGTPRRHLLTTGWSTFVNQKKLVAGDSIVFMRTENGDLCVGIRRAKKGGVGGPEFLPPPPPPPPTPAAGGNYGGFSMFLRGDDDGNKMAAAARGKVRARVRPEEVVEAANLAVSGQPFEVVYYPRASTPEFCVKAGAVRAAMRTQWFAGMRFKMAFETEDSSRISWFMGTVSAVQVADPIRWPNSPWRLLQVSWDEPDLLQNVKRVSPWLVELVSNMPAIHLAPFSPPRKKLCVPLYPELPIDGQFPTPMFHGNPLARGVGPMCYFPDGTPAGIQGARHAQFGISLSDLHLNKLQSSLSPHGLHQLDHGMQPRIAAGLIIGHPAARDDISCLLTIGSPQNNKKSDGKKAPAQLMLFGKPILTEQQISLGDAASVDVKKSSSDGNAENTVNKSNSDVSSPRSNQNGTTDNLSCGGVPLCQDNKVLDVGLETGHCKVFMQSEDVGRTLDLSVVGSYEELYRRLADMFGIEKAELMSHVFYRDAAGALKHTGDEPFSEFTKTARRLNILTDTSGDNLAR

SEQ ID NO: 1698 - DNA, 2523 bp, Oryza sativa (japonica cultivar-group)
  CDS (1)..(2523)
atggctgctgcagcgacggcggcggcctcgccggttgaggggctcaccggcggcggcggcggtggtggtggaggagtggacgggctgttcgtggagctgtggcgcgcgtgcgcggggccgctggtgacggtgcccgccgtcggggagagggtcttctacctcccgcagggccacatcgagcaggtggaggcatcgacgaaccaggtcgccgagcagcagggggctccgctctacaatctgccatggaagatcccgtgcaaggtcatgaacgtcgagctcaaggctgagcctgatacggatgaggtgtatgcgcagctcaccctgcttccggagaagcaggatgggaatgggagtggtaacgggaatgtgtccaaagacaaggtggaggaggaagaggtggtgccaccagctgcaactgagcggccccgggtgcactccttctgcaagacgctcactgcgtcggacacgagcacgcatggtggcttctcggtgctgcgccggcacgcggatgagtgcctcccaccactggatatgagtcagcatcccccaacacaagagctggtggccaaggatcttcatggggttgagtggcgcttccgtcacatcttccgaggtcagccacgaagacaccttctccagagtggttggagtgtttttgtgagtgccaaacgccttgttgctggagatgccttcatatttctcagaggtgagaatggggaactacgagttggagttcggcgtgcaatgagacaacaagctaatattccatcttcggtcatatcaagccacagtatgcatcttggtgttcttgcaactgcatggcatgcagtgaacactggaaccatgttcactgtgtactacaagccaaggactagtccatctgaatttgtggtaccacgtgatctgtacaaggaatctctgaaacgaaatcattcaatagggatgagattcaagatgacatttgaaggcgaagaggctgcagagcaaagattcactggcacaattgttggagtaggtgattctgacccatctggttgggctgactcaaaatggcgttcccttaaggtgcgatgggatgaagctgcttctgttcctcgtcctgatagggtttctccttggcaaatagaacctgctaacagcccttcccctgtcaaccctcttccagcaccccgaaccaagcgggctcgtccaaatgttttagcttcctcacctgacttgtctgctgtaaacaaagaagttgcttcaaaagtcatggcaaactcgcagcaaaatggtcttccaagggccttccacagtcaagaaaacatgaatttgagaagtcgttttggtgatagcaatgagctaaatacttcccaaaagcttaccatgtggtcttcaggaagcaatcaagagaaaaataatgtttctgtccagagggagctaggttcacagagttggatgcagatgagaaggcctgatggttcctctgagatattatctggatttcaaccactgaaagatacgcggaaccctctgagttcatttcctagtcagatatctggaaaccgttcaaatacgtggaacacaatcaatgttcattatcccgaccaaaatgccaatcataatatgtaccctggcacatggtctcttatgcctccaaacactggttttggtgtgaatcagcagaactacctaatgacgcctgacatcacactccctcaaaggtctcttaatgccaagtttggtgggaatggagcattcacttcgcttcgggcccatggcatagatcagcgctcctctggttggcttgggcatattgagccaagttctcacattgatgatgcctcatcgagtcttatcaagccacagcctttggttattgatcacaatgttcagaaagctaaaggctcttcatgcatgctatttgggatttctcttgacagccctgcaaaacctgaactattgatatccccaccaagtgttgcatttgatgggaagctccaacaggatgcacttgaagaggatgaatgctctgatccttccaagactgtgaagccacttgatggagctcagcacgattctgctagagagaaacatcagtcatgtccagatggtaccaaaaacattcagagtaaacagcaaaatggttcctcccgaagttgcaagaaggtccacaagcaaggaatcgcactcgggaggtcaatagatcttacaaagttcacttgctatgatgagttgattgctgaactggaccagatgtttgacttcaatggtgagctgaacagttcaagcaagaactggatggtcgtttacactgataatgagggtgacatgatgttggttggtgatgatccttggaatgaattctgcaacatggttcataaaatcttcatctacacgagggaggaggtccagaagatgaatccgggtgccctaaactcaaggtcagaggatagccggtctacttccgtggaacgagggctagttggcgaagggctccaaggtggtctatccaccccatcactgaattctgagaactgctaa

SEQ ID NO: 1699 - protein, 840 aa, Oryza sativa (japonica cultivar-group)
MAAAATAAASPVEGLTGGGGGGGGGVDGLFVELWRACAGPLVTVPAVGERVFYLPQGHIEQVEASTNQVAEQQGAPLYNLPWKIPCKVMNVELKAEPDTDEVYAQLTLLPEKQDGNGSGNGNVSKDKVEEEEVVPPAATERPRVHSFCKTLTASDTSTHGGFSVLRRHADECLPPLDMSQHPPTQELVAKDLHGVEWRFRHIFRGQPRRHLLQSGWSVFVSAKRLVAGDAFIFLRGENGELRVGVRRAMRQQANIPSSVISSHSMHLGVLATAWHAVNTGTMFTVYYKPRTSPSEFVVPRDLYKESLKRNHSIGMRFKMTFEGEEAAEQRFTGTIVGVGDSDPSGWADSKWRSLKVRWDEAASVPRPDRVSPWQIEPANSPSPVNPLPAPRTKRARPNVLASSPDLSAVNKEVASKVMANSQQNGLPRAFHSQENMNLRSRFGDSNELNTSQKLTMWSSGSNQEKNNVSVQRELGSQSWMQMRRPDGSSEILSGFQPLKDTRNPLSSFPSQISGNRSNTWNTINVHYPDQNANHNMYPGTWSLMPPNTGFGVNQQNYLMTPDITLPQRSLNAKFGGNGAFTSLRAHGIDQRSSGWLGHIEPSSHIDDASSSLIKPQPLVIDHNVQKAKGSSCMLFGISLDSPAKPELLISPPSVAFDGKLQQDALEEDECSDPSKTVKPLDGAQHDSAREKHQSCPDGTKNIQSKQQNGSSRSCKKVHKQGIALGRSIDLTKFTCYDELIAELDQMFDFNGELNSSSKNWMVVYTDNEGDMMLVGDDPWNEFCNMVHKIFIYTREEVQKMNPGALNSRSEDSRSTSVERGLVGEGLQGGLSTPSLNSENC

SEQ ID NO: 1700 - DNA, 2700 bp, Oryza sativa (japonica cultivar-group)
  CDS (1)..(2700)
atgaagctctctccgccggcgtcggcggatatgccgcaggccttgccggagaacgacggggaacaaagatgtctgaactcggagctgtggcatgcatgcgctgggccccttgtgtctttgccagtggtcaggagcagggtcgtctactttccacagggccatagcgagcaggttgcggcatcaactaataaggaagttgatgctcaaatcccaaattatccaaacttacctcctcagttaatctgccagcttcataatgtcaccatgcatgctgatgcagagacagatgaagtttatgctcagatgacattgcaaccattgagcccggaagagcaaaaggagcctttccttccaatggagttgggtgctgctagcaagcaacccactaattacttctgcaagacattgactgcaagtgacacgagcactcatggtggtttctctgttccccgccgggcagctgagaaagtcttccctccactagatttttcacagcagcctccggcacaggagctgattgcaagagatttgcatgataatgaatggaaatttcgccatatatttcgtggtcagcctaaaaggcatctcctgacaacaggctggagtgtgtttgtgagtgcgaaaagactagtagcaggagactctgttatatttatctggaatgataacaatcaacttcttttgggaatacgtcgtgcaaatcgccaacagactgttatgccctcttccgtgttgtcaagcgatagcatgcatataggtcttcttgcagcagcagctcatgctgcagccacaaatagtcgcttcactattttctataaccccagggctagcccttctgaatttgtgattccattggccaagtatgtgaaagctgtttaccacacacgtgtatctgttggaatgcgttttagaatgcttttcgagacagaggagtcaagtgtcaggcgatacatgggtacaatcaccagcataagtgatctagattcagtgcgctggccaaactcacactggcgttctgttaaggttggttgggatgagtccaccactggtgataaacagccaagggtttctctttgggagattgagcctttgacaacctttccgatgtaccccagtgcttttcctttaagacttaagcgtccgtgggcttcaggactgcctatgcatggcatgttcaatggtgggggaaatgacgattttgcacgctattcttctctcatgtggcttcgagacggaaatagaggaacccagtccctgaattttcaaggacatggagtctcaccatggcttcagccaagaatagattctccattgctgggccttaagccagacacgtaccagcaaatggctgcagcagcactggaagaaattcgatatggggacccttcaaagcagcatccagctactctgcaataccaacagactcataatctgaacagtggattaaattctctgtttgcaagccatgttctagggcaggtgcagtttcaacctcagcagtcacccctgcaagttgttcagcaaggccattgtcagaacactggtgactctgggttccttcaaggtcagcttccacggctgcagttgcataacactcagcagctgctaaaggagcaagagttgcagcagcagcaaagacagcatgttttacaagagcaatctagtcaagagatgcaacagcagctcccatctagtgatcatcatgttgctgatgtagcttctgagtctggatctgctcctcaggcacaatcatcattgcttagtggatcatcattctacaatcagaacctcttagaaggaaatagtgatccccctttacatctacacaacaatttccacaacttctctaaccaggaagcctcaaaccttcttattttgcctcgaagtagccaattaatggcatcagatgggtggccttcaaagcgattaactttagaatctgctgttcatcctgaagctccgtccatgcaccccaagattgagaaagtaaatcaccagggtatatctcattttcctggcgcctttccaccacaatcagcaagaggctgttccatcgtccaggattgcagggcagatgctgagaaccgcctactttcatcatcatttgaactccaggatggcatgacaagcatcataactgatgctaacagagaaactgatactatggccatacctttgttgagatatagtggtgcagatttgacaactgaaaacaccttagcaacctccaattgtttaggtgaatctggaacgttcaatcctcttaataacatatctgtaaatccatcacaaggagcaacctttgtgaaggtttacaaatcagggtcccttgggagatcacttgacatctccagattcagcagctactgcgagttacgtagtgagcttgagcgtctctttggtcttgaaggccaactggaggaccctgtaagatcaggctggcagcttgtatttgtcgaccgggaaaatgacattcttctcgtcggcgacgatccatggcaggagtttgcaaatagcgtatggtgcatcaaaatactctcgccacaggaggtgcagcagttggttcgtggtggagacggccttctgtcctcacctggagcaaggatgcagcagagcaatgcctgcgacgactattctgcaagccacaacatgcagaatatcgccggaaacattgcatctgtagcgcctctggactactga

SEQ ID NO: 1701 - protein, 899 aa, Oryza sativa (japonica cultivar-group)
MKLSPPASADMPQALPENDGEQRCLNSELWHACAGPLVSLPVVRSRVVYFPQGHSEQVAASTNKEVDAQIPNYPNLPPQLICQLHNVTMHADAETDEVYAQMTLQPLSPEEQKEPFLPMELGAASKQPTNYFCKTLTASDTSTHGGFSVPRRAAEKVFPPLDFSQQPPAQELIARDLHDNEWKFRHIFRGQPKRHLLTTGWSVFVSAKRLVAGDSVIFIWNDNNQLLLGIRRANRQQTVMPSSVLSSDSMHIGLLAAAAHAAATNSRFTIFYNPRASPSEFVIPLAKYVKAVYHTRVSVGMRFRMLFETEESSVRRYMGTITSISDLDSVRWPNSHWRSVKVGWDESTTGDKQPRVSLWEIEPLTTFPMYPSAFPLRLKRPWASGLPMHGMFNGGGNDDFARYSSLMWLRDGNRGTQSLNFQGHGVSPWLQPRIDSPLLGLKPDTYQQMAAAALEEIRYGDPSKQHPATLQYQQTHNLNSGLNSLFASHVLGQVQFQPQQSPLQVVQQGHCQNTGDSGFLQGQLPRLQLHNTQQLLKEQELQQQQRQHVLQEQSSQEMQQQLPSSDHHVADVASESGSAPQAQSSLLSGSSFYNQNLLEGNSDPPLHLHNNFHNFSNQEASNLLILPRSSQLMASDGWPSKRLTLESAVHPEAPSMHPKIEKVNHQGISHFPGAFPPQSARGCSIVQDCRADAENRLLSSSFELQDGMTSIITDANRETDTMAIPLLRYSGADLTTENTLATSNCLGESGTFNPLNNISVNPSQGATFVKVYKSGSLGRSLDISRFSSYCELRSELERLFGLEGQLEDPVRSGWQLVFVDRENDILLVGDDPWQEFANSVWCIKILSPQEVQQLVRGGDGLLSSPGARMQQSNACDDYSASHNMQNIAGNIASVAPLDY

SEQ ID NO: 1702 - DNA, 2559 bp, Oryza sativa (japonica cultivar-group)
  CDS (1)..(2559)
atggcgacggcggaggtcggcggcggcggcggtgagggggatgctgctgccgcggcggtggcgcgaggcggcggcggcggaggaggaggaggaggaggggaggacgcgctgttcacggagctgtggagcgcgtgcgcggggccgctggtgacggtgccgagggttggggagaaggtgttctacttcccgcaggggcacatcgagcaggtggaggcctcgaccaaccaggtaggcgagcagcggatgcagttgtacaatctcccatggaagatcctgtgtgaggttatgaacgttgagctgaaggccgagccagacaccgacgaggtttatgctcagctcactctgcttcctgaatcgaagcaacaagaagataacggctctactgaggaggaggtgccttctgctccagcagctgggcatgttaggccacgggtgcactcattctgcaagacattgaccgcctcggacacgagcacacatggcggcttctcggtgctgcgacgccacgcggacgaatgcctcccaccactggatatgagccgtcagcctccaacacaagagctggtggccaaggatctgcacggtgtggaatggcgctttcgtcacatattcagaggtcaaccacgaagacaccttttgcagagtggctggagtgtgtttgttagtgccaaacggcttgttgctggggatgcctttatctttctcagaggtgagaacggggaactgcgtgttggagtcaggcgtgcaatgaggcagcaaactaatgttccatcttcagtgatatcaagccacagcatgcatcttggggttcttgccacagcatggcatgctgttaacacagggaccatgttcactgtctactacaagcctaggacaagtccagccgagtttgtggtcccttacgatcgctatatggaatcactgaaacaaaattactccattgggatgagatttaagatgaggtttgaaggtgaagaggctccagagcaaagattcactgggactattgtcggaatgggggattctgatccagctggctggcctgaatcaaaatggcgctcccttaaggtgagatgggatgaagcttcttccatacctcgccctgaaagagtttctccctggcaaatagaacctgctgtaagccctcctcctgtcaacccactaccagttccaagaaccaagaggcttcgtccgaatgctaccgctttgccggctgactcttctgctatagcaaaagaagctgctacgaaagttgtggtcgagtctgaaccaaatggtacgcaaaggaccttccagacacaagagaatgcaaccccaaaaagtggtttcggcaatagcagcgagttagaaagtgctcagaaatcaatcatgcgtccatctggatttgatcgtgagaaaaataacactcccatacagtggaagctaggttcagatggtcggatgcagatgagcaagcctgagagttacagtgagatgctatctggatttcagccacctaaagatgtacaaatcccacagggtttctgttctttacctgagcagattactgcaggccattctaacttctggcacacagtaaatgctcagtatcaagatcaacagagcaatcacaatatgttccccagctcatggtccttcatgcctccaaatactcgccttggattaaacaaacagaactattcaatgattcaggaagctggtgtgttgtctcaaaggcctggaaatacaaagtttgggaatggagtttatgctgcactgccaggccgaggtactgagcaatactcagggggttggtttggccatatgatgccaaattcccacatggatgatacacagccacgcctgatcaagcctaaacctctggttgttgcccatggtgatgttcagaaagctaaaggtgcttcatgcaaactatttggaattcaccttgacagcccagcgaaatctgaacctttgaaatctccatcaagtgttgtatatgatgggacgccacaaacaccaggtgctactgaatggcgccgaccagatgtaactgaagtagagaaatgttctgatccttctaaggccatgaagccacttgatactccgcaaccagactctgttcctgagaagccttcttctcagcaagcttcacgaaacatgtcgtgcaaatcacaaggtgtatcaactagaagctgcaagaaggtccacaagcaaggcattgcacttggcaggtctgtggaccttacaaagtttaatggctatgaagagttgattgctgagctggatgacatgtttgatttcaatggtgaactgaagggtcctaagaaggagtggatggttgtctacactgacaacgaaggtgacatgatgctagttggggatgatccctggattgaattctgcgacatggttcacaagatcttcatctacacaagagaagaggttcagcggatgaatccgggaaccctgaactcaagatcagaagatagtcatgctaattcaatggaaaggggctcagtcggcagagaaatgcgaggctgcttgtcaacctcgtctcttaattctgagaactgctaa

SEQ ID NO: 1703 - protein, 852 aa, Oryza sativa (japonica cultivar-group)
MATAEVGGGGGEGDAAAAAVARGGGGGGGGGGGEDALFTELWSACAGPLVTVPRVGEKVFYFPQGHIEQVEASTNQVGEQRMQLYNLPWKILCEVMNVELKAEPDTDEVYAQLTLLPESKQQEDNGSTEEEVPSAPAAGHVRPRVHSFCKTLTASDTSTHGGFSVLRRHADECLPPLDMSRQPPTQELVAKDLHGVEWRFRHIFRGQPRRHLLQSGWSVFVSAKRLVAGDAFIFLRGENGELRVGVRRAMRQQTNVPSSVISSHSMHLGVLATAWHAVNTGTMFTVYYKPRTSPAEFVVPYDRYMESLKQNYSIGMRFKMRFEGEEAPEQRFTGTIVGMGDSDPAGWPESKWRSLKVRWDEASSIPRPERVSPWQIEPAVSPPPVNPLPVPRTKRLRPNATALPADSSAIAKEAATKVVVESEPNGTQRTFQTQENATPKSGFGNSSELESAQKSIMRPSGFDREKNNTPIQWKLGSDGRMQMSKPESYSEMLSGFQPPKDVQIPQGFCSLPEQITAGHSNFWHTVNAQYQDQQSNHNMFPSSWSFMPPNTRLGLNKQNYSMIQEAGVLSQRPGNTKFGNGVYAALPGRGTEQYSGGWFGHMMPNSHMDDTQPRLIKPKPLVVAHGDVQKAKGASCKLFGIHLDSPAKSEPLKSPSSVVYDGTPQTPGATEWRRPDVTEVEKCSDPSKAMKPLDTPQPDSVPEKPSSQQASRNMSCKSQGVSTRSCKKVHKQGIALGRSVDLTKFNGYEELIAELDDMFDFNGELKGPKKEWMVVYTDNEGDMMLVGDDPWIEFCDMVHKIFIYTREEVQRMNPGTLNSRSEDSHANSMERGSVGREMRGCLSTSSLNSENC

SEQ ID NO: 1704 - DNA, 2322 bp, Arabidopsis thaliana
  CDS (1)..(2322)
atgaagctgtcaacatctggattgggtcaacagggtcatgaaggagagaagtgtctgaattctgagctatggcatgcttgtgctggaccattagtctctcttccatcatctggtagtcgagttgtttactttccacagggtcacagtgaacaggtagctgctacaactaataaggaagttgatggtcacatacccaattacccaagcctaccaccacaattgatatgccagctccataatgttacaatgcatgcagatgttgagacggatgaagtctatgctcaaatgacacttcaaccattgacaccggaggagcagaaggaaacatttgtaccgattgagttggggataccgagtaagcaacctagtaattatttttgtaagactctcacagctagtgataccagtacacatggagggttttctgttcctagacgtgctgctgagaaagtgtttcctccattggattacacactgcagccaccagctcaagaactgattgcaagggatctccatgatgttgaatggaagtttaggcatatctttcggggacagcccaaacggcatctcctaactactggatggagtgtctttgtcagtgccaagcgactagtagctggagattctgtcattttcatcaggaatgaaaagaatcaactctttttgggaattcgtcatgccactcggccgcagactattgtaccatcatctgttttatctagtgatagcatgcatattggactccttgctgctgctgcacatgcttctgcaactaatagctgtttcactgttttctttcatccaagggctagccaatctgagtttgtgatacaactttccaagtacattaaagccgtttttcacacgcgtatttcagttgggatgcgctttcgcatgctcttcgagacagaagagtcgagtgtccgcaggtacatgggtactataactggtattagtgatctagattctgttcgttggccaaactctcattggcgatctgtgaaggttggttgggatgaatcgactgcaggggagagacagccaagggtttctttatgggagattgagcctctgactacctttcctatgtatccatctctttttcctctcagactaaaacgtccatggcatgctggcacatcatctttgcctgatggaaggggtgatttgggaagtggtctaacatggctaagagggggaggtggagagcagcaaggtttgcttcctctaaattatccatctgttggtttgtttccatggatgcaacaaaggctggatctcagtcaaatggggactgataataatcagcaataccaagcaatgttagctgctgggttgcagaacatcggcggtggagatcctttaagacagcagtttgtacagctgcaagagcctcaccaccaatatcttcaacaatcagcttcccataattctgatttgatgcttcagcagcaacagcagcaacaagcgtcacgccatctcatgcatgctcaaacacagattatgagtgagaatcttccgcagcagaatatgcgacaagaagttagtaaccaaccagctggacagcagcaacagctacagcaaccggaccaaaatgcatatcttaatgctttcaaaatgcaaaatggccatcttcaacagtggcagcagcaatcagagatgccatctccctcgttcatgaagtcagattttactgactcaagcaacaaatttgcaacaactgctagtccggcttctggagatggcaatcttttgaatttttctataaccggtcagtctgtactccctgagcagttaacaacagagggctggtctccaaaagcatccaacactttttctgaaccgttgtcacttccacaagcctatcctgggaagagtcttgctctagaacccggaaatccgcagaatccctctcttttcggtgttgatcccgactctggactcttcctccccagtacggttccccgctttgcttcttcatcaggagatgctgaagcttcccctatgtcactaacagattcaggatttcagaattccttatatagctgcatgcaagacacaactcatgagttattgcatggagctggacagattaactcgtccaaccaaaccaagaactttgtaaaggtttataaatctggttcggttgggcgttcattagacatctcccgattcagcagctaccacgagctgcgagaagagttagggaagatgtttgctatcgaagggttgttggaagacccccttagatcaggctggcagcttgtattcgttgacaaggaaaatgatattcttctccttggtgatgacccatgggagtaa

SEQ ID NO: 1705 - protein, 773 aa, Arabidopsis thaliana
MKLSTSGLGQQGHEGEKCLNSELWHACAGPLVSLPSSGSRVVYFPQGHSEQVAATTNKEVDGHIPNYPSLPPQLICQLHNVTMHADVETDEVYAQMTLQPLTPEEQKETFVPIELGIPSKQPSNYFCKTLTASDTSTHGGFSVPRRAAEKVFPPLDYTLQPPAQELIARDLHDVEWKFRHIFRGQPKRHLLTTGWSVFVSAKRLVAGDSVIFIRNEKNQLFLGIRHATRPQTIVPSSVLSSDSMHIGLLAAAAHASATNSCFTVFFHPRASQSEFVIQLSKYIKAVFHTRISVGMRFRMLFETEESSVRRYMGTITGISDLDSVRWPNSHWRSVKVGWDESTAGERQPRVSLWEIEPLTTFPMYPSLFPLRLKRPWHAGTSSLPDGRGDLGSGLTWLRGGGGEQQGLLPLNYPSVGLFPWMQQRLDLSQMGTDNNQQYQAMLAAGLQNIGGGDPLRQQFVQLQEPHHQYLQQSASHNSDLMLQQQQQQQASRHLMHAQTQIMSENLPQQNMRQEVSNQPAGQQQQLQQPDQNAYLNAFKMQNGHLQQWQQQSEMPSPSFMKSDFTDSSNKFATTASPASGDGNLLNFSITGQSVLPEQLTTEGWSPKASNTFSEPLSLPQAYPGKSLALEPGNPQNPSLFGVDPDSGLFLPSTVPRFASSSGDAEASPMSLTDSGFQNSLYSCMQDTTHELLHGAGQINSSNQTKNFVKVYKSGSVGRSLDISRFSSYHELREELGKMFAIEGLLEDPLRSGWQLVFVDKENDILLLGDDPWE

SEQ ID NO: 1706 - DNA, 1518 bp, Arabidopsis thaliana
  CDS (1)..(1518)
atggaaaataatggagaaatgaatgcacagcctgaattatcagttgatataaccaagacttatatgtatgagaaattatggaacatatgtgctggacctttgtgtgttcttccgaaacctggagaaaaagtttattactttcctcaagggcacatcgagctcattgagaattctacaagagatgaattggatcatatcaggccaatttttgatcttccatctaagcttcgatgtcgtgttgtggctattgatcgtaaggtagacaaaaatacagatgaagtctatgctcagatttcgttaatgcctgatacaacagaagttatgacccataatactactatggatactcgaagaccaatagtttatttttttagtaaaattttaacggcgtctgacgtcagtttaagtggtggattaattattcccaaacaatatgccattgagtgttttcctccgctggatatgtcccaaccaatatccacacaaaatcttgttgcaaaggatctctatggtcaagaatggagtttcaaacatgtctttagaggtacaccgcagagacatatgtttactagcggcggcggctggagcgtatttgcaacaacaaaaagattgattgttggggatatatttgtactccttagaggagagaatggggagttacgatttggtattaggcgagcaaagcatcaacaaggccacataccttcatcagtaatatcagcaaattgtatgcaacatggagtaatagcttcagtagtgaatgcttttaaaaccaaatgcatgttcaatgtggtttataagccaagttcaagtcaatttgttataagctatgacaaatttgttgatgcaatgaacaataattacattgttggttcgagatttaggatgcagtttgagggtaaggatttttctgaaaaaagatacgatgggacgattattggtgtaaatgacatgtctcctcattggaaggattcagaatggcgaagcctaaaagtgcaatgggacgagctttcaccatttctaagacctaatcaggtttcaccttgggacatcgagcatctaattccttcgtcagatatctctcaatcaagtttgaaaaagaaaaaacattggcttcaattgaatgaaattggtgcaacattatcgaatctttggacatgccaagaaattggacaacggagcatgaattctcctataagtgttcctgagtttagttatcccaatgcaattgaagattcaaagtttctttctggtttgctactgaatcactcactcctagccatacctaatgaaaactataacagcgaccaaatgattcaaccaaggaaagaagatataacaactgaagcaaccactagttgcctcttgtttggagttgatctgaccaaagtatcaaagagcaaagattccatctgtccaattgaatcatgcaaaaaatcagaaatttcaaaactcaaaaatcaaaaagcaaccactagttgcctcaagataaaaagtttgaccaaacccaacctctga

SEQ ID NO: 1707 - protein, 505 aa, Arabidopsis thaliana
MENNGEMNAQPELSVDITKTYMYEKLWNICAGPLCVLPKPGEKVYYFPQGHIELIENSTRDELDHIRPIFDLPSKLRCRVVAIDRKVDKNTDEVYAQISLMPDTTEVMTHNTTMDTRRPIVYFFSKILTASDVSLSGGLIIPKQYAIECFPPLDMSQPISTQNLVAKDLYGQEWSFKHVFRGTPQRHMFTSGGGWSVFATTKRLIVGDIFVLLRGENGELRFGIRRAKHQQGHIPSSVISANCMQHGVIASVVNAFKTKCMFNVVYKPSSSQFVISYDKFVDAMNNNYIVGSRFRMQFEGKDFSEKRYDGTIIGVNDMSPHWKDSEWRSLKVQWDELSPFLRPNQVSPWDIEHLIPSSDISQSSLKKKKHWLQLNEIGATLSNLWTCQEIGQRSMNSPISVPEFSYPNAIEDSKFLSGLLLNHSLLAIPNENYNSDQMIQPRKEDITTEATTSCLLFGVDLTKVSKSKDSICPIESCKKSEISKLKNQKATTSCLKIKSLTKPNL

SEQ ID NO: 1708 - DNA, 1773 bp, Arabidopsis thaliana
  CDS (1)..(1773)
atggaaactggcaacgttgtgaatgcacaacctgaattatcaggcataattgatggatccaagagctatatgtacgagcagttatggaaactctgtgcgggacctttgtgtgatattccaaaacttggagaaaatgtttattactttcctcaaggcaatatagagcttgttgatgcatctacaagagaagagttgaatgagttacaaccaatttgtgatcttccttctaagcttcaatgccgtgttattgcaattcatcttaaggtggaaaacaatagtgatgagacttatgctgagatcactttgatgccagatacaactcaagttgtaatccctactcagagtgaaaatcaatttaggccattagttaattcctttacgaaggttttaacggcctctgatacaagcgcttatggtggattctttgttccgaaaaaacatgccattgaatgtctccctccactgcctctaccggcacaagaacttcttgctaaagatctccatggtaatcaatggagattcagacacagctatagaggtacaccgcaaagacattcgttaacaactggttggaatgaattcacaacatcgaaaaagttggttaaaggagatgttattgtattcgttaggggagagactggagagttacgagttggtatcagacgagcaagacatcaacaagggaatataccttcatcaatagtatcaatagattgtatgagacatggggtaattgcttccgcaaagcatgctcttgataaccaatgtatattcattgtggtttacaagccaagtatcaggtcaagtcaatttattgtcagttacgacaaattcttagacgctatgaacaataagttcattgtcggttcaagatttacaatgcggtttgagggtgatgatttctctgaaagaagatattttgggacaattattggagttaatgatttctctcctcattggaagtgttcagagtggcgcagcttagaagttcagtgggatgaatttgcatcattttcgagacctaataaagtgtcaccctgggagatcgaacatttaatgtctgcgttaaatgttccgcgatcatctttgctcaagaacaagcgtttacgagaagttaatgaattcggacaagaaattggacaactaagcgtcgcctccccgatgaatacttctcttcgttatcgtgatacaactgaagatgctatgaatccttctagattgctaatgagctaccctgtccaaccaatgcccaaactaaattacaataaccaaatggttacacaaatagaagaaaatataacaaccaaggcagtcactaattttaggctgtttggagtctctctagccattcctctagtgatcaaagatcccattgaagaaattggctcggatatttcgaaacttactgaaggaaaaaagtttggtcaaagccaaactttgagatcaccaatagagatccaaagcaagcagtttggttctactagaacttgtaccaaagttcaaatgcaaggtgtaacaataggaagagctgtggatttaagtgttcttaatggatatgatcagctaatactagaattggagaagctctttgatctcaaaggccaactacaaactcgcaaccaatggaaaatagctttcacagatagtgacgggtatgagatgcttgttggagacgatccatggcctgaattctgcaaaatggtgaagaagatattgatatattcaaaagaggaggtcaaaaacctaaagtccagtaagagtctctcaagttga

SEQ ID NO: 1709 - protein, 590 aa, Arabidopsis thaliana
METGNVVNAQPELSGIIDGSKSYMYEQLWKLCAGPLCDIPKLGENVYYFPQGNIELVDASTREELNELQPICDLPSKLQCRVIAIHLKVENNSDETYAEITLMPDTTQVVIPTQSENQFRPLVNSFTKVLTASDTSAYGGFFVPKKHAIECLPPLPLPAQELLAKDLHGNQWRFRHSYRGTPQRHSLTTGWNEFTTSKKLVKGDVIVFVRGETGELRVGIRRARHQQGNIPSSIVSIDCMRHGVIASAKHALDNQCIFIVVYKPSIRSSQFIVSYDKFLDAMNNKFIVGSRFTMRFEGDDFSERRYFGTIIGVNDFSPHWKCSEWRSLEVQWDEFASFSRPNKVSPWEIEHLMSALNVPRSSLLKNKRLREVNEFGQEIGQLSVASPMNTSLRYRDTTEDAMNPSRLLMSYPVQPMPKLNYNNQMVTQIEENITTKAVTNFRLFGVSLAIPLVIKDPIEEIGSDISKLTEGKKFGQSQTLRSPIEIQSKQFGSTRTCTKVQMQGVTIGRAVDLSVLNGYDQLILELEKLFDLKGQLQTRNQWKIAFTDSDGYEMLVGDDPWPEFCKMVKKILIYSKEEVKNLKSSKSLSS

SEQ ID NO: 1710 - DNA, 1797 bp, Arabidopsis thaliana
  CDS (1)..(1797)
atggaaactggcaacgttgtgaatgcacaacctgaattatcaggcataattgatagatccaagagctatatgtacgagcagttatggaaactctgtgcgggacctttgtgtgatattccaaaacttggagaaaaggtttattactttcctcaaggcaatatagagcttgttgaggcatctacaagagaagagttgaatgagttacaaccaatttgtgatcttccttctaagcttcaatgtcgtgttattgcaattcatcttaaggtggaaaacaatagtgatgagacttatgctaagatcactttgatgccagatacaactgtaagtgaaaatttacaagttgtaatccctactcagaatgaaaatcaatttaggccattagttaattcctttacaaaggttttaactgcctctgatataagtgctaatggtgtattttctgttccgaaaaaacatgccattgaatgtctccctcctctggatatgtctcagcctctaccggcacaagaacttcttgctatagatctccatggtaatcaatggagcttcagacacagctatagaggtacaccgcaaagacatttattaacaactggttggaatgaatttacaacatcaaaaaaattggttaaaggagatgttattgtattcgttaggggagagactggagagttacgagttggtatcagacgagcaagacatcaacaagggaatataccttcatcaatagtatcaatagattgtatgagacatggggtaattgcttccgcaaagcatgcttttgataaccaatgtatgttcattgtggtttacaagccaaggtcaagtcaatttattgtcagttacgacaaattcttagacgctgtgaacaataagttcaatgtcggttcaagatttacaatgcggtttgagggtgatgatttatctgaaagaagatattttgggacaattattggagttagtaatttctctcctcattggaagtgttcagactggcgcagcttagaagtgcagtgggatgaatttgcatcatttttgagacctaataaagtgtcaccctgggagatcgaacatttaatgcctgcgttaaatgttccgcgatcatcttttctcaagaacaagcgtttacgagaagttaatgaattcggttcttcatcatcacatctcttgcctcctatattgacacaaggacaagaaattggacaactaagcgtggcctccccgatgaatatttctcttctttatcgtgaaacaacagaagatgctatgaatccttctagattgctaatgagctaccctgtccaaccaatgcccaaacgaaattacaataaccaaatggttacacaaatagaagaaaatataacaaccaaggcaggcactaattttaggttgtttggagtctctctggccactcctccggtgatcaaagatcccattgaacaaattggctcggatatttcgaaacttactgaaggaaaaaagtttggtcaaagccaaactttgagatcaccaacaaaaatccaaagcaagcagttcagttctactagaacttgtacgaaagttcaaatgcaaggtgtaacaataggaagagctgtggatttaagtgttcttaatggatatgatcagctaatactagaattggagaagctcttcgatctcaaaggccaattacaaactcgcaaccaatggaaaataattttcacaggtagtgacgaggatgagatgcttgttggagacgatccatggcctgaattctgcaacatggtgaagaggatatatattcaaaagaggaggtaa

SEQ ID NO: 1711 - protein, 598 aa, Arabidopsis thaliana
METGNVVNAQPELSGIIDRSKSYMYEQLWKLCAGPLCDIPKLGEKVYYFPQGNIELVEASTREELNELQPICDLPSKLQCRVIAIHLKVENNSDETYAKITLMPDTTVSENLQVVIPTQNENQFRPLVNSFTKVLTASDISANGVFSVPKKHAIECLPPLDMSQPLPAQELLAIDLHGNQWSFRHSYRGTPQRHLLTTGWNEFTTSKKLVKGDVIVFVRGETGELRVGIRRARHQQGNIPSSIVSIDCMRHGVIASAKHAFDNQCMFIVVYKPRSSQFIVSYDKFLDAVNNKFNVGSRFTMRFEGDDLSERRYFGTIIGVSNFSPHWKCSDWRSLEVQWDEFASFLRPNKVSPWEIEHLMPALNVPRSSFLKNKRLREVNEFGSSSSHLLPPILTQGQEIGQLSVASPMNISLLYRETTEDAMNPSRLLMSYPVQPMPKRNYNNQMVTQIEENITTKAGTNFRLFGVSLATPPVIKDPIEQIGSDISKLTEGKKFGQSQTLRSPTKIQSKQFSSTRTCTKVQMQGVTIGRAVDLSVLNGYDQLILELEKLFDLKGQLQTRNQWKIIFTGSDEDEMLVGDDPWPEFCNMVKRIYIQKRR

SEQ ID NO: 1712 - DNA, 3453 bp, Arabidopsis thaliana
  CDS (1)..(3453)
atgaaagctccttcatcaaatggagtttctcctaatcctgttgaaggagaaaggagaaatataaactcagagctatggcacgcttgtgctgggccattgatttcgttgcctccagcaggaagtcttgttgtttacttccctcaaggtcacagtgagcaagtcgcggcttcaatgcagaagcagactgatttcataccaagttacccgaatcttccttccaagctcatatgcatgctccacaatgttacactgaatgctgatcctgagacggatgaggtctatgcgcagatgactcttcagccagtaaacaaatatgacagagatgcattgcttgcttctgacatgggtcttaagctaaacagacaacctaatgaatttttctgcaaaaccctcacggcgagtgacacaagtactcacggtggattttctgtaccccgacgagctgctgagaaaatctttcctgctctggatttctcgatgcaaccaccttgtcaggagcttgttgctaaggatattcatgacaacacatggactttcagacatatttatcgaggtcaaccaaaaaggcacttgctaactacaggctggagtgtgtttgtcagcacgaaaaggctctttgctggagactctgttctttttataagagatggaaaggcgcaacttctgttggggataagacgtgcaaatagacaacagcctgcactttcttcatctgtaatatcaagtgatagcatgcacatcggagttcttgcagctgcagctcatgctaatgctaataacagtcctttcaccattttctacaacccgaggtgggctgctcctgctgagtttgtggttcctttagccaagtataccaaagcgatgtacgctcaagtttccctcggtatgcggtttagaatgatatttgagactgaagaatgtggagttcgtcggtatatgggtacagttaccggtatcagtgatcttgatccagtgagatggaaaaactctcagtggcggaatcttcagattggatgggatgagtcagctgctggtgataggcccagtcgagtttcagtttgggacattgaaccggttttaactcctttctacatatgtcctcctccatttttccgacctcgcttttctggacaacctggaatgccagatgatgagactgacatggagtctgcactgaagagagcaatgccatggcttgataatagcttagagatgaaagacccttcgagtactatctttcctggtctgagtttagttcagtggatgaatatgcagcagcagaacggccagctaccctctgctgctgcacagccaggtttcttcccatcaatgctttcgccaaccgcggcgctgcacaacaatcttggcggcactgatgatccctccaagttactgagctttcagacgccgcacggggggatttcctcctcaaatctccaatttaacaaacagaatcagcaagccccaatgtctcagttgcctcagccaccaactacgttgtcccaacaacagcagctgcagcaattgttgcactcctctttgaaccatcaacaacagcaatcgcagtctcaacaacagcaacaacaacaacagttgctgcagcagcaacaacaattgcagtctcaacaacacagcaacaacaatcaatcgcagtctcagcaacaacaacaattgctccagcagcaacaacaacaacaactgcagcaacaacatcaacaaccgttacagcaacagactcagcagcagcagctaagaacacagccattgcaatctcactcgcatccacagccacaacagttacaacaacataagttgcagcaacttcaggttccacagaatcagctttacaatggtcaacaagcagcgcagcagcatcagtcgcaacaagcatctacacatcatttgcaaccacaattagtttcgggatcaatggcaagcagtgtcatcacgcctccgtccagctcccttaatcaaagctttcaacagcaacaacaacagtctaagcaacttcaacaagcacatcaccatttaggtgctagcactagccagagtagtgtaattgaaaccagcaagtcttcatccaatctgatgtccgcaccgccgcaagagacacagttttcacgacaagtagaacagcagcagcctcctggtctcaacgggcagaatcagcaaacacttttgcagcagaaagctcaccaggcacaggcccaacagatattccagcagagtctcttggaacagccgcatatacagtttcagctgttacagagattacaacagcaacagcagcagcaatttctttcgccgcagtctcagttaccacaccatcaattgcaaagccagcagttgcaacagctgcctactctctctcaaggtcatcagtttccgtcatcttgcactaacaatggcttatcgacgttgcaaccacctcaaatgctggtgagccgacctcaggaaaaacaaaacccaccggttgggggaggggtcaaagcttattcaggcatcacagatggaggagatgcaccttcctcttcaacgtcgccttccaccaacaactgtcagatctcttcttcaggctttctcaacagaagccaaagcgggccagcgatcttgatacctgatgcagcgattgatatgtctggtaatcttgttcaggatctttacagcaaatccgatatgcggctaaaacaagaactcgtgggtcagcaaaagtccaaagctagtttaacagatcatcaactagaagcatctgcctctggaacttcttacggtttagatggaggcgaaaacaacagacaacaaaatttcttggctccaacttttggccttgacggtgattccaggaacagcttgctcggtggagctaatgttgataatggctttgtgcctgacacgctactctcgaggggatatgactcccagaaagatcttcagaacatgctttcaaactatggaggagtgacaaatgacattggtacagagatgtctacttcagctgtaagaactcaatcttttggtgtccccaatgtgcccgccatttcgaacgatctagctgtcaacgatgctggagttcttggtggtggattgtggccagctcagactcagcgaatgcgaacttatacaaaggtgcaaaaacgaggctcagtggggagatcaatagacgtcaaccgttacagaggttacgatgagctgaggcatgatctagcgcgcatgtttgggatcgaaggacagctcgaagatcctcaaacatctgactggaaacttgtttatgtcgatcatgaaaatgacatcctcctcgtcggcgatgatccatgggaagaattcgtaaactgtgttcagagcattaagatcctttcatcagctgaggttcagcagatgagcttagacgggaactttgccggtgtaccagttactaatcaagcttgtagtggcgccacttcgtttaaccggtga

SEQ ID NO: 1713 - protein, 1150 aa, Arabidopsis thaliana
MKAPSSNGVSPNPVEGERRNINSELWHACAGPLISLPPAGSLVVYFPQGHSEQVAASMQKQTDFIPSYPNLPSKLICMLHNVTLNADPETDEVYAQMTLQPVNKYDRDALLASDMGLKLNRQPNEFFCKTLTASDTSTHGGFSVPRRAAEKIFPALDFSMQPPCQELVAKDIHDNTWTFRHIYRGQPKRHLLTTGWSVFVSTKRLFAGDSVLFIRDGKAQLLLGIRRANRQQPALSSSVISSDSMHIGVLAAAAHANANNSPFTIFYNPRWAAPAEFVVPLAKYTKAMYAQVSLGMRFRMIFETEECGVRRYMGTVTGISDLDPVRWKNSQWRNLQIGWDESAAGDRPSRVSVWDIEPVLTPFYICPPPFFRPRFSGQPGMPDDETDMESALKRAMPWLDNSLEMKDPSSTIFPGLSLVQWMNMQQQNGQLPSAAAQPGFFPSMLSPTAALHNNLGGTDDPSKLLSFQTPHGGISSSNLQFNKQNQQAPMSQLPQPPTTLSQQQQLQQLLHSSLNHQQQQSQSQQQQQQQQLLQQQQQLQSQQHSNNNQSQSQQQQQLLQQQQQQQLQQQHQQPLQQQTQQQQLRTQPLQSHSHPQPQQLQQHKLQQLQVPQNQLYNGQQAAQQHQSQQASTHHLQPQLVSGSMASSVITPPSSSLNQSFQQQQQQSKQLQQAHHHLGASTSQSSVIETSKSSSNLMSAPPQETQFSRQVEQQQPPGLNGQNQQTLLQQKAHQAQAQQIFQQSLLEQPHIQFQLLQRLQQQQQQQFLSPQSQLPHHQLQSQQLQQLPTLSQGHQFPSSCTNNGLSTLQPPQMLVSRPQEKQNPPVGGGVKAYSGITDGGDAPSSSTSPSTNNCQISSSGFLNRSQSGPAILIPDAAIDMSGNLVQDLYSKSDMRLKQELVGQQKSKASLTDHQLEASASGTSYGLDGGENNRQQNFLAPTFGLDGDSRNSLLGGANVDNGFVPDTLLSRGYDSQKDLQNMLSNYGGVTNDIGTEMSTSAVRTQSFGVPNVPAISNDLAVNDAGVLGGGLWPAQTQRMRTYTKVQKRGSVGRSIDVNRYRGYDELRHDLARMFGIEGQLEDPQTSDWKLVYVDHENDILLVGDDPWEEFVNCVQSIKILSSAEVQQMSLDGNFAGVPVTNQACSGATSFNR

SEQ ID NO: 1714 - DNA, 1989 bp, Arabidopsis thaliana
  CDS (1)..(1989)
atggcagcttccaatcattcatctggtaaacctggaggagttttaagtgatgctttatgtagggagctctggcatgcctgtgctggacctcttgtaaccctacctcgtgaaggggaacgagtttattatttccctgaaggccacatggagcagctcgaggcatcaatgcaccaaggtttggagcaacagatgccttccttcaacctcccatctaagatcctctgtaaagttatcaacatccagcgcagggcagagcccgagactgacgaagtatatgcgcaaataaccttattgccagaactggatcaaagcgaacccactagcccagatgcccctgttcaagaacctgaaaagtgcaccgtacattcattttgcaagacactaactgcttcagacacaagcacacatggtggcttctcggtgctacggagacatgcagatgattgtctcccacccttggatatgtcccaacaaccaccgtggcaagaattggttgcaactgatttgcacaatagtgaatggcattttaggcacattttccgaggccaaccaaggcgtcatttgctaacaactggatggagtgtttttgttagctcgaagaaactagtggctggtgatgctttcatattcttaaggggtgagaatgaagagctccgagtaggtgttaggcggcacatgagacaacagactaatatcccgtcatctgtcatttcaagtcatagcatgcatattggggtccttgcaacagcagctcatgccattacaacaggaacaatcttttctgtcttctacaagccaaggacaagtaggtcagagtttattgtgagcgtcaataggtatctcgaagctaagacccagaagctgtctgtaggcatgcgtttcaagatgagattcgagggggaagaagctcccgagaaaaggttcagtggcacaatagttggtgttcaggaaaataagtcttcggtctggcatgattctgaatggagatcgctaaaggttcaatgggacgaaccctcatctgtatttcgtcctgaaagagtttcaccttgggaacttgagcccctagttgcaaatagtactccgtcttcacaacctcagcctccgcaaaggaacaaacgaccaagacctcctggtttaccttcaccagccactggtccatctggtcctgatggtgtgtggaaatccccggcagacactccttcctcagtgccattattctctcctcctgccaaagctgctacgtttggtcatggtgggaacaaatcatttggagtatctattggatcagccttttggcccaccaatgcagatagtgcagctgaatcctttgcttcagcgtttaacaatgaatctactgaaaagaaacaaactaatggaaatgtctgtaggctttttgggtttgagctagttgaaaatgttaatgtggatgaatgtttctctgctgcctctgtgtctggtgctgtcgctgtagatcaacctgtcccatccaacgagtttgactctggccagcaatctgagccattaaacatcaaccaatctgatattccttcggggagtggtgaccctgagaaatcctctttgaggtctcctcaagaatcacaaagtagacagatacgtagctgcacaaaggtgcacatgcaaggcagtgcagtaggcagagctattgatttgacaaggtcagagtgttatgaagatctgttcaagaagctggaagagatgtttgatatcaagggtgaactcttagaatctaccaaaaaatggcaagtcgtttacaccgatgatgaagatgacatgatgatggttggtgatgatccatggaatgagttctgtggaatggtgaggaagatattcatctacacacctgaggaagtgaagaaactttcaccgaagaacaaactcgcagtcaatgcaaggatgcagctcaaagctgatgcagaggaaaatgggaatacagagggcagatcatcatctatggcgggatcaagatga

SEQ ID NO: 1715 - protein, 662 aa, Arabidopsis thaliana
MAASNHSSGKPGGVLSDALCRELWHACAGPLVTLPREGERVYYFPEGHMEQLEASMHQGLEQQMPSFNLPSKILCKVINIQRRAEPETDEVYAQITLLPELDQSEPTSPDAPVQEPEKCTVHSFCKTLTASDTSTHGGFSVLRRHADDCLPPLDMSQQPPWQELVATDLHNSEWHFRHIFRGQPRRHLLTTGWSVFVSSKKLVAGDAFIFLRGENEELRVGVRRHMRQQTNIPSSVISSHSMHIGVLATAAHAITTGTIFSVFYKPRTSRSEFIVSVNRYLEAKTQKLSVGMRFKMRFEGEEAPEKRFSGTIVGVQENKSSVWHDSEWRSLKVQWDEPSSVFRPERVSPWELEPLVANSTPSSQPQPPQRNKRPRPPGLPSPATGPSGPDGVWKSPADTPSSVPLFSPPAKAATFGHGGNKSFGVSIGSAFWPTNADSAAESFASAFNNESTEKKQTNGNVCRLFGFELVENVNVDECFSAASVSGAVAVDQPVPSNEFDSGQQSEPLNINQSDIPSGSGDPEKSSLRSPQESQSRQIRSCTKVHMQGSAVGRAIDLTRSECYEDLFKKLEEMFDIKGELLESTKKWQVVYTDDEDDMMMVGDDPWNEFCGMVRKIFIYTPEEVKKLSPKNKLAVNARMQLKADAEENGNTEGRSSSMAGSR

SEQ ID NO: 1716 - DNA, 3498 bp, Arabidopsis thaliana
  CDS (1)..(3498)
atgaaagctccttcatcaaatggagtttctcctaatcctgttgaaggagaaaggagaaatataaactcagagctatggcacgcttgtgctgggccattgatttcgttgcctccagcaggaagtcttgttgtttacttccctcaaggtcacagtgagcaagtcgcggcttcaatgcagaagcagactgatttcataccaagttacccgaatcttccttccaagctcatatgcatgctccacaatgttacactgaatgctgatcctgagacggatgaggtctatgcgcagatgactcttcagccagtaaacaaatatgacagagatgcattgcttgcttctgacatgggtcttaagctaaacagacaacctaatgaatttttctgcaaaaccctcacggcgagtgacacaagtactcacggtggattttctgtaccccgacgagctgctgagaaaatctttcctgctctggatttctcgatgcaaccaccttgtcaggagcttgttgctaaggatattcatgacaacacatggactttcagacatatttatcgaggtcaaccaaaaaggcacttgctaactacaggctggagtgtgtttgtcagcacgaaaaggctctttgctggagactctgttctttttataagagatggaaaggcgcaacttctgttggggataagacgtgcaaatagacaacagcctgcactttcttcatctgtaatatcaagtgatagcatgcacatcggagttcttgcagctgcagctcatgctaatgctaataacagtcctttcaccattttctacaacccgaggtgggctgctcctgctgagtttgtggttcctttagccaagtataccaaagcgatgtacgctcaagtttccctcggtatgcggtttagaatgatatttgagactgaagaatgtggagttcgtcggtatatgggtacagttaccggtatcagtgatcttgatccagtgagatggaaaaactctcagtggcggaatcttcagattggatgggatgagtcagctgctggtgataggcccagtcgagtttcagtttgggacattgaaccggttttaactcctttctacatatgtcctcctccatttttccgacctcgcttttctggacaacctggaatgccagatgatgagactgacatggagtctgcactgaagagagcaatgccatggcttgataatagcttagagatgaaagacccttcgagtactatctttcctggtctgagtttagttcagtggatgaatatgcagcagcagaacggccagctaccctctgctgctgcacagccaggtttcttcccatcaatgctttcgccaaccgcggcgctgcacaacaatcttggcggcactgatgatccctccaagttactgagctttcagacgccgcacggggggatttcctcctcaaatctccaatttaacaaacagaatcagcaagccccaatgtctcagttgcctcagccaccaactacgttgtcccaacaacagcagctgcagcaattgttgcactcctctttgaaccatcaacaacagcaatcgcagtctcaacaacagcaacaacaacaacagttgctgcagcagcaacaacaattgcagtctcaacaacacagcaacaacaatcaatcgcagtctcagcaacaacaacaattgctccagcagcaacaacaacaacaactgcagcaacaacatcaacaaccgttacagcaacagactcagcagcagcagctaagaacacagccattgcaatctcactcgcatccacagccacaacagttacaacaacataagttgcagcaacttcaggttccacagaatcagctttacaatggtcaacaagcagcgcagcagcatcagtcgcaacaagcatctacacatcatttgcaaccacaattagtttcgggatcaatggcaagcagtgtcatcacgcctccgtccagctcccttaatcaaagctttcaacagcaacaacaacagtctaagcaacttcaacaagcacatcaccatttaggtgctagcactagccagagtagtgtaattgaaaccagcaagtcttcatccaatctgatgtccgcaccgccgcaagagacacagttttcacgacaagtagaacagcagcagcctcctggtctcaacgggcagaatcagcaaacacttttgcagcagaaagctcaccaggcacaggcccaacagatattccagcagagtctcttggaacagccgcatatacagtttcagctgttacagagattacaacagcaacagcagcagcaatttctttcgccgcagtctcagttaccacaccatcaattgcaaagccagcagttgcaacagctgcctactctctctcaaggtcatcagtttccgtcatcttgcactaacaatggcttatcgacgttgcaaccacctcaaatgctggtgagccgacctcaggaaaaacaaaacccaccggttgggggaggggtcaaagcttattcaggcatcacagatggaggagatgcaccttcctcttcaacgtcgccttccaccaacaactgtcagatctcttcttcaggctttctcaacagaagccaaagcgggccagcgatcttgatacctgatgcagcgattgatatgtctggtaatcttgttcaggatctttacagcaaatccgatatgcggctaaaacaagaactcgtgggtcagcaaaagtccaaagctagtttaacagatcatcaactagaagcatctgcctctggaacttcttacggtttagatggaggcgaaaacaacagacaacaaaatttcttggctccaacttttggccttgacggtgattccaggaacagcttgctcggtggagctaatgttgataatggctttgtgcctgacacgctactctcgaggggatatgactcccagaaagatcttcagaacatgctttcaaactatggaggagtgacaaatgacattggtacagagatgtctacttcagctgtaagaactcaatcttttggtgtccccaatgtgcccgccatttcgaacgatctagctgtcaacgatgctggagttcttggtggtggattgtggccagctcagactcagcgaatgcgaacttatacaaaggtgcaaaaacgaggctcagtggggagatcaatagacgtcaaccgttacagaggttacgatgagctgaggcatgatctagcgcgcatgtttgggatcgaaggacagctcgaagatcctcaaacatctgactggaaacttgtttatgtcgatcatgaaaatgacatcctcctcgtcggcgatgatccatgggaagaattcgtaaactgtgttcagagcattaagatcctttcatcagctgaggttcagcagatgagcttagacgggaactttgccggtgtaccagttactaatcaagcttgtagtggcggtgacagtggcaatgcttggagaggtcattatgatgataactcagccacttcgtttaaccggtga

SEQ ID NO: 1717 - protein, 1165 aa, Arabidopsis thaliana
MKAPSSNGVSPNPVEGERRNINSELWHACAGPLISLPPAGSLVVYFPQGHSEQVAASMQKQTDFIPSYPNLPSKLICMLHNVTLNADPETDEVYAQMTLQPVNKYDRDALLASDMGLKLNRQPNEFFCKTLTASDTSTHGGFSVPRRAAEKIFPALDFSMQPPCQELVAKDIHDNTWTFRHIYRGQPKRHLLTTGWSVFVSTKRLFAGDSVLFIRDGKAQLLLGIRRANRQQPALSSSVISSDSMHIGVLAAAAHANANNSPFTIFYNPRWAAPAEFVVPLAKYTKAMYAQVSLGMRFRMIFETEECGVRRYMGTVTGISDLDPVRWKNSQWRNLQIGWDESAAGDRPSRVSVWDIEPVLTPFYICPPPFFRPRFSGQPGMPDDETDMESALKRAMPWLDNSLEMKDPSSTIFPGLSLVQWMNMQQQNGQLPSAAAQPGFFPSMLSPTAALHNNLGGTDDPSKLLSFQTPHGGISSSNLQFNKQNQQAPMSQLPQPPTTLSQQQQLQQLLHSSLNHQQQQSQSQQQQQQQQLLQQQQQLQSQQHSNNNQSQSQQQQQLLQQQQQQQLQQQHQQPLQQQTQQQQLRTQPLQSHSHPQPQQLQQHKLQQLQVPQNQLYNGQQAAQQHQSQQASTHHLQPQLVSGSMASSVITPPSSSLNQSFQQQQQQSKQLQQAHHHLGASTSQSSVIETSKSSSNLMSAPPQETQFSRQVEQQQPPGLNGQNQQTLLQQKAHQAQAQQIFQQSLLEQPHIQFQLLQRLQQQQQQQFLSPQSQLPHHQLQSQQLQQLPTLSQGHQFPSSCTNNGLSTLQPPQMLVSRPQEKQNPPVGGGVKAYSGITDGGDAPSSSTSPSTNNCQISSSGFLNRSQSGPAILIPDAAIDMSGNLVQDLYSKSDMRLKQELVGQQKSKASLTDHQLEASASGTSYGLDGGENNRQQNFLAPTFGLDGDSRNSLLGGANVDNGFVPDTLLSRGYDSQKDLQNMLSNYGGVTNDIGTEMSTSAVRTQSFGVPNVPAISNDLAVNDAGVLGGGLWPAQTQRMRTYTKVQKRGSVGRSIDVNRYRGYDELRHDLARMFGIEGQLEDPQTSDWKLVYVDHENDILLVGDDPWEEFVNCVQSIKILSSAEVQQMSLDGNFAGVPVTNQACSGGDSGNAWRGHYDDNSATSFNR

SEQ ID NO: 1718 - DNA, 2040 bp, Oryza sativa subsp
  CDS (1)..(2040)
atgtcgtcgcaaggtgacgcgctgcctctggttcttgttttgttcttgttcttgtttttgttttgttttgtttgccgggagctgcaagagccgacggacccggcgctgctggcggagcaaatcaagatgttccaggtgccgtacaagatcctctgcaaggtcgtcaacgtcgagctcaaggccgagacggaaaccgacgaggtgttcgcgcagattaccctgcagcctgacccggatcaagagaatctgccaacattacctgacccgcccctgccggagcagccgaggcctgtggtgcactccttctgcaagatcctgaccccatccgacaccagcacccatggcgggttctccgtgctccgacggcatgccaacgagtgcctcccgccactggatatgtccatggcgacaccaacccaagagctcatcacaaaggaccttcatggatctgagtggaggtttaagcacatctacaggggccaaccccgtaggcatcttctgactactggatggagcacgtttgtgacatcgaagaagctgatttctggcgacgcgtttgtctacttgaggagtgagacaggagagcagcgtgtcggagtgaggcgtcttgtgcagaaacagagcacaatgccggcatctgttatatcaagccaaagcatgcatcttggtgtgcttgcaagtgcatctcatgctatcaagactaattcaattttcctagtgtactacaggccaaggttaagccaaagccaatatattgttagtgtgaataagtaccttgcggctagtaaggttggatttaatgtgggcatgaggttcaagatgagttttgaaggggaagacgtcccggttaaaaagttttctggaactatagttggtgaaggtgatctttctctgcagtggtcaggttctgaatggaagtccttgaaggtccaatgggatgaagtcacaaatgttaatggccctgagagggtttccccttgggaaattgaaacatgtgatggcactgcacctgccatcaatgtacccctgcagtcagcaacgaaaaacaagcggcctagggagccaagtgaaactattgaccttcaatcactggaaccagctcaagagttttggctatctggaatgccacaacagcatgagaagacaggtattggttccagtgaacctaattgtatctctggacatcaagttgtttggccaggcgagcatccaggatatggtgccgtgagtagttcagtttgtcagaatccgctagtacttgaaagttggttgaaggatttcaactcttcaaacaagggtgtctcccctaccttgtcagagatttctcagaaaatttttcaggttaccagcaatgaagcaagaattgctacatggcctgcacgttctgcttaccaagctgaggagcccacttccaagttgtcttcgaacaccgctgcctgtggttaccgaactgaagaagttgctccaaatgcgtccaaggttgttgaaggaaaaaaggaacctgccatgtttcgtctgtttggtgtggatttgatgaaatgtaccagcatatctactaccactgatgacaagtcaagtgtgggagcaggagaagcttcagccaaaggtactggttctcacgaagactctggtcagctgtcagcattctcaaaagtgacaaaagagcatattgctgcggatgaaagcccccaagagatccaaagccatcagaattacaccgctagaactcgcataaaggttcaaatgcatggaaatgctgtgggcagagctgtggatctagctaatctagacggatatgagcaactgatgaatgagctggaagagatgttcaatataaaggacctcaaacaaaaatggaaggtggctttcactgatgatgagggtgacacaatggaagttggagatgatccttggctggaattttgccagatggtcagaaagattgtgctctatcccattgaagacgagaagaagatcgagcctcacccgaagttactgtcttcagctaatccagagcaggatcagaagactgggttttag

SEQ ID NO: 1719 - protein, 679 aa, Oryza sativa subsp
MSSQGDALPLVLVLFLFLFLFCFVCRELQEPTDPALLAEQIKMFQVPYKILCKVVNVELKAETETDEVFAQITLQPDPDQENLPTLPDPPLPEQPRPVVHSFCKILTPSDTSTHGGFSVLRRHANECLPPLDMSMATPTQELITKDLHGSEWRFKHIYRGQPRRHLLTTGWSTFVTSKKLISGDAFVYLRSETGEQRVGVRRLVQKQSTMPASVISSQSMHLGVLASASHAIKTNSIFLVYYRPRLSQSQYIVSVNKYLAASKVGFNVGMRFKMSFEGEDVPVKKFSGTIVGEGDLSLQWSGSEWKSLKVQWDEVTNVNGPERVSPWEIETCDGTAPAINVPLQSATKNKRPREPSETIDLQSLEPAQEFWLSGMPQQHEKTGIGSSEPNCISGHQVVWPGEHPGYGAVSSSVCQNPLVLESWLKDFNSSNKGVSPTLSEISQKIFQVTSNEARIATWPARSAYQAEEPTSKLSSNTAACGYRTEEVAPNASKVVEGKKEPAMFRLFGVDLMKCTSISTTTDDKSSVGAGEASAKGTGSHEDSGQLSAFSKVTKEHIAADESPQEIQSHQNYTARTRIKVQMHGNAVGRAVDLANLDGYEQLMNELEEMFNIKDLKQKWKVAFTDDEGDTMEVGDDPWLEFCQMVRKIVLYPIEDEKKIEPHPKLLSSANPEQDQKTGF

SEQ ID NO: 1720 - DNA, 2562 bp, Oryza sativa subsp
  CDS (1)..(2562)
atggctccccctcccccgccgcagggctcctccacaggggatccgctctacgacgagctgtggcacgcctgcgcggggccgctcgtcaccgtgccgcgggtgggcgacctcgtcttctacttcccgcaggggcacatcgagcaggtggaggcgtccatgaaccaggttgccgacagccagatgcgcctctacgatctgccctccaagctgctttgccgtgtcctcaacgtcgagctcaaggcggagcaagacaccgacgaggtctacgcgcaggtcatgctcatgccggagcccgagcaaaatgagatggcggtggagaagacgactcctacgtccggccctgtgcaggcaaggccgccggtgaggtccttctgcaagacgctcaccgcgtctgacaccagcacgcacggcggcttctctgtactccgccgccacgctgatgagtgcctccctcccctggatatgacccagtcgccacccacacaggagctcgtggccaaggatctgcacagcatggactggcgcttccgtcacatctttcgcgggcaaccgaggaggcatctccttcagagtggttggagtgtgtttgtcagttccaaaaggcttgttgctggggatgctttcattttcctcagaggagagaatggtgaactccgtgttggtgttagacgagctatgaggcagctgtccaatgtgccttcttcagtcatatctagccaaagcatgcacctgggagtccttgctactgcatggcatgctatcaacacgaagagtatgttcaccgtctactacaaacctaggacgagcccttcagagttcattataccatatgatcagtatatggagtccgtcaaaaacaattactctgttgggatgaggttcaggatgaggtttgaaggagaagaggcaccagagcagaggtttactggtactataattggcagtgagaatctcgacccagtgtggcctgaatcaagttggagatccctgaaggtgcggtgggatgaaccatcaactattccgcggccagatagagtctctccttggaaaatagagcctgcttcatcacctcctgttaacccccttcctctttctagggttaaaagacctaggccaaatgctcctccagcatctcctgaatctcctattcttacgaaagaagctgctactaaggttgacactgatcctgctcaagcacaacgaagtcaaaacagtacggtcttgcaaggtcaagaacaaatgaccttgaggagcaaccttactgagagtaatgactctgatgtcactgctcataagccaatgatgtggtctccatccccaaatgctgcaaaagcccaccccttgacatttcagcagagaccccctatggataattggatgcagttgggaaggcgtgaaactgactttaaggatgtccgttctggctctcaatcttttggtgattccccaggcttctttatgcagaattttgatgaggctcctaaccgtcttacttctttcaagaaccagtttcaggatcaaggttctgctcggcacttctctgacccatactactatgtatctccacagccttccctaactgttgaatcaagcacacagatgcacacagacagtaaggagttacatttctggaatggccagagtactgtgtatggtaattcgagagaccgaccacagaatttcagattcgaacagaactcatcaagttggttaaatcagtcatttgcccgacctgaacagccaagagtgattagaccgcatgcatcaatagctccagttgagttggaaaaaacagaaggcagtgggtttaagatttttgggtttaaagttgatacaaccaatgctcctaacaatcacttgagctccccgatggctgcaacacatgagcctatgcttcaaactccatcatcattgaatcagttgcaacctgtacaaactgattgcattcctgaggtatcagtaagcacagctggaacggcgactgagaatgagaaaagcggtcagcaagctcaacagagttcaaaagatgttcaaagcaagactcaggttgcttcgacgaggagttgtacaaagcacatgaagttttttcttctcgtagttgacatgctgaagttctcgttttgcaaatttcttgcaaaatctcagttttatcccctttgtggtatggtccataagcaaggcgttgcacttggcagatctgtggatctttcaaagttcagtaactatgatgaactcaaagctgagctagacaagatgtttgaattcgatggtgaattggtgtcttcaaacaaaaactggcaaattgtttatactgataatgagggtgatatgatgcttgttggagacgacccatgggaagaattctgcagcattgtgcggaagatttatatttacaccaaggaggaggtccagaagatgaattcgaaatcaaatgccccaaggaaagatgactcttcagaaaatgagaaaggttcagtgaagcgagatgatacaagagatggaggagtactccagaaagctgcctccgctagtgtgctctcaatactgcgctacagtagctag

SEQ ID NO: 1721 - protein, 853 aa, Oryza sativa subsp
MAPPPPPQGSSTGDPLYDELWHACAGPLVTVPRVGDLVFYFPQGHIEQVEASMNQVADSQMRLYDLPSKLLCRVLNVELKAEQDTDEVYAQVMLMPEPEQNEMAVEKTTPTSGPVQARPPVRSFCKTLTASDTSTHGGFSVLRRHADECLPPLDMTQSPPTQELVAKDLHSMDWRFRHIFRGQPRRHLLQSGWSVFVSSKRLVAGDAFIFLRGENGELRVGVRRAMRQLSNVPSSVISSQSMHLGVLATAWHAINTKSMFTVYYKPRTSPSEFIIPYDQYMESVKNNYSVGMRFRMRFEGEEAPEQRFTGTIIGSENLDPVWPESSWRSLKVRWDEPSTIPRPDRVSPWKIEPASSPPVNPLPLSRVKRPRPNAPPASPESPILTKEAATKVDTDPAQAQRSQNSTVLQGQEQMTLRSNLTESNDSDVTAHKPMMWSPSPNAAKAHPLTFQQRPPMDNWMQLGRRETDFKDVRSGSQSFGDSPGFFMQNFDEAPNRLTSFKNQFQDQGSARHFSDPYYYVSPQPSLTVESSTQMHTDSKELHFWNGQSTVYGNSRDRPQNFRFEQNSSSWLNQSFARPEQPRVIRPHASIAPVELEKTEGSGFKIFGFKVDTTNAPNNHLSSPMAATHEPMLQTPSSLNQLQPVQTDCIPEVSVSTAGTATENEKSGQQAQQSSKDVQSKTQVASTRSCTKHMKFFLLVVDMLKFSFCKFLAKSQFYPLCGMVHKQGVALGRSVDLSKFSNYDELKAELDKMFEFDGELVSSNKNWQIVYTDNEGDMMLVGDDPWEEFCSIVRKIYIYTKEEVQKMNSKSNAPRKDDSSENEKGSVKRDDTRDGGVLQKAASASVLSILRYSS

SEQ ID NO: 1722 - DNA, 3435 bp, Oryza sativa subsp
  CDS (1)..(3435)
atggcgagcatgaagcagcagcagacgccggcgagctccgcggtgaccgcggcggcggcggcctcctcctccgccaccgccgccgtggccgcatgcgaaggggagcggaaggcggcggcgatcaactcggagctgtggcacgcgtgcgccggcccgctcgtgtcgctgccgccggtgggcagcctcgtcgtctacttcccgcaaggccacagcgagcagctactaataactgtacttgttcattaccaaagtggttgggagcattgggcctactggcttcccttttctgttgacctactagtatggtcaatagacagtcttgggaggactaatcctgcaattattcgtgcatttctttttagaaagatgagaaaaaaggtgtacaaaagtaacataatattaagaaatgctttctccatgctattggaaacagcagaatatctacttaatctaagctttttgtttcaggttgcagcttctatgcaaaaggatgtggatgcacatgttccaagctacccaaatcttccctccaagttgatatgtcttcttcacggtgtcaatttgcatgcagacccagatactgatgaagtttatgcacagatgactcttcaaccagtgaatacatatggaaaagaggcgttgcaactatcagagcttgcactaaaacaagcaaggccacaaatggaattcttctgtaagacactcaccgcaagtgatacaagtacacatggaggattctctgtgcctcgccgtgccgcagagaagatattccctcccctggacttctctatgcaacctccagctcaagaactgcaagctagagatatacatgacaatgtgtggacatttcgtcatatatatcgaggtcaaccaaaaagacatttacttactactggttggagccttttcgtgagtggcaagagattatttgctggtgattctgttattgttgtgagaaggcactgtgatagtaatcagatatctttaggaatgcggtttcgcatgatgtttgaaaccgaggaattaggaacaagaaggtacatgggtacaataactggaataagtgacctagatcctgttggctgggatgagtctgcagctggtgaaaggaggaacagagtttcaatctgggagattgaaccggttgcagctcccttttttctatgtccccaacctttttttggtgtgaagcgccccaggcaattagatgacgagtcagagatggaaaaccttttcaagagggcaatgccttggcttggtgaggaggtatgcataaaggatactcaaaaccagaacagtacagcacctggtctaagtttggttcagtggatgaacatgaacaggcagcagagctcatcattggctaacaccgctgcgcagtctgagtacctgcaagctctaggtaaccctgccatgcaaaaccttgctgctgatgaacttgcaaggcaactatatgtccagaacaatctccttcaacagaactgcatacagtttaattctcccaagctccctcagcaaatgcaaaccatgaacgatctgtccaaggcggcaattccgttgaatcagcttggtgctatcatcaatcctcaagatcagaaacaagatgctgtcaaccatcagagacagcagaactccatacaagtgattcccctgagccaagctcaatctaatctcgtccaggctcaggtgattgttcagaatcagatgcaacagcagaagccatctccaactcaaaacccgcaaaggattaatggccagcggctgcttttgtctcatcaacagaaggatcaaaatttacagctgcaacagcagcttttacttcagcaaaaacaacagttacagcagcagcagcagcagcaacaacagaatcagcagcagctaaataagtcccttggacagttggtaaatctggcaagtcagcagtctaagttgtttgatgaggagcttcagttgcagatattacagaaactgcagcagcaatcactgatgtcacaatccacatcaacactctcacagccacctctgatccaagaacagcaaaagttaatcacggacatgcaaaagcagttgtcaaattcacattcacttgctcagcaacaaatgatgccccaacaagaaatcaagccttcattgcaagcaacaccattgctacccacggtccagcaagagcaacagcagaagcttttacagaaacaagtctcacttgcagatgtgtcaggagttgcttttcaaccaatttcatcaaccaatgtgatccccaaaactggaggtgctatgatcatttcgggtgctacacaatctgtagttacagaggaaatgccctcttgttcaacatctccatccacagctaatggaaaccactttacacaatcaaccaaaaacagacattgcatcaacacagaaaggctgccaccgtccactgctccaatgttgatcccaacctccattgacgctgtaacagcaactccactaatgaccaaggaattgccaaagccgaataataatgtgaagcaaagtgttgtcaactcaaaattaccaaatgttgctcctggcccacaaaattgtataaaccatgcattgcaaacagacaacttggaaacatcttcatcagcaacttcattatgtccttcccgaacagatggacttgtgcatcaaggtttcccctcttctaacttcaatcaacaccagatgttcaaagatgcacttcctgatgtagaaatggaaggtgtggatccaagtaacagttgcttgtttgggatcaacaatgataacctgttaggattcccaatagaaacagaggacttgctgataaatgcacttgattctgtcaagtatcagaatcacatatcaactgatgttgaaaacaactacccgatgcaaaaggatgcactgcaagaaatatcaacctccatggtttcccagtcatttggtcagtcggatatggcttttaattccattgattctgcgatcaatgatggtgccttcttgaacaaaaattcctggcccgctgcccctctgctgcagagaatgcggacattcaccaaggtgtacaaacgaggagctgtaggccggtctattgacatcggcaggtactctggatatgaagagttgaagcatgctttggctcgcatgtttggtatagagggtcaacttgaagatcgacagagaataggctggaaactggtctacaaggatcacgaggatgacatcctgcttcttggtgatgacccatgggaggagtttgtgaactgtgtaagatgcattaggattctatcacctcaagaagtgcaacagatgagcttggatggtgatctggggagcaatgtcctccccaaccaggcttgcagcagctcagatggggtgaatggttggaggcctcgctgtgaccagaaccccgggaacccttccatcggcccgtatgatcaattcgaatga

SEQ ID NO: 1723 - protein, 1144 aa, Oryza sativa subsp
MASMKQQQTPASSAVTAAAAASSSATAAVAACEGERKAAAINSELWHACAGPLVSLPPVGSLVVYFPQGHSEQLLITVLVHYQSGWEHWAYWLPFSVDLLVWSIDSLGRTNPAIIRAFLFRKMRKKVYKSNIILRNAFSMLLETAEYLLNLSFLFQVAASMQKDVDAHVPSYPNLPSKLICLLHGVNLHADPDTDEVYAQMTLQPVNTYGKEALQLSELALKQARPQMEFFCKTLTASDTSTHGGFSVPRRAAEKIFPPLDFSMQPPAQELQARDIHDNVWTFRHIYRGQPKRHLLTTGWSLFVSGKRLFAGDSVIVVRRHCDSNQISLGMRFRMMFETEELGTRRYMGTITGISDLDPVGWDESAAGERRNRVSIWEIEPVAAPFFLCPQPFFGVKRPRQLDDESEMENLFKRAMPWLGEEVCIKDTQNQNSTAPGLSLVQWMNMNRQQSSSLANTAAQSEYLQALGNPAMQNLAADELARQLYVQNNLLQQNCIQFNSPKLPQQMQTMNDLSKAAIPLNQLGAIINPQDQKQDAVNHQRQQNSIQVIPLSQAQSNLVQAQVIVQNQMQQQKPSPTQNPQRINGQRLLLSHQQKDQNLQLQQQLLLQQKQQLQQQQQQQQQNQQQLNKSLGQLVNLASQQSKLFDEELQLQILQKLQQQSLMSQSTSTLSQPPLIQEQQKLITDMQKQLSNSHSLAQQQMMPQQEIKPSLQATPLLPTVQQEQQQKLLQKQVSLADVSGVAFQPISSTNVIPKTGGAMIISGATQSVVTEEMPSCSTSPSTANGNHFTQSTKNRHCINTERLPPSTAPMLIPTSIDAVTATPLMTKELPKPNNNVKQSVVNSKLPNVAPGPQNCINHALQTDNLETSSSATSLCPSRTDGLVHQGFPSSNFNQHQMFKDALPDVEMEGVDPSNSCLFGINNDNLLGFPIETEDLLINALDSVKYQNHISTDVENNYPMQKDALQEISTSMVSQSFGQSDMAFNSIDSAINDGAFLNKNSWPAAPLLQRMRTFTKVYKRGAVGRSIDIGRYSGYEELKHALARMFGIEGQLEDRQRIGWKLVYKDHEDDILLLGDDPWEEFVNCVRCIRILSPQEVQQMSLDGDLGSNVLPNQACSSSDGVNGWRPRCDQNPGNPSIGPYDQFE

SEQ ID NO: 1724 - DNA, 2064 bp, Oryza sativa subsp
  CDS (1)..(2064)
atggctggctccgtcgttgctgctgctgctgccggcggcggtggcacagggagctcttgcgatgcgttgtacagggagctatggcatgcttgcgctgggccgttggtcacagtgcctcgccaaggcgaattggtttactacttcccccagggccatatggaacagcttgaggcatctacagaccaacagcttgaccagcatctgcctttgtttaacctgccatctaagatcctctgcaaagtggtcaatgtagaacttagggctgaaaccgattcagatgaggtttatgctcaaattatgctgcaaccagaagcagatcaaaatgaactcaccagcccaaaacctgagccacatgaacctgaaaaatgcaatgtccattccttctgcaagactttgactgcttcagatacaagcacccatggtggattttcagttcttaggaggcatgcagaagaatgtcttcctcccctggacatgactcagaatccaccatggcaagagcttgtggctagagatctccatggaaacgagtggcatttccgtcacatctttcgagggtccccccaccactcccttattttaggacaacctaggagacatctgcttacaactggctggagtgtttttgttagctcaaaaagattagttgctggtgacgcattcatctttctgagaggtgagaatggagagctacgagttggtgtcaggaggctcatgaggcaacttaataacatgccatcatcagtaatatcaagtcatagtatgcatcttggagtcctagcaactgcatcacatgctatatccactggaactctcttttctgttttctacaaaccaagaacaagtcagtctgagtttgttgtgagtgctaacaagtaccttgaagctaaaaacagcaagatatctgttggaatgaggtttaagatgagattcgagggcgatgaagctcctgaaagaaggtttagtggaacaattattggtgttgggagcatgtcaacgtctccatgggcaaattctgactggagatctttgaaggtccaatgggatgagccttctgtggttcctcgtccagatagagtttcaccatgggaactagagccacttgctgtgagtaattcacagccatcacctcagccaccggcaagaaataagcgggctcggcctcctgcttcgagttcaattgctccagaactacctccggtcttcggtttgtggaaatcttcagctgagtccacacaaggcttctcattttcgggactacagcgaacacaggaactatatccttcaagccccaatccgatcttctcaacatcattaaatgttggattcagtacaaagaatgagccatctgctctaagcaacaagcatttttactggccaatgagagagacaagagccgactcttactctgctagcatcagcaaagttccatctgaaaagaagcaagagcctagttcggctggctgcagattgtttggaatcgagataagctctgctgtggaagctacatctccactggctgctgtttctggtgttggtcaagaccaactagctgcctcagtagatgctgagtctgatcagctctcacaaccatcacatgccaacaaatctgatgctccagcggcaagcagtgagccatctccccatgagactcagagtcggcaagtgaggagctgcaccaaggtcatcatgcaaggaatggcagttggaagggcagtggacctgacaaggctccatggatatgatgatcttcgctgcaagttagaagagatgtttgatatccaaggagagctctctgctagcctaaagaaatggaaggttgtttacacagatgatgaggatgatatgatgctggttggggatgacccttggcctgaattttgcagcatggtgaaaaggatatacatctacacctacgaggaagccaagcaacttactcccaagtcgaagctgccgatcattggcgacgccatcaagccaaacccaaacaaacaatcgcccgagtctgacatgcctcacagtgacctggacagcactgcccccgtcaccgataaggattgctga

SEQ ID NO: 1725 - protein, 687 aa, Oryza sativa subsp
MAGSVVAAAAAGGGGTGSSCDALYRELWHACAGPLVTVPRQGELVYYFPQGHMEQLEASTDQQLDQHLPLFNLPSKILCKVVNVELRAETDSDEVYAQIMLQPEADQNELTSPKPEPHEPEKCNVHSFCKTLTASDTSTHGGFSVLRRHAEECLPPLDMTQNPPWQELVARDLHGNEWHFRHIFRGSPHHSLILGQPRRHLLTTGWSVFVSSKRLVAGDAFIFLRGENGELRVGVRRLMRQLNNMPSSVISSHSMHLGVLATASHAISTGTLFSVFYKPRTSQSEFVVSANKYLEAKNSKISVGMRFKMRFEGDEAPERRFSGTIIGVGSMSTSPWANSDWRSLKVQWDEPSVVPRPDRVSPWELEPLAVSNSQPSPQPPARNKRARPPASSSIAPELPPVFGLWKSSAESTQGFSFSGLQRTQELYPSSPNPIFSTSLNVGFSTKNEPSALSNKHFYWPMRETRADSYSASISKVPSEKKQEPSSAGCRLFGIEISSAVEATSPLAAVSGVGQDQLAASVDAESDQLSQPSHANKSDAPAASSEPSPHETQSRQVRSCTKVIMQGMAVGRAVDLTRLHGYDDLRCKLEEMFDIQGELSASLKKWKVVYTDDEDDMMLVGDDPWPEFCSMVKRIYIYTYEEAKQLTPKSKLPIIGDAIKPNPNKQSPESDMPHSDLDSTAPVTDKDC

SEQ ID NO: 1726 - DNA, 1563 bp, Oryza sativa subsp
  CDS (1)..(1563)
atggagatggcggcgaatccaggtggttcaggaacctgcagcgatgcactattccgggagctatggcatgcttgtgctggtccgttggtcacggtcccgaagcgcggcgagcgcgtctactactttccccagggtcatatggaacagcttgaggcgtctacaaaccagcagcttgaccagtacctgccgatgttcaatctaccatccaagatcctatgcagcgtggtcaacgtagaactccgggcggaggctgattcagatgaagtttatgctcaaattatgctgcaaccagaagctgatcaaagtgaactcaccagtctggatcctgagcttcaagatcttgagaaatgcacagctcattccttttgcaagacattaacagcttcagatacaagcacacatggcggtttctctgttcttaggaggcatgctgaagaatgccttcctcagctggacatgtctcagaatccaccatgtcaagaactggttgccaaagatctccatggaactgagtggcatttccgtcacatctttcgtggacaacctaggaggcatctgcttacaaccggttggagtgtctttgttagctcaaaaagattggttgctggcgatgcatttatcttcctgaggggtgaaagtggtgagctacgggttggagtaaggagacttatgagacaagtaaataacatgccatcatctgtcatatcaagccacagcatgcatcttggagtccttgcaacagcttcccatgctatctccactggaaccctcttttctgttttctacaaacccagaacaagccggtctgagtttgttgtgagcgttaacaagtaccttgaagctaagaagcagaacttgtctgttggaatgaggtttaagatgagatttgaaggtgatgaagctcctgaaagaaggtttagtggaacaattattggtattgggagtgtgccagcaatgtcaaaatctccatgggcagattctgactggaaatctctgaaggtccaatgggatgaaccttcggctattgtctgtccagatagagtttcaccatgggaactggaaccattggatgcgagtaatccacaaccacctcagcctccattgaggaataagcgtgcaaggcctccagcttcaccttctgtggttgcggaacttcctccaagtttcgatgtggactctgatcagatctcacagccatctaatggcaataaatccgatgcccctggaacaagcagtgaacgttctcctctgagtcccaaagtcgtcaacaagttggaggagatgtttgatatacagggggacttgtgtcccaccctgaagagatggcaagttgtttacaccgatgatgaggatgacatgatgcttgtcggggatgatccttgggatgaattttgtagcatggtgaaacggatttatatttactcctacgaggaggccaagctgctggctccaaagtctaagctgccagtcataggtgacaccatcaaattgagcagtatgaactcatcacatgaatccgtcgacctggacaatcatgcctcagttactaacagggactgctaa

SEQ ID NO: 1727 - protein, 520 aa, Oryza sativa subsp
MEMAANPGGSGTCSDALFRELWHACAGPLVTVPKRGERVYYFPQGHMEQLEASTNQQLDQYLPMFNLPSKILCSVVNVELRAEADSDEVYAQIMLQPEADQSELTSLDPELQDLEKCTAHSFCKTLTASDTSTHGGFSVLRRHAEECLPQLDMSQNPPCQELVAKDLHGTEWHFRHIFRGQPRRHLLTTGWSVFVSSKRLVAGDAFIFLRGESGELRVGVRRLMRQVNNMPSSVISSHSMHLGVLATASHAISTGTLFSVFYKPRTSRSEFVVSVNKYLEAKKQNLSVGMRFKMRFEGDEAPERRFSGTIIGIGSVPAMSKSPWADSDWKSLKVQWDEPSAIVCPDRVSPWELEPLDASNPQPPQPPLRNKRARPPASPSVVAELPPSFDVDSDQISQPSNGNKSDAPGTSSERSPLSPKVVNKLEEMFDIQGDLCPTLKRWQVVYTDDEDDMMLVGDDPWDEFCSMVKRIYIYSYEEAKLLAPKSKLPVIGDTIKLSSMNSSHESVDLDNHASVTNRDC

SEQ ID NO: 1728 - DNA, 1980 bp, Oryza sativa subsp
  CDS (1)..(1980)
atgagagttttggattggcaagtttggtgggtgagcggtgatcgcatttgggggttggagatgaaggaggtgggggaggtggaggaggtgaggtgcttggacccgcagctatggcacgcgtgcgcgggcgggatggtgcagatgccggcgccgcgttcccgggtgtactacttcgcgcagggccacgccgagcacgccgacggcggaggcggggcggcggcggcagccgcggagctggggccgcgcgcgctcccgccgctcgtgctctgccgcgtcgaaggggtccagttcctggccgatcgggactccgacgaggtgtacgccaagatccgcctcgcgccggtcgcccccggggaggccgagttccgggagcccgacgagctctgcccgctcggcgccgccggcgacgcggcggagccgtcgccggaaaagccgacctcgttcgccaagacgctcacgcagtccgacgccaacaacggcggcggcttctcggtgccccgctactgcgccgagaccatcttccccaagctggactacagggccgacccaccggtgcagacggtgctcgccaaggacgtccacggcgtggtctggaagttccgccacatctaccgcggcacgccgcgccggcatttgctcaccaccgggtggagcacgttcgtgaaccagaagaagctcgtcgcgggggactcgatcgtgttcctgcgcaccaggcacggggagctctgcgtcgggatacggcgggcgaagcggatggcgtgcggggggatggagtgcatgtcggggtggaacgcgccgggctatggcggcggcggcttctcggcgttcttgaaggaggaggagagtaagctgatgaagggccatggtggtggtgggtacatgaagggcaaggggaaggtgaggatggccgatgtcgtggaggccgctagcctcgcgtcgagcgggcagccgttcgaggtggcgtactacccgagggctagcaccccggattttgtcgtgaaggccgcgtcggtgcaggccgcaatgaggatccagtggtgctccgggatgaggttcaagatggcttttgagacagaggattcatcaaggattagctggtttatggggacaatatcttctgttcaggttgctgatcccaacagatggccgaattcgccgtggagacttcttcaggtgacatgggatgaaccggacctgttgcagaatgtgaaatgtgtcagcccatggcttgtggagcttgtgtcaagtattccaccaatccatttaggaccattttcgtcacctcgaaagaagttgcgggttcccccacatcctgacttcccatttgagggtcatcttctgaacccaattttccatgggaacccacttggtcctagcaacagcccactatgctgttacccggacaccgctcctgcaggcatacagggagccaggcatgctcaatttggtttaccactaacagaccaccagcttaacaagctgcaccttggtctgttacatagcggcagttttaacagacttgatgctattactccgccttcccggatatcaaagggctttgtgaaagacgacaccccatataatgctgtttggaaaggtatatttactgagcagcagataacttcaagcggatcaacggagacactctcccccggagttactggaaatagcgcacctaatggcaatgcgcacaagacaggaaatgcatctgatggttctggttcatcaatttgcattggtttctcatctcaaggtcacgaggcttctgaccttggtttagaagctggtcactgcaaggtatttatggaatcggaggacgttggtcgcaccattgatttgtctgtctttgggtcatacgaagaactgtatggtcggctggctgacatgttcggaatcgagaaagaagaaatcataaaccatcttcatttccatgacgcagctggtgtagtcaagcatccgggtgaggtaccattcaggtga

SEQ ID NO: 1729 - protein, 659 aa, Oryza sativa subsp
MRVLDWQVWWVSGDRIWGLEMKEVGEVEEVRCLDPQLWHACAGGMVQMPAPRSRVYYFAQGHAEHADGGGGAAAAAAELGPRALPPLVLCRVEGVQFLADRDSDEVYAKIRLAPVAPGEAEFREPDELCPLGAAGDAAEPSPEKPTSFAKTLTQSDANNGGGFSVPRYCAETIFPKLDYRADPPVQTVLAKDVHGVVWKFRHIYRGTPRRHLLTTGWSTFVNQKKLVAGDSIVFLRTRHGELCVGIRRAKRMACGGMECMSGWNAPGYGGGGFSAFLKEEESKLMKGHGGGGYMKGKGKVRMADVVEAASLASSGQPFEVAYYPRASTPDFVVKAASVQAAMRIQWCSGMRFKMAFETEDSSRISWFMGTISSVQVADPNRWPNSPWRLLQVTWDEPDLLQNVKCVSPWLVELVSSIPPIHLGPFSSPRKKLRVPPHPDFPFEGHLLNPIFHGNPLGPSNSPLCCYPDTAPAGIQGARHAQFGLPLTDHQLNKLHLGLLHSGSFNRLDAITPPSRISKGFVKDDTPYNAVWKGIFTEQQITSSGSTETLSPGVTGNSAPNGNAHKTGNASDGSGSSICIGFSSQGHEASDLGLEAGHCKVFMESEDVGRTIDLSVFGSYEELYGRLADMFGIEKEEIINHLHFHDAAGVVKHPGEVPFR

SEQ ID NO: 1730 - DNA, 2064 bp, Oryza sativa subsp
  CDS (1)..(2064)
atggctggctccgtcgttgctgctgctgccgccgccggcggtggcacagggagctcttgcgatgcgttgtacagggagctatggcatgcttgcgctgggccgttggtcacagtgcctcgccaaggcgaattggtttactacttcccccagggccatatggaacagcttgaggcatctacagaccaacagcttgaccagcatctgcctttgtttaacctgccatctaagatcctctgcaaagtggtcaatgtagaacttagggctgaaaccgattcagatgaggtttatgctcaaattatgctgcaaccagaagcagatcaaaatgaactcaccagcccaaaacctgagccacatgaacctgaaaaatgcaatgtccattccttctgcaagactttgactgcttcagatacaagcacccatggtggattttcagttcttaggaggcatgcagaagaatgtcttcctcccctggacatgactcagaatccaccatggcaagagcttgtggctagagatctccatggaaacgagtggcatttccgtcacatctttcgagggtccccccaccactcccttattttaggacaacctaggaggcatctgcttacaactggctggagtgtttttgttagctcaaaaagattagttgccggtgacgcattcatctttctgagaggtgagaatggagagctacgagttggtgtcaggaggctcatgaggcaactaaataacatgccatcatcagtaatatcaagtcatagtatgcatcttggagtcctagcaactgcatcacatgctatatccaccggaactctcttttctgttttctacaaaccaagaacaagtcagtctgagtttgttgtgagtgctaacaagtaccttgaagctaaaaacagcaagatatctgttggaatgaggtttaagatgagattcgagggcgatgaagctcctgaaagaaggtttagtggaacaattattggtgttgggagcatgtcaacgtctccatgggcaaattctgactggagatctttgaaggtccaatgggatgagccttctgtggttcctcgtccagatagagtttcaccatgggaactagagccacttgctgtgagtaattcacagccatcacctcagccaccggcaagaaataagcgggctcggcctcctgcttcgaattcaattgctccagaactacctccggtcttcggtttgtggaaatcttcagctgagtccacacaaggcttctcattttcgggactacagcgaacacaggaactatatccttcaagccccaatccgatcttctcaacatcattaaatgttggattcagtacaaagaatgagccatctgctctaagcaacaagcatttttactggccaatgagagagacaagagccaactcttactctgctagcatcagcaaagttccatctgaaaagaagcaagagcctagttcggctggctgcagattgtttggaatcgagataagctctgctgtggaagctacatctccactggctgctgtttctggtgttggtcaagaccaaccagctgcctcagtagatgctgagtctgatcagctctcacaaccatcacatgccaacaaatctgatgctccagcggcaagcagtgagccatctcctcatgagactcagagtcggcaagtgaggagctgcaccaaggtcatcatgcaaggaatggcagttggaagggcagtggacctgacaaggctccatggatatgatgatcttcgctgcaagttagaagagatgtttgatatccaaggagagctctctgctagcctaaagaaatggaaggttgtttacacagatgatgaggatgatatgatgctggttggggatgacccttggcctgaattttgcagcatggtgaaaaggatatacatctacacctacgaggaagccaagcaacttactcccaagtcgaagctgccgatcattggcgacgccatcaagccaaacccaaacaaacaatcgcccgagtctgacatgcctcacagtgacctggacagcaccgcccccgtcaccgataaggattgctga

SEQ ID NO: 1731 - protein, 687 aa, Oryza sativa subsp
MAGSVVAAAAAAGGGTGSSCDALYRELWHACAGPLVTVPRQGELVYYFPQGHMEQLEASTDQQLDQHLPLFNLPSKILCKVVNVELRAETDSDEVYAQIMLQPEADQNELTSPKPEPHEPEKCNVHSFCKTLTASDTSTHGGFSVLRRHAEECLPPLDMTQNPPWQELVARDLHGNEWHFRHIFRGSPHHSLILGQPRRHLLTTGWSVFVSSKRLVAGDAFIFLRGENGELRVGVRRLMRQLNNMPSSVISSHSMHLGVLATASHAISTGTLFSVFYKPRTSQSEFVVSANKYLEAKNSKISVGMRFKMRFEGDEAPERRFSGTIIGVGSMSTSPWANSDWRSLKVQWDEPSVVPRPDRVSPWELEPLAVSNSQPSPQPPARNKRARPPASNSIAPELPPVFGLWKSSAESTQGFSFSGLQRTQELYPSSPNPIFSTSLNVGFSTKNEPSALSNKHFYWPMRETRANSYSASISKVPSEKKQEPSSAGCRLFGIEISSAVEATSPLAAVSGVGQDQPAASVDAESDQLSQPSHANKSDAPAASSEPSPHETQSRQVRSCTKVIMQGMAVGRAVDLTRLHGYDDLRCKLEEMFDIQGELSASLKKWKVVYTDDEDDMMLVGDDPWPEFCSMVKRIYIYTYEEAKQLTPKSKLPIIGDAIKPNPNKQSPESDMPHSDLDSTAPVTDKDC

SEQ ID NO: 1732 - DNA, 4944 bp, Oryza sativa subsp
  CDS (1)..(4944)
atggagatggcggcgaatccaggtggttcaggaacctgcagcgatgcactattccgggagctatggcatgcttgtgctggtccgttggtcacggtcccgaagcgcggcgagcgcgtctactactttccccagggtcatatggaacagcttgaggcgtctacaaaccagcagcttgaccagtacctgccgatgttcaatctaccatccaagatcctatgcagcgtggtcaacgtagaactccgggcggaggctgattcagatgaagtttatgctcaaattatgctgcaaccagaagctgatcaaagtgaactcaccagtctggatcctgagcttcaagatcttgagaaatgcacagctcattccttttgcaagacattaacagcttcagatacaagcacacatggcggtttctctgttcttaggaggcatgctgaagaatgccttcctcagctggacatgtctcagaatccaccatgtcaagaactggttgccaaagatctccatggaactgagtggcatttccgtcacatctttcgtggacaacctaggaggcatctgcttacaaccggttggagtgtctttgttagctcaaaaagattggttgctggcgatgcatttatcttcctgaggggcgaaagtggtgagctacgggttggagtaaggagacttatgagacaagtaaataacatgccatcatctgtcatatcaagccacagcatgcatcttggagtccttgcaacagcttcccatgctatctccactggaaccctcttttctgttttctacaaacccagaacaagccggtctgagtttgttgtgagcgttaacaagtaccttgaagctaagaagcagaacttgtctgttggaatgaggtttaagatgagatttgaaggtgatgaagctcctgaaagaaggtttagtggaacaattattggtattgggagtgtgccagcaatgtcaaaatctccatgggcagattctgactggaaatctctgaaggtccaatgggatgaaccttcggctattgtccgtccagatagagtttcaccatgggaactggaaccattggatgcgagtaatccacaaccacctcagcctccattgaggaataagcgtgcaaggcctccagcttcaccttctgtggttgcggaacttcctccaagtttcgatgtggactctgatcagatctcacagccatctaatggcaataaatccgatgcccctggaacaagcagtgaacgttctcctcttgagtcccaaagtcgtcaagtgaggagctgcacaaaggtaattatgcaaggtatggcagttgggagggctgtggacttgacaaaactaaatggttatggtgatcttcgcagcaagttggaggagatgtttgatatacagggggacttgtgtcccaccctgaagagatggcaagttgtttacaccgatgatgaggatgacatgatgcttgtcggggatgatccttgggagaaattccaatgtttcttcattactgcttcctgtgctgaagacgcaacgcccttttgtcttgaattgtggtggtatttgaactgcaagtgccaggaagttcccaagactggcaagaccgcctggaagaggcattctggcaaatgcatgccgttccaaattgttttgtgttttggtaggagccttggcgttcttgtctggtgcccagatttaggcgattcggtcggcggcggcgcggagaggcggcgaaccggcggcgtggagaggcggcggagggagcccgtgactcggcggagaggcggcaaggagaggcgacgacccagctggcgggctctggcggcgaaccggcggcgcggagaggcggcaaaccagcgacgcggagaggcggcgacccagcgtggaggcagcgacccagctggcgggctccgacggcgcggagaggcggcgaaacggcggcacggagaggcggcaaaccggtggcgcgaagaggcggtgaggagaggcggcgacccatcggagaggtggcgaaccggcggcgtggagaggcggcgaaggggagcccgcgactcggcggactggctccagcggcgtgggcttcttccacgcgtcgtcatcgtcgctcattgccggagcgaatggcggcagcgacggcggtggcggagctcgaactttgagttggggaacgtggtggcggcgacttggcaggctggctccgacagtggcgctgggttggggaaccgccggcgcagcaccctcgtcctcccgcacgtccgatctgcccccttccacgccgtggttccgggagctgtggggggtcaacgccgacaaatagtagcagccgccgtcgccgaagctgatggtaatgaaaacggaaataagcatttcacttgtcacagggagaatgcaaactatggtctaaaatctgcatctgaaaataaaattgagctgctgaggggtgctcatagttgggccgacagtaatttaattgaggatgtactggcctctgtgaacaatgatgttggtgaagcatctgctttgttgaaagctatggcgtctccttgttttccaataagggaggatggactacctgatcagctttcttctgagattaataaaacacatggtttaccatcaggaaatggtacagcagaaaataatcttgtaaatgactcgcagttgttgcctctgccaatgaatatgtcgtctgtacccatagaaccggaagtggaagagctcgatgacgattactttaaccacaggaaagatgcattgaagattatgagggctgccacgaagcattctcaggctgcgagtaatgctttcttgagaggtgaccatgctgctgccaaggaactttccctcagagctcaagaagagcgatccgctgctgaagagctgaacaagaaggcagcaaaagaaatatttcgcctcaggaacagcaataatagcatttggaagctagacatgcatggtctacatgcatcagaggctgtggaagtactggaacggcatcttcacaggatagaattccagccaccagggaataatgcagcttcatctgatgaagtagctaggtctgaacccagagtgtctggtccaagcattgagcccggcccagggaaggtggtgtttgttcgtcccatacaggctatcttagaggtgatcacagggattggcaagcacagcaaagggcaggcctcactacctgttgcagtcaggggcttcctcattgaaaatgggtaccgatttgatgagctgcggcctgggcataagcttctcacttctcagcctgaagttaaaaatcacaaaggaatcaaggggcattcgccttcgaatctaggcttccgaagatcgggattgcagttaaaggttactgcaatttttgggtggattaagggagacacaagaacacgtgaattgaacccatctgctgaatcatatacgcttacagggtcagcctcagaggcagacaccaagccacgtgaggtttctgttgctgttgtttcttctattatggacattccttcagcagattgggatgcctgtgcagttgattcagttgatcctgacaattttaatccttttctgacccacgcattcctctcaagcttagaggaatcgggttctgcagtgaaggaaacagggtggttacctctgcatgttgttgcacgggatgagaatgaaactgtcgttggtgttgtcccactttacctgaaaagccattcaaggggagagtttgtatttgatcaatcatgggcagaagcttactatagctatggactcgaatactaccccaagttgcagtcttgtgtgccttttactccagtaactggtcaaagaatattagttcgagatacaccatacagggatcaagtttttgaagctttagtgaaagaattgaagagtttgactaccaagctgaaggtgtcatcgttacatataacatttccatctgaaggtgaattcagcaagttgaaggatagtgagttcttgcagagaatcgggatgcagtatcactggagaaatcgagattacagaagttttgacgagtttttaatggatttgaagcaacccaaacggaagaatatcagacaagaacgtaaaaagattcctgctcaaaatttgaaaatgaagcgacttcgtggagatgagataaaggattattttttgtgtgctttcagctggggcagaccatacttgacaagggaattctttcaccgcttgggagaaaagatgggtgacaaggtgatgcttattgttgctgaacatgacgataaacatgttgccggggctcttaaccttattggaggtgacacattgtttggccgcttatggggctgtctgccagatgcttatttccccaatttgcattttgaagcttgctattatcagaatatacatactactcaggcaattgaagcagctatagaactgaacctgagtaaggtggaggcaggtgctcaaggagagcacaagatccagcgtggttacctcccagtgacaacatacagctgccactacttcttagatcctggttttggggcagctataggaaattatcttgtacatgagacggctcaggtgaggagttgccatcggcgaaaggaaagggcaaggaaaaagctctctgaatgtcacatcgacatatcagccaagatcccaaccaaaaaggacatcagatactgcctcattatgctttttgtacaaggatacaaggattggttcttcctccctcctctcatcaatcaaaggccaagaagaaccaagctccagtgcagaaagctatcgcaaacaagaaagagctttgccagttgcagcctgcctttgcatttggactgcaccggttgcttcattcgtcaagcacaccacaggttgaggaagcagccgtttgaccatctgtgcagcagctcacccaggcacaggatggcgtacaccagcaggatgaacttgaagaggaaagggaagtaa

SEQ ID NO: 1733 - protein, 1647 aa, Oryza sativa subsp
MEMAANPGGSGTCSDALFRELWHACAGPLVTVPKRGERVYYFPQGHMEQLEASTNQQLDQYLPMFNLPSKILCSVVNVELRAEADSDEVYAQIMLQPEADQSELTSLDPELQDLEKCTAHSFCKTLTASDTSTHGGFSVLRRHAEECLPQLDMSQNPPCQELVAKDLHGTEWHFRHIFRGQPRRHLLTTGWSVFVSSKRLVAGDAFIFLRGESGELRVGVRRLMRQVNNMPSSVISSHSMHLGVLATASHAISTGTLFSVFYKPRTSRSEFVVSVNKYLEAKKQNLSVGMRFKMRFEGDEAPERRFSGTIIGIGSVPAMSKSPWADSDWKSLKVQWDEPSAIVRPDRVSPWELEPLDASNPQPPQPPLRNKRARPPASPSVVAELPPSFDVDSDQISQPSNGNKSDAPGTSSERSPLESQSRQVRSCTKVIMQGMAVGRAVDLTKLNGYGDLRSKLEEMFDIQGDLCPTLKRWQVVYTDDEDDMMLVGDDPWEKFQCFFITASCAEDATPFCLELWWYLNCKCQEVPKTGKTAWKRHSGKCMPFQIVLCFGRSLGVLVWCPDLGDSVGGGAERRRTGGVERRRREPVTRRRGGKERRRPSWRALAANRRRGEAANQRRGEAATQRGGSDPAGGLRRRGEAAKRRHGEAANRWREEAVRRGGDPSERWRTGGVERRRRGARDSADWLQRRGLLPRVVIVAHCRSEWRQRRRWRSSNFELGNVVAATWQAGSDSGAGLGNRRRSTLVLPHVRSAPFHAVVPGAVGGQRRQIVAAAVAEADGNENGNKHFTCHRENANYGLKSASENKIELLRGAHSWADSNLIEDVLASVNNDVGEASALLKAMASPCFPIREDGLPDQLSSEINKTHGLPSGNGTAENNLVNDSQLLPLPMNMSSVPIEPEVEELDDDYFNHRKDALKIMRAATKHSQAASNAFLRGDHAAAKELSLRAQEERSAAEELNKKAAKEIFRLRNSNNSIWKLDMHGLHASEAVEVLERHLHRIEFQPPGNNAASSDEVARSEPRVSGPSIEPGPGKVVFVRPIQAILEVITGIGKHSKGQASLPVAVRGFLIENGYRFDELRPGHKLLTSQPEVKNHKGIKGHSPSNLGFRRSGLQLKVTAIFGWIKGDTRTRELNPSAESYTLTGSASEADTKPREVSVAVVSSIMDIPSADWDACAVDSVDPDNFNPFLTHAFLSSLEESGSAVKETGWLPLHVVARDENETVVGVVPLYLKSHSRGEFVFDQSWAEAYYSYGLEYYPKLQSCVPFTPVTGQRILVRDTPYRDQVFEALVKELKSLTTKLKVSSLHITFPSEGEFSKLKDSEFLQRIGMQYHWRNRDYRSFDEFLMDLKQPKRKNIRQERKKIPAQNLKMKRLRGDEIKDYFLCAFSWGRPYLTREFFHRLGEKMGDKVMLIVAEHDDKHVAGALNLIGGDTLFGRLWGCLPDAYFPNLHFEACYYQNIHTTQAIEAAIELNLSKVEAGAQGEHKIQRGYLPVTTYSCHYFLDPGFGAAIGNYLVHETAQVRSCHRRKERARKKLSECHIDISAKIPTKKDIRYCLIMLFVQGYKDWFFLPPLINQRPRRTKLQCRKLSQTRKSFASCSLPLHLDCTGCFIRQAHHRLRKQPFDHLCSSSPRHRMAYTSRMNLKRKGK

SEQ ID NO: 1734 - DNA, 2781 bp, Oryza sativa subsp
  CDS (1)..(2781)
atggcgtcctcgcaggagaaggccaagacgggtgttctgagaaatgccgcagcgctgctcgacgaaatgcagctcatgggagaaacacagggtgccaagaaggtgatcaactcggagctctggcacgcttgtgccgggccgcttgtgtgcttgccgcagcgggggagcctcgtgtactacttccctcaggggcacagtgaacaggttgcagcgacaactagaaagattccaaattcccgcattccgaactacccaaacctgccatctcagttgctgtgtcaagttcacaacatcaccttgcatgccgacaaggacactgatgaagtttatgcacagatgacccttcagccagtaaactctgaaacggatgtattccctattccaactcttggtgcttataccaaaagcaagcaccccactgaatatttctgcaagaatttaaccgcaagtgatacgagtacacatggtggtttctcggtgccacgaagggctgcagagaagttgttcccacaactggattactcaatgcaacctcctaaccaggagcttattgttcgagatttgcatgataacatgtggacattccgtcacatttatcgtggacagccaaaacgacatcttctaacaactggatggagtctctttgttggggcaaagcgtctaaaagcaggggactctgtcttatttataagcatgcacattggcgttcttgctgctgcagctcatgccgcatcaagtggtagttcatttactatctactacaatcctaggacaagtccttcgccatttgtaattcctgtagcaaggtacaacaaggcaacatatatgcaaccatcagttggaatgagatttgcgatgatgtttgagacagaggagtcaagcaagcgcagatacacaggtacagttgtgggaataagtgactacgaccccatgagatggcccaattctaaatggcgcaacttacaggtcgaatgggatgaacatgggtatggagaaagacctgagcgtgtgagcatatgggatattgaaactccagaaaacactcttgtgttcccttcgtcgaccttgaattcaaagcggcaatgtcttcctggttatggagtttcagtgcctgggatggaaattggatcagcaaatatgtcatcatttccaagggctcagggtaatccctatggcagtttgcagcacattccagctgttggatcagaattggctatcatgcttctcaaccaatctggtcaaacccttgggagtccccttagttttcaccagtcctcatattctagtattatccaaaatgtgaagcaaaattatatccctcctctaacagttagcacttcagcttgtttgacaaagcaagaaagcctgccttcagatgatgcccagcaccagttccatatggcaaatatgcagaatggtgatcttgaaggctctgaagtccagcctgtcattgattcgatttctgagtcaaagttgaatgctacatcaagagatccaagaaacacagattcatacacaagtcgaagtacttcggagcaaaacagtaagggtgagcctagaggcaagactcgtaggagtaagaagggcttgcctcacaaaaccgtttcagagaaatctgacctttcttcagccccttcttggatctgtgacaatcagcaggttggtttagaatcgaaactggttggttgtgatgaacaagtaaactgtggaaatattgaagattcatcaggtgcacttactcaaggtaattttgttggacagccgcatggccatcaggttgaacaaaagggagtgctgtcgccaccaaaggtagaatcatcaaaatcacctgatggaggaaagtctgtcaattcgtttccaaaccaagggtgtttttcgcagttcattgatggtcttgattggatgactcagccttcctactaccaagactccaatgtaattcaaccagccggtgtgtcagagaacattttcagttcttctgcagatatacctccctcaatgattgctgatactatggagacttttcaggcttcatgtctttctgattgccttcctaattccatacaagaattcatctccagcccagatctgaattcactaacctttctttcacctgacatgcaaaatttggaggtccaactccagcatgatggaagcaatttgccaagcacgtccaactcgtttgtacagatgagtttttctgaagagagtgcaagtcagagtgcaaacttaagtggacttcacatggaatctacacacagaagcataaacaccacttcatgctctcaaccaatgtctactgggggctttgatgcagggatgtactcaaagttgccacgtttaaaagaatcccaaatcttgtctttgccagagattcataccaattccatgggaacatcagcttgcagtatggatgcaaccgagtacagccttgaccgaagtgcgaagccgatgaaaccaccagtgcggacatatacaaaggttcaaaagcaaggatcagttggaagatctatcgatgttacagggtttagaaattaccatgagttgagatctgccatcgcttgcatgtttggtctccaggggaaattggagcatcctggcagttcagagtggaagcttgtatatgtcgactacgaaaatgatgttcttcttgtcggagatgatccatgggaggaattcatcaactgtgtccggtgcatccggattttgtcaccttcagaagtacaacagatgagcgagaatggcatgcatgttttgaacgactgtattcaagcagcttag

SEQ ID NO: 1735 - protein, 926 aa, Oryza sativa subsp
MASSQEKAKTGVLRNAAALLDEMQLMGETQGAKKVINSELWHACAGPLVCLPQRGSLVYYFPQGHSEQVAATTRKIPNSRIPNYPNLPSQLLCQVHNITLHADKDTDEVYAQMTLQPVNSETDVFPIPTLGAYTKSKHPTEYFCKNLTASDTSTHGGFSVPRRAAEKLFPQLDYSMQPPNQELIVRDLHDNMWTFRHIYRGQPKRHLLTTGWSLFVGAKRLKAGDSVLFISMHIGVLAAAAHAASSGSSFTIYYNPRTSPSPFVIPVARYNKATYMQPSVGMRFAMMFETEESSKRRYTGTVVGISDYDPMRWPNSKWRNLQVEWDEHGYGERPERVSIWDIETPENTLVFPSSTLNSKRQCLPGYGVSVPGMEIGSANMSSFPRAQGNPYGSLQHIPAVGSELAIMLLNQSGQTLGSPLSFHQSSYSSIIQNVKQNYIPPLTVSTSACLTKQESLPSDDAQHQFHMANMQNGDLEGSEVQPVIDSISESKLNATSRDPRNTDSYTSRSTSEQNSKGEPRGKTRRSKKGLPHKTVSEKSDLSSAPSWICDNQQVGLESKLVGCDEQVNCGNIEDSSGALTQGNFVGQPHGHQVEQKGVLSPPKVESSKSPDGGKSVNSFPNQGCFSQFIDGLDWMTQPSYYQDSNVIQPAGVSENIFSSSADIPPSMIADTMETFQASCLSDCLPNSIQEFISSPDLNSLTFLSPDMQNLEVQLQHDGSNLPSTSNSFVQMSFSEESASQSANLSGLHMESTHRSINTTSCSQPMSTGGFDAGMYSKLPRLKESQILSLPEIHTNSMGTSACSMDATEYSLDRSAKPMKPPVRTYTKVQKQGSVGRSIDVTGFRNYHELRSAIACMFGLQGKLEHPGSSEWKLVYVDYENDVLLVGDDPWEEFINCVRCIRILSPSEVQQMSENGMHVLNDCIQAA

SEQ ID NO: 1736 - DNA, 2613 bp, Oryza sativa subsp
  CDS (1)..(2613)
atggtggcgatctccgagctcggatgcttgttgtgggtgtgggtgttggtggtggtggtgcagaatgcggccgatttgaggagggggatggggttttcgggtggatttgaggaggagatgagctcgtcgtcggcggccagcatcgggccgccgcagccgccgccgccccccgcgccgcccgaggaagagaagaagtgcctcaactcggagctatggcacgcctgcgccggcccgctcgtctgcctccccaccgtcggcacgcgcgtcgtctacttcccgcaaggccacagcgagcaggtggcggcgtcgacgaacaaggaggtggagggtcacatcccgaactaccccaacctgccggcgcagctgatctgccagctccacgatgtcacaatgcatgcggatgtggagactgacgaggtgtacgcgcagatgacgctccagccactgaacccagtaaggcgcctggggtttttgcatgatgtttgcagtgctgaggttttgatgcaggagcagaacgatgcgtaccttcccgcggagatggggataatgagcaagcagccgacgaattacttctgcaagacattgacggcgagcgacaccagcacgcacggggggttctccgtgccccgccgtgctgctgagcgcgtcttccctcctttggatttcacacagcagcctccagcccaggagctaattgcacgggatattcatgacatcgagtggaagttcaggcacatctttcgaggccaacccaaacgacacctgctaaccactggctggagcgtttttgtcagtgctaagagacttgttgctggagattctgtgcttttcatatggaacgagaaaaaccagcttttacttggaataagacgtgccagtcggccacagactgtgatgccttcctctgttctttcaagcgatagcatgcacataggtctccttgcagcagcagctcatgctgctgctacaaacagccgtttcactattttctacaacccccggtatatggggactataactgaagttagtgatgcagacccagtccgttggcctagttcctattggagatctgtgaaggttggttgggatgaatcaactgcaggggaaagaccaccaagagtttctttatgggaaattgaaccattgacaacctttccaatgtatccatctctgttcccactgagagttaagcatccttggtattcaggagttgcttccctgcatgatgacagcaatgctttaatgtggctgagaggagttgctggtgagggaggttttcagtctctgaactttcagtcacctggtattggctcctggggacaacagaggctccatccatccttactgagcagcgatcacgatcagtaccaagcagtagttgctgctgctgctgcttcccaatctggtggttacttaaaacagcaattcttgcaccttcagcaacctatgcagtcccctcaagaacactgcaacctcaacccattattgcagcaacaaattctgcagcaagcaagccagcaacagataattaatcctgatgcccaaaatatccaaacgatgttgagcccaagtgctatacaacagcaactccagcaactacagcaaatgcagcaagttcagaatgatcagaagcagaagattcaaccagatcaaagctaccaagttcctacaagtgcagttctcccaagtccaacatcattaccgagtcatttgcgagaaaaatttggcttctctgatcctaatgcgaattcttcaagcttcatcacctctagcagtagtgataacatgttggattcgagcttccttcagggaagttcgaaagctgtggacttatctcgatttaatcagcctgtagctagtgagcagcagcagcagcagcaacaggcatggaagcagaagtttatgggttcacagtcagtgtcttttgggggctcggttttgcataactcacccacaagcaaagatggttctgttgaaaacaaaattggtcgtgatgtgcaaaaccagtccctttttagtccacaagttgactcttcatccctcctgtacaacatggttcctaatctgacttcgaatgtttcggatggcaacttatcaacgatcccttctggatcaacttatctgcagaatgcaatgtatggttgcttggacgactcttctggtttattgcaaaatacaggagagaacgatccagcaaccagaacatttgtgaaggtttacaagtcaggttcggttgggaggtcgttggacataacccggttctctaattatgctgaacttcgagaagaactgggtcagatgttcggcattaagggtcaattggacgaccctgatagatcaggctggcagcttgtattcgtcgacagggagaatgatgtgcttctccttggagacgacccttgggaattcattaacatctatatgaatgtgagcaatgctaaaaagtcttacattatgaaacggagggagtacaatactttggtttcctggtttccacaactaatagcttatcgaggaaagactgttcttccttcaataatatgtgttggtcagtcactatatgttgatgctcagttacccaagacccttcgtgagagtaaacatcagacatga

SEQ ID NO: 1737 - protein, 870 aa, Oryza sativa subsp
MVAISELGCLLWVWVLVVVVQNAADLRRGMGFSGGFEEEMSSSSAASIGPPQPPPPPAPPEEEKKCLNSELWHACAGPLVCLPTVGTRVVYFPQGHSEQVAASTNKEVEGHIPNYPNLPAQLICQLHDVTMHADVETDEVYAQMTLQPLNPVRRLGFLHDVCSAEVLMQEQNDAYLPAEMGIMSKQPTNYFCKTLTASDTSTHGGFSVPRRAAERVFPPLDFTQQPPAQELIARDIHDIEWKFRHIFRGQPKRHLLTTGWSVFVSAKRLVAGDSVLFIWNEKNQLLLGIRRASRPQTVMPSSVLSSDSMHIGLLAAAAHAAATNSRFTIFYNPRYMGTITEVSDADPVRWPSSYWRSVKVGWDESTAGERPPRVSLWEIEPLTTFPMYPSLFPLRVKHPWYSGVASLHDDSNALMWLRGVAGEGGFQSLNFQSPGIGSWGQQRLHPSLLSSDHDQYQAVVAAAAASQSGGYLKQQFLHLQQPMQSPQEHCNLNPLLQQQILQQASQQQIINPDAQNIQTMLSPSAIQQQLQQLQQMQQVQNDQKQKIQPDQSYQVPTSAVLPSPTSLPSHLREKFGFSDPNANSSSFITSSSSDNMLDSSFLQGSSKAVDLSRFNQPVASEQQQQQQQAWKQKFMGSQSVSFGGSVLHNSPTSKDGSVENKIGRDVQNQSLFSPQVDSSSLLYNMVPNLTSNVSDGNLSTIPSGSTYLQNAMYGCLDDSSGLLQNTGENDPATRTFVKVYKSGSVGRSLDITRFSNYAELREELGQMFGIKGQLDDPDRSGWQLVFVDRENDVLLLGDDPWEFINIYMNVSNAKKSYIMKRREYNTLVSWFPQLIAYRGKTVLPSIICVGQSLYVDAQLPKTLRESKHQT

SEQ ID NO: 1738 - DNA, 2661 bp, Oryza sativa subsp
  CDS (1)..(2661)
atgggggaagggtttgggttttcccaattgctttttttactactggttactactactactgcgggggtggaggcatcgacgaaccaggtcgccgagcagcagggggctccgctctacaatctgccatggaagatcccgtgcaaggtcatgaacgtcgagctcaaggctgagcctgatacggatgaggtgtatgcgcagctcaccctgcttccggagaagcagcaggatgggaatgggagtggtaacgggaatgtgtccaaagacaaggtggaggaggaagaggtggtgccaccagctgcaactgagcggccccgggtgcactccttctgcaagacgctcactgcgtcggacacgagcacgcatggtggcttctcggtgctgcgccggcacgcggatgagtgcctcccaccactgtacagcttttttgataggctaattgtagcaatgcctttgacgtcgctgcttgatcaggatatgagtcagcatcccccaacacaagagctggtggccaaggatcttcatggggttgagtggcgcttccgtcacatcttccgaggtcagccacgaagacaccttctccagagtggttggagtgtttttgtgagtgccaaacgccttgttgctggagatgccttcatatttctcagaggtgagaatggggaactacgagttggagttcggcgtgcaatgagacaacaagctaatattccatcttcggtcatatcaagccacagtatgcatcttggtgttcttgcaactgcatggcatgcagtgaacactggaaccatgttcactgtgtactacaagccaaggactagtccatctgaatttgtggtaccacgtgatctgtacaaggaatctctgaaacgaaatcattcaatagggatgagattcaagatgacatttgaaggcgaagaggctgcagagcaaagattcactggcacaattgttggagtaggtgattctgacccatctggttgggctgactcaaaatggcgttcccttaaggtgcgatgggatgaagctgcttctgttcctcgtcctgatagggtttctccttggcaaatagaacctgctaacagcccttcccctgtcaaccctcttccagcaccccgaaccaagcgggctcgtccaaatgttttagcttcctcacctgacttgtctgctgtaaacaaagaagttgcttcaaaagtcatggcaaactcgcagcaaaatggtcttccaagggccttccacagtcaagaaaacatgaatttgagaagtcgttttggtgatagcaatgagctaaatacttcccaaaagcttaccatgtggtcttcaggaagcaatcaagagaaaaataatgtttctgtccagagggagctaggttcacagagttggatgcagatgagaaggcctgatggttcctctgagatattatctggatttcaaccactgaaagatacgcggaaccctctgagttcatttcctagtcagatatctggaaaccgttcaaatacgtggaacacaatcaatgttcattatcccgaccaaaatgccaatcataatatgtaccctggcacatggtctcttatgcctccaaacactggttttggtgtgaatcagcagaactacctaatgacgcctgacatcacactccctcaaaggtctcttaatgccaagtttggtgggaatggagcattcacttcgcttcgggcccatggcatagatcagcgctcctctggttggcttgggcatattgagccaagttctcacattgatgatgcctcatcgagtcttatcaagccacagcctttggttattgatcacaatgttcagaaagctaaaggctcttcatgcatgctatttgggatttctcttgacagccctgcaaaacctgaactattgatatccccaccaagtgttgcatttgatgggaagctccaacaggatgcacttgaagaggatgaatgctctgatccttccaagactgtgaagccacttgatggagctcagcacgattctgctagagagaaacatcagtcatgtccagatggtaccaaaaacattcagagtaaacagcaaaatggttcctcccgaagttgcaagaaggtccacaagcaaggaatcgcactcgggaggtcaatagatcttacaaagttcacttgctatgatgagttgattgctgaactggaccagatgtttgacttcaatggtgagctgaacagttcaagcaagaactggatggtcgtttacactgataatgagggtgacatgatgttggttggtgatgatccttggaatgaattctgcaacatggttcataaaatcttcatctacacgagggaggaggtccagaagatgaatccgggtgccctaaactcaaggtcttttgtggtttgcaagaacagaagacgacatatccatggtaggaaggaatcttttcgtggtgtagtagtagtagctggtgctttatatgtatcgggtaagccccgcagtaccccatttgtagatggtgcttgtcctggtatcagttgcccgctcttcgttttcgacaagttttgggtgtgctttgttgaggttttaagttattgtatgatatgccccgtagtagtgaaaggtgctgaggccaagctgccgcgcccggtgcgcttgcttgcttgcgctcttcctccctcctaa

SEQ ID NO: 1739 - protein, 886 aa, Oryza sativa subsp
MGEGFGFSQLLFLLLVTTTTAGVEASTNQVAEQQGAPLYNLPWKIPCKVMNVELKAEPDTDEVYAQLTLLPEKQQDGNGSGNGNVSKDKVEEEEVVPPAATERPRVHSFCKTLTASDTSTHGGFSVLRRHADECLPPLYSFFDRLIVAMPLTSLLDQDMSQHPPTQELVAKDLHGVEWRFRHIFRGQPRRHLLQSGWSVFVSAKRLVAGDAFIFLRGENGELRVGVRRAMRQQANIPSSVISSHSMHLGVLATAWHAVNTGTMFTVYYKPRTSPSEFVVPRDLYKESLKRNHSIGMRFKMTFEGEEAAEQRFTGTIVGVGDSDPSGWADSKWRSLKVRWDEAASVPRPDRVSPWQIEPANSPSPVNPLPAPRTKRARPNVLASSPDLSAVNKEVASKVMANSQQNGLPRAFHSQENMNLRSRFGDSNELNTSQKLTMWSSGSNQEKNNVSVQRELGSQSWMQMRRPDGSSEILSGFQPLKDTRNPLSSFPSQISGNRSNTWNTINVHYPDQNANHNMYPGTWSLMPPNTGFGVNQQNYLMTPDITLPQRSLNAKFGGNGAFTSLRAHGIDQRSSGWLGHIEPSSHIDDASSSLIKPQPLVIDHNVQKAKGSSCMLFGISLDSPAKPELLISPPSVAFDGKLQQDALEEDECSDPSKTVKPLDGAQHDSAREKHQSCPDGTKNIQSKQQNGSSRSCKKVHKQGIALGRSIDLTKFTCYDELIAELDQMFDFNGELNSSSKNWMVVYTDNEGDMMLVGDDPWNEFCNMVHKIFIYTREEVQKMNPGALNSRSFVVCKNRRRHIHGRKESFRGVVVVAGALYVSGKPRSTPFVDGACPGISCPLFVFDKFWVCFVEVLSYCMICPVVVKGAEAKLPRPVRLLACALPPS

SEQ ID NO: 1740 - DNA, 1944 bp, Gossypium hirsutum
  CDS (1)..(1944)
atgaggaaagaggcagaaaagagcttggatcctcagctatggcatgcctgtgctggatccatggttcaaattccaccagtgaactccaaagtcttctactttcctcaaggccatgccgaacactctttatatccggtcgatttttcatcttctcctccaatcccggctctacttctttgccgggtggcttctgtcaaattcttggctgatgctgaaaccgatgaagtgtatgccaagatcatgcttgtaccattgcccaacactgagcctgatctcgagaacgatgccgttttcggtggtgggtctgataatgtggaaaagcctgcttcttttgctaagacattgactcaatccgatgcaaacaacggaggtggtttttcggttcccagatattgtgctgaaaccatatttccgagactggattacactgccgatcctccggttcaaactgtgattgccagggatgttcatggtgagatttggaagtttaggcatatctataggggaacccctaggagacatttattgactactggctggagtagtttcgttaaccataagaaacttgttgctggggactccattgtgttcttgagagccgaaaacggtgagctttgtgttgggataaggcgggccaagcgtgggaatgatactggagctgaatctggtcttggaaatggaaacgacgttagtccttatggagggttttcaggtttcttgaaggaggatgagagtaagataacccgaaaacggagtccgagagggaagggaaaagtgagagcagaggctgttgtggaggcagtggcgcttgccgctaatggccagccttttgagatagtttactatccgagagcaagcacaccggagttttgtgttaaggcatctgcagtaagggcggcaatgagggttccttggtgttctttgatgaggttcaagatggctttcgagaccgaggattgttctaggattagttggttcatggggactgtatcttctgttcatattgcagacccccttcgttggcctaattccccgtggcgccttcttcaggtaacatgggatgaaccagatttgctgcaaaatgttgaacgcgtgagtccctggttggttgaattggtaccgaacatgcttcccgtccacctgtcacccttctcaacagtgacccccagaaagaagttgaggcttcctaagcacctcgatttcccccttgtcgaacaatttccgatgccaccgttttctggtcatcccctcaggtcaagcaaccccttacgttgtttatctgataatgctcctgcaggcatacagggagccaggcatgctcaattcagattatcttcatcagatcctcatcttaataaactgaagtccggactgtttccgtctggcttccagctgtttgatccgcaagctcgagttcctaatggcatctcaatgacaaagcacacagacagtaacgatgataatctatcttgcttattaacagtagggaattccagtccaaagaagaaatctgaaaacggaaagagacaccagtttttactctttggtcagccaatacttaccgagcagcagctctctcgtagctgttcaactggagtaaaaactgctctcgagaatgaagacaaaagaaaagattattccaatggttcagaatctgctctcgagaatcaattgtctccagagaagtcatttactaccagattattgtggcagcaggactatcaagccccagaacctggctcagccactggtcattgcaaggtattcttggaatctgaggatgtgggacgaactcttgacctcacagttctcggttcttatgaagagctatacatgaggttggctaacatgtttggaagagaaagatcagagatgttgggccatgtcttgtatcgagatgcaacaggtgctgtcaaacaaactggagatgaaccattcaggtaa

SEQ ID NO: 1741 - protein, 647 aa, Gossypium hirsutum
MRKEAEKSLDPQLWHACAGSMVQIPPVNSKVFYFPQGHAEHSLYPVDFSSSPPIPALLLCRVASVKFLADAETDEVYAKIMLVPLPNTEPDLENDAVFGGGSDNVEKPASFAKTLTQSDANNGGGFSVPRYCAETIFPRLDYTADPPVQTVIARDVHGEIWKFRHIYRGTPRRHLLTTGWSSFVNHKKLVAGDSIVFLRAENGELCVGIRRAKRGNDTGAESGLGNGNDVSPYGGFSGFLKEDESKITRKRSPRGKGKVRAEAVVEAVALAANGQPFEIVYYPRASTPEFCVKASAVRAAMRVPWCSLMRFKMAFETEDCSRISWFMGTVSSVHIADPLRWPNSPWRLLQVTWDEPDLLQNVERVSPWLVELVPNMLPVHLSPFSTVTPRKKLRLPKHLDFPLVEQFPMPPFSGHPLRSSNPLRCLSDNAPAGIQGARHAQFRLSSSDPHLNKLKSGLFPSGFQLFDPQARVPNGISMTKHTDSNDDNLSCLLTVGNSSPKKKSENGKRHQFLLFGQPILTEQQLSRSCSTGVKTALENEDKRKDYSNGSESALENQLSPEKSFTTRLLWQQDYQAPEPGSATGHCKVFLESEDVGRTLDLTVLGSYEELYMRLANMFGRERSEMLGHVLYRDATGAVKQTGDEPFR

SEQ ID NO: 1742 - DNA, 2013 bp, Medicago truncatula
  CDS (1)..(2013)
atgtgtttcagtattacctttacagggtcaactaatgatgctttatacaaggaattgtggcatgcctgtgctggaccccttgtcactcttcctcgtgaaggggagagagtgtattacttccctcaaggtcacatggaacagctcgaggcatctatgaatcagggattagagcagcaaatgccttcctttaatctgccctctaaaatattgtgtaaagtggtcaatattcatcttcgggctgaacctgaaacagatgaagtatatgcacagataactctgctacctgaaaccgatcaaagtgaggtgacaagcccagacgatcctctgcctgaacctccaaggtgtacagttcattcattttgcaagacacttacggcttctgacactagcactcacggaggtttctctgttcttcgaagacatgcagatgattgtctaccaccactggacatgactcagcagccaccatggcaagaactggttgcaactgatttgcatggaaatgagtggcattttcgacatatttttcgcggacaacccaggcgccacttactaaccactgggtggagtgtctttgtcagttccaaaaagttagtggctggcgacgcatttatattcttaaggcaagttgttctgggtgaaaatggagagctccgagttggagtcaggaggctcatgagacagcaaagcaatatgccatcttctgtcatatctagtcacagcatgcatcttggtgttttggccactgcatctcatgccatttccactggaacgttgttttctgtgttttacaagcccagaacaagccggtcagagtttattgtaagtattaacaagtatcttgaagctcgaaatcacaaactttctgttgggatgcgattcaaaatgaggttcgagggtgatgaagtacctgaaagaaggttcagtggtacaattgtgggtgttgaagataataaatcatctgtctgggctgattccgagtggcgatcgttaaaggttcaatgggatgaaccgtcatcaattttgcgtccagatagagtttctccatgggagttggagccacttgtatctacccctccagcaaactcccagccaacccaacgaaacaagagatcacggcctcctattctaccttcaacaatgaccgattcttctctgcaaggcatatggaaatcaccagctgactctccacctttcccttatcgcgaccctcaacatggaagagacctctatccatcaccaagattcagctctactgcgactagctttcttggttttggtgggaacagccctgcttctaacaagtcaatgtattggtctagtagattggaaaactctacagaacctttttcacctgtagcacttgaagaatctggagagaagagacaaggcactggaaatggctgtaggctctttgggattcagttacttgagaattctaatgcagaagaaagtctgcaaactgctcctttgtcaggaagggtgggggatgataggtctgttccgtccttggatgtcgagtctgaccaacattctgaaccatcaaatgttaatcggtctgatattccttcagtaagttgtgatgctgacaaatcatgcctgcggtctcctcaggagtcacaaagcagacagataagaagctgcacaaaggttcacatgcaaggtatggctgttggaagggctgttgatttaacacgttttgatggatatgaggatctgcttaggaaattggaagagatgtttgacattgagggtgagctctgtggagcaacaaaaaaatggctggtagtttacactgacaatgaagatgatatgatgatggttggggatgatccgtggcttgaattttgtagcgttgtgaggaaaatgttcatctacacaccagaggaggtgaagaagctttcaccgaaaataggtcttccgagcaatgaagaaggtaaaccaagcaaactggattctgaagcagttgtcaatcccgaggaccggtcatctattgtggggcctggttgctaa

SEQ ID NO: 1743 - protein, 670 aa, Medicago truncatula
MCFSITFTGSTNDALYKELWHACAGPLVTLPREGERVYYFPQGHMEQLEASMNQGLEQQMPSFNLPSKILCKVVNIHLRAEPETDEVYAQITLLPETDQSEVTSPDDPLPEPPRCTVHSFCKTLTASDTSTHGGFSVLRRHADDCLPPLDMTQQPPWQELVATDLHGNEWHFRHIFRGQPRRHLLTTGWSVFVSSKKLVAGDAFIFLRQVVLGENGELRVGVRRLMRQQSNMPSSVISSHSMHLGVLATASHAISTGTLFSVFYKPRTSRSEFIVSINKYLEARNHKLSVGMRFKMRFEGDEVPERRFSGTIVGVEDNKSSVWADSEWRSLKVQWDEPSSILRPDRVSPWELEPLVSTPPANSQPTQRNKRSRPPILPSTMTDSSLQGIWKSPADSPPFPYRDPQHGRDLYPSPRFSSTATSFLGFGGNSPASNKSMYWSSRLENSTEPFSPVALEESGEKRQGTGNGCRLFGIQLLENSNAEESLQTAPLSGRVGDDRSVPSLDVESDQHSEPSNVNRSDIPSVSCDADKSCLRSPQESQSRQIRSCTKVHMQGMAVGRAVDLTRFDGYEDLLRKLEEMFDIEGELCGATKKWLVVYTDNEDDMMMVGDDPWLEFCSVVRKMFIYTPEEVKKLSPKIGLPSNEEGKPSKLDSEAVVNPEDRSSIVGPGC

SEQ ID NO: 1744 - DNA, 2331 bp, Arabidopsis thaliana
  CDS (330)..(2135)
ggtttcgtaactgaaactgaaaaagctttaagagaaaacccggaaaaaaaaaaaagagaaatattttaatcaattcttctttatcacaaagagtgcctttgtattaatgaattttgatgttgtgtaatgaatacagacataaccgtcgtgtctcgtcgttaaagaaacgagagtttttcagctctttacttaccttttcttcttacccttctttcatgactcttcttctttgatgggttaataatgctttgagcttgatgatttcgattttagtttcctgttagtgtttgttttcttctgtaaagcttggattttttttggtttcttcgatggcgaatgtggaagctgatttcagaacatcagggtctaatgatgatgaattgtacacggagctatggaaagcttgtgcagggccacttgtggaagttcctcgttatggtgaaagagttttctacttccctcaaggtcacatggaacaattggttgcttcgactaatcaaggagttgttgatcaagagataccagtgtttaatcttcctccaaagatactttgtcgtgttcttagtgttacgttaaaagcagaacatgagaccgatgaggtttacgctcagatcacattacaaccagaagaagatcaaagtgaaccaacaagtcttgacccacctttagtagaaccagctaaaccagcggttgattcttttgtgaagattctaacagcttcagatacaagcacacatggtggattctctgttcttcgtaaacacgccactgagtgtttaccttcacttgatatgacacaacctacaccgactcaagaacttgtagctagagatcttcacggctatgaatggaggtttaagcatatatttagagggcaaccgaggaggcatttacttacaaccggttggagtacatttgtaacctcgaaaagacttgtagctggagatgcatttgtgttcttgaggggtgaaaccggggatttacgggttggtgtgaggcgtttagctaagcagcaaagcacgatgcccgcatccgttatttcgagtcagagtatgcgtttgggagttcttgctacagcttctcatgctgttaccacaacaactatatttgttgtcttctataaaccaaggataagccagtttataattagtgtgaacaagtatatgatggcgatgaagaacgggttttctctcggtatgcggtataggatgagattcgaaggagaagagtctcctgagagaatatttacaggtaccattattggcagtggagatctatcttctcaatggccagcttccaaatggaggtcattgcagatccaatgggacgagccatcttctatacagagaccaaacaaggtctcaccgtgggagatcgagcctttctcaccatccgcgcttacaccaacccctactcaacaacaatcaaagtccaaacggtccagaccaatctcagaaatcacagggagtcctgtagcttctagtttcttgagtagtttctcgcagagccacgagtctaatccatcggtcaaactgttgtttcaagatccagcaaccgagagaaactcaaacaaatcagtgttttcaagtggattacaatgcaagataaccgaggctccggtcacaagtagttgtaggttattcggattcgatctcacgagcaagcctgcttctgctacaattcctcatgacaagcagctaataagtgtggattcaaatatatctgattctaccaccaagtgtcatgatcctaactcttcaaactcaccaaaagagcagaaacaacaaacatccacaagaagccgaatcaaggtgcaaatgcaaggaacagcggttggacgcgcggttgatttaacattgttgagatcatacgatgaactaataaaagagctagagaaaatgtttgagattgaaggagaacttagtcctaaagacaaatgggctatcgtgtttacagacgatgaaggagataggatgcttgtaggagatgatccatggaatgagttctgtaaaatggcaaagaagttattcatatatccgagtgatgaggtcaagaaaatgaggtcgaagtcgttgttgggtgataaaggtacgatcgtaaatcttgaatcagatcagaggacagttcacgtttaactatcaagttgttgatttcttactttcttggagactctctcaagtctcaccaagtccgagagttaggtggtttttttttttggttttttttttggcgttaggtgggtttgttatttacttgtttaacataaagactataaaatatacagttattatatacgagtatatcgtattaggtttcaaacgaaaaaaaaaa

SEQ ID NO: 1745 - protein, 601 aa, Arabidopsis thaliana
MANVEADFRTSGSNDDELYTELWKACAGPLVEVPRYGERVFYFPQGHMEQLVASTNQGVVDQEIPVFNLPPKILCRVLSVTLKAEHETDEVYAQITLQPEEDQSEPTSLDPPLVEPAKPAVDSFVKILTASDTSTHGGFSVLRKHATECLPSLDMTQPTPTQELVARDLHGYEWRFKHIFRGQPRRHLLTTGWSTFVTSKRLVAGDAFVFLRGETGDLRVGVRRLAKQQSTMPASVISSQSMRLGVLATASHAVTTTTIFVVFYKPRISQFIISVNKYMMAMKNGFSLGMRYRMRFEGEESPERIFTGTIIGSGDLSSQWPASKWRSLQIQWDEPSSIQRPNKVSPWEIEPFSPSALTPTPTQQQSKSKRSRPISEITGSPVASSFLSSFSQSHESNPSVKLLFQDPATERNSNKSVFSSGLQCKITEAPVTSSCRLFGFDLTSKPASATIPHDKQLISVDSNISDSTTKCHDPNSSNSPKEQKQQTSTRSRIKVQMQGTAVGRAVDLTLLRSYDELIKELEKMFEIEGELSPKDKWAIVFTDDEGDRMLVGDDPWNEFCKMAKKLFIYPSDEVKKMRSKSLLGDKGTIVNLESDQRTVHV

SEQ ID NO: 1746 - DNA, 2697 bp, Musa acuminata
  CDS (1)..(2697)
atgttgattctgattcttgctgttttcgtgccctcgtatacagaggaaccacggtgtcttaactcagagttatggcatgcatgtgctggacctctggtgtcattacctgctgttggaagtcgggtggctgcatcaaccaacaaggaagttgattctcaaataccaaactacccaagcttgcctcctcagctgatctgtcagctgcataatgttactatgcatgctgatgtggagaccgacgaagtttatgctcagatgaccttgcaaccattgagtgctcaagagcaaaaagatccctatctccctgctgatttgggtacccccagcaaacaaccaacgaattacttctgtaagacactgaccgcaagtgacaccagtacacacggtggattttcagttccccgtcgagcagcagaaaaagttttccctccattggatttttcacagcagcctcctgcacaggagttggttgctagagaccttcatggcaatgagtggaagttccgccacatttttcgtggtcagccaaagaggcatctgcttactacaggatggagtgtttttgtgagtgcaaagagactcgttgcaggggattctgttctttttatctggaatgagaacaatcagttgctattgggtattcggcgtgccaatcgacctcaaacagttatgccttcttctgtattgtctagcgatagcatgcacataggccttcttgctgcagctgctcatgctgctgctacaaacagccgattcaccatattctataacccaagggcaagcccttctgaatttgtaatcccactaacgaagtatgttaaagcagtctatcacacccgtgtttctgtgggtatgcgtttccggatgctgtttgaaaccgaagaatcaagcgttagacgatacatgggtacgattactgggatcagtgatcttgaccctgtccgttggccaaattcacattggcgttctgtaaaggttggctgggatgagtcaacggcaggagagaagcagcctagggtatcactttgggaaattgaacctctaacgacttttcccatgtatccgtcttcctttcctctccggtttaagcgcccatggcccaccggattgcccttcttccatggtggaagagatgatgagttcagtctaaattcaccactgatgtggcttagagatggtggaaatccagcacttcagtcattgaatttccagggtgttggtgtgacaccttggatgcagccaagacttggtacttctatgcttgctctacaacctgacatgcatcagacagtggctgcagtagcccttcaggaaatgcagaccatggatcttactaaacaggtaacccctgcaatgcttcaatttcagcaacctcagaacacaaccagcagatccacacccatactgcagagtcagatcctacagcatgcacagcctcaatctcaccagcccctccttcacactattcaaggaaatcagatgcaaagccaggctcagtctcagtttcttcagcatcatttgcaacaggggcattcgtttgctgaacaacagcagcagcagcagcataatctgcagctacagataccagagcatcaacaatttcagcagcaaagagttttgcctgcttatcagcaagttccttatggtgcagccaatctgtctcagctcagctctagttctcaatcccaatcaaccactttgaacatgatatctccatcctcacagttgaaggactttccagattctaatggtaactctgtttcggcatctagtgtctccccccttgataacattttacatcaaatttctccagaagaaacatcacaacttcttagtttgccaagatatgcccaaccagttacttcgaatccctggtcgtcgaagcgaattgcagttgaatcaatgcttccttcgggagctcaaagtgtactctcacaggtggaacaaataggttctggacagcctaatatccccttacaatctgtagtgctaccaccatttccgggaagagagtgctcaatgaatcaagatggcaatatggatatccaaaaccagcacatgtttggtgtcaatattgactcatcgatttcagtacagaatggcatccgaagtcttggtactggtgtcaatggaactaattcaacaaacataccatatgctgcatgcaatttattgaggtctgctggaaatgattttcctatcaatcaagcagtaaatgggtcgaatggtctggatgaatcaggacttttgcagtctactgagaatgttgatcgagtgaactcacagagtggaacatttgttaaggtttataaatcaggttcatttgggaggtcactggacatcacgaggtttagcagctaccacgagttgcgaagtgagcttgggcacctgtttggcctggaaggccaattggaggaccctttgagatcaggctggcagcttgtattcgtcgaccgggaggatgatgttcttcttgtcggcgatgatccatggcaggagtttgtcaacagtgtatcgtgcataaagatactttcacccgaagaagtgcaacagatgggcaaacaaggtgtagattttgtgaattcagcccccatcaaaaggcttcaaagtaatgggtgtgatgactatgtaagtcagcagcattcaagaaatctcagtgccgccaggatcacatcggtcgggtcgttcaaatactga

SEQ ID NO: 1747 - protein, 898 aa, Musa acuminata
MLILILAVFVPSYTEEPRCLNSELWHACAGPLVSLPAVGSRVAASTNKEVDSQIPNYPSLPPQLICQLHNVTMHADVETDEVYAQMTLQPLSAQEQKDPYLPADLGTPSKQPTNYFCKTLTASDTSTHGGFSVPRRAAEKVFPPLDFSQQPPAQELVARDLHGNEWKFRHIFRGQPKRHLLTTGWSVFVSAKRLVAGDSVLFIWNENNQLLLGIRRANRPQTVMPSSVLSSDSMHIGLLAAAAHAAATNSRFTIFYNPRASPSEFVIPLTKYVKAVYHTRVSVGMRFRMLFETEESSVRRYMGTITGISDLDPVRWPNSHWRSVKVGWDESTAGEKQPRVSLWEIEPLTTFPMYPSSFPLRFKRPWPTGLPFFHGGRDDEFSLNSPLMWLRDGGNPALQSLNFQGVGVTPWMQPRLGTSMLALQPDMHQTVAAVALQEMQTMDLTKQVTPAMLQFQQPQNTTSRSTPILQSQILQHAQPQSHQPLLHTIQGNQMQSQAQSQFLQHHLQQGHSFAEQQQQQQHNLQLQIPEHQQFQQQRVLPAYQQVPYGAANLSQLSSSSQSQSTTLNMISPSSQLKDFPDSNGNSVSASSVSPLDNILHQISPEETSQLLSLPRYAQPVTSNPWSSKRIAVESMLPSGAQSVLSQVEQIGSGQPNIPLQSVVLPPFPGRECSMNQDGNMDIQNQHMFGVNIDSSISVQNGIRSLGTGVNGTNSTNIPYAACNLLRSAGNDFPINQAVNGSNGLDESGLLQSTENVDRVNSQSGTFVKVYKSGSFGRSLDITRFSSYHELRSELGHLFGLEGQLEDPLRSGWQLVFVDREDDVLLVGDDPWQEFVNSVSCIKILSPEEVQQMGKQGVDFVNSAPIKRLQSNGCDDYVSQQHSRNLSAARITSVGSFKY

SEQ ID NO: 1748 - DNA, 2424 bp, Medicago truncatula
  CDS (1)..(2424)
atggaaattgatctaaacaatgaagtgattgaggttgagaagaatgcattgtgccataaggaatgtgaaaaaggtttttgtttctgtgtttcttgtttgtctccttcaacttgttcatcttcaagttcaacttcaccacttgtttcttcttcttatcttgaattatggcatgcttgtgctggtcctcttacctcacttcctaagaaaggaaatgttgtggtgtattttccacaaggtcacttggaacaatttgcttctttttctccttttaagcaattggagataccaaactatgatcttcagcctcagatcttttgcagggttgtcaatgtccaactacttgccaacaaggagaatgatgaggtttatacgcaagttactctgctacctcaggctgagttggcagggatgcatatggaaggaaaagaagttgaggaattagaaggagatgaagagggagatggagggtcgcctacaaaatcaacccctcacatgttctgcaagacactaactgtctctgataccagcactcatggtggattctctgtgcctcgtagagctgctgaagattgttttcctcctttggactataagctgcagagaccctctcaagagcttgttgccaaagacctgcatggtgtggagtggaaatttcgccatatttatagaggtcagccaaggcggcatctactcactactggctggagcatttttgtgaaccaaaagaatcttgtttctggtgatgctgtgctctttctaagggggcaagactgcgtacatctatcttctccagacctcacctggggtcaaaatggagagctgagattgggaatcagaagagctgttagacctagaaacggtcttcctgaatcaatcgttggtaatcagaattgttatcccaatttcctttcatctgttgcaaatgctatatccaccaaaagcatgtttcatgttttctatagtccaagagcaagccatgccgaatttgttgttccctaccaaaaatatgttaaaagcatcaagaatccaatgaccatagggacaagattcaaaatgagaattgaaatggacgaatcgcctgaaagaaggtgtagtagtggtatgttgattggaataaatgacttggatccctatagatggcctaaatcaaaatggaggtgcttgatggtaagatgggatgatgatactgagactaatcatcaagaccgagtatctccatgggagatcgatccttcttctcctcagcctcccctaagcattcagtcttccccaagactgaagaaaccgcggaccggtctactggttgcctcacccaatcacctcatcactggtatgaatcctaatgcaggaatcagtggaatgatgggttttgaggagtcagtaagatcaccaaaggtcttgcaaggtcaagaaaatacaggttttatgtcactatactatggatgtgacaaagtaaccaaccagccaggttttgagttgagcacttcaagtcatcatcaaaaccttgcatcaactggaataggaaaagtagttacctcttctgagcttatgagtgttcatcctttcagttatgcaggctttatggaaagtaacaactttccaagggtcttgcaaggtcaagaaatatgtaaactgaaatccctttcaggaaaagttgatttcaacattggagcttggggaaccaagcccagttttcaatctgcatgttttccttatggagatattgacaaatccaatcaagctagcatgtttagctcaaaacacaccagtttcatgagtgataatgtcccgtttaacacgccatcgatagtggcaggggacattagaaaagaagttggaagatctggatctaatctccttccaaatgagcataagctgcaggacaatgtttctgcttctgcttcattagtggatactaatagaaatgctccaaatgataacaatgtcaagggaaaggcaaattcctgcaaactattcggctttcctttgtctggcgaacctagtagccaaaatttacagaacacggcaaaaaggagttgcacaaaggttcacaagcaaggaagcttagttggaagagccattgatctctctaggttgagcggctacaatgatcttctgagtgaactggagaaactatttggcatggaaggacttcttagagattctgataagggatggaggatcctctacactgacagtgagaatgacataatggttgtgggggatgatccatggcatgagttttgtgatgtggtgtcgaagatccatatatataccaaagaagaagtggagaagatgacatttgggatgatgaccaatgatgatactcatagctgtttggatcaggcaccagttattattgaaccttcaaagtcttcctcagttggtcagccagattattctccaacagtagtaagagtctaa

SEQ ID NO: 1749 - protein, 807 aa, Medicago truncatula
MEIDLNNEVIEVEKNALCHKECEKGFCFCVSCLSPSTCSSSSSTSPLVSSSYLELWHACAGPLTSLPKKGNVVVYFPQGHLEQFASFSPFKQLEIPNYDLQPQIFCRVVNVQLLANKENDEVYTQVTLLPQAELAGMHMEGKEVEELEGDEEGDGGSPTKSTPHMFCKTLTVSDTSTHGGFSVPRRAAEDCFPPLDYKLQRPSQELVAKDLHGVEWKFRHIYRGQPRRHLLTTGWSIFVNQKNLVSGDAVLFLRGQDCVHLSSPDLTWGQNGELRLGIRRAVRPRNGLPESIVGNQNCYPNFLSSVANAISTKSMFHVFYSPRASHAEFVVPYQKYVKSIKNPMTIGTRFKMRIEMDESPERRCSSGMLIGINDLDPYRWPKSKWRCLMVRWDDDTETNHQDRVSPWEIDPSSPQPPLSIQSSPRLKKPRTGLLVASPNHLITGMNPNAGISGMMGFEESVRSPKVLQGQENTGFMSLYYGCDKVTNQPGFELSTSSHHQNLASTGIGKVVTSSELMSVHPFSYAGFMESNNFPRVLQGQEICKLKSLSGKVDFNIGAWGTKPSFQSACFPYGDIDKSNQASMFSSKHTSFMSDNVPFNTPSIVAGDIRKEVGRSGSNLLPNEHKLQDNVSASASLVDTNRNAPNDNNVKGKANSCKLFGFPLSGEPSSQNLQNTAKRSCTKVHKQGSLVGRAIDLSRLSGYNDLLSELEKLFGMEGLLRDSDKGWRILYTDSENDIMVVGDDPWHEFCDVVSKIHIYTKEEVEKMTFGMMTNDDTHSCLDQAPVIIEPSKSSSVGQPDYSPTVVRV

SEQ ID NO: 1750 - DNA, 3363 bp, Medicago truncatula
  CDS (1)..(3363)
atgaaggctccaaacaatggatacatgcccaattcaggagaaggggaaaggaagaccatcaattcagaattatggcatgcttgtgctggacctttggtttccttgccacccgttggaagtcttgtggtttacttccctcaaggacacagcgagcaagttgcggcttccatgcaaaaacagaccgacttcatacccagttaccccaatcttccatccaagttgatttgcatgcttcacaatgttgccctgcatgctgatcctgaaactgacgaggtctacgcacaaatgacacttcaacctgtaaacaaatatgacaaggatgcaatattggcatcagattttggtctcaaacaaaaccgtcaacctaccgaattcttttgcaaaactctaactgctagtgacacaagcactcatggtggattttctgttcctcgtagagcagctgagaaaatattcccacctttggatttttccatgcaacctcccgctcaggagcttgttgctaaagatctacatgacaatacatgggcatttagacatatttatagagggcaaccaaagagacatctgttgactactggttggagtgtatttatcagcacaaagagactttttgctggagattctgttctttttatcagagatgaaaaacagcaacttcttttaggcttgaggcgcgctaatagacagcagccagcgctttcttcatcagtaatatccagtgacagtatgcatattggcattttagctgctgccgctcatgctgctgcaaataacagtccatttactatatattacaatccaagggccagcccctccgaatttgttgttccattggccaagtataacaaagccatgtacactcaagtgtctcttggaatgagatttagaatgatgtttgaaacagaggagtctggagtacgtagatatatgggtacagttacaggaattagtgacttggatcctgtccgatggaaaaattcacaatggcgcaatcttcaggttggatgggatgaatcgacagctggtgaacgcccaagcagagtttcaatttgggatattgaaccagtagtgactcctttctatatttgtccacctccttttttcaggcaaaacttccctggccaccctggcatgccagatgacgggtctgatgtagaaaattctttcaagagagctatgccctggcttggagatgactttggcatgaaggatgcctcaagttcagtcttccctggtttgagtttagtgcagtggatgagcatgcagcagaaaaatcagttttcaggtgctcaatcaggatgtttcccatccatgctctcgtctaatactctgcatagtaatcttagcaccgatgacccatccaaattattaagtttccaagctccagccctctctgcaccaaatcttcaatttaacaaacctaatttaccaaatcaaatcaaccaattgcaacagtccccaacatcatggcctcagcagcaacagcagcagcagcagccgctgcagcaacaacagcagcagcaacaacaacagcaacagcagctgcagtcattgtcacaaataccaatgaaccagttccagcaacaaaggcaacagcagctgcctgaatcacaaaatctgacactgctacaacaacaaattactcatcagctacagaaacagccacagtcatctcaacatgctattatgaataatggtgtagttgcttctaaccagattacaaatcagtttcaacaaccgcaaccactagcttacgctcagcttcagcaacaacaacagttgctccagggaagtatcccactccagcaaagtatccaatcagccagtaagaatgcattcccactgacatccctgccacatgactcacaatttcatcaacagatagaccagcaagcgagtctctcacagaggcagcagcaacagacacaatcacaacaatcttcactgcaggcgctgcaacaaagccagccacagagggtgcaaccaaatcttcaagcaactcaaatgtctcaacaaaacacctcggagcaacaactgcagctacagtttttgcaaaaattgcagcagcagcagcaacaacaacaacttctttcgacgtctaacccacttttgcaatctcagcttctacagcaacaaaatactaaccaacaaaaccagcaattatcacagcttcctatatcccaacatcacaatcaacagtttggcaataatgcattttcgacggagaagcttctcaacagcaacaatttgtcttcttcgtctcttatgcaatcacagcagctttctgtgaatcaaacccgaaatacacagaagccactcacaattactagagttccctctacacttacagatggagaggctccatcatgctcaacatcgccatctactaataactgccgtataactcaaccaaacctcctgaagagaaatcaacaagtaccaactacaataggcgggatcttggcagtggagcccaccagtaatctgatacatgaccttcagagtaagtctgacatgcatatcaaacacgagttctcaaatgtaaaaggatctgaccagctaaaatataaaggtacaactactgatcaactggaagcttcttctggaacatcatactgtctggatcctggcaacgttcaacagaatttgccactatccaacttctgcatggaaggggatgtccaatcaaaccctcgaatcaatctgccgtttgactctaatcttgatggtctaatgtctgatactatgctttcaaggggttttgactctcaaaaagatcttcaaaatttgttgtctaattatgatgctgctccaagagacattgaaaccgagctgtccactgctgacatcagctcacagtcatttggattgccagacatgtcttttaagcctggttgctcaaatgatgttggcattaatgatacttctggggttttgaacaatggcttgcgggcaaatcaaaatcaacgaatgcgaacatatactaaggttcaaaagcgtggctctgttggaaggtgtattgacgtcacccgttacaagggatatgatgaactccggtatgatttagcacgaatgtttgggattgaagggcaactagaagatcctcaaaggactgactggaagttagtatatgtggatcatgaaaatgacattcttcttgttggtgatgatccttgggaggaatttgtaagttgtgttcagagtataaagatattgtcatctgctgaggtgcagcaaatgagtttggatggggatttaggtaatgttacaatcccaaatcaagcatccagtgggacagatagtggcaatgcatggaggggacagtatgatgataactctgcagcctcattcaataggtga

SEQ ID NO: 1751 - protein, 1120 aa, Medicago truncatula
MKAPNNGYMPNSGEGERKTINSELWHACAGPLVSLPPVGSLVVYFPQGHSEQVAASMQKQTDFIPSYPNLPSKLICMLHNVALHADPETDEVYAQMTLQPVNKYDKDAILASDFGLKQNRQPTEFFCKTLTASDTSTHGGFSVPRRAAEKIFPPLDFSMQPPAQELVAKDLHDNTWAFRHIYRGQPKRHLLTTGWSVFISTKRLFAGDSVLFIRDEKQQLLLGLRRANRQQPALSSSVISSDSMHIGILAAAAHAAANNSPFTIYYNPRASPSEFVVPLAKYNKAMYTQVSLGMRFRMMFETEESGVRRYMGTVTGISDLDPVRWKNSQWRNLQVGWDESTAGERPSRVSIWDIEPVVTPFYICPPPFFRQNFPGHPGMPDDGSDVENSFKRAMPWLGDDFGMKDASSSVFPGLSLVQWMSMQQKNQFSGAQSGCFPSMLSSNTLHSNLSTDDPSKLLSFQAPALSAPNLQFNKPNLPNQINQLQQSPTSWPQQQQQQQQPLQQQQQQQQQQQQQLQSLSQIPMNQFQQQRQQQLPESQNLTLLQQQITHQLQKQPQSSQHAIMNNGVVASNQITNQFQQPQPLAYAQLQQQQQLLQGSIPLQQSIQSASKNAFPLTSLPHDSQFHQQIDQQASLSQRQQQQTQSQQSSLQALQQSQPQRVQPNLQATQMSQQNTSEQQLQLQFLQKLQQQQQQQQLLSTSNPLLQSQLLQQQNTNQQNQQLSQLPISQHHNQQFGNNAFSTEKLLNSNNLSSSSLMQSQQLSVNQTRNTQKPLTITRVPSTLTDGEAPSCSTSPSTNNCRITQPNLLKRNQQVPTTIGGILAVEPTSNLIHDLQSKSDMHIKHEFSNVKGSDQLKYKGTTTDQLEASSGTSYCLDPGNVQQNLPLSNFCMEGDVQSNPRINLPFDSNLDGLMSDTMLSRGFDSQKDLQNLLSNYDAAPRDIETELSTADISSQSFGLPDMSFKPGCSNDVGINDTSGVLNNGLRANQNQRMRTYTKVQKRGSVGRCIDVTRYKGYDELRYDLARMFGIEGQLEDPQRTDWKLVYVDHENDILLVGDDPWEEFVSCVQSIKILSSAEVQQMSLDGDLGNVTIPNQASSGTDSGNAWRGQYDDNSAASFNR

SEQ ID NO: 1752 - DNA, 2748 bp, Medicago truncatula
  CDS (1)..(2748)
atgagactctcttcagctagttttagtcctccaccccaagaaggggaaaagagagttctagattcagaactttggcatgcatgtgctggccctcttgtctctttgccagcagttggaagtagagttgtgtactttccacaaggccacagtgaacaagtggctgtgtcaactaacaaggaagtcgatgcacatatcccaaactatccaagcttacctcctcagcttatttgtcaacttcataatttgactatgcatgctgatgtggagaccgatgaagtgtatgcgcagatgaccttgcaacctctgaatgctcaagagcaaaaagaggcttaccttccagcagagttgggaactccaagtaaacagccgacaaactacttttgcaagaccttgactgctagtgacacaagcactcacgggggattctctgttcctcgccgggcggctgaaaaagtgtttcctcctttggatttctcccaacagcctcctgctcaagagttaatagcaagggacttgcatggtaacgaatggaaattcagacatatcttccgaggccagcccaaaagacatctacttacaactggatggagtgtttttgtgagtgctaaaagacttgttgctggtgattctgtgctgtttatctggcaatgcatcttcttcaataggaatgaaaagaaccaattgcttcttggtattcgccgtgctagccgaccacaaactgtgatgccttcctcagtattgtcaagtgatagtatgcacttgggacttcttgctgcagcagctcatgcggctgcaaccaatagccgtttcactattttctataacccacgtgcgtgtccatccgaatttgtcatacccttggcgaagtatgttaaagctgtgtatcatactcgagtttcagttggtatgcgtttcaggatgctctttgaaacagaggagtctagtgtgcgacgatacatgggtacaataactggcatttgtgacctagattctgtccggtggcctaactcacattggcgctcggtaaaggttggttgggatgaatccactgccggagaaaggcaacctagagtgtctttgtgggaaatcgagccattaacaacgtttcctatgtatccgtcaccattccctcttaggcttaaacgaccatggcctcctggattgccttcgttccatggcatgaaagatgatgattttggcatgagttctcctttgatgtggctccgagacacggatagagggcttcaatctcttaattatcaagggattggggttaatccttggatgcagccaaggtttgatcccgccatgctgaatatgcaaaccgatatgtatcaagctgtggctgctgctgcacttcaggacatgaggactgtagtagatccttccaaacagcttcctggttccttgcttcaatttcagcaaccaccgaacttcccgaacaggaccgctgctttaatgcaggctcagatgttgcaacagtcgcaacctcaacaggcttttcaaaataataatcaggagaatcaaaatctgtcgcaatctcagccacaagctcagactaatcctcaacagcatccacagcatcagcattcattcaataatcaactccatcatcatagccagcagcaacaacaaactcaacagcaagtggtggataataatcagcagatttctggttcggtctctacaatgtctcagtttgtttcagcgactcaacctcaatcaccaccacccatgcaagctctctcttctctatgccatcagcagagtttttctgattcaaatgtgaactcttcaactactattgtttctcctttgcacagtatcatgggttcatcgtttccgcatgatgaatcatccctccttatgagtcttccaagaacaagctcttgggttcctgttcaaaattcaactggttggccatccaaacgcattgcagtggatccactcctctcttcgggagcatctcaatgtattctgcctcaggtggagcagctagggcaggcacggaattcgatgtctcaaaatgctattacattgccaccatttcctggtagggagtgctcaatagaccaagaagggagcaatgatccgcaaagtaatcttttattcggtgtcaatatagatccctcatctcttctactgcataatgggatgtcgaactttaaggggatcagtggcaacaacaatgattcctcaaccatgtcctaccatcaatcttctagttacatgaacaccgcaggcgctgattcttcgttgaatcatggagtaacgcctagtattggtgaatctggtttcttgcatacccaggaaaacggggagcaaggaaacaacccactgaacaagacctttgtgaaggtttataaatcagggtccttcggaagatcgttggatatcactaaattcagcagctacaatgagctgcgtagtgagctcgcccgaatgttcggactggaaggcgagttggaggaccctgtgagatcaggctggcagcttgtattcgttgaccgagagaatgatgttcttctcctcggtgatggcccttggccggaatttgtgaatagtgtatggtgcatcaagatactttcgcctgaggaagtgcagcaaatgggcaacactggcctcgggcttttgaactcggttccaattcaaaggctctcaaatagcatttgtgatgactatgtgagccgtcaagattcaagaaatctaagcagcgggataacaaccgtgggatctctagactactaa

SEQ ID NO: 1753 - protein, 915 aa, Medicago truncatula
MRLSSASFSPPPQEGEKRVLDSELWHACAGPLVSLPAVGSRVVYFPQGHSEQVAVSTNKEVDAHIPNYPSLPPQLICQLHNLTMHADVETDEVYAQMTLQPLNAQEQKEAYLPAELGTPSKQPTNYFCKTLTASDTSTHGGFSVPRRAAEKVFPPLDFSQQPPAQELIARDLHGNEWKFRHIFRGQPKRHLLTTGWSVFVSAKRLVAGDSVLFIWQCIFFNRNEKNQLLLGIRRASRPQTVMPSSVLSSDSMHLGLLAAAAHAAATNSRFTIFYNPRACPSEFVIPLAKYVKAVYHTRVSVGMRFRMLFETEESSVRRYMGTITGICDLDSVRWPNSHWRSVKVGWDESTAGERQPRVSLWEIEPLTTFPMYPSPFPLRLKRPWPPGLPSFHGMKDDDFGMSSPLMWLRDTDRGLQSLNYQGIGVNPWMQPRFDPAMLNMQTDMYQAVAAAALQDMRTVVDPSKQLPGSLLQFQQPPNFPNRTAALMQAQMLQQSQPQQAFQNNNQENQNLSQSQPQAQTNPQQHPQHQHSFNNQLHHHSQQQQQTQQQVVDNNQQISGSVSTMSQFVSATQPQSPPPMQALSSLCHQQSFSDSNVNSSTTIVSPLHSIMGSSFPHDESSLLMSLPRTSSWVPVQNSTGWPSKRIAVDPLLSSGASQCILPQVEQLGQARNSMSQNAITLPPFPGRECSIDQEGSNDPQSNLLFGVNIDPSSLLLHNGMSNFKGISGNNNDSSTMSYHQSSSYMNTAGADSSLNHGVTPSIGESGFLHTQENGEQGNNPLNKTFVKVYKSGSFGRSLDITKFSSYNELRSELARMFGLEGELEDPVRSGWQLVFVDRENDVLLLGDGPWPEFVNSVWCIKILSPEEVQQMGNTGLGLLNSVPIQRLSNSICDDYVSRQDSRNLSSGITTVGSLDY

SEQ ID NO: 1754 - DNA, 3291 bp, Medicago truncatula
  CDS (1)..(3291)
atgactaccacgctggaagaaggtccctccgccgccatcgccgccgtagcttccgaaggagaagacaagaatgacggcggcgtaaacagtgagctatggcaagcttgtgctggtcctcttgtcaatcttcctttacctggtacccatgtcgtttacttccctcaaggccactccgaacaagttgcagcatctttgaagaaagatggggatgtccaagtaccaaactattccaatcttccctccaagttgccttgtactcttcacagtctcaccttacatgcagattcagacacagacgaagtatatgcccggatgacacttcagccagtgtctagttttgacatggatgccatattaagatcagatatttctctcaagtcgaacaagccacaacctgagtttttctgcaagcaattgacagctagtgatacgagtactcatggaggtttctctgtaccccgccgtgctgcagagaagattttccccccacttgatttctcagcgcagcctcctgctcaagaacttgtggcaaaggatttgcatggaaatgtttggaagttccgccatatataccgtggacaaccgaaacgccacttgcttacaaccggatggagtctatttatcagtgggaagaggcttttagctggagactctgttttatttatacgagatgaaaagcagcagttgcttttgggtatcagacgagcaaacaggcaaccgactaatttatcttcctcagtactgtcaagtgatagtatgcacattggaatcctggctgcagcagctcatgctagtgcaaacaatagtcccttcaccgtgttttataatcctagggccagtccctcagaatttgttattccattggccaagtactacagggcagtatacagccaccaaatatcacctggcatgcgctttagaatgatgtttgaaacagaagactcaggaacaagaagatatatgggtacagttattggtgttagtgatctggattccgtgagatggaaaaactcgcagtggcgtaatttgcaggttggttgggatgaagccaccgctggggaaaggcggagtagggtctcaatctgggaaattgaacctgttactgctccatttttcatctgtccacctccattcttcagacccaagagaccaagacaacccggaatgcctgacgatgagtcatttgatttcagtaaccttttcaagaatacaatgccttggcttggtgatgatatgtgtatgaaggatccccaggctttccctggcatgagcttagctcaatggatgaacatacagcaaaatcctgctatggttagctcattgcaaccaaatcatgtgccttccatgcctgcatctgttgtacagaatcttcctggatccgatattgcccatcaattgggattttctactcaacaaatctctcaatcaaacaatgtagccttcaatgcaccggggatgcctcagatgccactatccacttctagtggattgggagcagtcatgcagccagaacaacattctagacagaacttggcatatcaaactctaccgcagagtcaagttcagacccaacttcttaatccccagagtattgtccaaacgaacaatattcttcaatcacaacaaccatccattcaaaacaatcaactccatagaagtctctctcagaacccactgcaacagtttcaacagactataattgggcaaaaccaaccgcaaaatatgattaggcccactatgccagatcatattaatcaacagttgcatatgtctgataatcaggtccggcttcagttgttacagaagcttcaacagcaacaacagacactcttgtctcagcaatctgcattgcagcagcctgctcagattattcaaaaccatgaccagcagaggcaagaattagacgtcacacacaactctagggcaataactccccgtcaagtgtttgaaattcctcatacgcttcaaaactcactgctcgaggctaattctatgaaccatcagatgacagatcatagtagccagaacaatgttcagttctcccatccagccaagcaacaaaagcttcaacatcaacaacagcaaacacaacccggctcactgtctaaaatgtctagtcatgttggacttccttctgcaactactgctaatcagttatctgcttccggttgcagtatacggactgtagcaactgggacagtgccatcggtaaatactgatcatgctccatcttgttctacttcgccttccacaaataactgtgttggtgcgcttcctccagtgaccacatcccagatccttatgagcacaataggggatgacgttgctcagtctgctgtgaccatcttgagtcaaagttctaatgcaaatgtggtaaaatatgcacagccaaattatgatgttaagccttgtttaaacatttccgaaaatcacaacccagtgaatttttaccctcagacttgcttgaatggtgctgctatccagacagattgtttggatacgtcgtcttctacaacttcagtttgcctttctcagagtgattcacgctttcatcagactgacagaccggtatcttactatcctcagtcaatgttttctagagacaacattcaaaacgtggaagttcaggctgatgctaggtgcaatgttgcatatggcaacagcatgaatgggcaaatgagaatgccactgaatctagattctacggtaaccaaaggcacagcaagactgggcaaggatttgtcaaatgatttctcttcgggaggcttgctcgggggctatgaaaataacggtgatgcccagccagaactttcatcttccatggtttcacaaacatggggagtccctgatatgacctttaattcgattgattccactataaatgatagtggtttcttggatagtggtccatgggctccgcggccgccgccacatcaatttcaacggattagaacatataccaaggtatataaacgcggagctgtgggaaggtccatagacataacaagatattcaggttacgatgagcttaaacatgatctggctcgtaggtttggtattgagggacaactagaggatagacaacgagtaggttggaaacttgtttatgtagatcatgaaaatgatgttctgctagtgggagatgacccttgggaggagtttgtcaattgtgtccgctgtattaaaatactttctcctcaagaagttcaacagatgagcttagatggagattttggcaatggtggccttccaagacaggccagtagtagctctgatggtgggattgcttaa

SEQ ID NO: 1755 - protein, 1096 aa, Medicago truncatula
MTTTLEEGPSAAIAAVASEGEDKNDGGVNSELWQACAGPLVNLPLPGTHVVYFPQGHSEQVAASLKKDGDVQVPNYSNLPSKLPCTLHSLTLHADSDTDEVYARMTLQPVSSFDMDAILRSDISLKSNKPQPEFFCKQLTASDTSTHGGFSVPRRAAEKIFPPLDFSAQPPAQELVAKDLHGNVWKFRHIYRGQPKRHLLTTGWSLFISGKRLLAGDSVLFIRDEKQQLLLGIRRANRQPTNLSSSVLSSDSMHIGILAAAAHASANNSPFTVFYNPRASPSEFVIPLAKYYRAVYSHQISPGMRFRMMFETEDSGTRRYMGTVIGVSDLDSVRWKNSQWRNLQVGWDEATAGERRSRVSIWEIEPVTAPFFICPPPFFRPKRPRQPGMPDDESFDFSNLFKNTMPWLGDDMCMKDPQAFPGMSLAQWMNIQQNPAMVSSLQPNHVPSMPASVVQNLPGSDIAHQLGFSTQQISQSNNVAFNAPGMPQMPLSTSSGLGAVMQPEQHSRQNLAYQTLPQSQVQTQLLNPQSIVQTNNILQSQQPSIQNNQLHRSLSQNPLQQFQQTIIGQNQPQNMIRPTMPDHINQQLHMSDNQVRLQLLQKLQQQQQTLLSQQSALQQPAQIIQNHDQQRQELDVTHNSRAITPRQVFEIPHTLQNSLLEANSMNHQMTDHSSQNNVQFSHPAKQQKLQHQQQQTQPGSLSKMSSHVGLPSATTANQLSASGCSIRTVATGTVPSVNTDHAPSCSTSPSTNNCVGALPPVTTSQILMSTIGDDVAQSAVTILSQSSNANVVKYAQPNYDVKPCLNISENHNPVNFYPQTCLNGAAIQTDCLDTSSSTTSVCLSQSDSRFHQTDRPVSYYPQSMFSRDNIQNVEVQADARCNVAYGNSMNGQMRMPLNLDSTVTKGTARLGKDLSNDFSSGGLLGGYENNGDAQPELSSSMVSQTWGVPDMTFNSIDSTINDSGFLDSGPWAPRPPPHQFQRIRTYTKVYKRGAVGRSIDITRYSGYDELKHDLARRFGIEGQLEDRQRVGWKLVYVDHENDVLLVGDDPWEEFVNCVRCIKILSPQEVQQMSLDGDFGNGGLPRQASSSSDGGIA

SEQ ID NO: 1756 - DNA, 2451 bp, Oryza sativa
  CDS (1)..(2451)
atgagctcgtcgtcggcggccagcatcgggccgccgcagccgccgccgccccccgcgccgcccgaggaagagaagaagtgcctcaactcggagctatggcacgcctgcgccggcccgctcgtctgcctccccaccgtcggcacgcgcgtcgtctacttcccgcaaggccacagcgagcaggtggcggcgtcgacgaacaaggaggtggagggtcacatcccgaactaccccaacctgccggcgcagctgatctgccagctccacgatgtcacaatgcatgcggatgtggagactgacgaggtgtacgcgcagatgacgctccagccactgaacccacaggagcagaacgatgcgtaccttcccgcggagatggggataatgagcaagcagccgacgaattacttctgcaagacattgacggcgagcgacaccagcacgcacggggggttctccgtgccccgccgtgctgctgagcgcgtcttccctcctctggatttcacacagcagcctccagcccaggagctaattgcacgggatattcatgacatcgagtggaagttcaggcacatctttcgaggccaacccaaacgacacctgctaaccactggctggagcgtttttgtcagtgctaagagacttgttgctggagattctgtgcttttcatatggaacgagaaaaaccagcttttacttggaataagacgtgccagtcggccacagactgtgatgccttcctctgttctttcaagcgatagcatgcacataggtctccttgcagcagcagctcatgctgctgctacaaacagccgtttcactattttctacaacccccgggcaagtccatcagaatttgtcataccactgtcaaaatacatcaaggctgtttttcacacccggatatcggttgggatgcggttcaggatgttgtttgagactgaggaatcaagcgttcgcaggtatatggggactataactgaagttagtgatgcagacccagtccgttggcctagttcctattggagatctgtgaaggttggttgggatgaatcaactgcaggggaaaggccaccaagagtttctttatgggaaattgaaccattgacaacctttccaatgtatccatctctgttcccactgagagttaagcatccttggtattcaggagttgcttccctgcatgatgacagcaatgctttaatgtggctgagaggagttgctggtgagggaggttttcagtctctgaactttcagtcacctggtattggctcctggggacaacagaggctccatccatccttactgagcagcgatcacgatcagtaccaagcagtagttgctgctgctgctgcttcccaatctggtggttacttaaaacagcaattcttgcaccttcagcaacctatgcagtcccctcaagaacactgcaacctcaacccattattgcagcaacaaattctgcagcaagcaagccagcaacagataattaatcctgatgcccaaaatatccaaacgatgttgagcccaagtgctatacaacagcaactccagcaactacagcaaatgcagcaagttcagaatgatcagaagcagaagattcaaccagatcaaagctaccaagttcctacaagtgcagttctcccaagtccaacatcattaccgagtcatttgcgagaaaaatttggcttctctgatcctaatgcgaattcttcaagcttcatcacctctagcagtagtgataacatgttggattcgagcttccttcagggaagttcgaaagctgtggacttatctcgatttaatcagcctgtagctagtgagcagcagcagcaacaggcatggaagcagaagtttatgggttcacagtcagtgtcttttgggggctcggttttgcataactcacccacaagcaaagatggttctgttgaaaacaaaattggtcgtgatgtgcaaaaccagtccctttttagtccacaagttgactcttcatccctcctgtacaacatggttcctaatctgacttcgaatgtttcggatggcaacttatcaacgatcccttctggatcaacttatctgcagaatgcaatgtatggttgcttggacgactcttctggtttattgcaaaatacaggagagaacgatccagcaaccagaacatttgtgaaggtttacaagtcaggttcggttgggaggtcgttggacatcacccggttctctaattatgctgaacttcgagaagaactgggtcagatgttcggcattaagggtcaattggacgaccctgatagatcaggctggcagcttgtattcgtcgacagggagaatgatgtgcttctccttggagacgacccttgggagtcctttgtgaatagtgtatggtacatcaagatactttcacctgaggatgtgcataagatgggaaagcaaggaaatgatccacggtatctgtcctga

SEQ ID NO: 1757 - protein, 816 aa, Oryza sativa
MSSSSAASIGPPQPPPPPAPPEEEKKCLNSELWHACAGPLVCLPTVGTRVVYFPQGHSEQVAASTNKEVEGHIPNYPNLPAQLICQLHDVTMHADVETDEVYAQMTLQPLNPQEQNDAYLPAEMGIMSKQPTNYFCKTLTASDTSTHGGFSVPRRAAERVFPPLDFTQQPPAQELIARDIHDIEWKFRHIFRGQPKRHLLTTGWSVFVSAKRLVAGDSVLFIWNEKNQLLLGIRRASRPQTVMPSSVLSSDSMHIGLLAAAAHAAATNSRFTIFYNPRASPSEFVIPLSKYIKAVFHTRISVGMRFRMLFETEESSVRRYMGTITEVSDADPVRWPSSYWRSVKVGWDESTAGERPPRVSLWEIEPLTTFPMYPSLFPLRVKHPWYSGVASLHDDSNALMWLRGVAGEGGFQSLNFQSPGIGSWGQQRLHPSLLSSDHDQYQAVVAAAAASQSGGYLKQQFLHLQQPMQSPQEHCNLNPLLQQQILQQASQQQIINPDAQNIQTMLSPSAIQQQLQQLQQMQQVQNDQKQKIQPDQSYQVPTSAVLPSPTSLPSHLREKFGFSDPNANSSSFITSSSSDNMLDSSFLQGSSKAVDLSRFNQPVASEQQQQQAWKQKFMGSQSVSFGGSVLHNSPTSKDGSVENKIGRDVQNQSLFSPQVDSSSLLYNMVPNLTSNVSDGNLSTIPSGSTYLQNAMYGCLDDSSGLLQNTGENDPATRTFVKVYKSGSVGRSLDITRFSNYAELREELGQMFGIKGQLDDPDRSGWQLVFVDRENDVLLLGDDPWESFVNSVWYIKILSPEDVHKMGKQGNDPRYLS

SEQ ID NO: 1758 - DNA, 2433 bp, Medicago truncatula
  CDS (1)..(2433)
atggaaattgatctgaatgattccataactgaagttaagaagaatgtgtgtagcaatggtaaatgtgagaaaagtgtttgttgtgtttgcactttatcttcttcttcatcaccaacatgttcatcttctagttccacttcagctattgtgtcttcatcttatcttgaactatggcatgcttgtgctggacctttaacatcacttccaaagaaagggaatgttgtagtttattttccacaaggtcatttggaacaagttgcatctttgtctctcttttcttcattggaaattccaacatatggtcttcaaccacaaatactttgtagggttgtcaatgttcaattacttgccaataaggagaatgatgaggtttacacacaggttgctttgcttccacaggcagagttagcagggatgtgtttggatgacaaagagcctgaaggtttggaagcagatgatgagggaaatggaagatcccctacaaagttagcttctcacatgttttgcaaaacactcactgcctctgataccagcactcatggagggttttcggttccacgtagagctgctgaagattgttttcctcctttggattataagcagcagaggccctctcaagagcttgttgcaaaagacctgcatggtgtggggtggaaatttcgccatatttaccgaggtcagccaaggaggcatctgctcactactggctggagtatttttgttagccaaaagaatcttgtttctggggatgcagttctctttctaaggggtgaaaacggagagttaagattgggaatcagaagagctgctcgaccgagaaacggtcttcctgaatcaattattggtaaccagagttgttctcctagtttcctttcttctgtggctaatgctatctccgcaaaaagcatgtttcatgttttctacagtccaagagcaagtcatgccgatttcgttgtgccttaccaaaagtatgctaaaagcatcaggaacccagtgaccatagggacaagattcaaaatgaaatttgaaatggatgaatctccagaaagaaggtgtagtagcggtatcgtgactggaatgagtgatttggatccgtataaatggcccaagtcaaaatggagatgcttgatggtcagatgggatgaggatattggggctaatcatcaagatagagtctctccttgggagattgatccgtctacttctctccctcccttgaacattcaatcttctcgaaggctgaagaaactgcggacgggtctgcatgttgaatcaccgagtcactttatcactgctggagacagtgggtttatggactttgatgagtctataagatcatccaaggtcttgcaaggtcaagaaaaaacaagttttatgtcactatattatggatgtgacacagtaactaagcagaaagaatttgatatcaattctctaagacatactaatcttgcatcaaatggagcaagaaaaattacttcttctgagtttacgaggattcaaccttctagttatgcagacttcacggaaatgaaccggtttcctagggtcttgcaagctcaagaaatatatccattgagatccctgacaggaaaggttgatctaaaccttaactcttggggtaaaaccaatgttagttacacaaaatataacctgcataatgcaaccaaacttaactttcactcattaggatcagaagttcttcaaaattcctcttttccatatggtgatatacacaaagttggtcaaggtagcagcatgctgtgctccaaaccaaccaatttccaactagggaatgtttcatttaatactccttcatctcagataggtgcattgagaaatgaagttggactgtctagtttcaaaatccgaaatgaacagaagctgcagaacgatatttcggctgctacttctctagatgcaaacatcaggatttcaaatgacgaaaatttcaaggagatggtaaatccttgtaaactgtttggattttccttatcggcagcagcggaaaccacctcacaaaatctacaaaactctgctaaaagaagttgcacaaaggttcacaagcaaggtagcttagttggaagagccattgatctgtcaagattgagcagctacaatgatctggtgagtgaactagagagactatttggcatggaaggtcttctaagagatcctgacaaaggatggagaatcctctacactgacagtgaaaatgacattatggttgttggggatgatccatggcatgagttctgtgatatggtatcaaaaatccatatatatacacaagaagaagtggagaagatgacaattgggatgatgaatgatgataaccagagctgtttggaacagacaccattgattatggaggcttcaaaatcttcctcggtgggacagccggattcttctacaacagtagttagaatctag

SEQ ID NO: 1759 - protein, 810 aa, Medicago truncatula
MEIDLNDSITEVKKNVCSNGKCEKSVCCVCTLSSSSSPTCSSSSSTSAIVSSSYLELWHACAGPLTSLPKKGNVVVYFPQGHLEQVASLSLFSSLEIPTYGLQPQILCRVVNVQLLANKENDEVYTQVALLPQAELAGMCLDDKEPEGLEADDEGNGRSPTKLASHMFCKTLTASDTSTHGGFSVPRRAAEDCFPPLDYKQQRPSQELVAKDLHGVGWKFRHIYRGQPRRHLLTTGWSIFVSQKNLVSGDAVLFLRGENGELRLGIRRAARPRNGLPESIIGNQSCSPSFLSSVANAISAKSMFHVFYSPRASHADFVVPYQKYAKSIRNPVTIGTRFKMKFEMDESPERRCSSGIVTGMSDLDPYKWPKSKWRCLMVRWDEDIGANHQDRVSPWEIDPSTSLPPLNIQSSRRLKKLRTGLHVESPSHFITAGDSGFMDFDESIRSSKVLQGQEKTSFMSLYYGCDTVTKQKEFDINSLRHTNLASNGARKITSSEFTRIQPSSYADFTEMNRFPRVLQAQEIYPLRSLTGKVDLNLNSWGKTNVSYTKYNLHNATKLNFHSLGSEVLQNSSFPYGDIHKVGQGSSMLCSKPTNFQLGNVSFNTPSSQIGALRNEVGLSSFKIRNEQKLQNDISAATSLDANIRISNDENFKEMVNPCKLFGFSLSAAAETTSQNLQNSAKRSCTKVHKQGSLVGRAIDLSRLSSYNDLVSELERLFGMEGLLRDPDKGWRILYTDSENDIMVVGDDPWHEFCDMVSKIHIYTQEEVEKMTIGMMNDDNQSCLEQTPLIMEASKSSSVGQPDSSTTVVRI

SEQ ID NO: 1760 - DNA, 2436 bp, Solanum lycopersicum
  CDS (1)..(2436)
atggaaattgatctgaatcatgcattagtgagtgaagtggagaagaatgtatgttgtaatgaagaatgtgataaagggggtggtgggggttgtgttaattgctctttgtacacttccactacttcttcttgttcttcaaatgtatcttcatcttcttcacttgctcttacctcaatttataaagagctttggcatgcttgtgctggtcctcttactagtttacccaagaaaggaaatgtagtggtttatttccctcaaggtcatatggaagaagctgtttctgcttttccattttcacctgtcaagattgatttaccaacttttggtcttcagcctcagatcttctgtagagtggaagatgtccaattgcttgcaaataaggaaaatgatgaggtgtatacacagctcactcttcttcctcttccagagtcaatggctataagcttagaggggaaagaacatgaagattcggggacggatgaggaagggaatggagtcaatccagggaaatcagcttctcacatgttctgtaaaacgctgactgcttcggataccaccacccatggtggcttttcagttccccgtcgagcagctgaagactgcttcccccctctggattacaaagagcaaagaccctcacaggagctaattgctaaggatctgcacggagtagagtggaaatttcgtcacatttatagaggccagccaaggcgacatttgctcactactggatggagtatctttgtcagccaaaagaatcttgtctcaggggatgcagttctcttcttgaggggagaaggtggaaatctcagactgggaataagaagagctgcaagacctagaaatgggcttcctgaatcgataatcaaaagtcaatattctggaccggatgttctttcgtcagttgctacagccctatcagcaaagagcactttccatgttttctatagcccaagggcaagtcatgctgatttcgttgtaccttaccaaaagtacgtgaaagccatcaactctcggattcctgttgggacaagatttaaaatgaaatttgatttggatgattcacctgaaagaaggtacagcggtgtagtgactgggataagcgatatggatccctttagatggcccaactctaaatggagatgcttgatggtcagatgggatgaagatataatgagtaatcatcaggaacgggtttctccttgggaaattgattcttcagtttccttaccaccactgagcattcagtcctcaccaagactgaagaaactgcggactagtcagcaggcaccatcagtactggacagccattttgctggagggagtgctcttttagactttgaggagtcaataagatcctccaaggtcttgcaaggtcaagaaaatttaggtctgatatcacctccctatggttgtgataaaccagtccgcccactggatttcgagctgcaaagagtagctcgtcacaatctcatgccaaatggtgtagagaacattattgttggtgactttgtgaaaactcagcctccaacaacctacacaggctttctggaatccaataggtttccaaaggtcttgcaaggtcaagaaatttgctcgttgagatcccttactggaaaaggtgatgttaattttggtgcttggggaaaacctgaatttggttgcaatgttttcggcacatatcagaggccgagagccaatttctatcctctcgcttctgaaggggcgaggaatgtgtttttaccttacaatgcgatgtatagagctggacaagatcccgtggttccctcctacagtactaatttccaaagagaaaatcctaccttgaaccagaattcaatccaaaatgtggttaggagggaagaagttggaatgccaaagtttgtaaatgagcagaggccaccggagatgtctaaagtgtccattccagagaaccatttcaagaatgaaaatgacgactccttcaatgcacaggctccatgtaaactgtttggcttttccttgacgaaagaaccatctactcctagctcgcagagttctggtaagaggagctgtactaaggttcacaaacaaggcagcttggttggacgagccattgatctctcgagattgaatggctatgacgacttgctggttgagttggagaggcttttcaacatggaagacctcttaagagatcccaacaaggggtggcgaatcttgtacactgacagtgagaatgacatgatggttgtcggagatgatccatggcatgagttctgtgaggtagtatccaagatccatatatacactcaagaagaagtggagaaaatgactattgaggggatcagcgatgacactcaaagttgtttggaggaggcaccagcaatcatggatgtctcaaagtcttcttcagttggccagcctgattcatctccaactgtaatcaggatttga

SEQ ID NO: 1761 - protein, 811 aa, Solanum lycopersicum
MEIDLNHALVSEVEKNVCCNEECDKGGGGGCVNCSLYTSTTSSCSSNVSSSSSLALTSIYKELWHACAGPLTSLPKKGNVVVYFPQGHMEEAVSAFPFSPVKIDLPTFGLQPQIFCRVEDVQLLANKENDEVYTQLTLLPLPESMAISLEGKEHEDSGTDEEGNGVNPGKSASHMFCKTLTASDTTTHGGFSVPRRAAEDCFPPLDYKEQRPSQELIAKDLHGVEWKFRHIYRGQPRRHLLTTGWSIFVSQKNLVSGDAVLFLRGEGGNLRLGIRRAARPRNGLPESIIKSQYSGPDVLSSVATALSAKSTFHVFYSPRASHADFVVPYQKYVKAINSRIPVGTRFKMKFDLDDSPERRYSGVVTGISDMDPFRWPNSKWRCLMVRWDEDIMSNHQERVSPWEIDSSVSLPPLSIQSSPRLKKLRTSQQAPSVLDSHFAGGSALLDFEESIRSSKVLQGQENLGLISPPYGCDKPVRPLDFELQRVARHNLMPNGVENIIVGDFVKTQPPTTYTGFLESNRFPKVLQGQEICSLRSLTGKGDVNFGAWGKPEFGCNVFGTYQRPRANFYPLASEGARNVFLPYNAMYRAGQDPVVPSYSTNFQRENPTLNQNSIQNVVRREEVGMPKFVNEQRPPEMSKVSIPENHFKNENDDSFNAQAPCKLFGFSLTKEPSTPSSQSSGKRSCTKVHKQGSLVGRAIDLSRLNGYDDLLVELERLFNMEDLLRDPNKGWRILYTDSENDMMVVGDDPWHEFCEVVSKIHIYTQEEVEKMTIEGISDDTQSCLEEAPAIMDVSKSSSVGQPDSSPTVIRI

SEQ ID NO: 1762 - DNA, 2541 bp, Solanum lycopersicum
  CDS (1)..(2541)
atggctgcttcggaggtgtcgattcaaggttacagcgagccgagtgatggttctaggccggtttcagagactggtaggagtagttccggtgtcggaatagttgatgctgatacggcgttgtacacggagctttggcgttcatgtgccggtccacttgtgacggtaccgcgagagggtgagctggtgtactatttccctcaaggacatatcgagcaggttgaagcatcaactaatcaagtggctgaccagcagatgcctttgtataatcttccatctaagattctatgccgtgttgtgaatgtcctgttaaaggctgaaccagatactgatgaggtgtatgcacaagtgactttgatgccggagccaaatcaagatgagaatgcagtgaagaaggaacctatgcgccctcctccaccacgatttcatgtacactctttttgtaagactctaacagcctctgatacaagcactcacggtggattttccgtcttgagacgacatgctgatgaatgcctcccccaactggacatgtctcggcagcctcccacacaggagttggtggccaaagatttacatggaaatgagtggcgattcaggcatatattccggggccagcctaggaggcatcttcttcagagtggttggagtgtctttgttagttcgaagaggcttgttgctggggatgcattcatatttcttagaggtgagaatggggagcttcgtgttggtgttagacgtgccatgagacagcaaggaaatgctccatcatcggtgatatccagtcatagcatgcatcttggtgtacttgcaacagcttggcatgccattcaaacaaaaacgatgttcactgtgtattacaagcccaggacaagccctgctgagtttatagttccatatgaccactatatggaatctgtgaagaataattactctattggaatgaggtttaagatgaggttcgaaggtgaagaagctccagagcaaaggtttactggaactattgttggcattgaagatgctgatccccaaaggtggcttgaatctaagtggagatgtctgaaggtacggtgggatgaaaattcaagcattccaaggccagaccgagtttcaccgtggaaaatagaaccagctcttagccctcctgcacttaatgtacctccagttgcaaggccaaaaaggcctagatccagtattttgcccacatctcctgattcatctgtccttactagggaaggttcatcaagagcgacagcagaccattcccaagccagtgggtttccgagggtcttgcaaggtcaagagttatcgacctttagaggcggttttgcagaaattaatgagacagacttgtctgagaaaccaatgatatggcaaacatcagtgaatgatgaaaagaatgatattcattctgcatcaaagagatatcttccagataaatggctacctttagggaggcctgagtcatctctcacagatttgttatcaggttttggctcctcccatgggttctgtttaccctctgcggaccaagctgcgtttggtgctagattggtgaagcaacaaacacaagatcaggaaaaggattttagcttattgggaaagccatggtctcttctgtcttccggtctctctcttaatctgatggattctggttcaaaagctcctggcatagggggtgatactccctatcaaatgcggggagatgctaggtatagtggttatggtgagttttcagtactccccggtcatagggttgcaaatcagcagggaagctggattatgcctcaaccagtgtcgccttacatgcagctctcctctcattcaagagaaatgatgcataaaccctctgtagtaaagcaacccgaggctgtgaaacccaaagagggtaactacaaactatttggcattcctcttacaagtaatgtttgcacagatgctgttatgatgcggaaaagttcattgattgatccagcaagtgacatgaatattggtatacaccctcatcaatcccttgccactgattctgatcaaaggtctgagcaatcaaagggatcaaaggtggatgatggagttgcagctaatgatcatgacaaacaatttcatacctttcatcttgctgctagagataaggatggcaaagggcatagtagttctacaaggagctgcacaaaggttcataaacagggtacagcactcggaaggtccgtagatcttgcaaagttcaacaattatgacgaattgattgctgaactggatcaactttttgattttaatggtgaactcaaggctcggagtaagagttggctggttgtatacactgatgatgagggtgacatgatgcttgttggagatgatccatggcaggaattttgtggtatggttcgcaagattttcatctatacaaaagaggaggtgcagcgtatgaatccagggacccttaattcaaaaggtgaggacacttcttctgttgctgagggctcagacgctaaagaagtgaagaatctgcaacttccttctgaatctggtcaagcagaatcttag

SEQ ID NO: 1763 - protein, 846 aa, Solanum lycopersicum
MAASEVSIQGYSEPSDGSRPVSETGRSSSGVGIVDADTALYTELWRSCAGPLVTVPREGELVYYFPQGHIEQVEASTNQVADQQMPLYNLPSKILCRVVNVLLKAEPDTDEVYAQVTLMPEPNQDENAVKKEPMRPPPPRFHVHSFCKTLTASDTSTHGGFSVLRRHADECLPQLDMSRQPPTQELVAKDLHGNEWRFRHIFRGQPRRHLLQSGWSVFVSSKRLVAGDAFIFLRGENGELRVGVRRAMRQQGNAPSSVISSHSMHLGVLATAWHAIQTKTMFTVYYKPRTSPAEFIVPYDHYMESVKNNYSIGMRFKMRFEGEEAPEQRFTGTIVGIEDADPQRWLESKWRCLKVRWDENSSIPRPDRVSPWKIEPALSPPALNVPPVARPKRPRSSILPTSPDSSVLTREGSSRATADHSQASGFPRVLQGQELSTFRGGFAEINETDLSEKPMIWQTSVNDEKNDIHSASKRYLPDKWLPLGRPESSLTDLLSGFGSSHGFCLPSADQAAFGARLVKQQTQDQEKDFSLLGKPWSLLSSGLSLNLMDSGSKAPGIGGDTPYQMRGDARYSGYGEFSVLPGHRVANQQGSWIMPQPVSPYMQLSSHSREMMHKPSVVKQPEAVKPKEGNYKLFGIPLTSNVCTDAVMMRKSSLIDPASDMNIGIHPHQSLATDSDQRSEQSKGSKVDDGVAANDHDKQFHTFHLAARDKDGKGHSSSTRSCTKVHKQGTALGRSVDLAKFNNYDELIAELDQLFDFNGELKARSKSWLVVYTDDEGDMMLVGDDPWQEFCGMVRKIFIYTKEEVQRMNPGTLNSKGEDTSSVAEGSDAKEVKNLQLPSESGQAES

SEQ ID NO: 1764 - DNA, 2244 bp, Solanum lycopersicum
  CDS (1)..(2244)
atgatgtgtggacttattgatctgaatactgtggataacgatgatgccggagaagaaacgacggcgccggtgtcattggattcaccggcgtcgtcgtcggcggcatcaggaagttcggatttaacgtcgtcaactacgccagcggtggcatcggtgtgtatggagctttggcatgcgtgtgctggaccgttgatttcgctgccgaagaaaggaagtgcggttgtgtacctgcctcaaggtcacttggaacatttatctgagtacccgtccatagcctgtaatctccctcctcatgtgttttgtcgcgttgtagatgtgaagctacaagcagatgcggctactgatgaggtctatgcacaagtctcactagttcctgacaatcagcagattgagcagaaatggaaggatggagacattgatgctgatattgaagaagaggaaatagaaggtgctggaaaatcaataacaccacacatgttctgcaaaactcttactgcatcggataccagcactcatggtggtttctctgtccctcggcgggcagcagaagattgttttgctcccttggattacagacaacagaggccctcgcaggagctggtagccaaagatctacatggtatagagtggaaatttcggcatatctatcggggtcagccacggcggcatctgctcactacaggatggagtgcatttgtaaacaagaagaagcttgtttctggtgacgctgttcttttcttgaggactggtgatggagagcttaggttaggagtgagacgagctgcccaagcaaaaacatgttctagttatctggctccttgtagcaaaccgttgaatgttagtggcattgtagatgctgttaacgttatatctagcagaaatgctttcaacatttgttacaacccaagggatagctcatcggatttcattgtaccttaccacaaattctctaagactcttgcacatcccttttcagctggaatgaggtttaaaatgcgtgtcgaaacagaagatgcagctgagcaaaggttcactggactagttgtgggagtcagcaatgtagatccagttcgatggccaggttctaaatggaggtgcctattggtcagatgggatgatcttgatgtttctagacataatagggtttcaccatgggagattgagccatctggttcagctcctgtgcccagcagcttggtgatgccttctgctaagaggaccagggttggcttccctatttcaaaggcagattttccaattcctagagaaggaattgcagtatcagactttggggaaccttctaggttccagaaggtcttgcaaggtcaagaaattttgaggatgcatgctccttatggcggacttgatgctcggagtcctcgtccagcaggcacaagatgctttcctggttttcctagttctgggatatctagaatgggaaacagcatcagacccctgtttggtgacactgacaagtcccatgaaagcattggctttagtgaatctcttcgattcaataaggtcttgcaaggtcaagaaatttttacaagccctccttatgggagagctcaagctggtatccaaatgcaggagaaaagtaggaccggtatttttgtcggtattcaggttccaaaccatggaaacaggtggcctgctccaaatcaggataataacactccttgcaagccaattaatcctgtctcagcatcatcaccgccttctgcactcaattttcagcatccgagccctccagcatcaaagttccaggctatgttcaatcataaacatgatcttgttaaccaggcttcgttagatctgtctgagaactgttgtaggtatccgtatctctcatctggttcacataccgaggacatcagtcagaaggaaggtactcaaggaatcagctcgtttggtttcttaaaggagcaaaagcaaacaggactttcatatctttctcctgggacacagtcgtcattcaaaggcaatcaaaacttagtttccacttgtaaaactggttgcaggatctttgggttccccttgaccgagagtaaaataagtgcaactagagcggatactccctctgaagctgtatactcacatggtctagaaactacatttctcccttccagtgatggaaagttgcagccggggccaccattgatgactaacgttgtggggacaaattttaccaaagtaaatgacctctatgcagcaagagatgtgcttcttgatattgctctgtag

SEQ ID NO: 1765 - protein, 747 aa, Solanum lycopersicum
MMCGLIDLNTVDNDDAGEETTAPVSLDSPASSSAASGSSDLTSSTTPAVASVCMELWHACAGPLISLPKKGSAVVYLPQGHLEHLSEYPSIACNLPPHVFCRVVDVKLQADAATDEVYAQVSLVPDNQQIEQKWKDGDIDADIEEEEIEGAGKSITPHMFCKTLTASDTSTHGGFSVPRRAAEDCFAPLDYRQQRPSQELVAKDLHGIEWKFRHIYRGQPRRHLLTTGWSAFVNKKKLVSGDAVLFLRTGDGELRLGVRRAAQAKTCSSYLAPCSKPLNVSGIVDAVNVISSRNAFNICYNPRDSSSDFIVPYHKFSKTLAHPFSAGMRFKMRVETEDAAEQRFTGLVVGVSNVDPVRWPGSKWRCLLVRWDDLDVSRHNRVSPWEIEPSGSAPVPSSLVMPSAKRTRVGFPISKADFPIPREGIAVSDFGEPSRFQKVLQGQEILRMHAPYGGLDARSPRPAGTRCFPGFPSSGISRMGNSIRPLFGDTDKSHESIGFSESLRFNKVLQGQEIFTSPPYGRAQAGIQMQEKSRTGIFVGIQVPNHGNRWPAPNQDNNTPCKPINPVSASSPPSALNFQHPSPPASKFQAMFNHKHDLVNQASLDLSENCCRYPYLSSGSHTEDISQKEGTQGISSFGFLKEQKQTGLSYLSPGTQSSFKGNQNLVSTCKTGCRIFGFPLTESKISATRADTPSEAVYSHGLETTFLPSSDGKLQPGPPLMTNVVGTNFTKVNDLYAARDVLLDIAL

SEQ ID NO: 1766 - DNA, 3300 bp, Gossypium arboreum
  CDS (1)..(3300)
atggggaaaagcgagttgacagatggttgcttgagtgatgatgcaggtgaagcgccggagagaaggcacatcaacccggagctatggcaggcgtgtgctgggccgctggtgaacctgccggctgctgggacccatgttgtctactttcctcaaggccacagtgaacaggttgcagcatctatgaagagagatgtggatgctcaaattccgaactacccaaatcttccttctaagctattatgtctccttcataatgtcaccttgcatgcagacccagagacagatgaagtctatgctcagatgaccctccaacctgtttcttcgtttgataaggaggcgttactgagatcagatctttctctgaagtcaaataagccacaacctgaattcttctgtaagacgttgacagcaagtgatacaagcactcatggaggtttttctgttcctcgacgtgccgccgaaaagattttccctcctcttgatttctcgatgcaaacacctgctcaagaacttgtggccagggatctgcatgaaaatgtctggaagttccgccatatctatcgtggaaaaccaaagcgccacttgcttacaacaggatggagtctatttgttagtggaaagagactttttgctggtgattcagttttattcattagagatgaaacacagcagcttctcttgggtataaggcgtgctaacaggcaacctgccaatctatcatcatcagtactgtctagtgatagcatgcatattggcatcctcgctgcagctgctcatgcagcagcaaacaatagcccttttaccgtgttttataacccaagggctagcctatctgaatttgttattcctttagccaagtactataaagcagtgtacaaccatcaaatatcacctggcatgcgctttcgaatgatgtttgaaactgaagagtcaggaacaagaaggtatatgggtacaattacaggaatcagcgatattgaccctgtaagatggaaaaactcacaatggcgtaatttgcaggttggctgggacgagtcaactgctggcgaaagacgtaatagagtatccatttgggaaatcgaaccagttacagctccatttttcatctgtccatctccattgttcagatctaagcgtcctaggcaacctggaatgctggctgatgaatactctgacttagataatctattcaagaggccaatgccttggcttggtgatgatatatgcctgaaggattccgatgctcatccagggcttagcttggttcagtggatgaacatgcagcaaaatcctctactggcaaactctatgcagccaaatttcatgcagtctctggctgggtctactatgcaaaactttgacggagcagatctttcccaccaaatgggcctttcagcaccacaaatgcctcagcccaacaacttacagttcaatgctcataggctacctcagaaagtgcagcaacttgatcaagttccaaagctaccatctacaatgaactcactgggatccattattcagccgcaacagctgaatgacatgactcagcagtcaaggcaaaatttggttgctcagactctaccctctagtcaagttttgcagcctcaagcccttgtccgaagtaacaatatccttcatcagcagcaaacatctaatccaactcatcaactccctctaagtcttcctcaaaacctgcagcagcagcagcagtatcttgtgggcccaaatcatccgcaaaacctaatgcattcccagctgcctgatccactcaaccagcatttacaagtgcctgacaaccaggtccagtttcaactgatgcagaaacttcagcagcaacaacagttgcttttggcacagcaatctgcacttcagcagcctggtctacttgcccaaccccaagatcaacaaaggcagctgttagatgcgtctcagagcttctctagttctgtgacagctagccaagtgttagagatgcctcaaaacatacctaccttgctacctcaatctaatgttgccccacagcagatgcctaaaaataacagccaggcaaatgtttggttctctcagccgcctctgcagtcaaaagttcagcaacaacaaactggaatgctacctgaagttcctggtcttgtaggtcccttccaaactacagcaacaaatcaattctccacagctgttagtagtgtaatgacgtctgctgctgtagccgcaccttctgtgattactgatgataatccatcatgctccacttcaccatctacaaactgtccaagtgttcttcaaccaatgatagacagcagagtccacaggagtgctgggttaggagatgacatcagtcagtctgctgccacagtattgaatcctaatgccttggagacaatgtcaactaaggctaatatggttaaagaacagcagcaaaagtctgttaaacccttgttgaatatctccaagagtcaaaaccaaggctcttttgccccgcaaaactgtatcaatggtgctacagcacatgcagattgtttggacacatcatcttctacaacttcagtttgcctttctcaaagtgatgctcatttgcaccaaaacacactgtcttacaaccctcaaacaatgttgttgagagatacaagtcaagagggagaagttcgggcatatccaaggaataatgtttcatatggcaataatatggatagccaaattgagatgcccatgaattctgacactttgtctgcgaaaggcatgatgggactggggaaggatttttcgaatcacctctcttcgggagggatactcgccagctatgaaaaccctaaagatgctcagcaagaactttcttcgtcaatggtttcccagccatatagagttccagatatggcgtttaactccattgatcccactataaaccatagcagcttcataaaccgcaatgcatggaccccaccatcacaatttcagagattgcgaacatataccaaggtttacaaacgtggagctgttggaagatcaatagatataactcgttattcaggttatgatgagctcaaacaagatttggctcgtaggtttggaattgaggggcagctggaagaccgtgggagagtaggctggaaactagtctatgtggatcacgagaacgatgttctgctagtaggagatgacccatgggaggagtttatcaactgtgtccgatgcatcaaaatactctcccctcaggaagtccagcagatgagcatggatggagagtttgggaactctgtcctgcctaatcaagactgtagcagctctggcaatgggaatgcataa

SEQ ID NO: 1767 - protein, 1099 aa, Gossypium arboreum
MGKSELTDGCLSDDAGEAPERRHINPELWQACAGPLVNLPAAGTHVVYFPQGHSEQVAASMKRDVDAQIPNYPNLPSKLLCLLHNVTLHADPETDEVYAQMTLQPVSSFDKEALLRSDLSLKSNKPQPEFFCKTLTASDTSTHGGFSVPRRAAEKIFPPLDFSMQTPAQELVARDLHENVWKFRHIYRGKPKRHLLTTGWSLFVSGKRLFAGDSVLFIRDETQQLLLGIRRANRQPANLSSSVLSSDSMHIGILAAAAHAAANNSPFTVFYNPRASLSEFVIPLAKYYKAVYNHQISPGMRFRMMFETEESGTRRYMGTITGISDIDPVRWKNSQWRNLQVGWDESTAGERRNRVSIWEIEPVTAPFFICPSPLFRSKRPRQPGMLADEYSDLDNLFKRPMPWLGDDICLKDSDAHPGLSLVQWMNMQQNPLLANSMQPNFMQSLAGSTMQNFDGADLSHQMGLSAPQMPQPNNLQFNAHRLPQKVQQLDQVPKLPSTMNSLGSIIQPQQLNDMTQQSRQNLVAQTLPSSQVLQPQALVRSNNILHQQQTSNPTHQLPLSLPQNLQQQQQYLVGPNHPQNLMHSQLPDPLNQHLQVPDNQVQFQLMQKLQQQQQLLLAQQSALQQPGLLAQPQDQQRQLLDASQSFSSSVTASQVLEMPQNIPTLLPQSNVAPQQMPKNNSQANVWFSQPPLQSKVQQQQTGMLPEVPGLVGPFQTTATNQFSTAVSSVMTSAAVAAPSVITDDNPSCSTSPSTNCPSVLQPMIDSRVHRSAGLGDDISQSAATVLNPNALETMSTKANMVKEQQQKSVKPLLNISKSQNQGSFAPQNCINGATAHADCLDTSSSTTSVCLSQSDAHLHQNTLSYNPQTMLLRDTSQEGEVRAYPRNNVSYGNNMDSQIEMPMNSDTLSAKGMMGLGKDFSNHLSSGGILASYENPKDAQQELSSSMVSQPYRVPDMAFNSIDPTINHSSFINRNAWTPPSQFQRLRTYTKVYKRGAVGRSIDITRYSGYDELKQDLARRFGIEGQLEDRGRVGWKLVYVDHENDVLLVGDDPWEEFINCVRCIKILSPQEVQQMSMDGEFGNSVLPNQDCSSSGNGNA

SEQ ID NO: 1768 - DNA, 2734 bp, Gossypium barbadense
  CDS (352)..(2373)
  misc_feature (1941)..(1941): n is a, g, c or t
aaatttaagtcaatgatataaaagagtgggaaaaagactaaatctatatttatttatgataataatggggatttctttaaaatttttataggtgtatttagaagagagaggaagaaataagggcagaaaacaaaagaaaaaacctagagagagagtgtatgtgtgtaagaaaaagaacagaaaaagaggcagccatagccaaaagagctcttgtcggcttcgaccgaacattgacgcaaacaaacttatttacactattgaacagagagcactcaaagtgttgtatcctttaatacaaccaatcttcagcacagggtttccattgagtgatttcttttggagggcgtttctatggcttttccggcatcagatattccatctgctgaacaacaagcagatgatcctttatatcgtgaactatggcatgcctgtgctggacctcttgtcacacttcctcgtgtaggggagcgtgtttattacttcccacaaggtcacatggaacaacttgaggcgtcaatgcatcaagggttagaacaccaaatgccttcattcgatctgccatctaaaatactttgcaaagtggcttctgttcagcgtaaggctgaacctgatacagatgaagtttatgcccaaataaccctggtacctgaagtagatcaaagtgaggttatgagcccagatgatccacttcaagaacctgaaaggtgcatagtccattcattttgcaagactcttactgcttctgacactagcacccatggtggattctcagttttgcgccggcatgcagatgattgtctgcccccgctggacatgacacagcagccaccatggcaggaactgattgcaactgatctgcatggaaatgagtggcactttcggcatatttttcgaggacaacctaggcgccacttgctcactactgggtggagtgtctttgttagttccaaaaagctagtagctggagatgctttcatattcctgaggggtgctaatggggatctgcgtgttggagtgaggaggcttatgagacaacaggcaaatatgccttcttctgttatatctagtcatagcatgcatcttggggtgcttgccactgcatcttatgccctctctacgcgaagtatgttttccatcttctacaagcccagaacaagtttgtctgagttcatagtgagtgtaaacaaatatcttgaagctcgaagccataagctatcagttgggatgaggttcaaaatgagatttgagggtgaagaggtacctgaaagaagattcagtggcacaattgttggtgttgaggctgataaatcatctggatgggctgattctgagtggagatctctcaaggttcaatgggatgaaccttcatccatcatacgtcctgatagggtgtccccatgggaattagagcctcttgttgcaactagtaactcttccatctcacaacctgcacaaaggaacaagcgggctaggccacccgttctaccttcaccatcttcagatctttcttcacttggtatatggaaatcaccagttgaatctcctttctcgtattgtgatgcacaacgtgggcaaccgtcacctaaattatcctccactgcaaagcctaattctgttggctttagtgggaatagctccctggctgcagtttctagcagctctaagtattggcctaaccgagttgagaatgttacagaatctgttgcaccagttgtgaacaaagaatctagtgaaagaaagcagggaactgggaatggctgcagactttttggtattcagttgattgacaatataaacatggaagaaaattcacctttggctacaatttctgggactggtgttaatgaccagccacttcattcactagatgctaactctgaccagcagtctgatccatcaaatcttaatcagtctgatcttccttctataagttgtgaaccngagaagtgcctgagatctcctcaggagtcacagagcaagcaaattcggagctgcacaaaggttcacatgcaaggtatggcagttggaagggctgttgatttgacacgatttgactgttatgaggatttgctaaagaagctggaatacatgtttgacattaaaggtcagctttgtggatcaacaaagaattggcaggttgtctacaccgatgatgaagatgacatgatgatggttggggatgatccctggaatgagttttgcagcatggtgaggaaaatttttatctatacatcagaggaagtccggaagttatcacctaagataaaacttccagtgaatgatgatgatgatgatagcaaagcaaccaaggctggggttgacacagttatcaaccctgaagatcgttcatcaatcgttggtcaagggtgctaaagtaaccacacctttacgcacgtcaggaacatagtgcttccatagaagagttttgagaaaaaaggaagctagtgctcaagattttgtttatatatatatatgcattacccagatgatatatcactattgacatcgcaagtctgaaacagcatctatatctaggaaactgctgttgtgtcaacaaattcatctggaatgtgagatttgcattgcctgaaagatgatggggttcaggtttagattttttctttttcctttttttaattcttctttaaagtttttgctaaagcaactctcatagggtggattgttcatttggatttgaaatagtccggaaagtttatttctttttgccttatta

SEQ ID NO: 1769 - protein, 673 aa, Gossypium barbadense
MAFPASDIPSAEQQADDPLYRELWHACAGPLVTLPRVGERVYYFPQGHMEQLEASMHQGLEHQMPSFDLPSKILCKVASVQRKAEPDTDEVYAQITLVPEVDQSEVMSPDDPLQEPERCIVHSFCKTLTASDTSTHGGFSVLRRHADDCLPPLDMTQQPPWQELIATDLHGNEWHFRHIFRGQPRRHLLTTGWSVFVSSKKLVAGDAFIFLRGANGDLRVGVRRLMRQQANMPSSVISSHSMHLGVLATASYALSTRSMFSIFYKPRTSLSEFIVSVNKYLEARSHKLSVGMRFKMRFEGEEVPERRFSGTIVGVEADKSSGWADSEWRSLKVQWDEPSSIIRPDRVSPWELEPLVATSNSSISQPAQRNKRARPPVLPSPSSDLSSLGIWKSPVESPFSYCDAQRGQPSPKLSSTAKPNSVGFSGNSSLAAVSSSSKYWPNRVENVTESVAPVVNKESSERKQGTGNGCRLFGIQLIDNINMEENSPLATISGTGVNDQPLHSLDANSDQQSDPSNLNQSDLPSISCEPEKCLRSPQESQSKQIRSCTKVHMQGMAVGRAVDLTRFDCYEDLLKKLEYMFDIKGQLCGSTKNWQVVYTDDEDDMMMVGDDPWNEFCSMVRKIFIYTSEEVRKLSPKIKLPVNDDDDDSKATKAGVDTVINPEDRSSIVGQGC

SEQ ID NO: 1770 - DNA, 2580 bp, Arabidopsis thaliana
  CDS (1)..(2580)
atggcgagttcggaggtttcaatgaaaggtaatcgtggaggagataacttctcctcctctggttttagtgaccctaaggagactagaaatgtctccgtcgccggcgaggggcaaaaaagtaattctacccgatccgctgcggctgagcgtgctttggaccctgaggctgctctttacagagagctatggcacgcttgtgctggtccgcttgtgacggttcctagacaagacgaccgagtcttctattttcctcaaggacacatcgagcaggtggaggcttcgacgaaccaggcggcagaacaacagatgcctctctatgatcttccgtcaaagcttctctgtcgagttattaatgtagatttaaaggcagaggcagatacagatgaagtttatgcgcagattactcttcttcctgaggctaatcaagacgagaatgcaattgagaaagaagcgcctcttcctccacctccgaggttccaggtgcattcgttctgcaaaaccttgactgcatccgacacaagtacacatggtggattttctgttcttaggcgacatgcggatgaatgtctcccacctctggatatgtctcgacagcctcccactcaagagttagttgcaaaggatttgcatgcaaatgagtggcgattcagacatatattccggggtcaaccacggaggcatttgctacagagtgggtggagtgtgtttgttagctccaaaaggctagttgcaggcgatgcgtttatatttctaaggggcgagaatggagaattaagagttggtgtaaggcgtgcgatgcgacaacaaggaaacgtgccgtcttctgttatatctagccatagcatgcatcttggagtactggccaccgcatggcatgccatttcaacagggactatgtttacagtctactacaaacccaggacgagcccatctgagtttattgttccgttcgatcagtatatggagtctgttaagaataactactctattggcatgagattcaaaatgagatttgaaggcgaagaggctcctgagcagaggtttactggcacaatcgttgggattgaagagtctgatcctactaggtggccaaaatcaaagtggagatccctcaaggtgagatgggatgagacttctagtattcctcgacctgatagagtatctccgtggaaagtagagccagctcttgctcctcctgctttgagtcctgttccaatgcctaggcctaagaggcccagatcaaatatagcaccttcatctcctgactcttcgatgcttaccagagaaggtacaactaaggcaaacatggaccctttaccagcaagcggactttcaagggtcttgcaaggtcaagaatactcgaccttgaggacgaaacatactgagagtgtagagtgtgatgctcctgagaattctgttgtctggcaatcttcagcggatgatgataaggttgacgtggtttcgggttctagaagatatggatctgagaactggatgtcctcagccaggcatgaacctacttacacagatttgctctccggctttgggactaacatagatccatcccatggtcagcggatacctttttatgaccattcatcatcaccttctatgcctgcaaagagaatcttgagtgattcagaaggcaagttcgattatcttgctaaccagtggcagatgatacactctggtctctccctgaagttacatgaatctcctaaggtacctgcagcaactgatgcgtctctccaagggcgatgcaatgttaaatacagcgaatatcctgctcttaatggtctatcgactgagaatgctggtggtaactggccaatacgtccacgtgctttgaattattatgaggaagtggtcaatgctcaagcgcaagctcaggctagggagcaagtaacaaaacaacccttcacgatacaagaggagacagcaaagtcaagagaagggaactgcaggctctttggcattcctctgaccaacaacatgaatgggacagactcaaccatgtctcagagaaacaacttgaatgatgctgcggggcttacacagatagcatcaccaaaggttcaggacctttcagatcagtcaaaagggtcaaaatcaacaaacgatcatcgtgaacagggaagaccattccagactaataatcctcatccgaaggatgctcaaacgaaaaccaactcaagtaggagttgcacaaaggttcacaagcagggaattgcacttggccgttcagtggatctttcaaagttccaaaactatgaggagttagtcgctgagctggacaggctgtttgagttcaatggagagttgatggctcctaagaaagattggttgatagtttacacagatgaagagaatgatatgatgcttgttggtgacgatccttggcaggagttttgttgcatggttcgcaaaatcttcatatacacgaaagaggaagtgaggaagatgaacccggggactttaagctgtaggagcgaggaagaagcagttgttggggaaggatcagatgcaaaggacgccaagtctgcatcaaatccttcattgtccagcgctgggaactcttaa

SEQ ID NO: 1771 - protein, 859 aa, Arabidopsis thaliana
MASSEVSMKGNRGGDNFSSSGFSDPKETRNVSVAGEGQKSNSTRSAAAERALDPEAALYRELWHACAGPLVTVPRQDDRVFYFPQGHIEQVEASTNQAAEQQMPLYDLPSKLLCRVINVDLKAEADTDEVYAQITLLPEANQDENAIEKEAPLPPPPRFQVHSFCKTLTASDTSTHGGFSVLRRHADECLPPLDMSRQPPTQELVAKDLHANEWRFRHIFRGQPRRHLLQSGWSVFVSSKRLVAGDAFIFLRGENGELRVGVRRAMRQQGNVPSSVISSHSMHLGVLATAWHAISTGTMFTVYYKPRTSPSEFIVPFDQYMESVKNNYSIGMRFKMRFEGEEAPEQRFTGTIVGIEESDPTRWPKSKWRSLKVRWDETSSIPRPDRVSPWKVEPALAPPALSPVPMPRPKRPRSNIAPSSPDSSMLTREGTTKANMDPLPASGLSRVLQGQEYSTLRTKHTESVECDAPENSVVWQSSADDDKVDVVSGSRRYGSENWMSSARHEPTYTDLLSGFGTNIDPSHGQRIPFYDHSSSPSMPAKRILSDSEGKFDYLANQWQMIHSGLSLKLHESPKVPAATDASLQGRCNVKYSEYPALNGLSTENAGGNWPIRPRALNYYEEVVNAQAQAQAREQVTKQPFTIQEETAKSREGNCRLFGIPLTNNMNGTDSTMSQRNNLNDAAGLTQIASPKVQDLSDQSKGSKSTNDHREQGRPFQTNNPHPKDAQTKTNSSRSCTKVHKQGIALGRSVDLSKFQNYEELVAELDRLFEFNGELMAPKKDWLIVYTDEENDMMLVGDDPWQEFCCMVRKIFIYTKEEVRKMNPGTLSCRSEEEAVVGEGSDAKDAKSASNPSLSSAGNS

SEQ ID NO: 1772 - DNA, 2580 bp, Arabidopsis thaliana
  CDS (1)..(2580)
atggcgagttcggaggtttcaatgaaaggtaatcgtggaggagataacttctcctcctctggttttagtgaccctaaggagactagaaatgtctccgtcgccggcgaggggcaaaaaagtaattctacccgatccgctgcggctgagcgtgctttggaccctgaggctgctctttacagagagctatggcacgcttgtgctggtccgcttgtgacggttcctagacaagacgaccgagtcttctattttcctcaaggacacatcgagcaggtggaggcttcgacgaaccaggcggcagaacaacagatgcctctctatgatcttccgtcaaagcttctctgtcgagttattaatgtagatttaaaggcagaggcagatacagatgaagtttatgcgcagattactcttcttcctgaggctaatcaagacgagaatgcaattgagaaagaagcgcctcttcctccacctccgaggttccaggtgcattcgttctgcaaaaccttgactgcatccgacacaagtacacatggtggattttctgttcttaggcgacatgcggatgaatgtctcccacctctggatatgtctcgacagcctcccactcaagagttagttgcaaaggatttgcatgcaaatgagtggcgattcagacatatattccggggtcaaccacggaggcatttgctacagagtgggtggagtgtgtttgttagctccaaaaggctagttgcaggcgatgcgtttatatttctaaggggcgagaatggagaattaagagttggtgtaaggcgtgcgatgcgacaacaaggaaacgtgccgtcttctgttatatctagccatagcatgcatcttggagtactggccaccgcatggcatgccatttcaacagggactatgtttacagtctactacaaacccaggacgagcccatctgagtttattgttccgttcgatcagtatatggagtctgttaagaataactactctattggcatgagattcaaaatgagatttgaaggcgaagaggctcctgagcagaggtttactggcacaatcgttgggattgaagagtctgatcctactaggtggccaaaatcaaagtggagatccctcaaggtgagatgggatgagacttctagtattcctcgacctgatagagtatctccgtggaaagtagagccagctcttgctcctcctgctttgagtcctgttccaatgcctaggcctaagaggcccagatcaaatatagcaccttcatctcctgactcttcgatgcttaccagagaaggtacaactaaggcaaacatggaccctttaccagcaagcggactttcaagggtcttgcaaggtcaagaatactcgaccttgaggacgaaacatactgagagtgtagagtgtgatgctcctgagaattctgttgtctggcaatcttcagcggatgatgataaggttgacgtggtttcgggttctagaagatatggatctgagaactggatgtcctcagccaggcatgaacctacttacacagatttgctctccggctttgggactaacatagatccatcccatggtcagcggatacctttttatgaccattcatcatcaccttctatgcctgcaaagagaatcttgagtgattcagaaggcaagttcgattatcttgctaaccagtggcagatgatacactctggtctctccctgaagttacatgaatctcctaaggtacctgcagcaactgatgcgtctctccaagggcgatgcaatgttaaatacagcgaatatcctgttcttaatggtctatcgactgagaatgctggtggtaactggccaatacgtccacgtgctttgaattattatgaggaagtggtcaatgctcaagcgcaagctcaggctagggagcaagtaacaaaacaacccttcacgatacaagaggagacagcaaagtcaagagaagggaactgcaggctctttggcattcctctgaccaacaacatgaatgggacagactcaaccatgtctcagagaaacaacttgaatgatgctgcggggcttacacagatagcatcaccaaaggttcaggacctttcagatcagtcaaaagggtcaaaatcaacaaacgatcatcgtgaacagggaagaccattccagactaataatcctcatccgaaggatgctcaaacgaaaaccaactcaagtaggagttgcacaaaggttcacaagcagggaattgcacttggccgttcagtggatctttcaaagttccaaaactatgaggagttagtcgctgagctggacaggctgtttgagttcaatggagagttgatggctcctaagaaagattggttgatagtttacacagatgaagagaatgatatgatgcttgttggtgacgatccttggcaggagttttgttgcatggttcgcaaaatcttcatatacacgaaagaggaagtgaggaagatgaacccggggactgtaagctgtaggagcgaggaagaagcagttgttggggaaggatcagatgcaaaggacgccaagtctgcatcaaatccttcattgtccagcgctgggaactcttaa

SEQ ID NO: 1773 - protein, 859 aa, Arabidopsis thaliana
MASSEVSMKGNRGGDNFSSSGFSDPKETRNVSVAGEGQKSNSTRSAAAERALDPEAALYRELWHACAGPLVTVPRQDDRVFYFPQGHIEQVEASTNQAAEQQMPLYDLPSKLLCRVINVDLKAEADTDEVYAQITLLPEANQDENAIEKEAPLPPPPRFQVHSFCKTLTASDTSTHGGFSVLRRHADECLPPLDMSRQPPTQELVAKDLHANEWRFRHIFRGQPRRHLLQSGWSVFVSSKRLVAGDAFIFLRGENGELRVGVRRAMRQQGNVPSSVISSHSMHLGVLATAWHAISTGTMFTVYYKPRTSPSEFIVPFDQYMESVKNNYSIGMRFKMRFEGEEAPEQRFTGTIVGIEESDPTRWPKSKWRSLKVRWDETSSIPRPDRVSPWKVEPALAPPALSPVPMPRPKRPRSNIAPSSPDSSMLTREGTTKANMDPLPASGLSRVLQGQEYSTLRTKHTESVECDAPENSVVWQSSADDDKVDVVSGSRRYGSENWMSSARHEPTYTDLLSGFGTNIDPSHGQRIPFYDHSSSPSMPAKRILSDSEGKFDYLANQWQMIHSGLSLKLHESPKVPAATDASLQGRCNVKYSEYPVLNGLSTENAGGNWPIRPRALNYYEEVVNAQAQAQAREQVTKQPFTIQEETAKSREGNCRLFGIPLTNNMNGTDSTMSQRNNLNDAAGLTQIASPKVQDLSDQSKGSKSTNDHREQGRPFQTNNPHPKDAQTKTNSSRSCTKVHKQGIALGRSVDLSKFQNYEELVAELDRLFEFNGELMAPKKDWLIVYTDEENDMMLVGDDPWQEFCCMVRKIFIYTKEEVRKMNPGTVSCRSEEEAVVGEGSDAKDAKSASNPSLSSAGNS

SEQ ID NO: 1774 - DNA, 2976 bp, Oryza sativa subsp
  CDS (1)..(2976)
atgatgaagcaggcgcagcagcagccgccgccgccaccggcgagctctgcggcgacgacgaccaccgcgatggcagccgctgcggcggcggcggtggtggggagcgggtgcgaaggggagaagacgaaggcgccggcgatcaactcggagctgtggcacgcctgcgcggggccgctggtgtcgctgccgccggcgggcagcctcgtcgtctacttcccccagggccacagcgagcaggttgcagcctctatgcaaaaggatgttgatgcacatgttccaagctacccaaatctgccttcaaagttgatttgccttctgcataacgtcactttacatgcggacccagaaacagatgaagtgtatgcacaaatgactcttcagccagttacttcatatgggaaggaggccctgcagttatcagagcttgcactcaaacaagcgagaccacagacagaattcttttgcaagacactgactgcaagtgatacaagtactcatggaggcttctctgtgcctcgtcgagctgcagaaaagatatttcctccactggacttctcaatgcaaccacctgcacaagaactacaggccagggatttgcatgataatgtgtggacattccgtcacatatatcggggtcagccaaaaaggcatctgcttaccactggctggagtctatttgtaagcggcaagaggttatttgctggagattctgtcatttttgtcagggatgaaaagcagcaacttctattaggaatcaggcgtgctaaccgacagccaactaacatatcatcatctgtcctttcaagtgacagcatgcacatagggattcttgctgctgcagcccatgctgctgccaacaatagcccatttaccatcttttataaccctagggccagtcctactgaatttgttatcccatttgctaagtatcagaaggcagtctatggtaatcaaatatctttagggatgcgctttcgcatgatgtttgagactgaggaattaggaacacgaagatacatgggaacaataactggcataagtgatctagatccagtaagatggaaaaactcgcagtggcgcaacttacaggttggttgggatgaatccgcagccggtgaaaggcgaaatagggtttctatctgggagattgaaccggtcgctgctccatttttcatatgtcctccaccattttttggtgcgaagcggcccaggcaattagatgacgagtcctcggaaatggagaatctcttaaagagggctatgccttggcttggtgaggaaatatgcataaaggatcctcagactcagaacaccataatgcctgggctgagcttggttcagtggatgaacatgaacatgcaacagagctcctcatttgcgaatacagccatgcagtctgagtaccttcgatcattgagcaaccccaacatgcaaaatcttggtgccgccgatctctctaggcaattatgcctgcagaaccagcttcttcaacagaacaatatacagtttaatactcccaaactttctcagcaaatgcagccagtcaatgagttagcaaaggcaggcattccgttgaatcagcttggtgtgagcaccaaacctcaggaacagattcatgatgctagcaaccttcagaggcaacaaccttccatgaaccatatgcttcctttgagccaagctcaaaccaatcttggccaagctcaggtccttgtccaaaatcaaatgcaacagcaacatgcatcttcaactcaaggtcaacaaccagctaccagccagcccttgcttctgccccagcagcagcaacagcagcagcagcagcagcaacaacaacaacaacagcaacaacaacaaaaattgctacaacagcagcagcaacagcttttgctccagcaacagcagcaattgagtaagatgcctgcacagttgtcaagtctggcgaatcagcagtttcagctaactgatcaacagcttcagctgcaactgttacaaaaactacagcaacaacagcagtcattgctttcacaacctgcagtcacccttgcacaattacctctgatccaagaacagcagaagttacttctggatatgcaacagcagctgtcaaactcccaaacactttcccaacaacaaatgatgcctcaacaaagtaccaaggttccatcacagaatgatggacttctacatcaaaatttccctatgtccaacttcaaccagccacagatgttcaaagatgctcctcctgatgctgaaattcatgctgctaatacaagtaacaatgcattgtttggaatcaatggtgatggtccgctgggcttccctataggactaggaacagatgatttcctgtcgaatggaattgatgctgccaagtacgagaaccatatctcaacagaaattgataatagctacagaattccgaaggatgcccagcaagaaatatcatcctcaatggtttcacagtcatttggtgcatcagatatggcatttaattcaattgattccacgatcaacgatggtggctttttgaaccggagttcttggcctcctgccgctcccttaaagaggatgaggacattcaccaaggtatataagcgaggagctgtaggccggtccattgacatgagtcagttctctggatatgatgaattaaagcatgctctggcacggatgttcagtatagaggggcaacttgaggaacggcagagaattggttggaagctcgtttacaaggatcatgaagatgacatcctacttcttggcgacgacccatgggaggaatttgtcggttgcgtgaaatgcattaggatcctttcacctcaagaagttcagcagatgagcttggagggttgtgatctcgggaacaacattcccccgaatcaggcctgcagcagctcagacggagggaatgcatggagggctcgctgcgatcagaactccggtaacccttccaatggttcatatgaacaattcgaatga

SEQ ID NO: 1775 - protein, 991 aa, Oryza sativa subsp
MMKQAQQQPPPPPASSAATTTTAMAAAAAAAVVGSGCEGEKTKAPAINSELWHACAGPLVSLPPAGSLVVYFPQGHSEQVAASMQKDVDAHVPSYPNLPSKLICLLHNVTLHADPETDEVYAQMTLQPVTSYGKEALQLSELALKQARPQTEFFCKTLTASDTSTHGGFSVPRRAAEKIFPPLDFSMQPPAQELQARDLHDNVWTFRHIYRGQPKRHLLTTGWSLFVSGKRLFAGDSVIFVRDEKQQLLLGIRRANRQPTNISSSVLSSDSMHIGILAAAAHAAANNSPFTIFYNPRASPTEFVIPFAKYQKAVYGNQISLGMRFRMMFETEELGTRRYMGTITGISDLDPVRWKNSQWRNLQVGWDESAAGERRNRVSIWEIEPVAAPFFICPPPFFGAKRPRQLDDESSEMENLLKRAMPWLGEEICIKDPQTQNTIMPGLSLVQWMNMNMQQSSSFANTAMQSEYLRSLSNPNMQNLGAADLSRQLCLQNQLLQQNNIQFNTPKLSQQMQPVNELAKAGIPLNQLGVSTKPQEQIHDASNLQRQQPSMNHMLPLSQAQTNLGQAQVLVQNQMQQQHASSTQGQQPATSQPLLLPQQQQQQQQQQQQQQQQQQQQKLLQQQQQQLLLQQQQQLSKMPAQLSSLANQQFQLTDQQLQLQLLQKLQQQQQSLLSQPAVTLAQLPLIQEQQKLLLDMQQQLSNSQTLSQQQMMPQQSTKVPSQNDGLLHQNFPMSNFNQPQMFKDAPPDAEIHAANTSNNALFGINGDGPLGFPIGLGTDDFLSNGIDAAKYENHISTEIDNSYRIPKDAQQEISSSMVSQSFGASDMAFNSIDSTINDGGFLNRSSWPPAAPLKRMRTFTKVYKRGAVGRSIDMSQFSGYDELKHALARMFSIEGQLEERQRIGWKLVYKDHEDDILLLGDDPWEEFVGCVKCIRILSPQEVQQMSLEGCDLGNNIPPNQACSSSDGGNAWRARCDQNSGNPSNGSYEQFE

SEQ ID NO: 1776 - DNA, 2046 bp, Oryza sativa subsp
  CDS (1)..(2046)
atgatcacgttcgcggacctggcggagccggcgcccggcgccgagcggtgcgtcgaccggcagctgtggctggcgtgcgcggggggcatgtgcaccgtgccgccggtgggcgccgccgtgtactacttcccgcaggggcacgccgagcacgcgctcggcctcgccgcgccggagctctccgcggcgcgcgtcccggcgctcgtgccctgccgcgtcgcgtccgtgcggtacatggccgacccggacaccgacgaggtgttcgccaggatccgcctcgtgccgctccgcgccgcggaggatggggacgtcgaggaggatggcgccgcggcaggcgaggagcacgagaagccggcgtcgttcgccaagacgctgacgcagtcggatgccaacaacggcggggggttctcggtgcccaggtactgcgccgagaccatcttcccgcgcctggactacgccgccgacccgcccgtgcagaccgtcgtcgccaaggacgtccatggagtcgcctggaacttccgccacatctacaggggcacgccgcgccggcacctgctcaccacggggtggagcacgttcgtgaaccagaagaagctcgtggccggcgactccatcgtgttcctccgcggcgacggaggggacctgcacgtcggcatccggcgcgccaagcgcgggttttgcggcggcggaggcggagccgaggaggcctccctgcccgggtgggaccagtacggcggcctgatgcgaggcaatgcgagcccgtgcgcggccgccaaggggcggggcaaggtgcgcgcggaggacctcgtcgaggcggcgaggctggcgaacggcgggcagccgttcgaggtcgtgtactacccgcgcgccagcacgccggagttctgcgtgcgcgcggcggcggtccgcgcggcgatgcgggtgcagtggtgccccgggatgcggttcaagatggcgttcgagaccgaggactcctcccggatcagctggttcatgggcaccgtcgccagcgtccaggtcgccgaccccatccgttggccgcagtcgccgtggcggcttctccaggtgacctgggacgaaccggacctcctccagaacgtgaagcgggtgagcccatggttggtcgagctggtgtcgagcatgccggccatcaacctctcgtctttctcgccgccgcgcaagaagccccggattctggcgtacccggagttccccttcgaggggcagctcctcaacccggcgttcccgccaaacccgctggcacacggccaccaccattaccatcacaaccacccgtccttcttcccgttccccgacgttagtgctcctgcaggcatacagggagccaggcatgcgcaatttggtccatctttatcagatctccaccttacccacctgcagtcgagcctcatgtacccggggctccgccgccccgatcatgtcggtccaacatccatcccgccaccaagaatcagcactgacctgacaatgggcagctcgccgccggcgcgcgctctgtccatgggcgccaagaagcccgacgacgccaagccgccggggctaatgctgttcgggcagaggatactgaccgagcgccagatgagccttagcggcaccacctcgccggcggccaccgggaacagctctctcaactggaacaccgagaaaggtgcctcggagggctcgggctccggcgtcatccagaacagccccaccgacaacacgtcgtcggagaggctccagtggttcagggagaacagcaccgtctccgagctcgggctggagcccgggcagtgcaaggtgttcatcgagtccgacacggtcggccgcaacctcgacctctcgtcgctggcctcgttcgagcagctctacggccggctgtccgagatgttctgcatcgacagcgcggagctgaggagccgtgtgctctaccgtggcgccaccggcgaagtgaggcacgccggcgacgagccattcagcgagttcattaagttggcgaggaggcttaccatactaaccgacgccgggagcgacaacttagggagctag

SEQ ID NO: 1777 - protein, 681 aa, Oryza sativa subsp
MITFADLAEPAPGAERCVDRQLWLACAGGMCTVPPVGAAVYYFPQGHAEHALGLAAPELSAARVPALVPCRVASVRYMADPDTDEVFARIRLVPLRAAEDGDVEEDGAAAGEEHEKPASFAKTLTQSDANNGGGFSVPRYCAETIFPRLDYAADPPVQTVVAKDVHGVAWNFRHIYRGTPRRHLLTTGWSTFVNQKKLVAGDSIVFLRGDGGDLHVGIRRAKRGFCGGGGGAEEASLPGWDQYGGLMRGNASPCAAAKGRGKVRAEDLVEAARLANGGQPFEVVYYPRASTPEFCVRAAAVRAAMRVQWCPGMRFKMAFETEDSSRISWFMGTVASVQVADPIRWPQSPWRLLQVTWDEPDLLQNVKRVSPWLVELVSSMPAINLSSFSPPRKKPRILAYPEFPFEGQLLNPAFPPNPLAHGHHHYHHNHPSFFPFPDVSAPAGIQGARHAQFGPSLSDLHLTHLQSSLMYPGLRRPDHVGPTSIPPPRISTDLTMGSSPPARALSMGAKKPDDAKPPGLMLFGQRILTERQMSLSGTTSPAATGNSSLNWNTEKGASEGSGSGVIQNSPTDNTSSERLQWFRENSTVSELGLEPGQCKVFIESDTVGRNLDLSSLASFEQLYGRLSEMFCIDSAELRSRVLYRGATGEVRHAGDEPFSEFIKLARRLTILTDAGSDNLGS

SEQ ID NO: 1778 - DNA, 2547 bp, Brassica napus
  CDS (1)..(2547)
atggcgagttcggaggtttctatgaaaggaaatcgtggacgaggagaaaacttctcctccgctggttacagtgacccgacggtcgccggcgaggcgcagaaaactcagtctaaccgatctgtggctgcagagcgcgttgtcgacccggaagctgctctctaccgtgagctgtggcacgcttgtgctggtcctctcgtgacagtccctcgacaagatgaccgagtcttctacttccctcaggggcacatcgagcaggtggaagcatcgacaaatcaagctgcagaacagcagatgcctctctatgatcttccttcgaagatcctttgtcgtgtcattaatgttgatttaaaggcagaggcagacaccgacgaagtttatgcgcagattactcttcttccggagcctgttcaagacgagaattcaatagagaaagaggcgcctcctcctccgcccccaaggttccaagtgcactccttctgcaaaaccttgactgcatcggacacaagtacacatggtggattttctgtgcttaggcggcatgcggatgaatgtctcccacctctggatatgtcacgtcaacctcctactcaggagttagttgcaaaagatctgcatgcaagcgagtggcgtttccgacatattttccgaggtcaaccacgaaggcatttgcttcagagtggatggagcgtgtttgttagctccaagaggctggtcgcaggcgatgcttttatatttctaaggggcgagaatggagaattacgtgtgggtgtaaggcgtgcaatgcggcagcaaggaaatgtgccatcctctgttatatcaagccacagcatgcatctcggagtattggccactgcctggcacgctatttcaactggaaccatgtttacagtctactataaaccgaggactagtccttcagagtttattgttccgtttgatcagtatacggagtccgtgaagattaactactccataggcatgagatttaaaatgagatttgaaggcgaagaggctcccgagcagaggtttactggcacaatcgttgggattgaagactctgaccccacgaggtgggcaaaatcaaaatggagatccctcaaggtacggtgggatgagaccactagtattcctcgccctgatagagtatccccgtggaagatagagccagctctttctcctcctgctttgagccctgtaccaatgcctaggcctaagaggcccagatctaatctagcttcttcaactccggactcttccatgcgcataagggaaggctcatctaaggcaaacatggaccctttaccggcaagtggactatcaagggtcttgcaaggtcaagaatacccgaccttgagaacgaaacatgttgagagtgtagaatgcgatgctcctgaaaattcggttgtgtggcaatcgtcaactgatgatgacaaggttgatgtgatttcagcttctaggagatatgagaactggatatcctcaggtaggcatggacctacttgcacggatttgctttctggctttgggacaaacatagaaccacctcacggtcatcagatacctttttatgaccgtttatcatcaccaccttctgtggctgcaaggaaaatcctcagcgaccaggatggcaagtttgaatatcttgctaaccagtggatgatgcactcaggcctttccctgaagttacatgaatctcctaaagtccctgccgcatctgatgcctctttccaagggataggcaatcccaattacggcgaatatgctttgcctcgtgcagtgacgactgagaatgctgctggcaactggccaatacgtccacgtgctctaaattattttgaagaagcggttcatgctcaggctagagagcatgtgacaaaacgtcctgcggtcgtacaagaggaggcagcaaagccaagagacgggaactgcaggctttttggcattcctctggtgaacaacgtgaatgggacagatacaactttgtctcagagaaacaatttgaatgaccctgcggggcctacgcagatggcatcaccaaaggttcaggatctttctgaccagtccaaagggtcaaaatcgacaaatgatcatcgtgagcaaggacgaccattcccggttagtaaaccccatccgaaagacgttcaaaccaaaacaaactcatgtaggagctgcacgaaggttcagaagcaggggattgcacttggccggtcagtggatctctcaaagttccagaactatgaggagttggttactgaattggataggctgtttgagttcaatggagagttgatggctcctaagaaagattggctgatagtttacacagatgatgagaatgatatgatgcttgttggagacgatccttggcaggagttttgttgcatggttcgtaaaatcttcatatacacgaaagaggaggtcaggaagatgaacccgggaactctatgctgtaggaacgaggaagaaccagttgttggggaaggatcagatgcaaaggacgcgaagtctgcatcaaatccttcattgtccagcgccggaaactcttaa

SEQ ID NO: 1779 - protein, 848 aa, Brassica napus
MASSEVSMKGNRGRGENFSSAGYSDPTVAGEAQKTQSNRSVAAERVVDPEAALYRELWHACAGPLVTVPRQDDRVFYFPQGHIEQVEASTNQAAEQQMPLYDLPSKILCRVINVDLKAEADTDEVYAQITLLPEPVQDENSIEKEAPPPPPPRFQVHSFCKTLTASDTSTHGGFSVLRRHADECLPPLDMSRQPPTQELVAKDLHASEWRFRHIFRGQPRRHLLQSGWSVFVSSKRLVAGDAFIFLRGENGELRVGVRRAMRQQGNVPSSVISSHSMHLGVLATAWHAISTGTMFTVYYKPRTSPSEFIVPFDQYTESVKINYSIGMRFKMRFEGEEAPEQRFTGTIVGIEDSDPTRWAKSKWRSLKVRWDETTSIPRPDRVSPWKIEPALSPPALSPVPMPRPKRPRSNLASSTPDSSMRIREGSSKANMDPLPASGLSRVLQGQEYPTLRTKHVESVECDAPENSVVWQSSTDDDKVDVISASRRYENWISSGRHGPTCTDLLSGFGTNIEPPHGHQIPFYDRLSSPPSVAARKILSDQDGKFEYLANQWMMHSGLSLKLHESPKVPAASDASFQGIGNPNYGEYALPRAVTTENAAGNWPIRPRALNYFEEAVHAQAREHVTKRPAVVQEEAAKPRDGNCRLFGIPLVNNVNGTDTTLSQRNNLNDPAGPTQMASPKVQDLSDQSKGSKSTNDHREQGRPFPVSKPHPKDVQTKTNSCRSCTKVQKQGIALGRSVDLSKFQNYEELVTELDRLFEFNGELMAPKKDWLIVYTDDENDMMLVGDDPWQEFCCMVRKIFIYTKEEVRKMNPGTLCCRNEEEPVVGEGSDAKDAKSASNPSLSSAGNS

SEQ ID NO: 1780 - DNA, 2202 bp, Cucumis sativus
  CDS (1)..(2202)
atggaaattgatctgaaccaaacagccagtgaggtggggaagaatgcatattgctatggaaattgtgaagagggtctttgcaattgttgtttatcctcctcaacttcttcttgttcctcaaattcatcgtcaactcccgtctcttcttcaacctatttggagctttggcatgcttgtgctggtcctctcacctcattgcccaagaaaggaaatgtagttgtctatttcccacaaggtcacttggagcaaattgcctcggcgtctcccttttcccccatggagatgcgcacttttgaccttcagccacatatcctctgcagggtcatcaatgttcacctactcgccaataaggagaatgatgaggtctatacgcaacttactctccgtcccttgccagagttattaggcactggtgtagcgggcaaagagctggaggagttggcgttgaatggagctgatggagatgggagcggggggtcgcctactaaatctacacctcacatgttctgcaaaacacttacagcgtctgacaccagcacccatggaggattctctgttcctcgcagagctgctgaagactgtttccctcctctggattacactcagcttaggccgtctcaagagctaatagccaaggacctgcatggcgtggagtggagatttagacatatttacagaggtcaacctaggcggcatctgctcactactggatggagtatttttgtaagccaaaagaatcttatttctggtgatgcagtgctctttttaaggggtgagaatggagagttaagattgggaataaggcgagctgttcggcctagaaatggtcttcctgattcaattgttggcaaccaaaattcttgtgcaaatgatcttgctcgtgtggtgaaagcaatatccaccaagagcacatttgatgtgttttataatccaagggcatatcatgcacaatttattatatcttgtcagaagtatgtgaagagcatcaataatccagtgagtgtaggcacaagattcaaaatgagatttgagatggatgattcaccagaaagaaagtttaatggtgtagttgttggaattagtgacatggattcctttagatggccgaactcaaaatggagatgcttaacggtccgatgggataaagacagtgatcatcaagaacgtgtgtcaccctgggagatcgatccttctgtttctcttccgcctttgagtgttcagtcttctccaaggctgaagaaactgaggactagtctgcaggcagccccgcctaacaacgcctttactgggaggggcggttttatggactttgaagattcagttagatcctctaaggtcttgcaaggtcaagaaatatgctcattgaggccaccaactagtaaaccagaatatagtttaggtgtttggggaaagttcaatcttagtgacaactcttttaacacatttcaatcaccaaactccaatttttatcacatggcgtctaacagcgcccaaaagatgtatttccctcgtagtgagatgcacagtactggccaagcggccatgatgctctcaaatgatagcaactttccaagagagagtgccttgttcaacccatctgctgttggtgctaatgttatcaggactaaaatggaaaggactagtcgttctcttgatcgggaatctctacatctggcatctgctcctccaactttagggtcgaatatgcggaattccaaggatgaacatgtgaatgataatgcaactggctgtaaactttttggcttttccttgactacggaaactgctacaaacgtgcaaagttcaggaaagagaagttgtaccaaagttcacaaacaaggcagcttggtgggaagagctatcgatctctctaggctgaatggctatactgatctgatttctgaactggagcggctgtttagcatggaaggtctcttaaaagatcccgataaaggatggcgagttttgtacacagacaacgagaacgatgtaatggttgttggggattatccatggcatgacttctgtgatgcggtttcgaaaatccacatatacactcaagaagaagtggaaaagatgacaaatggagtgatcagcgatgatactcaaagctgcttagaccaggctcctttatgtatggaagcatcaaaatcctcttcagtgggccaacctgattctcctccaacggcagtaagaggttaa

SEQ ID NO: 1781 - protein, 733 aa, Cucumis sativus
MEIDLNQTASEVGKNAYCYGNCEEGLCNCCLSSSTSSCSSNSSSTPVSSSTYLELWHACAGPLTSLPKKGNVVVYFPQGHLEQIASASPFSPMEMRTFDLQPHILCRVINVHLLANKENDEVYTQLTLRPLPELLGTGVAGKELEELALNGADGDGSGGSPTKSTPHMFCKTLTASDTSTHGGFSVPRRAAEDCFPPLDYTQLRPSQELIAKDLHGVEWRFRHIYRGQPRRHLLTTGWSIFVSQKNLISGDAVLFLRGENGELRLGIRRAVRPRNGLPDSIVGNQNSCANDLARVVKAISTKSTFDVFYNPRAYHAQFIISCQKYVKSINNPVSVGTRFKMRFEMDDSPERKFNGVVVGISDMDSFRWPNSKWRCLTVRWDKDSDHQERVSPWEIDPSVSLPPLSVQSSPRLKKLRTSLQAAPPNNAFTGRGGFMDFEDSVRSSKVLQGQEICSLRPPTSKPEYSLGVWGKFNLSDNSFNTFQSPNSNFYHMASNSAQKMYFPRSEMHSTGQAAMMLSNDSNFPRESALFNPSAVGANVIRTKMERTSRSLDRESLHLASAPPTLGSNMRNSKDEHVNDNATGCKLFGFSLTTETATNVQSSGKRSCTKVHKQGSLVGRAIDLSRLNGYTDLISELERLFSMEGLLKDPDKGWRVLYTDNENDVMVVGDYPWHDFCDAVSKIHIYTQEEVEKMTNGVISDDTQSCLDQAPLCMEASKSSSVGQPDSPPTAVRG

SEQ ID NO: 1782 - DNA, 2751 bp, Cucumis sativus
  CDS (1)..(2751)
atgaggctttcaactgctggttttagtcctcaggctccggaaggggagaggagagttcttaactcggagctttggcatgcatgtgctggcccacttgtttctctacctgctgttggaagtcgggttgtttattttccacagggtcatagcgagcaggttgccatatcaaccaacagagaagttgatgcccatataccaagttatccaagcttgccaccacagctaatctgccagcttcacaatgttacaatgcatgcagatattgagacagatgaagtgtatgcccaaatgaccttgcaaccgctcactgctcaagagcaaaaggagccttatcttccagctgagttgggtgcccccagcaaacaaccaaccaactatttttgtaaaacattgacagcaagtgacactagtacacatggaggattttctgttcctcgtcgtgcagctgagaaagtgtttcctccattggacttctctcagcagcctcctgcacaggagttaattgcaagggatctgcatgataatgagtggaaatttaggcatatctttcgtggccaaccgaaaaggcatctccttacaactggatggagtgtgtttgtaagtgctaagaggcttgttgctggcgattcggttatctttatttggaatgaaaagaatcaattactgttggggatccgtcgagctaatcgaccacaaacagtgatgccctcgtcggttctgtccagtgacagcatgcacttggggcttcttgctgctgcagcacatgcagctgctacaaatagtcggttcacgatattttataatccaagggctagcccatcagagttcatcatacctctggccaagtatgtcaaagctgtgtaccatacccgtgtttctgttggtatgcgttttagaatgctatttgaaacagaagaatcaagtgttcgtcgttacatgggcactattactggtatcagtgatttagattctacccggtggccaaattcacactggcgctcagtcaaggttggatgggatgaatctacagctggggagagacagccaagggtttccttatgggagatcgagccacttacaaccttcccaatgtatccttctccatttcccctcaggcttaagcgcccctggccaactggatttccctctttccatggtcttaaagaggacgatctgggattaaattctcaactaatgtggcttcggggagatggtctagatcgtggaattcaacctctgaacttccctggaattggagttgcaccatggatgcagccaaggcttgatgcttctatggtcggtctgcagccggagatatatcaagcaatggctgctgctgcactacaggagatgagaaccgtagatcctgctaaggcgcaggctgcttcgcttcttcaattccaacaaactcaaaatcttcccaacaggcctgctaatttcatgccacctcagatgttgcagcagcctcagcctcagcctcagcctccacagacctttcttcaaggtgatgaaaaccaacatctctctcattctcaggcccaaagccagcctactgctgttcttcagcaggagataaagcatcaaacattcaacaaccacccccagcagcagcagcagcagcaacaacaacaacaacagcagcaacagcaaccacaacagcaagtgtttgatcaccatcaaattccaagtcccatgtctacaatgtctcagttcagttctgcttcccaatcccaagcccaatccctgcaaactattcctccattatgtcggcaacagagtttttctgattcaaatcccaaccatgtgacaagtcccatcatttcacccttgcacagcctattaggtggttcattttcacaagatgaatcatctcagatgcttaaccttcctcgaaacaatcccatgatacattcatctacatggccgtcaaagcgagctgcaatcgatcctcttctctcttcaggaaattctcagtttgttctttcccaaggggaaaatatagggacaactccggctaatatctctcagaatgcttttacattgccgccttttcctgggagagagtgttcattagatcaagggaatgtcgatccgcagagtaatcttctgtttggtgtcaatatagagccttcatctcttctaatgcagaatggcatgccaaatcttaggggaatttgcagtgacagtgactcaacagctatacctttttcttcgaattatgtgaatactgctggtaccaacttctctgccaatccaactgggacagggacaccttccaattgcaatgaggattcaggtttcttgcattctccagaaaacactggccaagtaaacccaccaaccacaacctttgtaaaggtttacaagtcggggtccttcggtagatcactggatatttccaaattcagtagataccatcagctacgcagtgagcttgctcacatgttcggccttgaaggcgaattggaggaccctttgagatcaggttggcagcttgtattcgttgaccgggaaaatgacgtccttcttcttggggacgatccctggccggagtttgtcaacagcgtgtggtgtatcaaaatactatcaccacaggaagtgcaggacatgggcaaacgtggcctagagctcttgaactctgtcccgattcagaggctctcaaatggcagttgtgataactacgccaacagacaggagtcatccagaaatatgaattctgggattacttctgtcgggtctcttgagtactga

SEQ ID NO: 1783 - protein, 916 aa, Cucumis sativus
MRLSTAGFSPQAPEGERRVLNSELWHACAGPLVSLPAVGSRVVYFPQGHSEQVAISTNREVDAHIPSYPSLPPQLICQLHNVTMHADIETDEVYAQMTLQPLTAQEQKEPYLPAELGAPSKQPTNYFCKTLTASDTSTHGGFSVPRRAAEKVFPPLDFSQQPPAQELIARDLHDNEWKFRHIFRGQPKRHLLTTGWSVFVSAKRLVAGDSVIFIWNEKNQLLLGIRRANRPQTVMPSSVLSSDSMHLGLLAAAAHAAATNSRFTIFYNPRASPSEFIIPLAKYVKAVYHTRVSVGMRFRMLFETEESSVRRYMGTITGISDLDSTRWPNSHWRSVKVGWDESTAGERQPRVSLWEIEPLTTFPMYPSPFPLRLKRPWPTGFPSFHGLKEDDLGLNSQLMWLRGDGLDRGIQPLNFPGIGVAPWMQPRLDASMVGLQPEIYQAMAAAALQEMRTVDPAKAQAASLLQFQQTQNLPNRPANFMPPQMLQQPQPQPQPPQTFLQGDENQHLSHSQAQSQPTAVLQQEIKHQTFNNHPQQQQQQQQQQQQQQQQPQQQVFDHHQIPSPMSTMSQFSSASQSQAQSLQTIPPLCRQQSFSDSNPNHVTSPIISPLHSLLGGSFSQDESSQMLNLPRNNPMIHSSTWPSKRAAIDPLLSSGNSQFVLSQGENIGTTPANISQNAFTLPPFPGRECSLDQGNVDPQSNLLFGVNIEPSSLLMQNGMPNLRGICSDSDSTAIPFSSNYVNTAGTNFSANPTGTGTPSNCNEDSGFLHSPENTGQVNPPTTTFVKVYKSGSFGRSLDISKFSRYHQLRSELAHMFGLEGELEDPLRSGWQLVFVDRENDVLLLGDDPWPEFVNSVWCIKILSPQEVQDMGKRGLELLNSVPIQRLSNGSCDNYANRQESSRNMNSGITSVGSLEY

SEQ ID NO: 1784 - DNA, 3324 bp, Cucumis sativus
  CDS (1)..(3324)
atgaagacgccggcgaacggtgccgccggtgccgccgccgcgcctaattctaacgaaggtggattggagaagaagatcataaatccggagttatggcaagcgtgcgccggtccactggtgaacctaccgccggccggttaccacgtggtgtattttcctcaaggtcatagcgaacaggtagcagcatctttgaggaaagatgtggatggccaagtccctaattacccaagtcttgcttccaagttactatgtttgcttcataatgtaacattacatgctgatccagaaacagatgaagtatatgctcaaatgaccctgctgccagttctttcttttgacaaggatgcattgttgagatcagatctagctctcaagtctaataagcctcaaccagagttcttctgtaaaacattgactgcaagtgacacaagcactcatggcgggttctccgtgccacgccgtgctgcagagaagatcttcccccctcttgatttctcaatgcaaccccctgcacaagagcttgttgctaaggatttgcatgataatgtatggactttccgtcacatatatcgagggcaacccaaacgccatttgctaacaactggttggagcttatttgttagtggaaagagacttcttgctggcgattcagttttgttcataagagatgaaaaacaacagcttctattgggcattaggcgagcgaacaggcaaccgacaaacttatcatcatcagtgttgtcaagtgatagtatgcatattggtattcttgcagctgctgcacatgctgctgcaaacaatagccctttcaccgtcttctacaacccaagagcaagtccttcagaatttgtcattcctctggccaaatattacaaggcagtgtctgcaaaccaaatatcactcggaatgcgcttcagaatgatgtttgaaactgaagagtctggaaccagaaggtatatgggcactattactggtataagtgatcttgatcctgttcgatggaagggctcacagtggcgtaatctacaggttgggtgggatgagtcgactggaggagaaagacgtaatcgagtctccgtatgggagattgagcctgttattgctccatttttcatttgtccccctccttttttgagatcgaaacgtccgaggcaaccgggaatgccagatgacgactcctccgatttggatggtatatttaaaagaacaatgtttggtgacgatttttgcatgaaagatccacagggatatcctggcctaaacttagttcaatggatgaatatgcaaaacccttcactttctaattcaatgcagcaaaattatatgcattcgttttctgggtctatgcttccaaaccttggtagtgtcgatatttctcgacaacttggtttgtcaaatgcacaacttcctcaatcaaacaacatacagttcaatgcacaaaggctactttctcaggctcaacagttagatcagctacctaagctaccgacaagtatgaactcgttggggtccgttgtgcagccaccacagcagttggatgatatgtctcagcagacgcgacaaaatttgattaaccaaaacgcagtctcgagtcagattcaggctcaaataatgcagcagcctcacactaatgggatcctacaacagcaaactgctttgcaaaaccagcagcttcagagaaatgcccctcagaatttgcaaatgcagcagcatcagcaaattttgagtcagaatcaacaacagaatatgaatccgtcaccgcacctggaacagttaaatcatcagttgcaaatgtcggacaatcaggttcatatacagatgttgcagaagtttcaacagcagccgcaatcacttttggctcagcagtctgctcttcagccttctcaactcgtccaattaccagatcagcagagacagtcggtagatgcgtcccaaagcttttccaggtccatgtcatctaaccaaatgctcgacattcctcaatccaccccagctgcaggccctccatcaaatgcattaccacagcaggcagcaaattgcaatggccagacgaataatcggttctcgaatcagcatttgcagccgaaacttccacaactacagcaaccagcttcatctactgtactttctgatatgtctaggccaatgggacttcctcctgcccaaataaacaatcagctctctgcagctacaagtagtttgataacaggagtggcaggagctggccaatctggaatcacggacgacattccgtcgtgctccacgtcaccttccacaaacaattgttccagtttggttcaaccagtagccaacggaagggttcatcgaaccacaggattggttgaggatgttgctcaatcaactgcaacaatattcagttcaaatacattggataacatgtcaccaaatgccaacttagttcataaagatttgccacaaaagactgctgttaaaccttcactgaacatttccaagaatcaaagccatggaatttttgctcaacaaactttcttaagtggtgttgttgctcaaacggatttcttggatacgtcatcctctacaacctcggcttgcctttctcagaatgatgctcaattgcagcagaataacatgatgtctttcaactcacagccaatgttatttaaagataattctcaagatttggaagtaccaaccgatctccataacattccgtacgggaatcatgtcgatggacaaatggtagcgcagttaagttccgatcctttgttagacaaaggcattggaggtttggggaaagatttctccaataatttctcttctggggccatgctcaccacctatgatgcacagaaagatcctcaacaggaaatttcttcatctatagtttcccaatcatttggtattccagacatgacatttaattctatggattcaacgataaatgataataccttcttgaatagaaaccaatgggcccctccgcctccattccagcgtatgcgaacctacaccaaggtttacaaacgtggagctgttgggagatctattgatatcgctcgttactcgggttatgatgagcttaagcaagaccttgcccgtaggtttggtatcgagggacaattagaggacaggcaaaagataggctggaaacttgtctatgtggatcatgaaaatgacgttttgctcgtaggggacgacccttgggatgactttgtgaactgtgtacggagcatcaagatcctctctccacaggaagtccaacaaatgagcttggacggagatattggtaatggggtcctaccgaaccaagcctgcagtagttctgatggtggaaatgcttaa

SEQ ID NO: 1785 - protein, 1107 aa, Cucumis sativus
MKTPANGAAGAAAAPNSNEGGLEKKIINPELWQACAGPLVNLPPAGYHVVYFPQGHSEQVAASLRKDVDGQVPNYPSLASKLLCLLHNVTLHADPETDEVYAQMTLLPVLSFDKDALLRSDLALKSNKPQPEFFCKTLTASDTSTHGGFSVPRRAAEKIFPPLDFSMQPPAQELVAKDLHDNVWTFRHIYRGQPKRHLLTTGWSLFVSGKRLLAGDSVLFIRDEKQQLLLGIRRANRQPTNLSSSVLSSDSMHIGILAAAAHAAANNSPFTVFYNPRASPSEFVIPLAKYYKAVSANQISLGMRFRMMFETEESGTRRYMGTITGISDLDPVRWKGSQWRNLQVGWDESTGGERRNRVSVWEIEPVIAPFFICPPPFLRSKRPRQPGMPDDDSSDLDGIFKRTMFGDDFCMKDPQGYPGLNLVQWMNMQNPSLSNSMQQNYMHSFSGSMLPNLGSVDISRQLGLSNAQLPQSNNIQFNAQRLLSQAQQLDQLPKLPTSMNSLGSVVQPPQQLDDMSQQTRQNLINQNAVSSQIQAQIMQQPHTNGILQQQTALQNQQLQRNAPQNLQMQQHQQILSQNQQQNMNPSPHLEQLNHQLQMSDNQVHIQMLQKFQQQPQSLLAQQSALQPSQLVQLPDQQRQSVDASQSFSRSMSSNQMLDIPQSTPAAGPPSNALPQQAANCNGQTNNRFSNQHLQPKLPQLQQPASSTVLSDMSRPMGLPPAQINNQLSAATSSLITGVAGAGQSGITDDIPSCSTSPSTNNCSSLVQPVANGRVHRTTGLVEDVAQSTATIFSSNTLDNMSPNANLVHKDLPQKTAVKPSLNISKNQSHGIFAQQTFLSGVVAQTDFLDTSSSTTSACLSQNDAQLQQNNMMSFNSQPMLFKDNSQDLEVPTDLHNIPYGNHVDGQMVAQLSSDPLLDKGIGGLGKDFSNNFSSGAMLTTYDAQKDPQQEISSSIVSQSFGIPDMTFNSMDSTINDNTFLNRNQWAPPPPFQRMRTYTKVYKRGAVGRSIDIARYSGYDELKQDLARRFGIEGQLEDRQKIGWKLVYVDHENDVLLVGDDPWDDFVNCVRSIKILSPQEVQQMSLDGDIGNGVLPNQACSSSDGGNA

SEQ ID NO: 1786 - DNA, 3246 bp, Cucumis sativus
  CDS (1)..(3246)
atgaaagctccctcaaatgggtttctagccaattctggagaaggtgaaaggaagaatattaattctgagttatggcatgcttgtgctgggcctcttgtttcgttacctccagtaggaagtcttgtggtttacttccctcaaggccacagtgaacaagttgcagcatcgatgaataaggagactgatttcattccaaactaccctaaccttccttcaaagttgatctgcatgctacacaatgtcacattacatgctgatcctgagactgatgaggtgtatgcacaaatgacccttcaaccagtgaataaatatgaaaaagaagctttgttggcatctgatattggcctcaagcaaagtaggcagcctgcagaattcttctgcaaaactctaacagctagtgacactagcacccacggtggattttctgtgcctcgtcgtgcagccgagaagattttccccccattagactactcgatgcaaccccctgctcaggaactagtggctagagatttgcatgataattcatggacattcagacatatttaccgtggccaaccaaaacgacaccttctgaccactggttggagtgtttttgtgagcacaaaacgactctttgctggagactctgtgctctttataagagatgaaaagtcacagcttctcttaggcataaggcgtgctaacaggcagcagcctgctctctcttcatcagtcatatcaagtgatagcatgcacataggaatccttgcttctgcggctcatgctgctgcaaataacagtccttttactatattttacaaccccagggccagtccttctgaatttgtgatacctttggccaagtataataaagcaatgtatacgcaagtttcacttggcatgcgatttaggatgatgtttgaaactgaggagtcgggagtacgaagatatatgggtacaattactggtatcagcgacatggattctgtaagatggaaaaattcacagtggcggaatcttcaggttggatgggatgaatccgcagctggtgaacgacctaatcgagtttcaatatgggaagttgagcctgttgtgactcccttctacatatgtccgcctccgttcttcagacccaaatttcctaaacaacaagggatgccagatgacgaatctgatattgaaaatgcttttaagagagccatgccatggtttggtgatgactttggcatgaaagatacgccaagctcaatctttcctggtttaagtttagtgcagtggatgagcatgcaacataataatcaattcccagcagcacaatctggaattttgccgtctatggttgcgcctagtgctctgcatggaactcttaccaatgatgacccatccaaattattgagttttcaagcaccagtactgtcttcaccaaatctccaattcagcaaagcaaatcaacagaaccaagttggccaatttcctccaactacatggtcccaacagcagcagctgcagcaattattacaagtttctgcaagccaacagttacagcagcagcaattgccaccccaggaacaacagcagcagctgccccagcagcagcaactccagtcacaacagtcacagcggcaacagcagacctcacaatccgttcttctgaacaacagtgtaactgctgctaaccatttgccaaatccaagtatgcaacaaccgcttgtatactctcagctacaacagcagcaattgcttgcaagcaatattcaatcccatcaaactagtcaaccatctaataagaattcatttcagactacatctttatcagaagaaacacagcttcagccacaaatagagcagcaatctagccttcttccgagacaacagcagccgacacaatttcaacaggccccactacaattattgcaacaaagtctgtctcaaaaagcacaacagcatcctcaagttcagcaattttcacagccaatcccgactgagcaacaacttcaattgcagctgctacagaagctccagcaacaacaccagcagcaaccattgttctccccggctagcccattattaccgcctcagctgctacagcagcaacacattcatccgcagaaccagcagttaccaccattgccgttgcccaatcagcagcagttcaatactagtggaggcagcttacaaacagaaaaacttaatagcaatggcttcgcaagtttaggtctcatgcaatcacagcaggttcccataacccaatcccatagtcaattcaaaccaaccacggcaattagagcatactctggactgactgaaggagatgctccatcttgttctacctcaccttccagtaataattgcccagttcctgtgtcaaacctgctcaataagaaccaacaaggagcagccacacttggtggagattcagtagttgagcctgcaactaacctggcacaggagctacatagcaaacctgatttgcggatcaaacatgagtttcctaactcaaaaggattagaccaactaaagtataaaggcactgttcctgatcagttagaagggtcttcttctgggacatcatattgtttggatgctggcaccattcagcaggctctcccactccctacatgtttggataatgatgtacaatcacatccacgtaacaacatccctttcagtaatagcattgatggattgacaccagataccttattgtcgaggggatatgactctcaaaaagatcttcagaacttactttctaactatggtgggggtgtgccaagagatattgaaacagagttgtcaactgctgcaatcagctctcagtcctttggggttccaaacctgcctttcaagcctggctgctcaaatgatgtcaacataaatgaagctggagctttgagtagtggattgtgggcaaaccacagtcaacgcatgcgtacatatacaaaggttcaaaagcgtggatcagtgggtagatgtatcgatgtcactcgctacaaaggatatgacgagcttaggcatgatcttgcccgcatgtttggcattgaagggcagttagaagatcctcaacgaactgattggaaacttgtttatgtggaccatgaaaatgatatacttctagttggtgatgatccttgggatgagtttgtgagctgtgttcagagcataaagatcctgtcatccgctgaagtacagcagatgagtttggatgagtttggatgggaatttgggtcacattcaggctcccaatcaagcttgcagtgggacggatag

SEQ ID NO: 1787 - protein, 1081 aa, Cucumis sativus
MKAPSNGFLANSGEGERKNINSELWHACAGPLVSLPPVGSLVVYFPQGHSEQVAASMNKETDFIPNYPNLPSKLICMLHNVTLHADPETDEVYAQMTLQPVNKYEKEALLASDIGLKQSRQPAEFFCKTLTASDTSTHGGFSVPRRAAEKIFPPLDYSMQPPAQELVARDLHDNSWTFRHIYRGQPKRHLLTTGWSVFVSTKRLFAGDSVLFIRDEKSQLLLGIRRANRQQPALSSSVISSDSMHIGILASAAHAAANNSPFTIFYNPRASPSEFVIPLAKYNKAMYTQVSLGMRFRMMFETEESGVRRYMGTITGISDMDSVRWKNSQWRNLQVGWDESAAGERPNRVSIWEVEPVVTPFYICPPPFFRPKFPKQQGMPDDESDIENAFKRAMPWFGDDFGMKDTPSSIFPGLSLVQWMSMQHNNQFPAAQSGILPSMVAPSALHGTLTNDDPSKLLSFQAPVLSSPNLQFSKANQQNQVGQFPPTTWSQQQQLQQLLQVSASQQLQQQQLPPQEQQQQLPQQQQLQSQQSQRQQQTSQSVLLNNSVTAANHLPNPSMQQPLVYSQLQQQQLLASNIQSHQTSQPSNKNSFQTTSLSEETQLQPQIEQQSSLLPRQQQPTQFQQAPLQLLQQSLSQKAQQHPQVQQFSQPIPTEQQLQLQLLQKLQQQHQQQPLFSPASPLLPPQLLQQQHIHPQNQQLPPLPLPNQQQFNTSGGSLQTEKLNSNGFASLGLMQSQQVPITQSHSQFKPTTAIRAYSGLTEGDAPSCSTSPSSNNCPVPVSNLLNKNQQGAATLGGDSVVEPATNLAQELHSKPDLRIKHEFPNSKGLDQLKYKGTVPDQLEGSSSGTSYCLDAGTIQQALPLPTCLDNDVQSHPRNNIPFSNSIDGLTPDTLLSRGYDSQKDLQNLLSNYGGGVPRDIETELSTAAISSQSFGVPNLPFKPGCSNDVNINEAGALSSGLWANHSQRMRTYTKVQKRGSVGRCIDVTRYKGYDELRHDLARMFGIEGQLEDPQRTDWKLVYVDHENDILLVGDDPWDEFVSCVQSIKILSSAEVQQMSLDEFGWEFGSHSGSQSSLQWDG

SEQ ID NO: 1788 - DNA, 3342 bp, Oryza sativa subsp
  CDS (1)..(3342)
atggcgagctccggcggagggggtggtggtggggaggagggggagggcaggggggcgaccaaggtgaaccaggagctgtggtacgcgtgcgcggggccgctcgtctcgctgccgccgcaggggagcctcatcgtctacttcccccagggtcacagcgagcaggttgcagcatctatgcgaaaggacgcagatgcgcaaattccaagctatccaaatcttccatcaaagctgatatgcatcctccacagtgtcaccatgcttgctgatcctgacacagatgaggtttatgctcgaatgactctccagccagtgacccagtgtgacaaggagacattgctagcatcagagcttgcgctgaagcaaaccaggccacaaacagaattcttttgcaaaacactgaccgccagtgatacaagcactcatggaggtttctctgtgccacgccgtgccgctgagaggatttttcctcgtcttgacttctccatgcagcctcctgcccaggaactgcaggcccgggatttgcatgataatgtttggacatttcgtcatatataccggggtcagcctaaaaggcatttactgactacgggctggagcctatttgtcagtggaaagagattacttgctggtgattcagtcttgtttattagggatgcaaaacagcagctcctcttggggatcagacgagcaaataggcaacctacgaacctctcatcatctgtcttatctagtgatagtatgcatattggaattcttgctgcagcagcccatgctgcagcgaataacagccaatttacaatatattataacccaagggccagtacttccgaatttgtgattccttttgccaaataccagaaggcagtgtatggtaaccaattatctcttggcatgcggttcagaatgatgtttgaaactgaagagtcaggaacaagaaggtacatgggtacaataactggtataagtgatctggatccagtaaggtggaaaacatctcattggcgcaatattcaggttgcatgggatgaagcggcaccaactgagagacgcaccagggtttccctctgggagatagagcctatcattgctccattcttcatctacccctcaccattattcaccgcaaaacgtccaaggctacctgggatgacagatgacgagactgaaatggacggtcttctcaagagggccatgccatgggttggtgaggagatttgcaagaaagatctgaatattcagaacagtgtagtgcctggtctaaatctagctcagtggatgaacatgcagcacagctcctcgcttcctggcacggttgtgcaaccagagttactaaactcattaagtggaaaacctgtacaaaatttggctgcagctgatttatcaaggcaaatcagttttcacccgcagttcttgcaacaaaacaacatccagttcaacactgcgttggtacctcaacaaaaccaacagacagaacaattagcgaaagttatccctacaccaaaccaattgggaagtgttataataccgcagaaggtggttcaggattgcaactctgaacaaaggcagcatgtggttactcaaccagtgcaaggcagccagccaaacataaacattccacagcctcagcttgttgttcaggctcagcttcagcaaccgcaagtcattctccaggcgcaactgcagcaacctcaagttgttgtccaggcccaactccagcaaacgcaaccttcggtccaaagtcacactgtcttacaaggaggtcttcaacaaatccagcttctccagcagcaacagccacatgtgcagcaccagcagataccgcaacagttacatcatcagcagcagcaaacacaacagttgcaacctgtccagcaggttcagcagtcagtacaggaacatcagcaaataaagatacaacctgttcatgtttccatggatgcaagtatgaatacgcaggtggcagatcatcaaatgaaactacaactactcaaggctttacagccacagcagcctctgatctcagagcagcagaagatgcttttggatttgcagcagcaagtgataaattcacagtcagctcctcagcagtgtgtacaggtaacaaaccaagctattagtttacataacagtaacactattcaatacccgacacagcaaaaggttcagtctcaccaagttcaagacttaactgggaatgtcattcctaattcaaaatcagacatcgctacttccatgggtgctagttctttgcatgtagctggtggacgccaattattgaagacagatgatgttccgtctacttcaacatcaccatccactaacagcaatcctgttcttctgcaatccatcccaagtagctccaagaaccaaagtttaactacagcaggaaagacatctcaatcatctgttgtgttgggtcctacgatcgaacaggacacaaagccatatcaaaatgtaaagcaaacagttatgattcccaagacgacagaacaaaggccagctactggacaagactgcataaataacaatcctcaaatggattacttggacacatcctcttcagctacttcggtttgcctttcccaggctgatggatcattgcaacaaaactttccaccttcatccttccaccagcatcacttgctaaaagacacagttccagatagcgagtttgaggttacagatccaagaaataaccttctatttggggtgaatattgatggtcaactgggtttaccacttaatgcagacctgcttgcgaatgacattggaaccgataaatacatggatcagttgccaggaaatggcatttctaacttcatttcatcaaaggattctcaacaagagttatcatcttcaatgatttcacattcatttggagttgctgatatggcattcaattctatagattctgcaatcaatgataccccattcttaaatagaaattcccggtctgcagcaggtcctgcacatcaacggatgagaacctacaccaaggtacacaagcgtggtgcggtgggaagatcaattgacatcaatcgatattctggatatgatgagctgaaacatgacgttgctcggatgtttggtattgaggggcagcttggtgatcaaaatagagttggctggaagctagtatatgaagatcacgagaaggatgttctactagttggtgatgatccatgggaggactttgtgaaatgtgtacgatgtatcaggattctttctccacaggaagaaatgcagatgagattagtcggcgactttggagacagctttctacccaaccaagcttgcagcagctctgatgggggtcatccctggaggataaccggcgactag

SEQ ID NO: 1789 - protein, 1113 aa, Oryza sativa subsp
MASSGGGGGGGEEGEGRGATKVNQELWYACAGPLVSLPPQGSLIVYFPQGHSEQVAASMRKDADAQIPSYPNLPSKLICILHSVTMLADPDTDEVYARMTLQPVTQCDKETLLASELALKQTRPQTEFFCKTLTASDTSTHGGFSVPRRAAERIFPRLDFSMQPPAQELQARDLHDNVWTFRHIYRGQPKRHLLTTGWSLFVSGKRLLAGDSVLFIRDAKQQLLLGIRRANRQPTNLSSSVLSSDSMHIGILAAAAHAAANNSQFTIYYNPRASTSEFVIPFAKYQKAVYGNQLSLGMRFRMMFETEESGTRRYMGTITGISDLDPVRWKTSHWRNIQVAWDEAAPTERRTRVSLWEIEPIIAPFFIYPSPLFTAKRPRLPGMTDDETEMDGLLKRAMPWVGEEICKKDLNIQNSVVPGLNLAQWMNMQHSSSLPGTVVQPELLNSLSGKPVQNLAAADLSRQISFHPQFLQQNNIQFNTALVPQQNQQTEQLAKVIPTPNQLGSVIIPQKVVQDCNSEQRQHVVTQPVQGSQPNINIPQPQLVVQAQLQQPQVILQAQLQQPQVVVQAQLQQTQPSVQSHTVLQGGLQQIQLLQQQQPHVQHQQIPQQLHHQQQQTQQLQPVQQVQQSVQEHQQIKIQPVHVSMDASMNTQVADHQMKLQLLKALQPQQPLISEQQKMLLDLQQQVINSQSAPQQCVQVTNQAISLHNSNTIQYPTQQKVQSHQVQDLTGNVIPNSKSDIATSMGASSLHVAGGRQLLKTDDVPSTSTSPSTNSNPVLLQSIPSSSKNQSLTTAGKTSQSSVVLGPTIEQDTKPYQNVKQTVMIPKTTEQRPATGQDCINNNPQMDYLDTSSSATSVCLSQADGSLQQNFPPSSFHQHHLLKDTVPDSEFEVTDPRNNLLFGVNIDGQLGLPLNADLLANDIGTDKYMDQLPGNGISNFISSKDSQQELSSSMISHSFGVADMAFNSIDSAINDTPFLNRNSRSAAGPAHQRMRTYTKVHKRGAVGRSIDINRYSGYDELKHDVARMFGIEGQLGDQNRVGWKLVYEDHEKDVLLVGDDPWEDFVKCVRCIRILSPQEEMQMRLVGDFGDSFLPNQACSSSDGGHPWRITGD

SEQ ID NO: 1790 - DNA, 3420 bp, Oryza sativa subsp
  CDS (1)..(3420)
atgaagcagcagcagacgccggcgagctccgcggtgaccgcggcggcggcggcctcctcctccgccaccgccgccgtggccgcatgcgaaggggagcggaaggcggcggcgatcaactcggagctgtggcacgcgtgcgccggcccgctcgtgtcgctgccgccggtgggcagcctcgtcgtctacttcccgcaaggccacagcgagcaggttgcagcttctatgcaaaaggatgtggatgcacatgttccaagctacccaaatcttccctccaagttgatatgtcttcttcacggtgtcaatttgcatgcagacccagatactgatgaagtttatgcacagatgactcttcaaccagtgaatacatatggaaaagaggcgttgcaaatatcagagcttgcactaaaacaagcaaggccacaaatggaattcttctgtaagacactcaccgcaagtgatacaagtacacatggaggattctctgtgcctcgccgtgccgcagagaagatattccctcccctggacttctctatgcaacctccagctcaagaactgcaagctagagatatacatgacaatgtgtggacatttcgtcatatatatcgaggtcaaccaaaaagacatttacttactactggttggagccttttcgtgagtggcaagaggttatttgctggtgattctgttattgttgtgagggatgaaaagcatcaacttctactaggaatcaggcgtgctaacagacaaccgactaatatatcatcttcagtactttcaagcgacagtatgcacataggagtccttgctgcggctgcccatgctgctgccaacagtagcccttttaccatattttataaccctagggccagtcctactgaatttgttatcccatttgcaaaataccagaaggcactgtatagtaatcagatatctttaggaatgcggtttcgcatgatgtttgaaaccgaggaattaggaacaagaaggtacatgggtacaataactggaataagtgacctagatcctgtgagatggaaaaactcccaatggcgcaatttacaggttggctgggatgagtctgcagctggtgaaaggaggaacagagtttcaatctgggagattgaaccggttgcagctcccttttttctatgtccccaacctttttttggtgtgaagcgccccaggcaattagatgacgagtcagagatggaaaaccttttcaagagggcaatgccttggcttggtgaggaggtatgcataaaggatactcaaaaccagaacagtacagcacctggtctaagtttggttcagtggatgaacatgaacaggcagcagagctcatcattggctaacaccgctgcgcagtctgagtacctgcaagctctaggtaaccctgccatgcaaaaccttgctgctgatgaacttgcaaggcaactatatgtccagaacaatctccttcaacagaactgcatacagtttaattctcccaagctccctcagcaaatgcaaaccatgaacgatctgtccaaggcggcaattccgttgaatcagcttggtgctatcatcaatcctcaagatcagaaacaagatgctgtcaaccatcagagacagcagaactccatacaagtgattcccctgagccaagctcaatctaatctcgtccaggctcaggtgattgttcagaatcagatgcaacagcagaagccatctccaactcaaaacccgcaaaggattaatggccagcggctgcttttgtctcatcaacagaaggatcaaaatttacagctgcaacagcagcttttacttcagcaaaaacaacagttacagcagcagcagcagcagcaacaacagaatcagcagcagctaaataagtcccttggacagttggtaaatctggcaagtcagcagtctaagttgtttgatgaggagcttcagttgcagatattacagaaactgcagcagcaatcactgatgtcacaatccacatcaacactctcacagccacctctgatccaagaacagcaaaagttaatcacggacatgcaaaagcagttgtcaaattcacattcacttgctcagcaacaaatgatgccccaacaagaaatcaagccttcattgcaagcaacaccattgctacccacggtccagcaagagcaacagcagaagcttttacagaaacaagtctcacttgcagatgtgtcaggagttgcttttcaaccaatttcatcaaccaatgtgatccccaaaactggaggtgctatgatcatttcgggtgctacacaatctgtagttacagaggaaatgccctcttgttcaacatctccatccacagctaatggaaaccactttacacaatcaaccaaaaacagacattgcatcaacacagaaaggctgccaccgtccactgctccaatgttgatcccaacctccattgacgctgtaacagcaactccactaatgaccaaggaattgccaaagccgaataataatgtgaagcaaagtgttgtcaactcaaaattaccaaatgttgctcctggcccacaaaattgtataaaccatgcattgcaaacagacaacttggaaacatcttcatcagcaacttcattatgtccttcccgaacagatggacttgtgcatcaaggtttcccctcttctaacttcaatcaacaccagatgttcaaagatgcacttcctgatgtagaaatggaaggtgtggatccaagtaacagtggcttgtttgggatcaacaatgataacctgttaggattcccaatagaaacagaggacttgctgataaatgcacttgattctgtcaagtatcagaatcacatatcaactgatgttgaaaacaactacccgatgcaaaaggatgctctgcaagaaatatcaacctccatggtttcccagtcatttggtcagtcggatatggcttttaattccattgattctgcgatcaatgatggtgccttcttgaacaaaaattcctggcccgctgcccctctgctgcagagaatgcggacattcaccaaggtgtacaaacgaggagctgtaggccggtctattgacatcggcaggtactctggatatgaagagttgaagcatgctttggctcgcatgtttggtatagagggtcaacttgaagatcgacagagaataggctggaaactggtctacaaggatcacgaggatgacatcctgcttcttggtgatgacccatgggaggagtttgtgaactgtgtaagatgcattaggattctatcacctcaagaagtgcaacagatgagcttggatggtgatctggggagcaatgtcctccccaaccaggcttgcagcagctcagatggggtgaatggttggaggcctcgctgtgaccagaaccccgggaacccttccatcggcccgtatgatcaattcgaatga

SEQ ID NO: 1791 - protein, 1139 aa, Oryza sativa subsp
MKQQQTPASSAVTAAAAASSSATAAVAACEGERKAAAINSELWHACAGPLVSLPPVGSLVVYFPQGHSEQVAASMQKDVDAHVPSYPNLPSKLICLLHGVNLHADPDTDEVYAQMTLQPVNTYGKEALQISELALKQARPQMEFFCKTLTASDTSTHGGFSVPRRAAEKIFPPLDFSMQPPAQELQARDIHDNVWTFRHIYRGQPKRHLLTTGWSLFVSGKRLFAGDSVIVVRDEKHQLLLGIRRANRQPTNISSSVLSSDSMHIGVLAAAAHAAANSSPFTIFYNPRASPTEFVIPFAKYQKALYSNQISLGMRFRMMFETEELGTRRYMGTITGISDLDPVRWKNSQWRNLQVGWDESAAGERRNRVSIWEIEPVAAPFFLCPQPFFGVKRPRQLDDESEMENLFKRAMPWLGEEVCIKDTQNQNSTAPGLSLVQWMNMNRQQSSSLANTAAQSEYLQALGNPAMQNLAADELARQLYVQNNLLQQNCIQFNSPKLPQQMQTMNDLSKAAIPLNQLGAIINPQDQKQDAVNHQRQQNSIQVIPLSQAQSNLVQAQVIVQNQMQQQKPSPTQNPQRINGQRLLLSHQQKDQNLQLQQQLLLQQKQQLQQQQQQQQQNQQQLNKSLGQLVNLASQQSKLFDEELQLQILQKLQQQSLMSQSTSTLSQPPLIQEQQKLITDMQKQLSNSHSLAQQQMMPQQEIKPSLQATPLLPTVQQEQQQKLLQKQVSLADVSGVAFQPISSTNVIPKTGGAMIISGATQSVVTEEMPSCSTSPSTANGNHFTQSTKNRHCINTERLPPSTAPMLIPTSIDAVTATPLMTKELPKPNNNVKQSVVNSKLPNVAPGPQNCINHALQTDNLETSSSATSLCPSRTDGLVHQGFPSSNFNQHQMFKDALPDVEMEGVDPSNSGLFGINNDNLLGFPIETEDLLINALDSVKYQNHISTDVENNYPMQKDALQEISTSMVSQSFGQSDMAFNSIDSAINDGAFLNKNSWPAAPLLQRMRTFTKVYKRGAVGRSIDIGRYSGYEELKHALARMFGIEGQLEDRQRIGWKLVYKDHEDDILLLGDDPWEEFVNCVRCIRILSPQEVQQMSLDGDLGSNVLPNQACSSSDGVNGWRPRCDQNPGNPSIGPYDQFE

SEQ ID NO: 1792 - DNA, 2865 bp, Oryza sativa subsp
  CDS (1)..(2865)
atggcgtcctcgcaggagaaggccaagacgggtgttctgagaaatgccgcagcgctgctcgacgaaatgcagctcatgggagaaacacagggtgccaagaaggtgatcaactcggagctctggcacgcttgtgccgggccgcttgtgtgcttgccgcagcgggggagcctcgtgtactacttccctcaggggcacagtgaacaggttgcagcgacaactagaaagattccaaattcccgcattccgaactacccaaacctgccatctcagttgctgtgtcaagttcacaacatcaccttgcatgccgacaaggacactgatgaagtttatgcacagatgacccttcagccagtaaactctgaaacggatgtattccctattccaactcttggtgcttataccaaaagcaagcaccccactgaatatttctgcaagaatttaaccgcaagtgatacgagtacacatggtggtttctcggtgccacgaagggctgcagagaagttgttcccacaactggattactcaatgcaacctcctaaccaggagcttattgttcgagatttgcatgataacatgtggacattccgtcacatttatcgtggacagccaaaacgacatcttctaacaactggatggagtctctttgttggggcaaagcgtctaaaagcaggggactctgtcttatttataagggatgagaagtcacaacttcttttgggtgttaggcgagccacgcgacaacaaacaatgttgtcatcttctgttctatctactgatagcatgcacattggcgttcttgctgctgcagctcatgccgcatcaagtgcatttggtcattcatggaatctccataggacaagtccttcgccatttgtaattcctgtagcaaggtacaacaaggcaacatatatgcaaccatcagttggaatgagatttgcgatgatgtttgagacagaggagtcaagcaagcgcagatacacaggtacagttgtgggaataagtgactacgaccccatgagatggcccaattctaaatggcgcaacttacaggtcgaatgggatgaacatgggtatggagaaagacctgagcgtgtgagcatatgggatattgaaactccagaaaacactcttgtgttcccttcgtcgaccttgaattcaaagcggcaatgtcttcctggttatggagtttcagtgcctgggatggaaattggatcagcaaatatgtcatcatttccaagggctcagggtaatccctatggcagtttgcagcacattccagctgttggatcagaattggctatcatgcttctcaaccaatctggtcaaacccttgggagtccccttagttttcaccagtcctcatattctagtattatccaaaatgtgaagcaaaattatatccctcctctaacagttagcacttcagcttgtttgacaaagcaagaaagcctgccttcagatgatgcccagcaccagttccatatggcaaatatgcagaatggtgatcttgaaggctctgaagtccagcctgtcattgattcgatttctgagtcaaagttgaatgctacatcaagagatccaagaaacacagattcatacacaagtcgaagtacttcggagcaaaacagtaagggtgagcctagaggcaagactcgtaggagtaagaagggcttgcctcacaaaaccgtttcagagaaatctgacctttcttcagccccttcttggatctgtgacaatcagcaggttggtttagaatcgaaactggttggttgtgatgaacaagtaaactgtggaaatattgaagattcatcaggtgcacttactcaaggtaattttgttggacagccgcatggccatcaggttgaacaaaagggagtgctgtcgccaccaaaggtagaatcatcaaaatcacctgatggaggaaagtctgtcaattcgtttccaaaccaagggtgtttttcgcagttcattgatggtcttgattggatgactcagccttcctactaccaagactccaatgtaattcaaccagccggtgtgtcagagaacattttcagttcttctgcagatatacctccctcaatgattgctgatactatggagacttttcaggcttcatgtctttctgattgccttcctaattccatacaagaattcatctccagcccagatctgaattcactaacctttctttcacctgacatgcaaaatttggaggtccaactccagcatgatggaagcaatttgccaagcacgtccaactcgtttgtacagatgagtttttctgaagagagtgcaagtcagagtgcaaacttaagtggacttcacatggaatctacacacagaagcataaacaccacttcatgctctcaaccaatgtctactgggggctttgatgcagggatgtactcaaagttgccacgtttaaaagaatcccaaatcttgtctttgccagagattcataccaattccatgggaacatcagcttgcagtatggatgcaaccgagtacagccttgaccgaagtgcgaagccgatgaaaccaccagtgcggacatatacaaaggttcaaaagcaaggatcagttggaagatctatcgatgttacagggtttagaaattaccatgagttgagatctgccatcgcttgcatgtttggtctccaggggaaattggagcatcctggcagttcagagtggaagcttgtatatgtcgactacgaaaatgatgttcttcttgtcggagatgatccatgggaggaattcatcaactgtgtccggtgcatccggattttgtcaccttcagaagtacaacagatgagcgagaatggcatgcatgttttgaacgactgtattcaagcagcttag

SEQ ID NO: 1793 - protein, 954 aa, Oryza sativa subsp
MASSQEKAKTGVLRNAAALLDEMQLMGETQGAKKVINSELWHACAGPLVCLPQRGSLVYYFPQGHSEQVAATTRKIPNSRIPNYPNLPSQLLCQVHNITLHADKDTDEVYAQMTLQPVNSETDVFPIPTLGAYTKSKHPTEYFCKNLTASDTSTHGGFSVPRRAAEKLFPQLDYSMQPPNQELIVRDLHDNMWTFRHIYRGQPKRHLLTTGWSLFVGAKRLKAGDSVLFIRDEKSQLLLGVRRATRQQTMLSSSVLSTDSMHIGVLAAAAHAASSAFGHSWNLHRTSPSPFVIPVARYNKATYMQPSVGMRFAMMFETEESSKRRYTGTVVGISDYDPMRWPNSKWRNLQVEWDEHGYGERPERVSIWDIETPENTLVFPSSTLNSKRQCLPGYGVSVPGMEIGSANMSSFPRAQGNPYGSLQHIPAVGSELAIMLLNQSGQTLGSPLSFHQSSYSSIIQNVKQNYIPPLTVSTSACLTKQESLPSDDAQHQFHMANMQNGDLEGSEVQPVIDSISESKLNATSRDPRNTDSYTSRSTSEQNSKGEPRGKTRRSKKGLPHKTVSEKSDLSSAPSWICDNQQVGLESKLVGCDEQVNCGNIEDSSGALTQGNFVGQPHGHQVEQKGVLSPPKVESSKSPDGGKSVNSFPNQGCFSQFIDGLDWMTQPSYYQDSNVIQPAGVSENIFSSSADIPPSMIADTMETFQASCLSDCLPNSIQEFISSPDLNSLTFLSPDMQNLEVQLQHDGSNLPSTSNSFVQMSFSEESASQSANLSGLHMESTHRSINTTSCSQPMSTGGFDAGMYSKLPRLKESQILSLPEIHTNSMGTSACSMDATEYSLDRSAKPMKPPVRTYTKVQKQGSVGRSIDVTGFRNYHELRSAIACMFGLQGKLEHPGSSEWKLVYVDYENDVLLVGDDPWEEFINCVRCIRILSPSEVQQMSENGMHVLNDCIQAA

SEQ ID NO: 1794 - DNA, 2496 bp, Oryza sativa
  CDS (1)..(2496)
atgagctcgtcgtcggcggccagcatcgggccgccgcagccgccgccgccccccgcgccgcccgaggaagagaagaagtgcctcaactcggagctatggcacgcctgcgccggcccgctcgtctgcctccccaccgtcggcacgcgcgtcgtctacttcccgcaaggccacagcgagcaggtggcggcgtcgacgaacaaggaggtggagggtcacatcccgaactaccccaacctgccggcgcagctgatctgccagctccacgatgtcacaatgcatgcggatgtggagactgacgaggtgtacgcgcagatgacgctccagccactgaacccagtaaggcgcctggggtttttgcatgatgtttgcagtgctgaggttttgatgcaggagcagaacgatgcgtaccttcccgcggagatggggataatgagcaagcagccgacgaattacttctgcaagacattgacggcgagcgacaccagcacgcacggggggttctccgtgccccgccgtgctgctgagcgcgtcttccctcctttggatttcacacagcagcctccagcccaggagctaattgcacgggatattcatgacatcgagtggaagttcaggcacatctttcgaggccaacccaaacgacacctgctaaccactggctggagcgtttttgtcagtgctaagagacttgttgctggagattctgtgcttttcatatggaacgagaaaaaccagcttttacttggaataagacgtgccagtcggccacagactgtgatgccttcctctgttctttcaagcgatagcatgcacataggtctccttgcagcagcagctcatgctgctgctacaaacagccgtttcactattttctacaacccccggtatatggggactataactgaagttagtgatgcagacccagtccgttggcctagttcctattggagatctgtgaaggttggttgggatgaatcaactgcaggggaaagaccaccaagagtttctttatgggaaattgaaccattgacaacctttccaatgtatccatctctgttcccactgagagttaagcatccttggtattcaggagttgcttccctgcatgatgacagcaatgctttaatgtggctgagaggagttgctggtgagggaggttttcagtctctgaactttcagtcacctggtattggctcctggggacaacagaggctccatccatccttactgagcagcgatcacgatcagtaccaagcagtagttgctgctgctgctgcttcccaatctggtggttacttaaaacagcaattcttgcaccttcagcaacctatgcagtcccctcaagaacactgcaacctcaacccattattgcagcaacaaattctgcagcaagcaagccagcaacagataattaatcctgatgcccaaaatatccaaacgatgttgagcccaagtgctatacaacagcaactccagcaactacagcaaatgcagcaagttcagaatgatcagaagcagaagattcaaccagatcaaagctaccaagttcctacaagtgcagttctcccaagtccaacatcattaccgagtcatttgcgagaaaaatttggcttctctgatcctaatgcgaattcttcaagcttcatcacctctagcagtagtgataacatgttggattcgagcttccttcagggaagttcgaaagctgtggacttatctcgatttaatcagcctgtagctagtgagcagcagcagcagcagcaacaggcatggaagcagaagtttatgggttcacagtcagtgtcttttgggggctcggttttgcataactcacccacaagcaaagatggttctgttgaaaacaaaattggtcgtgatgtgcaaaaccagtccctttttagtccacaagttgactcttcatccctcctgtacaacatggttcctaatctgacttcgaatgtttcggatggcaacttatcaacgatcccttctggatcaacttatctgcagaatgcaatgtatggttgcttggacgactcttctggtttattgcaaaatacaggagagaacgatccagcaaccagaacatttgtgaaggtttacaagtcaggttcggttgggaggtcgttggacataacccggttctctaattatgctgaacttcgagaagaactgggtcagatgttcggcattaagggtcaattggacgaccctgatagatcaggctggcagcttgtattcgtcgacagggagaatgatgtgcttctccttggagacgacccttgggaattcattaacatctatatgaatgtgagcaatgctaaaaagtcttacattatgaaacggagggagtacaatactttggtttcctggtttccacaactaatagcttatcgaggaaagactgttcttccttcaataatatgtgttggtcagtcactatatgttgatgctcagttacccaagacccttcgtgagagtaaacatcagacatga

SEQ ID NO: 1795 - protein, 831 aa, Oryza sativa
MSSSSAASIGPPQPPPPPAPPEEEKKCLNSELWHACAGPLVCLPTVGTRVVYFPQGHSEQVAASTNKEVEGHIPNYPNLPAQLICQLHDVTMHADVETDEVYAQMTLQPLNPVRRLGFLHDVCSAEVLMQEQNDAYLPAEMGIMSKQPTNYFCKTLTASDTSTHGGFSVPRRAAERVFPPLDFTQQPPAQELIARDIHDIEWKFRHIFRGQPKRHLLTTGWSVFVSAKRLVAGDSVLFIWNEKNQLLLGIRRASRPQTVMPSSVLSSDSMHIGLLAAAAHAAATNSRFTIFYNPRYMGTITEVSDADPVRWPSSYWRSVKVGWDESTAGERPPRVSLWEIEPLTTFPMYPSLFPLRVKHPWYSGVASLHDDSNALMWLRGVAGEGGFQSLNFQSPGIGSWGQQRLHPSLLSSDHDQYQAVVAAAAASQSGGYLKQQFLHLQQPMQSPQEHCNLNPLLQQQILQQASQQQIINPDAQNIQTMLSPSAIQQQLQQLQQMQQVQNDQKQKIQPDQSYQVPTSAVLPSPTSLPSHLREKFGFSDPNANSSSFITSSSSDNMLDSSFLQGSSKAVDLSRFNQPVASEQQQQQQQAWKQKFMGSQSVSFGGSVLHNSPTSKDGSVENKIGRDVQNQSLFSPQVDSSSLLYNMVPNLTSNVSDGNLSTIPSGSTYLQNAMYGCLDDSSGLLQNTGENDPATRTFVKVYKSGSVGRSLDITRFSNYAELREELGQMFGIKGQLDDPDRSGWQLVFVDRENDVLLLGDDPWEFINIYMNVSNAKKSYIMKRREYNTLVSWFPQLIAYRGKTVLPSIICVGQSLYVDAQLPKTLRESKHQT

SEQ ID NO: 1796 - DNA, 5022 bp, Oryza sativa subsp
  CDS (1)..(5022)
atggagatggcggcgaatccaggtggttcaggaacctgcagcgatgcactattccgggagctatggcatgcttgtgctggtccgttggtcacggtcccgaagcgcggcgagcgcgtctactactttccccagggtcatatggaacagcttgaggcgtctacaaaccagcagcttgaccagtacctgccgatgttcaatctaccatccaagatcctatgcagcgtggtcaacgtagaactccgggcggaggctgattcagatgaagtttatgctcaaattatgctgcaaccagaagctgatcaaagtgaactcaccagtctggatcctgagcttcaagatcttgagaaatgcacagctcattccttttgcaagacattaacagcttcagatacaagcacacatggcggtttctctgttcttaggaggcatgctgaagaatgccttcctcagctggacatgtctcagaatccaccatgtcaagaactggttgccaaagatctccatggaactgagtggcatttccgtcacatctttcgtggacaacctaggaggcatctgcttacaaccggttggagtgtctttgttagctcaaaaagattggttgctggcgatgcatttatcttcctgaggggcgaaagtggtgagctacgggttggagtaaggagacttatgagacaagtaaataacatgccatcatctgtcatatcaagccacagcatgcatcttggagtccttgcaacagcttcccatgctatctccactggaaccctcttttctgttttctacaaacccagaacaagccggtctgagtttgttgtgagcgttaacaagtaccttgaagctaagaagcagaacttgtctgttggaatgaggtttaagatgagatttgaaggtgatgaagctcctgaaagaaggtttagtggaacaattattggtattgggagtgtgccagcaatgtcaaaatctccatgggcagattctgactggaaatctctgaaggtccaatgggatgaaccttcggctattgtccgtccagatagagtttcaccatgggaactggaaccattggatgcgagtaatccacaaccacctcagcctccattgaggaataagcgtgcaaggcctccagcttcaccttctgtggttgcggaacttcctccaagtttcgatgtggactctgatcagatctcacagccatctaatggcaataaatccgatgcccctggaacaagcagtgaacgttctcctcttgagtcccaaagtcgtcaagtgaggagctgcacaaaggtaattatgcaaggtatggcagttgggagggctgtggacttgacaaaactaaatggttatggtgatcttcgcagcaagttggaggagatgtttgatatacagggggacttgtgtcccaccctgaagagatggcaagttgtttacaccgatgatgaggatgacatgatgcttgtcggggatgatccttgggagaaattccaatgtttcttcattactgcttcctgtgctgaagacgcaacgcccttttgtcttgaattgtggtggtatttgaactgcaagtgccaggaagttcccaagactggcaagaccgcctggaagaggcattctggcaaatgcatgccgttccaaattgttttgtgttttggtaggagccttggcgttcttgtctggtgcccagatttaggcgattcggtcggcggcggcgcggagaggcggcgaaccggcggcgtggagaggcggcggagggagcccgtgactcggcggagaggcggcaaggagaggcgacgacccagctggcgggctctggcggcgaaccggcggcgcggagaggcggcaaaccagcgacgcggagaggcggcgacccagcgtggaggcagcgacccagctggcgggctccgacggcgcggagaggcggcgaaacggcggcacggagaggcggcaaaccggtggcgcgaagaggcggtgaggagaggcggcgacccatcggagaggtggcgaaccggcggcgtggagaggcggcgaagggagcccgcgactcggcggactggctccagcggcgtgggcttcttccacgcgtcgtcatcgtcgctcattgccggagcgaatggcggcagcgacggcggtggcggagctcgaactttgagttggggaacgtggtggcggcgacttggcaggctggctccgacagtggcgctgggttggtgtgggcgctggagcacgagagaggaggggattattgacgtggggaagagaatccatgtggggccaccatttggcgaggggaaccgccggcgcagcaccctcgtcctcccgcacgtccgatctgcccccttccacgccgtggttccgggagctgtggggggtcaacgccgacaaatagtagcagccgccgtcgccgaagctgatggtaatgaaaacggaaataagcatttcacttgtcacagggagaatgcaaactatggtctaaaatctgcatctgaaaataaaattgagctgctgaggggtgctcatagttgggccgacagtaatttaattgaggatgtactggcctctgtgaacaatgatgttggtgaagcatctgctttgttgaaagctatggcgtctccttgttttccaataagggaggatggactacctgatcagctttcttctgagattaataaaacacatggtttaccatcaggaaatggtacagcagaaaataatcttgtaaatgactcgcagttgttgcctctgccaatgaatatgtcgtctgtacccatagaaccggaagtggaagagctcgatgacgattactttaaccacaggaaagatgcattgaagattatgagggctgccacgaagcattctcaggctgcgagtaatgctttcttgagaggtgaccatgctgctgccaaggaactttccctcagagctcaagaagagcgatccgctgctgaagagctgaacaagaaggcagcaaaagaaatatttcgcctcaggaacagcaataatagcatttggaagctagacatgcatggtctacatgcatcagaggctgtggaagtactggaacggcatcttcacaggatagaattccagccaccagggaataatgcagcttcatctgatgaagtagctaggtctgaacccagagtgtctggtccaagcattgagcccggcccagggaaggtggtgtttgttcgtcccatacaggctatcttagaggtgatcacagggattggcaagcacagcaaagggcaggcctcactacctgttgcagtcaggggcttcctcattgaaaatgggtaccgatttgatgagctgcggcctgggcataagcttctcacttctcagcctgaagttaaaaatcacaaaggaatcaaggggcattcgccttcgaatctaggcttccgaagatcgggattgcagttaaaggttactgcaatttttgggtggattaagggagacacaagaacacgtgaattgaacccatctgctgaatcatatacgcttacagggtcagcctcagaggcagacaccaagccacgtgaggtttctgttgctgttgtttcttctattatggacattccttcagcagattgggatgcctgtgcagttgattcagttgatcctgacaattttaatccttttctgacccacgcattcctctcaagcttagaggaatcgggttctgcagtgaaggaaacagggtggttacctctgcatgttgttgcacgggatgagaatgaaactgtcgttggtgttgtcccactttacctgaaaagccattcaaggggagagtttgtatttgatcaatcatgggcagaagcttactatagctatggactcgaatactaccccaagttgcagtcttgtgtgccttttactccagtaactggtcaaagaatattagttcgagatacaccatacagggatcaagtttttgaagctttagtgaaagaattgaagagtttgactaccaagctgaaggtgtcatcgttacatataacatttccatctgaaggtgaattcagcaagttgaaggatagtgagttcttgcagagaatcgggatgcagtatcactggagaaatcgagattacagaagttttgacgagtttttaatggatttgaagcaacccaaacggaagaatatcagacaagaacgtaaaaagattcctgctcaaaatttgaaaatgaagcgacttcgtggagatgagataaaggattattttttgtgtgctttcagctggggcagaccatacttgacaagggaattctttcaccgcttgggagaaaagatgggtgacaaggtgatgcttattgttgctgaacatgacgataaacatgttgccggggctcttaaccttattggaggtgacacattgtttggccgcttatggggctgtctgccagatgcttatttccccaatttgcattttgaagcttgctattatcagaatatacatactactcaggcaattgaagcagctatagaactgaacctgagtaaggtggaggcaggtgctcaaggagagcacaagatccagcgtggttacctcccagtgacaacatacagctgccactacttcttagatcctggttttggggcagctataggaaattatcttgtacatgagacggctcaggtgaggagttgccatcggcgaaaggaaagggcaaggaaaaagctctctgaatgtcacatcgacatatcagccaagatcccaaccaaaaaggacatcagatactgcctcattatgctttttgtacaaggatacaaggattggttcttcctccctcctctcatcaatcaaaggccaagaagaaccaagctccagtgcagaaagctatcgcaaacaagaaagagctttgccagttgcagcctgcctttgcatttggactgcaccggttgcttcattcgtcaagcacaccacaggttgaggaagcagccgtttgaccatctgtgcagcagctcacccaggcacaggatggcgtacaccagcaggatgaacttgaagaggaaagggaagtaa

SEQ ID NO: 1797 - protein, 1673 aa, Oryza sativa subsp
MEMAANPGGSGTCSDALFRELWHACAGPLVTVPKRGERVYYFPQGHMEQLEASTNQQLDQYLPMFNLPSKILCSVVNVELRAEADSDEVYAQIMLQPEADQSELTSLDPELQDLEKCTAHSFCKTLTASDTSTHGGFSVLRRHAEECLPQLDMSQNPPCQELVAKDLHGTEWHFRHIFRGQPRRHLLTTGWSVFVSSKRLVAGDAFIFLRGESGELRVGVRRLMRQVNNMPSSVISSHSMHLGVLATASHAISTGTLFSVFYKPRTSRSEFVVSVNKYLEAKKQNLSVGMRFKMRFEGDEAPERRFSGTIIGIGSVPAMSKSPWADSDWKSLKVQWDEPSAIVRPDRVSPWELEPLDASNPQPPQPPLRNKRARPPASPSVVAELPPSFDVDSDQISQPSNGNKSDAPGTSSERSPLESQSRQVRSCTKVIMQGMAVGRAVDLTKLNGYGDLRSKLEEMFDIQGDLCPTLKRWQVVYTDDEDDMMLVGDDPWEKFQCFFITASCAEDATPFCLELWWYLNCKCQEVPKTGKTAWKRHSGKCMPFQIVLCFGRSLGVLVWCPDLGDSVGGGAERRRTGGVERRRREPVTRRRGGKERRRPSWRALAANRRRGEAANQRRGEAATQRGGSDPAGGLRRRGEAAKRRHGEAANRWREEAVRRGGDPSERWRTGGVERRRREPATRRTGSSGVGFFHASSSSLIAGANGGSDGGGGARTLSWGTWWRRLGRLAPTVALGWCGRWSTREEGIIDVGKRIHVGPPFGEGNRRRSTLVLPHVRSAPFHAVVPGAVGGQRRQIVAAAVAEADGNENGNKHFTCHRENANYGLKSASENKIELLRGAHSWADSNLIEDVLASVNNDVGEASALLKAMASPCFPIREDGLPDQLSSEINKTHGLPSGNGTAENNLVNDSQLLPLPMNMSSVPIEPEVEELDDDYFNHRKDALKIMRAATKHSQAASNAFLRGDHAAAKELSLRAQEERSAAEELNKKAAKEIFRLRNSNNSIWKLDMHGLHASEAVEVLERHLHRIEFQPPGNNAASSDEVARSEPRVSGPSIEPGPGKVVFVRPIQAILEVITGIGKHSKGQASLPVAVRGFLIENGYRFDELRPGHKLLTSQPEVKNHKGIKGHSPSNLGFRRSGLQLKVTAIFGWIKGDTRTRELNPSAESYTLTGSASEADTKPREVSVAVVSSIMDIPSADWDACAVDSVDPDNFNPFLTHAFLSSLEESGSAVKETGWLPLHVVARDENETVVGVVPLYLKSHSRGEFVFDQSWAEAYYSYGLEYYPKLQSCVPFTPVTGQRILVRDTPYRDQVFEALVKELKSLTTKLKVSSLHITFPSEGEFSKLKDSEFLQRIGMQYHWRNRDYRSFDEFLMDLKQPKRKNIRQERKKIPAQNLKMKRLRGDEIKDYFLCAFSWGRPYLTREFFHRLGEKMGDKVMLIVAEHDDKHVAGALNLIGGDTLFGRLWGCLPDAYFPNLHFEACYYQNIHTTQAIEAAIELNLSKVEAGAQGEHKIQRGYLPVTTYSCHYFLDPGFGAAIGNYLVHETAQVRSCHRRKERARKKLSECHIDISAKIPTKKDIRYCLIMLFVQGYKDWFFLPPLINQRPRRTKLQCRKLSQTRKSFASCSLPLHLDCTGCFIRQAHHRLRKQPFDHLCSSSPRHRMAYTSRMNLKRKGK

SEQ ID NO: 1798 - DNA, 2523 bp, Mangifera indica
  CDS (1)..(2523)
atgatggctactgcttcttcggagttgtcaataaagtcttcaaacgagactagtaagagtcctatggaagaggataaagatttgaacctcgaaacggcgctgtacaaagagctctggcatgcatgcgcgggtcctttagtcaccgtgcctcgtcaaggcgagcgcgtgtactactttcctcaaggccacatagagcaggtcgaagcgtcaaccaatcaattcgctgaccagcaaatgccaatttatgatcttcgttcaaagatactttgtcgcgtgattaacgtgcaattaaaggctaaaccggacactgacgaggtttttgcgcaaatcactttacttcctgagccaaaccaagatgagaacgctgtagagaaagaaccacctcctccactgctgccaagatttcatgtgcattcattttgtaagacgctaaccgcgtcagacacgagtactcatggtgggttttcggttcttagacgacatgctgaagaatgtcttccagaattggacatgtcacagcagccccctacacaggacttggttgcaaaggatttgcatggaaatgagtggcggttccggcatatctttaggggtcaaccacgtagacacttgctacaaagtggatggagtgtttttgttagctcaaaaaggctagtagcgggggatgcatttatatttctgaggtgtgagaaggaactccgtgttggcgtgagacgcgcaatgaggcaacagggtaatgttccgtcctctgtcatatccagtcacagcatgcatcttggtgtccttgccactgcatggcatgcagtctccactggaaccatgtttacagtttactacaagcctaggataagcccggcagaattcattgttccctttgatcagtacatggaatctgttaaaagcaattattcaattggaatgggattcgaaatgagatttgaaggcgaggaagctcctgagcagaggtatactggcaccattgttggaattgaagatgctgacccccaaaggtggccagattccaaatggagatgccttaaggtgagatgggatgagacatctactgtacctaggcctgagagagtttctccttggaagatagagcctgcattggctcctcttgccctcaatccgcttccattgtctaggcccaagaggccgagatcaaacatggttccctcttcacctgactcttctgttctgacaagggaaggttcatttaaagtaaatgtagacccttcatcagctactggattttcaagggtcttgcaaggtcaagaattctcgaccttgcgaggcaattttgctgagagagatagcaacgagtttgatactgcagaaaagtctgttgtccggccgtcttcacttgatgataagaagattgatgtggtttttgcttcaagaagatatgggtttgagaactgtgtgccagcagggaggagtgaaccgatgtgtacagatttgctgtcaggccttgggacgaattctgattctgtccatgggtatagtccatccattgatcagtctttagcatcggctgttccagtgaggaaaagcttgctgagtcaagagggcaagtttaacatgcttggtagtccatggtctttgatgccctctagtctttcacttaagatgccagaaactaatgcaaaggttcaagttcaaggtggtgatataaattatctagtacaaggcaatgctagatatggtgggctcagcgactatcccactcttcagagtcatagagttgggccatctaatggaaactggtttatgcctcctttagtctcatctcattttgaaaatttagttccttcgagagagttgatggagaaacctatatcagtacaacaccacgaggctggtaaaaccaaagactgcaaactctttggtattcccctcgtcagtagtagttgtgtcacaccagaaccaattttattgcatcaaaactcaatgaatgagccagttggccatatgaatcaccaacttggtgtgcttgaatctgatcccaagtctgaacaatctaaaagcccaacattggcaaatgatagtaattgtgttagtgagcagggcaaaccatcacagacttgtcagcctcatgtaaaggatgttcatagcaagcctcagagtgggtcttcaaggagttgtactaaggttcacaagcagggaattgcacttggtaggtctgtggacctttctaagtttaataactatgaggagttgattgctgaattagatcggttgtttgaatttggtggtgaactaatgactccaaaaaagaactggctcattatatatactgatgatgagggtgacattatgcttgttggagatgatccgtggaaggaattttgtggcatggtccgcaaaatttttatctatacaagagaggaggtccagaagatgaaaccaggatcctcgctctcaaagggtgacgagaatttgtccattggggaaggtacagaagcaaaagaagtgaaacatcagtcggtcccttcagcatgtaatgatgaaaattgttag

SEQ ID NO: 1799 - protein, 840 aa, Mangifera indica
MMATASSELSIKSSNETSKSPMEEDKDLNLETALYKELWHACAGPLVTVPRQGERVYYFPQGHIEQVEASTNQFADQQMPIYDLRSKILCRVINVQLKAKPDTDEVFAQITLLPEPNQDENAVEKEPPPPLLPRFHVHSFCKTLTASDTSTHGGFSVLRRHAEECLPELDMSQQPPTQDLVAKDLHGNEWRFRHIFRGQPRRHLLQSGWSVFVSSKRLVAGDAFIFLRCEKELRVGVRRAMRQQGNVPSSVISSHSMHLGVLATAWHAVSTGTMFTVYYKPRISPAEFIVPFDQYMESVKSNYSIGMGFEMRFEGEEAPEQRYTGTIVGIEDADPQRWPDSKWRCLKVRWDETSTVPRPERVSPWKIEPALAPLALNPLPLSRPKRPRSNMVPSSPDSSVLTREGSFKVNVDPSSATGFSRVLQGQEFSTLRGNFAERDSNEFDTAEKSVVRPSSLDDKKIDVVFASRRYGFENCVPAGRSEPMCTDLLSGLGTNSDSVHGYSPSIDQSLASAVPVRKSLLSQEGKFNMLGSPWSLMPSSLSLKMPETNAKVQVQGGDINYLVQGNARYGGLSDYPTLQSHRVGPSNGNWFMPPLVSSHFENLVPSRELMEKPISVQHHEAGKTKDCKLFGIPLVSSSCVTPEPILLHQNSMNEPVGHMNHQLGVLESDPKSEQSKSPTLANDSNCVSEQGKPSQTCQPHVKDVHSKPQSGSSRSCTKVHKQGIALGRSVDLSKFNNYEELIAELDRLFEFGGELMTPKKNWLIIYTDDEGDIMLVGDDPWKEFCGMVRKIFIYTREEVQKMKPGSSLSKGDENLSIGEGTEAKEVKHQSVPSACNDENC

SEQ ID NO: 1800 - DNA, 2511 bp, Oryza sativa
  CDS (1)..(2511)
atggcgacggcggaggtcggcggcggcggcggaggaggaggaggaggaggggaggacgcgctgttcacggagctgtggagcgcgtgcgcggggccgctggtgacggtgccgagggttggggagaaggtgttctacttcccgcaggggcacatcgagcaggtggaggcctcgaccaaccaggtaggcgagcagcggatgcagttgtacaatctcccatggaagatcctgtgtgaggttatgaacgttgagctgaaggccgagccagacaccgacgaggtttatgctcagctcactctgcttcctgaatcgaagcaacaagaagataacggctctactgaggaggaggtgccttctgctccagcagctgggcatgttaggccacgggtgcactcattctgcaagacattgaccgcctcggacacgagcacacatggcggcttctcggtgctgcgacgccacgcggacgaatgcctcccaccactggatatgagccgtcagcctccaacacaagagctggtggccaaggatctgcacggtgtggaatggcgctttcgtcacatattcagaggtcaaccacgaagacaccttttgcagagtggctggagtgtgttcgttagtgccaaacggcttgttgctggggatgcctttatctttctcagaggtgagaacggggaactgcgtgttggagtcaggcgtgcaatgaggcagcaaactaatgttccatcttcagtgatatcaagccacagcatgcatcttggggttcttgccacagcatggcatgctgttaacacagggaccatgttcactgtctactacaagcctaggacaagtccagccgagtttgtggtcccttacgatcgctatatggaatcactgaaacaaaattactccattgggatgagatttaagatgaggtttgaaggtgaagaggctccagagcaaagattcactgggactattgtcggaatgggggattctgatccagctggctggcctgaatcaaaatggcgctcccttaaggtgagatgggatgaagcttcttccatacctcgccctgaaagagtttctccctggcaaatagaacctgctgtaagccctcctcctgtcaacccactaccagttccaagaaccaagaggcttcgtccgaatgctaccgctttgccggctgactcttccgctatagcaaaagaagctgctacgaaagttgtggtcgagtctgaaccaaatggtacgcaaaggaccttccagacacaagagaatgcaaccccaaaaagtggtttcggcaatagcagcgagttagaaagtgctcagaaatcaatcatgcgtccatctggatttgatcgtgagaaaaataacactcccatacagtggaagctaggttcagatggtcggatgcagatgagcaagcctgagagttacagtgagatgctatctggatttcagccacctaaagatgtacaaatcccacagggtttctggtctttacctgagcagattactgcaggccattctaacttctggcacacagtaaatgctcagtatcaagatcaacagagcaatcacaatatgttccccagctcatggtccttcatgcctccaaatactcgccttggattaaacaaacaaaactattcaatgattcaggaagctggtgtgttgtctcaaaggcctggaaatacaaagtttgggaatggagtttatgctgcactgccaggccgaggtactgagcaatactcagggggttggtttggccatatgatgccaaattcccacatggatgatacacagccacgcctgatcaagcctaaacctctggttgttgcccatggtgatgttcagaaagctaaaggtgcttcatgcaaactatttggaattcaccttgacagcccagcgaaatctgaacctttgaaatctccatcaagtgttgtatatgatgggacgccacaaacaccaggtgctactgaatggcgccgaccagatgtaactgaagtagagaaatgttctgatccttctaaggccatgaagccacttgatactccgcaaccagactctgttcccgagaagccttcttctcagcaagcttcacgaaacatgtcgtgcaaatcacaaggtgtatcaactagaagctgcaagaaggtccacaagcaaggcattgcacttggcaggtctgtggaccttacaaagtttaatggctatgaagagttgattgctgagctggatgacatgtttgatttcaatggtgaactgaagggtcctaagaaggagtggatggttgtctacactgacaacgaaggtgacatgatgctagttggggatgatccctggattgaattctgcgacatggttcacaagatcttcatctacacaagagaagaggttcagcggatgaatccgggaaccctgaactcaagatcagaagatagtcatgctaattcaatggaaaggggctcagtcggcagagaaatgcgaggctgcttgtcaacctcgtctcttaattctgagaactgctaa

SEQ ID NO: 1801 - protein, 836 aa, Oryza sativa
MATAEVGGGGGGGGGGGEDALFTELWSACAGPLVTVPRVGEKVFYFPQGHIEQVEASTNQVGEQRMQLYNLPWKILCEVMNVELKAEPDTDEVYAQLTLLPESKQQEDNGSTEEEVPSAPAAGHVRPRVHSFCKTLTASDTSTHGGFSVLRRHADECLPPLDMSRQPPTQELVAKDLHGVEWRFRHIFRGQPRRHLLQSGWSVFVSAKRLVAGDAFIFLRGENGELRVGVRRAMRQQTNVPSSVISSHSMHLGVLATAWHAVNTGTMFTVYYKPRTSPAEFVVPYDRYMESLKQNYSIGMRFKMRFEGEEAPEQRFTGTIVGMGDSDPAGWPESKWRSLKVRWDEASSIPRPERVSPWQIEPAVSPPPVNPLPVPRTKRLRPNATALPADSSAIAKEAATKVVVESEPNGTQRTFQTQENATPKSGFGNSSELESAQKSIMRPSGFDREKNNTPIQWKLGSDGRMQMSKPESYSEMLSGFQPPKDVQIPQGFWSLPEQITAGHSNFWHTVNAQYQDQQSNHNMFPSSWSFMPPNTRLGLNKQNYSMIQEAGVLSQRPGNTKFGNGVYAALPGRGTEQYSGGWFGHMMPNSHMDDTQPRLIKPKPLVVAHGDVQKAKGASCKLFGIHLDSPAKSEPLKSPSSVVYDGTPQTPGATEWRRPDVTEVEKCSDPSKAMKPLDTPQPDSVPEKPSSQQASRNMSCKSQGVSTRSCKKVHKQGIALGRSVDLTKFNGYEELIAELDDMFDFNGELKGPKKEWMVVYTDNEGDMMLVGDDPWIEFCDMVHKIFIYTREEVQRMNPGTLNSRSEDSHANSMERGSVGREMRGCLSTSSLNSENC

SEQ ID NO: 1802 - DNA, 2865 bp, Prunus persica
  CDS (1)..(2865)
atgataatgggctcagttgaggagaagattaaagcagggggcttgcttagtggtgcacaatcaagcatacttgatgagatgaagctattgaaagagcttcaggatcattctgggtcccggaaggctataaattcagagttatggcatgcctgcgccggcccacttgtttgtttgcctcaggtgggaagtctttcatattacttccctcaaggacacagcgaacaggtggcggtttccacgaaaagaacggcaacctcacagattcccaactatccgaatctcccatctcagttgctatgtcaagttcaaaatgttacactgcatgcagacaaagaaaccgatgaaatctacgcacagatgagtcttaaaccagtgaactctgaaaaggatgtcttcccggtaccagactttggactaaagcctagcaaacatccaagtgaatttttctgcaaaactttaactgcaagtgatacaagcacacatgggggcttctctgtgccgcgcagagcagcagaaaagctcttccctccactagatttcacaatgcaaccaccaagccaagaacttgttgtccgagacttgcatgataatagctggacatttcgccatatttatcgcgggcagccgaagcggcaccttctcacaactggatggagtttgtttgttggtgcaaagaggcttagagcgggtgattcggtgctgtttatcagggatgagaagtcacagctaatgattggtgtgagacgagcaaatcgtcagcaaacaacattgccgtcatcagttctatctgctgatagcatgcacattggtgtccttgctgctgcagctcatgctgcagccaatcgaagtccattcactatattctacaatccaagggcatgcccttcagaatttgtcatacctttggctacataccaaaaggccatatatgggacccagctctcagttggaatgaggtttggaatgatgttcgagacagaagagtcgggtaagcgcaggtatatgggtacaatagtcagtactagtgatttagatccactgagatggcctggttcaaagtggcggaatcttcaggtagagtgggatgagccagggtgttgtgataaacagaacagggttagttcatgggaaattgagactcctgaaaatattttcatatttccttctctgacttcgagtcttaaacggccatcacacactggattcttgggagcagaaactgagtggggaaatttgattaaaagaccatttatccgtgttcctgagattggaaatgggaactcatttccgtactcgatttcaaatctatgttcggaacagctagtcaatatgctactgaaacctcaacttgttaatcatgctggaactttagctgctctacaacagcaatcacctgctaatggagatctaatagcagatatgaaggccatgcaggcaaaactcatccaaaagaatccgggtgtcttttcagaaggtacatctctacagagtcaaaaccctccccaatcatctctggatcaatctgctacaatagacgtgaatacaacatctcatgcaattctaccaggaaagctgaacaacctaacaaagtttggaagtcaagcaccagttggaaatagcactgacaagacaaaattagaaactgatttttctgccgatcagttaagccagttgaattctacaggactgggaattgaagataaattggctgcagggtttgttagtccctataaccttgtgaaccagctgacatttgccaaccaaaaccaaagtgcagcgcaactacaaactagcccacggcctatgcagccgcctttggaatcattactttaccactcccaacaaactgatatgcctaattcagatttcaatagcacaaatggttcgcttccattcctagacaatgatgaatgcatattttaccagtcttatcaaccctttgccgggacacttagatcacaggggcctttgtctgtgtttggtttgcaagattcttcagctgttttaactgaagcaaataattcctccctaacttcaattggtcaggaaatgtgggataatagcctgaataattgtaggcttttaccccaagtggatcagctcacttcatcccatcaaggtcctggtagccttaattgtatttctaactcaagcagtctcagagatttgtcagatgagagcaacaatcaaagtgggatttatggttgtccaaacgttgatgttggtagtggtgtaagcgctgttattgacccttctgtttcaagcaccatactggatgagttttctacattaaagaatgcagatttccacaacccctcagattgcttgcttggtaacttgagctcgagccaggatcttcagtctcagattacctctgcaagcctaggagactcccaggctttctccaggcaagacctggcagacaactcaggcggtacatcctcaagcaatatagatcttgatgagagcagtctactgcagaacaacggttcatggcatcaagtggttccacctgtgcgaacctatacaaaagtacaaaagacgggatctgttggaaggtcaattgatgttactagtttcaaaaactatgaagaactatgttctgcaattgaatgcatgtttggactggaagggctgctaaatgacccaagaggttcagggtggaaattggtttatgtggattatgagaatgacgttctacttgttggggatgatccttgggaggaattcgttggttgtgttcgctgtatcaggatcctttcacctacagaagttcagcagatgagcgaggagggaataaagcttctgaatagtgctgcaatgcaagggattaatggcaccatgtccgaaggtggccgtacttaa

SEQ ID NO: 1803 - protein, 954 aa, Prunus persica
MIMGSVEEKIKAGGLLSGAQSSILDEMKLLKELQDHSGSRKAINSELWHACAGPLVCLPQVGSLSYYFPQGHSEQVAVSTKRTATSQIPNYPNLPSQLLCQVQNVTLHADKETDEIYAQMSLKPVNSEKDVFPVPDFGLKPSKHPSEFFCKTLTASDTSTHGGFSVPRRAAEKLFPPLDFTMQPPSQELVVRDLHDNSWTFRHIYRGQPKRHLLTTGWSLFVGAKRLRAGDSVLFIRDEKSQLMIGVRRANRQQTTLPSSVLSADSMHIGVLAAAAHAAANRSPFTIFYNPRACPSEFVIPLATYQKAIYGTQLSVGMRFGMMFETEESGKRRYMGTIVSTSDLDPLRWPGSKWRNLQVEWDEPGCCDKQNRVSSWEIETPENIFIFPSLTSSLKRPSHTGFLGAETEWGNLIKRPFIRVPEIGNGNSFPYSISNLCSEQLVNMLLKPQLVNHAGTLAALQQQSPANGDLIADMKAMQAKLIQKNPGVFSEGTSLQSQNPPQSSLDQSATIDVNTTSHAILPGKLNNLTKFGSQAPVGNSTDKTKLETDFSADQLSQLNSTGLGIEDKLAAGFVSPYNLVNQLTFANQNQSAAQLQTSPRPMQPPLESLLYHSQQTDMPNSDFNSTNGSLPFLDNDECIFYQSYQPFAGTLRSQGPLSVFGLQDSSAVLTEANNSSLTSIGQEMWDNSLNNCRLLPQVDQLTSSHQGPGSLNCISNSSSLRDLSDESNNQSGIYGCPNVDVGSGVSAVIDPSVSSTILDEFSTLKNADFHNPSDCLLGNLSSSQDLQSQITSASLGDSQAFSRQDLADNSGGTSSSNIDLDESSLLQNNGSWHQVVPPVRTYTKVQKTGSVGRSIDVTSFKNYEELCSAIECMFGLEGLLNDPRGSGWKLVYVDYENDVLLVGDDPWEEFVGCVRCIRILSPTEVQQMSEEGIKLLNSAAMQGINGTMSEGGRT

SEQ ID NO: 1804 - DNA, 2868 bp, Oryza sativa
  CDS (1)..(2868)
atggcgtcctcgcaggagaaggccaagacgggtgttctgagaaatgccgcagcgctgctcgacgaaatgcagctcatgggagaaacacagggtgccaagaaggtgatcaactcggagctctggcacgcttgtgccgggccgcttgtgtgcttgccgcagcgggggagcctcgtgtactacttccctcaggggcacagtgaacaggttgcagcgacaactagaaagattccaaattcccgcattccgaactacccaaacctgccatctcagttgctgtgtcaagttcacaacatcaccttgcatgccgacaaggacactgatgaagtttatgcacagatgacccttcagccagtaaactctgaaacggatgtattccctattccaactcttggtgcttataccaaaagcaagcaccccactgaatatttctgcaagaatttaaccgcaagtgatacgagtacacatggtggtttctcggtgccacgaagggctgcagagaagttgttcccacaactggattactcaatgcaacctcctaaccaggagcttattgttcgagatttgcatgataacatgtggacattccgtcacatttatcgtggacagccaaaacgacatcttctaacaactggatggagtctctttgttggggcaaagcgtctaaaagcaggggactctgtcttatttataagggatgagaagtcacaacttcttttgggtgttaggcgagccacgcgacaacaaacaatgttgtcatcttctgttctatctactgatagcatgcacattggcgttcttgctgctgcagctcatgccgcatcaagtggtagttcatttactatctactacaatcctaggacaagtccttcgccatttgtaattcctgtagcaaggtacaacaaggcaacatatatgcaaccatcagttggaatgagatttgcgatgatgtttgagacagaggagtcaagcaagcgcagatacacaggtacagttgtgggaataagtgactacgaccccatgagatggcccaattctaaatggcgcaacttacaggtcgaatgggatgaacatgggtatggagaaagacctgagcgtgtgagcatatgggatattgaaactccagaaaacactcttgtgttcccttcgtcgaccttgaattcaaagcggcaatgtcttcctggttatggagtttcagtgcctgggatggaaattggatcagcaaatatgtcatcatttccaagggctcagggtaatccctatggcagtttgcagcacattccagctgttggatcagaattggctatcatgcttctcaaccaatctggtcaaacccttgggagtccccttagttttcaccagtcctcatattctagtattatccaaaatgtgaagcaaaattatatccctcctctaacagttagcacttcagcttgtttgacaaagcaagaaagcctgccttcagatgatgcccagcaccagttccatatggcaaatatgcagaatggtgatcttgaaggctctgaagtccagcctgtcattgattcgatttctgagtcaaagttgaatgctacatcaagagatccaagaaacacagattcatacacaagtcgaagtacttcggagcaaaacagtaagggtgagcctagaggcaagactcgtaggagtaagaagggcttgcctcacaaaaccgtttcagagaaatctgacctttcttcagccccttcttggatctgtgacaatcagcaggttggtttagaatcgaaactggttggttgtgatgaacaagtaaactgtggaaatattgaagattcatcaggtgcacttactcaaggtaattttgttggacagccgcatggccatcaggttgaacaaaagggagtgctgtcgccaccaaaggtagaatcatcaaaatcacctgatggaggaaagtctgtcaattcgtttccaaaccaagggtgtttttcgcagttcattgatggtcttgattggatgactcagccttcctactaccaagactccaatgtaattcaaccagccggtgtgtcagagaacattttcagttcttctgcagatatacctccctcaatgattgctgatactatggagacttttcaggcttcatgtctttctgattgccttcctaattccatacaagaattcatctccagcccagatctgaattcactaacctttctttcacctgacatgcaaaatttggaggtccaactccagcatgatggaagcaatttgccaagcacgtccaactcgtttgtacagatgagtttttctgaagagagtgcaagtcagagtgcaaacttaagtggacttcacatggaatctacacacagaagcataaacaccacttcatgctctcaaccaatgtctactgggggctttgatgcagggatgtactcaaagttgccacgtttaaaagaatcccaaatcttgtctttgccagagattcataccaattccatgggaacatcagcttgcagtatggatgcaaccgagtacagccttgaccgaagtgcgaagccgatgaaaccaccagtgcggacatatacaaaggttcaaaagcaaggatcagttggaagatctatcgatgttacagggtttagaaattaccatgagttgagatctgccatcgcttgcatgtttggtctccaggggaaattggagcatcctggcagttcagagtggaagcttgtatatgtcgactacgaaaatgatgttcttcttgtcggagatgatccatgggaggaattcatcaactgtgtccggtgcatccggattttgtcaccttcagaagtacaacagatgagcgagaatggcatgcatgttttgaacgactgtattcaagcagcttag

SEQ ID NO: 1805 - protein, 955 aa, Oryza sativa
MASSQEKAKTGVLRNAAALLDEMQLMGETQGAKKVINSELWHACAGPLVCLPQRGSLVYYFPQGHSEQVAATTRKIPNSRIPNYPNLPSQLLCQVHNITLHADKDTDEVYAQMTLQPVNSETDVFPIPTLGAYTKSKHPTEYFCKNLTASDTSTHGGFSVPRRAAEKLFPQLDYSMQPPNQELIVRDLHDNMWTFRHIYRGQPKRHLLTTGWSLFVGAKRLKAGDSVLFIRDEKSQLLLGVRRATRQQTMLSSSVLSTDSMHIGVLAAAAHAASSGSSFTIYYNPRTSPSPFVIPVARYNKATYMQPSVGMRFAMMFETEESSKRRYTGTVVGISDYDPMRWPNSKWRNLQVEWDEHGYGERPERVSIWDIETPENTLVFPSSTLNSKRQCLPGYGVSVPGMEIGSANMSSFPRAQGNPYGSLQHIPAVGSELAIMLLNQSGQTLGSPLSFHQSSYSSIIQNVKQNYIPPLTVSTSACLTKQESLPSDDAQHQFHMANMQNGDLEGSEVQPVIDSISESKLNATSRDPRNTDSYTSRSTSEQNSKGEPRGKTRRSKKGLPHKTVSEKSDLSSAPSWICDNQQVGLESKLVGCDEQVNCGNIEDSSGALTQGNFVGQPHGHQVEQKGVLSPPKVESSKSPDGGKSVNSFPNQGCFSQFIDGLDWMTQPSYYQDSNVIQPAGVSENIFSSSADIPPSMIADTMETFQASCLSDCLPNSIQEFISSPDLNSLTFLSPDMQNLEVQLQHDGSNLPSTSNSFVQMSFSEESASQSANLSGLHMESTHRSINTTSCSQPMSTGGFDAGMYSKLPRLKESQILSLPEIHTNSMGTSACSMDATEYSLDRSAKPMKPPVRTYTKVQKQGSVGRSIDVTGFRNYHELRSAIACMFGLQGKLEHPGSSEWKLVYVDYENDVLLVGDDPWEEFINCVRCIRILSPSEVQQMSENGMHVLNDCIQAA

SEQ ID NO: 1806 - DNA, 2574 bp, Oryza sativa subsp
  CDS (1)..(2574)
atggcgacggcggaggtcggcggcggcggcggtgagggggatgctgctgccgcggcggtggcgcgagcaggcggcggcggcggcggaggaggaggaggggaggacgcgctgttcacggagctgtggagcgcgtgcgcggggccgctggtgacggtgccgagggttggggagaaggagttctacttcccgcaggggcacatcgagcaggtggaggcctcgaccaaccaggtaggcgagcagcggatgcagttgtacaatctcccatggaagatcctgtgtgaggttatgaacgttgagctgaaggccgagccagacaccgacgaggtttatgctcagctcactctgcttcctgaattgaagcgacaagaagataacggctctactgaggaggaggtgccttctgctccagcagctgggcatgttaggccacgggtgcactcattctgcaagacattgaccgcctcggacacgagcacacatggcggcttctcggtgctgcgacgccacgcggacgaatgcctcccaccactggatatgagccgtcagcctccaacacaagagctggtggccaaggatctgcacggtgtggaatggcgctttcgtcacatattcagaggtcaaccacgaagacaccttttgcagagtggctggagtgtgtttgttagtgccaaacggcttgttgctggggatgcctttatctttctcagaggtgagaacggggaactgcgtgttggagtcaggcgtgcaatgaggcagcaaactaatgttccatcttcagtgatatcaagccacagcatgcatcttggggttcttgccacagcatggcatgctgttaacacagggaccatgttcactgtctactacaagcctaggacaagtccagccgagtttgtggtcccttacgatcgctatatggaatcactgaaacgaaattactccattgggatgagatttaagatgaggtttgaaagtgaagaggctccagagcaaagattcactgggactattgtcggaatgggggattctgatccagctggctggcctgaatcaaaatggcgctcccttaaggtgagatgggatgaagcttcttccatacctcgccctgaaagagtttctccctggcaaatagaacctgctgtaagccctcctcctgtcaacccactaccagttccaagaaccaagaggcttcgtccgaatgctaccgctttgccggctgactcttctgctatagcaaaagaagctgctacgaaagttgtggtcgagtctgaaccaaatggtacgcaaaggaccttccagacacaagagaatgcaaccccaaaaagtggtttcggcaatagcagcgagttagaaagtgctcagaaatcaatcatgcgtccatctggatttgatcgtgagaaaaataacactcccatacagtggaagctaggttcagatggtcggatgcagatgagcaagcctgagagttacagtgagatgctatctggatttcagccacctaaagatgtacaaaccccacagggtttctgttctttacctgagcagattactgcaggccattctaacttctggcacacagtaaatgctcagtatcaagatcaacagagcaatcacaatatgttccccagctcatggtccttcatgcctccaaatactcgccttggattaaacaaacagaactattcaatgattcaggaagctggtgtgttgtctcaaaggcctggaaatacaaagtttgggaatggagtttatgctgcactgccaggccgaggtactgagcaatactcagggggttggtttggccttatgatgccaaattcccacatggatgatacacagccacgcctgatcaagcctaaacctctggttgttgcccatggtgatgttcagaaagctaaaggtgcttcatgcaaactatttggaattcaccttgacagcccagcgaaatctgaaccttcgaaatctccatcaagtgttgtatatgatgggacgccacaaacaccaggtgctactgaatggcgccgaccagatgtaactgaagtagagaaatgttctgatccttctaaggccatgaagccacttgatactccgcaaccagactctgttcctgagaagccttcttctcagcaagcttcttctcagcaagcttcacgaaacatgtcgtgcaaatcacaaggtgtatcaactagaagctgcaagaaggtccacaagcaaggcattgcacttggcaggtctgtggaccttacaaagtttaatggctatgaagagttgattgctgagttggatgacatgtttgatttcaacggtgaactgaagggtcctaagaaggagtggatggttgtctacactgacaacgaaggtgacatgatgctagttggggatgatccctggattgaattctgcgacatggttcacaagatcttcatctacacaagagaagaggtccagcggatgaatccgggaaccctgaacttaagatcagaagatagtcatgctaattcaatggaaaggggctcagtcggcagagaaatgcgaggctgcttgtcaacctcgtctcttaattctgagaactgctaa

SEQ ID NO: 1807 - protein, 857 aa, Oryza sativa subsp
MATAEVGGGGGEGDAAAAAVARAGGGGGGGGGGEDALFTELWSACAGPLVTVPRVGEKEFYFPQGHIEQVEASTNQVGEQRMQLYNLPWKILCEVMNVELKAEPDTDEVYAQLTLLPELKRQEDNGSTEEEVPSAPAAGHVRPRVHSFCKTLTASDTSTHGGFSVLRRHADECLPPLDMSRQPPTQELVAKDLHGVEWRFRHIFRGQPRRHLLQSGWSVFVSAKRLVAGDAFIFLRGENGELRVGVRRAMRQQTNVPSSVISSHSMHLGVLATAWHAVNTGTMFTVYYKPRTSPAEFVVPYDRYMESLKRNYSIGMRFKMRFESEEAPEQRFTGTIVGMGDSDPAGWPESKWRSLKVRWDEASSIPRPERVSPWQIEPAVSPPPVNPLPVPRTKRLRPNATALPADSSAIAKEAATKVVVESEPNGTQRTFQTQENATPKSGFGNSSELESAQKSIMRPSGFDREKNNTPIQWKLGSDGRMQMSKPESYSEMLSGFQPPKDVQTPQGFCSLPEQITAGHSNFWHTVNAQYQDQQSNHNMFPSSWSFMPPNTRLGLNKQNYSMIQEAGVLSQRPGNTKFGNGVYAALPGRGTEQYSGGWFGLMMPNSHMDDTQPRLIKPKPLVVAHGDVQKAKGASCKLFGIHLDSPAKSEPSKSPSSVVYDGTPQTPGATEWRRPDVTEVEKCSDPSKAMKPLDTPQPDSVPEKPSSQQASSQQASRNMSCKSQGVSTRSCKKVHKQGIALGRSVDLTKFNGYEELIAELDDMFDFNGELKGPKKEWMVVYTDNEGDMMLVGDDPWIEFCDMVHKIFIYTREEVQRMNPGTLNLRSEDSHANSMERGSVGREMRGCLSTSSLNSENC

SEQ ID NO: 1808 - DNA, 1998 bp, Arabidopsis thaliana
  CDS (1)..(1998)
atggcagcttccaatcattcatctggtaaacctggaggagttttaagtgatgctttatgtagggagctctggcatgcctgtgctggacctcttgtaaccctacctcgtgaaggggaacgagtttattatttccctgaaggccacatggagcagctcgaggcatcaatgcaccaaggtttggagcaacagatgccttccttcaacctcccatctaagatcctctgtaaagttatcaacatccagcgcagggcagagcccgagactgacgaagtatatgcgcaaataaccttattgccagaactggatcaaagcgaacccactagcccagatgcccctgttcaagaacctgaaaagtgcaccgtacattcattttgcaagacactaactgcttcagacacaagcacacatggtggcttctcggtgctacggagacatgcagatgattgtctcccacccttggatatgtcccaacaaccaccgtggcaagaattggttgcaactgatttgcacaatagtgaatggcattttaggcacattttccgaggccaaccaaggcgtcatttgctaacaactggatggagtgtttttgttagctcgaagaaactagtggctggtgatgctttcatattcttaaggggtgagaatgaagagctccgagtaggtgttaggcggcacatgagacaacagactaatatcccgtcatctgtcatttcaagtcatagcatgcatattggggtccttgcaacagcagctcatgccattacaacaggaacaatcttttctgtcttctacaagccaaggacaagtaggtcagagtttattgtgagcgtcaataggtatctcgaagctaagacccagaagctgtctgtaggcatgcgtttcaagatgagattcgagggggaagaagctcccgagaaaaggttcagtggcacaatagttggtgttcaggaaaataagtcttcggtctggcatgattctgaatggagatcgctaaaggttcaatgggacgaaccctcatctgtatttcgtcctgaaagagtttcaccttgggaacttgagcccctagttgcaaatagtactccgtcttcacaacctcagcctccgcaaaggaacaaacgaccaagacctcctggtttaccttcaccagccactggtccatctggtcctgttactccagatggtgtgtggaaatccccggcagacactccttcctcagtgccattattctctcctcctgccaaagctgctacgtttggtcatggtgggaacaaatcatttggagtatctattggatcagccttttggcccaccaatgcagatagtgcagctgaatcctttgcttcagcgtttaacaatgaatctactgaaaagaaacaaactaatggaaatgtctgtaggctttttgggtttgagctagttgaaaatgttaatgtggatgaatgtttctctgctgcctctgtgtctggtgctgtcgctgtagatcaacctgtcccatccaacgagtttgactctggccagcaatctgagccattaaacatcaaccaatctgatattccttcggggagtggtgaccctgagaaatcctctttgaggtctcctcaagaatcacaaagtagacagatacgtagctgcacaaaggtgcacatgcaaggcagtgcagtaggcagagctattgatttgacaaggtcagagtgttatgaagatctgttcaagaagctggaagagatgtttgatatcaagggtgaactcttagaatctaccaaaaaatggcaagtcgtttacaccgatgatgaagatgacatgatgatggttggtgatgatccatggaatgagttctgtggaatggtgaggaagatattcatctacacacctgaggaagtgaagaaactttcaccgaagaacaaactcgcagtcaatgcaaggatgcagctcaaagctgatgcagaggaaaatgggaatacagagggcagatcatcatctatggcgggatcaagatga

SEQ ID NO: 1809 - protein, 665 aa, Arabidopsis thaliana
MAASNHSSGKPGGVLSDALCRELWHACAGPLVTLPREGERVYYFPEGHMEQLEASMHQGLEQQMPSFNLPSKILCKVINIQRRAEPETDEVYAQITLLPELDQSEPTSPDAPVQEPEKCTVHSFCKTLTASDTSTHGGFSVLRRHADDCLPPLDMSQQPPWQELVATDLHNSEWHFRHIFRGQPRRHLLTTGWSVFVSSKKLVAGDAFIFLRGENEELRVGVRRHMRQQTNIPSSVISSHSMHIGVLATAAHAITTGTIFSVFYKPRTSRSEFIVSVNRYLEAKTQKLSVGMRFKMRFEGEEAPEKRFSGTIVGVQENKSSVWHDSEWRSLKVQWDEPSSVFRPERVSPWELEPLVANSTPSSQPQPPQRNKRPRPPGLPSPATGPSGPVTPDGVWKSPADTPSSVPLFSPPAKAATFGHGGNKSFGVSIGSAFWPTNADSAAESFASAFNNESTEKKQTNGNVCRLFGFELVENVNVDECFSAASVSGAVAVDQPVPSNEFDSGQQSEPLNINQSDIPSGSGDPEKSSLRSPQESQSRQIRSCTKVHMQGSAVGRAIDLTRSECYEDLFKKLEEMFDIKGELLESTKKWQVVYTDDEDDMMMVGDDPWNEFCGMVRKIFIYTPEEVKKLSPKNKLAVNARMQLKADAEENGNTEGRSSSMAGSR

SEQ ID NO: 1810 - DNA, 2580 bp, Arabidopsis thaliana
  CDS (1)..(2580)
atggcgagttcggaggtttcaatgaaaggtaatcgtggaggagataacttctcctcctctggttttagtgaccctaaggagactagaaatgtctccgtcgccggcgaggggcaaaaaagtaattctacccgatccgctgcggctgagcgtgctttggaccctgaggctgctctttacagagagctatggcacgcttgtgctggtccgcttgtgacggttcctagacaagacgaccgagtcttctattttcctcaaggacacatcgagcaggtggaggcttcgacgaaccaggcggcagaacaacagatgcctctctatgatcttccgtcaaagcttctctgtcgagttattaatgtagatttaaaggcagaggcagatacagatgaagtttatgcgcagattactcttcttcctgaggctaatcaagacgagaatgcaattgagaaagaagcgcctcttcctccacctccgaggttccaggtgcattcgttctgcaaaaccttgactgcatccgacacaagtacacatggtggattttctgttcttaggcgacatgcggatgaatgtctcccacctctggatatgtctcgacagcctcccactcaagagttagttgcaaaggatttgcatgcaaatgagtggcgattcagacatatattccggggtcaaccacggaggcatttgctacagagtgggtggagtgtgtttgttagctccaaaaggctagttgcaggcgatgcgtttatatttctaaggggcgagaatggagaattaagagttggtgtaaggcgtgcgatgcgacaacaaggaaacgtgccgtcttctgttatatctagccatagcatgcatcttggagtactggccaccgcatggcatgccatttcaacagggactatgtttacagtctactacaaacccaggacgagcccatctgagtttattgttccgttcgatcagtatatggagtctgttaagaataactactctattggcatgagattcaaaatgagatttgaaggcgaagaggctcctgagcagaggtttactggcacaatcgttgggattgaagagtctgatcctactaggtggccaaaatcaaagtggagatccctcaaggtgagatgggatgagacttctagtattcctcgacctgatagagtatctccgtggaaagtagagccagctcttgctcctcctgctttgagtcctgttccaatgcctaggcctaagaggcccagatcaaatatagcaccttcatctcctgactcttcgatgcttaccagagaaggtacaactaaggcaaacatggaccctttaccagcaagcggactttcaagggtcttgcaaggtcaagaatactcgaccttgaggacgaaacatactgagagtgtagagtgtgatgctcctgagaattctgttgtctggcaatcttcagcggatgatgataaggttgacgtggtttcgggttctagaagatatggatctgagaactggatgtcctcagccaggcatgaacctacttacacagatttgctctccggctttgggactaacatagatccatcccatggtcagcggatacctttttatgaccattcatcatcaccttctatgcctgcaaagagaatcttgagtgattcagaaggcaagttcgattatcttgctaaccagtggcagatgatacactctggtctctccctgaagttacatgaatctcctaaggtacctgcagcaactgatgcgtctctccaagggcgatgcaatgttaaatacagcgaatatcctgttcttaatggtctatcgactgagaatgctggtggtaactggccaatacgtccacgtgctttgaattattatgaggaagtggtcaatgctcaagcgcaagctcaggctagggagcaagtaacaaaacaacccttcacgatacaagaggagacagcaaagtcaagagaagggaactgcaggctctttggcattcctctgaccaacaacatgaatgggacagactcaaccatgtctcagagaaacaacttgaatgatgctgcggggcttacacagatagcatcaccaaaggttcaggacctttcagatcagtcaaaagggtcaaaatcaacaaacgatcatcgtgaacagggaagaccattccagactaataatcctcatccgaaggatgctcaaacgaaaaccaactcaagtaggagttgcacaaaggttcacaagcagggaattgcacttggccgttcagtggatctttcaaagttccaaaactatgaggagttagtcgctgagctggacaggctgtttgagttcaatggagagttgatggctcctaagaaagattggttgatagtttacacagatgaagagaatgatatgatgcttgttggtgacgatccttggcaggagttttgttgcatggttcgcaaaatcttcatatacacgaaagaggaagtgaggaagatgaacccggggactttaagctgtaggagcgaggaagaagcagttgttggggaaggatcagatgcaaaggacgccaagtctgcatcaaatccttcattgtccagcgctgggaactcttaa

SEQ ID NO: 1811 - protein, 859 aa, Arabidopsis thaliana
MASSEVSMKGNRGGDNFSSSGFSDPKETRNVSVAGEGQKSNSTRSAAAERALDPEAALYRELWHACAGPLVTVPRQDDRVFYFPQGHIEQVEASTNQAAEQQMPLYDLPSKLLCRVINVDLKAEADTDEVYAQITLLPEANQDENAIEKEAPLPPPPRFQVHSFCKTLTASDTSTHGGFSVLRRHADECLPPLDMSRQPPTQELVAKDLHANEWRFRHIFRGQPRRHLLQSGWSVFVSSKRLVAGDAFIFLRGENGELRVGVRRAMRQQGNVPSSVISSHSMHLGVLATAWHAISTGTMFTVYYKPRTSPSEFIVPFDQYMESVKNNYSIGMRFKMRFEGEEAPEQRFTGTIVGIEESDPTRWPKSKWRSLKVRWDETSSIPRPDRVSPWKVEPALAPPALSPVPMPRPKRPRSNIAPSSPDSSMLTREGTTKANMDPLPASGLSRVLQGQEYSTLRTKHTESVECDAPENSVVWQSSADDDKVDVVSGSRRYGSENWMSSARHEPTYTDLLSGFGTNIDPSHGQRIPFYDHSSSPSMPAKRILSDSEGKFDYLANQWQMIHSGLSLKLHESPKVPAATDASLQGRCNVKYSEYPVLNGLSTENAGGNWPIRPRALNYYEEVVNAQAQAQAREQVTKQPFTIQEETAKSREGNCRLFGIPLTNNMNGTDSTMSQRNNLNDAAGLTQIASPKVQDLSDQSKGSKSTNDHREQGRPFQTNNPHPKDAQTKTNSSRSCTKVHKQGIALGRSVDLSKFQNYEELVAELDRLFEFNGELMAPKKDWLIVYTDEENDMMLVGDDPWQEFCCMVRKIFIYTKEEVRKMNPGTLSCRSEEEAVVGEGSDAKDAKSASNPSLSSAGNS

SEQ ID NO: 1812 - DNA, 1827 bp, Arabidopsis thaliana
  CDS (1)..(1827)
atgggtggtttaatcgatctgaacgtgatggagacggaggaagacgaaacgcaaacgcaaacaccgtcttcagcttctgggtctgtctctcctacttcgtcttcttcagcttctgtgtctgtggtgtcttcgaattctgctggtggaggggtttgtttggagctgtggcatgcttgtgctggaccccttatctctctaccaaaaagaggaagccttgtgttgtatttccctcagggacatttggaacaagcccccgatttctccgccgcgatttacgggctccctcctcacgtgttctgtcgtattctcgatgttaagcttcacgcagagacgactacagatgaagtttatgctcaagtctctcttcttcctgagtcagaggacattgagaggaaggtgcgtgaaggaattatagatgttgatggtggagaggaagattatgaagtgcttaagaggtctaatactcctcacatgttttgcaaaacccttactgcttctgatacaagcacccatggtggtttctctgttcctcgccgagctgctgaggattgcttccctcctctggactatagccagccccggccttctcaggagcttcttgctagggatcttcatggcctggagtggcgatttcgccacatttatcgagggcaacctaggaggcatttgctcactaccgggtggagtgcgtttgtgaacaagaagaagcttgtctctggtgatgctgtgcttttccttagaggagatgatggcaaactgcgactgggagttagaagagcttctcaaatcgaaggcaccgctgctctctcggctcaatataatcagaatatgaaccacaacaatttctctgaagtagctcatgccatatcgacccatagcgttttcagcatttcctacaaccccaaggcaagctggtcaaacttcataatccctgcaccaaagttcttgaaggttgttgactatcccttttgcattgggatgagatttaaagcgagggttgaatctgaagatgcatctgagagaagatcccctgggattataagtggtatcagcgacttggatccaatcaggtggcctggttcaaaatggagatgccttttggtaaggtgggacgacattgtggcaaatgggcatcaacagcgtgtctcgccatgggagatcgaaccatctggttccatctccaattcaggcagcttcgtaacaactggtcccaagagaagcaggattggcttttcctcaggaaagcctgatatccctgtctctgaggggattcgcgccacagactttgaggaatcattgagattccagagggtcttgcaaggtcaagaaatttttccgggttttatcaacacttgttcggatggtggagccggtgccaggagaggccgcttcaaaggaacagaatttggtgactcttatggtttccataaggtcttgcaaggtcaagaaacagttcccgcctactcaataaccgatcatcggcagcagcacgggttgagccagaggaacatttggtgtgggccgttccagaactttagtacacgtatcctccccccatctgtatcatcatcaccctcttccgtcttgcttaccaactcgaacagtcctaacggacgtctggaagaccatcacggaggttcaggcagatgcaggctgtttggtttcccattaaccgacgaaaccacagcagttgcatctgcgacggctgtcccctgcgttgaagggaattccatgaaaggtgcgtcagctgttcaaagcaatcatcatcattcgcaaggaagggacatctatgcaatgagagacatgttgctagacattgctctctag

SEQ ID NO: 1813 - protein, 608 aa, Arabidopsis thaliana
MGGLIDLNVMETEEDETQTQTPSSASGSVSPTSSSSASVSVVSSNSAGGGVCLELWHACAGPLISLPKRGSLVLYFPQGHLEQAPDFSAAIYGLPPHVFCRILDVKLHAETTTDEVYAQVSLLPESEDIERKVREGIIDVDGGEEDYEVLKRSNTPHMFCKTLTASDTSTHGGFSVPRRAAEDCFPPLDYSQPRPSQELLARDLHGLEWRFRHIYRGQPRRHLLTTGWSAFVNKKKLVSGDAVLFLRGDDGKLRLGVRRASQIEGTAALSAQYNQNMNHNNFSEVAHAISTHSVFSISYNPKASWSNFIIPAPKFLKVVDYPFCIGMRFKARVESEDASERRSPGIISGISDLDPIRWPGSKWRCLLVRWDDIVANGHQQRVSPWEIEPSGSISNSGSFVTTGPKRSRIGFSSGKPDIPVSEGIRATDFEESLRFQRVLQGQEIFPGFINTCSDGGAGARRGRFKGTEFGDSYGFHKVLQGQETVPAYSITDHRQQHGLSQRNIWCGPFQNFSTRILPPSVSSSPSSVLLTNSNSPNGRLEDHHGGSGRCRLFGFPLTDETTAVASATAVPCVEGNSMKGASAVQSNHHHSQGRDIYAMRDMLLDIAL

SEQ ID NO: 1814 - DNA, 2367 bp, Arabidopsis thaliana
  CDS (1)..(2367)
atggaatttgacttgaatactgagattgcggaggtggaagaggaggagaatgatgatgtaggagtaggagtaggaggaggaacaagaattgacaagggtaggcttggaatttcaccatcttcttcttcttcatgctcttccggatcatcatcgtcatcatcttctacaggctctgcatcttccatttactctgagctttggcatgcttgtgctggtcctctcacttgtcttcccaagaaaggcaatgtagttgtctatttccctcaaggtcatttggagcaagatgctatggtttcatattcgtctcctcttgaaatccccaaatttgaccttaatccccaaatcgtctgcagggtggttaatgtccagttgcttgctaataaggacaccgatgaggtctacactcaagtcactctgcttccacttcaagagttttcgatgctaaatggggaggggaaagaggtcaaggagttaggaggggaggaagagaggaacggaagctcatccgtcaagcggacacctcatatgttctgtaaaaccttaacagcgtctgacacaagcacacatggaggcttctctgtacctagaagagccgctgaagattgttttgctcctcttgactacaaacaacagaggccatctcaagagctcattgcaaaggacctccatggagtagagtggaagtttcgccatatctatagaggtcaaccaaggaggcatctactcaccactggttggagtatctttgtcagtcaaaaaaatctcgtctctggtgatgcggttctctttctgagagacgaaggaggagagctgagattaggaatcagaagagcagcacggccaagaaatggacttcctgactcaatcattgagaagaattcatgttcaaacattctgtctcttgtggctaatgctgtatctacaaaaagcatgtttcatgtgttctacagtccacgagcgacgcatgcagagtttgtgattccttatgagaagtatatcacaagcatcaggagtcctgtttgcataggcacaagatttagaatgcgatttgaaatggacgattctcctgagagaagatgcgctggtgtagtgactggagtctgtgacttggacccgtataggtggccaaactctaaatggaggtgcttgttggtgcgatgggatgagtcttttgtgagtgatcatcaagaaagagtttcaccttgggagattgatccctcggtttctctcccacacttgagcattcagtcatctccaaggcctaaaaggccatgggcaggtttactggatactaccccacccggaaaccccataacaaaaaggggtggttttttggactttgaggagtcggttagaccctctaaggtcttgcaaggtcaagaaaatataggttctgcatcaccctcacaggggtttgatgttatgaaccgccggatactggattttgcgatgcagtctcatgcaaatccagttcttgtgtcgagtagagtcaaggatcgatttggtgagtttgtagatgctactggcgtgaacccagcttgttcaggtgttatggacctggataggtttccaagggtcttgcaaggtcaagaaatttgctcgcttaaatcattcccgcaatttgctggtttcagtccagctgctgctcctaatccctttgcttaccaagccaacaagtcaagttactatccgctagctttgcatgggattaggagcactcatgttccgtatcagaatccatacaatgcgggaaaccaatcctcgggtcccccttcacgtgcaataaactttggtgaagagactagaaagtttgatgcacaaaatgaaggtggcctaccaaataatgttacagctgatttgccattcaagattgatatgatgggaaaacagaaaggcagtgagttgaatatgaatgcttcatcaggatgtaaacttttcggattctccttaccagtggagacacctgcatctaagccgcaaagctcgagcaaaagaatctgtacaaaggtccacaagcaaggaagccaagtggggagagctattgatttgtcgcgacttaacgggtatgatgatctccttatggagcttgaacggctgttcaacatggaagggcttctcagggatcctgaaaaaggatggaggatcttatatactgatagtgagaacgatatgatggtcgttggcgatgatccatggcatgatttctgcaatgtggtgtggaagatacacttatacacgaaagaggaagtggagaatgcgaatgacgataacaagagttgtttagagcaagctgctctcatgatggaagcatcaaagtcatcttctgtgagccagcctgattcttctcctacaatcactagggtttga

SEQ ID NO: 1815 - protein, 788 aa, Arabidopsis thaliana
MEFDLNTEIAEVEEEENDDVGVGVGGGTRIDKGRLGISPSSSSSCSSGSSSSSSSTGSASSIYSELWHACAGPLTCLPKKGNVVVYFPQGHLEQDAMVSYSSPLEIPKFDLNPQIVCRVVNVQLLANKDTDEVYTQVTLLPLQEFSMLNGEGKEVKELGGEEERNGSSSVKRTPHMFCKTLTASDTSTHGGFSVPRRAAEDCFAPLDYKQQRPSQELIAKDLHGVEWKFRHIYRGQPRRHLLTTGWSIFVSQKNLVSGDAVLFLRDEGGELRLGIRRAARPRNGLPDSIIEKNSCSNILSLVANAVSTKSMFHVFYSPRATHAEFVIPYEKYITSIRSPVCIGTRFRMRFEMDDSPERRCAGVVTGVCDLDPYRWPNSKWRCLLVRWDESFVSDHQERVSPWEIDPSVSLPHLSIQSSPRPKRPWAGLLDTTPPGNPITKRGGFLDFEESVRPSKVLQGQENIGSASPSQGFDVMNRRILDFAMQSHANPVLVSSRVKDRFGEFVDATGVNPACSGVMDLDRFPRVLQGQEICSLKSFPQFAGFSPAAAPNPFAYQANKSSYYPLALHGIRSTHVPYQNPYNAGNQSSGPPSRAINFGEETRKFDAQNEGGLPNNVTADLPFKIDMMGKQKGSELNMNASSGCKLFGFSLPVETPASKPQSSSKRICTKVHKQGSQVGRAIDLSRLNGYDDLLMELERLFNMEGLLRDPEKGWRILYTDSENDMMVVGDDPWHDFCNVVWKIHLYTKEEVENANDDNKSCLEQAALMMEASKSSSVSQPDSSPTITRV

SEQ ID NO: 1816 - DNA, 2709 bp, Arabidopsis thaliana
  CDS (1)..(2709)
atgatggcttcattgtcttgtgttgaagacaagatgaaaacaagttgtttggttaatggtggaggaactataacaacaacaacatctcaatctaccttgcttgaagagatgaagctgttgaaagaccagtcaggtacaagaaagccggtaataaactcggagctatggcacgcttgtgcaggccctttggtgtgtctccctcaagttgggagcttagtgtattacttctcacaaggtcatagcgagcaggttgctgtttcaaccagaagatcagcaacaacacaagttcctaattatccgaaccttccatctcagttgatgtgtcaagtccataatgttactcttcatgctgacaaagacagtgacgaaatctatgctcagatgagtcttcaacctgttcactctgagagagatgtgttccctgtaccagactttggaatgctgagaggaagtaagcacccgactgagtttttctgcaaaacacttactgcaagtgacacaagcacacatggaggtttctcagtgccacgtagagctgcagagaagctatttccaccattggattactcagcacagccgccaacgcaagagcttgtagttcgagatcttcatgagaatacttggacatttcgccatatctaccgagggcaaccaaagagacatctcctaactacaggatggagtttgttcgttggatcgaagagattgagagctggggattctgttttgttcatcagggatgagaagtcacaacttatggtcggtgttaggcgtgccaatcgccaacaaacagcacttccttcatcagttctctcagcggatagtatgcacatcggtgttcttgctgctgctgctcacgcaaccgccaaccgtactccttttttgatattctataatccaagagcttgtccagcagagttcgtgatccctctagctaagtaccgtaaggcgatatgcgggtctcagctctcagttggtatgagatttggaatgatgtttgaaactgaagattccgggaaacgaaggtacatgggaactattgttggaatcagcgatttggatccgttgagatggcctggttctaagtggcgtaaccttcaggtagaatgggatgagcctggatgtaatgataaacctactcgggtcagtccatgggatatcgaaacacctgaaagtctcttcatttttccttctctgacctcaggactcaaacgtcagctccatccatcttactttgctggtgaaactgaatggggtagcttgataaaacggccacttatacgtgttcctgattccgcgaatgggattatgccatatgcatctttccctagtatggcttcggagcagcttatgaaaatgatgatgaggcctcacaacaaccaaaatgtaccatctttcatgtctgagatgcagcagaatattgtaatggggaatggaggtttgctaggagatatgaagatgcagcaacccctgatgatgaaccagaaatctgagatggtgcagccacaaaacaagctaacagtgaacccatctgcttctaatacgagtggccaagaacagaatctttcacagagtatgagtgctcctgctaaacctgagaactctacactctctggttgcagctctggtagagtccaacatggacttgagcagtcaatggaacaggcaagccaggttactacatccacagtgtgtaatgaggaaaaggttaatcagctacttcagaaaccgggtgcttcgtcgcctgtacaagctgatcaatgtcttgacattactcatcagatttaccaaccacagtctgatccaataaatggattctctttcctggaaactgatgagctgacatcacaagtctcttccttccagtctcttgccggatcatacaagcaaccattcattctatcctcccaggattcttcagctgttgtgttaccggattccacaaactcaccgctgtttcatgatgtgtgggacactcagttgaacggtctcaagtttgaccagttcagtcccttgatgcagcaggacctttatgctagtcagaatatctgtatgagtaatagcacaaccagtaacattctagatcctccactctcaaacacagtccttgatgacttctgtgccatcaaagacactgatttccagaaccacccttctggttgtttggttggaaacaacaacactagctttgctcaagatgtccagtcgcagatcacatcagctagctttgcagactcacaggccttctctcgccaagattttccagataattctggaggcactggtacatcttcaagcaatgttgattttgatgattgtagtctgcggcaaaatagtaaaggctcatcatggcagaaaattgcgacaccccgcgtccgaacctacactaaggttcaaaaaaccgggtcagtcgggagatcaattgatgtcacaagctttaaagactacgaggagctaaaatctgctatcgaatgcatgtttggattggaaggactactaactcacccacaaagctcgggttggaagcttgtatatgttgattatgagagtgatgttctgcttgtaggagatgatccatgggaagagtttgtgggatgcgtaaggtgcataaggatattgtcgccaactgaggtccagcagatgagtgaagaagggatgaagcttttgaacagcgcaggcattaacgatcttaagacttctgtttcataa

SEQ ID NO: 1817 - protein, 902 aa, Arabidopsis thaliana
MMASLSCVEDKMKTSCLVNGGGTITTTTSQSTLLEEMKLLKDQSGTRKPVINSELWHACAGPLVCLPQVGSLVYYFSQGHSEQVAVSTRRSATTQVPNYPNLPSQLMCQVHNVTLHADKDSDEIYAQMSLQPVHSERDVFPVPDFGMLRGSKHPTEFFCKTLTASDTSTHGGFSVPRRAAEKLFPPLDYSAQPPTQELVVRDLHENTWTFRHIYRGQPKRHLLTTGWSLFVGSKRLRAGDSVLFIRDEKSQLMVGVRRANRQQTALPSSVLSADSMHIGVLAAAAHATANRTPFLIFYNPRACPAEFVIPLAKYRKAICGSQLSVGMRFGMMFETEDSGKRRYMGTIVGISDLDPLRWPGSKWRNLQVEWDEPGCNDKPTRVSPWDIETPESLFIFPSLTSGLKRQLHPSYFAGETEWGSLIKRPLIRVPDSANGIMPYASFPSMASEQLMKMMMRPHNNQNVPSFMSEMQQNIVMGNGGLLGDMKMQQPLMMNQKSEMVQPQNKLTVNPSASNTSGQEQNLSQSMSAPAKPENSTLSGCSSGRVQHGLEQSMEQASQVTTSTVCNEEKVNQLLQKPGASSPVQADQCLDITHQIYQPQSDPINGFSFLETDELTSQVSSFQSLAGSYKQPFILSSQDSSAVVLPDSTNSPLFHDVWDTQLNGLKFDQFSPLMQQDLYASQNICMSNSTTSNILDPPLSNTVLDDFCAIKDTDFQNHPSGCLVGNNNTSFAQDVQSQITSASFADSQAFSRQDFPDNSGGTGTSSSNVDFDDCSLRQNSKGSSWQKIATPRVRTYTKVQKTGSVGRSIDVTSFKDYEELKSAIECMFGLEGLLTHPQSSGWKLVYVDYESDVLLVGDDPWEEFVGCVRCIRILSPTEVQQMSEEGMKLLNSAGINDLKTSVS

SEQ ID NO: 1818 - DNA, 2802 bp, Arabidopsis thaliana
  CDS (1)..(2802)
atgagattatcttcagctgggtttaatcctcaacctcatgaaggagagaaaagagttcttaattctgagctctggcatgcttgtgctggtcctcttgtctcactacctcctgttggaagcagagttgtgtattttcctcaaggtcacagtgaacaggttgctgcttcgaccaacaaagaagtagatgctcatataccaaattatccgagcttgcatccgcagcttatctgtcagcttcataatgttacaatgcatgctgatgtggagactgatgaagtctatgcacagatgactttgcaaccgttgaatgcgcaagagcaaaaagatccttaccttcccgcggaattaggtgtcccaagtagacagcctacaaactatttctgtaaaactctgactgctagtgatacaagcactcacggaggtttttctgtacctcgccgagctgctgagaaagttttccctcccttggattactcgcagcagccaccagctcaagagttaatggcgagggatctgcatgataatgaatggaagttcaggcatattttccgaggccaaccaaagagacatctccttaccacgggttggagcgtatttgtgagtgctaaaaggcttgttgctggtgactctgttcttttcatctggaacgataagaatcaattacttcttggtataagacgagccaaccgaccacaaactgtcatgccttcatctgttttgtcaagtgacagtatgcatttaggccttcttgctgcagcagctcatgctgccgctacaaacagccgattcaccatcttctataacccgagggcgagtccatcagagtttgttatacccctggctaagtatgtgaaagcggtttatcacactcgcgtctctgttggtatgcggtttaggatgctgtttgaaactgaagaatctagtgttcgtcggtacatgggtacaataactggcatttgtgatctagatcctactcgttgggctaattcgcattggcgatctgtcaaggttgggtgggacgaatctactgcaggagagagacagccaagggtttcattgtgggagattgagcctttaacaacattccctatgtatccatctccttttcctctcaggcttaaacggccgtggcctcctggtctcccatctttccatggccttaaagaagatgatatgggtatgagtatgagttcaccgcttatgtgggatcgaggactccaatctctaaactttcaaggtatgggagtaaacccgtggatgcagccgagacttgatacgtcgggcttgcttggtatgcaaaatgatgtgtaccaagcaatggctgcagctgcccttcaagacatgagaggcattgatcctgcaaaagctgctgcttcacttcttcagttccaaaattcgccggggttctcaatgcaatctccgtccttagtgcagccgcagatgctgcagcagcaactctctcagcagcagcaacaactctctcagcagcagcagcagcagcaacagctctcccaacagcagcagcaacagctctctcaacagcagcagcagcagctctctcaacagcagcagcaacaactctctcagcagcagcagcaacaggcgtatcttggcgttcctgaaacccaccagcctcagtctcaggctcaatcacagtcaaacaatcatctttctcagcagcagcagcaagtagtggataatcataatccgtctgcgtccagtgctgctgttgtttccgctatgtctcaatttggttctgcttctcagcccaacacgtcaccactccagtccatgacctctctgtgtcatcagcaaagcttctccgataccaacggaggaaacaatcctatttctccacttcacactcttctcagtaacttctctcaagacgaatcttctcaactgctccacctcactagaacaaactctgcaatgacttcatccggttggccatcaaagcgtcctgcagttgattcatcgttccagcactctggagccggtaataataacactcaatccgtattggagcaactgggacagtcccacacaagcaacgttcctccaaacgctgtctcgttgcctccatttcccggtggtagagagtgctcgatcgagcaagaaggaagcgcctcagacccgcatagccatcttctctttggagtcaatatagattcatcttctcttttgatgccgaacggaatgtcaaaccttagaagcattggtattgaaggtggtgactccacgactttacccttcacatcatctaatttcaacaatgatttctcgggtaatcttgcaatgacaacaccttctagttgcatagatgaatcgggttttctacaatcctcagaaaacctcggttccgagaacccacaatctaacacctttgtgaaggtgtacaagtcagggtcttttggaagatcgttagatatatcaaagtttagcagctaccacgagctgcgaagcgagcttgctcgcatgtttggcctcgaaggccaattagaagaccctgtgagatcaggctggcagcttgtatttgttgaccgagagaacgacgttcttctcctcggcgatgacccttggccggagtttgtgagcagcgtgtggtgcattaagatactgtcaccacaagaagtgcaacaaatgggaaaaagaggccttgagcttctcaactccgcgccatcttccaacaatgtcgataagctcccgagcaacgggaactgtgacgactttgggaaccggtcagacccgaggaatctcggtaacggtatcgcatcagttgggggttcattcaactactag

SEQ ID NO: 1819 - protein, 933 aa, Arabidopsis thaliana
MRLSSAGFNPQPHEGEKRVLNSELWHACAGPLVSLPPVGSRVVYFPQGHSEQVAASTNKEVDAHIPNYPSLHPQLICQLHNVTMHADVETDEVYAQMTLQPLNAQEQKDPYLPAELGVPSRQPTNYFCKTLTASDTSTHGGFSVPRRAAEKVFPPLDYSQQPPAQELMARDLHDNEWKFRHIFRGQPKRHLLTTGWSVFVSAKRLVAGDSVLFIWNDKNQLLLGIRRANRPQTVMPSSVLSSDSMHLGLLAAAAHAAATNSRFTIFYNPRASPSEFVIPLAKYVKAVYHTRVSVGMRFRMLFETEESSVRRYMGTITGICDLDPTRWANSHWRSVKVGWDESTAGERQPRVSLWEIEPLTTFPMYPSPFPLRLKRPWPPGLPSFHGLKEDDMGMSMSSPLMWDRGLQSLNFQGMGVNPWMQPRLDTSGLLGMQNDVYQAMAAAALQDMRGIDPAKAAASLLQFQNSPGFSMQSPSLVQPQMLQQQLSQQQQQLSQQQQQQQQLSQQQQQQLSQQQQQQLSQQQQQQLSQQQQQQAYLGVPETHQPQSQAQSQSNNHLSQQQQQVVDNHNPSASSAAVVSAMSQFGSASQPNTSPLQSMTSLCHQQSFSDTNGGNNPISPLHTLLSNFSQDESSQLLHLTRTNSAMTSSGWPSKRPAVDSSFQHSGAGNNNTQSVLEQLGQSHTSNVPPNAVSLPPFPGGRECSIEQEGSASDPHSHLLFGVNIDSSSLLMPNGMSNLRSIGIEGGDSTTLPFTSSNFNNDFSGNLAMTTPSSCIDESGFLQSSENLGSENPQSNTFVKVYKSGSFGRSLDISKFSSYHELRSELARMFGLEGQLEDPVRSGWQLVFVDRENDVLLLGDDPWPEFVSSVWCIKILSPQEVQQMGKRGLELLNSAPSSNNVDKLPSNGNCDDFGNRSDPRNLGNGIASVGGSFNY

SEQ ID NO: 1820 - DNA, 3495 bp, Arabidopsis thaliana
  CDS (1)..(3495)
atgaaagctccttcatcaaatggagtttctcctaatcctgttgaaggagaaaggagaaatataaactcagagctatggcacgcttgtgctgggccattgatttcgttgcctccagcaggaagtcttgttgtttacttccctcaaggtcacagtgagcaagtcgcggcttcaatgcagaagcagactgatttcataccaagttacccgaatcttccttccaagctcatatgcatgctccacaatgttacactgaatgctgatcctgagacggatgaggtctatgcgcagatgactcttcagccagtaaacaaatatgacagagatgcattgcttgcttctgacatgggtcttaagctaaacagacaacctaatgaatttttctgcaaaaccctcacggcgagtgacacaagtactcacggtggattttctgtaccccgacgagctgctgagaaaatctttcctgctctggatttctcgatgcaaccaccttgtcaggagcttgttgctaaggatattcatgacaacacatggactttcagacatatttatcgaggtcaaccaaaaaggcacttgctaactacaggctggagtgtgtttgtcagcacgaaaaggctctttgctggagactctgttctttttataagagatggaaaggcgcaacttctgttggggataagacgtgcaaatagacaacagcctgcactttcttcatctgtaatatcaagtgatagcatgcacatcggagttcttgcagctgcagctcatgctaatgctaataacagtcctttcaccattttctacaacccgagggctgctcctgctgagtttgtggttcctttagccaagtataccaaagcgatgtacgctcaagtttccctcggtatgcggtttagaatgatatttgagactgaagaatgtggagttcgtcggtatatgggtacagttaccggtatcagtgatcttgatccagtgagatggaaaaactctcagtggcggaatcttcagattggatgggatgagtcagctgctggtgataggcccagtcgagtttcagtttgggacattgaaccggttttaactcctttctacatatgtcctcctccatttttccgacctcgcttttctggacaacctggaatgccagatgatgagactgacatggagtctgcactgaagagagcaatgccatggcttgataatagcttagagatgaaagacccttcgagtactatctttcctggtctgagtttagttcagtggatgaatatgcagcagcagaacggccagctaccctctgctgctgcacagccaggtttcttcccatcaatgctttcgccaaccgcggcgctgcacaacaatcttggcggcactgatgatccctccaagttactgagctttcagacgccgcacggggggatttcctcctcaaatctccaatttaacaaacagaatcagcaagccccaatgtctcagttgcctcagccaccaactacgttgtcccaacaacagcagctgcagcaattgttgcactcctctttgaaccatcaacaacagcaatcgcagtctcaacaacagcaacaacaacaacagttgctgcagcagcaacaacaattgcagtctcaacaacacagcaacaacaatcaatcgcagtctcagcaacaacaacaattgctccagcagcaacaacaacaacaactgcagcagcaacatcaacaaccgttacagcaacagactcagcagcagcagctaagaacacagccattgcaatctcactcgcatccacagccacaacagttacaacaacataagttgcagcaacttcaggttccacagaatcagctttacaatggtcaacaagcagcgcagcagcatcagtcgcaacaagcatctacacatcatttgcaaccacaattagtttcgggatcaatggcaagcagtgtcatcacgcctccgtccagctcccttaatcaaagctttcaacagcaacaacaacagtctaagcaacttcaacaagcacatcaccatttaggtgctagcactagccagagtagtgtaattgaaaccagcaagtcttcatccaatctgatgtccgcaccgccgcaagagacacagttttcacgacaagtagaacagcagcagcctcctggtctcaacgggcagaatcagcaaacacttttgcagcagaaagctcaccaggcacaggcccaacagatattccagcagagtctcttggaacagccgcatatacagtttcagctgttacagagattacaacagcaacagcagcagcaatttctttcgccgcagtctcagctaccacaccatcaattgcaaagccagcagttgcaacagctgcctactctctctcaaggtcatcagtttccgtcatcttgcactaacaatggcttatcgacgttgcaaccacctcaaatgctggtgagccgacctcaggaaaaacaaaacccaccggttgggggaggggtcaaagcttattcaggcatcacagatggaggagatgcaccttcctcttcaacgtcgccttccaccaacaactgtcagatctcttcttcaggctttctcaacagaagccaaagcgggccagcgatcttgatacctgatgcagcgattgatatgtctggtaatcttgttcaggatctttacagcaaatccgatatgcggctaaaacaagaactcgtgggtcagcaaaagtccaaagctagtttaacagatcatcaactagaagcatctgcctctggaacttcttacggtttagatggaggcgaaaacaacagacaacaaaatttcttggctccaacttttggccttgacggtgattccaggaacagcttgctcggtggagctaatgttgataatggctttgtgcctgacacgctactctcgaggggatatgactcccagaaagatcttcagaacatgctttcaaactatggaggagtgacaaatgacattggtacagagatgtctacttcagctgtaagaactcaatcttttggtgtccccaatgtgcccgccatttcgaacgatctagctgtcaacgatgctggagttcttggtggtggattgtggccagctcagactcagcgaatgcgaacttatacaaaggtgcaaaaacgaggctcagtggggagatcaatagacgtcaaccgttacagaggttacgatgagctgaggcatgatctagcgcgcatgtttgggatcgaaggacagctcgaagatcctcaaacatctgactggaaacttgtttatgtcgatcatgaaaatgacatcctcctcgtcggcgatgatccatgggaagaattcgtaaactgtgttcagagcattaagatcctttcatcagctgaggttcagcagatgagcttagacgggaactttgccggtgtaccagttactaatcaagcttgtagtggcggtgacagtggcaatgcttggagaggtcattatgatgataactcagccacttcgtttaaccggtga

SEQ ID NO: 1821 - protein, 1164 aa, Arabidopsis thaliana
MKAPSSNGVSPNPVEGERRNINSELWHACAGPLISLPPAGSLVVYFPQGHSEQVAASMQKQTDFIPSYPNLPSKLICMLHNVTLNADPETDEVYAQMTLQPVNKYDRDALLASDMGLKLNRQPNEFFCKTLTASDTSTHGGFSVPRRAAEKIFPALDFSMQPPCQELVAKDIHDNTWTFRHIYRGQPKRHLLTTGWSVFVSTKRLFAGDSVLFIRDGKAQLLLGIRRANRQQPALSSSVISSDSMHIGVLAAAAHANANNSPFTIFYNPRAAPAEFVVPLAKYTKAMYAQVSLGMRFRMIFETEECGVRRYMGTVTGISDLDPVRWKNSQWRNLQIGWDESAAGDRPSRVSVWDIEPVLTPFYICPPPFFRPRFSGQPGMPDDETDMESALKRAMPWLDNSLEMKDPSSTIFPGLSLVQWMNMQQQNGQLPSAAAQPGFFPSMLSPTAALHNNLGGTDDPSKLLSFQTPHGGISSSNLQFNKQNQQAPMSQLPQPPTTLSQQQQLQQLLHSSLNHQQQQSQSQQQQQQQQLLQQQQQLQSQQHSNNNQSQSQQQQQLLQQQQQQQLQQQHQQPLQQQTQQQQLRTQPLQSHSHPQPQQLQQHKLQQLQVPQNQLYNGQQAAQQHQSQQASTHHLQPQLVSGSMASSVITPPSSSLNQSFQQQQQQSKQLQQAHHHLGASTSQSSVIETSKSSSNLMSAPPQETQFSRQVEQQQPPGLNGQNQQTLLQQKAHQAQAQQIFQQSLLEQPHIQFQLLQRLQQQQQQQFLSPQSQLPHHQLQSQQLQQLPTLSQGHQFPSSCTNNGLSTLQPPQMLVSRPQEKQNPPVGGGVKAYSGITDGGDAPSSSTSPSTNNCQISSSGFLNRSQSGPAILIPDAAIDMSGNLVQDLYSKSDMRLKQELVGQQKSKASLTDHQLEASASGTSYGLDGGENNRQQNFLAPTFGLDGDSRNSLLGGANVDNGFVPDTLLSRGYDSQKDLQNMLSNYGGVTNDIGTEMSTSAVRTQSFGVPNVPAISNDLAVNDAGVLGGGLWPAQTQRMRTYTKVQKRGSVGRSIDVNRYRGYDELRHDLARMFGIEGQLEDPQTSDWKLVYVDHENDILLVGDDPWEEFVNCVQSIKILSSAEVQQMSLDGNFAGVPVTNQACSGGDSGNAWRGHYDDNSATSFNR

SEQ ID NO: 1822 - DNA, 2436 bp, Arabidopsis thaliana
  CDS (1)..(2436)
atgaagctgtcaacatctggattgggtcaacagggtcatgaaggagagaagtgtctgaattctgagctatggcatgcttgtgctggaccattagtctctcttccatcatctggtagtcgagttgtttactttccacagggtcacagtgaacaggtagctgctacaactaataaggaagttgatggtcacatacccaattacccaagcctaccaccacaattgatatgccagctccataatgttacaatgcatgcagatgttgagacggatgaagtctatgctcaaatgacacttcaaccattgacaccggaggagcagaaggaaacatttgtaccgattgagttggggataccgagtaagcaacctagtaattatttttgtaagactctcacagctagtgataccagtacacatggagggttttctgttcctagacgtgctgctgagaaagtgtttcctccattggattacacactgcagccaccagctcaagaactgattgcaagggatctccatgatgttgaatggaagtttaggcatatctttcggggacagcccaaacggcatctcctaactactggatggagtgtctttgtcagtgccaagcgactagtagctggagattctgtcattttcatcaggaatgaaaagaatcaactctttttgggaattcgtcatgccactcggccgcagactattgtaccatcatctgttttatctagtgatagcatgcatattggactccttgctgctgctgcacatgcttctgcaactaatagctgtttcactgttttctttcatccaagggctagccaatctgagtttgtgatacaactttccaagtacattaaagccgtttttcacacgcgtatttcagttgggatgcgctttcgcatgctcttcgagacagaagagtcgagtgtccgcaggtacatgggtactataactggtattagtgatctagattctgttcgttggccaaactctcattggcgatctgtgaaggttggttgggatgaatcgactgcaggggagagacagccaagggtttctttatgggagattgagcctctgactacctttcctatgtatccatctctttttcctctcagactaaaacgtccatggcatgctggcacatcatctttgcctgatggaaggggtgatttgggaagtggtctaacatggctaagagggggaggtggagagcagcaaggtttgcttcctctaaattatccatctgttggtttgtttccatggatgcaacaaaggctggatctcagtcaaatggggactgataataatcagcaataccaagcaatgttagctgctgggttgcagaacatcggcggtggagatcctttaagacagcagtttgtacagctgcaagagcctcaccaccaatatcttcaacaatcagcttcccataattctgatttgatgcttcagcagcaacagcagcaacaagcgtcacgccatctcatgcatgctcaaacacagattatgagtgagaatcttccgcagcagaatatgcgacaagaagttagtaaccaaccagctggacagcagcaacagctacagcaaccggaccaaaatgcatatcttaatgctttcaaaatgcaaaatggccatcttcaacagtggcagcagcaatcagagatgccatctccctcgttcatgaagtcagattttactgactcaagcaacaaatttgcaacaactgctagtccggcttctggagatggcaatcttttgaatttttctataaccggtcagtctgtactccctgagcagttaacaacagagggctggtctccaaaagcatccaacactttttctgaaccgttgtcacttccacaagcctatcctgggaagagtcttgctctagaacccggaaatccgcagaatccctctcttttcggtgttgatcccgactctggactcttcctccccagtacggttccccgctttgcttcttcatcaggagatgctgaagcttcccctatgtcactaacagattcaggatttcagaattccttatatagctgcatgcaagacacaactcatgagttattgcatggagctggacagattaactcgtccaaccaaaccaagaactttgtaaaggtttataaatctggttcggttgggcgttcattagacatctcccgattcagcagctaccacgagctgcgagaagagttagggaagatgtttgctatcgaagggttgttggaagacccccttagatcaggctggcagcttgtattcgttgacaaggaaaatgatattcttctccttggtgatgacccatgggagtcatttgtgaataacgtttggtacataaagatactatcaccagaagatgtgcatcaaatgggagatcatggagaaggcagtggtgggttattcccgcaaaacccgacccatctctag

SEQ ID NO: 1823 - protein, 811 aa, Arabidopsis thaliana
MKLSTSGLGQQGHEGEKCLNSELWHACAGPLVSLPSSGSRVVYFPQGHSEQVAATTNKEVDGHIPNYPSLPPQLICQLHNVTMHADVETDEVYAQMTLQPLTPEEQKETFVPIELGIPSKQPSNYFCKTLTASDTSTHGGFSVPRRAAEKVFPPLDYTLQPPAQELIARDLHDVEWKFRHIFRGQPKRHLLTTGWSVFVSAKRLVAGDSVIFIRNEKNQLFLGIRHATRPQTIVPSSVLSSDSMHIGLLAAAAHASATNSCFTVFFHPRASQSEFVIQLSKYIKAVFHTRISVGMRFRMLFETEESSVRRYMGTITGISDLDSVRWPNSHWRSVKVGWDESTAGERQPRVSLWEIEPLTTFPMYPSLFPLRLKRPWHAGTSSLPDGRGDLGSGLTWLRGGGGEQQGLLPLNYPSVGLFPWMQQRLDLSQMGTDNNQQYQAMLAAGLQNIGGGDPLRQQFVQLQEPHHQYLQQSASHNSDLMLQQQQQQQASRHLMHAQTQIMSENLPQQNMRQEVSNQPAGQQQQLQQPDQNAYLNAFKMQNGHLQQWQQQSEMPSPSFMKSDFTDSSNKFATTASPASGDGNLLNFSITGQSVLPEQLTTEGWSPKASNTFSEPLSLPQAYPGKSLALEPGNPQNPSLFGVDPDSGLFLPSTVPRFASSSGDAEASPMSLTDSGFQNSLYSCMQDTTHELLHGAGQINSSNQTKNFVKVYKSGSVGRSLDISRFSSYHELREELGKMFAIEGLLEDPLRSGWQLVFVDKENDILLLGDDPWESFVNNVWYIKILSPEDVHQMGDHGEGSGGLFPQNPTHL

SEQ ID NO: 1824 - DNA, 1917 bp, Arabidopsis thaliana
  CDS (1)..(1917)
atggcaaatcgcggaggtgaatatctgtacgatgagttatggaaattatgcgcgggacctcttgttgatgttcctcaagctcaagaaagagtttattattttcctcaaggtcacatggaacaactcgaagcgtcaacgcaacaagtcgacttaaatacgatgaagcctctttttgttcttccccctaagattctctgcaatgttatgaacgttagtcttcaggcggagaaagatacggatgaggtctatgctcagattactttgatccctgttggaactgaagttgatgaacccatgagtcctgatccctctcctcctgagttgcaaaggccgaaagttcactctttcagcaaggttttgacagcgtctgatacaagcacccatggtggcttttctgttctaaggaaacatgccacggaatgtcttcctccgctggatatgactcagcaaaccccgacccaggagttagtagccgaagatgtgcacggttatcagtggaaattcaagcatatttttagaggccaaccacggaggcatctattgacgacagggtggagcacctttgttacatcaaagagattggttgctggggacacctttgtattcctgagaggggagaacggagagttgcgagttggagtcagacgtgctaatcttcaacagagcagtatgccttcatccgttatatcaagtcatagtatgcatctgggagtgcttgctactgcacgccatgctactcaaacgaaaactatgttcattgtatactataaaccaaggacaagccaattcatcattagcttgaacaaatatctagaagccatgagcaataagttctctgtagggatgagatttaagatgcgttttgagggagaggattcccctgaaagaagatattctggcacggttattggtgtgaaagactgctcccctcactggaaagactcaaaatggcgatgcttagaagttcattgggatgagcctgcatcgatttcaagacccaataaggtttcaccatgggaaattgaaccgtttgtaaattcagaaaacgttcccaaatcagttatgctgaagaacaaaaggccccgtcaagttagtgaagtatctgcacttgatgtaggcataacagcttcaaacctttggagctctgttttgacgcaaccccatgagtttgcacaatcgtgcatcacctcacagtggagttctcctcagcaatgtcatcgtgatgcaaatgaggatgctaagaaatctgactggctaaataactcttactctgtgtcaaatgtagcaaaagactcaacactgaacgaccaaatggtttccccagtcgagcagaagaagcctgagacaaccgctaattatagattatttggaattgatctgatgagttcctccctagcggttcctgaggagaaaactgcacccatgcgaccaatcaacatatccaaaccgactatggacagccactcagacccaaaatcagagatttcaaaagtatcagaagagaaaaagcaggaacctgcggagggatcaccaaaagaggtccaaagcaagcaaagcagttctacaagaagccgtaccaaggtgcagatgcaaggcgtacctgtgggcagggctgtggatttaaatgcgctaaaggggtacaacgagctcatagatgacattgagaagctgtttgacataaaaggggaactgcggagtcgcaatcaatgggaaatagtgttcacagacgatgagggagatatgatgcttgtcggtgatgacccatggcctgagttctgcaacatggtgaagagaatattcatatggtcgaaagaggaagtgaagaaaatgacgcctgggaaccaactccggatgctgttaagggaagttgaaacaacactaacaacaacttccaaaacagataatcattccaactaa

SEQ ID NO: 1825 - protein, 638 aa, Arabidopsis thaliana
MANRGGEYLYDELWKLCAGPLVDVPQAQERVYYFPQGHMEQLEASTQQVDLNTMKPLFVLPPKILCNVMNVSLQAEKDTDEVYAQITLIPVGTEVDEPMSPDPSPPELQRPKVHSFSKVLTASDTSTHGGFSVLRKHATECLPPLDMTQQTPTQELVAEDVHGYQWKFKHIFRGQPRRHLLTTGWSTFVTSKRLVAGDTFVFLRGENGELRVGVRRANLQQSSMPSSVISSHSMHLGVLATARHATQTKTMFIVYYKPRTSQFIISLNKYLEAMSNKFSVGMRFKMRFEGEDSPERRYSGTVIGVKDCSPHWKDSKWRCLEVHWDEPASISRPNKVSPWEIEPFVNSENVPKSVMLKNKRPRQVSEVSALDVGITASNLWSSVLTQPHEFAQSCITSQWSSPQQCHRDANEDAKKSDWLNNSYSVSNVAKDSTLNDQMVSPVEQKKPETTANYRLFGIDLMSSSLAVPEEKTAPMRPINISKPTMDSHSDPKSEISKVSEEKKQEPAEGSPKEVQSKQSSSTRSRTKVQMQGVPVGRAVDLNALKGYNELIDDIEKLFDIKGELRSRNQWEIVFTDDEGDMMLVGDDPWPEFCNMVKRIFIWSKEEVKKMTPGNQLRMLLREVETTLTTTSKTDNHSN

SEQ ID NO: 1826 - DNA, 2082 bp, Arabidopsis thaliana
  CDS (1)..(2082)
atggagcaagagaaaagcttggatccacaactatggcatgcttgtgcaggatcaatggttcaaatcccttcactgaattcaacggttttttacttcgctcaaggccacacagagcacgctcacgcgcctcctgattttcacgcgccgcgcgttccacctcttatcctctgtcgtgtcgtctccgtgaagttcctcgccgacgctgaaacagacgaagtttttgctaaaattacgcttttgccacttccgggaaacgacttggatctagaaaacgacgccgttttgggtctaactcctccttcttctgacggtaacggtaacggtaaagagaaaccggcgtctttcgctaaaacgttaacgcagtctgacgctaataacggcggtggtttctccgttccacgttattgcgccgagacgattttcccgcggcttgattactcggcggagccaccggttcaaaccgtgattgctaaagacatccacggcgagacttggaaattccggcatatttacagaggaacacctcgccgtcatctcctaaccaccggttggagcactttcgttaaccagaagaaactaatcgccggagactcaatcgtcttcctccgttctgaatccggtgacctctgcgtcggaatccgccgcgctaaacgcggcggtctcggatctaacgcaggatccgacaatccttaccctggattctccggtttcctccgtgacgacgagtcaacaacaacaacatcgaagctaatgatgatgaaacgcaacggaaacaacgacggaaacgccgcggctacagggagggttagagtagaagcagtagcggaagcggtggcgcgtgcagcgtgtggacaagcgtttgaggttgtttattatccacgcgctagtacaccggagttttgcgtaaaagcagctgatgttagatcagcaatgaggataagatggtgtagtggtatgcgttttaaaatggcgtttgaaacagaggattcttctagaatcagttggtttatgggtactgtctccgccgttcaagtcgctgatccaattcgttggcctaattcaccatggcgtctccttcaggtagcttgggacgaaccggatttgttacaaaacgttaagcgggttagtccgtggttagtcgaattggtatcgaacatgcctacaatacatttatctccattctctccgaggaagaagattaggattccgcagccatttgagtttccattccacggtactaaattcccgattttctccccgggattcgccaacaatggcggtggcgagtccatgtgttatctgtcaaacgacaacaataatgctcctgcaggaatacagggagccaggcaagctcaacaactcttcggatcaccatctccgtctttgttgtctgatctcaatcttagtagttacaccggtaacaacaagttacattctccggcgatgtttctatcgagtttcaacccgaggcatcatcattatcaggctagggatagtgagaatagtaataacatttcgtgttctttaactatggggaatcctgctatggttcaggataagaagaagtctgttggttcggttaagactcatcagttcgtgttgttcggtcaaccgattttaaccgaacagcaagttatgaaccgaaaacggtttttggaagaagaggcggaagcggaggaggagaaaggtttagtggctcgtgggttaacatggaattatagtttgcaaggacttgagacgggtcattgtaaagttttcatggaatctgaggatgttggacgcacactcgatctctcggttattggctcgtaccaagaattgtaccggaaattggctgagatgtttcatatagaagagaggtcggatttgttgactcatgttgtgtaccgggatgcaaatggtgttatcaaacgtattggagacgaacctttcagtgatttcatgaaagcaactaaacggctaacaatcaagatggatattggtggcgacaacgtgagaaagacgtggataaccggaatcaggactggtgaaaatggtatagacgcttctacgaagactggtccgctcagcatcttcgcttga

SEQ ID NO: 1827 - protein, 693 aa, Arabidopsis thaliana
MEQEKSLDPQLWHACAGSMVQIPSLNSTVFYFAQGHTEHAHAPPDFHAPRVPPLILCRVVSVKFLADAETDEVFAKITLLPLPGNDLDLENDAVLGLTPPSSDGNGNGKEKPASFAKTLTQSDANNGGGFSVPRYCAETIFPRLDYSAEPPVQTVIAKDIHGETWKFRHIYRGTPRRHLLTTGWSTFVNQKKLIAGDSIVFLRSESGDLCVGIRRAKRGGLGSNAGSDNPYPGFSGFLRDDESTTTTSKLMMMKRNGNNDGNAAATGRVRVEAVAEAVARAACGQAFEVVYYPRASTPEFCVKAADVRSAMRIRWCSGMRFKMAFETEDSSRISWFMGTVSAVQVADPIRWPNSPWRLLQVAWDEPDLLQNVKRVSPWLVELVSNMPTIHLSPFSPRKKIRIPQPFEFPFHGTKFPIFSPGFANNGGGESMCYLSNDNNNAPAGIQGARQAQQLFGSPSPSLLSDLNLSSYTGNNKLHSPAMFLSSFNPRHHHYQARDSENSNNISCSLTMGNPAMVQDKKKSVGSVKTHQFVLFGQPILTEQQVMNRKRFLEEEAEAEEEKGLVARGLTWNYSLQGLETGHCKVFMESEDVGRTLDLSVIGSYQELYRKLAEMFHIEERSDLLTHVVYRDANGVIKRIGDEPFSDFMKATKRLTIKMDIGGDNVRKTWITGIRTGENGIDASTKTGPLSIFA

SEQ ID NO: 1828 - DNA, 2276 bp, Arabidopsis thaliana
  CDS (173)..(1978)
gttaaagaaacgagagtttttcagctctttacttaccttttcttcttacccttctttcatgactcttcttctttgatgggttaataatgctttgagcttgatgatttcgattttagtttcctgttagtgtttgttttcttctgtaaagcttggattttttttggtttcttcgatggcgaatgtggaagctgatttcagaacatcagggtctaatgatgatgaattgtacacggagctatggaaagcttgtgcagggccacttgtggaagttcctcgttatggtgaaagagttttctacttccctcaaggtcacatggaacaattggttgcttcgactaatcaaggagttgttgatcaagagataccagtgtttaatcttcctccaaagatactttgtcgtgttcttagtgttacgttaaaagcagaacatgagaccgatgaggtttacgctcagatcacattacaaccagaagaagatcaaagtgaaccaacaagtcttgacccacctttagtagaaccagctaaaccaacggttgattcttttgtgaagattctaacagcttcagatacaagcacacatggtggattctctgttcttcgtaaacacgccactgagtgtttaccttcacttgatatgacacaacctacaccgactcaagaacttgtagctagagatcttcacggctatgaatggaggtttaagcatatatttagagggcaaccgaggaggcatttacttacaaccggttggagtacatttgtaacctcgaaaagacttgtagctggagatgcatttgtgttcttgaggggtgaaaccggggatttacgggttggtgtgaggcgtttagctaagcagcaaagcacgatgcccgcatccgttatttcgagtcagagtatgcgtttgggagttcttgctacagcttctcatgctgttaccacaacaactatatttgttgtcttctataaaccaaggataagccagtttataattagtgtgaacaagtatatgatggcgatgaagaacgggttttctctcggtatgcggtataggatgagattcgaaggagaagagtctcctgagagaatatttacaggtaccattattggcagtggagatctatcttctcaatggccagcttccaaatggaggtcattgcagatccaatgggacgagccatcttctatacagagaccaaacaaggtctcaccgtgggagatcgagcctttctcaccatccgcgcttacaccaacccctactcaacaacaatcaaagtccaaacggtccagaccaatctcagaaatcacagggagtcctgtagcttctagtttcttgagtagtttctcgcagagccacgagtctaatccatcggtcaaactgttgtttcaagatccagcaaccgagagaaactcaaacaaatcagtgttttcaagtggattacaatgcaagataaccgaggctccggtcacaagtagttgtaggttattcggattcgatctcacgagcaagcctgcttctgctacaattcctcatgacaagcagctaataagtgtggattcaaatatatctgattctaccaccaagtgtcaagatcctaactcttcaaactcaccaaaagagcagaaacaacaaacatccacaagaagccgaatcaaggtgcaaatgcaaggaacagcggttggacgcgcggttgatttaacattgttgagatcatacgatgaactaataaaagagctagagaaaatgtttgagattgaaggagaacttagtcctaaagacaaatgggctatcgtgtttacagacgatgaaggagataggatgcttgtaggagatgatccatggaatgagttctgtaaaatggcaaagaagttattcatatatccgagtgatgaggtcaagaaaatgaggtcgaagtcgttgttgggtgataaaggtacgatcgtaaatcttgaatcagatcagaggacagttcacgtttaactatcaagttgttgatttcttactttcttggagactctctcaagtctcaccaagtccgagagttaggtggtttttttttttttggttttttttttggcgttaggtgggtttgttatttacttgtttaacataaagactataaaatatacagttattatatacgagtatatcgtattaggtttcaaacgacgtcgtttatgtaaagtgtttgcttttccgacgtggctttcgtcgtcatgactaatgaatgatgtgttagcaataacttaaaaaaggtcatatttttctaaaaaaaaaa

SEQ ID NO: 1829 - protein, 601 aa, Arabidopsis thaliana
MANVEADFRTSGSNDDELYTELWKACAGPLVEVPRYGERVFYFPQGHMEQLVASTNQGVVDQEIPVFNLPPKILCRVLSVTLKAEHETDEVYAQITLQPEEDQSEPTSLDPPLVEPAKPTVDSFVKILTASDTSTHGGFSVLRKHATECLPSLDMTQPTPTQELVARDLHGYEWRFKHIFRGQPRRHLLTTGWSTFVTSKRLVAGDAFVFLRGETGDLRVGVRRLAKQQSTMPASVISSQSMRLGVLATASHAVTTTTIFVVFYKPRISQFIISVNKYMMAMKNGFSLGMRYRMRFEGEESPERIFTGTIIGSGDLSSQWPASKWRSLQIQWDEPSSIQRPNKVSPWEIEPFSPSALTPTPTQQQSKSKRSRPISEITGSPVASSFLSSFSQSHESNPSVKLLFQDPATERNSNKSVFSSGLQCKITEAPVTSSCRLFGFDLTSKPASATIPHDKQLISVDSNISDSTTKCQDPNSSNSPKEQKQQTSTRSRIKVQMQGTAVGRAVDLTLLRSYDELIKELEKMFEIEGELSPKDKWAIVFTDDEGDRMLVGDDPWNEFCKMAKKLFIYPSDEVKKMRSKSLLGDKGTIVNLESDQRTVHV

SEQ ID NO: 1830 - DNA, 1782 bp, Arabidopsis thaliana
  CDS (1)..(1782)
atggaaagtggcaacgttgtgaatgcacaacctgaattatcaggcataattgatggatccaagagctatgtttacgagcagttatggaaactctgtgcgggacctttgtgtgatattccaaaacttggagaaaaggtttattactttcctcaaggtcacatagagcttgttgagacatctacaagagaagagttgaatgagttacaaccaatttgtgatcttccttctaagcttcaatgtcgtgttattgctattcatcttaaggtggaaaacaatagtgatgagacttatgctgagatcactttgatgccagatacaactcaagttgtaatccctactcagaatgaaaatcaatttagaccattagttaattcctttacgaaggttttaacggcctcagatacaagcgctcatggtggattctttgtaccgaaaaaacatgccattgaatgtctcccttcgctggatatgtctcaacctttacctgcacaagaacttcttgctatagatctccatggtaatcaatggagattcaaccacaactatagaggtacaccgcaaagacatttgttaacaactggttggaatgcattcacaacatcaaaaaaattggttgcaggggatgtcatcgtattcgttaggggagagactggagagttacgagttggtatcagacgagcaagacatcaacaagggaatataccttcatcaatagtatcaatagattgtatgagacatggggtagttgcttccgcaaagcatgcttttgataaccaatgtatgttcactgtggtttacaagccaaggtcaagtaaatttattgtcagttacgacaaattcttggacgctgtgaacaataagttcaatgtcggttcaagatttacaatgcggttagagggtgatgatttctctgaaagaagatgttttgggacaattattggagttagtgatttctctcctcattggaaatgttcagagtggcgcagcttagaagtgcagtgggatgaatttacatcatttccgggacctaaaaaagtgtcaccctgggacatcgaacatttaatgcctgcaataaatgttccgcgatcatttttgctcaagaacaagcgtttacgagaagttaatgaaatcggttcttcatcatcacatctcttacctcctatattgacacaaggacaagaaaatgaacaactaagtgttgcctctccgatgaatatttctcttcgttatcgtgatgcaactgaagatgctatgaatccttctaaattgctaatgagctaccctgtccaaccaatgcccaaactaaattacaataaccaaatggttacagaaatggaagaaaatataacaaccaagacaggcactaattttaggctgtttggagtcactctggacactcctccggtgatcaaagatcccattgaagaaattggctcggagatttcgaaacttactgaaggaaaaaagtttggtctaagccaaactttaagatcaccaacagagatccaaaacaagcagttcagttctagtagaacttgtaccaaagttcaaatgcaaggtgtaacaataggaagagctgtggatttaagtgttcttaatggatatgatcagctaatactagaattggagaagctctttgatatcaaaggtcaattgcaaactcgcaaccaatgggaaatagctttcacagatagtgacgaagataagatgcttgttggagacgatccatggcctgaattctgcaacatggtgaagaagatattcattcaaaagaggaggtaa

SEQ ID NO: 1831 - protein, 593 aa, Arabidopsis thaliana
MESGNVVNAQPELSGIIDGSKSYVYEQLWKLCAGPLCDIPKLGEKVYYFPQGHIELVETSTREELNELQPICDLPSKLQCRVIAIHLKVENNSDETYAEITLMPDTTQVVIPTQNENQFRPLVNSFTKVLTASDTSAHGGFFVPKKHAIECLPSLDMSQPLPAQELLAIDLHGNQWRFNHNYRGTPQRHLLTTGWNAFTTSKKLVAGDVIVFVRGETGELRVGIRRARHQQGNIPSSIVSIDCMRHGVVASAKHAFDNQCMFTVVYKPRSSKFIVSYDKFLDAVNNKFNVGSRFTMRLEGDDFSERRCFGTIIGVSDFSPHWKCSEWRSLEVQWDEFTSFPGPKKVSPWDIEHLMPAINVPRSFLLKNKRLREVNEIGSSSSHLLPPILTQGQENEQLSVASPMNISLRYRDATEDAMNPSKLLMSYPVQPMPKLNYNNQMVTEMEENITTKTGTNFRLFGVTLDTPPVIKDPIEEIGSEISKLTEGKKFGLSQTLRSPTEIQNKQFSSSRTCTKVQMQGVTIGRAVDLSVLNGYDQLILELEKLFDIKGQLQTRNQWEIAFTDSDEDKMLVGDDPWPEFCNMVKKIFIQKRR

SEQ ID NO: 1832 - DNA, 1818 bp, Arabidopsis thaliana
  CDS (1)..(1818)
atggaaagtggcaacgttgtgaatacacaacctgaattatcaggcataattgatggatccaagagttatatgtacgagcagttatggaaactctgtgcgggacctttgtgtgatattccaaaacttggagaaaaggtttattactttcctcaaggccatatagagcttgttgaggcatctacaagagaagagttgaatgagttacaaccaatttgtgattttccttctaagcttcaatgtcgtgttattgctattcaacttaaggtggaaaacaatagtgatgagacttatgctgagatcactttgatgccagatacaactcaagttgtaatccctactcagaatcaaaatcaatttaggccattagttaattcctttacgaaggttttaacggcctcagatacaagcgttcatggtggattctctgttccgaaaaaacatgccattgaatgtctccctccgctggatatgtcacagcctctaccgacacaagaaattcttgctatagatcttcatggtaatcaatggagattcagacacatctatagaggtacagcgcaaagacatttgttaacaattggttggaatgcattcacaacatcaaaaaaattggttgaaggagatgttattgtattcgttaggggagagactggagagttacgagttggtatcagacgagcaggacatcaacaagggaatataccttcatcaatagtatcaatagaaagtatgagacatgggataattgcttctgcaaagcatgcttttgataaccaatgtatgttcattgtggtttacaagccaaggtcaagtcaatttattgtcagttacgacaaattcttagacgttgtgaacaataagttcaatgtcggttcaagatttacaatgcggtttgagggtgatgatttctctgaaagaagatcttttgggacaattattggagttagtgatttctctcctcattggaagtgttcagagtggcgcagcttagaagtgcagtgggatgaatttgcatcatttccgagaccaaaccaagtttcaccatgggacatcgaacatttaacgccttggtcaaatgtttccaggtcatcttttctcaagaacaagcgttcacgagaagttaatgaaatcggttcttcctcatcacatctcttgcctcctacattgacacaaggacaagaaattggacaacaaagcatggccaccccgatgaatatttctcttcgttatcgtgatattactgaagatgctatgactccttctagattgctaatgagctaccctgtccaaccaatggccaaactaaattacaataatgtggttacaccaatagaagaaaatataacaaccaatgcagtcgctagttttaggttgtttggagtctctctggccactccttcggtgatcaaagatcccgttgaacaaattggcttggagatttctagacttactcaggaaaaaaagtttggtcaaagccaaattttgagatcaccaacagagatccaaagcaagcagttcagttctaccagaacttgtaccaaagttcaaatgcaaggtgtaacaataggaagagctgtggatttaagtgttcttaatggatatgatcagttaatactagaattggagaagctcttcgatctcaaaggccaattgcaagctcgcaaccaatgggaaatagctttcacaaataatgaagaggataagatgcttgttggagaagatccatggcctgaattctgcaacatggtgaagaagatattcatatattcaaaagaggaggtcaaaaacttgaagtccaggaagagtctctcaagttga

SEQ ID NO: 1833 - protein, 605 aa, Arabidopsis thaliana
MESGNVVNTQPELSGIIDGSKSYMYEQLWKLCAGPLCDIPKLGEKVYYFPQGHIELVEASTREELNELQPICDFPSKLQCRVIAIQLKVENNSDETYAEITLMPDTTQVVIPTQNQNQFRPLVNSFTKVLTASDTSVHGGFSVPKKHAIECLPPLDMSQPLPTQEILAIDLHGNQWRFRHIYRGTAQRHLLTIGWNAFTTSKKLVEGDVIVFVRGETGELRVGIRRAGHQQGNIPSSIVSIESMRHGIIASAKHAFDNQCMFIVVYKPRSSQFIVSYDKFLDVVNNKFNVGSRFTMRFEGDDFSERRSFGTIIGVSDFSPHWKCSEWRSLEVQWDEFASFPRPNQVSPWDIEHLTPWSNVSRSSFLKNKRSREVNEIGSSSSHLLPPTLTQGQEIGQQSMATPMNISLRYRDITEDAMTPSRLLMSYPVQPMAKLNYNNVVTPIEENITTNAVASFRLFGVSLATPSVIKDPVEQIGLEISRLTQEKKFGQSQILRSPTEIQSKQFSSTRTCTKVQMQGVTIGRAVDLSVLNGYDQLILELEKLFDLKGQLQARNQWEIAFTNNEEDKMLVGEDPWPEFCNMVKKIFIYSKEEVKNLKSRKSLSS

SEQ ID NO: 1834 - DNA, 2013 bp, Arabidopsis thaliana
  CDS (1)..(2013)
atgataaatgtgatgaatccaatgaaaggtggaacagagaaaggtttagatcctcagctatggcatgcatgtgctggtggtatggttcgtatgcctcctatgaactctaaagtcttttactttcctcaaggtcacgccgaaaacgcttacgattgtgtcgatttcggtaatctccctattcctcccatggttttgtgtcgtgttttagccattaagtatatggctgatgctgaatctgacgaggttttcgctaaactgagattgattcctttgaaagatgatgagtatgttgatcacgagtatggtgatggtgaagatagtaacggtttcgagagtaatagtgagaaaacgccttcgtttgctaagactttgactcagtctgatgctaataacggtgggggtttctctgttcctcgttattgcgctgagacgattttcccgaggttggattataacgccgagccgccggttcagaccattcttgctaaggatgttcatggtgatgtttggaagttcagacatatttatagagggacgcctcggcgtcaccttcttacaaccggatggagtaattttgtaaaccagaagaagcttgtggcgggagattcgattgtcttcatgagagcggagaatggagatctttgtgtaggtattaggagggctaagagaggagggataggtaatggacccgaatattcagcgggttggaatccgatcggtggaagttgcggctactcttctctgttaagggaagatgaaagcaatagtttgaggagaagtaattgttcccttgcggataggaaggggaaagtgacggctgaatctgttatagaagcagccactcttgctattagcggaagaccgtttgaggttgtgtactatccgagagctagcacttcagagttttgtgtcaaggcattagatgctcgagctgccatgcggattccgtggtgctcaggtatgaggtttaagatggcttttgagacagaggattcgtctcggataagttggtttatggggactgtttcagctgttaatgtctctgatcctatccgttggcctaactctccttggcggcttctacaggtggcgtgggatgagccagatttactccaaaacgtgaagcgagttaacccgtggttggtggaattggtatcaaacgtacatccgatcccgcttacttcgttttcgccaccgaggaaaaagatgcggctacctcagcatccagattacaacaatctgatcaattcgattccagtaccttcattcccaagcaatccccttattagatcaagcccgttaagctctgttctggacaatgttcccgtgggtttacagggagccaggcataatgctcatcagtactacgggttatcatcttcggatcttcaccattactacttgaatagaccacctcctcctcctcctccatcctctctccaactttctccttctctcggtctccgaaacatcgataccaaaaacgaaaaaggattttgctttttgacaatgggaacaacaccatgcaatgataccaaatctaaaaagtcccatattgtattgttcggcaagcttatactacccgaggaacagctatcagaaaaaggctcaacggataccgcaaacatagagaaaacgcagatttcatcaggcgggtcgaaccaaaacggcgttgcgggaagggagttttcttcgtcagatgaaggatcaccttgctctaagaaagttcatgatgcatcaggtttggaaacagggcattgtaaagtgtttatggagtcagacgatgtaggtcgaaccttagacctatcggttcttggttcatacgaagaattgagtcggaaactctctgacatgtttggaatcaaaaagtctgagatgttaagctctgttctctatagggatgcatcaggagccatcaaatacgcaggaaacgaacctttcagtgagttcttgaagacagctcgaagattgacaattctgacggaacaaggaagtgagagcgttgtagtataa

SEQ ID NO: 1835 - protein, 670 aa, Arabidopsis thaliana
MINVMNPMKGGTEKGLDPQLWHACAGGMVRMPPMNSKVFYFPQGHAENAYDCVDFGNLPIPPMVLCRVLAIKYMADAESDEVFAKLRLIPLKDDEYVDHEYGDGEDSNGFESNSEKTPSFAKTLTQSDANNGGGFSVPRYCAETIFPRLDYNAEPPVQTILAKDVHGDVWKFRHIYRGTPRRHLLTTGWSNFVNQKKLVAGDSIVFMRAENGDLCVGIRRAKRGGIGNGPEYSAGWNPIGGSCGYSSLLREDESNSLRRSNCSLADRKGKVTAESVIEAATLAISGRPFEVVYYPRASTSEFCVKALDARAAMRIPWCSGMRFKMAFETEDSSRISWFMGTVSAVNVSDPIRWPNSPWRLLQVAWDEPDLLQNVKRVNPWLVELVSNVHPIPLTSFSPPRKKMRLPQHPDYNNLINSIPVPSFPSNPLIRSSPLSSVLDNVPVGLQGARHNAHQYYGLSSSDLHHYYLNRPPPPPPPSSLQLSPSLGLRNIDTKNEKGFCFLTMGTTPCNDTKSKKSHIVLFGKLILPEEQLSEKGSTDTANIEKTQISSGGSNQNGVAGREFSSSDEGSPCSKKVHDASGLETGHCKVFMESDDVGRTLDLSVLGSYEELSRKLSDMFGIKKSEMLSSVLYRDASGAIKYAGNEPFSEFLKTARRLTILTEQGSESVVV

SEQ ID NO: 1836 - DNA, 3261 bp, Arabidopsis thaliana
  CDS (1)..(3261)
atgaaagctccatcaaatggatttcttccaagttccaacgaaggagagaagaagccaatcaattctcaactatggcacgcttgtgcagggcctttagtttcattacctcctgtgggaagtcttgtggtttacttccctcaaggacacagcgagcaagttgcagcatcgatgcagaagcaaacagattttataccaaattacccaaatcttccttctaagctgatttgcttgcttcacagtgttacattacatgctgataccgaaacagatgaagtctatgcacaaatgactcttcaacctgtgaataagtatgatagagaagcattgctagcttctgatatgggcttgaagctaaacagacaacctactgagtttttttgcaagactcttactgcaagtgacacaagcactcatggtggattctctgtaccgcgtcgtgcagctgagaaaatattccctcctcttgatttctcgatgcaaccgcctgcgcaagagattgtagctaaagatttacatgatactacatggactttcagacatatctatcgaggccaaccaaaaagacacttgcttaccacaggttggagcgtttttgttagcacaaagagactatttgcgggtgattcagttttgtttgtaagagatgagaaatcacagctgatgttgggtataagacgtgcaaatagacaaactccgactctttcctcatcggtcatatccagcgacagtatgcacattgggatacttgcagctgcagctcatgctaatgccaatagtagcccttttaccatcttcttcaatccaagggcaagtccttcagagtttgtagttcctttagccaaatacaacaaagccttatacgctcaagtatctctaggaatgagattccggatgatgtttgagactgaggattgtggggttcgtagatatatgggtacagtcacaggtattagtgatcttgaccctgtaagatggaaaggctcacaatggcgtaatcttcaggtaggatgggatgaatcaacagctggagataggccaagccgagtatccatatgggaaatcgaacccgtcataactcctttttacatatgtcctcctccatttttcagacctaagtacccgaggcaacccgggatgccagatgatgagttagacatggaaaatgctttcaaaagagcaatgccttggatgggagaagactttgggatgaaggacgcacagagttcgatgttccctggtttaagtctagttcaatggatgagtatgcagcaaaacaatccattgtcaggttctgctactcctcagctcccgtccgcgctctcatcttttaacctaccaaacaattttgcttccaacgacccttccaagctgttgaacttccaatccccaaacctctcttccgcaaattcccaattcaacaaaccgaacacggttaaccatatcagccaacagatgcaagcacaaccagccatggtgaaatctcaacaacaacaacaacaacaacaacaacaacaccaacaccaacaacaacaactgcaacaacaacaacaactacagatgtcacagcaacaggtgcagcaacaagggatttataacaatggtacgattgctgttgctaaccaagtctcttgtcaaagtccaaaccaacctactggattctctcagtctcagcttcagcagcagtcaatgctccctactggtgctaaaatgacacaccagaacataaattctatggggaataaaggcttgtctcaaatgacatcgtttgcgcaagaaatgcagtttcagcagcaactggaaatgcataacagtagccagttattaagaaaccagcaagaacagtcctctctccattcattacaacaaaatctgtcccaaaatcctcagcaactccaaatgcaacaacaatcatcaaaaccaagtccttcacaacagcttcagttgcagctactgcagaagctacagcagcagcaacagcagcagtcgattcctccagtaagctcatccttacagccacaattatcagcgttgcagcagacacaaagccatcaattgcaacaacttctgtcgtctcaaaatcaacagcccttggcacatggtaataacagcttcccagcttcaactttcatgcagcctccacagattcaggtgagtcctcagcagcaaggacagatgagtaacaaaaatcttgtagccgctggaagatcacattctggccacacagatggagaagctccttcttgttcaacctcaccttccgccaataacacgggacatgataatgtttcaccgacaaatttcctgagcagaaatcaacagcaaggacaagctgcatctgtatctgcatctgattcagtctttgagcgcgcaagcaatccggtccaagagctttatacaaaaactgagagccggatcagtcaaggcatgatgaatatgaagagtgctggtgaacatttcagatttaaaagcgcggtaacagatcaaatcgatgtatccacagcgggaacgacgtactgtcctgatgttgttggccctgtacagcagcaacaaactttcccactaccatcatttggttttgatggagactgccaatctcatcatccaagaaacaacttagctttccctggtaatctcgaagccgtaacttctgatccactctattctcaaaaggactttcaaaacttggttcccaactatggcaacacaccaagagacattgagacggagctgtccagtgctgcaatcagttctcagtcatttggtattcccagcattccctttaagcccggatgttcaaatgaggttggcggcatcaatgattcaggaatcatgaatggtggaggactgtggcccaatcagactcaacgaatgcgaacatatacaaaggttcaaaaacgagggtcagtaggtagatcaatagatgttacccgttatagcggctatgatgaacttaggcatgacttagcgagaatgtttggcatcgaaggacagctcgaagatccgctaacctctgattggaaactcgtctacaccgatcacgaaaacgatattttactagttggtgatgatccttgggaagagtttgtgaactgcgtgcagaacataaagatactatcatcagtagaagttcagcaaatgagcttagacggagatcttgcagctatcccaaccacaaaccaagcctgcagcgaaacagacagcggaaatgcttggaaagtacactatgaagacacttctgctgcagcttctttcaacagatag

SEQ ID NO: 1837 - protein, 1086 aa, Arabidopsis thaliana
MKAPSNGFLPSSNEGEKKPINSQLWHACAGPLVSLPPVGSLVVYFPQGHSEQVAASMQKQTDFIPNYPNLPSKLICLLHSVTLHADTETDEVYAQMTLQPVNKYDREALLASDMGLKLNRQPTEFFCKTLTASDTSTHGGFSVPRRAAEKIFPPLDFSMQPPAQEIVAKDLHDTTWTFRHIYRGQPKRHLLTTGWSVFVSTKRLFAGDSVLFVRDEKSQLMLGIRRANRQTPTLSSSVISSDSMHIGILAAAAHANANSSPFTIFFNPRASPSEFVVPLAKYNKALYAQVSLGMRFRMMFETEDCGVRRYMGTVTGISDLDPVRWKGSQWRNLQVGWDESTAGDRPSRVSIWEIEPVITPFYICPPPFFRPKYPRQPGMPDDELDMENAFKRAMPWMGEDFGMKDAQSSMFPGLSLVQWMSMQQNNPLSGSATPQLPSALSSFNLPNNFASNDPSKLLNFQSPNLSSANSQFNKPNTVNHISQQMQAQPAMVKSQQQQQQQQQQHQHQQQQLQQQQQLQMSQQQVQQQGIYNNGTIAVANQVSCQSPNQPTGFSQSQLQQQSMLPTGAKMTHQNINSMGNKGLSQMTSFAQEMQFQQQLEMHNSSQLLRNQQEQSSLHSLQQNLSQNPQQLQMQQQSSKPSPSQQLQLQLLQKLQQQQQQQSIPPVSSSLQPQLSALQQTQSHQLQQLLSSQNQQPLAHGNNSFPASTFMQPPQIQVSPQQQGQMSNKNLVAAGRSHSGHTDGEAPSCSTSPSANNTGHDNVSPTNFLSRNQQQGQAASVSASDSVFERASNPVQELYTKTESRISQGMMNMKSAGEHFRFKSAVTDQIDVSTAGTTYCPDVVGPVQQQQTFPLPSFGFDGDCQSHHPRNNLAFPGNLEAVTSDPLYSQKDFQNLVPNYGNTPRDIETELSSAAISSQSFGIPSIPFKPGCSNEVGGINDSGIMNGGGLWPNQTQRMRTYTKVQKRGSVGRSIDVTRYSGYDELRHDLARMFGIEGQLEDPLTSDWKLVYTDHENDILLVGDDPWEEFVNCVQNIKILSSVEVQQMSLDGDLAAIPTTNQACSETDSGNAWKVHYEDTSAAASFNR

SEQ ID NO: 1838 - DNA, 1821 bp, Arabidopsis thaliana
  CDS (1)..(1821)
atggaaagtggcaacattgtgaatgcacaacctaaattatcaggcataattgatggatccaagagctatatgtacgagcagttatggaaactctgtgcagggcctttgtgtgatattccaaaacttggagaaaatgtttattactttcctcaaggcaatatagagcttgttcaggcatctacaagagaagagttgaatgagttacaaccaatttgtgatcttccttctaagcttcaatgtcgtgttattgcaattcatcttaaggtggaaaacaatagtgatgagatttatgctgagatcactttgatgccagatacaactcaagttgtaatccctactcagagtgaaaatcgatttaggccattagttaattcctttacaaaggttttaacggcctcagatacaagcgcttatggtggattctctgttccgaaaaaacatgccattgaatgtctccctccgctggatatgtctcagcctctaccggcacaagaaattcttgctatagatctccatgataatcaatggagattcagacacaactatagaggtacaccgcaaagacattcgttaacaactggttggaatgaattcataacatcaaagaaattggttaaaggagatgttattgtattcgttaggggagagactggagagttacgagttggtatcagacgagcaagacatcaacaagggaatataccttcatcaatagtatcaatagattgtatgagacatggggtaattgcttccgcaaagcatgcttttgataaccaatgtatattcattgtggtttacaagccaaggtcaagtcaatttattgtcagttatgacaaattcttagacgctgtgaacaataagtttaatgtcggttcaagatttacaatgcggtttgagggtgatgatttctctgaaagaagatattttgggacaattattggagttagtgatttctctcctcattggaagtgttcagagtggcgcagcttagaagtgcagtgggatgaatttgcatcattttcgagacctaataaagtgtcaccctgggagatcgaacatttagtgcctgcgttaaatgttccgcgatcatctttgctcaagaacaagcgtttacgagaagttaatgaattcggttcttcatcatcacatctcttgcctcctatattgacacaaggacaagaaattggacaactaagcgtggcctccccgatgaatatttctcttcgttatcgtgatacaactgaagctgctatgaatccttctagattgctaatgagctaccctgtccaaccaatgcccaaactaaattacaataaccaaatggttacacaaatagaagaaaatataacaaccaaggcaggcactaattttaggctgtttggagtcactctggacactcctccgatgatcaaagatcccattaaacaaattggctcggatatttcgaaacttactgaaagaaaaaagtttggtcaaagccaaactttgagatcaccaatagagatccaaagcaagcagttcagttcttctaggacttgtaccaaagttcaaatgcaaggtgtaacaataggaagagctgtggatttaagtgttcttaatggatatgatcagctaatactagaattggagaagctctttgatatcaaaggccaattacaaactcgcaaccaatggaaaatagctttcacagatagtgacgggtatgagatgcttgttggagacgatccatggcctgaattctgcaaaatggtgaagaagatattgatatattcaaaagaggaggtcaaaaacctgaagtccagtaagagtctctcaagttga

SEQ ID NO: 1839 - protein, 606 aa, Arabidopsis thaliana
MESGNIVNAQPKLSGIIDGSKSYMYEQLWKLCAGPLCDIPKLGENVYYFPQGNIELVQASTREELNELQPICDLPSKLQCRVIAIHLKVENNSDEIYAEITLMPDTTQVVIPTQSENRFRPLVNSFTKVLTASDTSAYGGFSVPKKHAIECLPPLDMSQPLPAQEILAIDLHDNQWRFRHNYRGTPQRHSLTTGWNEFITSKKLVKGDVIVFVRGETGELRVGIRRARHQQGNIPSSIVSIDCMRHGVIASAKHAFDNQCIFIVVYKPRSSQFIVSYDKFLDAVNNKFNVGSRFTMRFEGDDFSERRYFGTIIGVSDFSPHWKCSEWRSLEVQWDEFASFSRPNKVSPWEIEHLVPALNVPRSSLLKNKRLREVNEFGSSSSHLLPPILTQGQEIGQLSVASPMNISLRYRDTTEAAMNPSRLLMSYPVQPMPKLNYNNQMVTQIEENITTKAGTNFRLFGVTLDTPPMIKDPIKQIGSDISKLTERKKFGQSQTLRSPIEIQSKQFSSSRTCTKVQMQGVTIGRAVDLSVLNGYDQLILELEKLFDIKGQLQTRNQWKIAFTDSDGYEMLVGDDPWPEFCKMVKKILIYSKEEVKNLKSSKSLSS

SEQ ID NO: 1840 - DNA, 1797 bp, Arabidopsis thaliana
  CDS (1)..(1797)
atggaaagtggcaacattgtgaatgcacaacctgaattatcaggcataattgatggatccaagagttatatgtacgagcagttatggaaactctgtgcggggcctttgtgtgatattccaaaacttggagaaaagatttattactttcctcaaggcaatatagagcttgttgaggcatctacaagagaagagttgaatgagttaaaaccaatttgtgatcttccttctaagcttcaatgtcgtgttattgctattcaacttaaggtggaaaacaatagtgatgagacttatgctgagatcactttgatgccagatacaactcaagttgtaatccctactcaaaatgaaaatcaatttagaccattagttaattcctttacgaaggttttaacggcctcggatacaagcggtggattctttgttccaaaaaaacatgccattgaatgtcttcctcccctggatatgtctcagcctctaccgacacaagaacttcttgctacagatctccatggtaatcaatggagattcaaccacaactatagaggtacaccgcaaagacatttgttaacaactggttggaatgcattcacaacatcaaaaaaattggttgcaggggatgttattgtattcgttaggggagagactggagagttacgagttggtatcagacgagcaggacatcaacaagggaatataccttcatcaataatatcaatagaaagtatgagacatggggtgattgcttccgcaaagcatgcttttgataaccaatgtatgttcattgtggtttacaagccaagatcaagtcaatttattgtcagttacgacaaattcttagatgctgtgaacaataagttcaatgttggttcaagatttacaatgcggtttgagggtgatgatttctctgaaagaagatattttgggacaattattggagttagtgatttctctcctcattggaagtgttcagagtggcgcaacttagaagtgcagtgggatgaatttgcatcattttcgagacctaataaagtgtcaccctgggagatcgaacatttaatgcctgcgttaaatgttccgcgaccatctttgctcaagaacaagcgtttacgagaagttaatgaaatcggttcttcatcatcacatctcttgcctcctatattgacacaaggacaagaaattggccaactaagcgtggcctccccgatgaatatttctctcacttatcgtgatacaactgaagatgttatgaatccttctagattgctaatgagctaccctgtccaaccaatgcccaaactaaattacaataaccaaatggttacacaaatagaagaaaatataacaaccaagactggcactaattttaggctgtttggagtctcactggtcactccttcagtgatcaaagatcccattgaagaaattggctcggagatttcgaaacttactgaaggaaaaaagtttggtcaaagccaaactttgagatcaccaacagagatccaaagcaagcagttcagttctactagaacttgtaccaaagttcaaatgcaaggtgtaacaatagaaagagctgtggatttaagtgttctgaatggatatgatcagctaatactagaattggaggagctcttcgatctcaaaggccaattacaaactcgcaaccaatgggaaatagctttcacagatagtgacgatgataagatgcttgttggagacgatccatggcctgaattctgcaacatggtgaagaagatattgatattcaaaagaggaggtcaaaaacttgaagtccagtaa

SEQ ID NO: 1841 - protein, 598 aa, Arabidopsis thaliana
MESGNIVNAQPELSGIIDGSKSYMYEQLWKLCAGPLCDIPKLGEKIYYFPQGNIELVEASTREELNELKPICDLPSKLQCRVIAIQLKVENNSDETYAEITLMPDTTQVVIPTQNENQFRPLVNSFTKVLTASDTSGGFFVPKKHAIECLPPLDMSQPLPTQELLATDLHGNQWRFNHNYRGTPQRHLLTTGWNAFTTSKKLVAGDVIVFVRGETGELRVGIRRAGHQQGNIPSSIISIESMRHGVIASAKHAFDNQCMFIVVYKPRSSQFIVSYDKFLDAVNNKFNVGSRFTMRFEGDDFSERRYFGTIIGVSDFSPHWKCSEWRNLEVQWDEFASFSRPNKVSPWEIEHLMPALNVPRPSLLKNKRLREVNEIGSSSSHLLPPILTQGQEIGQLSVASPMNISLTYRDTTEDVMNPSRLLMSYPVQPMPKLNYNNQMVTQIEENITTKTGTNFRLFGVSLVTPSVIKDPIEEIGSEISKLTEGKKFGQSQTLRSPTEIQSKQFSSTRTCTKVQMQGVTIERAVDLSVLNGYDQLILELEELFDLKGQLQTRNQWEIAFTDSDDDKMLVGDDPWPEFCNMVKKILIFKRGGQKLEVQ

SEQ ID NO: 1842 - DNA, 2331 bp, Oryza sativa
  CDS (1)..(2331)
atgccgccggccgccatggctccccctcccccgccgcagggctcctccacaggggatccgctctacgacgagctgtggcacgcctgcgcggggccgctcgtcaccgtgccgcgggtgggcgacctcgtcttctacttcccgcaggggcacatcgagcaggtggaggcgtccatgaaccaggttgccgacagccagatgcgcctctacgatctgccctccaagctgctttgccgtgtcctcaacgtcgagctcaaggcggagcaagacaccgacgaggtctacgcgcaggtcatgctcatgccggagcccgagcaaaatgagatggcggtggagaagacgactcctacgtccggccctgtgcaggcaaggccgccggtgaggtccttctgcaagacgctcaccgcgtctgacaccagcacgcacggcggcttctctgtactccgccgccacgctgatgagtgcctccctcccctggatatgacccagtcgccacccacacaggagctcgtggccaaggatctgcacagcatggactggcgcttccgtcacatctttcgcgggcaaccgaggaggcatctccttcagagtggttggagtgtgtttgtcagttccaaaaggcttgttgctggggatgctttcattttcctcagaggagagaatggtgaactccgtgttggtgttagacgagctatgaggcagctgtccaatgtgccttcttcagtcatatctagccaaagcatgcacctgggagtccttgctactgcatggcatgctatcaacacgaagagtatgttcaccgtctactacaaacctaggacgagcccttcagagttcattataccatatgatcagtatatggagtccgtcaaaaacaattactctgttgggatgaggttcaggatgaggtttgaaggagaagaggcaccagagcagaggtttactggtactataattggcagtgagaatctcgacccagtgtggcctgaatcaagttggagatccctgaaggtgcggtgggatgaaccatcaactattccgcggccagatagagtctctccttggaaaatagagcctgcttcatcacctcctgttaacccccttcctctttctagggttaaaagacctaggccaaatgctcctccagcatctcctgaatctcctattcttacgaaagaagctgctactaaggttgacactgatcctgctcaagcacaacgaagtcaaaacagtacggtcttgcaaggtcaagaacaaatgaccttgaggagcaaccttactgagagtaatgactctgatgtcactgctcataagccaatgatgtggtctccatccccaaatgctgcaaaagcccaccccttgacatttcagcagagaccccctatggataattggatgcagttgggaaggcgtgaaactgactttaaggattttcaggatcaaggttctgctcggcacttctctgacccatactactatgtatctccacagccttccctaactgttgaatcaagcacacagatgcacacagacagtaaggagttacatttctggaatggccagagtactgtgtatggtaattcgagagaccgaccacagaatttcagattcgaacagaactcatcaagttggttaaatcagtcatttgcccgacctgaacagccaagagtgattagaccgcatgcatcaatagctccagttgagttggaaaaaacagaaggcagtgggtttaagatttttgggtttaaagttgatacaaccaatgctcctaacaatcacttgagctccccgatggctgcaacacatgagcctatgcttcaaactccatcatcattgaatcagttgcaacctgtacaaactgattgcattcctgaggtatcagtaagcacagctggaacggcgactgagaatgagaaaagcggtcagcaagctcaacagagttcaaaagatgttcaaagcaagactcaggttgcttcgacgaggagttgtacaaaggtccataagcaaggcgttgcacttggcagatctgtggatctttcaaagttcagtaactatgatgaactcaaagctgagctagacaagatgtttgaattcgatggtgaattggtgtcttcaaacaaaaactggcaaattgtttatactgataatgagggtgatatgatgcttgttggagacgacccatgggaagaattctgcagcattgtgcggaagatttatatttacaccaaggaggaggtccagaagatgaattcgaaatcaaatgccccaaggaaagatgactcttcagaaaatgagaaaggtcatctgccgatgcccaacaaatcagataactag

SEQ ID NO: 1843 - protein, 776 aa, Oryza sativa
MPPAAMAPPPPPQGSSTGDPLYDELWHACAGPLVTVPRVGDLVFYFPQGHIEQVEASMNQVADSQMRLYDLPSKLLCRVLNVELKAEQDTDEVYAQVMLMPEPEQNEMAVEKTTPTSGPVQARPPVRSFCKTLTASDTSTHGGFSVLRRHADECLPPLDMTQSPPTQELVAKDLHSMDWRFRHIFRGQPRRHLLQSGWSVFVSSKRLVAGDAFIFLRGENGELRVGVRRAMRQLSNVPSSVISSQSMHLGVLATAWHAINTKSMFTVYYKPRTSPSEFIIPYDQYMESVKNNYSVGMRFRMRFEGEEAPEQRFTGTIIGSENLDPVWPESSWRSLKVRWDEPSTIPRPDRVSPWKIEPASSPPVNPLPLSRVKRPRPNAPPASPESPILTKEAATKVDTDPAQAQRSQNSTVLQGQEQMTLRSNLTESNDSDVTAHKPMMWSPSPNAAKAHPLTFQQRPPMDNWMQLGRRETDFKDFQDQGSARHFSDPYYYVSPQPSLTVESSTQMHTDSKELHFWNGQSTVYGNSRDRPQNFRFEQNSSSWLNQSFARPEQPRVIRPHASIAPVELEKTEGSGFKIFGFKVDTTNAPNNHLSSPMAATHEPMLQTPSSLNQLQPVQTDCIPEVSVSTAGTATENEKSGQQAQQSSKDVQSKTQVASTRSCTKVHKQGVALGRSVDLSKFSNYDELKAELDKMFEFDGELVSSNKNWQIVYTDNEGDMMLVGDDPWEEFCSIVRKIYIYTKEEVQKMNSKSNAPRKDDSSENEKGHLPMPNKSDN

SEQ ID NO: 1844 - DNA, 1668 bp, Brassica napus
  CDS (1)..(1668)
atggcgaatgtagatggagacgatctcagaacctctctctcaaggtcttataacgatgagctatacacagagctatggaaagcttgtgcaggtccattggtggaggttcctcttgctggagagaaagttttctacttccctcagggtcacatggaacaacttgtggcttcaactaatcagggaattgaatcagaggagatacctgatttcaaacttcctccaaagatactttgtcgagttctcagtgtcatgttaaaggctgagcatgacacagatgaagtttacgctcagatcacattaaaaccagaggaagatcaaagtgaacttacaagtcttgatccaccccttgttgaaccaacaaaacaaatgttccactcgtttgtaaagattctaacggcgtcagatacaagcactcatggtggattctctgttcttcgtaaacacgccactgaatgcttgcctgccttggacatgggacaagctactcctactcaagagcttgtgactagagatcttcatgggtttgaatggaggtttaagcatatattccgaggacaacctaggaggcatttgcttacaacgggttggagtacatttgtatcctccaaaagacttgtagctggagatgcctttgtgttcttgaggggtgagaatggggatttaagagttggagtgaggcgcttagctaggcatcagagcacaatgcctacttcggttatctcaagtcagagcatgcatttgggagtccttgctacagcttctcatgctgttgttaccaaaactatcttccttgtgttttacaagcctaggataagccagttcatagtgggagcgaacaagtatatggaagctatgaagcatggattctctcttggtaccagattcagaatgagatttgaaggagaagagtctcctgaaagaatgtttactggtactattgtgggaattggagatctatcttcacaatggccagcttctacatggagatcattgcaggtccaatgggatgagccaacaacatttcagagaccagacagagtctcaccatgggagattgagcctttcttgtcatctcccccagtttcaacacctgctcagcaatcacaacccaaatgcaaacggtcaagacctgtggaatcatcagttttgactccagctccgcccactttcttgtatggctttcctcagagccaagagactcctcctcctcctcctccctctgcgagtagttgctataggttgtttggatttgatctcacaagcaaccctcctgctccaattcctccagacaagtgtcaagaacccatcactccaagcgcagctaatgagcctaagaagcaacaaaaacaaaggacaagaaccaaagtaatcatgcaaggggtggctgttggtcgtgcagttgatttaacgctgttgaaatcgtataatgaactgattaaggagcttgaggagatgtttgagatcaaaggacagcttcttactcgagagaaatgggtcgttgtcttcacggatgatgaaggtgacatgatgcttgctggagatgatccatggaatgagttttgcaagatggctaagaagatatttatatattcgagcgatgaggttaagaagatgacaacgatgttgaagagctcttcgtcgttagagaatgatgaaagtatggattaa

SEQ ID NO: 1845 - protein, 555 aa, Brassica napus
MANVDGDDLRTSLSRSYNDELYTELWKACAGPLVEVPLAGEKVFYFPQGHMEQLVASTNQGIESEEIPDFKLPPKILCRVLSVMLKAEHDTDEVYAQITLKPEEDQSELTSLDPPLVEPTKQMFHSFVKILTASDTSTHGGFSVLRKHATECLPALDMGQATPTQELVTRDLHGFEWRFKHIFRGQPRRHLLTTGWSTFVSSKRLVAGDAFVFLRGENGDLRVGVRRLARHQSTMPTSVISSQSMHLGVLATASHAVVTKTIFLVFYKPRISQFIVGANKYMEAMKHGFSLGTRFRMRFEGEESPERMFTGTIVGIGDLSSQWPASTWRSLQVQWDEPTTFQRPDRVSPWEIEPFLSSPPVSTPAQQSQPKCKRSRPVESSVLTPAPPTFLYGFPQSQETPPPPPPSASSCYRLFGFDLTSNPPAPIPPDKCQEPITPSAANEPKKQQKQRTRTKVIMQGVAVGRAVDLTLLKSYNELIKELEEMFEIKGQLLTREKWVVVFTDDEGDMMLAGDDPWNEFCKMAKKIFIYSSDEVKKMTTMLKSSSSLENDESMD

SEQ ID NO: 1846 - DNA, 2046 bp, Glycine max
  CDS (1)..(2046)
atggcttccgctgcgccaggtgcaaccaatgatgctttatacaaggaattgtggcatgcctgtgctggaccccttgtcactcttccgcgtgaaggggagagagtttattacttcccgcaaggtcatatggaacaggaacaacttgctctcggcatggcatctcaaatcatgactttaattgaacttgaggcatccatgaatcagggattggagcagcaaatgccttccttcaatctgccgtctaaaattttatgtaaagtggtcaatgttcatcttcgagctgaacctgaaacagatgaagtatatgcacaaataactttgcttcctgaagcagatcaaagcgaggtgacaagccctgatgatcccctgcccgaatctccaaggtgtacagtccattcattttgcaagacactcactgcttctgacactagcactcatggaggtttctctgttcttcgaagacatgcagatgattgcctgccaccactggatatgactcaacagccaccatggcaagaattagttgcaactgatctgcatgggaatgaatggcattttagacatatttttcgaggacaacccaggcgccacttactgaccactgggtggagtgtctttgtcagttccaaaaaattagtggctggtgatgcatttatattcttaaggggtgaaaatggagagctgcgagttggagttaggagactcatgagacagcaaagcaacatgccatcttctgttatatccagtcacagtatgcatctgggtgtcctggctactgcatctcacgccattgccacaggaacattgttttctgtattttacaagcccagaactagccggtctgagtttattgtgagtgtcaacaaataccttgaagctcaaagtcataaactttctgttgggatgagattcaaaatgagatttgagggtgatgaagttcctgaaagaaggttcagtggaacgattgtgggtgttgaagataacaaatcatcagtctgggctgattctgagtggcgatcattaaaggttcaatgggatgaaccatcgtctattttgcgtcctgatagagtttctccatgggaattggagccacttgtgtctacccctcctacaaacccccagccatcccaaagaaacaagagatcgcggcctcccattctaccttcaacaatgcctgattcttctctgcaaggtgtatggaaatcaccagttgaatctgcaccattctcttattgtgaccatcaacatgggcgagatgtctatccatcaaccaatttcaattccactgcaactggttttcttggttttggtgggaactgctatgcttccaacaagtcaatatattggtccagtaggatggaaaactccacagaatctttttctcctgtagcacttaaagaatttggagagaagagacaagggactgcaaatggctgtagactctttaggattcagttacatgacaattctaattctaatgaagaaagtctaccaatggtcactttgtcaggaaggatgggtgatgatggcccccttccatctttggatgctgagtctgaccagcattctgaaccatcaaatgttaatcgatctgatatcccttcggtaagctgtgatgctgaaaaatcatgcctgcggtctccccaggagtcacagagcaggcaaataagaagttgcacaaaggtccacatgcaaggtatggctgttggaagggctgtggatttaacacggtttgatggatatgaggatctgctaaggaaattggaagagatgtttgacatcactggtgagctctgcggatcgacaaaaaaatggcaggttgtgtacactgataatgaagatgatatgatgatggttggggatgatccatggcttgaattttgtagcattgtgaggaaaattttcatctacactgcagaggaggtgaggaagctttcacccaaaataggacttccaatcagtgaagaagttaaacccagcaaaatggactctgaagcagtagccaatcctgaggatcagtcatctattgtggggcctggttgctaa

SEQ ID NO: 1847 - protein, 681 aa, Glycine max
MASAAPGATNDALYKELWHACAGPLVTLPREGERVYYFPQGHMEQEQLALGMASQIMTLIELEASMNQGLEQQMPSFNLPSKILCKVVNVHLRAEPETDEVYAQITLLPEADQSEVTSPDDPLPESPRCTVHSFCKTLTASDTSTHGGFSVLRRHADDCLPPLDMTQQPPWQELVATDLHGNEWHFRHIFRGQPRRHLLTTGWSVFVSSKKLVAGDAFIFLRGENGELRVGVRRLMRQQSNMPSSVISSHSMHLGVLATASHAIATGTLFSVFYKPRTSRSEFIVSVNKYLEAQSHKLSVGMRFKMRFEGDEVPERRFSGTIVGVEDNKSSVWADSEWRSLKVQWDEPSSILRPDRVSPWELEPLVSTPPTNPQPSQRNKRSRPPILPSTMPDSSLQGVWKSPVESAPFSYCDHQHGRDVYPSTNFNSTATGFLGFGGNCYASNKSIYWSSRMENSTESFSPVALKEFGEKRQGTANGCRLFRIQLHDNSNSNEESLPMVTLSGRMGDDGPLPSLDAESDQHSEPSNVNRSDIPSVSCDAEKSCLRSPQESQSRQIRSCTKVHMQGMAVGRAVDLTRFDGYEDLLRKLEEMFDITGELCGSTKKWQVVYTDNEDDMMMVGDDPWLEFCSIVRKIFIYTAEEVRKLSPKIGLPISEEVKPSKMDSEAVANPEDQSSIVGPGC

SEQ ID NO: 1848 - DNA, 1926 bp, Glycine max
  CDS (1)..(1926)
atgtcgttgaactgtggtggctgcggtggagaagaagatgagctctatgagcaactatggaaggcgtgcgcaggaccccatgtggaagttccacgtacaggccaaagggtcttctattttcctcagggtcacatggaacaattagaagtatcaacaaatcaggaactaaaccaacggattccactgttcaagctttcctccaagatcctttgtcgtgtcgtcaacgtccatttactggctgaacaagaaacagatgaggtttatgcacagattactctggtgccggaatctaatcaaactgagcctacgagccccgatccatgccctgctgaacttccaaggccaagagttcactccttctgtaaggtcttaactgcctctgatacaagcacccatggtggcttctctgtcctcaggaagcatgccactgaatgccttccagcattggacatgtctaaatcaacaccaactcaggaattggttgccaaggatctccagggctttgaatggcgctttaagcatatatttagaggtcagccacgtagacacttgctcacaactggatggagtacttttgtgacttccaagagattagttgctggagacacctttgtgtttctgagagggaacaatggagaattgcgggttggagtgaggcgtattgctcctctgcagagcagcatgccatcatctgtgatttctagtcagagcatgcacctaggagttcttgcaactgcatctcatgctgtagcaactcagactctttttgttgtatattataagccaaggacaagccagttcattgttagtgtgaacaagtatttagaggctatcaaccaaaaatgtaatgttggtatgagattcaagatgaggtttgaaggggatgaatcccctgaaaatgacaaaagattttcgggcacaatacttggagtagaggatatttcccctcactgggtgaattcaaattggcgatctcttaaggttcaatgggatgaacctgcatcttttccaagacctgatagagtttcatcatgggagatagaacacattctggcttgtgttcctactacgtcatctcaacctgctgttataaagaataaaaggcctcgacaagcaagtgaaatgacacaacttagggtcatgaccgaaagcaaaaggagtgacagcagttcccacatgaggcatcataacagtaaaagcaacaacaatggtatatcaatgaatcagacagaagcaagttggctatcttctcctcaattatatcaggacacaaccgatgataacaagagcatcttagcttggcctatttcgaaacctcactcagaaagattgaacaatgatcatttccttgaccaggttgacaagaacatcaacaaagtagaggctgctacaagctatagattgtttgggattgaccttattgatcatgcaaggaacaactctctttctgtagagaatgcgtctggagtcgcctctgagtgcaaaactgatgtaaaccacgagtctgatctctcaaaggcttctaaagaatggaaccaagaacaactactagtatctccaaaagagactcaaagcaaacaagtttgtagcagaagttgcactaaggttcaaatgcagggggttgcggtcggtcgtgctgtggatttgaccacattggatggatatgatcaacttgtagatgaattggagaagatgtttgacataaagggacagcttcaacacaggaataagtgggaaactgtcttcactgatgatgaaggggatatgatgcttgttggtgatgatccatggcctgaattctgcaatatggtgaaaagaatcttcatttgttcaagccaggatgtgcacaaattgagctcagggagcaaactacctatctcttctatgggagagattgtaataagcttaaacacaaccgagacctga

SEQ ID NO: 1849 - protein, 641 aa, Glycine max
MSLNCGGCGGEEDELYEQLWKACAGPHVEVPRTGQRVFYFPQGHMEQLEVSTNQELNQRIPLFKLSSKILCRVVNVHLLAEQETDEVYAQITLVPESNQTEPTSPDPCPAELPRPRVHSFCKVLTASDTSTHGGFSVLRKHATECLPALDMSKSTPTQELVAKDLQGFEWRFKHIFRGQPRRHLLTTGWSTFVTSKRLVAGDTFVFLRGNNGELRVGVRRIAPLQSSMPSSVISSQSMHLGVLATASHAVATQTLFVVYYKPRTSQFIVSVNKYLEAINQKCNVGMRFKMRFEGDESPENDKRFSGTILGVEDISPHWVNSNWRSLKVQWDEPASFPRPDRVSSWEIEHILACVPTTSSQPAVIKNKRPRQASEMTQLRVMTESKRSDSSSHMRHHNSKSNNNGISMNQTEASWLSSPQLYQDTTDDNKSILAWPISKPHSERLNNDHFLDQVDKNINKVEAATSYRLFGIDLIDHARNNSLSVENASGVASECKTDVNHESDLSKASKEWNQEQLLVSPKETQSKQVCSRSCTKVQMQGVAVGRAVDLTTLDGYDQLVDELEKMFDIKGQLQHRNKWETVFTDDEGDMMLVGDDPWPEFCNMVKRIFICSSQDVHKLSSGSKLPISSMGEIVISLNTTET

SEQ ID NO: 1850 - DNA, 2106 bp, Glycine max
  CDS (1)..(2106)
atgaaggaaggtgaaaaggtattggatccgcagctatggcacgcgtgtgcaggtggcatggttcagatgccgcaaatgaactccaaagtcttctacttcccacagggtcacgccgaacacgcccacaccaacattcatctgaggcttccaccattcattttatgcaacgttgaagcagttaagttcatggcgaacccagaaaccgacgaagtgttcgcgaagctgagtttgcttcctctcagaaactcggaactcggtgctgactcggacggtgctggtggtgatgacgtggcagaaccttcttgttgtgaaaagcctgcgtctttcgctaagactctgactcagagcgacgccaacaatggtggggggttttcggttccgcggtactgcgcggagacaattttcccgcgtctggactacacggcggagccgccggtgcagacggtggtggcgaaagacgtgcacggcgagacctggaggttccggcacatctaccgagggacgccacgtaggcacttgctgaccacagggtggagcagtttcgtgaaccagaagaaactcgtggctggggattccgttgtgtttctgagggctgagaatggtgatttgtgtgttgggattcggagggcaaaaaagggaattagcgagggttcaggttcaggttcatcatctgtgtggagttcagcttctgggtctggaaatggaaattgtgggattgggccttatgggcctttttcttttttcttgaaagaagaaaacaaaatgttaaggaatggttgtggtgggaatttgagtggaagggtgaaagtgagggctgaggatgttgttgaagctgtgactcttgctgctagtaataagccttttgaggttgtgtattacccaagagctagtactcctgagttttgtgttaaggcttctgctgtgagggctgctatgaggattcagtggtgttctgggatgaggttcaagatggcctttgagactgaggatgcttcaaggataagttggttcatgggaaccattgcttctgttcaggttgttgaccccatccgctggcctaattccccttggaggcttcttcaggttacttgggatgagccagatttactacaaaatgtgaagcgtgttagcccgtggcttgttgagttggtatctaacattccactcattaatttcacacccttctctccaccaagaaagaagctgcggccacaacacccagacttcccccttgatgttcaatttccaataccaatgttttcaggcaaccagcttgggcctaacagccccttgtgtggtttttcggataatgctcctgcagggatacagggagccaggcatgctcaatttggaaaatctctatcagatctccaccttaacaataaactgcagttggggatgcttccaactaatatccatcaacttggagtgtataatgagatttcaaatggtaacatgatgaccaaccatgataagagcaaagaaagtttatcatgctttctgaccatggggaaatctaccaagagtttggagaaatctgatgatgttaagaaacaccagtttttgctttttggtcaaccaattctcactgagcaacaaatttctagctgttctggagatgtgttgtctcaccgaaaaagatcggtaagtgatgataaggacaaagcgaagtgccttatggatgactcgcaatctacactctcacagcagttttcaccaggaaaagcatcttctgctgagttctcttggcaacttggcttggatactggtcattgcaaagttttcttggagtcggaagatgtaggaaggaccctagacctatcgctgtttggttcttatgaagatctgtataggagacttgccatcatgtttgggattgaaaggtctgagattttgaaccatgtgctctaccatgatgcagctggtgctgctaagaaaaccggagaagaacccttcagtgacttcatgaagacagcaaaaagattgacaattctgacggattcaagcagcaaaaacattaaaagggcctttattacaggaactcgtaatggtgaacatggactagatgcatcaaacaaaacaggccctctgagcatatttgcttaa

SEQ ID NO: 1851 - protein, 701 aa, Glycine max
MKEGEKVLDPQLWHACAGGMVQMPQMNSKVFYFPQGHAEHAHTNIHLRLPPFILCNVEAVKFMANPETDEVFAKLSLLPLRNSELGADSDGAGGDDVAEPSCCEKPASFAKTLTQSDANNGGGFSVPRYCAETIFPRLDYTAEPPVQTVVAKDVHGETWRFRHIYRGTPRRHLLTTGWSSFVNQKKLVAGDSVVFLRAENGDLCVGIRRAKKGISEGSGSGSSSVWSSASGSGNGNCGIGPYGPFSFFLKEENKMLRNGCGGNLSGRVKVRAEDVVEAVTLAASNKPFEVVYYPRASTPEFCVKASAVRAAMRIQWCSGMRFKMAFETEDASRISWFMGTIASVQVVDPIRWPNSPWRLLQVTWDEPDLLQNVKRVSPWLVELVSNIPLINFTPFSPPRKKLRPQHPDFPLDVQFPIPMFSGNQLGPNSPLCGFSDNAPAGIQGARHAQFGKSLSDLHLNNKLQLGMLPTNIHQLGVYNEISNGNMMTNHDKSKESLSCFLTMGKSTKSLEKSDDVKKHQFLLFGQPILTEQQISSCSGDVLSHRKRSVSDDKDKAKCLMDDSQSTLSQQFSPGKASSAEFSWQLGLDTGHCKVFLESEDVGRTLDLSLFGSYEDLYRRLAIMFGIERSEILNHVLYHDAAGAAKKTGEEPFSDFMKTAKRLTILTDSSSKNIKRAFITGTRNGEHGLDASNKTGPLSIFA

SEQ ID NO: 1852 - DNA, 2019 bp, Zea mays
  CDS (1)..(2019)
atggcgagcgccggcgtggcgggctgctcagggagtgctggcgatgctttgttcagggaactctggcatgcttgtgctgggccgttggtcacagtgcctcgccaaggcgagctggtttactacttcccacagggtcatatggaacagcttgaagcatctacagatcaacaacttgatcagcacttacctttgtttgatctaccacccaagattctctgcaaggtggtcaatgtagaacttagagctgaaactgattctgatgaagtttatgctcaaattatgctgcaaccagaagcagatcaaagtgagcccaccagcccagattctgagccaccggagcctgaaagatgcaacgtctattccttctgcaagaccttgactgcttcagatacaagtacacatggtggattctctgtcctcaggaggcatgctgaagaatgtttgccccaactggacatgactcagaatccaccatggcaagaactgctggctaaagatctccatggaaatgaatggcatttccgtcacatctttcgagggcaaccaaggaggcatctacttacgacaggttggagtgtttttgttagctcaaaaagattggttgctggtgacgcgtttatctttttgagaggtgagaacggagagctgagagttggggtaaggaggctcatgaggcaactaaataacatgccatcttcggttatctcaagccacaacatgcatcttggagtcctagcaactgcatctcatgccatctccacaggaactctcttttctgttttctacaaacctagaacaagtcgatcggaatttgtcgttagtgtaaataagtaccttgaagctaagaatcacaaggtgtctgttggcatgaggtttaaaatgagatttgagggtgatgaatctcctgaaagaagattaagtgggacaattattggtctgggaagcatgccagctaactcaacttctccatgggctaactctgattggagatctttgagggtccaatgggacgagccttctgctattctgcgtccagatagagtttcaccatgggaactagaaccccttgatgcaactaatccacaaccacctcaacctcatttacggaataagcgtgcacgaccccctgctttactttctattgctccagaacttcctcaagtttttggttttttgaaatccccagctgagcctgcccaagctttctcattttcaagaccgcagcaaactcaggaattataccattcaaatcccagttcaatcttctcatcatcgttgaatgtaggattcagttcaaagaatgaccgttctactccaatcaacagtcatttgtactggacaatgaggcagacaagaactgaatcctactctgctagcgttaacaaagctcctactgaaaagaagcaagaatctgctacttctggctgcagattgtttggcattgagataggttctgcagtatcaccagtggctactgttgctagtgttggccaggatcagccacctgctctctcagtagacgttgaatctgatcagctgtcacagccatccaatgccaacaaaacggatgccccagtggcaagcagcgagcgctctcttaacgagtcagagagccggcaagtcaggagctgcaccaaggtaatcatgcaaggaatggcggttggcagggcagtggacttgacaaggttagatgggtatgctgatctccaccgcaagttggaggagatgtttgatatccagggagagctttctgccaacctcaagaaatggaaggtcatttacacagatgacgaggatgatacgatgctggtcggggacgatccatggaatgaattcctcaggatggtaaaaaggatatacatttactcttacgaggaggccaagtctttgactcgcaaggcgaagccgccggttgttggtgacaccatcaagccagacccaaacaaattgccaccggaatctgacgtgccacatgactcaaacaacaatgctcccgttgctgctgattatcaggactga

SEQ ID NO: 1853 - protein, 672 aa, Zea mays
MASAGVAGCSGSAGDALFRELWHACAGPLVTVPRQGELVYYFPQGHMEQLEASTDQQLDQHLPLFDLPPKILCKVVNVELRAETDSDEVYAQIMLQPEADQSEPTSPDSEPPEPERCNVYSFCKTLTASDTSTHGGFSVLRRHAEECLPQLDMTQNPPWQELLAKDLHGNEWHFRHIFRGQPRRHLLTTGWSVFVSSKRLVAGDAFIFLRGENGELRVGVRRLMRQLNNMPSSVISSHNMHLGVLATASHAISTGTLFSVFYKPRTSRSEFVVSVNKYLEAKNHKVSVGMRFKMRFEGDESPERRLSGTIIGLGSMPANSTSPWANSDWRSLRVQWDEPSAILRPDRVSPWELEPLDATNPQPPQPHLRNKRARPPALLSIAPELPQVFGFLKSPAEPAQAFSFSRPQQTQELYHSNPSSIFSSSLNVGFSSKNDRSTPINSHLYWTMRQTRTESYSASVNKAPTEKKQESATSGCRLFGIEIGSAVSPVATVASVGQDQPPALSVDVESDQLSQPSNANKTDAPVASSERSLNESESRQVRSCTKVIMQGMAVGRAVDLTRLDGYADLHRKLEEMFDIQGELSANLKKWKVIYTDDEDDTMLVGDDPWNEFLRMVKRIYIYSYEEAKSLTRKAKPPVVGDTIKPDPNKLPPESDVPHDSNNNAPVAADYQD

SEQ ID NO: 1854 - DNA, 2034 bp, Zea mays
  CDS (1)..(2034)
atggcggaggccggcgtggcacgcggctcagggagtgctggcgatgctttgttcagggaactctggcatgcttgtgctgggccattggtcacagtgcctcgccaaggcgagctggtttattacttcccgcagggtcatatggaacagcttgaagcatctacagatcaacaacttgatcagcacttgcctttgtttaatctaccgcacaagatcctctgcaaggtggtcaatgtagaacttagagctgaaactgattctgatgaagtttatgctcaaattatgctgcaaccacaaacagagcaaagtgagcccaccagcccagatcctgaaccacctgagcctgaaagatgcaacattcattccttctgcaagaccttgactgcttcagatacaagtacccatggtggattctctgtcctcaggaggcatgctgaagaatgtttgccccaactggacatgactcagaatccaccgtggcaagaactagtggctaaagatctccatggaaatgaatggcatttccgtcacatctttcgagggcaaccaaggaggcatctacttacgacaggctggagtgtttttgttagctcaaaaagattggttgcgggtgacgcgtttatcttcttgagaggtgagaacggagagctgcgagtcggggtaaggaggctcatgagacaactaaataacatgccgtcttcggttatctcaagccacagcatgcatcttggagtcctagcaactgcatctcatgccatctccactggaactctcttttctgttttctacaaacccagaacaagtagatctgaatttgtcgttagtgtaaacaagtacctcgaagctaagaatcacaagatgtctgttggtatgaggtttaaaatgagatttgagggtgatgaatcccctgaaagaagattcagtgggacaattattggtatgggatgcatgccagctaactccacatctccatgggctaactctgaatggagatcattgaaggtccaatgggacgagccttctgctattctgcgtccagatagagtttcaccatgggaagtagaaccccttgatcgaactaatccacagccacctcaacctcctttacggaataagcgagcacggcctcctgcttcaccttcgattgctccagaacttgctccagtttttggtttttggaagtccccagctgagcctgcccaagctttctcattctcaggactgcagcgaactcaggagctataccattcaagccccagttcaatgttctcatcgtcgttgaatgtgggattcaatccaaagtacgagggtcccactccaaacaccaaccatttgtactggacaatgagagagacaagaactgaatcctactccgctagcatcaacaaagctccaactgaaaagaagcaagaatccactacttctggctgcagattgttcggtatcgagataggttcttctgcagtgtcacccgtggttactgttgctagcgtcgggcatgatcctccgccacctgctctctcagtagacgctgaatcagaccagctgtcacagccgtcccatgccaacaaagcaatggatgccccagcggcaagcagcgatcgctctcctaacgagacagagagccggcaagccaggagctgcaccaaggtaatcatgcaaggggtggcggttggcagggcggtggacttgacgaggctagatgggtacgatgacctccgccgcaagttggaggagatgttcgatatcccgggagagctttgcgccagcatcaagaaatggaaggtgatctacacagatgacgaggacgatatgatgctggtcggggacgatccatggagtgaattttgcaggatggtaaaaaggatatacatttattcctacgaggaggccaagtctttgactcccaaggcgaagctgccggccatcggtggtgacaccggcgtcaagccggacccaagcaaactgccaccagaatctgacgtgccacagagcgactccgacaacagtgctcccgttgctgctgataaggactga

SEQ ID NO: 1855 - protein, 677 aa, Zea mays
MAEAGVARGSGSAGDALFRELWHACAGPLVTVPRQGELVYYFPQGHMEQLEASTDQQLDQHLPLFNLPHKILCKVVNVELRAETDSDEVYAQIMLQPQTEQSEPTSPDPEPPEPERCNIHSFCKTLTASDTSTHGGFSVLRRHAEECLPQLDMTQNPPWQELVAKDLHGNEWHFRHIFRGQPRRHLLTTGWSVFVSSKRLVAGDAFIFLRGENGELRVGVRRLMRQLNNMPSSVISSHSMHLGVLATASHAISTGTLFSVFYKPRTSRSEFVVSVNKYLEAKNHKMSVGMRFKMRFEGDESPERRFSGTIIGMGCMPANSTSPWANSEWRSLKVQWDEPSAILRPDRVSPWEVEPLDRTNPQPPQPPLRNKRARPPASPSIAPELAPVFGFWKSPAEPAQAFSFSGLQRTQELYHSSPSSMFSSSLNVGFNPKYEGPTPNTNHLYWTMRETRTESYSASINKAPTEKKQESTTSGCRLFGIEIGSSAVSPVVTVASVGHDPPPPALSVDAESDQLSQPSHANKAMDAPAASSDRSPNETESRQARSCTKVIMQGVAVGRAVDLTRLDGYDDLRRKLEEMFDIPGELCASIKKWKVIYTDDEDDMMLVGDDPWSEFCRMVKRIYIYSYEEAKSLTPKAKLPAIGGDTGVKPDPSKLPPESDVPQSDSDNSAPVAADKD

SEQ ID NO: 1856 - DNA, 2019 bp, Zea mays
  CDS (1)..(2019)
atggcgaacgccggcgtggcacgcggctcagggagtgctggcgatgctttgttcagggaactctggcatgcttgtgctgggccgttggtcacagtgcctcgccaaggcgagctggtttactacttcccacagggtcatatggaacagcttgaagcatctacagatcaacaacttgatcagcacttacctttgtttaatctaccacacaagatcctctgcaaggtggtcaatgtagaacttagagctgaaactgattctgatgaagtttatgctcaaattatgctgcaaccagaagcagatcaaagtgagcccaccagcccagattctgagccaccggagcctgaaagatgcaacgtctattccttctgcaagaccttgactgcttcagatacaagtacccatggtggattctctgtcctcaggaggcatgctgaagaatgtttgccccaactggacatgactcagaatccaccatggcaagaactactggctaaagatctccatggaaatgaatggcatttccgtcacatctttcgagggcaaccaaggaggcatctacttacaacaggctggagtgtttttgttagctcaaaaagattggttgcgggtgacgcgtttatcttcttgagaggtgagaacggagagctgagagtcggggtaaggaggctcatgagacaactaaataacatgccatcttcggttatctcaagccacaacatgcatcttggagtcctagcaactgcatctcatgccatctccacaggaactctcttttctgttttctacaaacctagaacaagtcgatcggaatttgtcgttagtgtaaataagtaccttgaagctaagaatcacaaggtgtctgttggcatgaggtttaaaatgagatttgagggtgatgaatctcctgaaagaagattaagtgggacaattattggtctgggaagcatgccagctaactcaacttctccatgggctaactctgattggagatctttgaaggtccaatgggacgagccttctgctattctgcgtccagatagagtttcaccatgggaactagaaccccttgatgcaactaatccacaaccacctcaacctcatttacggaataagcgtgcacgaccccctgctttactttctattgctccagaacttcctcaagtttttggtttttggaaatccccagctgagcctgcccaagctttctcattttcaagaccacagcaaactcaggaattataccattcaaatcccagttcaatcttctcatcatcgttgaatgtaggattcagttcaaagaatgaccgttctactccaatcaacagtcatttgtactggacaatgaggcagacaagaactgaatcctactctgctagcattaacaaagctcctactgaaaagaagcaagaatctgctacttctggctgcagattgtttggcattgagataggttctgcagtatcaccagtggctactgttgctagtgttggccaggatcagccacctgctctctcagtagacgttgaatctgatcagctgtcacagccatccaatgccaacaaaacggatgccccagtggcaagcagcgagcgctctcttaacgagtcagagagccggcaagtcaggagctgcaccaaggtaatcatgcaaggaatggcggttggcagggcagtggacttgacaaggttagatgggtatgctgatctccaccgcaagttggaggagatgtttgatatccagggagagctttctgccaacctcaagaaatggaaggtcatttacacagatgacgaggatgatacgatgctggtcggggacgatccatggaatgaattcctcaggatggtaaaaaggatatacatttactcttacgaggaggccaagtctttgactcgcaaggcgaagccgccggttgttggtgacaccatcaagccagacccaaacaaattgccaccggaatctgacgtgccacatgactcaaacaacaatgctcccgttgctgctgattatcaggactga

SEQ ID NO: 1857 - protein, 672 aa, Zea mays
MANAGVARGSGSAGDALFRELWHACAGPLVTVPRQGELVYYFPQGHMEQLEASTDQQLDQHLPLFNLPHKILCKVVNVELRAETDSDEVYAQIMLQPEADQSEPTSPDSEPPEPERCNVYSFCKTLTASDTSTHGGFSVLRRHAEECLPQLDMTQNPPWQELLAKDLHGNEWHFRHIFRGQPRRHLLTTGWSVFVSSKRLVAGDAFIFLRGENGELRVGVRRLMRQLNNMPSSVISSHNMHLGVLATASHAISTGTLFSVFYKPRTSRSEFVVSVNKYLEAKNHKVSVGMRFKMRFEGDESPERRLSGTIIGLGSMPANSTSPWANSDWRSLKVQWDEPSAILRPDRVSPWELEPLDATNPQPPQPHLRNKRARPPALLSIAPELPQVFGFWKSPAEPAQAFSFSRPQQTQELYHSNPSSIFSSSLNVGFSSKNDRSTPINSHLYWTMRQTRTESYSASINKAPTEKKQESATSGCRLFGIEIGSAVSPVATVASVGQDQPPALSVDVESDQLSQPSNANKTDAPVASSERSLNESESRQVRSCTKVIMQGMAVGRAVDLTRLDGYADLHRKLEEMFDIQGELSANLKKWKVIYTDDEDDTMLVGDDPWNEFLRMVKRIYIYSYEEAKSLTRKAKPPVVGDTIKPDPNKLPPESDVPHDSNNNAPVAADYQD

SEQ ID NO: 1858 - DNA, 1986 bp, Zea mays
  CDS (1)..(1986)
atggccgcggcgatggacgcgcccaaccctggagcggctgctggcccaggaatgcctagtgacgccctgtaccaggagctgtggcatgcgtgtgctggcccgttggtcacagtacctagacaaggcgagcgtgtctattacttccctcagggccatatggagcagctcgaggcgtctgcacaccaccagcagcttgatcagtacttaccgatgttcgatctaccacccaagatcctatgcagagtagtcaacgtggaactacgggccgaagctgattcagatgaagtttatgctcaaattatgttgcagccagaagctgatcaaaatgaactcaccagcctggacgctgaaccacaagaacgtgaaaaatgcactgcccattccttctgcaagacactgacagcttcagatacgagcactcacggcgggttttctgttcttcggaggcatgctgaggaatgtcttcctcagctggacatgtctcaaaatccaccttgccaagaactggttgccaaagagcgccatggcactgaatggcattttcggcacatttttcgagggcaacccaagaggcatctccttaccaccggctggagtgtctttgttagctcaaaaagattggtttctggggatgcattcatcttcatgagaggtgaaaatggtgagctacgggttggtgtaaggaggctcatgagacaagtaaatagcatgccgtcatctgtcatatcaagccacagcatgcatcttggagtattggccacagcctcccatgccatctccactggaaccctcttttctgttttctacaaaccaagaactagtcgctctgattttattgtgagtgtgaacaagtaccttgaagctaagaagcagaaaatatctgttggaatgaggtttaagatgagatttgaaggtgatgatgctcctgaaagaaggttcagcggaacaatcattggcatcgggagtttgccggcaatgtcaaaatctctgtgggcagattctgactggagatctctaaaggttcaatgggatgaaccttcatccattcttcgtccagatagaatctcaccatgggaagtggagccactggatgcagctaatccacaatcccctcaacctccactaagggctaagcgtccacgacccccagcttcaccttgtatggtttcggaactgccttcaggttttggactctggaaatccccaattgaatcatcctgtacactctcattttcggaacctcaacgggctcgagagttatttccttcaatccccacgtcaaccttgtcatcttcatcaaatgtcagttttaattcaaagaatgagccgtccatgctaaccagtcagttctactggtcagcaaggcatacaagagctgactcctgcgctgctagcaccaacacagtcgtaattgaaaagaagcaagagccaagttctggtggttgtagattgtttggaattaatatatgctcagctgaggaagaagtattacctgaggttactgctccaggtgttggttatgagcagactgctgcctctgtagagttgaactcggataagctctcacagccatctgatgtcaacaattctgatgccctagcagctagcagtgaacgttcacctcttgaatcccaaagccggcaagtgaggagctgtaccaaggtaattatgcaaggaatggcagtaggaagggctgtagacctgacaaagcttagtggctacagcgatctttgccagaagctggaggagatgtttgacatccagggggagctgggttccacactaaagaaatggcgggtcattttcactgatgatgaggatgacatgatgcttgttggagatgatccttgggatgagttttgcaggatggtgaaaaggatttacatttacacatacgaggaggcaaagaagctgacatccaagtcaaagttaccggttagcagtgacagcagcaagctgagcgctgcgaactcactgtctgaatga

SEQ ID NO: 1859 - protein, 661 aa, Zea mays
MAAAMDAPNPGAAAGPGMPSDALYQELWHACAGPLVTVPRQGERVYYFPQGHMEQLEASAHHQQLDQYLPMFDLPPKILCRVVNVELRAEADSDEVYAQIMLQPEADQNELTSLDAEPQEREKCTAHSFCKTLTASDTSTHGGFSVLRRHAEECLPQLDMSQNPPCQELVAKERHGTEWHFRHIFRGQPKRHLLTTGWSVFVSSKRLVSGDAFIFMRGENGELRVGVRRLMRQVNSMPSSVISSHSMHLGVLATASHAISTGTLFSVFYKPRTSRSDFIVSVNKYLEAKKQKISVGMRFKMRFEGDDAPERRFSGTIIGIGSLPAMSKSLWADSDWRSLKVQWDEPSSILRPDRISPWEVEPLDAANPQSPQPPLRAKRPRPPASPCMVSELPSGFGLWKSPIESSCTLSFSEPQRARELFPSIPTSTLSSSSNVSFNSKNEPSMLTSQFYWSARHTRADSCAASTNTVVIEKKQEPSSGGCRLFGINICSAEEEVLPEVTAPGVGYEQTAASVELNSDKLSQPSDVNNSDALAASSERSPLESQSRQVRSCTKVIMQGMAVGRAVDLTKLSGYSDLCQKLEEMFDIQGELGSTLKKWRVIFTDDEDDMMLVGDDPWDEFCRMVKRIYIYTYEEAKKLTSKSKLPVSSDSSKLSAANSLSE

SEQ ID NO: 1860 - DNA, 1935 bp, Zea mays
  CDS (1)..(1935)
atgaaggaggcgggcgaggagaggtgccttgacccgcagctgtggcacgcgtgcgccggcggcatggtgcagatgccccccgtgcgctcccgtgtctactacttcccgcagggccacgcggaacacgcgcacggcggcggcggcgccacggacctcgccggggcgcgggcgcgacctctcccgccgctcgtgctctgcaccgtcgccggggtgcgcttcctggccgatccggagaccgacgaggtcttcgccaagatccgcctcgtgccggccgcgcccggcgaggtggagttcggagagccccgcgagttcggcatcgaccccgaggacgcccgggagaagctgtcctccttcgccaagacgctcacgcagtccgacgccaacaacggcggcggcttctccgtgccgcgctactgcgccgagaccatcttccccaagctcgactaccgggccgacccgccggtgcagacggtgctcgccaaggacgtgcacggggaggtctggaagttccgccacattttccggggcacgccgcgccggcatttgctcaccacgggatggagcgcgttcgtcaaccagaagaagctcgtcgccggggactccatcgtattcctgcgcaccgagcatggcgagctgtgcgtcgggatacgccgtgccaagcgggtgtcctgtggtggcatggagtgcatctctggctggaacgccccggtgtacggggccttgtcggcgttcttgaaggacgaggaaggtaagatcactaagggtcctggtgggtacatgagaggcagggggaaggtggagatcacggacgttgttgaggccgcaagcttagccgcgagcgggcagccatttgaggtggtgtactacccgagagctagcactccagagtttgttgtgaaggctgcatcggtacagaacgcgatgaggaaccagtggtgccctgggatgaggttcaagatggcatttgagacagaggattcgtcaaggatcagctggtttatggggacgatagcttctgctcaggttgctgacccaatcagatggccaaattcaccgtggaggcttcttcaggtgtcatgggatgaaccagacttgctgcagaatgtgaaatgtgtcaatccatggcttgtggagattgtatcaagcattccaccgattcacctagggacattttctccacctagaaagaagttgcgggtggcccaacatccagactttccatttgagggtcagctgttgaatccaattttccatggcaacccacttggtccaagcaacagcccacttcgctgtttctcggacatcgctcctgcaggcatacagggagccaggcatgctcaatttggtttacccctaacagactaccagcttaaccagctgcacctcggtttcaaccggcttggtgctatgactccgacgccccgtatatccaagggttttgtgatcagcagcgcaccagccagtgagagtgtctcttgcttgctgacaatcggcacaccacaggccacagagaaatctgatgacataaagagaccccacataatgctgttcggaaagcctatccttactgagcagcagatggattctggaggatcgagggaaggcctatcccaagaccgcaaggcttctgagcttgggctagaagacgggcactgcaaggtgtttatggaatcagaggatgttggccgcaccattgacctatctgtctttggttcgtacgaagagctgtacggccagttagcggacatgtttggaattgagaaggcggaaataatgaggcacctttgctaccgtgatgctgctggtgctgtcaggcatactggtgaagagccgttcaatgacttcatgaaagtagcacggaggctcaccattatagagggcacggaggggagactgcagaaacctctcgtggaatacatggtcgagcgggcttga

SEQ ID NO: 1861 - protein, 644 aa, Zea mays
MKEAGEERCLDPQLWHACAGGMVQMPPVRSRVYYFPQGHAEHAHGGGGATDLAGARARPLPPLVLCTVAGVRFLADPETDEVFAKIRLVPAAPGEVEFGEPREFGIDPEDAREKLSSFAKTLTQSDANNGGGFSVPRYCAETIFPKLDYRADPPVQTVLAKDVHGEVWKFRHIFRGTPRRHLLTTGWSAFVNQKKLVAGDSIVFLRTEHGELCVGIRRAKRVSCGGMECISGWNAPVYGALSAFLKDEEGKITKGPGGYMRGRGKVEITDVVEAASLAASGQPFEVVYYPRASTPEFVVKAASVQNAMRNQWCPGMRFKMAFETEDSSRISWFMGTIASAQVADPIRWPNSPWRLLQVSWDEPDLLQNVKCVNPWLVEIVSSIPPIHLGTFSPPRKKLRVAQHPDFPFEGQLLNPIFHGNPLGPSNSPLRCFSDIAPAGIQGARHAQFGLPLTDYQLNQLHLGFNRLGAMTPTPRISKGFVISSAPASESVSCLLTIGTPQATEKSDDIKRPHIMLFGKPILTEQQMDSGGSREGLSQDRKASELGLEDGHCKVFMESEDVGRTIDLSVFGSYEELYGQLADMFGIEKAEIMRHLCYRDAAGAVRHTGEEPFNDFMKVARRLTIIEGTEGRLQKPLVEYMVERA

SEQ ID NO: 1862 - DNA, 22 bp, Artificial sequence
  primer
atggcgagtgttgaaggtgatg

SEQ ID NO: 1863 - DNA, 21 bp, Artificial sequence
  primer
tcaccccctactacgattttc

SEQ ID NO: 1864 - protein, 1301 aa, Artificial sequence
  consensus sequence
  Variant (3)..(3): Xaa in position 3 is any amino acid
  Variant (11)..(12): Xaa in position 11 to 12 is any amino acid
  Variant (14)..(15): Xaa in position 14 to 15 is any amino acid
  Variant (17)..(17): Xaa in position 17 is any amino acid
  Variant (18)..(18): Xaa in position 18 is any or no amino acid
  Variant (20)..(20): Xaa in position 20 is any amino acid
  Variant (27)..(27): Xaa in position 27 is any amino acid
  Variant (29)..(30): Xaa in position 29 to 30 is any amino acid
  Variant (31)..(113): Xaa in position 31 to 113 is any or no amino acid
  Variant (115)..(120): Xaa in position 115 to 120 is any amino acid
  Variant (121)..(130): Xaa in position 121 to 130 is any or no amino acid
  Variant (133)..(136): Xaa in position 133 to 136 is any amino acid
  Variant (138)..(141): Xaa in position 138 to 141 is any amino acid
  Variant (143)..(145): Xaa in position 143 to 145 is any amino acid
  Variant (147)..(150): Xaa in position 147 to 150 is any amino acid
  Variant (157)..(158): Xaa in position 157 to 158 is any amino acid
  Variant (160)..(160): Xaa in position 160 is any amino acid
  Variant (162)..(182): Xaa in position 162 to 182 is any amino acid
  Variant (183)..(203): Xaa in position 183 to 203 is any or no amino acid
  Variant (205)..(205): Xaa in position 205 is any amino acid
  Variant (207)..(207): Xaa in position 207 is any amino acid
  Variant (222)..(222): Xaa in position 222 is any amino acid
  Variant (224)..(225): Xaa in position 224 to 225 is any amino acid
  Variant (227)..(230): Xaa in position 227 to 230 is any amino acid
  Variant (232)..(232): Xaa in position 232 is any amino acid
  Variant (234)..(234): Xaa in position 234 is any amino acid
  Variant (235)..(252): Xaa in position 235 to 252 is any or no amino acid
  Variant (254)..(255): Xaa in position 254 to 255 is any amino acid
  Variant (256)..(258): Xaa in position 256 to 258 is any or no amino acid
  Variant (260)..(260): Xaa in position 260 is any amino acid
  Variant (264)..(264): Xaa in position 264 is any amino acid
  Variant (266)..(266): Xaa in position 266 is any amino acid
  Variant (268)..(268): Xaa in position 268 is any amino acid
  Variant (270)..(272): Xaa in position 270 to 272 is any amino acid
  Variant (274)..(274): Xaa in position 274 is any amino acid
  Variant (279)..(279): Xaa in position 279 is any amino acid
  Variant (282)..(290): Xaa in position 282 to 290 is any amino acid
  Variant (293)..(293): Xaa in position 293 is any amino acid
  Variant (301)..(302): Xaa in position 301 to 302 is any amino acid
  Variant (305)..(305): Xaa in position 305 is any amino acid
  Variant (308)..(309): Xaa in position 308 to 309 is any amino acid
  Variant (311)..(311): Xaa in position 311 is any amino acid
  Variant (313)..(313): Xaa in position 313 is any amino acid
  Variant (317)..(319): Xaa in position 317 to 319 is any amino acid
  Variant (321)..(321): Xaa in position 321 is any amino acid
  Variant (323)..(326): Xaa in position 323 to 326 is any amino acid
  Variant (327)..(341): Xaa in position 327 to 341 is any or no amino acid
  Variant (343)..(344): Xaa in position 343 to 344 is any amino acid
  Variant (346)..(346): Xaa in position 346 is any amino acid
  Variant (349)..(350): Xaa in position 349 to 350 is any amino acid
  Variant (351)..(401): Xaa in position 351 to 401 is any or no amino acid
  Variant (403)..(404): Xaa in position 403 to 404 is any amino acid
  Variant (406)..(406): Xaa in position 406 is any amino acid
  Variant (407)..(408): Xaa in position 407 to 408 is any or no amino acid
  Variant (410)..(411): Xaa in position 410 to 411 is any amino acid
  Variant (413)..(413): Xaa in position 413 is any amino acid
  Variant (416)..(416): Xaa in position 416 is any amino acid
  Variant (418)..(418): Xaa in position 418 is any amino acid
  Variant (421)..(426): Xaa in position 421 to 426 is any amino acid
  Variant (428)..(430): Xaa in position 428 to 430 is any amino acid
  Variant (432)..(432): Xaa in position 432 is any amino acid
  Variant (435)..(435): Xaa in position 435 is any amino acid
  Variant (436)..(436): Xaa in position 436 is any or no amino acid
  Variant (438)..(438): Xaa in position 438 is any amino acid
  Variant (439)..(440): Xaa in position 439 to 440 is any or no amino acid
  Variant (442)..(447): Xaa in position 442 to 447 is any amino acid
  Variant (448)..(459): Xaa in position 448 to 459 is any or no amino acid
  Variant (464)..(464): Xaa in position 464 is any amino acid
  Variant (466)..(466): Xaa in position 466 is any amino acid
  Variant (469)..(471): Xaa in position 469 to 471 is any amino acid
  Variant (472)..(480): Xaa in position 472 to 480 is any or no amino acid
  Variant (483)..(484): Xaa in position 483 to 484 is any amino acid
  Variant (486)..(492): Xaa in position 486 to 492 is any amino acid
  Variant (493)..(496): Xaa in position 493 to 496 is any or no amino acid
  Variant (498)..(499): Xaa in position 498 to 499 is any amino acid
  Variant (501)..(501): Xaa in position 501 is any amino acid
  Variant (504)..(504): Xaa in position 504 is any amino acid
  Variant (506)..(506): Xaa in position 506 is any amino acid
  Variant (508)..(508): Xaa in position 508 is any amino acid
  Variant (512)..(517): Xaa in position 512 to 517 is any amino acid
  Variant (518)..(519): Xaa in position 518 to 519 is any or no amino acid
  Variant (523)..(523): Xaa in position 523 is any amino acid
  Variant (525)..(526): Xaa in position 525 to 526 is any amino acid
  Variant (528)..(592): Xaa in position 528 to 592 is any amino acid
  Variant (593)..(1219): Xaa in position 593 to 1219 is any or no amino acid
  Variant (1222)..(1223): Xaa in position 1222 to 1223 is any amino acid
  Variant (1225)..(1230): Xaa in position 1225 to 1230 is any amino acid
  Variant (1232)..(1232): Xaa in position 1232 is any amino acid
  Variant (1233)..(1233): Xaa in position 1233 is any or no amino acid
  Variant (1235)..(1237): Xaa in position 1235 to 1237 is any amino acid
  Variant (1239)..(1241): Xaa in position 1239 to 1241 is any amino acid
  Variant (1243)..(1245): Xaa in position 1243 to 1245 is any amino acid
  Variant (1246)..(1247): Xaa in position 1246 to 1247 is any or no amino acid
  Variant (1249)..(1256): Xaa in position 1249 to 1256 is any amino acid
  Variant (1257)..(1262): Xaa in position 1257 to 1262 is any or no amino acid
  Variant (1264)..(1264): Xaa in position 1264 is any amino acid
  Variant (1266)..(1266): Xaa in position 1266 is any amino acid
  Variant (1268)..(1271): Xaa in position 1268 to 1271 is any amino acid
  Variant (1277)..(1277): Xaa in position 1277 is any amino acid
  Variant (1278)..(1278): Xaa in position 1278 is any or no amino acid
  Variant (1280)..(1285): Xaa in position 1280 to 1285 is any amino acid
  Variant (1286)..(1300): Xaa in position 1286 to 1300 is any or no amino acid
LWXACAGPLVXXPXXGXXVXYFPQGHXEXXXXXXXXXXXXXXXXXXXXXXXXXXXXXXXXXXXXXXXXXXXXXXXXXXXXXXXXXXXXXXXXXXXXXXXXXXXXXXXXXXXXXAXXXXXXXXXXXXXXXXLPXXXXCXXXXVXXXAXXXXDEVYAQXXLXPXXXXXXXXXXXXXXXXXXXXXXXXXXXXXXXXXXXXXXXXXXFXKXLTASDTSTHGGFSVXRXXAXXXXPXLXXXXXXXXXXXXXXXXXXXDXXXXXPXQELXAXDXHXXXWXFRHIXRGXXXXXXXXXQPXRHLLTTGXXWSXFVXXKXLXAGDXXXFXRXXXXXXXXXXXXXXXXXXXLXXGXRRXXXXXXXXXXXXXXXXXXXXXXXXXXXXXXXXXXXXXXXXXXXXXXXXXXXXXSXXSXXXMXXGXLAXAXHAXXXXXXFXXXYXPRXXSXXXFXXXXXXXXXXXXXXXXXXGMRFXMXFEXXXXXXXXXXXXGTXXGXXXXXXXXXXXWXXSXWRXLXVXWDEXXXXXXXXRVSXWXXEXXXXXXXXXXXXXXXXXXXXXXXXXXXXXXXXXXXXXXXXXXXXXXXXXXXXXXXXXXXXXXXXXXXXXXXXXXXXXXXXXXXXXXXXXXXXXXXXXXXXXXXXXXXXXXXXXXXXXXXXXXXXXXXXXXXXXXXXXXXXXXXXXXXXXXXXXXXXXXXXXXXXXXXXXXXXXXXXXXXXXXXXXXXXXXXXXXXXXXXXXXXXXXXXXXXXXXXXXXXXXXXXXXXXXXXXXXXXXXXXXXXXXXXXXXXXXXXXXXXXXXXXXXXXXXXXXXXXXXXXXXXXXXXXXXXXXXXXXXXXXXXXXXXXXXXXXXXXXXXXXXXXXXXXXXXXXXXXXXXXXXXXXXXXXXXXXXXXXXXXXXXXXXXXXXXXXXXXXXXXXXXXXXXXXXXXXXXXXXXXXXXXXXXXXXXXXXXXXXXXXXXXXXXXXXXXXXXXXXXXXXXXXXXXXXXXXXXXXXXXXXXXXXXXXXXXXXXXXXXXXXXXXXXXXXXXXXXXXXXXXXXXXXXXXXXXXXXXXXXXXXXXXXXXXXXXXXXXXXXXXXXXXXXXXXXXXXXXXXXXXXXXXXXXXXXXXXXXXXXXXXXXXXXXXXXXXXXXXXXXXXXXXXXXXXXXXXXXXXXXXXXXXXXXXXXXXXXXXXXXXXXXXXXXXXXXXXXXXXXXXXXXXXXXXXXXXXXXXXXXXXXXXXXXXXXXGRXXDXXXXXXYXXLXXXLXXXFXXXXXLXXXXXXXXXXXXXXDXEXDXXXXGDDPWXXFXXXXXXXXXXXXXXXXXXXXXI

SEQ ID NO: 1865 - protein, 34 aa, Artificial sequence
  protein pattern
  Variant (2)..(2): Xaa in position 2 is Glu or Thr
  Variant (3)..(3): Xaa in position 3 is Leu or Val
  Variant (4)..(4): Xaa in position 4 is Ile, Leu, Met or Val
  Variant (5)..(5): Xaa in position 5 is Ala, Thr or Val
  Variant (6)..(6): Xaa in position 6 is any amino acid
  Variant (8)..(8): Xaa in position 8 is Ile, Leu or Val
  Variant (10)..(10): Xaa in position 10 is Ala, Asp, Glu, Gly, Asn or Ser
  Variant (11)..(12): Xaa in position 11 to 12 is any amino acid
  Variant (14)..(14): Xaa in position 14 is any amino acid
  Variant (16)..(16): Xaa in position 16 is Lys or Arg
  Variant (19)..(19): Xaa in position 19 is Phe or Tyr
  Variant (22)..(22): Xaa in position 22 is any amino acid
  Variant (24)..(24): Xaa in position 24 is any or no amino acid
  Variant (26)..(26): Xaa in position 26 is any or no amino acid
  Variant (30)..(30): Xaa in position 30 is Gln or Thr
  Variant (31)..(31): Xaa in position 31 is Ser or Thr
QXXXXXDXHXXXWXFXHIXRGXPXRXHLLXXGWS

SEQ ID NO: 1866 - protein, 15 aa, Artificial sequence
  protein pattern
  Variant (2)..(2): Xaa in position 2 is Cys, Ser, Thr or Val
  Variant (4)..(4): Xaa in position 4 is any amino acid
  Variant (12)..(12): Xaa in position 12 is Ala, Thr or Val
FXKXLTASDTSXHGG

SEQ ID NO: 1867 - protein, 16 aa, Artificial sequence
  protein pattern
  Variant (2)..(3): Xaa in position 2 to 3 is any amino acid
  Variant (4)..(6): Xaa in position 4 to 6 is any or no amino acid
  Variant (8)..(8): Xaa in position 8 is Phe or Val
  Variant (9)..(9): Xaa in position 9 is Ala or Ser
  Variant (12)..(12): Xaa in position 12 is Ala, Ser, Thr or Val
  Variant (13)..(13): Xaa in position 13 is Phe, Ile or Val
  Variant (14)..(14): Xaa in position 14 is Ile, Leu or Val
  Variant (15)..(15): Xaa in position 15 is Phe or Val
  Variant (16)..(16): Xaa in position 16 is Ile, Leu, Met or Val
FXXXXXLXXGDXXXXX

SEQ ID NO: 1868 - protein, 15 aa, Artificial sequence
  protein pattern
  Variant (2)..(3): Xaa in position 2 to 3 is any amino acid
  Variant (5)..(5): Xaa in position 5 is any amino acid
  Variant (8)..(8): Xaa in position 8 is any amino acid
  Variant (9)..(9): Xaa in position 9 is Leu or Val
  Variant (10)..(10): Xaa in position 10 is any amino acid
  Variant (12)..(12): Xaa in position 12 is any amino acid
WXXSXWRXXXVXWDE

SEQ ID NO: 1869 - protein, 22 aa, Artificial sequence
  protein pattern
  Variant (2)..(4): Xaa in position 2 to 4 is any amino acid
  Variant (5)..(6): Xaa in position 5 to 6 is any or no amino acid
  Variant (8)..(8): Xaa in position 8 is Asp, Glu or Asn
  Variant (9)..(9): Xaa in position 9 is any amino acid
  Variant (10)..(10): Xaa in position 10 is Ala, Asp, Glu or Thr
  Variant (11)..(11): Xaa in position 11 is Asn, Ser or Thr
  Variant (14)..(14): Xaa in position 14 is Ile or Val
  Variant (15)..(15): Xaa in position 15 is Phe or Tyr
  Variant (16)..(16): Xaa in position 16 is Ala or Thr
  Variant (17)..(17): Xaa in position 17 is any amino acid
  Variant (18)..(18): Xaa in position 18 is Ile, Leu, Met or Val
  Variant (19)..(19): Xaa in position 19 is any amino acid
  Variant (21)..(21): Xaa in position 21 is any amino acid
VXXXXXAXXXXDEXXXXXXLXP

SEQ ID NO: 1870 - protein, 12 aa, Artificial sequence
  protein pattern
  Variant (2)..(2): Xaa in position 2 is any amino acid
  Variant (5)..(5): Xaa in position 5 is any amino acid
  Variant (7)..(7): Xaa in position 7 is any amino acid
  Variant (10)..(10): Xaa in position 10 is Gly or Thr
  Variant (11)..(12): Xaa in position 11 to 12 is Asp or Glu
GXRFXMXFEXXX

SEQ ID NO: 1871 - protein, 13 aa, Artificial sequence
  protein pattern
  Variant (2)..(2): Xaa in position 2 is any or no amino acid
  Variant (4)..(4): Xaa in position 4 is any or no amino acid
  Variant (6)..(6): Xaa in position 6 is any amino acid
  Variant (7)..(7): Xaa in position 7 is Leu or Met
  Variant (8)..(8): Xaa in position 8 is Leu, Met or Val
  Variant (9)..(9): Xaa in position 9 is Ala, Leu or Val
  Variant (12)..(12): Xaa in position 12 is any amino acid
DXEXDXXXXGDXP

SEQ ID NO: 1872 - protein, 10 aa, Artificial sequence
  protein pattern
  Variant (2)..(2): Xaa in position 2 is any amino acid
  Variant (3)..(3): Xaa in position 3 is Leu or Val
  Variant (5)..(5): Xaa in position 5 is Ile or Val
  Variant (8)..(8): Xaa in position 8 is Ala or Leu
  Variant (9)..(9): Xaa in position 9 is any amino acid
  Variant (10)..(10): Xaa in position 10 is His, Lys or Arg
LXXGXRRXXX

SEQ ID NO: 1873 - protein, 28 aa, Artificial sequence
  protein pattern
  Variant (2)..(2): Xaa in position 2 is any amino acid
  Variant (3)..(3): Xaa in position 3 is Ile, Leu or Val
  Variant (5)..(5): Xaa in position 5 is Ile, Leu, Met or Val
  Variant (6)..(6): Xaa in position 6 is Ala, Gly, Asn, Ser or Thr
  Variant (7)..(10): Xaa in position 7 to 10 is any amino acid
  Variant (12)..(12): Xaa in position 12 is any amino acid
  Variant (13)..(13): Xaa in position 13 is Asp, Glu or Gln
  Variant (15)..(17): Xaa in position 15 to 17 is any amino acid
  Variant (18)..(18): Xaa in position 18 is Ile, Leu or Val
  Variant (19)..(19): Xaa in position 19 is Ala, Asp, Glu or Gly
  Variant (20)..(21): Xaa in position 20 to 21 is any amino acid
  Variant (23)..(23): Xaa in position 23 is Ala, Asp, Glu, Gly, Asn or Ser
  Variant (24)..(24): Xaa in position 24 is Phe, Ile, Leu or Met
  Variant (25)..(25): Xaa in position 25 is any amino acid
  Variant (27)..(27): Xaa in position 27 is any amino acid
RXXDXXXXXXYXXLXXXXXXXFXXXGXL

SEQ ID NO: 1874 - DNA, 864 bp, Arabidopsis thaliana
  CDS (1)..(864)
atggatcggcaaagttccgatgacatcatgaaatttctcgacggcatggctagctccgacgatgttctttttggcttcctcgacgaaggaaaccactcaccggaggattataacttcgccgccggcgacgaatccgaagttgacaacgataccaccgattgtaattcagaagagaacagaaaattttggcaagaacacgaacaacttctccaggcgacactgtataggacaagttcaattgagacaaagataagacaagcaactaaggaagcgttgaaagtagttagatcaaagggtttggtatgtgtctgccggagaccggttaccgacggttgtcgtagctgtttacgcggcgaagtatctagcctcctccgagaagctggctatgattgcgtcatttccaaatctaagtggagaagctctcatgagatccctgcaggtgagcatgaatacttggaggtcgtggacaaatcggtttcaaagaaaggcgagatccgggtggtgatcgaactatgttttagggcggagtttgagatggcgagaggcagtgaagagtacaagcgactcatcggaatgttaccggaagtgtatgtcgggaaaacggagaggctaaaatcattaataaagatattgtgcaccgcagcgaagaagtgtatgaaagacaagaagatgcacatgggtccttggagaaaacacaaatacatgcaggctaaatggtttggaacttgtgagagaaaatctgtgtcgccagtatccgaaactgaggagaatatgtttccggtggcaaagcagagggtttctatgttgaattatggtctttttggtgctggaataggccgtccgaccgttgtagcggttgtgtga

SEQ ID NO: 1875 - protein, 287 aa, Arabidopsis thaliana
MDRQSSDDIMKFLDGMASSDDVLFGFLDEGNHSPEDYNFAAGDESEVDNDTTDCNSEENRKFWQEHEQLLQATLYRTSSIETKIRQATKEALKVVRSKGLVCVCRRPVTDGCRSCLRGEVSSLLREAGYDCVISKSKWRSSHEIPAGEHEYLEVVDKSVSKKGEIRVVIELCFRAEFEMARGSEEYKRLIGMLPEVYVGKTERLKSLIKILCTAAKKCMKDKKMHMGPWRKHKYMQAKWFGTCERKSVSPVSETEENMFPVAKQRVSMLNYGLFGAGIGRPTVVAVV

SEQ ID NO: 1876 - DNA, 1299 bp, Glycine max
  CDS (97)..(1065)
gggcgtgcgtacggctgcgagaagacgacagaagggacaccaatttgttttaagtcaaaaaaacaaagaccaccttgttcggttgtttttgttgttatgggtgccacctctatggtccgaggaggagtcacgaggtttctaccccgaagggaatatttggggtgcgagaaattacaacttggagatgtggagtttgaatttctcgatgatggtgagatcatgtcgttggccaaaagtgaaggttctggcgatgagtttcatcaatccaatgaaatggaattggatgatgaagatgatggtgagagggttgatggtggcagcgttgaggagaatagaagcttttgggataatcaacaccagcttttgcagaccaacctatatagaacaacttcagttgagtcaaggataagaaatgtcaccaaagaagccgttcaggatatacaaaacgcggaaatagtgtgcagttgcagtagacagataatttccagatcctgtagaaactgtttcatgatacaagtctcaaggcgccttcagaagtctggttatgacagtgccatttgcaaaacaaaatggagcagctcaccaagtattccatcaggggagcatacttttctagatgttatagacagcagaagcaaaaagcaagaaattagggtgatcatagaactgaatttccgagcagagtttgagatggcaagggcaagtgaagagtacaacgggcttgttcggaagctccctgaggtgtatgtggggaaaatagagagattaagcaacatcatcaaggtgttgtgcatgggagcaaaaaggtgcatgaaggaaaacaaaatgcacatgggaccatggaggaagcacaagtacgtgcacgctaagtggctaggtccatgcaaaaggaacacctcaacaacttcactttcaaattcaatgatgggaaattccgaggtgatgatgccaaaaccaaagcctagggcatcactgctaacaatggatctgatgctagaaactaatactaagacagaaatgttgaagcttcccaatatgcattgttcagctgttgaagttttgtaattgtaattaagacagaaaagtagctaggtttcatttctctctctttaaataatttatttgtagcaataggttggtacttcaaagttgccctgaatttgaaagatccattaaacatgtacctatttttttttattattgatatgttgctttacatatagggtgactcaattgagggttaaaatcatatttattttgccattaatccaaaaaaaaaaaaaaaaaaaaaagggcgcc

SEQ ID NO: 1877 - protein, 322 aa, Glycine max
MGATSMVRGGVTRFLPRREYLGCEKLQLGDVEFEFLDDGEIMSLAKSEGSGDEFHQSNEMELDDEDDGERVDGGSVEENRSFWDNQHQLLQTNLYRTTSVESRIRNVTKEAVQDIQNAEIVCSCSRQIISRSCRNCFMIQVSRRLQKSGYDSAICKTKWSSSPSIPSGEHTFLDVIDSRSKKQEIRVIIELNFRAEFEMARASEEYNGLVRKLPEVYVGKIERLSNIIKVLCMGAKRCMKENKMHMGPWRKHKYVHAKWLGPCKRNTSTTSLSNSMMGNSEVMMPKPKPRASLLTMDLMLETNTKTEMLKLPNMHCSAVEVL

SEQ ID NO: 1878 - DNA, 1393 bp, Glycine max
  CDS (52)..(960)
caggggggaagtgggagtcagacagacaaacaaactactgctacgttaatcatgggtccaacctctatggccgccggaagagtcacgaggtttttggccaggcactaccctctcgagcaccaccgtgataacgccgatgttgagttcgactttcttgatgatattggagaagccttgttagctcaaagtgctagcagtgatgagtgcggtcaccccaatgaaatggaggaacagttcgaccaagacgaggatcacagagataccgtcgaggagaatagaaccttttgggacaaacaacaccagcttttgcaggccagtatatgcagaactagttcttcggagtcacggataaggcatgccaccaaagaagcgcttcaggaaattcaaagcgcggaaactgtgtgcggttgtggcagacaggtggctgtgatcacaacttgtcgaaactgtttgatgagagaagtttctaggcggcttcagaaagcaggttatgatagtgctatttgcaaaactaaatggagaagctcacccgatatcccatcaggggaacacaattttttggatgtgatagacagcacaaagaagggggaggtgagggtgattgtggagctgaatttcagaggagagtttgagatggcaaggggaagtgaagactacaaccgacttgttaggaggcttccagaggtgtttgtggggaaggtggagagactgagcaacctaataaagatattgtgtatgggagccaaaaggtgcatgaaggaaaagaaaatgcacatggggccatggaggaagcataggtacatgcaagctaagtggttaggtccatgtgaaaggaacacttccacaacctcactttcagtgaggtataattctgagaggatattgccaaggccaaaggcatccatgttgactgttgatctgctagagaagccttcccaatatgcattgcactgctgttgaggttgtgtaatataattttaagagagagaaccccctttttttgtttattttggtaattaattaattcccctccctaaaaaggtgaatattaaatgagtgattcgcaaattaatgtcctatacacatgtacgtaaaaacaaattatggaaatgaatgtgcagttcaaaactgccttttaaaatttcataaaaaaaaaaaaaaaaaaaaaaaaaaaaaaatttgtctttcatcaaatttgctaatcttttacatgcaaaatgccaaactatttgatgaaaacatagtgtatacaaactcaaaaagacctttttcaattggtgtatataaagaaatggtataaaatagagtatcataagggtgggaagtattgtatttagcaaaaatagattttgcttgtaaagagagaatttggattgttgagtttccccatcta

SEQ ID NO: 1879 - protein, 302 aa, Glycine max
MGPTSMAAGRVTRFLARHYPLEHHRDNADVEFDFLDDIGEALLAQSASSDECGHPNEMEEQFDQDEDHRDTVEENRTFWDKQHQLLQASICRTSSSESRIRHATKEALQEIQSAETVCGCGRQVAVITTCRNCLMREVSRRLQKAGYDSAICKTKWRSSPDIPSGEHNFLDVIDSTKKGEVRVIVELNFRGEFEMARGSEDYNRLVRRLPEVFVGKVERLSNLIKILCMGAKRCMKEKKMHMGPWRKHRYMQAKWLGPCERNTSTTSLSVRYNSERILPRPKASMLTVDLLEKPSQYALHCC

SEQ ID NO: 1880 - DNA, 927 bp, Oryza sativa (japonica cultivar-group)
  CDS (1)..(927)
atgggagcgacgcggccgtcgccgatggcgtacaagaaggcgacggcggtgctggacgaggcggccagggcacggctgcgtggcccgttcgccagcggtgccgcgtccctccggcgtgatcaagacgacgacgacgacgacctcctggtggatctggtgcacgagttctacgacgacggcgagcgcggcgcggacgccacggcgaggggcggcgtgtcgtcgtcgccggagccggagcctaccgagtggaaggacgcgctgcgcgaggcgctagcggacgcgacgtccgacgcggcggccgcccgcatccgcgccgaggccgagcgcgccgtccgggatgccgttcgcaacggcggcgacgtgatccggaagcgagtcgtcgagcggctccgcgcccgagggttcgacgccggcgtgtgcaggtcgtcgtgggaaagaaccggcagcgtgccggcgggcagccacgagtacgtggacgtgacggcggcggcgtcggcgacggggcgtcgcgctcgctacatcgtcgaggtcaacgtcgccggcgagttcgagatcgcgaggccgagcgccgagtaccaggacctcctcctctcgctcccgccggtgctcgtcgcgactcccgaggccttcaggggggtcgccgcggcaatgtgcgccgcggcggcggagtccatccgcggcgcgggcatgcacctgccgccgtggaggcgggcgcggtacgtgcaggccaagtggtccgcaccgtacgagcgagtggcggcggcggcaccgccggagggagctaggacggcgccgtccggcggccggaagcgttgcggaatggagattgggcgcagggagatggccatcggaaaggagagattgatacctatgcctaccggattgagatcaaatacagttggtactaaaaaggacttcacacaatga

SEQ ID NO: 1881 - protein, 308 aa, Oryza sativa (japonica cultivar-group)
MGATRPSPMAYKKATAVLDEAARARLRGPFASGAASLRRDQDDDDDDLLVDLVHEFYDDGERGADATARGGVSSSPEPEPTEWKDALREALADATSDAAAARIRAEAERAVRDAVRNGGDVIRKRVVERLRARGFDAGVCRSSWERTGSVPAGSHEYVDVTAAASATGRRARYIVEVNVAGEFEIARPSAEYQDLLLSLPPVLVATPEAFRGVAAAMCAAAAESIRGAGMHLPPWRRARYVQAKWSAPYERVAAAAPPEGARTAPSGGRKRCGMEIGRREMAIGKERLIPMPTGLRSNTVGTKKDFTQ

SEQ ID NO: 1882 - DNA, 885 bp, Arabidopsis thaliana
  CDS (1)..(885)
atggatcggcaaaattccgatgacatcatgagatttctcgatggaatggctagctccgacgacgttcttttcggttttcttgacgaaggaaaccagtcaccggaagatttctccgtaaacctcaacgccggcgaagatgacggtgacgaagacgacaataataacaattctgaagataacaaagctttttggcaggaacacgaacaacttcttcaggggacactgtataggacaagttccattgagacaaagattagacaagctacaaaagaagcgttgaaacaagttaaatctaagggtctttattgtgtttgccggcgaccagtggacggcggttgccggagttgcttacgtggcgaaatctctagacacctaagagatgtcgccggctacgattgcgtcatctctaaatctaaatggagaagttgtcaagacatccctgcaggggaacacgaatttatagagattgtggaccgatcgggttcaaagaaaagcgagatgcgagtggtgattgagttatcatttagggcagagtttgagattgcaaaaggcagtgaagagtacaaaagacttatcagtcgattgcctgaggtttacgtcgggaaaaccgagaggcttcgatctctgataaagatattgtgcatagcgggaaagaaatgcttgagagacaagaaaatgcatatggctccttggagaaaacacaagtacatgcaagccaagtggcttggcacatgtgatcgatctagctccttggaagcttcggtttccgaggccatggagccagaaaattgggtgccggtggcgaagcctagggtttctatgttgaactatgatggtctcttaggtggtttctctgccggtccggccactgtagcggtcgtgtga

SEQ ID NO: 1883 - protein, 294 aa, Arabidopsis thaliana
MDRQNSDDIMRFLDGMASSDDVLFGFLDEGNQSPEDFSVNLNAGEDDGDEDDNNNNSEDNKAFWQEHEQLLQGTLYRTSSIETKIRQATKEALKQVKSKGLYCVCRRPVDGGCRSCLRGEISRHLRDVAGYDCVISKSKWRSCQDIPAGEHEFIEIVDRSGSKKSEMRVVIELSFRAEFEIAKGSEEYKRLISRLPEVYVGKTERLRSLIKILCIAGKKCLRDKKMHMAPWRKHKYMQAKWLGTCDRSSSLEASVSEAMEPENWVPVAKPRVSMLNYDGLLGGFSAGPATVAVV

SEQ ID NO: 1884 - DNA, 933 bp, Arabidopsis thaliana
  CDS (1)..(933)
atgccattacatatgaaaatccaaccgatcgacgaatccgatgtatcggaagaggtaccttacccggagacgatgagacagatgccgaaatcgaggctgaagcgtctctttgagcgtcagttcactaataagaacgtttcggagaaatttaccggctcagatgttgaggcaccgctttcgagaggtaactctggagattttgagccgagctctgtttgtttggccaagatggttctaaattttatggaggacaacaacggcggcgagaaacagcggtgtggacgtagccgatgtaactgttttagcgggagtggtacagagagctctgatgatgaaactgaatgttcttctggtgaagcttgtgagatcctcaagagtttggttctctgtaagagcatccgtgtgaggaatttgctgactgatgtgaccaagattgcggaaacaagtaagaattgcaagcttaaagatggatcgtgcttgaaaagtgtggctaatgggttagtgagtttaggttatgatgcggctctatgcaaatctcgctgggagaaatctccttcttgtcctgctggggaatatgagtatgtggatgtgataatgaaaggtgaaagactgttaatcgacatagatttcaaatcgaagttcgagattgctcgtgcaacaaaaacgtataagtcgatgctacaaactctgccttacatatttgtggggaaagcggataggctgcagaagatcatcgttctaatatgtaaagcggcaaagcagagcttaaagaagaaaggacttcatgtaccgccatggaggagagctgagtatgtgaaatccaagtggctgtcttctcatgttcgtgtagaccaaaactcaaatggagaagtcaagcaggaatcagtagaggtgatcgctgagtcggtcagttccatagtcttcggtgtctga

SEQ ID NO: 1885 - protein, 310 aa, Arabidopsis thaliana
MPLHMKIQPIDESDVSEEVPYPETMRQMPKSRLKRLFERQFTNKNVSEKFTGSDVEAPLSRGNSGDFEPSSVCLAKMVLNFMEDNNGGEKQRCGRSRCNCFSGSGTESSDDETECSSGEACEILKSLVLCKSIRVRNLLTDVTKIAETSKNCKLKDGSCLKSVANGLVSLGYDAALCKSRWEKSPSCPAGEYEYVDVIMKGERLLIDIDFKSKFEIARATKTYKSMLQTLPYIFVGKADRLQKIIVLICKAAKQSLKKKGLHVPPWRRAEYVKSKWLSSHVRVDQNSNGEVKQESVEVIAESVSSIVFGV

SEQ ID NO: 1886 - DNA, 789 bp, Oryza sativa subsp
  CDS (1)..(789)
atgagcctgtcgaacctggtgctcggcttcttcgaggaggctgagagggagcagagatggccggagaacggcgacgacgacgacgagggctccagcggcagcggcgccgccgagagcaaggccttctggcagaaccagcactcccagctgcatgaggctttggccaagaccagccaggtagagagcaggatacgggaggacacggaggaggcaatcaggaagatgcgcgccgcgggcgccgtctgctcctgcgcgaggcgggcggcggccggggactgccggagctgcacgctccggcatgtcgacgagcggctgcgcgacaccgggtacaacagcgccatctgcaagtccaagtggacgcgctcgccggacatcccttcaggcgagcacagctacgtggacgtggtggtgcagacgaggagcggcaaggcggtgcgggtggtggtggagctgagcttccgcgccgagttcgaggtggcccgcgccagcgcggagtaccgcgcgctggtgaccgcgctgccggaggtgttcgtcggacgcgccgaccggctgcgcgccgtcgtcaaggccatgtgcgccgcggccaagcagtgcatgaaggagaacaacatgcacatgggcccctggaggaagcacaagtacatgcagtccaagtggctcggcacgccagagcgtgtcgcggccgcggcggcggcgccggtggcggtctggtcgccggagaagcagaccaagttcagggcgtccatgctcagctttgacttcgcccgggccgccgtggaggttgcgtga

SEQ ID NO: 1887 - protein, 262 aa, Oryza sativa subsp
MSLSNLVLGFFEEAEREQRWPENGDDDDEGSSGSGAAESKAFWQNQHSQLHEALAKTSQVESRIREDTEEAIRKMRAAGAVCSCARRAAAGDCRSCTLRHVDERLRDTGYNSAICKSKWTRSPDIPSGEHSYVDVVVQTRSGKAVRVVVELSFRAEFEVARASAEYRALVTALPEVFVGRADRLRAVVKAMCAAAKQCMKENNMHMGPWRKHKYMQSKWLGTPERVAAAAAAPVAVWSPEKQTKFRASMLSFDFARAAVEVA

SEQ ID NO: 1888 - DNA, 873 bp, Oryza sativa subsp
  CDS (1)..(873)
atggtgctcgggttctacgaggaggccgagctccagagctcgccgccgggagactgcgccgccgccgccggcgacgacgacgacggcagcgacgacgaggggtccggcggcgccgccaagtgcagggcgttctggaaggagcagcagtcgcaactctacgaagcgctggccaagatgagctcggcggagagcaggatccaagcggacgcggaggaggccatgaggcagatgcgcgcggcggcggcgggcgcctgctcctgcgcgagccgcggcgcggcggcggcggcggcggcggcaggcggcggaggctgccggagctgcacgctccggtttcttgccgagcggctgcgcgacgccgggtacaacagcgcgatctgcaggtccaaatggccgcgatcgccggaaattccttcaggggagcacagctacgtggacgtggtggcgccgaccaggagcggcaaggcggtgcgggtggtggtcgagcccagcttccgcggcgagttcgagatggcgcgcggcggcgcggggtacagggcgctggtggcgtcgctgccggaggcgttcgtcggccgcgccgatcggctgcgcggcgtggtgcgcgtcatgtgcgccgcggcgaagcagtgcgcgcgggagagcggcatgcacatggcgccctggaggaagcagcggtacatggaggccaagtggctcgccacgccggagcgggtcgcgccgcccggcaacgccggcggcgccggcgacgcggtggcggtcgggtcgccgtcgtcgccgctgtcgccggggatgacgaacaggcagatgcagcccaagttcagggcgtccatgctcacgctcgacttcggcggccggaccgccgtggaggtcgtgtga

SEQ ID NO: 1889 - protein, 290 aa, Oryza sativa subsp
MVLGFYEEAELQSSPPGDCAAAAGDDDDGSDDEGSGGAAKCRAFWKEQQSQLYEALAKMSSAESRIQADAEEAMRQMRAAAAGACSCASRGAAAAAAAAGGGGCRSCTLRFLAERLRDAGYNSAICRSKWPRSPEIPSGEHSYVDVVAPTRSGKAVRVVVEPSFRGEFEMARGGAGYRALVASLPEAFVGRADRLRGVVRVMCAAAKQCARESGMHMAPWRKQRYMEAKWLATPERVAPPGNAGGAGDAVAVGSPSSPLSPGMTNRQMQPKFRASMLTLDFGGRTAVEVV

SEQ ID NO: 1890 - DNA, 921 bp, Oryza sativa subsp
  CDS (1)..(921)
atggttgtggaggaggccgtcgtcgcggccggcaatgagatgagcctgtccaacatggtgctcgggttctacgaggaggccgagctccagagctcgccgccgggagactgcgccgccgccgccggtgacgacgacgacggcagcgacgacgaggggtccggcggcgccgccaagtgcagggcgttctggaaggagcagcagtcgcaactctacgaagcgctggccaagatgagctcggcggagagcaggatccaagcggacgcggaggaggccatgaggcagatgcgcgcggcggcggcgggcgcctgctcctgcgcgagccgcggcgcggcggcggcggcggcaggcagcggaggctgccggagctgcacgctccggtttctcgccgagcggctgcgcgacgccgggtacaacagcgcgatctgcaggtccaaatggccgcgatcgccggaaattccttcaggggagcacagctacgtggacgtggtggcgccgaccaggagcggcaaggcggtgcgggtggtggtcgagcccagcttccgcggcgagttcgagatggcgcgcggcggcgcggggtacagggcgctggtggcgtcgctgccggaggcgttcgtcggccgcgccgatcggctgcgcggcgtggtgcgcgtcatgtgcgccgcggcgaagcagtgcgcgcgggagagcggcatgcacatggcgccctggaggaagcagcggtacatggaggccaaatggctcgccaagccggaacgggtcgcgccgcccggaaaagccggcggagccggggaaccggtggcggtcgggttgccgttgttgccgctgttgccggggatgacgaacaggcagatgcagcccaagttcagggcgtccatgctcacgctcgacttcggcggccggaccgccgtggaggtcgtgtga

SEQ ID NO: 1891 - protein, 306 aa, Oryza sativa subsp
MVVEEAVVAAGNEMSLSNMVLGFYEEAELQSSPPGDCAAAAGDDDDGSDDEGSGGAAKCRAFWKEQQSQLYEALAKMSSAESRIQADAEEAMRQMRAAAAGACSCASRGAAAAAAGSGGCRSCTLRFLAERLRDAGYNSAICRSKWPRSPEIPSGEHSYVDVVAPTRSGKAVRVVVEPSFRGEFEMARGGAGYRALVASLPEAFVGRADRLRGVVRVMCAAAKQCARESGMHMAPWRKQRYMEAKWLAKPERVAPPGKAGGAGEPVAVGLPLLPLLPGMTNRQMQPKFRASMLTLDFGGRTAVEVV

SEQ ID NO: 1892 - DNA, 849 bp, Vitis vinifera
  CDS (1)..(849)
  misc_feature (77)..(77): r is g or a
  misc_feature (223)..(223): w is a or t
  misc_feature (736)..(736): r is g or a
atggcagtgttcgtgagatcgaagcgagtcactgacccgctcgatgatagagtgaaagcgcgaatcgtcggccgtgrctcagtccccgtcagcagcggcagtagcagcgacgccggggaagagtcgccgtgcctctccgatctcgtctacggcttccttgaggactgcgccgaagctcaaccgtccgagatggaattgggttccgagaacgacgatgacgacwcttcgccgttcgatcccacagaggtggttgcgtctctgctttatccgaaggccaatgtcgatcggtaccgtacattgcttttctcgcatgtctccaaggccgtgggttcgctctcgtgtccgagatcaaacaaggcggcgatccggcggaatgtcgccgcggtgctcagagatctcggccacaatgcggcggtgtgccgcaccaaatgggacggctcgggcgggctcaccgccgggaaccacgagtttatcgacgtcctcagatcggagaaacgctacatcgtggacctcgacttcgccggcgagttcgagatcgcaagaccgaccgatcagtacaagcgtctcatccaaacactgcctagggttttcatcggtaaaagcgaggacttaaagaagatcgtgaagctaacgtgcgacgcggctaagagatcgctgaagagcagagggcttcacctgccaccctggaggaagaatcgatacatgcagaacaagtggttcgggccttgccggcgtrccgccacaccaagcccgccactggcgccggcatcgacggagttcactgtgaaatgccggtcagtggggttcgacgccgtttcggacggccgtttctttgtgcgtacaagatga

SEQ ID NO: 1893 - protein, 282 aa, Vitis vinifera
  misc_feature (26)..(26): The Xaa at location 26 stands for Asp, or Gly.
  misc_feature (75)..(75): The Xaa at location 75 stands for Ser, or Thr.
  misc_feature (246)..(246): The Xaa at location 246 stands for Ala, or Thr.
MAVFVRSKRVTDPLDDRVKARIVGRXSVPVSSGSSSDAGEESPCLSDLVYGFLEDCAEAQPSEMELGSENDDDDXSPFDPTEVVASLLYPKANVDRYRTLLFSHVSKAVGSLSCPRSNKAAIRRNVAAVLRDLGHNAAVCRTKWDGSGGLTAGNHEFIDVLRSEKRYIVDLDFAGEFEIARPTDQYKRLIQTLPRVFIGKSEDLKKIVKLTCDAAKRSLKSRGLHLPPWRKNRYMQNKWFGPCRRXATPSPPLAPASTEFTVKCRSVGFDAVSDGRFFVRTR

SEQ ID NO: 1894 - DNA, 912 bp, Vitis vinifera
  CDS (1)..(912)
  misc_feature (171)..(171): y is t or c
  misc_feature (549)..(549): y is t or c
  misc_feature (630)..(630): r is g or a
  misc_feature (634)..(634): r is g or a
atgcccggagtagcggctagacttccggtgactccctggagttccgacgacactctcaaattctccggtgactcggagagtttaggtgatatggttttcgggtttttaggggaagactcgtcagggagttcgtgtaactccggcggcggttgggttcatggtgaagattgyggcgacggtgccgatggggaagaggggtttgacaatgttgaggggagtaaggcgttttgggaggaacaagaccaacttgttcaggcaattttgtgtaggacgagttctattgagtcgaaaattaggcaggtgacgaaagaggcccttagggaattaaaattgaaagaaacatactgtgtatgccggcgacgggttgccggagtatgccaaaattgtgcggaaaaggaagtttggggtcagctccaaaccgccggttacaatagtgccatctgcaagtccaagtggaagtcctctccggatattccatcaggcaaacactcgtatatggaggtggtggacaggtcaagtgccaagaaaggagaggtgagagtggtgatygagttgaattttcgggcggagttcgagatggcgagggctagcgccgaatataacctgttagtcagccggttgccggaggtrttcrtcggaaaatctgagaggctaaaggccttgatcaagatactatgccatgcagccaagaaatgcatgaaggagaagaaaatgcacatgggtccatggagaaagcacaaatacatgcaagctaagtggtttggcacgtgcgagaggacagcgccggcacccatgtcgcctgttgattttcccggccgtctacccaggcagagggtctccatgcttaccttcgacctgctggagaatttgccggcggccggtttaaattttaaggcggtggaagttgtgtga

SEQ ID NO: 1895 - protein, 303 aa, Vitis vinifera
  misc_feature (212)..(212): The Xaa at location 212 stands for Ile, or Val.
MPGVAARLPVTPWSSDDTLKFSGDSESLGDMVFGFLGEDSSGSSCNSGGGWVHGEDCGDGADGEEGFDNVEGSKAFWEEQDQLVQAILCRTSSIESKIRQVTKEALRELKLKETYCVCRRRVAGVCQNCAEKEVWGQLQTAGYNSAICKSKWKSSPDIPSGKHSYMEVVDRSSAKKGEVRVVIELNFRAEFEMARASAEYNLLVSRLPEVFXGKSERLKALIKILCHAAKKCMKEKKMHMGPWRKHKYMQAKWFGTCERTAPAPMSPVDFPGRLPRQRVSMLTFDLLENLPAAGLNFKAVEVV

SEQ ID NO: 1896 - DNA, 807 bp, Vitis vinifera
  CDS (1)..(807)
atggggcatcttattgaagagaaggctcttggagatgatcatcaacgcggggacagcctcgaagagaaaatctcattgttttttgatgaagaagacgaagaactggatcgaaattctgaaggtgattgggctgatgatgaagctgccaacaatgaattgcatgaccccattgagagaaaagagttctgggattcacaagaggctttgcttctggaaataatggaaagatgtaattcaatgggtgcaaagttgagggaagagatagggagagtggtggagagggcaagagaaacactagtgtgcagctgctccaagtcaaattcagatgggtgtgccctttgtttgaggaggagagtggtggatttgctttgcctcaagggtttctctgcctctctccgtacttccaagtggaggcacactcacaagttccccggaggatcacatgaatatatagaggtaatggcaagcacccctgggaggaagaagcaaatcccattccttatagagctcgaattccgaactgaattcgagatggccaaagcctgcgatgagtaccgcagactcatcgcccaactccccaaatcctacatcggaaaatccgactacctcaacgccatcctgcgtgtggtatgcgatgccgccaagaggtccatgaaggagcagaagatccacatggggccatggcggaagcgcagcttcatgcagatgaaatggtccggttacaacgacagaaaacagccctccaaggatcaaccctggaacaagttttcgctgtccggcatcactgctgctgtggtggttaaatga

SEQ ID NO: 1897 - protein, 268 aa, Vitis vinifera
MGHLIEEKALGDDHQRGDSLEEKISLFFDEEDEELDRNSEGDWADDEAANNELHDPIERKEFWDSQEALLLEIMERCNSMGAKLREEIGRVVERARETLVCSCSKSNSDGCALCLRRRVVDLLCLKGFSASLRTSKWRHTHKFPGGSHEYIEVMASTPGRKKQIPFLIELEFRTEFEMAKACDEYRRLIAQLPKSYIGKSDYLNAILRVVCDAAKRSMKEQKIHMGPWRKRSFMQMKWSGYNDRKQPSKDQPWNKFSLSGITAAVVVK

SEQ ID NO: 1898 - DNA, 963 bp, Medicago truncatula
  CDS (1)..(963)
atgagattcatgagtatttgctcttgggttgcaaaaactactaggtttttatggattcatcctctgaatagtctcgagtctgaagaacaatcttcaaacacgagtgttggtgatgttcagtttgaattttttgatgttggtgaagtgatcaagtcaggtcaaaatgctagcgatcttaaacagtgtcattcacttgaaatggatttggatgatgatgaagagaatgatcgaagtagtatcactaagaagaatcaaatcttttgggaaagccaacacctggatttgcagaccaatatagataacacaagttctttggagactaagataaggagtgccaccaaagaagctattgaagaaatagaaagctgtggaacagtgtgtggctgcaccagaaagaagattgctatcacctcttgccgagactgcttaatgagggaagtttttacgaggcttcacaaaactggtttcaatattgctatttgtaaaacaaaatggagaacttcatcagatattccatcaggggaacacacatttttggatgtgatagacaacacaaatccagaaaaaggggaggtgagagtgatgattgagatgaacttccaagctgagtttgagatggcaaaaggaagtgatgaatacaacaacttggttaagaaggtacctgaagtgtttgttggagaagtagggagaatgagcaagttaatcaaaatcttatgcatggcagccaaaaaatgcatgaaggataaaaagttgcatatggggccatggaggaggcataagtacatggaagctaaatggttaggtccatgtgaaaggtacccttcaacaaagtctccactttctattggatcattttctgagaggatcataacaaagcaaaaatcaaaggtatctatgttgactattgaattatttgataagcttccaacattgcattgcccagctgttgatgaggttgtgtga

SEQ ID NO: 1899 - protein, 320 aa, Medicago truncatula
MRFMSICSWVAKTTRFLWIHPLNSLESEEQSSNTSVGDVQFEFFDVGEVIKSGQNASDLKQCHSLEMDLDDDEENDRSSITKKNQIFWESQHLDLQTNIDNTSSLETKIRSATKEAIEEIESCGTVCGCTRKKIAITSCRDCLMREVFTRLHKTGFNIAICKTKWRTSSDIPSGEHTFLDVIDNTNPEKGEVRVMIEMNFQAEFEMAKGSDEYNNLVKKVPEVFVGEVGRMSKLIKILCMAAKKCMKDKKLHMGPWRRHKYMEAKWLGPCERYPSTKSPLSIGSFSERIITKQKSKVSMLTIELFDKLPTLHCPAVDEVV

SEQ ID NO: 1900 - DNA, 789 bp, Oryza sativa subsp
  CDS (1)..(789)
atgagcctgtcgaacctggtgctcggcttcttcgaggaggctgagagggagcagagatggccggagaacggcgacgacgacgacgagggctccagcggcagcggcgccgccgagagcaaggccttctggcagaaccagcactcccagctgcatgaggctttggccaagaccagccaggtagagagcaggatacgggaggacacggaggaggcaatcaggaagatgcgcgccgcgggcgccgtctgctcctgcgcgaggcgggcggcggccggggactgccggagctgcacgctccggcatgtcgacgagcggctgcgcgacgccgggtacaacagcgccatctgcaagtccaagtggacgcgctcgccggacatcccttcaggcgagcacagctacgtggacgtggtggtgcagacgaggagcggcaaggcggtgcgggtggtggtggagctgaacttccgcgccgagttcgaggtggcccgcgccagcgcggagtaccgcgcgctggtgaccgcgctgccggaggtgttcgtcggacgcgccgaccggctgcgcgccgtcgtcaaggccatgtgcgccgcggccaagcagtgcatgaaggagaacaacatgcacatgggcccctggaggaagcacaagtacatgcagtccaagtggctcggcacgccagagcgtgtcgcggccgcggcggcggcgccggtggcggtctggtcgccggagaagcagaccaagttcagggcgtccatgctcagctttgacttcgcccgggccgccgtggaggttgcgtga

SEQ ID NO: 1901 - protein, 262 aa, Oryza sativa subsp
MSLSNLVLGFFEEAEREQRWPENGDDDDEGSSGSGAAESKAFWQNQHSQLHEALAKTSQVESRIREDTEEAIRKMRAAGAVCSCARRAAAGDCRSCTLRHVDERLRDAGYNSAICKSKWTRSPDIPSGEHSYVDVVVQTRSGKAVRVVVELNFRAEFEVARASAEYRALVTALPEVFVGRADRLRAVVKAMCAAAKQCMKENNMHMGPWRKHKYMQSKWLGTPERVAAAAAAPVAVWSPEKQTKFRASMLSFDFARAAVEVA

SEQ ID NO: 1902 - DNA, 885 bp, Arabidopsis thaliana
  CDS (1)..(885)
atggatcggcaaaattccgatgacatcatgagatttctcgatggaatggctagctccgacgacgttcttttcggttttcttgacgaaggaaaccagtcaccggaagatttctccgtaaacctcaacgccggcgaagatgacggtgacgaagacgacaataataacaattctgaagataacaaagctttttggcaggaacacgaacaacttcttcaggggacactgtataggacaagttccattgagacaaagattagacaagctacaaaagaagcgttgaaacaagttaaatctaagggtctttattgtgtttgccggcgaccagtggacggcggttgccggagttgcttacgtggcgaaatctctagacacctaagagatgtcgccggctacgattgcgtcatctctaaatctaaatggagaagttgtcaagacatccctgcagaggaaaacgaatttatagagattgtggaccgatcgggttcaaagaaaagcgagatgcgagtggtgattgagttatcatttagggcagagtttgagattgcaaaaggcagtgaagagtacaaaagacttatcagtcgattgcctgaggtttacgtcgggaaaaccgagaggcttcgatctctgataaagatattgtgcatagcgggaaagaaatgcttgagagacaagaaaatgcatatggctccttggagaaaacacaagtacatgcaagccaagtggcttggcacatgtgatcgatctagctccttggaagcttcggtttccgaggccatggagccagaaaattgggtgccggtggcgaagcctagggtttctatgttgaactatgatggtctcttaggtggtttctctgccggtccggccactgtagcggtcgtgtga

SEQ ID NO: 1903 - protein, 294 aa, Arabidopsis thaliana
MDRQNSDDIMRFLDGMASSDDVLFGFLDEGNQSPEDFSVNLNAGEDDGDEDDNNNNSEDNKAFWQEHEQLLQGTLYRTSSIETKIRQATKEALKQVKSKGLYCVCRRPVDGGCRSCLRGEISRHLRDVAGYDCVISKSKWRSCQDIPAEENEFIEIVDRSGSKKSEMRVVIELSFRAEFEIAKGSEEYKRLISRLPEVYVGKTERLRSLIKILCIAGKKCLRDKKMHMAPWRKHKYMQAKWLGTCDRSSSLEASVSEAMEPENWVPVAKPRVSMLNYDGLLGGFSAGPATVAVV

SEQ ID NO: 1904 - DNA, 810 bp, Oryza sativa
  CDS (1)..(810)
atggttatggaggacggcgagatgagcctgtcgaacctggtgctcggcttcttcgaggaggctgagagggagcagagatggccggagaacggcgacgacgacgacgagggctccagcggcagcggcgccgccgagagcaaggccttctggcagaaccagcactcccagctgcatgaggctttggccaagaccagccaggtagagagcaggatacgggaggacacggaggaggcaatcaggaagatgcgcgccgcgggcgccgtctgctcctgcgcgaggcgggcggcggccggggactgccggagctgcacgctccggcatgtcgacgagcggctgcgcgacgccgggtacaacagcgccatctgcaagtccaagtggacgcgctcgccggacatcccttcaggcgagcacagctacgtggacgtggtggtgcagacgaggagcggcaaggcggtgcgggtggtggtggagctgaacttccgcgccgagttcgaggtggcccgcgccagcgcggagtaccgcgcgctggtgaccgcgctgccggaggtgttcgtcggacgcgccgaccggctgcgcgccgtcgtcaaggccatgtgcgccgcggccaagcagtgcatgaaggagaacaacatgcacatgggcccctggaggaagcacaagtacatgcagtccaagtggctcggcacgccagagcgtgtcgcggccgcggcggcggcgccggtggcggtctggtcgccggagaagcagaccaagttcagggcgtccatgctcagctttgacttcgcccgggccgccgtggaggttgcgtga

SEQ ID NO: 1905 - protein, 269 aa, Oryza sativa
MVMEDGEMSLSNLVLGFFEEAEREQRWPENGDDDDEGSSGSGAAESKAFWQNQHSQLHEALAKTSQVESRIREDTEEAIRKMRAAGAVCSCARRAAAGDCRSCTLRHVDERLRDAGYNSAICKSKWTRSPDIPSGEHSYVDVVVQTRSGKAVRVVVELNFRAEFEVARASAEYRALVTALPEVFVGRADRLRAVVKAMCAAAKQCMKENNMHMGPWRKHKYMQSKWLGTPERVAAAAAAPVAVWSPEKQTKFRASMLSFDFARAAVEVA

SEQ ID NO: 1906 - DNA, 864 bp, Oryza sativa
  CDS (1)..(864)
atggcgtacaagaaggcgacggcggtgctggacgaggcggccagggcacggctgcgtggcccgttcgccagcggtgccgcgtccctccggcgtgatcaagacgacgacgacgacgacctcctggtggatctggtgcacgagttctacgacgacggcgagcgcggcgcggacgccacggcgaggggcggcgtgtcgtcgtcgccggagccggagcctaccgagtggaaggacgcgctgcgcgaggcgctagcggacgcgacgtccgacgcggcggccgcccgcatccgcgccgaggccgagcgcgccgtccgggatgccgttcgcaacggcggcgacgtgatccggaagcgagtcgtcgagcggctccgcgcccgagggttcgacgccggcgtgtgcaggtcgtcgtgggaaagaaccggcagcgtgccggcgggcagccacgagtacgtggacgtgacggcggcggcgtcggcgacggggcgtcgcgctcgctacatcgtcgaggtcaacgtcgccggcgagttcgagatcgcgaggccgagcgccgagtaccaggacctcctcctctcgctcccgccggtgctcgtcgcgactcccgaggccttcaggggggtcgccgcggcaatgtgcgccgcggcggcggagtccatccgcggcgcgggcatgcacctgccgccgtggaggcgggcgcggtacgtgcaggccaagtggtccgcaccgtacgagcgagtggcggcggcggcaccgccggagggagctaggacggcgccgtccggcggccggaagcgttgcggaatggagattgggcgcagggagatggccatcggaaaggagagattggtaccatttttcagagggttatga

SEQ ID NO: 1907 - protein, 287 aa, Oryza sativa
MAYKKATAVLDEAARARLRGPFASGAASLRRDQDDDDDDLLVDLVHEFYDDGERGADATARGGVSSSPEPEPTEWKDALREALADATSDAAAARIRAEAERAVRDAVRNGGDVIRKRVVERLRARGFDAGVCRSSWERTGSVPAGSHEYVDVTAAASATGRRARYIVEVNVAGEFEIARPSAEYQDLLLSLPPVLVATPEAFRGVAAAMCAAAAESIRGAGMHLPPWRRARYVQAKWSAPYERVAAAAPPEGARTAPSGGRKRCGMEIGRREMAIGKERLVPFFRGL

SEQ ID NO: 1908 - DNA, 921 bp, Oryza sativa
  CDS (1)..(921)
atggttgtggaggaggccgtcgtcgcggccggcaatgagatgagcctgtccaacatggtgctcgggttctacgaggaggccgagctccagagctcgccgccgggagactgcgccgccgccgccggtgacgacgacgacggcagcgacgacgaggggtccggcggcgccgccaagtgcagggcgttctggaaggagcagcagtcgcaactctacgaagcgctggccaagatgagctcggcggagagcaggatccaagcggacgcggaggaggccatgaggcagatgcgcgcggcggcggcgggcgcctgctcctgcgcgagccgcggcgcggcggcggcggcggcaggcagcggaggctgccggagctgcacgctccggtttctcgccgagcggctgcgcgacgccgggtacaacagcgcgatctgcaggtccaaatggccgcgatcgccggaaattccttcaggggagcacagctacgtggacgtggtggcgccgaccaggagcggcaaggcggtgcgggtggtggtcgagcccagcttccgcggcgagttcgagatggcgcgcggcggcgcggggtacagggcgctggtggcgtcgctgccggaggcgttcgtcggccgcgccgatcggctgcgcggcgtggtgcgcgtcatgtgcgccgcggcgaagcagtgcgcgcgggagagcggcatgcacatggcgccctggaggaagcagcggtacatggaggccaagtggctcgccacgccggagcgggtcgcgccgcccggcaacgccggcggcgccggcgacgcggtggcggtcgggtcgccgtcgtcgccgctgtcgccggggatgacgaacaggcagatgcagcccaagttcagggcgtccatgctcacgctcgacttcggcggccggaccgccgtggaggtcgtgtga

SEQ ID NO: 1909 - protein, 306 aa, Oryza sativa
MVVEEAVVAAGNEMSLSNMVLGFYEEAELQSSPPGDCAAAAGDDDDGSDDEGSGGAAKCRAFWKEQQSQLYEALAKMSSAESRIQADAEEAMRQMRAAAAGACSCASRGAAAAAAGSGGCRSCTLRFLAERLRDAGYNSAICRSKWPRSPEIPSGEHSYVDVVAPTRSGKAVRVVVEPSFRGEFEMARGGAGYRALVASLPEAFVGRADRLRGVVRVMCAAAKQCARESGMHMAPWRKQRYMEAKWLATPERVAPPGNAGGAGDAVAVGSPSSPLSPGMTNRQMQPKFRASMLTLDFGGRTAVEVV

SEQ ID NO: 1910 - DNA, 900 bp, Brassica napus
  CDS (1)..(900)
atggatcgtcaagattccgatgacataatgaagtttctagacggcatggctagctccgacgatgttttatttggtttcctcgacggaggaaaccattcaccggaggtttaccctgacaccggtagcttcgccgcaggtgaagattcctatgcagaaaacgatgcagccggttgcaattccgatgagaacaaaaccttttggcttgaacaagaacaacttctccaggcgacactgtataggacaagttcaattgagacaaagattcgacaagcagcgaaacaagcgttgaaagaagtgagatcagaaggcacgcaatgtgtctgccggagacccgtggccggcggttgccgtagctgtttacgcggcgaagtggctcgccgtctccgagaggccggctatgattgcgtcagctgtaaatccaaatggagaagcaatcatgaaatccctgcaggtgagcatgaatatttggaaattgtggaccaatcgggatcgaagaaagtcgagatccgtgtggtgatcgagctatctttcagggctgagtttgagatggcgaggggtagtgaggagtacaagcgactcgttggaatattacctgaagtgtacgtggggaaaacagagaggctaagaacactaataaaaatattgtgcatggctgcgaaaaagtgcatgaaagacaagaaaatgcacatgggtccttggagaaaacacaagtatatgcaagccaaatggctcggtacctgcgagagaaaatctatgaggctggttgctgagactaagacggagactgaggaggaggatatgattgccaaagctaaacagagagtttctatgctgaattatggtatttttgaaaacgtatccgccggaatgggccgtccggccgccgtagcggtcgtatga

SEQ ID NO: 1911 - protein, 299 aa, Brassica napus
MDRQDSDDIMKFLDGMASSDDVLFGFLDGGNHSPEVYPDTGSFAAGEDSYAENDAAGCNSDENKTFWLEQEQLLQATLYRTSSIETKIRQAAKQALKEVRSEGTQCVCRRPVAGGCRSCLRGEVARRLREAGYDCVSCKSKWRSNHEIPAGEHEYLEIVDQSGSKKVEIRVVIELSFRAEFEMARGSEEYKRLVGILPEVYVGKTERLRTLIKILCMAAKKCMKDKKMHMGPWRKHKYMQAKWLGTCERKSMRLVAETKTETEEEDMIAKAKQRVSMLNYGIFENVSAGMGRPAAVAVV

SEQ ID NO: 1912 - DNA, 894 bp, Brassica napus
  CDS (1)..(894)
atggatcgtcaaaattctgatgacatcgtgagatttctcgatggaatggctagctccgacgacgttctattcggtttcctcgacgaaggaaaccagtcaccggaagacttcccggactccggtaacctcaacggtggtggagatatagacgatgttgacgacaatagcaattgcgatgctgaagaaaacaaagctttctggcaggaacaagaaaaacttcttcaggggacactgtataggacaagttcaattgagacaaagattagacaagcgacaaaggaagcactgaaagaagttaaatcaaagggtctttattgtttctgccgacgacccgttgctggcggttgccggagctgcttacgtggtgaaatctctagacaccttcgagatgtggccggctacgactgcgtcatctccaaatccaagtggagaagctctcaagacatccctgcaggggaacacgaatacatagagatcttggacagatctgattcgaagaaaggcgagatgcgagtggtgattgagttatcattcagggcagagttcgagattgcaaaaggcggtgaagagtacaaaaggcttatcagccgattgccggaggtttacgtcggaaaaaccgagaggctcagatccctgatcaagatattgtgcatcgccgggaagaaatgcttgagagacaagaaaatgcatatgggaccctggagaaaacataagtacatgcaagccaagtggcttggcacgtgcgatagatcgagctccttggaagcggccgtggtctccgagacgactgaaccggagaattgggtgccgctggtgaagcctagggtttccatgctgaactacgatggtctgactaccgggatgggccgttctgccgctgtaacagtcgtgtga

SEQ ID NO: 1913 - protein, 297 aa, Brassica napus
MDRQNSDDIVRFLDGMASSDDVLFGFLDEGNQSPEDFPDSGNLNGGGDIDDVDDNSNCDAEENKAFWQEQEKLLQGTLYRTSSIETKIRQATKEALKEVKSKGLYCFCRRPVAGGCRSCLRGEISRHLRDVAGYDCVISKSKWRSSQDIPAGEHEYIEILDRSDSKKGEMRVVIELSFRAEFEIAKGGEEYKRLISRLPEVYVGKTERLRSLIKILCIAGKKCLRDKKMHMGPWRKHKYMQAKWLGTCDRSSSLEAAVVSETTEPENWVPLVKPRVSMLNYDGLTTGMGRSAAVTVV

SEQ ID NO: 1914 - DNA, 990 bp, Glycine max
  CDS (1)..(990)
atgggtgctacctctatggtccgaggaggagtcacgaggtttctaccccgaagggaatcattggggtgcgagaaactacaacttggagttggagatgtggagtttgaatttctcgatgatggtgagatgatgatgtcgttggtcaaaagtgatgaaagttctggcgatgagtttcgtcaatccaatgaaatggaattggatgatgatgatgatggtgagagggttgatggtggcagcgttgaggagaatagaagcttttgggataatcaacaccagcttttgcagaactacctatatagatcaacttctattgagtcaaggataaggaatgccaccaaagaagccgttcaggaaatacaaaacgcagaaatagtgtgcagttgcagtagacagataatttccagatcctgtagaaactgcttcattatagaagtctcaagacgccttcagaattctggttataacagtgccatttgcaaaacaaaatggagaagctcaccaagtaatattccatcaggagagcatactttcctagatgtaatagacagcacaagcaaaaagcaagaagttagggtgatcatagaactgaattttcgagcagagtttgagatggcaagggcaagtgaagagtacaacgggctagtgagcaagctccctgaggtgtacgtggggaaaatagagagattaagcaacatcatcaaggtgttgtgtatgggagcaaaaaagtgcatgaaggaaaacaaaatgcacatgggaccatggaggaagcacaagtacatgcaagctaagtggctaggttcatgcaaaaggaacacctcaacaactacttcatcacttaattcaatgatggggtattccgaggtggtgatgccaaaaccaaagcctagagcatcactgctaacagtggatctgatgctagaaaataataattttaagacagaaatgttgaagcttcccaatatgcattgtacagctgttgaagttttgtga

SEQ ID NO: 1915 - protein, 329 aa, Glycine max
MGATSMVRGGVTRFLPRRESLGCEKLQLGVGDVEFEFLDDGEMMMSLVKSDESSGDEFRQSNEMELDDDDDGERVDGGSVEENRSFWDNQHQLLQNYLYRSTSIESRIRNATKEAVQEIQNAEIVCSCSRQIISRSCRNCFIIEVSRRLQNSGYNSAICKTKWRSSPSNIPSGEHTFLDVIDSTSKKQEVRVIIELNFRAEFEMARASEEYNGLVSKLPEVYVGKIERLSNIIKVLCMGAKKCMKENKMHMGPWRKHKYMQAKWLGSCKRNTSTTTSSLNSMMGYSEVVMPKPKPRASLLTVDLMLENNNFKTEMLKLPNMHCTAVEVL

SEQ ID NO: 1916 - DNA, 894 bp, Brassica napus
  CDS (1)..(894)
atggatcgtcaaaattctgatgacatcgtgagatttctcgatggaatggctagctccgacgacgttctattcggtttcctcgacgaaggaaaccagtcaccggaagacttcccggactccggtaacctcaacggtggtggagatatagacgatgttgacgacaatagcaattgcgatgctgaagaaaacaaagctttctggcaggaacaagaaaaacttcttcaggggacactgtataggacaagttcaattgagacaaagattagacaagcgacaaaggaagcactgaaagaagttaaatcaaagggtctttattgtttctgccgacgacccgttgctggcggttgccccacctgcttacgtggtgaaatctctagacaccttcgagatgtggccggctacgactgcgtcatctccaaatccaagtggagaagctctcaagacatccctgcaggggaacacgaatacatagagatcttggacagatctgattcgaagaaaggcgagatgcgagtggtgattgagttatcattcagggcagagttcgagattgcaaaaggcggtgaagagtacaaaaggcttatcagccgattgccggaggtttacgtcggaaaaaccgagaggctcagatccctgatcaagatattgtgcatcgccgggaagaaatgcttgagagacaagaaaatgcatatgggaccctggagaaaacataagtacatgcaagccaagtggcttggcacgtgcgatagatcgagctccttggaagcggccgtggtctccgagacgactgaaccggagaattgggtgccgctggtgaagcctagggtttccatgctgaactacgatggtctgactaccgggatgggccgttctgccgctgtaacagtcgtgtga

SEQ ID NO: 1917 - protein, 297 aa, Brassica napus
MDRQNSDDIVRFLDGMASSDDVLFGFLDEGNQSPEDFPDSGNLNGGGDIDDVDDNSNCDAEENKAFWQEQEKLLQGTLYRTSSIETKIRQATKEALKEVKSKGLYCFCRRPVAGGCPTCLRGEISRHLRDVAGYDCVISKSKWRSSQDIPAGEHEYIEILDRSDSKKGEMRVVIELSFRAEFEIAKGGEEYKRLISRLPEVYVGKTERLRSLIKILCIAGKKCLRDKKMHMGPWRKHKYMQAKWLGTCDRSSSLEAAVVSETTEPENWVPLVKPRVSMLNYDGLTTGMGRSAAVTVV

SEQ ID NO: 1918 - DNA, 903 bp, Brassica napus
  CDS (1)..(903)
atgggtttctccagagcaaaacgtgtcaccgatccactagccgacgaggccagggctcgtctcgttgggtgcagcttcagcagcggcagcgaacacaccggcgacggtatcgacgactacgacgatgattccccttgtctttccgatctagtccaagggttcttggaagacgaagctaaccagaacgttaacgaggagccacgctggtgcgacagcgactcggaatcagactcagactctgactcggagcgagtcgacctccctgactttgcggaagatattgcgaaaattctgaggaacactctcagggaagacaactacggacgaatggtgctgtttcatgtcgcgagagctatggaaatgctgccgtctctaggatctgatcaagaacagcgtgccgtttcgcgacgtaagctcatgtcccttcttagagggttcggacacaatgcggcgatctgcaaaacgaaatggaaatcctccggcggcctcaccgccggaaaccacgagtttatcgacgtcgtttacacacccgccgccgccacctcgcctcagaccgtacgttacatcgtcgatttggacttcgcgtcgcggtttcagatcgccagaccgacggcacagtactcgcgtgtgcttcagtcgcttccggcggtttttgtcgggagaggggatgatctgaagcggatcttacgtctcgtgtgcgacgcggcgaggttgtcgcttaggagccgtggcctcacgcttccaccgtggagaaagaaccgttatttgcagacgcggtggcttggttcttacaaacgcaccgtgaacttaacgccatcatctcccgccgttaacaccgtcatgtgtcgtgccgtcggtttcgataacgccgtcggtgaccgtctatttgtgcagactcgataa

SEQ ID NO: 1919 - protein, 300 aa, Brassica napus
MGFSRAKRVTDPLADEARARLVGCSFSSGSEHTGDGIDDYDDDSPCLSDLVQGFLEDEANQNVNEEPRWCDSDSESDSDSDSERVDLPDFAEDIAKILRNTLREDNYGRMVLFHVARAMEMLPSLGSDQEQRAVSRRKLMSLLRGFGHNAAICKTKWKSSGGLTAGNHEFIDVVYTPAAATSPQTVRYIVDLDFASRFQIARPTAQYSRVLQSLPAVFVGRGDDLKRILRLVCDAARLSLRSRGLTLPPWRKNRYLQTRWLGSYKRTVNLTPSSPAVNTVMCRAVGFDNAVGDRLFVQTR

SEQ ID NO: 1920 - DNA, 900 bp, Brassica napus
  CDS (1)..(900)
atggatcgtcaagattccgatgacataatgaagtttctagacggcatggctagctccgacgatgttttatttggtttcctcgacggaggaaaccattcaccggaggtttaccctgacaccggtagcttcgccgcaggtgaagattcctatgcagaaaacgatgcagccggttgcaattccgatgagaacaaaaccttttggcttgaacaagaacaacttctccaggcgacactgtataggacaagttcaattgagacaaagattcgacaagcagcgaaacaagcgttgaaagaagtgagatcagaaggcacgcaatgtgtctgccggagacccgtggccggcggttgccgtagctgtttacgcggcgaagtggctcgccgtctccgagaggccggctatgattgcgtcagctgtaaatccaaatggagaagcaatcatgaaatccctgcaggtgagcatgaatatttggaaattgtggaccaatcgggatcgaagaaagtcgagatccgtgtggtgatcgagctatctttcagggctgagtttgagatggcgaggggtagtgaggagtacaagcgactcgctggaatattacctgaagtgtacgtggggaaaacagagaggctaagaacactaataaaaatattgtgcatggctgcgaaaaagtgcatgaaagacaagaaaatgcacatgggtccttggagaaaacacaagtatatgcaagccaaatggctcggtacctgcgagagaaaatctatgaggctggttgctgagactaagacggagactgaggaggaggatatgattgccaaagctaaacagagagtttctatgctgaattatggtatttttgaaaacgtatccgccggaatgggccgtccggccgccgtagcggtcgtatga

SEQ ID NO: 1921 - protein, 299 aa, Brassica napus
MDRQDSDDIMKFLDGMASSDDVLFGFLDGGNHSPEVYPDTGSFAAGEDSYAENDAAGCNSDENKTFWLEQEQLLQATLYRTSSIETKIRQAAKQALKEVRSEGTQCVCRRPVAGGCRSCLRGEVARRLREAGYDCVSCKSKWRSNHEIPAGEHEYLEIVDQSGSKKVEIRVVIELSFRAEFEMARGSEEYKRLAGILPEVYVGKTERLRTLIKILCMAAKKCMKDKKMHMGPWRKHKYMQAKWLGTCERKSMRLVAETKTETEEEDMIAKAKQRVSMLNYGIFENVSAGMGRPAAVAVV

SEQ ID NO: 1922 - DNA, 903 bp, Brassica napus
  CDS (1)..(903)
atgggtttctccagagcaaaacgtgtcaccgatccactagccgacgaggtcagggctcgtctcgttgggtgcagcttcagcagcggcagcgaacacaccggcgacggtatcgacgactacgacgatgattccccttgtctttccgatctagtccaagggttcttggaagacgaagctaaccagaacgttaacgaggagccacgctggtgcgacagcgactcggaatcagactcagactctgactcggagcgagtcgagctccctgactttgcggaagatattgcgaagattctgaggaacactctcggggaagacaactacggacgaatggtgctgtttcatgtcgcgagagctatggaaatgctgccgtctctgggatctgatcaagaacagcgtgccgtttcgcgacgtaagctcatgtcccttctcagagggttcggacacaatgcggcgatctgcaaaacgaaatggaaatcctccggcggcctcaccgccggcaaccacgagtttatcgacgtcgtttacacacccgccgccgccgcctcgcctcagaccgtacgttacatcgtcgatttggacttcgcgtcgcggtttcagatcgccagaccgacggcacagtactcgcgtgtgcttcagtcgcttccggcggtttttgtcgggagaggggatgatctgaagcggatcttacgtctcgtgtgcgacgcggcgaggttgtcgcttaggagccgtggcctcacgcttccaccgtggagaaagaaccgttatttgcagacgcggtggcttggttcttacaaacgcaccgtgaacttaacgccatcatctcccgccgttaacaccgtcatgtgtcgtgccgtcggtttcgataacgccgtcggtgaccgtctatttgtgcagactcgataa

SEQ ID NO: 1923 - protein, 300 aa, Brassica napus
MGFSRAKRVTDPLADEVRARLVGCSFSSGSEHTGDGIDDYDDDSPCLSDLVQGFLEDEANQNVNEEPRWCDSDSESDSDSDSERVELPDFAEDIAKILRNTLGEDNYGRMVLFHVARAMEMLPSLGSDQEQRAVSRRKLMSLLRGFGHNAAICKTKWKSSGGLTAGNHEFIDVVYTPAAAASPQTVRYIVDLDFASRFQIARPTAQYSRVLQSLPAVFVGRGDDLKRILRLVCDAARLSLRSRGLTLPPWRKNRYLQTRWLGSYKRTVNLTPSSPAVNTVMCRAVGFDNAVGDRLFVQTR

SEQ ID NO: 1924 - DNA, 981 bp, Glycine max
  CDS (1)..(981)
atgggtgctacctctatggtccgaggaggagtcacgaggtttctaccccgaagggaatcattggggtgcgagaaactacaacttggagttggagatgtggagtttgaatttctcgatgatggtgagatgatgatgtcgttggtcaaaagtgatgaaagttctggcgatgagtttcgtcaatccaatgaaatggaattggatgatgatgatgatggtgagagggttgatggtggcagcgttgaggagaatagaagcttttgggataatcaacaccagcttttgcagaactacctatatagaacaacttcagttgagtcaaggataagaaatgtcaccaaagaagccgttcaggatatacaaaacgcggaaatagtgtgcagttgcagtagacagataatttccagatcctgtagaaactgtttcatgatacaagtctcaaggcgccttcagaagtctggttatgacagtgccatttgcaaaacaaaatggagcagctcaccaagtattccatcaggggagcatacttttctagatgttatagacagcagaagcaaaaagcaagaaattagggtgatcatagaactgaatttccgagcagagtttgagatggcaagggcaagtgaagagtacaacgggcttgttcggaagctccctgaggtgtatgtggggaaaatagagagattaagcaacatcatcaaggtgttgtgcatgggagcaaaaaggtgcatgaaggaaaacaaaatgcacatgggaccatggaggaagcacaagtacgtgcacgctaagtggctaggtccatgcaaaaggaacacctcaacaacttcactttcaaattcaatgatgggaaattccgaggtgatgatgccaaaaccaaagcctagggcatcactgctaacagtggatctgatgctagaaacgaattctaagacagaaatgttgaagcttcccaatatgcattgttcagctgttgcagttttgtaa

SEQ ID NO: 1925 - protein, 326 aa, Glycine max
MGATSMVRGGVTRFLPRRESLGCEKLQLGVGDVEFEFLDDGEMMMSLVKSDESSGDEFRQSNEMELDDDDDGERVDGGSVEENRSFWDNQHQLLQNYLYRTTSVESRIRNVTKEAVQDIQNAEIVCSCSRQIISRSCRNCFMIQVSRRLQKSGYDSAICKTKWSSSPSIPSGEHTFLDVIDSRSKKQEIRVIIELNFRAEFEMARASEEYNGLVRKLPEVYVGKIERLSNIIKVLCMGAKRCMKENKMHMGPWRKHKYVHAKWLGPCKRNTSTTSLSNSMMGNSEVMMPKPKPRASLLTVDLMLETNSKTEMLKLPNMHCSAVAVL

SEQ ID NO: 1926 - DNA, 900 bp, Glycine max
  CDS (1)..(900)
atggtggttttagcgagaaagaaacgagtcactgatccgttcgacgacgaagccaaagcacgtctcgtcggcggcggcgaccaccggcaattgagctacgtcagcagcgggagcgaacattccggcaacggcgacggacactcgccgtgtctctccgagctcgtgcatgatttcctcgaggacaatggcgactcggagaacaacaactcagcggggaacgagttcgactcggagcgagtcgactccgtcacagactgcattgactcagtggaggagcttctcatgttaaacgcatccaacgtttcagactcttataagagcttgcttctcgagcatgcttcggaggcatcagagaagttcgagtttttgaaagaaggaaacgtttcgtcgcatcgccgaaacgcgatgtcgtttctgcgcgagaaggggcacaatgcggcgatttgcaaaacgcggtgggactcttccggtggagtaactgcaggtaactatgaattcatcgacgtggtgcaatctgggccggctacgtggcacaaaaggtacttcgtggaccttgatttcgtggcccagttcgagatcgcacggcccacaagcgagtacttagagtttcttaattatgtgccgcgaatattcgttgggacggaggaggagctaaaacgcaccgtgcgggtgttgtgcggagttgcgaggcgttgttttgggaagagagggttaagtctgcctccatggaggaagaaccggtacatgcagaacaagtggttcggtccgtatcggagaaccgcgaacccggttcacggaaacccggttccaacggtcgtgtctgcgttgagtggggccaaatgtaggttcgtggggttcgacgacgcgtttcggaggccagacatggcggtgtggttgtaa

SEQ ID NO: 1927 - protein, 299 aa, Glycine max
MVVLARKKRVTDPFDDEAKARLVGGGDHRQLSYVSSGSEHSGNGDGHSPCLSELVHDFLEDNGDSENNNSAGNEFDSERVDSVTDCIDSVEELLMLNASNVSDSYKSLLLEHASEASEKFEFLKEGNVSSHRRNAMSFLREKGHNAAICKTRWDSSGGVTAGNYEFIDVVQSGPATWHKRYFVDLDFVAQFEIARPTSEYLEFLNYVPRIFVGTEEELKRTVRVLCGVARRCFGKRGLSLPPWRKNRYMQNKWFGPYRRTANPVHGNPVPTVVSALSGAKCRFVGFDDAFRRPDMAVWL

SEQ ID NO: 1928 - DNA, 861 bp, Glycine max
  CDS (1)..(861)
atgggtgctacctctatggtccgaggaggagtcacgaggtttctaccccgaagggaatcattggggtgcgagaaactacaacttggagttggagatgtggagtttgaatttctcgatgatggtgagatgatgatgtcgttggtcaaaagtgatgaaagttctggcgatgagtttcgtcaatccaatgaaatggaattggatgatgatgatgatggtgagagggttgatggtggcagcgttgaggagaatagaagcttttgggataatcaacaccagcttttgcagacctacctatatagaacaacttcagttgagtcaaggataagaaatgtcaccaaagaagccgttcaggatatacaaaacgcggaaatagtgtgcagttgcagtagacagataatttccagatcctgtagaaactgtttcatgatacaagtctcaaggcgccttcagaagtctggttatgacagtgccatttgcaaaacaaaatggagcagctcaccaagtattccatcaggggagcatacttttctagatgttatagacagcagaagcaaaaagcaagaaattagggtgatcatagaactgaatttccgagcagagtttgagatggcaagggcaagtgaagagtacaacgggcttgttcggaagctccctgaggtgtatgtggggaaaatagagagattaagcaacatcatcaaggtgttgtgcatgggagcaaaaaggtgcatgaaggaaaacaaaatgcacatgggaccatggaggaagcacaagtacgtgcacgctaagtggctaggtccatgcaaaaggaacacctcaacaacttcactttcaaattcaatgatgggaaaattcgaggtatga

SEQ ID NO: 1929 - protein, 286 aa, Glycine max
MGATSMVRGGVTRFLPRRESLGCEKLQLGVGDVEFEFLDDGEMMMSLVKSDESSGDEFRQSNEMELDDDDDGERVDGGSVEENRSFWDNQHQLLQTYLYRTTSVESRIRNVTKEAVQDIQNAEIVCSCSRQIISRSCRNCFMIQVSRRLQKSGYDSAICKTKWSSSPSIPSGEHTFLDVIDSRSKKQEIRVIIELNFRAEFEMARASEEYNGLVRKLPEVYVGKIERLSNIIKVLCMGAKRCMKENKMHMGPWRKHKYVHAKWLGPCKRNTSTTSLSNSMMGKFEV

SEQ ID NO: 1930 - DNA, 22 bp, Artificial sequence
  primer
atggatcggcaaagttccgatg

SEQ ID NO: 1931 - DNA, 20 bp, Artificial sequence
  primer
tcacacaaccgctacaacgg

SEQ ID NO: 1932 - protein, 126 aa, Artificial sequence
  consensus sequence
  Variant (2)..(3): Xaa in position 2 to 3 is any amino acid
  Variant (4)..(5): Xaa in position 4 to 5 is any or no amino acid
  Variant (7)..(14): Xaa in position 7 to 14 is any amino acid
  Variant (17)..(22): Xaa in position 17 to 22 is any amino acid
  Variant (23)..(23): Xaa in position 23 is any or no amino acid
  Variant (25)..(25): Xaa in position 25 is any amino acid
  Variant (27)..(27): Xaa in position 27 is any amino acid
  Variant (29)..(38): Xaa in position 29 to 38 is any amino acid
  Variant (39)..(46): Xaa in position 39 to 46 is any or no amino acid
  Variant (48)..(50): Xaa in position 48 to 50 is any amino acid
  Variant (52)..(53): Xaa in position 52 to 53 is any amino acid
  Variant (55)..(56): Xaa in position 55 to 56 is any amino acid
  Variant (60)..(60): Xaa in position 60 is any amino acid
  Variant (62)..(66): Xaa in position 62 to 66 is any amino acid
  Variant (68)..(69): Xaa in position 68 to 69 is any amino acid
  Variant (71)..(73): Xaa in position 71 to 73 is any amino acid
  Variant (76)..(78): Xaa in position 76 to 78 is any amino acid
  Variant (81)..(84): Xaa in position 81 to 84 is any amino acid
  Variant (86)..(92): Xaa in position 86 to 92 is any amino acid
  Variant (94)..(95): Xaa in position 94 to 95 is any amino acid
  Variant (98)..(105): Xaa in position 98 to 105 is any amino acid
  Variant (107)..(108): Xaa in position 107 to 108 is any amino acid
  Variant (113)..(114): Xaa in position 113 to 114 is any amino acid
  Variant (116)..(118): Xaa in position 116 to 118 is any amino acid
  Variant (121)..(125): Xaa in position 121 to 125 is any amino acid
LXXXXGXXXXXXXXKWXXXXXXXPXGXHXXXXXXXXXXXXXXXXXXRXXXEXXFXXEFEXAXXXXXYXXLXXXLPXXXVGXXXXLXXXXXXXCXXAKXXXXXXXXHXXPWRKXXYXXXKWXXXXXR

SEQ ID NO: 1933 - protein, 55 aa, Artificial sequence
  protein pattern
  Variant (3)..(3): Xaa in position 3 is any amino acid
  Variant (4)..(5): Xaa in position 4 to 5 is any or no amino acid
  Variant (7)..(8): Xaa in position 7 to 8 is any or no amino acid
  Variant (10)..(10): Xaa in position 10 is Lys or Arg
  Variant (11)..(11): Xaa in position 11 is any amino acid
  Variant (12)..(12): Xaa in position 12 is Asp or Glu
  Variant (13)..(13): Xaa in position 13 is Asp or Arg
  Variant (15)..(16): Xaa in position 15 to 16 is any amino acid
  Variant (17)..(18): Xaa in position 17 to 18 is Ile, Leu or Val
  Variant (19)..(19): Xaa in position 19 is any amino acid
  Variant (20)..(20): Xaa in position 20 is Ala, Ile, Leu or Val
  Variant (21)..(21): Xaa in position 21 is any amino acid
  Variant (23)..(23): Xaa in position 23 is any amino acid
  Variant (24)..(25): Xaa in position 24 to 25 is Ala or Gly
  Variant (26)..(26): Xaa in position 26 is Lys or Arg
  Variant (27)..(27): Xaa in position 27 is any amino acid
  Variant (28)..(28): Xaa in position 28 is Cys or Ser
  Variant (29)..(29): Xaa in position 29 is any amino acid
  Variant (30)..(30): Xaa in position 30 is Lys or Arg
  Variant (31)..(33): Xaa in position 31 to 33 is any amino acid
  Variant (34)..(34): Xaa in position 34 is Leu or Met
  Variant (35)..(35): Xaa in position 35 is any amino acid
  Variant (36)..(36): Xaa in position 36 is Leu, Met or Val
  Variant (37)..(37): Xaa in position 37 is Ala, Gly or Pro
  Variant (41)..(41): Xaa in position 41 is Lys or Arg
  Variant (42)..(42): Xaa in position 42 is any amino acid
  Variant (43)..(43): Xaa in position 43 is Glu, Lys or Arg
  Variant (45)..(45): Xaa in position 45 is Leu, Met or Val
  Variant (46)..(46): Xaa in position 46 is any amino acid
  Variant (47)..(47): Xaa in position 47 is Ala, Asn, Ser or Thr
  Variant (48)..(48): Xaa in position 48 is Lys or Arg
  Variant (50)..(50): Xaa in position 50 is Phe or Leu
  Variant (51)..(51): Xaa in position 51 is Ala, Gly or Ser
  Variant (52)..(54): Xaa in position 52 to 54 is any amino acid
LPXXXVXXGXXXXLXXXXXXXCXXXXXXXXXXXXXXXPWRXXXYXXXXWXXXXXR

SEQ ID NO: 1934 - protein, 14 aa, Artificial sequence
  protein pattern
  Variant (2)..(2): Xaa in position 2 is Phe, His or Tyr
  Variant (3)..(3): Xaa in position 3 is Asp or Asn
  Variant (4)..(4): Xaa in position 4 is any amino acid
  Variant (5)..(5): Xaa in position 5 is Ala or Val
  Variant (6)..(6): Xaa in position 6 is any amino acid
  Variant (7)..(7): Xaa in position 7 is Cys or Ser
  Variant (8)..(8): Xaa in position 8 is Lys or Arg
  Variant (9)..(9): Xaa in position 9 is Ser or Thr
  Variant (12)..(12): Xaa in position 12 is any amino acid
  Variant (13)..(13): Xaa in position 13 is any or no amino acid
GXXXXXXXXKWXXS

SEQ ID NO: 1935 - protein, 20 aa, Artificial sequence
  protein pattern
  Variant (2)..(2): Xaa in position 2 is any amino acid
  Variant (3)..(3): Xaa in position 3 is Ile, Met or Val
  Variant (4)..(4): Xaa in position 4 is Ile or Val
  Variant (5)..(5): Xaa in position 5 is Asp or Glu
  Variant (6)..(6): Xaa in position 6 is any amino acid
  Variant (7)..(7): Xaa in position 7 is Cys, Asp, Asn or Ser
  Variant (8)..(8): Xaa in position 8 is Phe or Val
  Variant (9)..(9): Xaa in position 9 is any amino acid
  Variant (10)..(10): Xaa in position 10 is Ala or Gly
  Variant (14)..(14): Xaa in position 14 is Ile, Met or Val
  Variant (16)..(16): Xaa in position 16 is Lys or Arg
  Variant (17)..(17): Xaa in position 17 is Ala, Gly or Pro
  Variant (18)..(18): Xaa in position 18 is Gly, Ser or Thr
  Variant (19)..(19): Xaa in position 19 is Ala, Asp or Glu
  Variant (20)..(20): Xaa in position 20 is Asp, Glu, Gly or Gln
RXXXXXXXXXEFEXAXXXXX

SEQ ID NO: 1936 - DNA, 1671 bp, Arabidopsis thaliana
  CDS (1)..(1671)
atgggcaattcttgccgtggatctttcaaggacaaactcgacgaaggcgataacaataagcctgaagattactctaaaacctctaccaccaacttgtcttctaattccgaccattcaccgaacgctgcagacatcattgctcaagaattctccaaagacaacaacagcaacaacaacagcaaagatccagctcttgttattcctttaagagaaccaatcatgaggcgtaacccagacaatcaagcttactatgttcttggtcataagacaccaaacattcgtgatatctatacccttagccgcaagctaggtcaaggtcaatttggaacgacttatctatgtacagagattgcctcaggcgttgactacgcttgtaagtcaatatccaagaggaagttgatctctaaagaagatgttgaggatgttagaagggagattcagataatgcatcatttagctggtcacggtagtatcgtgacgattaaaggagcttatgaggactctttgtatgttcacattgttatggagctttgtgctggaggtgaattgtttgataggattattcagagaggacattatagtgagaggaaagctgctgagctgactaagatcattgtcggtgttgttgaagcgtgtcattcgcttggtgtgatgcatagagacttgaagcctgagaatttcttattggttaataaggatgatgatttctctctcaaggctattgattttgggctatctgtctttttcaaaccaggtcaaatattcactgatgttgttggaagtccatattatgttgctcctgaggttttgctcaaacgttatgggcctgaagctgatgtgtggactgctggtgttatattgtatatattgctaagcggagtcccacctttctgggcagaaacacagcaagggatatttgatgctgtgttgaaaggatatatcgactttgagtcagacccgtggcctgtgatatccgacagtgctaaagacttgatccgcagaatgttatcctccaagcctgcagaacgtttgaccgctcatgaagtcttgcgtcatccatggatctgtgagaatggtgttgcaccagatagagcactagatccagctgttctttctcgtctcaagcaattctctgcaatgaataaactaaagaagatggctttgaaggttatagctgagagtctctcggaagaagagatagctggtttaagagaaatgtttcaagcaatggatactgataacagcggggcaatcacatttgatgaactcaaagctgggctgagaaaatatggatctaccttgaaagacacagagatccatgatcttatggatgcggctgatgtagacaacagtgggacaatagattacagtgagttcattgcagcgacgatccatctcaacaaactagagcgggaagagcatcttgttgcagcgtttcaatattttgacaaagatggaagcggtttcataacaattgatgagctacaacaagcgtgtgttgaacatggcatggctgatgttttccttgaagacatcatcaaagaagttgatcaaaacaatgatggaaagattgattatggtgagtttgtggagatgatgcaaaagggaaatgctggtgttggaagaaggacgatgagaaatagtctaaacattagcatgagagacgcgtag

SEQ ID NO: 1937 - protein, 556 aa, Arabidopsis thaliana
MGNSCRGSFKDKLDEGDNNKPEDYSKTSTTNLSSNSDHSPNAADIIAQEFSKDNNSNNNSKDPALVIPLREPIMRRNPDNQAYYVLGHKTPNIRDIYTLSRKLGQGQFGTTYLCTEIASGVDYACKSISKRKLISKEDVEDVRREIQIMHHLAGHGSIVTIKGAYEDSLYVHIVMELCAGGELFDRIIQRGHYSERKAAELTKIIVGVVEACHSLGVMHRDLKPENFLLVNKDDDFSLKAIDFGLSVFFKPGQIFTDVVGSPYYVAPEVLLKRYGPEADVWTAGVILYILLSGVPPFWAETQQGIFDAVLKGYIDFESDPWPVISDSAKDLIRRMLSSKPAERLTAHEVLRHPWICENGVAPDRALDPAVLSRLKQFSAMNKLKKMALKVIAESLSEEEIAGLREMFQAMDTDNSGAITFDELKAGLRKYGSTLKDTEIHDLMDAADVDNSGTIDYSEFIAATIHLNKLEREEHLVAAFQYFDKDGSGFITIDELQQACVEHGMADVFLEDIIKEVDQNNDGKIDYGEFVEMMQKGNAGVGRRTMRNSLNISMRDA

SEQ ID NO: 1938 - DNA, 2392 bp, Oryza sativa
  CDS (191)..(1897)
gttgtcagtgggacgtggcccagctcacctcgtccccctccggccatctcccctctcctccaccaaaatcctcctccgatccaaatccaccaaccctcgccgccgccgccaccgccgcctatgccgccgccgccgtcgccggctgcctagggttacggcggccgcagctcccccccacttcgccggcgcgatggggaacacctgcgtcggccccagctccgcggcggaccgccacggcttcttccactccgtctccctcgccgtgctctggcgccccggtggccgcgccgagccgtcgcagccgccgggttacccgcctcgggagtcgagccactcctccgtcacctcgtccacggcgcccgagcgcgtcaccatcgccgactccgacctctcctcctccacccccaacaagggcgggaataagcccaaggtgaggcgcgtccagagcgcggggctcctcgccgactccgtcctcaagcgcgactccgagcggctcaaggacctctacaccctggggaagaagctcgggcaggggcagttcgggaccacgtaccagtgcgtggagaaggccacggggaaggtgctcgcctgcaagtccatcgccaagcggaagctggtcagcgaggaggacgtggaggacgtgcgccgggagatccagatcatgcaccacctcgccggccacccgagcgtggtctccatcgtcggcgcgtacgaggacgccgtcgccgtgcacctcgtcatggagctctgcgctggcggggagctgtttgataggatcgtgcagcgcgggcactactccgagaaggcggccgcgcagctggcgcgggtgatcatcggtgtcgtcgaggcgtgccattcgctcggggtgatgcacagagacctcaagccggagaacttcttgtttgtcaaccataaggaggactcgccactcaagacgatcgattttgggctttccattttcttcaagccaggcgaaaattattcggatgttgttggaagtccttactatgttgcacctgaggttctgatgaagcattatggccgcgaggtggatgtatggagtgctggtgtaatcatttatatcttgcttagtggagttcctccattttgggatgaatctgaacaagggatatttgaaaaagttttgaaaggagatcttgatttttcatctgatccctggcctgctatctcagacagtgcaaaggatttggtgaggaaaatgttaaaccgtgatcccagaaagagattgactgcacatgaagctctatgtcatccttgggtttgtgttgatggagttgctcctgataaacctcttgattctgctgtcttaactagattgaagcaattttcagcaatgaacaagctaaagaagatggcccttagggtcattgctgaaaatttatcggaagatgaaattgcgagattgagagaaatgttcaaaatgttggacactgataatagtggtcagatcacattggaggaactaaaaactggcttgcggagagttggtgctaatttgaaggattcggaaattacaaccctaatggaagcggctgatattgataatagtggttcaatagattatggggagttcattgctgcaactatgcatctgaacaaagttgagagagaagataatctttttgcagcgttttcatactttgataaagacagcagtggttacattactcaagatgagctacaaaaagcctgtgaggaatttggcataggagatgcacatctggaggatatcatcaaagatattgatcaggacaatgatggccggatcgactacaatgaatttgtaacaatgatgcggaaagggaataatccactagggaaaaaggggcaaggccagctaagttttggtctaagggaagcattgaagcttggttaatggaataactacccctgaatgtagaatggagtgctatttagtaaaggacgaagactgaattcaagaaagcagaagatcaaagacaaacgttggtgttactcctttatcaacactctgtgaagatacaaactaactttttgggttccatcagccggacacacaagaaagccacgtacttgggtttcttcaaagagttcaacatccgtggaccctccaaccgtatagggtgtttttttttccttttttaaataggcacaactcacaagaatagcgtgtgtgttgtttcatactttcatgtcctccttttccgttctggaaacccttgtaggatgctctgctgagacggtgaagctttgacacgcttggaacttcggattggagagttggacgagattcctttgcattggagagttgtatagttgctagtattgaaatgttgtaagaattcgtaggttgtaacataaacagtaaaatgaatgaaatggttgttttagt

SEQ ID NO: 1939 - protein, 568 aa, Oryza sativa
MGNTCVGPSSAADRHGFFHSVSLAVLWRPGGRAEPSQPPGYPPRESSHSSVTSSTAPERVTIADSDLSSSTPNKGGNKPKVRRVQSAGLLADSVLKRDSERLKDLYTLGKKLGQGQFGTTYQCVEKATGKVLACKSIAKRKLVSEEDVEDVRREIQIMHHLAGHPSVVSIVGAYEDAVAVHLVMELCAGGELFDRIVQRGHYSEKAAAQLARVIIGVVEACHSLGVMHRDLKPENFLFVNHKEDSPLKTIDFGLSIFFKPGENYSDVVGSPYYVAPEVLMKHYGREVDVWSAGVIIYILLSGVPPFWDESEQGIFEKVLKGDLDFSSDPWPAISDSAKDLVRKMLNRDPRKRLTAHEALCHPWVCVDGVAPDKPLDSAVLTRLKQFSAMNKLKKMALRVIAENLSEDEIARLREMFKMLDTDNSGQITLEELKTGLRRVGANLKDSEITTLMEAADIDNSGSIDYGEFIAATMHLNKVEREDNLFAAFSYFDKDSSGYITQDELQKACEEFGIGDAHLEDIIKDIDQDNDGRIDYNEFVTMMRKGNNPLGKKGQGQLSFGLREALKLG

SEQ ID NO: 1940 - DNA, 2044 bp, Oryza sativa
  CDS (192)..(1793)
gacccttgtgcccttatctcctatggttgcttccactgtcaccaaagggggactcgccatctaccttgttcctcagttcatgcgaatttcatgcggtcctgggctgtgactgggagtagattgagggttgatctcgtttgcggagtaacaaatttgcaagcctacaactgctagggagaatttgactaaaaatggggtcgtgttgcagcagagctacgtctccagattctggtcgaggaggagcaaacggttatggctattctcaccagacaaaacctgctcagacaactcctagctataaccatcctcagccgccgccgccagctgaggtgaggtacacaccatcagcaatgaaccctccggtagtcccacctgtggttgccccaccgaagcccaccccagacacaattcttggaaagccgtatgacgatgtgcgctcggtttactcccttggaaaggaactcggaaggggacagtttggggtgacatacctgtgcacggagatcgctagtggtaagcagtatgcttgcaaatccatctctaagcgcaagcttgtgagcaaggccgacaaggaggacattcgccgggagattcagatcatgcagcacctatatggacaacaaaacattgtcgagttccggggagcatatgaggacaagagcaatgtccatgttgtcatggagctctgcgctggtggggagctgtttgatcggatcattgccaaggggcactactcagagcgtgcggctgctaccatctgcagggcagtggtgaatgttgtcaacatttgccattttatgggagtgatgcatcgtgatttaaaaccggagaacttcttacttgcaaccaaagaagagaatgcaatgctcaaagccactgattttggtctctcagttttcattgaagaaggaaaaatgtatagagacattgttggaagtgcttattatgttgctcctgaagtccttcggcggaattatggtaaagagattgatgtatggagtgcaggcgttattttgtacattcttctcagtggtgttcctccattttgggctgaaactgaaaagggaatatttgatgctattcttcaaggggagattgactttgagagtcaaccatggccatcaatatccgagagtgctaaagaccttgttagaaagatgttgacacaagatccaaagaaaagaattacttcggcccaagttctccaacatccctggctcagagatggagaagcatctgacaaacctattgacagcgctgttctttctaggatgaagcaattcagagcaatgaacaagctgaaaaagatggctctgaaggttattgcttcaaaccttaatgaggaggagatcaagggcctgaagcaaatgttcacaaacatggacacagacaacagcgggaccatcacatatgatgaactcaaagcaggattagccaaacttggatcaaagctttcagaagctgaagtaaagcagttgatggaagctgctgatgtagacggcaatggatccatcgactatgttgaatttatcactgccacaatgcatagacacaagctcgaaagagatgagcatttgtttaaggcattccagtattttgacaaagacaacagtggcttcatcacaagagatgaactggaatccgctttaatcgagcatgaaatgggcgatacaagtaccataaaggatattatatcagaagtcgacacgaataatgatgggaggattaactacgaggaattttgcgctatgatgagaggaggggggatgcagcagcctatgaggctcaaatagtctgtttccttgtagaaaatgatgtacaattacattagtaaactgttttcgccttcttttttttgttccatggatggtagtcgacggataaaaggtttaccctggacgcagcttttgcattgttgagatgattgtgtatattttcttgccttgcccgtgtatggtgtagtgatttgaatgtcctcccttttgtaagttgtttctgcaagtacacacaataaaagagcatttttgcacctcaattcttctgc

SEQ ID NO: 1941 - protein, 533 aa, Oryza sativa
MGSCCSRATSPDSGRGGANGYGYSHQTKPAQTTPSYNHPQPPPPAEVRYTPSAMNPPVVPPVVAPPKPTPDTILGKPYDDVRSVYSLGKELGRGQFGVTYLCTEIASGKQYACKSISKRKLVSKADKEDIRREIQIMQHLYGQQNIVEFRGAYEDKSNVHVVMELCAGGELFDRIIAKGHYSERAAATICRAVVNVVNICHFMGVMHRDLKPENFLLATKEENAMLKATDFGLSVFIEEGKMYRDIVGSAYYVAPEVLRRNYGKEIDVWSAGVILYILLSGVPPFWAETEKGIFDAILQGEIDFESQPWPSISESAKDLVRKMLTQDPKKRITSAQVLQHPWLRDGEASDKPIDSAVLSRMKQFRAMNKLKKMALKVIASNLNEEEIKGLKQMFTNMDTDNSGTITYDELKAGLAKLGSKLSEAEVKQLMEAADVDGNGSIDYVEFITATMHRHKLERDEHLFKAFQYFDKDNSGFITRDELESALIEHEMGDTSTIKDIISEVDTNNDGRINYEEFCAMMRGGGMQQPMRLK

SEQ ID NO: 1942 - DNA, 2235 bp, Sorghum bicolor
  CDS (216)..(1883)
gcacgaggcctagtggtcgtccccgttaaatccctgctcgcccagtcacgagcacccgccccgccacgctcctcccgcccgcccccgacccaacccagatcagagattccgtttgcggcgttggcgtttgcgctggcgtttccgagccgcggccgtgaccgaccgtccggagctagcttcatgcgccagggccggcggcttcaccccgtcgtttgatgggcaacgcatgcggcggctcccttagatccaagtacctgcacagcttcaagcacgccgcgtcgcagcgccacgactccgagtacagcgccaccagcaccgtcgacgactcgcccaggaagcagcccaccacgccgcccgccaccacggacgcccacgcgcagccgccgccggcgtccgccgccgccgcagccatgaggcgcggcggggcgggcgcgacgcccgacctcgggtccgtgctcggccaccccacccccaacctccgcgacctctacgcgctcggcaggaagctcgggcaggggcagttcggcaccacctacctctgcaccgagctcgccacgggggtcgactacgcctgcaagtccatctccaagcgcaagctcatcaccaaggaggacatcgacgacgtgcgccgagagatccagatcatgcaccacctctcgggccacaagaacgtcgtcgctatcaagggcgcgtacgaggaccaggtctacgtccacatcgtcatggagctctgcgccggaggcgagctcttcgaccggatgcacgagggcgggcactacagcgagcgcaaggccgccgagctcaccaggatcatcgtcggggtcgtcgaggcctgccactcgctcggggtcatgcaccgggaccccaagcccgagaacttcctgctcgccaacaaggacgacgacctctcgctcaaggccatcgatttcggactctctgtcttcttcaagcctggtcaagttttcaccgatgttgttggtagcccatattatgtggctccagaagttttgttgaaaagttatggaccagcagctgatgtatggacagccggtgtcattctttacattctactaagtggtgtgcctccattttgggcagaaacacaacaaggaatatttgatgctgtattgaaaggtgtcattgattttgattctgatccgtggcctgtcatatctgatagtgcaaaagatcttataagacgaatgctgaatcctcgtgctgccgagcgcttaacagcacacgaagttctatgccatccatggattcgtgatcatggagtagctcctgaccgtccactggatccagctgtcttatctcgcattaagcaattctctgcaatgaataagttgaagaaaatggctttacgagtaatagctgagagcctatcagaagaggaaattgcggggttgaaggaaatgttccagaccatggacactgataacagtggcgcaattacttatgatgagctaaaagaaggattgagaaaatatggctccacactgaaggacactgagattcgtgatcttatggacgcagctgatattgacaacagtggaacaattgactacatagaattcattgctgcaactttgcatctcaataagctggaacgtgaggaacatctcgtagcagccttttcatatttcgacaaagatggtagtggctatatcacagtggatgaactacaggaagcttgcaaagagcataacatgccagatgcttttcttgatgatgtcatcaacgaagcagaccaggacaatgatggccgcattgactatggagagtttgttgccatgatgaccaagggcaacatgggagtgggtcgaagaacaatgagaaacagcctgaatatcagcatgagggacgcacctggtgctttctgagacttaacacgatgtacagcttgtggcttagctacttcctctgtcttgctgccctacgaaaccgtctgcgatttttcaagatgttgtcaagtgtctgtgtggatgtgtttttctggggattctgattgaactcttgtgattgattccatgaaatgcataacaagatgtccatgtcacgcatgaagccgtaaaatgatgctgctgccccttgactctcagaaacacttatgttcagtgaactagcttgccatgtgtgtctccggatgacatccattcttggatgcacgctgtatctcaatgcaacgcgttgctccgtttgtatgaacctgtacttaatgcacgtgttttcccg

SEQ ID NO: 1943 - protein, 555 aa, Sorghum bicolor
MGNACGGSLRSKYLHSFKHAASQRHDSEYSATSTVDDSPRKQPTTPPATTDAHAQPPPASAAAAAMRRGGAGATPDLGSVLGHPTPNLRDLYALGRKLGQGQFGTTYLCTELATGVDYACKSISKRKLITKEDIDDVRREIQIMHHLSGHKNVVAIKGAYEDQVYVHIVMELCAGGELFDRMHEGGHYSERKAAELTRIIVGVVEACHSLGVMHRDPKPENFLLANKDDDLSLKAIDFGLSVFFKPGQVFTDVVGSPYYVAPEVLLKSYGPAADVWTAGVILYILLSGVPPFWAETQQGIFDAVLKGVIDFDSDPWPVISDSAKDLIRRMLNPRAAERLTAHEVLCHPWIRDHGVAPDRPLDPAVLSRIKQFSAMNKLKKMALRVIAESLSEEEIAGLKEMFQTMDTDNSGAITYDELKEGLRKYGSTLKDTEIRDLMDAADIDNSGTIDYIEFIAATLHLNKLEREEHLVAAFSYFDKDGSGYITVDELQEACKEHNMPDAFLDDVINEADQDNDGRIDYGEFVAMMTKGNMGVGRRTMRNSLNISMRDAPGAF

SEQ ID NO: 1944 - DNA, 2230 bp, Physcomitrella patens
  CDS (327)..(1976)
atcccgggcgaactgcgatctgagattccaacttggaagggcctcgcgtaagaccggatctcgtttcttacgcttttgcgcctcgcgatatttgtacattgtttcctctggttttattcgattccgcctctgaaaatgtgaacgggctgcaagcttggttttggagcaacgttggagcattgaagggttgcgctcgtccctgcccattcctcgcttctgctctggcctatgtcatgacgacgtgaaggagaggatttgagggttttgtaagtgatataatcctccccgaggagatttctgtgagttgattaacttggatcagcgacatggggaacactagttcgaggggatcgaggaagtccactcggcaggtgaatcagggagtcgggtctcaagacacccgagagaagaatgatagcgtcaatccaaagacgagacagggtggtagcgttggcgcaaacaactatggcggaaagccaagcagtggtgctcaggccggagaacgatccacctctgcgcccgctgctctgccgaggccgaagccagcatcgaggtcagtatccggtgttttgggtaagccgctgtcagatattcgtcaatcttacatcctgggacgggagcttggccgagggcagttcggagtgacttacttgtgtactgacaagatgacgaatgaggcgtacgcgtgcaagagcatcgccaaacggaaactgaccagtaaggaggatatcgaggatgttaagcgggaggttcagattatgcatcacctgtcggggacacccaatatcgtggtgttaaaggatgtgttcgaggacaagcattccgtgcatcttgtgatggagctctgtgcaggtggcgagctcttcgatcgcatcattgccaaggggcattacagtgagcgcgccgctgccgatatgtgcagagtcatcgtcaatgtggtgcacagatgccactcattaggggtcttccatcgggatctcaagccagagaattttctgttggccagcaaggctgaggatgcgcctctgaaggccacagacttcggtctgtcaactttctttaagccaggagatgtgttccaggatattgttggaagtgcgtattacgtggcccctgaagttttgaagagaagttatggtcctgaagctgatgtttggagtgcaggcgtgattgtgtacattctgctgtgtggtgtaccccccttctgggctgaaactgagcagggtatctttgacgctgtgctcaaagggcacatagacttcgagaacgatccatggccgaaaatctccaacggggctaaggatttggtgaggaaaatgctaaaccctaacgtgaagatacgtctgacggcacagcaggtgttgaaccatccatggatgaaggaagatggtgatgctccagacgtgccactcgacaatgcggtgttgaccagactgaaaaatttctcagccgccaacaagatgaaaaagctggcgctgaaggtgattgcagagagtctgtcggaggaagagatcgtggggttgagggagatgttcaaatccatagatacagacaacagcggcacggtgacgttcgaggagcttaaggaagggttgctgaagcagggctcaaaacttaatgaatcggacatcaggaaactaatggaagctgcagatgtcgatggaaacggcaagatcgacttcaacgagttcatatcggcaacaatgcacatgaacaagacggagaaagaggatcacctttgggcagcattcatgcatttcgacacggacaatagcgggtatatcaccatcgacgagcttcaggaagcaatggagaagaatggaatgggagatcctgagaccatccaagagatcatcagcgaggtggacacagacaacgacggaagaatagactacgacgagttcgtagccatgatgcgcaagggcaatcctggcgctgaaaacggaggaacggtgaacaagcccagacacaggtagtagctcctggttgccaatttgacgacgggtttggcaaggcaacagtagttgttgttagctttcagattcaggttcggtattgttcatgccctcctttgtctcgaacaatggactctaggcctttccaatggaaaagctattccaacagggtttgcataacgtgtagtagaatgaaagcattgcctggggggtgtacagtgcctgtgatcttgtggagttctcgtaggatggcttcggttggatctcgttaacgc

SEQ ID NO: 1945 - protein, 549 aa, Physcomitrella patens
MGNTSSRGSRKSTRQVNQGVGSQDTREKNDSVNPKTRQGGSVGANNYGGKPSSGAQAGERSTSAPAALPRPKPASRSVSGVLGKPLSDIRQSYILGRELGRGQFGVTYLCTDKMTNEAYACKSIAKRKLTSKEDIEDVKREVQIMHHLSGTPNIVVLKDVFEDKHSVHLVMELCAGGELFDRIIAKGHYSERAAADMCRVIVNVVHRCHSLGVFHRDLKPENFLLASKAEDAPLKATDFGLSTFFKPGDVFQDIVGSAYYVAPEVLKRSYGPEADVWSAGVIVYILLCGVPPFWAETEQGIFDAVLKGHIDFENDPWPKISNGAKDLVRKMLNPNVKIRLTAQQVLNHPWMKEDGDAPDVPLDNAVLTRLKNFSAANKMKKLALKVIAESLSEEEIVGLREMFKSIDTDNSGTVTFEELKEGLLKQGSKLNESDIRKLMEAADVDGNGKIDFNEFISATMHMNKTEKEDHLWAAFMHFDTDNSGYITIDELQEAMEKNGMGDPETIQEIISEVDTDNDGRIDYDEFVAMMRKGNPGAENGGTVNKPRHR

SEQ ID NO: 1946 - DNA, 2466 bp, Oryza sativa
  CDS (560)..(2269)
tttttcctcaaatcagaatcttatatacttttgtggaaaaaactgtcctttacaactgataatgcaagcatgaattagttaacctgccatgcttcacaatttgatgcatgcatgcctgcaatgtttatcatcaagaccctagcatctgaaatgtcagttgaacaacctggagataatgtcatctgctagctcaatctgcagcattgcagtgtcctcacaaagagatcctaggtttcaacctaattcgagtctctgtcatctgtttgcgtggtagtaagcatttagcctccaaggaagatccagaccaagaaattcatgtttcagagcattaatccttactccctagtaatccatctgtgccctcggatttcatacccacctaatccttgatcactgctctctcctccactctctgcgctcccgtacccagatttcctgcgatgcttccgtgatttcttctgaccactattatcacttaagctcccattcaggagaggatcgtcaataccgctgattaccctgctcaaggattgttgtcaggatatacatttttgtgggaatggggaattcttgccaaaatggaacctatgggaacaattaccagaacagcaaccggtttcagaatgaccgttttgcttctcggtacgttgatgggaatgatactgaggattgctactcgggctcgtcaagggccagcttagcgggtgctctgcggcaagggctgaacctaaagtcccctgtccttggatacaagactccaaatgtaagggagctctatactcttggccgggagcttggacagggacagttcgggaaaacatacctctgcactgagattagcacagggtgtcaatatgcatgcaagactatcttaaagagtaatctccgatgtgtgtcagatatcgaggacgtgcgccgtgaaatccagataatgcaccatctttcgggccagaagaatatagtgacaatcaaggacacatatgaggatgagcaggccgtgcacatcgtcatggagctctgcgcaggtggtgagctcttcagcaagattcagaagcgaggtcattacagtgaacggaaggctgcagagcttataaaaattatagttggcatcatagaaacatgccattcacatggagtgttgcaccgggatctcaagccagaaaatttcctcttactggacgcagacgatgaattctcggttaaagcaattgactttggtctatctgtgttcttcagaccaggtcaggttttcagagaggtagtgggaagtccatattatattgctccagaggtattggagaagcgttatggaccagaggctgatatatggactgctggagtgattctctatgtattgctgactggtgttcctccattttgggcagatacacaaagcgggatatatgaaaaagtactggatggacgtattgattttaaatcaaaccggtggcccaggatatctgacagtgcaaaggatcttataaaaaagatgctctgcccttatccattagagcgtttgaaagcccatgaagtgctaaagcatccatggatatgtgataatggagtggctactaatcgagctctggatccaagtgtacttcctcgtctcaagcaattttctgcaatgaataggttaaagaaattgtctctccagattattgctgagcgtctttcagaagaggagattgttgggttaagagaaatgttcaaggctatggacaccaaaaacagaagtgtggttacatttggtgagcttaagggactgaaaagatacagctcagtgttcaaggatactgaaattaacgacttaatggaagcagctgatgacaccacctccaccatcaactgggaagagtttattgctgcagcagtgtctcttaataaaatagaacgtgagaaacacttgatggcagcctttacatactttgacaaagatggaagtggttttatcacagttgacaagcttcaaaaggcttgcatggaacgtaacatggaagatactttccttgaagagatgattctggaggttgatcaaaacaatgatggtcaaatcgattatgctgaatttgtcacaatgatgcaaagcaacaactttggacttgggtggcaaacggtggaaagcagcctgaatgtagccctgagggaggcaccccaagtatctgaactcctgtcgcctggcacccccaagaattcagtttgttctcctgagcctttcatctgtttatcacaacacatagttgtggatttgagagaagagagccaagactagatggtttatcagtaatcaccctatagcagtggtggaagaagactctcttagtacctaatagcatataaatgtgtggtctaaagacatcgtatatgtatgaacctcataagttcgttcgttcgttcgtttggttggttggtttgctaccctgctatctaataataatatcaataatacccgaagaacccctcttggtt

SEQ ID NO: 1947 - protein, 569 aa, Oryza sativa
MGNSCQNGTYGNNYQNSNRFQNDRFASRYVDGNDTEDCYSGSSRASLAGALRQGLNLKSPVLGYKTPNVRELYTLGRELGQGQFGKTYLCTEISTGCQYACKTILKSNLRCVSDIEDVRREIQIMHHLSGQKNIVTIKDTYEDEQAVHIVMELCAGGELFSKIQKRGHYSERKAAELIKIIVGIIETCHSHGVLHRDLKPENFLLLDADDEFSVKAIDFGLSVFFRPGQVFREVVGSPYYIAPEVLEKRYGPEADIWTAGVILYVLLTGVPPFWADTQSGIYEKVLDGRIDFKSNRWPRISDSAKDLIKKMLCPYPLERLKAHEVLKHPWICDNGVATNRALDPSVLPRLKQFSAMNRLKKLSLQIIAERLSEEEIVGLREMFKAMDTKNRSVVTFGELKGLKRYSSVFKDTEINDLMEAADDTTSTINWEEFIAAAVSLNKIEREKHLMAAFTYFDKDGSGFITVDKLQKACMERNMEDTFLEEMILEVDQNNDGQIDYAEFVTMMQSNNFGLGWQTVESSLNVALREAPQVSELLSPGTPKNSVCSPEPFICLSQHIVVDLREESQD

SEQ ID NO: 1948 - DNA, 2142 bp, Oryza sativa (japonica cultivar-group)
  CDS (1)..(2142)
atgtctagttttgtaaatggtaagggagattttacccttagccgtcgctggcggcagcgtccaaccggaccacaccacaatacacttgtccgtggcacacggattcgctgtccaagaaaatatccacgccgagtcgctagtcgtcaccacccgccgcggcccgcgagcagaggaacagcgaatctccatcgacaaccgcgaccgcacccacccaccaactccccactgactccgcaaccccaccaccaactccccactgactccacgaccccaccataccctggaggccgggaccacccacgcgtttccaccccacccccacccccaagccagatccgaacgccacacgcgatcccccgccggcgtcgccgtcgcactccgtccgcacccgatccccactgtcacaactcgcaagtcgcaacgcgcgcctcgtcacgcgataaccgcagcggcgggtcgcggtcgcccctcggtcgtctccgcggagcgcgtctactactcgtgcgcttctgcttcctgttcaaacccaacgctccaccacatcgcctgcgttccccaccccgactgacccagcctccagtagccatgggcaaccgcacgtcgcgccaccaccgcgccgctcccgagcagccgccgccccagcccaagccgaagcctcagccgcagcagcagcagcagcagtggccgaggccgcagcagccgaccccgccgccggcggcggcgccggacgcggcgatggggagggtgctggggcggccgatggaggacgtccgcgcgacctacaccttcgggcgcgagctcgggcggggccagttcggggtcacctacctcgtcacccacaaggccacggggaagcgcttcgcctgcaagtccatcgccacgcggaagctcgcccaccgcgacgacatcgaggacgtgcgccgggaggtgcagatcatgcaccacctcacgggccaccgcaacatcgtcgagctccggggcgcctacgaggaccgccactcggtcaacctcatcatggagctctgcgagggcggggagctcttcgaccgcatcatcgccagggggcactactccgagcgcgccgccgccgcgctctgccgcgagatcgtcgccgtcgtgcacagctgccactccatgggggtcttccaccgggatctcaagccggagaactttttgttcctcagtaaaagcgaggactcgccgctcaaggccactgacttcggtctttccgttttcttcaagcctggggagcattttaaggaccttgttggaagtgcgtattatgttgcacctgaggtgctgaaacgaaactatggagcagaggctgacatatggagtgctggcgttattctttacatccttctttctggtgttccacctttttgggcagagagtgaagatggtatatttgatgccgtattacgtggtcacattgatttctcgtctgaaccttggccttcgatatccaatggtgcaaaagatttggttaagaagatgttgcggcaagacccaaaagagcgccttacttctgctgaaattttgaaccacccatggattagagaggatggagaagccccagacaagccacttgacattacagttatcagcaggatgaagcagttcagggcaatgaacaagcttaagaaagttgcattgaaggttgttgcagagaacttgtcagatgaagagattacaggcttaaaagaaatgttcagatccttggatactgataacagtgggacaataactcttgaggagctaagatctggtttaccaaaacttggcaccaaaatttctgaatcagaaattagacagctgatggaggcggctgatgttgatggaaatggaaccattgactatgctgagttcatatcagcgacaatgcacatgaacagattggagaaggaagaccacatacttaaagcatttgagtattttgataaggaccacagcggatacataacagtagatgagttggaagaagctctgaagaagtatgatatgggggacgataaaacgattaaggaaatcatcgctgaagtagatactgatcatgatggaagaattaactaccaggagtttgtcgccatgatgaggaacaacaaccctgagattgctcccaaccggcggcgcatgttctaa

SEQ ID NO: 1949 - protein, 713 aa, Oryza sativa (japonica cultivar-group)
MSSFVNGKGDFTLSRRWRQRPTGPHHNTLVRGTRIRCPRKYPRRVASRHHPPRPASRGTANLHRQPRPHPPTNSPLTPQPHHQLPTDSTTPPYPGGRDHPRVSTPPPPPSQIRTPHAIPRRRRRRTPSAPDPHCHNSQVATRASSRDNRSGGSRSPLGRLRGARLLLVRFCFLFKPNAPPHRLRSPPRLTQPPVAMGNRTSRHHRAAPEQPPPQPKPKPQPQQQQQQWPRPQQPTPPPAAAPDAAMGRVLGRPMEDVRATYTFGRELGRGQFGVTYLVTHKATGKRFACKSIATRKLAHRDDIEDVRREVQIMHHLTGHRNIVELRGAYEDRHSVNLIMELCEGGELFDRIIARGHYSERAAAALCREIVAVVHSCHSMGVFHRDLKPENFLFLSKSEDSPLKATDFGLSVFFKPGEHFKDLVGSAYYVAPEVLKRNYGAEADIWSAGVILYILLSGVPPFWAESEDGIFDAVLRGHIDFSSEPWPSISNGAKDLVKKMLRQDPKERLTSAEILNHPWIREDGEAPDKPLDITVISRMKQFRAMNKLKKVALKVVAENLSDEEITGLKEMFRSLDTDNSGTITLEELRSGLPKLGTKISESEIRQLMEAADVDGNGTIDYAEFISATMHMNRLEKEDHILKAFEYFDKDHSGYITVDELEEALKKYDMGDDKTIKEIIAEVDTDHDGRINYQEFVAMMRNNNPEIAPNRRRMF

SEQ ID NO: 1950 - DNA, 1794 bp, Oryza sativa (japonica cultivar-group)
  CDS (1)..(1794)
atgggtctctgccatggcaagtcggcggcggtgctggagccaacggtggaggaggaggaggagggggcgacgcgcgtagccgaggccgcggcggcgccggcgaagccagcgtcgcctgcgccttcggcggcggcggcggcggcgaagcccgggacgccgaagcagcacaagttcccgttctacctgccgagcccgctcccggcgtcgagctacaagggctcgccggcgaactcgagcgtggcgtcgacgcccgcgcgcggcgggttcaagcggccgttcccgccgccgtcgccggcgaagcacatccgcgcgctcctggcgcggcgccacggctcggtgaagccgaacgaggcgtccatcccggagtccggcgagcccggcgtggcgctggacaagggcttcggcttctccaggcacttcgccgccaagtacgagctcggccgcgaggttggccgcggccacttcggctacacctgcgccgccacctgcaagaagggcgagctcaagggcgacgacgtcgccgtcaaggtcatccccaaggccaagatgactactgctattgccattgaagatgtcaggagagaagtcagaatattgagttctttggcagggcacagcaacttagtgcagttttatgatgcttatgaggatgaagaaaatgtatatatagttatggagttatgcaaaggaggtgaactgctggacaggattttggctagaggtggaaaatattctgaggaagatgcaaaggttgttatgcgccaaatcctaagtgttgcttcattttgtcatcttcagggtgttgttcatcgggatctgaaaccagagaatttccttttctcgtcaaaggatgagaactctgccatgaaggtcatagacttcggtttgtctgactttgtaaagccagatgagaggcttaatgacattgtcggaagtgcatattatgttgctcctgaagtgctccatcgatcttatggcactgaggcagatatgtggagcattggagtaatagtgtatattttgctttgtggcagccgtcctttctgggcacgtactgagtcaggaatattccgagctgtgctgaaagcagaccctagttttgaggaagccccatggccaaccctctctgctgaagcaaaagactttgtaaggaggctgctcaataaagattaccgcaagaggatgactgctgcacaagccctctgtcatccatggattcgtggtactgaagaagtgaagcttcctttggacatgataatttataggcttatgagggcttacataagttcatcttctttacggagagctgcattgagggcccttgccaagacattgacaacagatcaaatctattacctaagagaacagtttgaattgataggcccaaacaagagcgatcttattactttgcaaaatttgaagacggccttgatgaagaactccacaaatgcaatgaaggattctagggtggttgactttgttaacacaatatccaatattcagtacagaaagttggattttgaggagttttctgctgctgccatcagtgtttaccagatggaaggtttggaaacctgggaacaacatgcccggcaagcgtacgagttctttgataaggagggtaaccgaccaattgtgatcgacgagctcgcatcggaacttggattgggtccttcggttcccctacatgttgttctccaagattggatcagacatcctgatggaaaactcagcttccttgggttcatgaaactattgcatggagtttcttcgcgtaccatcccaaaaacctga

SEQ ID NO: 1951 - protein, 597 aa, Oryza sativa (japonica cultivar-group)
MGLCHGKSAAVLEPTVEEEEEGATRVAEAAAAPAKPASPAPSAAAAAAKPGTPKQHKFPFYLPSPLPASSYKGSPANSSVASTPARGGFKRPFPPPSPAKHIRALLARRHGSVKPNEASIPESGEPGVALDKGFGFSRHFAAKYELGREVGRGHFGYTCAATCKKGELKGDDVAVKVIPKAKMTTAIAIEDVRREVRILSSLAGHSNLVQFYDAYEDEENVYIVMELCKGGELLDRILARGGKYSEEDAKVVMRQILSVASFCHLQGVVHRDLKPENFLFSSKDENSAMKVIDFGLSDFVKPDERLNDIVGSAYYVAPEVLHRSYGTEADMWSIGVIVYILLCGSRPFWARTESGIFRAVLKADPSFEEAPWPTLSAEAKDFVRRLLNKDYRKRMTAAQALCHPWIRGTEEVKLPLDMIIYRLMRAYISSSSLRRAALRALAKTLTTDQIYYLREQFELIGPNKSDLITLQNLKTALMKNSTNAMKDSRVVDFVNTISNIQYRKLDFEEFSAAAISVYQMEGLETWEQHARQAYEFFDKEGNRPIVIDELASELGLGPSVPLHVVLQDWIRHPDGKLSFLGFMKLLHGVSSRTIPKT

SEQ ID NO: 1952 - DNA, 1551 bp, Oryza sativa (japonica cultivar-group)
  CDS (1)..(1551)
atgggcaacgcatgcggcggttcccttagatccaagtacctgagcttcaagcagaccgcgtcgcagcgccacgacaccgacgacaacaacaacgccgccgcggccgactcgccgaagaagccctcccgccctccagcagccgccaagacggacctctacgccatgggcaggaagctcgggcaggggcagttcggcaccacctacctctgcaccgagctgtccactggggtggactacgcctgcaagtccatttccaagcgcaagctcatcaccaaggaggacatcgaagacgttcgccgcgagatccagatcatgcaccatctctcgggccacaagaacgtcgtcgccatcaagggcgcctacgaggaccagctatacgtgcacatcgtcatggagctctgcgccggcggcgagctcttcgatcgcatcatacagcgcggccactacagcgagcggaaggccgccgagctcacgcggatcatcgttggggtcgtcgaggcctgccactcgctcggggtcatgcaccgggacctcaagccagaaaacttcctgcttgccaacaaggacgatgacctctcgctcaaggccatagattttggtctctcagtcttcttcaagcccggtcaaacttttaccgatgttgtcggaagcccatattacgtagctccagaagtgttgttgaaacactatggaccagaagctgatgtatggactgcaggtgtcattctctacattttactaagtggtgtacccccattctgggcagagacacaacaaggaatatttgatgctgtactaaaaggtttcattgattttgattctgatccttggcctgtgatctctgagagcgcaaaggatcttataacaaaaatgctcaatcctcgcccaaaggaacgcttaacagcacatgaagttctatgccatccatggattcgtgatcacggagttgctccagatcggcctcttgatccagctgtcctatctcgcatcaagcagttctctgcaatgaataagttgaagaagatggctttgcgggtaatagctgagagtctctcagaggaggaaatcgctgggttgaaggaaatgtttcagactatggatgctgataacagtggtgcgatcacatatgatgagcttaaagaaggcttgagaaaatatggctcaacacttaaggacaccgagattcgtgatcttatggatgcagcagatatagacaacagcggaacaattgattatatcgaattcattgctgcaacattgcatctcaataaactggagcgagaggaacatcttgtggcagctttttcatattttgacaaagatggaagtggttacatcacagtggatgaactgcagcaagcttgcaaagagcataacatgcccgatgcttttcttgatgatgtcatcaatgaagctgatcaggacaatgatgggcgcattgactatggagaatttgttgccatgatgaccaagggcaatatgggagtcggacgaagaacaatgagaaacagcttgaatatcagcatgagggacgcacctggtgcactctag

SEQ ID NO: 1953 - protein, 516 aa, Oryza sativa (japonica cultivar-group)
MGNACGGSLRSKYLSFKQTASQRHDTDDNNNAAAADSPKKPSRPPAAAKTDLYAMGRKLGQGQFGTTYLCTELSTGVDYACKSISKRKLITKEDIEDVRREIQIMHHLSGHKNVVAIKGAYEDQLYVHIVMELCAGGELFDRIIQRGHYSERKAAELTRIIVGVVEACHSLGVMHRDLKPENFLLANKDDDLSLKAIDFGLSVFFKPGQTFTDVVGSPYYVAPEVLLKHYGPEADVWTAGVILYILLSGVPPFWAETQQGIFDAVLKGFIDFDSDPWPVISESAKDLITKMLNPRPKERLTAHEVLCHPWIRDHGVAPDRPLDPAVLSRIKQFSAMNKLKKMALRVIAESLSEEEIAGLKEMFQTMDADNSGAITYDELKEGLRKYGSTLKDTEIRDLMDAADIDNSGTIDYIEFIAATLHLNKLEREEHLVAAFSYFDKDGSGYITVDELQQACKEHNMPDAFLDDVINEADQDNDGRIDYGEFVAMMTKGNMGVGRRTMRNSLNISMRDAPGAL

SEQ ID NO: 1954 - DNA, 1539 bp, Oryza sativa (japonica cultivar-group)
  CDS (1)..(1539)
atgggactctgctcctcctccagcgcccgccgggacgccggcacacccggcggcggtaacggcgcggggaacaaggataacgcggggaggaaggggatcgtggcgtgcgggaagcggacggacttcgggtacgacaaggacttcgaggcgcggtacgcgctcgggaagctgctgggccacggccagttcggctacaccttcgccgccgtcgaccgccgctccagcgagcgcgtcgccgtcaagcgcatcgacaagaacaagatggttcttcctgttgccgttgaagacgtaaagcgagaagttaaaatactgaaggccttacaaggccatgaaaatgttgtacatttttacaatgcatttgaagatgataattatgtgtatattgttatggaattatgtgaaggcggggagttacttgaccggatactagccaagaaagatagccgttatagcgagaaagatgctgcagtagttgtgcggcaaatgctcaaggttgctgctgagtgccatttgcatggtttggttcatcgggacatgaagcctgagaacttcctcttcaaatcaaccaaagaggactcatccctcaaggctacagattttggtctttcagattttataagaccagggaaacactttcgtgacattgttggaagtgcctactatgtagcaccagaagtgcttaagcgtaagtcaggcccagaatctgacgtttggagtattggcgtaataacctatattctactgtgtggaagacgacctttctgggacaaaactgaagatggaatatttaaagaggtgttgaaaaacaagccagattttcgtcgcaagccctggccaaatatcactccttgtgctaaagactttgtacaaaagttgcttgttaaggatccccgtgcaagattaactgctgctcaggcattatcacatgaatgggtgagagaaggaggacaggcatctgatatacctctagatatatctgtattacataatatgcgtcagtttgtaaaatacagtcggtttaagcaatttgctttacgggcgttagcttctacactaaatgcagaagagttgtctgatcttcgtgaccagttcaatgccattgatgttgacaagaatggaacaattagtctggaagaactgaagcaggctcttgcaaaggatgttccatggagattaaagggtccacgtgttttagagattgttgaggcaattgacagtaacacagatggattagttgatttcgaagagtttgttgctgcaacattacatgtgcatcagctagtggaacatgatactgagaagtggaaatcattgtctcaagctgcatttgataaatttgatgttgacggagatggctatatcacatctgatgaactgagaatgcaaacaggactgaaaggttctattgatcccctcctggaggaggctgacattgacagagatggaaaaataagcctagatgaatttcgcaggctcctgaaaactgcaagcatgagttcacgcaatgtacaaactccgaggagtgttcacagatcgtag

SEQ ID NO: 1955 - protein, 512 aa, Oryza sativa (japonica cultivar-group)
MGLCSSSSARRDAGTPGGGNGAGNKDNAGRKGIVACGKRTDFGYDKDFEARYALGKLLGHGQFGYTFAAVDRRSSERVAVKRIDKNKMVLPVAVEDVKREVKILKALQGHENVVHFYNAFEDDNYVYIVMELCEGGELLDRILAKKDSRYSEKDAAVVVRQMLKVAAECHLHGLVHRDMKPENFLFKSTKEDSSLKATDFGLSDFIRPGKHFRDIVGSAYYVAPEVLKRKSGPESDVWSIGVITYILLCGRRPFWDKTEDGIFKEVLKNKPDFRRKPWPNITPCAKDFVQKLLVKDPRARLTAAQALSHEWVREGGQASDIPLDISVLHNMRQFVKYSRFKQFALRALASTLNAEELSDLRDQFNAIDVDKNGTISLEELKQALAKDVPWRLKGPRVLEIVEAIDSNTDGLVDFEEFVAATLHVHQLVEHDTEKWKSLSQAAFDKFDVDGDGYITSDELRMQTGLKGSIDPLLEEADIDRDGKISLDEFRRLLKTASMSSRNVQTPRSVHRS

SEQ ID NO: 1956 - DNA, 1653 bp, Oryza sativa (japonica cultivar-group)
  CDS (1)..(1653)
atgggcaactgctgcgtgacgccggagggcagcggccgcgggaggaagaaacagcagcaggagcagaagcagaagcagaaggagccgaagcagcagcagcagcagcagaagaaggggaagaagccgaacccgttctcgatcgagtacaaccggtcgtcggcgccgtcggggcacaggctggtggtgctgcgcgagccgacggggcgggacatcgccgcgcggtacgagctgggcggggagctcgggcgcggcgagttcggggtcacctacctctgcacggagcgggagacgggggacgcctacgcgtgcaagtccatctccaagaagaagctccgcaccgccgtggacatcgaggacgtgcgccgggaggtggacatcatgcgccacctccccaagcaccccaacatcgtcacgctccgggacacctacgaggacgacaatgccgtccacctcgtcatggagctctgcgagggcggggagctcttcgaccggatcgtcgcccggggccactacaccgagcgcgccgccgcgctggtcacccgcaccatcgtcgaggtcgtgcagatgtgccataagcatggagtgatgcaccgggacctcaaaccagagaatttcttgtttgcaaacaagaaggaaactgcagctctgaaggcaattgattttggcctgtctgtttttttcaccccaggtgaacggttcactgagattgtcggaagcccttattacatggctcctgaggtgctaaagagaaattatggccctgaggttgatgtttggagtgcaggagtgatcctttacattcttctttgtggagtccctccattttgggcagaaactgaacagggtgttgctcaggcaattatccgttctgtcattgacttcaagagagacccatggccaagggtctcagataatgcaaaggatcttgtcaagggaatgctcaatccagaccctaggcggcggctaaatgctcaacaagtgcttgatcatccttggttacagaacattaagaaggctccaaatgtaaatttaggcgaaactgttaaggccagacttcaacaattctctgtgatgaacaagttcaagaagcatgcacttagggtcatagctgagcatctttcagtagaagaggttgctggtataaaggacatgtttgagaagatggatctcaacaaagataatatgattaattttgatgagctgaagcttggcctgcataaacttgggcaccaaatggctgatgcagatgtccaaatactaatggatgctgcggatgtcgatggaaatggatctttagactacggggagtttgttgctctatctgttcacctgagaaagattggcaacgatgagcatctgcacaaggcatttgcatactttgatcggaaccagagtggatatattgaaatcgatgagctccgtgaatcattggctgatgacctgggagcaaatcatgaagaggttatcaatgccatcatccgtgatgtagacactgataaggatggcaagataagctatgatgagtttgcggcaatgatgaaggccggaacagattggaggaaagcctcaagacaatattcaagagaacggttcactagcctcagcctaaaacttcagaaagatggatcattgcagttaacaactacccaatag

SEQ ID NO: 1957 - protein, 550 aa, Oryza sativa (japonica cultivar-group)
MGNCCVTPEGSGRGRKKQQQEQKQKQKEPKQQQQQQKKGKKPNPFSIEYNRSSAPSGHRLVVLREPTGRDIAARYELGGELGRGEFGVTYLCTERETGDAYACKSISKKKLRTAVDIEDVRREVDIMRHLPKHPNIVTLRDTYEDDNAVHLVMELCEGGELFDRIVARGHYTERAAALVTRTIVEVVQMCHKHGVMHRDLKPENFLFANKKETAALKAIDFGLSVFFTPGERFTEIVGSPYYMAPEVLKRNYGPEVDVWSAGVILYILLCGVPPFWAETEQGVAQAIIRSVIDFKRDPWPRVSDNAKDLVKGMLNPDPRRRLNAQQVLDHPWLQNIKKAPNVNLGETVKARLQQFSVMNKFKKHALRVIAEHLSVEEVAGIKDMFEKMDLNKDNMINFDELKLGLHKLGHQMADADVQILMDAADVDGNGSLDYGEFVALSVHLRKIGNDEHLHKAFAYFDRNQSGYIEIDELRESLADDLGANHEEVINAIIRDVDTDKDGKISYDEFAAMMKAGTDWRKASRQYSRERFTSLSLKLQKDGSLQLTTTQ

SEQ ID NO: 1958 - DNA, 1998 bp, Oryza sativa (japonica cultivar-group)
  CDS (1)..(1998)
atggggcagtgttacgcgaggaacgtgccggtggatggggaggggggaggaggggtggtgacgacgacgacgacgacgaccatctcggtgagcgcgtcggcggcgggggaggaggtggaggtggggagagggggaggagggggaggagggaggaggagcgggaggccgtcgccggcggggacgccgaggaggaggggggcgacgccggcgaggtcgtcggtggcggggagcccgtgggcggggagcccgctccccgagggcatcgcaccgtcgcctgcgccgtcggcgaccacgccgaggcggttcttcaggcggccgttcccgccgccgtcgccggcgaagcacatcaaggcgtccctcgcgcgccgcctcgggcagcggtcgccggccacggcccaggcgcagcaggccgcgaagccgcccgccgaggtcccgatcccggagcacgggggcgggggcggcgccgccgccggggaggtggagcgggagctcgacaagagcttcggctatgaccgccacttcgccgccaagtacgagctggggaaggaggtgggtcgcggccacttcggccacacctgcctcgcgcgtgcccgcaagggcgacatgagaggccaactcctcgctgtcaaggtcatctccaaagccaagatgacaacagcaatatcaattgaggatgtgcgtagagaggtgaaaattctgaaggctttatctgggcattcgaatcttgtcaaattttatgatgcatgtgaggatgcccttaatgtctacataatcatggagttatgtgaaggtggggagttattggacagaattttgtccagaggtgggagatacactgaggaagatgctaaagttatcgttgaacaaatattaaatgttgtttctttctgccatcttcaaggcgttgttcaccgtgatttgaagccagagaatttcctattcagcactagagatgaccattcacctatgaagatcatcgactttggactttctgattttatacggccagatgaaagattaaatgatattgttggtagtgcatactatgttgctccagaagtcctacataggtcatatagcacggaagcagacatgtggagtattggtgttatcacttatatcttgctgtgcggtagcagaccattctgggcacgaactgaatcaggcattttccgctcagtgctgagagctgatcctaattttgatgatgcaccgtggtcttcaatatctcctgaagccaaagattttgtcaaaagacttcttaacaaggattacagaaaaagaatgactgctgcccaggcactctctcacccctggttgcgagatgagtgccgaccgatccctttggatatgctagtttttaagttgattaaggcatatcttcgctctacacctttcaagcgagcggcattgaaggctctgtccagagcaataacagaagatgagcttatctacatcagagcacagtacaacttgctagaaccaagtagtacagatggtcgactatgcattgaaaacttcaggatggctcttttacaaaactctacagatgctatgaaggaatccagagcccttgatatcttgaatgcgttggagccacttgcctacagaagaatggactttgaggagttccgggcggcgacaatcagtccttaccaacttgaggctttatcacggtgggaagaaatagctggcactgcgtttgagtactttgagcaggaaggcaaccgtcccatcacaattgaggagctggcacaggtgcctactgtttctccaaagaagcagccgcagatgggggcagaaggccgcaaatgtcgtagtgtgttttacttttgccggacaatggtacggcgccactttattgttctcaggacaattaacaaatgctttcagtatccgaggctttccctcattcccggtaaccttgagatgcttaacacaactgggctcgcggcagatcacaagaaaaataaggagcccatgctgactatctggtaa

SEQ ID NO: 1959 - protein, 665 aa, Oryza sativa (japonica cultivar-group)
MGQCYARNVPVDGEGGGGVVTTTTTTTISVSASAAGEEVEVGRGGGGGGGRRSGRPSPAGTPRRRGATPARSSVAGSPWAGSPLPEGIAPSPAPSATTPRRFFRRPFPPPSPAKHIKASLARRLGQRSPATAQAQQAAKPPAEVPIPEHGGGGGAAAGEVERELDKSFGYDRHFAAKYELGKEVGRGHFGHTCLARARKGDMRGQLLAVKVISKAKMTTAISIEDVRREVKILKALSGHSNLVKFYDACEDALNVYIIMELCEGGELLDRILSRGGRYTEEDAKVIVEQILNVVSFCHLQGVVHRDLKPENFLFSTRDDHSPMKIIDFGLSDFIRPDERLNDIVGSAYYVAPEVLHRSYSTEADMWSIGVITYILLCGSRPFWARTESGIFRSVLRADPNFDDAPWSSISPEAKDFVKRLLNKDYRKRMTAAQALSHPWLRDECRPIPLDMLVFKLIKAYLRSTPFKRAALKALSRAITEDELIYIRAQYNLLEPSSTDGRLCIENFRMALLQNSTDAMKESRALDILNALEPLAYRRMDFEEFRAATISPYQLEALSRWEEIAGTAFEYFEQEGNRPITIEELAQVPTVSPKKQPQMGAEGRKCRSVFYFCRTMVRRHFIVLRTINKCFQYPRLSLIPGNLEMLNTTGLAADHKKNKEPMLTIW

SEQ ID NO: 1960 - DNA, 1467 bp, Arabidopsis thaliana
  CDS (1)..(1467)
atgggtgtctgtttctccgccattagagtcactggtgctagcagcagtagacgaagcagtcagaccaaatccaaggctgctcctactcccatcgataccaaggcctctaccaaacgccgaaccggctccatcccctgcggcaagcgtaccgattttggctactccaaagacttccacgatcactacaccatcggcaagttgctcggccatggtcaattcggctacacctacgtcgccatccacagacccaatggagatcgcgtcgccgtcaaaagactcgataagtctaagatggttcttcctattgctgttgaggatgtcaagcgtgaggttcagattcttattgctctctctggccacgagaatgttgttcagtttcacaatgcctttgaggatgacgattacgtctatattgttatggagttgtgcgaaggaggcgaattgctggataggatattatccaagaaaggtaatcggtactccgagaaagatgcagccgttgtcgttaggcagatgctcaaagttgcaggagaatgtcatctacacggtcttgtacatagagatatgaaaccagagaactttttgttcaaatcagctcaactagattcgcctctaaaggctacggattttggtttatcggattttatcaaaccagggaaaaggttccatgacattgttggtagcgcctattatgtggctcctgaggtattaaagcgcagatcagggcctgaatcagatgtatggagcattggtgtgattacgtatatattactttgtgggaggcggcctttttgggatagaactgaagatggtatatttaaagaggttttaagaaataaacctgacttcagccgtaaaccttgggcaactataagtgacagcgccaaagattttgtgaaaaagttacttgtaaaagacccacgagcacggctaactgctgcacaagcactatcacatgcgtgggttagagaaggcgggaatgctactgatatccctgtcgacatttcagttctgaacaacttaagacaatttgtgagatacagccgtctaaagcaatttgctttaagggcgcttgctagcacacttgacgaggcagagatctctgacctcagagatcaatttgatgcgattgatgtggataaaaatggcgtcattagtcttgaagagatgagacaggcacttgccaaagatcttccttggaaactgaaagactcacgagttgctgagatccttgaagcgattgatagcaacactgatgggttagtggacttcacagagtttgtagcagcagctctacatgttcatcaactagaagaacatgattcagagaaatggcagctaaggtcaagagcagcttttgagaaattcgacctagacaaagacgggtacataacgcctgaggaacttcgaatggcgcagcaaaacaaagagagaaagtggagtgagaatcccattgatgaaatatga

SEQ ID NO: 1961 - protein, 488 aa, Arabidopsis thaliana
MGVCFSAIRVTGASSSRRSSQTKSKAAPTPIDTKASTKRRTGSIPCGKRTDFGYSKDFHDHYTIGKLLGHGQFGYTYVAIHRPNGDRVAVKRLDKSKMVLPIAVEDVKREVQILIALSGHENVVQFHNAFEDDDYVYIVMELCEGGELLDRILSKKGNRYSEKDAAVVVRQMLKVAGECHLHGLVHRDMKPENFLFKSAQLDSPLKATDFGLSDFIKPGKRFHDIVGSAYYVAPEVLKRRSGPESDVWSIGVITYILLCGRRPFWDRTEDGIFKEVLRNKPDFSRKPWATISDSAKDFVKKLLVKDPRARLTAAQALSHAWVREGGNATDIPVDISVLNNLRQFVRYSRLKQFALRALASTLDEAEISDLRDQFDAIDVDKNGVISLEEMRQALAKDLPWKLKDSRVAEILEAIDSNTDGLVDFTEFVAAALHVHQLEEHDSEKWQLRSRAAFEKFDLDKDGYITPEELRMAQQNKERKWSENPIDEI

SEQ ID NO: 1962 - DNA, 1488 bp, Arabidopsis thaliana
  CDS (1)..(1488)
atggagacgaagccaaaccctagacgtccttcaaacacagttctaccatatcaaacaccacgattaagagatcattaccttctgggaaaaaagctaggccaaggccaatttggaacaacctatctctgcacagagaaatcaacctccgctaattacgcctgcaaatcgatcccgaagcgaaagctcgtgtgtcgcgaggattacgaagatgtatggcgtgagattcagatcatgcatcatctctctgagcatccaaatgttgttaggatcaaagggacttatgaagattcggtgtttgttcatattgttatggaggtttgtgaaggtggtgagctttttgatcggattgtttctaaaggtcattttagtgagcgtgaagctgtcaagcttattaagacgattcttggtgttgttgaggcttgtcattctcttggtgttatgcatagagatctcaaacctgagaatttcttgtttgatagtcctaaagatgatgctaagcttaaggctaccgattttggtttgtctgtcttctataagccaggacaatatttatatgacgtagttggaagtccgtactatgttgcaccagaggtgctaaagaaatgttatggacctgaaatagatgtgtggagtgctggtgttatcctctacattttactcagcggtgttcctcccttctgggcagagactgagtctggaatctttagacagatattgcaagggaagttagatttcaaatctgacccgtggcctactatctcagaagctgctaaagatttgatctataaaatgctcgaaaggagccccaagaaacgcatttctgctcatgaagccttgtgtcacccatggattgtcgatgaacaagcagcaccagacaagcctcttgatccagcagtcttatctcgtctaaagcagttttctcaaatgaataagattaagaaaatggcattacgggtaattgctgagagactttcagaggaagaaattggaggtctgaaggaattgttcaagatgatagacacagacaacagcggaacgattacttttgaagagctcaaagcgggtttgaagagagtcggatctgaactgatggaatcagaaatcaagtctctcatggatgcggctgatatcgacaacagtggtacaatagactacggagaattcctagcagcaaccttacacatgaacaagatggagagagaggagaatctggtggctgcattttcgtactttgacaaagacggaagcggttatatcaccatcgatgagcttcagtcagcttgcacagagtttggtctatgtgatacacctctggacgacatgatcaaggagattgatcttgacaatgacgggaagatcgatttctcggagtttacagcaatgatgaggaaaggagatggagttgggagaagcagaaccatgatgaagaacttgaacttcaacattgctgatgcttttggagttgatggtgaaaaatctgatgactga

SEQ ID NO: 1963 - protein, 495 aa, Arabidopsis thaliana
METKPNPRRPSNTVLPYQTPRLRDHYLLGKKLGQGQFGTTYLCTEKSTSANYACKSIPKRKLVCREDYEDVWREIQIMHHLSEHPNVVRIKGTYEDSVFVHIVMEVCEGGELFDRIVSKGHFSEREAVKLIKTILGVVEACHSLGVMHRDLKPENFLFDSPKDDAKLKATDFGLSVFYKPGQYLYDVVGSPYYVAPEVLKKCYGPEIDVWSAGVILYILLSGVPPFWAETESGIFRQILQGKLDFKSDPWPTISEAAKDLIYKMLERSPKKRISAHEALCHPWIVDEQAAPDKPLDPAVLSRLKQFSQMNKIKKMALRVIAERLSEEEIGGLKELFKMIDTDNSGTITFEELKAGLKRVGSELMESEIKSLMDAADIDNSGTIDYGEFLAATLHMNKMEREENLVAAFSYFDKDGSGYITIDELQSACTEFGLCDTPLDDMIKEIDLDNDGKIDFSEFTAMMRKGDGVGRSRTMMKNLNFNIADAFGVDGEKSDD

SEQ ID NO: 1964 - DNA, 1821 bp, Arabidopsis thaliana
  CDS (1)..(1821)
atgggaggctgtacttccaaaccctccacttcctccggcagacctaaccctttcgctcccggtaatgactatcctcaaattgacgattttgcccctgaccatcccggtaaatcaccaattcctactccttccgccgcaaaggcctctcctttcttccccttttacacgccgagccctgctcgccaccgccgcaataagagccgcgacgtcggcggaggaggagagagcaagagtttgactagcacgcctctccgtcaattacgccgtgcgtttcaccctccgtctccggcgaaacacatacgggcggcgctacggcggaggaaagggaaaaaggaagctgctttatctggggtgacgcagctaacgacggaggtaccgcagcgtgaggaggaagaggaagtagggcttgacaaaagatttggtttttctaaagagtttcacagtagagtagagttaggggaagaaattggacgaggacattttgggtacacttgctctgctaagttcaagaaaggagagctcaaaggtcaagtggttgctgtcaaaatcatcccaaaatcgaagatgacaactgcaattgctatagaagatgtgagaagggaagtgaaaattctacaggctttatctggacataagaatctggtacaattctatgatgcatttgaggacaatgcaaacgtctacattgcaatggagctatgtgaaggtggtgagcttcttgacagaatactagcaaggggagggaaatactcagagaatgacgcaaaaccagtgattatacaaattctgaatgtggtagctttctgtcatttccaaggagttgttcatcgagaccttaaaccagagaacttcttgtacacttccaaggaggagaattctcagcttaaagcgatagactttggcttatcagactttgtcagaccagatgagagactaaacgatatagtgggaagtgcatactatgtagctcccgaagttctacacagatcatatacaacagaagcggatgtgtggagcatcggagtcatagcatacattctactatgtggtagccgtccgttttgggcaagaactgaatccggaatttttagagctgttcttaaagctgacccgagtttcgatgaacctccttggcccttcttgtcttctgacgctaaagactttgttaagcggttattgtttaaggatccccggcgaagaatgtcagcctcccaagccttgatgcatccttggatccgagcttataatacggacatgaatatccctttcgatatcttgatctttaggcagatgaaggcgtacttgcgatcttcttcattacgcaaagctgctttgagggcgctatcgaagacgttaatcaaggatgaaattctttacctgaaaactcaattttctcttctcgcaccaaacaaagatggcctaatcacaatggataccattagaatggcacttgcaagcaatgcaacagaagcaatgaaagaatctcggatcccagagtttcttgctttgctaaatggacttcaatacagaggaatggattttgaagagttttgtgcagctgctataaacgttcatcagcacgagtcgcttgattgttgggaacagagcattcgacatgcttatgagcttttcgacaagaatggaaaccgagctattgtcatcgaagaacttgcctctgaacttggtgttggaccatctataccggtacattcagttctacatgattggatcagacacactgatggaaagcttagcttcttcgggtttgttaaactgttacatggagtctctgttcgagcctcggggaaaactacccggtga

SEQ ID NO: 1965 - protein, 606 aa, Arabidopsis thaliana
MGGCTSKPSTSSGRPNPFAPGNDYPQIDDFAPDHPGKSPIPTPSAAKASPFFPFYTPSPARHRRNKSRDVGGGGESKSLTSTPLRQLRRAFHPPSPAKHIRAALRRRKGKKEAALSGVTQLTTEVPQREEEEEVGLDKRFGFSKEFHSRVELGEEIGRGHFGYTCSAKFKKGELKGQVVAVKIIPKSKMTTAIAIEDVRREVKILQALSGHKNLVQFYDAFEDNANVYIAMELCEGGELLDRILARGGKYSENDAKPVIIQILNVVAFCHFQGVVHRDLKPENFLYTSKEENSQLKAIDFGLSDFVRPDERLNDIVGSAYYVAPEVLHRSYTTEADVWSIGVIAYILLCGSRPFWARTESGIFRAVLKADPSFDEPPWPFLSSDAKDFVKRLLFKDPRRRMSASQALMHPWIRAYNTDMNIPFDILIFRQMKAYLRSSSLRKAALRALSKTLIKDEILYLKTQFSLLAPNKDGLITMDTIRMALASNATEAMKESRIPEFLALLNGLQYRGMDFEEFCAAAINVHQHESLDCWEQSIRHAYELFDKNGNRAIVIEELASELGVGPSIPVHSVLHDWIRHTDGKLSFFGFVKLLHGVSVRASGKTTR

SEQ ID NO: 1966 - DNA, 1566 bp, Arabidopsis thaliana
  CDS (1)..(1566)
atggggaattgcttagccaagaaatacggattggtgatgaaaccacaacaaaatggtgaaagatcagttgagatcgagaacagaagaaggagcacccaccaagatccgtctaaaatatccaccggaacgaatcaaccaccaccttggcggaatccagcgaaacacagtggtgctgcagctatactcgagaagccgtacgaagacgtgaaactgttctacactttgagcaaagaattgggtcgaggccagtttggagtaacgtatctgtgcacagagaagtcgacggggaagagattcgcttgcaagtcgatttccaagaagaaacttgtgacgaaaggtgataaagaagatatgaggagagagattcagattatgcagcatttgagtggacaacctaacattgttgagtttaaaggagcttatgaagatgagaaagctgtgaatttggttatggagctttgtgctggtggtgaattgttcgataggattttagcaaagggacattacagtgagagagcagctgcttctgtttgtagacagattgttaatgttgtcaatatttgtcatttcatgggtgtgatgcatagagacttaaagcctgagaatttcttgttatctagcaaagatgagaaggctcttatcaaagccactgatttcggattatcagtctttatcgaagaagggagagtgtataaagatatagttgggagtgcatattatgttgctcctgaagttttgaagcggagatatggtaaagaaatcgatatatggagtgctggaattatactatacattctacttagtggtgtgcctccgttttgggctgaaacggagaaagggatatttgatgctatattggaaggtgaaatcgactttgaatcccaaccttggccctcaatttccaatagtgctaaagatttggtacgtagaatgttgacacaagatccgaaaagacggatttctgctgctgaagttcttaagcatccatggctaagagaaggtggagaagcatcggataagcctattgatagtgctgttctctcaaggatgaagcaatttagagcgatgaataaactaaagaaacttgctttaaaggtcattgcggagaacattgacacggaagaaatacaaggcttaaaggcgatgtttgctaatatagatacagacaatagtggtactatcacatacgaagaattgaaagaaggattagccaaactgggatcaagactcactgaagctgaagtgaaacagctcatggatgctgctgacgttgatggaaatgggtcaatagattacattgagtttattactgcaacaatgcatagacataggcttgaaagtaatgagaacgtttacaaagccttccaacattttgacaaagatgggagtggatacattacgacagacgagctagaggctgctttgaaggaatatggaatgggagatgatgctactatcaaagagattttgtctgatgtcgacgctgataatgacggtagaatcaactatgacgagttttgtgctatgatgagaagtgggaatccacaacaaccaagattgttctaa

SEQ ID NO: 1967 - protein, 521 aa, Arabidopsis thaliana
MGNCLAKKYGLVMKPQQNGERSVEIENRRRSTHQDPSKISTGTNQPPPWRNPAKHSGAAAILEKPYEDVKLFYTLSKELGRGQFGVTYLCTEKSTGKRFACKSISKKKLVTKGDKEDMRREIQIMQHLSGQPNIVEFKGAYEDEKAVNLVMELCAGGELFDRILAKGHYSERAAASVCRQIVNVVNICHFMGVMHRDLKPENFLLSSKDEKALIKATDFGLSVFIEEGRVYKDIVGSAYYVAPEVLKRRYGKEIDIWSAGIILYILLSGVPPFWAETEKGIFDAILEGEIDFESQPWPSISNSAKDLVRRMLTQDPKRRISAAEVLKHPWLREGGEASDKPIDSAVLSRMKQFRAMNKLKKLALKVIAENIDTEEIQGLKAMFANIDTDNSGTITYEELKEGLAKLGSRLTEAEVKQLMDAADVDGNGSIDYIEFITATMHRHRLESNENVYKAFQHFDKDGSGYITTDELEAALKEYGMGDDATIKEILSDVDADNDGRINYDEFCAMMRSGNPQQPRLF

SEQ ID NO: 1968 - DNA, 1656 bp, Arabidopsis thaliana
  CDS (1)..(1656)
atgggatgtctctgcatcaatctgaagaagaaggtcaagaaaccaacaccagacatcagtggagaacaaaacacagaggtaaagagcagagaaataacaccaaaagaacaacctcgtcaaagacaaccagctccaagagccaagttccagattgtggtgcaacctcataaactcccacttccacttcctcagcctcaagaaaaacaaaagctgatcaatcatcaaaaacagagcaccctgcaacaaccagaaccgatcttagggagaccatttgaagatattaaggagaagtatagtcttggtcgcgaattaggtcgtggccaattcggtataacgtatatatgtacagagatttcatcaggcaagaactttgcttgtaaatccatcttgaagagaaagctcatcagaactaaggacagagaggatgtaagaagggagatacagataatgcactacttatcaggacaaccaaacattgtggaaatcaaaggagcttatgaagacagacaaagtgttcatcttgtaatggagctttgcgaaggcggtgagctttttgataagatcactaaacgaggacattactcagagaaagcagccgcggagatcattagaagtgtggttaaagttgtacagatttgtcatttcatgggtgtgattcatcgcgaccttaaacccgaaaacttcttgttgtccagtaaagatgaagcttcctcaatgctcaaggctactgattttggtgtttcagttttcatcgaagaagggaaagtgtatgaagacattgttggaagtgcatattacgttgcaccggaggttctgaagagaaactacggcaaagcaatcgatatttggagcgccggagttattctctacatccttctctgcggaaatcctccattttgggcagagactgataagggaatatttgaggagattttgagaggagagattgattttgagtcggaaccatggccgtcgatttcggagagtgctaaggatttggtgagaaacatgttaaagtatgatcccaagaaacggtttactgcggctcaagtcctagaacatccttggatacgagaaggtggagaagcttctgataaaccaatcgatagtgctgttttgtcgcggatgaagcaactccgagctatgaataagcttaagaagcttgcatttaaatttatcgcgcaaaatctcaaagaagaggaactaaagggtctcaagacaatgttcgcaaacatggataccgataagagcggtacaatcacttacgacgaattgaaatccggactggaaaaactcggttcgaggttaaccgaaaccgaagttaagcagctcttggaagatgctgatgtcgatgggaacggtactattgattacattgagttcatttcagctactatgaaccggttcagagtagaaagagaggataatttgttcaaagcttttcaacatttcgataaagataacagcgggtttatttcgagacaagaattagaaacagctatgaaagagtataatatgggagatgatattatgatcaaagagattatctcagaagttgatgctgataatgatggaagtataaattatcaagagttttgcaatatgatgaagagctgctcacaatcacaccaatcaaaattggttcaaccgaattaa

SEQ ID NO: 1969 - protein, 551 aa, Arabidopsis thaliana
MGCLCINLKKKVKKPTPDISGEQNTEVKSREITPKEQPRQRQPAPRAKFQIVVQPHKLPLPLPQPQEKQKLINHQKQSTLQQPEPILGRPFEDIKEKYSLGRELGRGQFGITYICTEISSGKNFACKSILKRKLIRTKDREDVRREIQIMHYLSGQPNIVEIKGAYEDRQSVHLVMELCEGGELFDKITKRGHYSEKAAAEIIRSVVKVVQICHFMGVIHRDLKPENFLLSSKDEASSMLKATDFGVSVFIEEGKVYEDIVGSAYYVAPEVLKRNYGKAIDIWSAGVILYILLCGNPPFWAETDKGIFEEILRGEIDFESEPWPSISESAKDLVRNMLKYDPKKRFTAAQVLEHPWIREGGEASDKPIDSAVLSRMKQLRAMNKLKKLAFKFIAQNLKEEELKGLKTMFANMDTDKSGTITYDELKSGLEKLGSRLTETEVKQLLEDADVDGNGTIDYIEFISATMNRFRVEREDNLFKAFQHFDKDNSGFISRQELETAMKEYNMGDDIMIKEIISEVDADNDGSINYQEFCNMMKSCSQSHQSKLVQPN

SEQ ID NO: 1970 - DNA, 1626 bp, Arabidopsis thaliana
  CDS (1)..(1626)
atgggtaattgtatcgcctgcgtcaagtttgacccagacaactcaaaaccaaaccagaagaagaaacctccacggggacggcaacgaaacccatacgacgatcccgatggtttaagaactcacgcaccgttacgtgtgattcctatgagccatcaatctcagatcagcgacaagtacatcttaggacgagaactcggtcgcggcgaattcggaatcacgtatctttgtacagatagagagactcgtgaagctttagcttgcaaatcaatctccaagagaaagctccgaaccgccgtcgatgtggaagacgtccgtcgtgaagtcacgatcatgtcaactttaccggaacacccaaacgttgtgaaacttaaagcgacttatgaggataacgagaacgtgcatcttgtgatggagctttgtgaaggaggtgagctttttgatcggattgttgccagaggacattatacagagcgtgcggcggctaccgtcgcgagaacgatcgcggaggttgtgaggatgtgtcatgtcaatggtgttatgcatagagatttgaagcctgagaatttcttgtttgctaacaagaaggagaattctgcacttaaggctattgattttggtttatctgttctctttaaacctggagagaggtttacagagattgttggaagtccttattatatggctccagaagtgttgaagagaaattatggaccagaggttgatgtgtggagtgctggagttatcctctacatcttgctttgtggtgttcctccgttttgggcagagactgaacaaggtgtggctcttgccatcttgaggggagttcttgattttaagagagatccttggtcgcagatatcagagagcgcaaagagccttgtgaagcagatgttggaacctgattcaactaagcgtttgactgctcagcaagttcttgatcacccttggatacagaatgcaaagaaagctccaaatgttcctttaggggatattgttaggtcaaggttgaagcaattctccatgatgaatagattgaaaaagaaagctctgcgtgttatcgccgaacacttgtctattcaagaagttgaagtgatcagaaacatgtttacgctgatggatgatgacaacgacggtaaaatatcatatctagaactcagagctggactccggaaagtcggttcacaactgggtgaaccagagatcaaattgttaatggaagtggcggatgttaatggaaatggatgcttggactatggagagtttgtagcagtgataattcacttgcagaagatggagaatgatgagcatttcagacaagcttttatgttctttgacaaagatggaagtggatacatcgaatcagaagaactacgtgaagctttaaccgacgagttaggtgaaccagacaacagtgttataatcgatataatgcgtgaagtcgacactgacaaggacggaaaaataaactatgatgagtttgtggtgatgatgaaagctggaactgattggagaaaggcatcaagacaatactcaagagagaggtttaaaagcttaagcttaaacttgatgaaagacgggtcaatgcatctacacgacgcactcactggacaatctattgcagtttga

SEQ ID NO: 1971 - protein, 541 aa, Arabidopsis thaliana
MGNCIACVKFDPDNSKPNQKKKPPRGRQRNPYDDPDGLRTHAPLRVIPMSHQSQISDKYILGRELGRGEFGITYLCTDRETREALACKSISKRKLRTAVDVEDVRREVTIMSTLPEHPNVVKLKATYEDNENVHLVMELCEGGELFDRIVARGHYTERAAATVARTIAEVVRMCHVNGVMHRDLKPENFLFANKKENSALKAIDFGLSVLFKPGERFTEIVGSPYYMAPEVLKRNYGPEVDVWSAGVILYILLCGVPPFWAETEQGVALAILRGVLDFKRDPWSQISESAKSLVKQMLEPDSTKRLTAQQVLDHPWIQNAKKAPNVPLGDIVRSRLKQFSMMNRLKKKALRVIAEHLSIQEVEVIRNMFTLMDDDNDGKISYLELRAGLRKVGSQLGEPEIKLLMEVADVNGNGCLDYGEFVAVIIHLQKMENDEHFRQAFMFFDKDGSGYIESEELREALTDELGEPDNSVIIDIMREVDTDKDGKINYDEFVVMMKAGTDWRKASRQYSRERFKSLSLNLMKDGSMHLHDALTGQSIAV

SEQ ID NO: 1972 - DNA, 1716 bp, Arabidopsis thaliana
  CDS (1)..(1716)
atgggtctctgtttctcctccgccgccaaatcctccggccacaaccgcagtagccggaatccccacccacatcctcctctcacggttgttaaatccagaccaccgcgatctccatgttccttcatggccgttacgatccaaaaggatcatagaacgcaaccgcgacgcaatgcaacggctaagaaaacgccgacgcggcatacgccaccgcacgggaaagtgagagagaaagttataagcaataacggtaggagacatggagaaacgatcccctacggtaagcgtgtagattttgggtacgctaaagattttgatcaccgttacaccattggaaaattgcttggacatggtcaatttggttatacatatgtcgctaccgataaaaaaaccggtgatcgtgtcgccgtcaagaagatcgataaggccaagatgacaattccgatagctgtggaagatgtaaagagagaggtgaagatattacaagctttaactggtcatgaaaatgtggttcggttttataatgccttcgaggacaagaactctgtttatatagttatggagttatgcgagggtggtgaattacttgatcgtattttagccaggaaggatagccgttatagcgagagagacgcggccgtggtggtgagacaaatgctgaaagttgcggctgagtgtcatttacgcggtttggttcaccgagatatgaaaccagagaattttctgttcaaatcaaccgaagaagattcgcctctaaaagctactgatttcggtttatctgacttcataaagccaggcaaaaagtttcatgatattgttgggagtgcatactatgtagcacctgaagtgttaaaacgtaggtcgggacctgaatcagatgtgtggagtattggtgtaatcagttacattcttctctgcgggagacgaccattctgggataagactgaagacggtatcttcaaggaggttttgaagaacaaacctgatttcagaagaaaaccgtggccaaccattagcaacagcgccaaagattttgtcaagaagttgttagtaaaagacccgagagcgcgattaacagctgcacaagcactatcacatccatgggttagagaaggaggagatgcatctgagattcccatagacatatctgttctgaacaacatgcgtcagtttgtgaaatttagccgccttaagcaattcgctttaagggctcttgcaacgacacttgatgaggaagagttggctgatcttcgagaccagtttgatgcgattgatgttgacaagaatggtgtcattagccttgaagagatgaggcaggctctagcgaaagatcatccttggaagcttaaggatgcaagagttgccgagattcttcaagcgattgatagcaacacagatggattcgtggactttggcgagtttgtcgccgctgcgctacacgtaaaccaattagaggaacacgattccgagaagtggcaacagagatcaagagcagcatttgaaaaattcgacatagatggagatggatttataacagcagaggaacttcgaatgcatactggcttgaaagggtccattgagccacttcttgaagaagcagacattgacaatgatggtaaaatcagtctccaagagtttcgtagacttttgagaactgcaagtatcaaatcaagaaatgttagaagccctcctggttatcttatttctcgcaaggtctaa

SEQ ID NO: 1973 - protein, 571 aa, Arabidopsis thaliana
MGLCFSSAAKSSGHNRSSRNPHPHPPLTVVKSRPPRSPCSFMAVTIQKDHRTQPRRNATAKKTPTRHTPPHGKVREKVISNNGRRHGETIPYGKRVDFGYAKDFDHRYTIGKLLGHGQFGYTYVATDKKTGDRVAVKKIDKAKMTIPIAVEDVKREVKILQALTGHENVVRFYNAFEDKNSVYIVMELCEGGELLDRILARKDSRYSERDAAVVVRQMLKVAAECHLRGLVHRDMKPENFLFKSTEEDSPLKATDFGLSDFIKPGKKFHDIVGSAYYVAPEVLKRRSGPESDVWSIGVISYILLCGRRPFWDKTEDGIFKEVLKNKPDFRRKPWPTISNSAKDFVKKLLVKDPRARLTAAQALSHPWVREGGDASEIPIDISVLNNMRQFVKFSRLKQFALRALATTLDEEELADLRDQFDAIDVDKNGVISLEEMRQALAKDHPWKLKDARVAEILQAIDSNTDGFVDFGEFVAAALHVNQLEEHDSEKWQQRSRAAFEKFDIDGDGFITAEELRMHTGLKGSIEPLLEEADIDNDGKISLQEFRRLLRTASIKSRNVRSPPGYLISRKV

SEQ ID NO: 1974 - DNA, 1749 bp, Arabidopsis thaliana
  CDS (1)..(1749)
atgggaagttgtgtttcgtcgccattgaaaggctctccttttggaaagagaccggtaagaaggcgacacagtagtaatagcagaacatcctctgttcctcgtttcgattcttcaactaatctttcccggagattgattttccagccaccaagccgcgttctccccgagcctatcggtgatggaattcacctcaagtatgatttgggaaaagaactaggccgtggtgaatttggtgtcactcatgaatgtatcgagatcagtacccgagaaagatttgcgtgtaagaggatatcgaaggagaagctaaggacggagatagatgtggaggatgtgagaagagaggttgagatcatgagatgtttaccaaaacatcctaatattgttagctttaaggaagcttttgaggacaaagacgctgtctatcttgtcatggagatttgtgaaggaggtgaactttttgaccgcattgtctctagagggcattacactgaacgcgccgctgcatctgttgctaaaaccattcttgaagttgtcaaggtgtgtcatgaacatggagtgattcatcgtgatcttaaaccagagaacttcctcttttcgaatggaactgagactgcacaactcaaagccattgattttggtctctccattttcttcaaaccggcccagcggttcaatgagattgtgggaagtccttactacatggctccagaggttttgagacgaaattacggtcctgagatcgatgtttggagtgctggtgttatactctatatcttgctttgtggtgttcctcccttttgggcagaaaccgaggaaggaatcgcgcacgctattgtgagagggaacatcgatttcgagagagatccatggccaaaagtctcacatgaagccaaggaactcgttaagaacatgcttgatgcaaatccttatagcagactcacagtccaagaagtgcttgaacatccatggatccggaacgcagagagagcaccaaatgtgaatcttggagataacgtcaggaccaagattcaacaattcttgttgatgaacaggttcaagaagaaagtcctcaggattgtagcggacaatctaccaaacgaggagatagcagcgatagtacagatgtttcaaacaatggacactgataagaatggtcacttgacttttgaggagctaagagatggactgaagaagattggacaagttgttcccgatggcgatgtgaagatgctaatggatgcagcggatacagatggaaatgggatgttgagctgtgatgagtttgtgacactctcaatacatttgaagagaatgggatgtgatgagcatttgcaggaagcattcaagtattttgacaagaacgggaacggatttatcgagctagatgagctcaaggtagctctttgcgatgataagctaggccacgctaacggtaacgaccagtggatcaaagatatcttctttgacgtcgacctcaacaaggatggacggataagctttgatgagtttaaggcaatgatgaaatcagggacggattggaaaatggcgtcgaggcagtactcgagggcgttgttgaatgctctaagcatcaagatgttcaaagaagattttggggacaatggtcctaagtcacattccatggagttccctatagcaaggaagagggctaagctgcttgatgctcccaagaacaaatcaatggagcttcagatctccaaaacctataaaccctcaggtctaagaaactaa

SEQ ID NO: 1975 - protein, 582 aa, Arabidopsis thaliana
MGSCVSSPLKGSPFGKRPVRRRHSSNSRTSSVPRFDSSTNLSRRLIFQPPSRVLPEPIGDGIHLKYDLGKELGRGEFGVTHECIEISTRERFACKRISKEKLRTEIDVEDVRREVEIMRCLPKHPNIVSFKEAFEDKDAVYLVMEICEGGELFDRIVSRGHYTERAAASVAKTILEVVKVCHEHGVIHRDLKPENFLFSNGTETAQLKAIDFGLSIFFKPAQRFNEIVGSPYYMAPEVLRRNYGPEIDVWSAGVILYILLCGVPPFWAETEEGIAHAIVRGNIDFERDPWPKVSHEAKELVKNMLDANPYSRLTVQEVLEHPWIRNAERAPNVNLGDNVRTKIQQFLLMNRFKKKVLRIVADNLPNEEIAAIVQMFQTMDTDKNGHLTFEELRDGLKKIGQVVPDGDVKMLMDAADTDGNGMLSCDEFVTLSIHLKRMGCDEHLQEAFKYFDKNGNGFIELDELKVALCDDKLGHANGNDQWIKDIFFDVDLNKDGRISFDEFKAMMKSGTDWKMASRQYSRALLNALSIKMFKEDFGDNGPKSHSMEFPIARKRAKLLDAPKNKSMELQISKTYKPSGLRN

SEQ ID NO: 1976 - DNA, 1752 bp, Arabidopsis thaliana
  CDS (1)..(1752)
atgggaaacacatgcgtgggtccgaatctgaaccctaatggattccttcaatccgttagtgctgccgtgtggcggaatcagaaaccagacgatagcattaagagcagcaaggacgagagcagtcgaaaaaagaacgataaaagcgttaatggcgacgacagtaacggtcacgtttcctccaccgtggatccagcaccatccacgttgccaacaccgagcacaccaccacctccggtgaaaatggccaacgaagaaccaccaccaaaacctatcacagagaacaaagaagatccgaattcgaaaccgcagaagaaagaagcgcacatgaaacgtatggcaagcgcaggtctacaaatagactcagttcttgggagaaaaacagagaatctcaaagatatatacagtgttgggagaaaattaggtcaaggacaatttggaacaacgtttctttgcgtggataagaagacaggtaaagagttcgcttgtaaaacgatagctaagaggaaattaacaacacctgaggatgttgaagatgtgagaagagagattcagataatgcatcatttgtctggtcatccaaacgtgattcagatcgttggtgcgtatgaagatgcagtagctgttcatgttgtgatggagatttgtgcaggtggagagttatttgataggattatacagagagggcattatactgagaaaaaagctgctgagcttgctaggatcattgttggtgttatagaagcttgtcattctttaggtgtaatgcaccgtgatcttaagcctgagaattttttatttgttagtggagatgaagaagctgctctcaagactattgattttggcctctctgttttctttaaaccaggagaaacattcactgatgtcgttggtagtccttattatgtggcaccagaagttttaaggaaacattatagtcatgaatgtgatgtttggagtgccggagttattatttacattttactaagtggcgtccctccgttttgggatgaaacggaacaggggatctttgagcaggttttgaaaggtgaccttgattttatatcagaaccatggcctagtgtatcagaaagtgccaaggatttggtccgtcggatgctaatcagagaccctaagaagcgaatgactactcatgaagttctctgtcatccatgggccagagtagatggtgttgctcttgataaacctcttgattctgctgtcctaagtcgtttgcaacaattttcagccatgaacaagctcaagaaaatagctatcaaggtaatagcagaaagcttgtcagaggaagaaatagcaggattgaaggaaatgttcaagatgatagatacagataatagtggacacatcactctcgaagaactcaagaaaggtttggacagagttggtgctgaccttaaagattcagaaatactaggattaatgcaagcagcggatatagataacagtgggacaatagactatggagagtttatagcagcaatggtgcatttgaacaaaatagagaaagaagaccatttgttcacagcattctcttactttgaccaagatggaagtggttatataaccagagacgagctccaacaagcttgcaagcaatttggcttagcggatgttcatttagacgacattttacgcgaagtcgataaagacaacgatggaagaatagactacagcgagtttgtggatatgatgcaagacactggttttggcaaaatgggtttaaaggtgagttga

SEQ ID NO: 1977 - protein, 583 aa, Arabidopsis thaliana
MGNTCVGPNLNPNGFLQSVSAAVWRNQKPDDSIKSSKDESSRKKNDKSVNGDDSNGHVSSTVDPAPSTLPTPSTPPPPVKMANEEPPPKPITENKEDPNSKPQKKEAHMKRMASAGLQIDSVLGRKTENLKDIYSVGRKLGQGQFGTTFLCVDKKTGKEFACKTIAKRKLTTPEDVEDVRREIQIMHHLSGHPNVIQIVGAYEDAVAVHVVMEICAGGELFDRIIQRGHYTEKKAAELARIIVGVIEACHSLGVMHRDLKPENFLFVSGDEEAALKTIDFGLSVFFKPGETFTDVVGSPYYVAPEVLRKHYSHECDVWSAGVIIYILLSGVPPFWDETEQGIFEQVLKGDLDFISEPWPSVSESAKDLVRRMLIRDPKKRMTTHEVLCHPWARVDGVALDKPLDSAVLSRLQQFSAMNKLKKIAIKVIAESLSEEEIAGLKEMFKMIDTDNSGHITLEELKKGLDRVGADLKDSEILGLMQAADIDNSGTIDYGEFIAAMVHLNKIEKEDHLFTAFSYFDQDGSGYITRDELQQACKQFGLADVHLDDILREVDKDNDGRIDYSEFVDMMQDTGFGKMGLKVS

SEQ ID NO: 1978 - DNA, 1731 bp, Arabidopsis thaliana
  CDS (1)..(1731)
atggggatctgtcatggaaaacccgtcgagcaacaatcaaaaagcctcccagtttccggcgaaactaatgaagctccgacgaattcacagccaccggcgaaatcctctggctttccgttttatagcccgagtcctgtacctagcttattcaaatcctcaccatctgtatcttctagcgtgagctcaacgcctcttcgtatcttcaagagacctttccctcctccttctcctgctaagcacatacgagctttcctcgcgcgtcgctatggctctgtcaagcctaatgaggtttcgattcccgaaggtaaagaatgtgagatcggtctcgataagagttttggcttttcaaaacagtttgcttcacactatgagattgatggtgaggtgggtcgtggacattttggatatacttgctctgctaagggtaaaaaaggtagcttgaaaggtcaagaagttgctgttaaagttattcctaaatcaaagatgacaactgcaattgcgattgaggatgttagtagagaagtgaagatgttgcgggctttgactggtcataagaacctagtccagttctatgacgcgtttgaagatgatgaaaatgtttatattgtcatggaattatgcaaaggtggtgaactcttggacaaaatacttcaaaggggtggaaaatactccgaagatgatgctaaaaaagttatggttcagattctcagtgttgtggcttactgtcatctacaaggtgtggttcaccgtgaccttaaacccgagaactttcttttctctaccaaggatgagacttctcctctgaaagcaattgattttggtctttctgactatgtcaagccagacgagaggttgaatgatattgtagggagtgcttactatgtggccccggaagttttacaccgtacatatggaacagaagctgacatgtggagtataggagtgattgcttatattcttctctgtggcagtcgacccttttgggcccgtactgaatccggaatctttcgagctgtactaaaggcagaaccgaattttgaagaagctccttggccttctctatcacccgaagctgtagattttgtgaagagattgctaaacaaagattaccgtaaaagactaactgcggcccaggctttgtgtcatccctggctggttggctcgcatgaactaaagattccatctgatatgatcatatacaagcttgtaaaagtgtacataatgtcaacttcattgagaaaatcggctttagcggctcttgccaaaacattaactgtaccgcagttagcgtatcttcgggagcaattcacattgttggggccaagcaaaaatggatatatctcgatgcagaattacaaaacagcaatcctaaagagttcaacagatgctatgaaggattctcgagtgtttgattttgttcacatgataagttgtcttcaatacaagaaactagactttgaagagttttgtgcttcagcattaagcgtttatcagctcgaagcaatggagacatgggagcaacatgcacggcgtgcttacgagttgtttgagaaagacgggaataggcccatcatgattgaagaacttgcatcggaactcggactagggccatcagtgccggtgcacgttgttcttcaggattggataagacattctgatggcaaacttagtttcttagggtttgtcagattgctacatggcgtgtcttctcggaccttacaaaaagcttag

SEQ ID NO: 1979 - protein, 576 aa, Arabidopsis thaliana
MGICHGKPVEQQSKSLPVSGETNEAPTNSQPPAKSSGFPFYSPSPVPSLFKSSPSVSSSVSSTPLRIFKRPFPPPSPAKHIRAFLARRYGSVKPNEVSIPEGKECEIGLDKSFGFSKQFASHYEIDGEVGRGHFGYTCSAKGKKGSLKGQEVAVKVIPKSKMTTAIAIEDVSREVKMLRALTGHKNLVQFYDAFEDDENVYIVMELCKGGELLDKILQRGGKYSEDDAKKVMVQILSVVAYCHLQGVVHRDLKPENFLFSTKDETSPLKAIDFGLSDYVKPDERLNDIVGSAYYVAPEVLHRTYGTEADMWSIGVIAYILLCGSRPFWARTESGIFRAVLKAEPNFEEAPWPSLSPEAVDFVKRLLNKDYRKRLTAAQALCHPWLVGSHELKIPSDMIIYKLVKVYIMSTSLRKSALAALAKTLTVPQLAYLREQFTLLGPSKNGYISMQNYKTAILKSSTDAMKDSRVFDFVHMISCLQYKKLDFEEFCASALSVYQLEAMETWEQHARRAYELFEKDGNRPIMIEELASELGLGPSVPVHVVLQDWIRHSDGKLSFLGFVRLLHGVSSRTLQKA

SEQ ID NO: 1980 - DNA, 1593 bp, Arabidopsis thaliana
  CDS (1)..(1593)
atgggaaattgttgtggaacggctggatcgttgattcaagataagcagaagaaaggttttaaattgccaaatcctttctcaaacgagtacggcaaccaccacgatggccttaagcttatcgtgttgaaggaaccaacgggtcatgagatcaagcagaaatataaattaggtcgtgagttaggtcgaggagagttcggtgtgacgtatctgtgcaccgagatcgagaccggagagattttcgcatgcaaatcaatcttaaagaagaagctgaaaacgtcgattgatatagaggacgttaagagagaagttgagatcatgaggcaaatgcctgaacatcctaatattgttactttgaaagagacttatgaggatgataaagctgtgcatttggttatggagctttgtgaaggcggtgagcttttcgataggattgttgctagagggcattatacggagagagctgctgcttcggttattaaaacgatcatcgaggttgttcagatgtgtcataagcatggagtaatgcacagagatttaaaacctgagaacttcttgtttgcaaacaagaaggaaactgcatctttgaaggctattgattttggtctctctgttttctttaaaccaggcgagagatttaacgaaattgttgggagtccttactacatggctcctgaggtattaaggaggagttatggacaagaaattgacatttggagcgcaggagtgattctttacatattgctctgtggtgttccacctttttgggcagaaaccgaacatggagtcgcaaaagcaattcttaaatctgtaattgactttaaaagagacccctggcctaaagtttctgataatgcaaaagatctgatcaaaaagatgcttcatcctgatccaaggcgtcgtctaactgctcaacaagtgcttgatcatccgtggatacagaatggtaagaatgcttccaatgtatcattgggtgaaaccgtaagagcaaggcttaagcaattctctgttatgaacaagctcaagaaaagggcactcagggttatcgctgagcatctatcggttgaagaaacatcttgcataaaagaaagattccaagtaatggatacaagcaatagaggaaagattactatcaccgagctaggaatcggattgcagaaactcgggattgttgttcctcaagatgacattcaaatattgatggacgcgggagatgttgataaagatggatatttagacgtcaatgaatttgtagccatatcggtacacatcaggaagttaggcaacgacgagcacttaaagaaagcttttacgttctttgacaaaaacaagagtggttatatcgaaatagaggagttaagagatgctttggcagatgatgttgacactactagtgaagaagttgttgaagccattattcttgatgtcgataccaataaggatgggaaaataagttacgacgaatttgcaacgatgatgaaaacgggaacggattggagaaaagcttcgaggcagtactcgagggacctgtttaagtgtcttagtcttaagctcatgcaagatgggtccttgcagtctaatggagatacaaagtag

SEQ ID NO: 1981 - protein, 530 aa, Arabidopsis thaliana
MGNCCGTAGSLIQDKQKKGFKLPNPFSNEYGNHHDGLKLIVLKEPTGHEIKQKYKLGRELGRGEFGVTYLCTEIETGEIFACKSILKKKLKTSIDIEDVKREVEIMRQMPEHPNIVTLKETYEDDKAVHLVMELCEGGELFDRIVARGHYTERAAASVIKTIIEVVQMCHKHGVMHRDLKPENFLFANKKETASLKAIDFGLSVFFKPGERFNEIVGSPYYMAPEVLRRSYGQEIDIWSAGVILYILLCGVPPFWAETEHGVAKAILKSVIDFKRDPWPKVSDNAKDLIKKMLHPDPRRRLTAQQVLDHPWIQNGKNASNVSLGETVRARLKQFSVMNKLKKRALRVIAEHLSVEETSCIKERFQVMDTSNRGKITITELGIGLQKLGIVVPQDDIQILMDAGDVDKDGYLDVNEFVAISVHIRKLGNDEHLKKAFTFFDKNKSGYIEIEELRDALADDVDTTSEEVVEAIILDVDTNKDGKISYDEFATMMKTGTDWRKASRQYSRDLFKCLSLKLMQDGSLQSNGDTK

SEQ ID NO: 1982 - DNA, 1788 bp, Arabidopsis thaliana
  CDS (1)..(1788)
atggggcaatgttacgggaaggttaatcagagtaagcaaaatggtgaagaagaagctaacacgactacttatgttgtttccggcgacgggaatcagattcagcctctaactccggttaattacggtcgagctaagaacactccagctaggtcatcgaatccgagtccttggcctagtcctttccctcacggatcagcgagccctcttccttctggtgtttctccttctccggccagaacttccactccgaggaggtttttccgacggcctttcccgccgccttctccagccaaacacattaaggcttctttgatcaaacgtcttggagtgaagcctaaggaaggtccgatccctgaggagagaggaactgagccggagcagtcgcttgataagagctttggttatggcaagaattttggtgctaagtacgaattggggaaagaagtgggtcgagggcattttggtcatacttgttctggccgtggtaagaagggagatattaaggatcatcctattgctgtcaagatcatctccaaggctaagatgacaacagcaattgcaattgaagatgttcgcagggaggtgaagttactgaaatcattatctggacacaaatatttaatcaaatattatgatgcatgtgaggacgccaataacgtatacatagtcatggagttgtgtgatggtggagaacttttggacagaattttagcaaggggtggtaaatacccggaggatgatgcaaaggcgattgtcgtacaaattctaactgttgtttcattttgtcatctccaaggagttgtgcaccgtgacttaaagccagagaattttctatttacatcaagccgcgaagactcagacttgaaacttattgattttggtctctcagactttattagacctgatgaaagactgaatgatatagttggaagtgcctactatgtcgcgcctgaagttttacacaggtcatatagccttgaggctgatatatggagtattggagttattacatatatactcttatgtggaagccgacctttttgggcacggacagaatctggaatctttcgcactgtactaagaactgaaccaaactatgatgacgtaccttggccttcttgttcatcagaaggtaaagattttgtgaaacgacttctcaacaaagactataggaagcgaatgtctgcagttcaagctttgactcatccgtggttacgggatgatagtcgtgtgattcctttagacattttgatctataagttggtcaaagcctacttgcacgcgacacctcttagacgagctgctttaaaggcgctagcaaaagcattgaccgagaacgagctagtctatcttagagcacagttcatgctgttgggaccaaacaaagatggtagcgtctctctcgaaaacttcaagacggcgcttatgcaaaacgcaacagacgcaatgagagaatcaagagttcctgaaatacttcacactatggaatctctagcgtataggaagatgtatttcgaagagttctgtgcagcagcaattagcatccatcaactagaagctgttgacgcgtgggaagagatagcaacggcaggtttccagcattttgaaaccgagggaaaccgagtgatcacaatcgaagaactagcaagggaactgaatgtgggtgcgtctgcgtatggacacttgagagattgggtaagaagcagtgacgggaagctgagttacttagggttcactaagttcttgcacggagttactcttcgtgctgctcacgcaagacctcgctag

SEQ ID NO: 1983 - protein, 595 aa, Arabidopsis thaliana
MGQCYGKVNQSKQNGEEEANTTTYVVSGDGNQIQPLTPVNYGRAKNTPARSSNPSPWPSPFPHGSASPLPSGVSPSPARTSTPRRFFRRPFPPPSPAKHIKASLIKRLGVKPKEGPIPEERGTEPEQSLDKSFGYGKNFGAKYELGKEVGRGHFGHTCSGRGKKGDIKDHPIAVKIISKAKMTTAIAIEDVRREVKLLKSLSGHKYLIKYYDACEDANNVYIVMELCDGGELLDRILARGGKYPEDDAKAIVVQILTVVSFCHLQGVVHRDLKPENFLFTSSREDSDLKLIDFGLSDFIRPDERLNDIVGSAYYVAPEVLHRSYSLEADIWSIGVITYILLCGSRPFWARTESGIFRTVLRTEPNYDDVPWPSCSSEGKDFVKRLLNKDYRKRMSAVQALTHPWLRDDSRVIPLDILIYKLVKAYLHATPLRRAALKALAKALTENELVYLRAQFMLLGPNKDGSVSLENFKTALMQNATDAMRESRVPEILHTMESLAYRKMYFEEFCAAAISIHQLEAVDAWEEIATAGFQHFETEGNRVITIEELARELNVGASAYGHLRDWVRSSDGKLSYLGFTKFLHGVTLRAAHARPR

SEQ ID NO: 1984 - DNA, 1941 bp, Arabidopsis thaliana
  CDS (1)..(1941)
atgggtaatgcttgcgttggaccaaacatttctggaaatggtttcttgcaaactgttacggctgcaatgtggaggccacggatcggagctgagcaagcttcttcttcttcccatggtaatggacaagtttctaaagaagcagcttcagaaccagctactgatcaagtccagaataaaccccctgagcctatcacaatgccaagctcaaagaccaatcccgaaactaaactgaaacccgatctagagatccaacctgaagaaaagaaggagaaagttcttgcagaagaaaccaagcagaaagttgttcctgaagaaagtaagcaggaagttcctcctgaagaaagtaagcgggaagttgttgtgcagccggagtcagcaaaaccagaaacaaagtctgaatccaagccagagacaacaaaaccagaaacaacgtctgaaaccaagccagagacgaaagctgaacctcagaagcctaaacatatgaggagagtgtccagtgcagggcttagaactgagtcagtgttgcagaggaaaactgaaaactttaaggagttctattcattagggaggaaacttggacaagggcaatttgggacgacgtttttatgccttgagaaaggtactgggaacgaatatgcgtgcaagtcgatttccaagaggaagcttttgactgatgaggatgttgaagatgtgagaagagagattcagataatgcatcacttggctggtcatccgaatgttatatctattaaaggtgcttatgaggatgttgttgcggtacatcttgtgatggagttgtgttcgggtggcgagctttttgatagaattattcaacgtggacattacactgagaggaaagctgctgagcttgcgagaaccattgttggggttttagaggcttgtcactctcttggtgttatgcatcgggacctcaagccagagaattttctatttgttagtagagaggaagattccctgttgaaaacgatcgactttggactctcaatgttctttaagccagatgaggtttttacagatgttgttggtagtccgtattatgtagctccagaagttcttagaaagcgttatggtcctgaatcagatgtgtggagtgctggtgtgattgtttacattttgttaagcggagttcctcctttctgggccgaaaccgaacaaggtattttcgagcaggtccttcatggagatcttgacttttcatctgatccatggccaagcatctctgaaagcgcgaaagacttggtaaggaaaatgcttgttcgagaccccaagcgaagactaaccgcacatcaagtattatgtcatccatgggtacagattgacggtgtggctccagataaacctctggactctgctgttctgagccgtatgaagcaattttctgcaatgaacaagttcaagaaaatggctcttagagtcatagctgagagcttatctgaagaagaaatagccggtttaaaacaaatgttcaagatgatagacgcagacaatagtggtcagatcacttttgaagaactgaaagcaggactaaaacgagttggtgccaatctcaaagagtcagagattcttgatctaatgcaagctgctgatgtggacaatagcggaacgatagactacaaagagttcatagccgccacattgcatctaaacaaaatagagagagaggaccatttgttcgccgccttctcttactttgacaaggacgagagtggctttatcaccccggacgagcttcaacaagcttgcgaagagtttggtgttgaagatgcccgcatagaagaaatgatgcgcgatgttgatcaagacaaggatggacgaatagactacaacgagtttgtggcaatgatgcagaaagggagcataatgggaggacctgtgaagatgggtttagagaacagcattagcatttctctgaaacattag

SEQ ID NO: 1985 - protein, 646 aa, Arabidopsis thaliana
MGNACVGPNISGNGFLQTVTAAMWRPRIGAEQASSSSHGNGQVSKEAASEPATDQVQNKPPEPITMPSSKTNPETKLKPDLEIQPEEKKEKVLAEETKQKVVPEESKQEVPPEESKREVVVQPESAKPETKSESKPETTKPETTSETKPETKAEPQKPKHMRRVSSAGLRTESVLQRKTENFKEFYSLGRKLGQGQFGTTFLCLEKGTGNEYACKSISKRKLLTDEDVEDVRREIQIMHHLAGHPNVISIKGAYEDVVAVHLVMELCSGGELFDRIIQRGHYTERKAAELARTIVGVLEACHSLGVMHRDLKPENFLFVSREEDSLLKTIDFGLSMFFKPDEVFTDVVGSPYYVAPEVLRKRYGPESDVWSAGVIVYILLSGVPPFWAETEQGIFEQVLHGDLDFSSDPWPSISESAKDLVRKMLVRDPKRRLTAHQVLCHPWVQIDGVAPDKPLDSAVLSRMKQFSAMNKFKKMALRVIAESLSEEEIAGLKQMFKMIDADNSGQITFEELKAGLKRVGANLKESEILDLMQAADVDNSGTIDYKEFIAATLHLNKIEREDHLFAAFSYFDKDESGFITPDELQQACEEFGVEDARIEEMMRDVDQDKDGRIDYNEFVAMMQKGSIMGGPVKMGLENSISISLKH

SEQ ID NO: 1986 - DNA, 1800 bp, Arabidopsis thaliana
  CDS (1)..(1800)
atgggaggctgtacttccaaaccttcctcctccgtcaaacctaatccttacgcacccaaagacgcggttctccaaaatgacgattctacccctgctcatcccgggaaatcaccggttcgttcatctcccgccgtaaaggcctctccttttttccctttttacacgcctagtcccgcccggcaccgccgtaacaagagccgcgacggcggaggaggagagagtaagagcgttaccagcactcctctccgtcagctcgcgcgtgctttccaccctccgtcaccggcgagacatatacgggatgttctgcggcggaggaaggagaagaaggaggctgctctgccggcggcgaggcagcagaaggaggaggaggagagggaagaggtagggctggataaaagatttgggttttccaaggagttacagagtaggattgagctaggggaagagattgggagagggcattttgggtatacttgctctgctaagttcaagaaaggagagctcaaagatcaggaggttgctgttaaagtcatcccaaaatctaagatgacatctgcaatatctatagaggatgtgagaagagaagtgaaaatactgcgggcgttatctggacatcaaaatttggtacaattctatgatgcgttcgaggacaatgccaacgtttacatcgttatggagttatgtggaggtggtgaacttcttgacaggatactagcaaggggaggaaaatactctgaagatgatgcaaaagcagtgcttatacagatccttaacgtcgtagctttctgtcatctccaaggagttgttcatcgagatctaaaaccagagaacttcttgtacacttccaaggaggagaattctatgttgaaagtcatagattttggcttatcggactttgtcagaccagacgaaagactaaatgatatagtgggaagtgcatattacgtagcccctgaagttctacacagatcttataccacagaagcggatgtatggagcataggagtcatagcatacattctcctatgtggaagccgtcctttttgggcaagaactgaatcaggaattttcagagcagttctaaaagctgatcccagttttgatgaacctccttggccttcgttatcctttgaggcaaaagattttgttaagagattattgtacaaggaccctcggaaaagaatgactgcatctcaagctttgatgcatccttggatcgcgggttataagaaaatagatatcccatttgatattctgatcttcaagcagatcaaagcatacttgagatcttcgtctttgcgcaaagctgctttgatggctctgtccaagacattaactaccgatgaacttctttatctgaaagcgcagtttgcacacttagcacccaacaaaaatggcctcatcactttagatagcatcagactggcacttgcgacaaatgcaacagaagcaatgaaggaatcacggatcccggactttcttgcattgttaaatggacttcaatacaaagggatggattttgaagagttttgtgcagcttccattagcgttcatcagcatgagtctcttgattgttgggagcagagcattcgtcatgcttatgagctatttgaaatgaatggaaaccgagttatcgtcatcgaagaactcgcttctgaacttggtgttggatcatccatcccggttcataccattctaaatgactggataagacatactgacgggaagctgagtttcttgggttttgtcaaactgctgcacggtgtctcgactcgacaatctttagcgaaaacgcgatga

SEQ ID NO: 1987 - protein, 599 aa, Arabidopsis thaliana
MGGCTSKPSSSVKPNPYAPKDAVLQNDDSTPAHPGKSPVRSSPAVKASPFFPFYTPSPARHRRNKSRDGGGGESKSVTSTPLRQLARAFHPPSPARHIRDVLRRRKEKKEAALPAARQQKEEEEREEVGLDKRFGFSKELQSRIELGEEIGRGHFGYTCSAKFKKGELKDQEVAVKVIPKSKMTSAISIEDVRREVKILRALSGHQNLVQFYDAFEDNANVYIVMELCGGGELLDRILARGGKYSEDDAKAVLIQILNVVAFCHLQGVVHRDLKPENFLYTSKEENSMLKVIDFGLSDFVRPDERLNDIVGSAYYVAPEVLHRSYTTEADVWSIGVIAYILLCGSRPFWARTESGIFRAVLKADPSFDEPPWPSLSFEAKDFVKRLLYKDPRKRMTASQALMHPWIAGYKKIDIPFDILIFKQIKAYLRSSSLRKAALMALSKTLTTDELLYLKAQFAHLAPNKNGLITLDSIRLALATNATEAMKESRIPDFLALLNGLQYKGMDFEEFCAASISVHQHESLDCWEQSIRHAYELFEMNGNRVIVIEELASELGVGSSIPVHTILNDWIRHTDGKLSFLGFVKLLHGVSTRQSLAKTR

SEQ ID NO: 1988 - DNA, 1626 bp, Arabidopsis thaliana
  CDS (1)..(1626)
atgggaaattgttttgccaagaaccatggattgatgaagccacagcaaaatggtaataccactagatcagttgaagtaggagtaaccaaccaagatccaccgtcgtatactccacaagcgagaaccactcagcagccggagaaaccaggttccgtgaatagtcaaccaccaccgtggagggcggcggctgcagcaccaggactaagtcccaagaccaccactaagagcaattcaatactagagaacgctttcgaagacgtgaagctcttttacacattgggtaaagagctaggtcgtggtcaatttggggtaacgtatctgtgcacagagaattccacggggaagaagtacgcttgcaaatcgatctcgaagaagaagctggtgactaaagctgataaggatgatatgaggagagagattcagataatgcagcatttgagtgggcagcctaatattgtggagtttaaaggagcttatgaggatgagaaagctgtgaatttggtgatggagctttgtgctggtggtgaattgtttgatagaatcattgctaagggacattacactgagagagctgctgcttctgtttgtagacagattgtgaatgttgtcaagatttgtcatttcatgggtgtgttgcatagagacttgaagcctgagaatttcttgctctctagcaaagatgagaaggctttgatcaaggctactgatttcggattgtctgtctttattgaagagggaaaagtatatagagatattgttgggagtgcatactatgttgctccagaagtcttacgtcgcagatatgggaaagaagttgatatctggagtgctggaatcatcttatacattctactcagcggtgtgcccccgttttgggctgagactgagaaaggaatatttgatgctatattggaaggccatatcgactttgagagccaaccatggccgtcaatctccagcagtgccaaagatttggtacgtagaatgttgactgcggatccaaaaaggcggatttctgctgctgatgttcttcagcatccatggcttagagaaggtggagaagcatcagacaagccaattgacagtgctgttctctcaaggatgaaacaatttagagcaatgaataagctaaagaaacttgctttaaaggtcatagcggagaatattgacacggaagaaatccaaggattgaaggcaatgtttgctaacatagacactgacaacagtggcacaatcacttatgaagaactgaaagaaggattagccaaattgggatctaaactcacagaggcagaagtgaaacagctcatggatgctgctgatgttgatgggaacgggtccatcgactacatagagtttattacagcaacaatgcataggcacaggcttgaaagtaatgagaatctttacaaagctttccagcattttgacaaagacagcagcggatacattacaatagacgaactggaatctgcattgaaggaatatggaatgggagatgatgcaacaatcaaagaggttttgtcagatgtcgactccgataacgatggtagaatcaactatgaagagttctgcgcaatgatgagaagtggaaatccacaacaacaacaacctcggctgttctag

SEQ ID NO: 1989 - protein, 541 aa, Arabidopsis thaliana
MGNCFAKNHGLMKPQQNGNTTRSVEVGVTNQDPPSYTPQARTTQQPEKPGSVNSQPPPWRAAAAAPGLSPKTTTKSNSILENAFEDVKLFYTLGKELGRGQFGVTYLCTENSTGKKYACKSISKKKLVTKADKDDMRREIQIMQHLSGQPNIVEFKGAYEDEKAVNLVMELCAGGELFDRIIAKGHYTERAAASVCRQIVNVVKICHFMGVLHRDLKPENFLLSSKDEKALIKATDFGLSVFIEEGKVYRDIVGSAYYVAPEVLRRRYGKEVDIWSAGIILYILLSGVPPFWAETEKGIFDAILEGHIDFESQPWPSISSSAKDLVRRMLTADPKRRISAADVLQHPWLREGGEASDKPIDSAVLSRMKQFRAMNKLKKLALKVIAENIDTEEIQGLKAMFANIDTDNSGTITYEELKEGLAKLGSKLTEAEVKQLMDAADVDGNGSIDYIEFITATMHRHRLESNENLYKAFQHFDKDSSGYITIDELESALKEYGMGDDATIKEVLSDVDSDNDGRINYEEFCAMMRSGNPQQQQPRLF

SEQ ID NO: 1990 - DNA, 1785 bp, Arabidopsis thaliana
  CDS (1)..(1785)
atgggccactgttacagccggaacatttccaccgtcgacgacgacgacgaaatcccctccgcaaccgctcagttaccacatcggtcacaccaaaaccaccaccagacttcatcatcatcatcaattccccagtctccggctacttcagaagtcaacccttacaacatcagcccatttcaaagcccgttaccggcgggagtagctccatctccggcgagaactccgggaagaaaattcaaatggccattcccgcctccttcacctgcgaaaccgattatggcggctttaagacggcgacgaggtacagcaccacatcctcgggatggtccgatccctgaggatagtgaagccggcggaagcggcggcggaatcggagaaaggttagataaaaatttcggatttgcgaagaattttgaaggtaagtatgagcttgggagagaagtaggtcgagggcattttggtcatacttgttgggctaaagctaagaaagggaagatcaaaggtcaaacagttgcagtcaaaatcatctctaaatctaagatgacatcagctttgtcgattgaagatgttcgtcgagaggtgaagttgttgaaagctttgtctgggcatagtcacatggttaagttctatgatgtgtttgaggattcggataatgtctttgttgttatggagttatgtgaaggtggagagctattggacagtattttggcgagaggtggtcgatatccggaagcagaagctaagcgtattcttgtacagattttatctgcaactgcttttttccatcttcaaggtgttgtgcaccgtgatctgaaaccggagaattttctctttacaagcaaaaatgaggatgcagtactcaaggttatagattttggcttgtctgattacgctagatttgatcagcgtctcaacgatgtggtaggaagtgcatactatgttgcacctgaagtacttcacagatcctatagcaccgaagcagatatatggagcattggtgtcatatcttacatattactctgtggaagtagacctttttacggaagaaccgagtctgcaatttttcgttgtgtgcttagagcgaacccgaatttcgacgatttgccgtggccttcaatatctcctattgccaaagactttgtgaaaaggcttttgaataaagaccataggaaaagaatgacagctgctcaagctttagctcatccatggcttcgagatgaaaatcctggtttacttctggatttctctatctacaaattggtgaagtcttatattcgtgcatcgcctttccgaagagcagcacttaagtctctatccaaagctatacccgaagaggaactcgtgttccttaaagcacagtttatgctcttggagccagaagatggaggcttgcatcttcacaatttcaccacggctctgacaagatatgctacggatgctatgatcgaatctagacttcctgacatattaaacatgatgcaaccattggcacataagaaacttgattttgaagagttttgtgcggcttcagtcagcgtttatcaacttgaggctcttgaagaatgggaacagatcgcaacggtagcctttgaacactttgaaagtgaaggaagccgagccatttcggtccaagaactcgccgaggagatgagtttgggaccaaatgcgtatcctctgctcaaggattggatccgtagtttagatgggaagctgaatttcttaggttacgccaagttcttgcacggtgtgactgttcgaagctcgagctcgagaccaatgagatga

SEQ ID NO: 1991 - protein, 594 aa, Arabidopsis thaliana
MGHCYSRNISTVDDDDEIPSATAQLPHRSHQNHHQTSSSSSIPQSPATSEVNPYNISPFQSPLPAGVAPSPARTPGRKFKWPFPPPSPAKPIMAALRRRRGTAPHPRDGPIPEDSEAGGSGGGIGERLDKNFGFAKNFEGKYELGREVGRGHFGHTCWAKAKKGKIKGQTVAVKIISKSKMTSALSIEDVRREVKLLKALSGHSHMVKFYDVFEDSDNVFVVMELCEGGELLDSILARGGRYPEAEAKRILVQILSATAFFHLQGVVHRDLKPENFLFTSKNEDAVLKVIDFGLSDYARFDQRLNDVVGSAYYVAPEVLHRSYSTEADIWSIGVISYILLCGSRPFYGRTESAIFRCVLRANPNFDDLPWPSISPIAKDFVKRLLNKDHRKRMTAAQALAHPWLRDENPGLLLDFSIYKLVKSYIRASPFRRAALKSLSKAIPEEELVFLKAQFMLLEPEDGGLHLHNFTTALTRYATDAMIESRLPDILNMMQPLAHKKLDFEEFCAASVSVYQLEALEEWEQIATVAFEHFESEGSRAISVQELAEEMSLGPNAYPLLKDWIRSLDGKLNFLGYAKFLHGVTVRSSSSRPMR

SEQ ID NO: 1992 - DNA, 1806 bp, Arabidopsis thaliana
  CDS (1)..(1806)
atgggtctatgtacttcgaaaccgaattcatctaattccgatcaaactccggcgaggaatagtccacttccggcgtctgaatccgtcaagccttcgagctcttccgttaatggtgaagatcagtgtgtaacaacaacgaacaatgaaggcaaaaagtctccgtttttccctttttatagtccaagtccagctcactatttcttctccaagaagactccggcgagatctccggcgactaattcgactaattcgactccgaagcgattctttaaacggccgtttcctcctccgtctccggctaaacatatcagagctgttttagcgagaaggcatggttctgtgaagcctaattcgtcggcgatccctgaaggtagtgaagctgaaggaggtggtgttggattggataaaagctttggtttttccaagagttttgcgagtaagtatgagcttggtgatgaagttggtcgtggtcattttggttatacttgtgctgctaagtttaagaagggtgataataaaggtcaacaagtcgcggttaaagtcattcccaaagcaaagatgacgacggctattgcaattgaagatgtgagaagggaagtgaagatattgagggctttgtctggtcataacaatcttcctcatttctatgatgcttatgaggatcatgataatgtctatatagtgatggaactatgtgaaggaggagagcttttggatagaatactttcaagaggtgggaagtacacagaggaggatgcaaagaccgttatgatacaaatattgaatgtggttgctttttgtcatctgcaaggcgttgtacacagagatcttaaaccagagaattttctttttacctcaaaagaagacacctctcaattgaaggcaatagatttcggtttgtcagattacgtgagaccagatgagaggctcaatgacattgttggtagtgcatactatgtagcacctgaagttctgcatagatcttacagtacagaagctgatatttggagtgttggtgtgattgtatatattctattgtgtggaagccgaccgttttgggctaggacagaatcaggaatctttcgtgctgttctaaaagctgatccaagttttgatgaccctccttggcctttgttatcttcagaggcaagagattttgtaaagcggttgctaaacaaagatccgcgtaaaagattaacagctgctcaagccttaagtcatccatggataaaggactcaaacgacgcaaaggttccaatggatattctggttttcaaacttatgagagcttatttacgatcatcatctctccgtaaagctgcattaagagctttatcgaaaacacttacggttgatgaactgttttatctgagagagcagtttgctttgttagaacctagtaagaacggaaccataagtctagaaaacatcaaatcagctctgatgaaaatggcaacagatgcgatgaaggactcacgtattccagagttcttaggacaactgagtgctcttcaatatagaagaatggactttgaggaattctgtgcagcggcattgagtgttcaccagctagaagctcttgatcgatgggaacaacacgctcgttgtgcttatgagcttttcgaaaaggaagggaaccgaccaatcatgatcgatgaactcgcttcggaacttggtcttggcccttctgtaccggttcacgcagtgcttcacgattggcttagacataccgatgggaagcttagctttctcggatttgtgaaattgctacatggtgtgtctagccgcacgatcaaagctcattag

SEQ ID NO: 1993 - protein, 601 aa, Arabidopsis thaliana
MGLCTSKPNSSNSDQTPARNSPLPASESVKPSSSSVNGEDQCVTTTNNEGKKSPFFPFYSPSPAHYFFSKKTPARSPATNSTNSTPKRFFKRPFPPPSPAKHIRAVLARRHGSVKPNSSAIPEGSEAEGGGVGLDKSFGFSKSFASKYELGDEVGRGHFGYTCAAKFKKGDNKGQQVAVKVIPKAKMTTAIAIEDVRREVKILRALSGHNNLPHFYDAYEDHDNVYIVMELCEGGELLDRILSRGGKYTEEDAKTVMIQILNVVAFCHLQGVVHRDLKPENFLFTSKEDTSQLKAIDFGLSDYVRPDERLNDIVGSAYYVAPEVLHRSYSTEADIWSVGVIVYILLCGSRPFWARTESGIFRAVLKADPSFDDPPWPLLSSEARDFVKRLLNKDPRKRLTAAQALSHPWIKDSNDAKVPMDILVFKLMRAYLRSSSLRKAALRALSKTLTVDELFYLREQFALLEPSKNGTISLENIKSALMKMATDAMKDSRIPEFLGQLSALQYRRMDFEEFCAAALSVHQLEALDRWEQHARCAYELFEKEGNRPIMIDELASELGLGPSVPVHAVLHDWLRHTDGKLSFLGFVKLLHGVSSRTIKAH

SEQ ID NO: 1994 - DNA, 1587 bp, Arabidopsis thaliana
  CDS (1)..(1587)
atgggaaactgttgcagatctcccgcagcagttgctagagaagacgtgaaatccaactattccggccacgatcacgcccgcaaagacgccgccggcggtaaaaaatcggcgccgattcgagttctaagcgatgttcccaaggaaaacatcgaggaccgttacttactcgacagagaactcggccgcggcgagtttggtgtcacttacctctgtatcgagaggtcctcgcgtgacctactcgcttgcaaatcgatctccaagaggaagcttagaactgctgtggatattgaagatgttaaaagagaagtagcgattatgaagcatttgcctaagagttcgagtattgttactttgaaagaagcttgtgaggatgataatgctgtgcatttggttatggagctttgtgaaggtggcgagcttttcgatcggattgttgcgagaggtcattatacggagcgtgctgctgctggtgttactaagactattgttgaggttgtgcagctttgtcataagcatggtgtgattcatagagatttgaagcccgagaactttttgtttgctaataagaaggagaactcgcctttgaaagctattgattttggattgtcgattttcttcaagccaggtgagaaattctctgagattgttgggagtccatattacatggcacctgaggtgcttaagcggaattatggacccgaaatagatatttggagtgctggagtgattctttatattctcttgtgtggagttcctccgttctgggcagagtcagaacagggagttgctcaggctattctgcgtggagtaattgattttaagagggaaccgtggccaaacatttctgagaccgctaagaatctagtcagacaaatgttagagcctgatccaaagcgtcggctgactgcaaagcaagtgcttgagcacccatggattcagaacgcaaagaaagctcccaatgttcctcttggagatgttgtgaagtcgaggttgaagcaattttcagtgatgaaccgattcaagagaaaagctttaagggttattgccgaatttttatctacggaagaagtagaagacatcaaagtaatgttcaacaagatggatactgataatgatggtatagtttccattgaggagttgaaagccggacttcgtgattttagtacacagctagcggaatcagaagttcagatgcttattgaagcggtggatactaaaggaaaaggaactctagactatggagaatttgtagcagtgtctctccacctgcaaaaggtagcaaacgatgagcatctccgcaaagccttctcttactttgacaaggatggaaatgggtacattttgccccaggagctttgtgacgccttaaaggaagatggaggagatgactgtgtggatgtcgccaatgatatattccaagaagttgacacagacaaggatgggagaataagctacgaagagtttgcggcaatgatgaaaacaggaacggattggagaaaggcgtctcgtcattactcaagagggagattcaatagcctaagcatcaagctaatgaaggacgggtctttgaacctaggcaacgaatag

SEQ ID NO: 1995 - protein, 528 aa, Arabidopsis thaliana
MGNCCRSPAAVAREDVKSNYSGHDHARKDAAGGKKSAPIRVLSDVPKENIEDRYLLDRELGRGEFGVTYLCIERSSRDLLACKSISKRKLRTAVDIEDVKREVAIMKHLPKSSSIVTLKEACEDDNAVHLVMELCEGGELFDRIVARGHYTERAAAGVTKTIVEVVQLCHKHGVIHRDLKPENFLFANKKENSPLKAIDFGLSIFFKPGEKFSEIVGSPYYMAPEVLKRNYGPEIDIWSAGVILYILLCGVPPFWAESEQGVAQAILRGVIDFKREPWPNISETAKNLVRQMLEPDPKRRLTAKQVLEHPWIQNAKKAPNVPLGDVVKSRLKQFSVMNRFKRKALRVIAEFLSTEEVEDIKVMFNKMDTDNDGIVSIEELKAGLRDFSTQLAESEVQMLIEAVDTKGKGTLDYGEFVAVSLHLQKVANDEHLRKAFSYFDKDGNGYILPQELCDALKEDGGDDCVDVANDIFQEVDTDKDGRISYEEFAAMMKTGTDWRKASRHYSRGRFNSLSIKLMKDGSLNLGNE

SEQ ID NO: 1996 - DNA, 1734 bp, Arabidopsis thaliana
  CDS (1)..(1734)
atggggctgtgtcatgggaaacctatcgaacaacaatcgaagaatctcccaatctccaatgaaatcgaagagacacctaagaattcatctcagaaggcgaaatcttcaggctttccgttttatagtccaagccctttacctagtctcttcaaaacctcacctgctgtgtcatcctccagcgtgagctccacgccacttcgtatctttaagcgacctttcccacctccatcaccagctaagcatatacgagctctcctcgcgcgtcgtcacggttctgttaagcccaatgaagcttcgatccctgaaggtagtgaatgtgaggttggcttggacaagaaatttggtttctctaagcagtttgcttcacactacgagattgacggtgaggtgggtcgagggcattttggttatacttgctctgctaaggggaaaaaaggtagcttgaaaggtcaagatgtggctgtcaaagttattcccaaatccaagatgactacggcaattgcaattgaggatgttagaagagaagtgaagatattgcgggctttaactggtcacaagaacctagtccagttctatgacgccttcgaagatgatgaaaatgtttacattgtcatggagttatgccaaggcggtgaactcttggacaaaatacttcaaaggggaggcaaatactcagaagtagatgctaaaaaagtaatgattcagattcttagtgtagtagcctactgtcatcttcaaggcgtggttcaccgtgacctcaaacctgagaattttctcttcaccacaaaggatgagtcttcccctttgaaagccattgattttggtctctccgactatgtcaggccagatgagaggttgaatgacattgtaggaagtgcttattacgtggcccctgaagttttacaccgtacatatggaactgaggcagatatgtggagtattggagtgattgcttatatactactctgtggtagccggcccttttgggcccgttctgaatctggaatctttagagctgttcttaaagcagaacccaatttcgaagaagctccttggccatctctttcacctgacgctgtagattttgtgaaacgtttgttaaataaagattaccgtaagagactaactgctgcacaggctttatgccatccgtggctggttggctcacatgaattaaagataccatctgatatgatcatttacaagctcgtaaaagtatacataatgtcgtcttctttgagaaaatcggctttagcggctcttgccaaaactttaacagtaccgcagctgacttatttgcaagagcagtttaatctgttaggaccaagcaaaaacggatatatctcgatgcagaattataaaacagcaatcttgaagagctccacagaagctacaaaggattcacgagtcttggattttgtacacatgattagttgtcttcagtataagaaactagactttgaagagttttgcgcttcagctttaagtgtatatcagctagaagcaatggagacttgggagcaacatgcacgccgtgcatatgagttgtatgagaaggatgggaacagagtcatcatgatcgaagaacttgccacggaactcggactaggtccatcggtgcctgttcatgttgttcttcaagattggataagacattctgatgggaagctaagtttcttgggttttgtcagactcttacacggcgtctcctctcgtacattgcagaaagcgtag

SEQ ID NO: 1997 - protein, 577 aa, Arabidopsis thaliana
MGLCHGKPIEQQSKNLPISNEIEETPKNSSQKAKSSGFPFYSPSPLPSLFKTSPAVSSSSVSSTPLRIFKRPFPPPSPAKHIRALLARRHGSVKPNEASIPEGSECEVGLDKKFGFSKQFASHYEIDGEVGRGHFGYTCSAKGKKGSLKGQDVAVKVIPKSKMTTAIAIEDVRREVKILRALTGHKNLVQFYDAFEDDENVYIVMELCQGGELLDKILQRGGKYSEVDAKKVMIQILSVVAYCHLQGVVHRDLKPENFLFTTKDESSPLKAIDFGLSDYVRPDERLNDIVGSAYYVAPEVLHRTYGTEADMWSIGVIAYILLCGSRPFWARSESGIFRAVLKAEPNFEEAPWPSLSPDAVDFVKRLLNKDYRKRLTAAQALCHPWLVGSHELKIPSDMIIYKLVKVYIMSSSLRKSALAALAKTLTVPQLTYLQEQFNLLGPSKNGYISMQNYKTAILKSSTEATKDSRVLDFVHMISCLQYKKLDFEEFCASALSVYQLEAMETWEQHARRAYELYEKDGNRVIMIEELATELGLGPSVPVHVVLQDWIRHSDGKLSFLGFVRLLHGVSSRTLQKA

SEQ ID NO: 1998 - DNA, 1617 bp, Arabidopsis thaliana
  CDS (1)..(1617)
atgggtaattgttgcggaacagcaggatcattggctcaaaacgataacaaacccaaaaaaggaaggaagaagcaaaaccctttctcgattgattacggtcttcaccacggtggtggagatggaggtggaagacctcttaagcttatcgttttgaatgatccaacaggtcgtgagatcgagtctaaatacacgttggggagagagctaggtcgtggagaattcggtgttacgtatctatgtactgataaggagacagacgacgtttttgcttgtaaatcgattttgaagaagaagctgaggacagctgttgatattgaagatgttaggagagaggttgagattatgaggcatatgcctgagcatcctaatgttgttactttgaaggagacttatgaggatgagcatgctgttcatttggttatggagctttgtgaaggtggtgaattgtttgataggattgttgctagagggcattatactgagagagctgctgctgctgtcactaagaccatcatggaagttgttcaggtgtgtcataagcatggggtaatgcacagggacctgaaacctgagaacttcttgtttggaaacaagaaggagactgcacctcttaaggcgattgattttggtctctctgttttctttaaaccaggcgagaggtttaacgaaatcgttggtagtccgtactacatggctcccgaggtgctaaaacggaattatggtccagaagttgatatttggagtgcaggtgtaattctttacatactgctatgtggtgtcccgcctttctgggcagaaactgaacaaggagttgcacaagcaattattcgatctgtactagacttcagaagggacccatggcccaaggtttctgaaaacgcaaaagaccttatcaggaaaatgcttgatcctgaccaaaagcgtcgtcttacagctcaacaagtcctagatcacccgtggttacagaatgcaaagacagcccccaatgtatcattgggtgaaacagtgagggcaaggttgaagcagttcaccgtcatgaacaagctcaagaaacgagcactcagggttattgctgagcatttatcagatgaagaagcttcaggtataagagaagggttccaaataatggacacaagccaaagagggaagattaacatcgacgagcttaaaatcgggttgcagaaacttggtcatgccattccgcaagatgatttacaaattttgatggatgctggagacatcgatagagatggatatttggactgtgacgagtttattgccatatcggtacacctaaggaaaatgggcaatgacgagcatctcaagaaagcgtttgcgttctttgatcaaaacaataacggatatatcgaaatagaggagttaagggaagccttgtctgacgaacttggtacaagtgaagaagttgttgatgccattatccgtgatgttgacaccgacaaggatggaagaataagttacgaagagtttgtaacgatgatgaaaacaggaacagattggagaaaagcttcgagacagtactcgagagaacggtttaacagtatcagtctcaaactgatgcaagatgcgtcgttgcaggtcaatggtgatacaagatga

SEQ ID NO: 1999 - protein, 538 aa, Arabidopsis thaliana
MGNCCGTAGSLAQNDNKPKKGRKKQNPFSIDYGLHHGGGDGGGRPLKLIVLNDPTGREIESKYTLGRELGRGEFGVTYLCTDKETDDVFACKSILKKKLRTAVDIEDVRREVEIMRHMPEHPNVVTLKETYEDEHAVHLVMELCEGGELFDRIVARGHYTERAAAAVTKTIMEVVQVCHKHGVMHRDLKPENFLFGNKKETAPLKAIDFGLSVFFKPGERFNEIVGSPYYMAPEVLKRNYGPEVDIWSAGVILYILLCGVPPFWAETEQGVAQAIIRSVLDFRRDPWPKVSENAKDLIRKMLDPDQKRRLTAQQVLDHPWLQNAKTAPNVSLGETVRARLKQFTVMNKLKKRALRVIAEHLSDEEASGIREGFQIMDTSQRGKINIDELKIGLQKLGHAIPQDDLQILMDAGDIDRDGYLDCDEFIAISVHLRKMGNDEHLKKAFAFFDQNNNGYIEIEELREALSDELGTSEEVVDAIIRDVDTDKDGRISYEEFVTMMKTGTDWRKASRQYSRERFNSISLKLMQDASLQVNGDTR

SEQ ID NO: 2000 - DNA, 1458 bp, Arabidopsis thaliana
  CDS (1)..(1458)
atgggttgcttcagcagtaaggagctacaacaatcgaaaagaaccattcttgagaaacctttagttgacatcacaaagatttatatcctcggggaggaattgggtagaggtaatttcggtctaacccgaaagtgcgttgagaaatctacaggtaagacattcgcctgcaaaaccattctcaagacaaagctaaaggacgaagaatgtgaagaagacgtgaagagagagattcggattatgaagcaattgtctggagaaccaaacattgtcgagttcaagaatgcttacgaggacaaagattctgtacatattgttatggaatattgtggtggtggagagttatacgacaagatcctagctttgtacgatgttgggaagtcttactcggagaaagaagctgctggaatcattaggtcgattgtgaatgttgtgaagaattgccattacatgggtgtgatgcatcgtgatctaaagcctgagaatttcttgcttacgagtaacgatgacaatgctacggtcaaagttattgactttgggtgttctgtgttcattgaagaaggaaaagtataccaggatttagctgggagtgattactacattgctcctgaagtgttacagggaaattacggtaaagaagcggacatttggagtgcagggattatattatacatcctactctgtggcaaatctccctttgtgaaagaacctgagggacagatgttcaatgagattaagagtttggaaatcgactacagcgaggaaccatggcctcttagagattcaagggcaatacatcttgtcaagaggatgcttgatagaaaccccaaggaacgaatctctgctgcagaggttcttggacatccttggatgaaagaaggagaagcttcggataagcctattgatggcgttgttttatcccgtttgaagagatttcgagatgcgaacaagtttaagaaggtagttctaaagtttattgcagcaaatctatcagaagaggaaatcaaaggtcttaagacactgttcaccaacatagatactgacaaaagtggaaatattactcttgaagaactcaaaacaggtcttactagacttggatctaacctctctaaaaccgaagtggagcaactcatggaagctgctgatatggatggtaatggaacaatcgacatagacgagtttatttctgcaacgatgcatagatacaaattggatagagatgaacatgtgtacaaagcattccaacactttgacaaagacaacgacgggcacataacgaaggaagagttggagatggcgatgaaggaggatggtgcgggagatgaaggtagcatcaaacaaatcatagccgatgctgataccgataatgatggaaaaataaactttgaggaattccgcacaatgatgagaactgagagcagcttgcagccagaaggggaacttcttccgatcatcaattga

SEQ ID NO: 2001 - protein, 485 aa, Arabidopsis thaliana
MGCFSSKELQQSKRTILEKPLVDITKIYILGEELGRGNFGLTRKCVEKSTGKTFACKTILKTKLKDEECEEDVKREIRIMKQLSGEPNIVEFKNAYEDKDSVHIVMEYCGGGELYDKILALYDVGKSYSEKEAAGIIRSIVNVVKNCHYMGVMHRDLKPENFLLTSNDDNATVKVIDFGCSVFIEEGKVYQDLAGSDYYIAPEVLQGNYGKEADIWSAGIILYILLCGKSPFVKEPEGQMFNEIKSLEIDYSEEPWPLRDSRAIHLVKRMLDRNPKERISAAEVLGHPWMKEGEASDKPIDGVVLSRLKRFRDANKFKKVVLKFIAANLSEEEIKGLKTLFTNIDTDKSGNITLEELKTGLTRLGSNLSKTEVEQLMEAADMDGNGTIDIDEFISATMHRYKLDRDEHVYKAFQHFDKDNDGHITKEELEMAMKEDGAGDEGSIKQIIADADTDNDGKINFEEFRTMMRTESSLQPEGELLPIIN

SEQ ID NO: 2002 - DNA, 1596 bp, Arabidopsis thaliana
  CDS (1)..(1596)
atgggttgcttcagcagtaaacaccggaaaactcaaaacgacggcggagaaaaatcaatcccgatcaatccagttcaaacccatgtagtccccgagcatcgtaaacctcaaaccccaacaccaaaacccatgactcaaccaatccatcagcagatttcaacaccgtcttcaaatccagtctcagttcgagatccagatacgattttaggtaaaccattcgaagacatcaggaaattttacagcttggggaaagaattaggtcgaggtcaatttgggattacgtatatgtgtaaagagattggtactggtaacacttatgcttgcaaatcgattcttaagaggaagctaattagtaagcaagataaagaagatgtgaagagagagattcagataatgcagtatttgtctggacaacctaacattgttgagatcaaaggtgcttatgaagatagacaatctatacatttggttatggagttgtgtgctggtggtgagttgtttgataggattatagctcaaggtcattactctgagagagctgctgctggtatcattaggtctattgtcaatgttgttcagatttgtcattttatgggtgtggttcatcgagatctcaagcctgagaatttcttgctttcgagtaaagaggagaatgctatgcttaaagctactgatttcggtttgtccgtcttcatcgaagaaggaaaagtttaccgggatatagttgggagtgcttactacgttgctccagaagtattaaggcgaagttacggaaaagaaatcgacatttggagtgcaggtgtcattttatacatcctactcagcggtgtacctcctttttgggccgaaaatgagaaaggaatattcgatgaggtcataaaaggcgaaattgattttgtaagtgagccatggccttctatatctgaaagcgcgaaagatcttgttaggaagatgctaaccaaagacccgaagagacgaatcacggctgcacaggttcttgaacatccttggatcaaagggggagaagcaccagacaagcctattgatagcgctgtgttatcccgcatgaagcaattccgagcaatgaacaagcttaagaagctagctctaaaggttatcgcggagagtctatcagaagaggagattaaaggtcttaaaaccatgtttgcgaatatagataccgacaaaagcgggacaatcacttatgaagaactcaaaactgggctaactagacttgggtctagactctcggaaactgaagttaagcaactcatggaagccgctgacgtcgatggtaatggaacaatcgactactacgagtttatctctgcgacaatgcatagatacaaattagatcgagatgagcatgtatacaaagcattccaacactttgataaagacaacagcgggcacataactagagatgagttggaaagtgccatgaaggaatatggaatgggagatgaagctagcatcaaagaagttatatccgaagttgataccgacaatgatggaagaataaactttgaagaattttgcgcgatgatgagaagtggcagcacgcagccacaggggaaactgcttccattccattga

SEQ ID NO: 2003 - protein, 531 aa, Arabidopsis thaliana
MGCFSSKHRKTQNDGGEKSIPINPVQTHVVPEHRKPQTPTPKPMTQPIHQQISTPSSNPVSVRDPDTILGKPFEDIRKFYSLGKELGRGQFGITYMCKEIGTGNTYACKSILKRKLISKQDKEDVKREIQIMQYLSGQPNIVEIKGAYEDRQSIHLVMELCAGGELFDRIIAQGHYSERAAAGIIRSIVNVVQICHFMGVVHRDLKPENFLLSSKEENAMLKATDFGLSVFIEEGKVYRDIVGSAYYVAPEVLRRSYGKEIDIWSAGVILYILLSGVPPFWAENEKGIFDEVIKGEIDFVSEPWPSISESAKDLVRKMLTKDPKRRITAAQVLEHPWIKGGEAPDKPIDSAVLSRMKQFRAMNKLKKLALKVIAESLSEEEIKGLKTMFANIDTDKSGTITYEELKTGLTRLGSRLSETEVKQLMEAADVDGNGTIDYYEFISATMHRYKLDRDEHVYKAFQHFDKDNSGHITRDELESAMKEYGMGDEASIKEVISEVDTDNDGRINFEEFCAMMRSGSTQPQGKLLPFH

SEQ ID NO: 2004 - DNA, 1563 bp, Arabidopsis thaliana
  CDS (1)..(1563)
atgggttgtttcagcagtaaacaccggaaaactcaaaacgacggcggcggagaaagatcaattccgataattccagttcaaacccatatcgttgatcaagtccccgatcatcgtaaacctcaaatcccatcaccatcgatacccatctcagttcgagatccagagacgattttaggtaaaccattcgaagacatcaggaaattttacagcttggggagagaattaggtcgaggtggtttagggattacgtatatgtgcaaagagattgggactgggaacatttatgcttgcaaatcgattctcaagaggaagctaattagtgagctgggtagagaagatgtgaagacagagattcagatcatgcagcatttgtctggacaaccaaacgttgttgagatcaaaggttcttatgaagacagacattctgtacatttggtaatggaattatgtgccggtggagagttgtttgataggattatagctcaaggtcattactctgagagagctgctgctggtaccattaagtcaattgtggatgttgttcagatttgtcatttgaatggtgtgattcatcgagatctcaagcctgagaatttcttgttctcgagtaaggaggagaatgcaatgcttaaagtaaccgatttcgggttgtccgcgttcatcgaagaaggaaaaatttacaaggatgtggttgggagtccttactacgttgctcctgaagtattaaggcagagttacggaaaagaaatcgacatttggagtgcaggtgttattttatacatcctactctgcggtgtacctcctttttgggccgacaatgaagaaggagtattcgttgaaattctaaaatgcaaaattgattttgtacgtgagccatggccttctatatctgacagcgcgaaagatcttgttgagaagatgctaaccgaagaccctaagagacgaatcactgctgcacaagttcttgaacatccttggatcaaagggggagaagcaccggaaaagcctattgatagcactgtgttatcacgtatgaagcaattccgagcaatgaacaagcttaagaagctagccctaaaggttagcgcggtgagtctatccgaagaagagatcaaaggtcttaaaaccttgtttgcgaatatggataccaatagaagcgggacaatcacttatgaacaactccaaactgggctaagtagacttagatctagactctctgaaactgaagttcagcaactcgttgaagcgtctgatgtggatggtaatggaacaattgactactatgagtttatctctgcgacaatgcatagatacaaattacatcacgatgagcacgtacacaaagcattccaacacttagataaagacaaaaatgggcacataactagggatgagttggaaagtgccatgaaggaatatggaatgggagatgaagctagcatcaaagaagttatatccgaagttgacaccgacaatgatggaaaaataaactttgaggaatttcgtgcgatgatgagatgtggcaccacacaaccaaaagggaaacagtatccattccactga

SEQ ID NO: 2005 - protein, 520 aa, Arabidopsis thaliana
MGCFSSKHRKTQNDGGGERSIPIIPVQTHIVDQVPDHRKPQIPSPSIPISVRDPETILGKPFEDIRKFYSLGRELGRGGLGITYMCKEIGTGNIYACKSILKRKLISELGREDVKTEIQIMQHLSGQPNVVEIKGSYEDRHSVHLVMELCAGGELFDRIIAQGHYSERAAAGTIKSIVDVVQICHLNGVIHRDLKPENFLFSSKEENAMLKVTDFGLSAFIEEGKIYKDVVGSPYYVAPEVLRQSYGKEIDIWSAGVILYILLCGVPPFWADNEEGVFVEILKCKIDFVREPWPSISDSAKDLVEKMLTEDPKRRITAAQVLEHPWIKGGEAPEKPIDSTVLSRMKQFRAMNKLKKLALKVSAVSLSEEEIKGLKTLFANMDTNRSGTITYEQLQTGLSRLRSRLSETEVQQLVEASDVDGNGTIDYYEFISATMHRYKLHHDEHVHKAFQHLDKDKNGHITRDELESAMKEYGMGDEASIKEVISEVDTDNDGKINFEEFRAMMRCGTTQPKGKQYPFH

SEQ ID NO: 2006 - DNA, 1506 bp, Arabidopsis thaliana
  CDS (1)..(1506)
atggagaaaccaaaccctagaagaccctcaaacagtgttcttccatacgaaacaccaagattaagagatcactatctcctcggcaaaaagctaggccaaggccaatttggaacaacctatctctgtacagagaaatcatcatcagctaattacgcttgcaaatcaatcccaaaacgtaagcttgtatgtcgtgaagactacgaagatgtatggcgtgagattcagatcatgcatcatctctctgagcatcctaatgttgttagaatcaagggtacttatgaagactctgtttttgttcacattgttatggaagtttgtgaaggtggtgagctttttgatcggattgtttctaaagggtgttttagtgaacgtgaagctgctaagttgattaagactattcttggtgttgttgaggcttgtcattctcttggtgttatgcatagagatcttaagcctgagaatttcttgtttgatagtcccagtgatgatgctaagcttaaagctacagactttggtttgtctgtcttctacaagccagggcagtatctgtatgatgtagttggaagtccgtattatgttgcacctgaggttctgaagaaatgttatggaccagagatagacgtgtggagcgccggtgttatcttgtacatcttactaagtggggttcctcctttttgggcagaaaccgagtcaggaatctttaggcagatattgcaagggaagatagattttaaatctgatccgtggcctactatctcagaaggtgctaaagatttgatttacaaaatgctcgataggagccccaagaaacgtatttctgcacatgaagcattgtgtcacccttggattgttgatgaacatgctgcaccagacaagcctctcgacccagcagtcttgtcgcgacttaagcagttctcgcaaatgaataaaatcaagaaaatggccttacgagtaatcgcggagagactctcggaggaagagattggtggtctgaaggaattgttcaaaatgatagatacagacaacagtggaacaatcacctttgaagagcttaaagcaggtctaaagagagttggatctgaattgatggaatcagaaatcaagtctcttatggatgcggcggatatagacaacagtgggacaatagactacggtgaattcctagcagcgacattacatataaacaagatggagagagaagagaacttggtggttgcgttttcatactttgataaagatggtagcggttatatcaccattgacgagcttcaacaagcctgcacagagtttggtctctgtgacactcctcttgatgacatgatcaaagagattgatcttgataatgacgggaagattgatttctcagagtttactgctatgatgaagaaaggagatggtgttgggaggagcagaactatgaggaacaacttgaacttcaatatagctgaagcttttggagttgaggacacaagcagcactgctaaatctgatgattcaccaaagtaa

SEQ ID NO: 2007 - protein, 501 aa, Arabidopsis thaliana
MEKPNPRRPSNSVLPYETPRLRDHYLLGKKLGQGQFGTTYLCTEKSSSANYACKSIPKRKLVCREDYEDVWREIQIMHHLSEHPNVVRIKGTYEDSVFVHIVMEVCEGGELFDRIVSKGCFSEREAAKLIKTILGVVEACHSLGVMHRDLKPENFLFDSPSDDAKLKATDFGLSVFYKPGQYLYDVVGSPYYVAPEVLKKCYGPEIDVWSAGVILYILLSGVPPFWAETESGIFRQILQGKIDFKSDPWPTISEGAKDLIYKMLDRSPKKRISAHEALCHPWIVDEHAAPDKPLDPAVLSRLKQFSQMNKIKKMALRVIAERLSEEEIGGLKELFKMIDTDNSGTITFEELKAGLKRVGSELMESEIKSLMDAADIDNSGTIDYGEFLAATLHINKMEREENLVVAFSYFDKDGSGYITIDELQQACTEFGLCDTPLDDMIKEIDLDNDGKIDFSEFTAMMKKGDGVGRSRTMRNNLNFNIAEAFGVEDTSSTAKSDDSPK

SEQ ID NO: 2008 - DNA, 1665 bp, Arabidopsis thaliana
  CDS (1)..(1665)
atgggttgctttagcagcaaacaccgaaacacagagagtgatatcatcaatggcagcgtacagagctcaattccgacaaatcaacctgaaaaccatgtctctcgtgatgttctcaagcctcagaaacctccttctcctcaaattccgacaacaacccaatcaaatcatcatcaccaacaagaatccaaacccgttaatcagcaaatcgaaaagaagcacgttctaacacaaccattgaaaccaatcgtttttagagaaacagagacaattctaggcaaaccctttgaagaaataaggaaactttacacgttaggtaaagaattaggtcgaggccaatttggtataacctacacttgcaaagagaattcaacaggcaacacatacgcttgcaaatcaatactcaagaggaaactaacgagaaagcaagacatagatgatgtgaagagagagattcagataatgcagtatttgtctggacaagagaacattgttgagatcaaaggtgcttatgaagatagacaatcgatacatttggtgatggagttgtgtggtggtagtgaattgttcgataggattatagctcaaggacattactctgagaaagcagctgctggtgttattagatcggttttgaatgttgttcagatttgtcatttcatgggagtgattcatcgtgatctcaagcctgagaattttctgctcgctagtactgatgagaatgctatgcttaaagctactgattttggattgtctgtgttcattgaagaagggaaagtttatagggatatagtaggaagtgcttactatgttgctcctgaagtattaagaagaagttatggaaaagaaatcgatatttggagtgcagggattattctatacatcttgctttgtggtgtgcctcctttttggtctgaaactgagaaggggatatttaatgagattataaagggagaaattgattttgatagccaaccatggccttctatatctgagagtgctaaagatcttgtgaggaagttgcttactaaggaccctaagcaacgaatctcagcggcacaagctcttgaacatccttggatcagaggaggagaagcaccggacaagcctattgatagtgctgttttatctcggatgaagcaattccgagcaatgaataagcttaaaaagctagctctaaaggttattgcagagagtctctcggaagaggaaattaaaggtcttaaaaccatgtttgcgaatatggatactgacaaaagcggcacaatcacttatgaagaactgaaaaacgggctagctaaacttggctctaaactcactgaagctgaagtgaagcaactcatggaagccgctgatgtagatggtaatggaacaattgactacatcgaatttatctcagcaacgatgcatagatacagatttgatcgagatgaacacgtattcaaagccttccaatacttcgacaaagacaacagcgggtttatcacaatggatgagttggagtcagccatgaaagagtatggtatgggagatgaagctagcatcaaagaagtcatagcggaagtcgatacagataacgatggaagaataaactatgaagaattttgtgcgatgatgagaagtggtatcacactgccacaacaagggaaaattcttccagtccaatga

SEQ ID NO: 2009 - protein, 554 aa, Arabidopsis thaliana
MGCFSSKHRNTESDIINGSVQSSIPTNQPENHVSRDVLKPQKPPSPQIPTTTQSNHHHQQESKPVNQQIEKKHVLTQPLKPIVFRETETILGKPFEEIRKLYTLGKELGRGQFGITYTCKENSTGNTYACKSILKRKLTRKQDIDDVKREIQIMQYLSGQENIVEIKGAYEDRQSIHLVMELCGGSELFDRIIAQGHYSEKAAAGVIRSVLNVVQICHFMGVIHRDLKPENFLLASTDENAMLKATDFGLSVFIEEGKVYRDIVGSAYYVAPEVLRRSYGKEIDIWSAGIILYILLCGVPPFWSETEKGIFNEIIKGEIDFDSQPWPSISESAKDLVRKLLTKDPKQRISAAQALEHPWIRGGEAPDKPIDSAVLSRMKQFRAMNKLKKLALKVIAESLSEEEIKGLKTMFANMDTDKSGTITYEELKNGLAKLGSKLTEAEVKQLMEAADVDGNGTIDYIEFISATMHRYRFDRDEHVFKAFQYFDKDNSGFITMDELESAMKEYGMGDEASIKEVIAEVDTDNDGRINYEEFCAMMRSGITLPQQGKILPVQ

SEQ ID NO: 2010 - DNA, 1590 bp, Arabidopsis thaliana
  CDS (1)..(1590)
atgggccacagacacagcaagtccaaatcctccgatccgccaccgtcctcctcctcctcttcctccggcaacgtagtccaccatgttaaacctgccggagaacgccgcggatcatccggttccggaaccgtcggatcgtcaggctccggaacaggcggatctcgttccaccacatctactcagcagaatggtcggatcttaggtcggccgatggaggaagtacggagaacctatgagtttggtcgtgagcttggtcgtggccagtttggtgtcacgtacctcgtaactcacaaagagacgaaacaacaggtcgcttgcaagtcaatccctacgcgccgccttgttcacaaagacgacattgaagatgttcgccgtgaagtccagattatgcaccatctcagcggtcaccggaacatagtggacttgaagggagcctacgaggacagacactctgtgaatctgataatggagttgtgtgaaggaggggaattgttcgataggatcatttctaaaggtctttactcagagagagctgctgcggatttgtgtaggcagatggtgatggttgtgcatagttgtcattctatgggtgtaatgcaccgagacttgaagcccgaaaactttctctttcttagtaaagatgagaactcaccattgaaagctacagactttggtctctctgtcttcttcaagccaggtgataagtttaaggatcttgttggaagtgcatactatgttgccccagaagttctaaaacggaactatggaccagaggctgatatctggagtgctggtgtgattctatacatccttctcagtggtgttccgcctttctggggagaaaatgaaacggggatctttgatgccattcttcaagggcaacttgatttttcagctgatccatggccagcactatcagatggtgccaaagatcttgtgaggaaaatgttaaaatatgaccctaaagatcggcttacagctgcggaagtgctaaatcatccgtggattagagaagatggggaggcatcagacaaaccgcttgacaatgcggtgttatccaggatgaaacaattccgggcgatgaacaaactaaaaaaaatggccctgaaggttatcgctgagaacctttctgaagaagaaatcattggtcttaaagagatgttcaaatctctagacactgataacaatggaatagtcaccttggaggaattgagaaccggtctcccaaaacttggttcaaagatctctgaagctgaaataaggcagttaatggaagcagctgatatggatggagatggatcaattgattacttggagtttatatcagccacaatgcatatgaacagaatcgaacgtgaggatcacttgtacaccgcattccagttctttgacaatgacaacagcggctacataacaatggaagagctagagctagccatgaagaaatacaacatgggtgatgataaatccatcaaagagatcattgctgaagtagacaccgatcgtgacggaaaaatcaactacgaagaatttgtagcgatgatgaagaagggaaatccagaattggtgccaaaccgacgcagaatgtga

SEQ ID NO: 2011 - protein, 529 aa, Arabidopsis thaliana
MGHRHSKSKSSDPPPSSSSSSSGNVVHHVKPAGERRGSSGSGTVGSSGSGTGGSRSTTSTQQNGRILGRPMEEVRRTYEFGRELGRGQFGVTYLVTHKETKQQVACKSIPTRRLVHKDDIEDVRREVQIMHHLSGHRNIVDLKGAYEDRHSVNLIMELCEGGELFDRIISKGLYSERAAADLCRQMVMVVHSCHSMGVMHRDLKPENFLFLSKDENSPLKATDFGLSVFFKPGDKFKDLVGSAYYVAPEVLKRNYGPEADIWSAGVILYILLSGVPPFWGENETGIFDAILQGQLDFSADPWPALSDGAKDLVRKMLKYDPKDRLTAAEVLNHPWIREDGEASDKPLDNAVLSRMKQFRAMNKLKKMALKVIAENLSEEEIIGLKEMFKSLDTDNNGIVTLEELRTGLPKLGSKISEAEIRQLMEAADMDGDGSIDYLEFISATMHMNRIEREDHLYTAFQFFDNDNSGYITMEELELAMKKYNMGDDKSIKEIIAEVDTDRDGKINYEEFVAMMKKGNPELVPNRRRM

SEQ ID NO: 2012 - DNA, 1605 bp, Arabidopsis thaliana
  CDS (1)..(1605)
atgggtctctgtttctcgtctcctaaagccaccagacgtggcaccggtagtcggaaccctaatcctgattctccgacgcaggggaaggcgagtgagaaggttagtaataaaaacaagaagaatacgaagaagatccaattgaggcaccaaggagggatcccgtacggtaaacgcatcgattttgggtacgctaaggatttcgataaccgatacaccattgggaaattgctcggacatggccagtttggctttacctacgtcgccaccgataacaacaatggcaatcgcgttgcagtcaagagaatcgacaaggccaagatgactcaaccgattgaagtggaagatgtgaagcgagaggttaagatactacaagctttaggtgggcatgagaatgtggtaggctttcacaatgcatttgaggacaagacctatatttacattgtcatggagttatgtgacggtggtgaattgctagatcgaatactagctaagaaagatagccgttacaccgagaaagatgcagcggttgtggtgagacaaatgctgaaagttgcagctgaatgtcatttacgaggtctagttcaccgcgacatgaagccagagaattttctgttcaaatcaaccgaagaaggttcatctctaaaggctacagattttggtctgtcggacttcataaagccaggagtgaaatttcaggatatagtaggaagcgcatactacgttgcacctgaagtgttgaaacgtaggtcaggacctgaatcagacgtttggagtattggtgtcatcacttacattctgctctgcgggagaagacccttctgggataagactcaagacggaatattcaatgaggtcatgaggaaaaaacctgatttcagagaagtcccatggccaaccattagcaacggtgccaaagatttcgtgaagaagttgttagttaaggagcctcgggcacggttaacagcagctcaagcgctatcacattcatgggtgaaagaaggaggtgaggcctcagaggttccaatagacatatctgttcttaacaatatgcgtcagtttgtgaaattcagccgtctgaagcagattgcacttagggctctggcgaaaacaattaatgaggatgagctggatgatctcagagaccagtttgatgcgattgacattgacaagaacggttctataagccttgaggaaatgaggcaggctcttgcgaaagatgttccttggaaactcaaagatgcaagagttgcagagattctccaagcgaatgatagcaacactgatggtttggtggatttcactgagtttgtggtggctgctttgcacgtgaaccaattggaggagcatgactctgagaagtggcaacagaggtcaagagcagcatttgacaagtttgacatagacggagatgggtttataactcccgaagaacttagattgcaaacgggtttaaaaggctccatcgaaccacttcttgaagaggccgacgtagatgaagatgggagaatcagcatcaatgagtttcgcagacttttgagaagtgcaagcctcaagtcaaaaaatgttaaaagccctcctggttaccagctttcacaaaagatgtaa

SEQ ID NO: 2013 - protein, 534 aa, Arabidopsis thaliana
MGLCFSSPKATRRGTGSRNPNPDSPTQGKASEKVSNKNKKNTKKIQLRHQGGIPYGKRIDFGYAKDFDNRYTIGKLLGHGQFGFTYVATDNNNGNRVAVKRIDKAKMTQPIEVEDVKREVKILQALGGHENVVGFHNAFEDKTYIYIVMELCDGGELLDRILAKKDSRYTEKDAAVVVRQMLKVAAECHLRGLVHRDMKPENFLFKSTEEGSSLKATDFGLSDFIKPGVKFQDIVGSAYYVAPEVLKRRSGPESDVWSIGVITYILLCGRRPFWDKTQDGIFNEVMRKKPDFREVPWPTISNGAKDFVKKLLVKEPRARLTAAQALSHSWVKEGGEASEVPIDISVLNNMRQFVKFSRLKQIALRALAKTINEDELDDLRDQFDAIDIDKNGSISLEEMRQALAKDVPWKLKDARVAEILQANDSNTDGLVDFTEFVVAALHVNQLEEHDSEKWQQRSRAAFDKFDIDGDGFITPEELRLQTGLKGSIEPLLEEADVDEDGRISINEFRRLLRSASLKSKNVKSPPGYQLSQKM

SEQ ID NO: 2014 - DNA, 1587 bp, Arabidopsis thaliana
  CDS (1)..(1587)
atgggaaattgttgctctcacggacgggactcagccgataacggagacgcattggaaaacggagcttccgcttcaaatgctgccaattcgactggtccaaccgcggaagcttctgtaccacaatcaaaacatgcacctccttctcctcctcctgcaaccaaacaaggccctataggccctgtcttaggtcgacccatggaagatgtaaaagcttcatattctttagggaaagagctcgggcgaggccaatttggtgtcacacacctctgcacacagaaggcaacaggtcatcaatttgcttgcaagacgattgcaaaaagaaagcttgtaaacaaggaagacattgaggatgtaagaagagaagtgcagataatgcatcacttgactggtcaaccaaacattgtggagcttaaaggggcttatgaggataagcattccgtgcatttggttatggagctttgcgcaggtggagagttgttcgataggattattgctaaaggacattactcggagagagcagctgcttcgttgctaagaacgattgttcagattgtgcatacttgccattccatgggggtgattcacagggatttgaagccagagaactttctcttgctcaacaaagatgagaattctcctctcaaagctactgactttgggttgtcggttttctacaagccaggagaggtattcaaggatattgtggggagtgcttattacatcgcacctgaggttttgaaaagaaagtatggaccagaggcagatatttggagtattggtgtcatgttgtatatcctcttatgtggtgtcccgccattctgggctgagtcggagaacgggatattcaacgcaatccttaggggacatgttgatttctcaagtgatccatggccatccatctcgcctcaggcaaaggatcttgttaagaagatgctcaactctgatccaaagcaaagactaactgctgctcaagttctcaaccatccatggatcaaggaggatggagaggcaccagatgttcctcttgataatgcggtgatgtccaggctcaaacaattcaaagcaatgaacaatttcaagaaagttgcattacgggtgatagcaggctgcttatcagaggaagagatcatggggttgaaggagatgtttaaaggtatggatactgatagtagtggaacaattacactcgaggagttaagacaaggacttgctaagcaaggtacaaggttgtcagaatatgaagttcagcagttaatggaagctgctgatgctgatggtaatggaacaatagactatggcgagtttatcgcagccacaatgcatatcaacagacttgacagagaagaacatctttactcagccttccaacactttgacaaagacaacagtggatatatcacaatggaagagctagagcaagccctacgggagtttggcatgaatgatggcagagacattaaggagatcatttccgaggttgatggagacaatgatggtcggataaactatgatgaatttgtggcaatgatgagaaaaggaaacccggatccaatcccaaagaagcggcgtgaactttcattcaaatga

SEQ ID NO: 2015 - protein, 528 aa, Arabidopsis thaliana
MGNCCSHGRDSADNGDALENGASASNAANSTGPTAEASVPQSKHAPPSPPPATKQGPIGPVLGRPMEDVKASYSLGKELGRGQFGVTHLCTQKATGHQFACKTIAKRKLVNKEDIEDVRREVQIMHHLTGQPNIVELKGAYEDKHSVHLVMELCAGGELFDRIIAKGHYSERAAASLLRTIVQIVHTCHSMGVIHRDLKPENFLLLNKDENSPLKATDFGLSVFYKPGEVFKDIVGSAYYIAPEVLKRKYGPEADIWSIGVMLYILLCGVPPFWAESENGIFNAILRGHVDFSSDPWPSISPQAKDLVKKMLNSDPKQRLTAAQVLNHPWIKEDGEAPDVPLDNAVMSRLKQFKAMNNFKKVALRVIAGCLSEEEIMGLKEMFKGMDTDSSGTITLEELRQGLAKQGTRLSEYEVQQLMEAADADGNGTIDYGEFIAATMHINRLDREEHLYSAFQHFDKDNSGYITMEELEQALREFGMNDGRDIKEIISEVDGDNDGRINYDEFVAMMRKGNPDPIPKKRRELSFK

SEQ ID NO: 2016 - DNA, 1572 bp, Arabidopsis thaliana
  CDS (1)..(1572)
atgggaaattgttgctctcatggaagagattcagatgataacaaagaagaaccgaggccggaaaatggaggcggcggtgttggtgccgctgaagcctctgttagagcttctaaacacccgccagcatctcctcctcctgcaaccaaacaaggaccaataggacctgtcttagggcgaccaatggaagatgtaaagagctcatatacattgggtaaggagctaggtcgtggacagtttggggtgactcatctctgcacgcaaaaggccacggggctgcaattcgcttgcaagaccattgctaaaaggaagctcgtgaacaaagaagacattgaggatgtgagaagggaggtgcagattatgcatcacttgaccggtcagccaaacattgtggagcttaaaggagcgtatgaggataagcattctgtgcatttggttatggagctttgcgcgggaggtgagttgttcgacaggattatcgcaaagggacattattcggagagagctgcagcctcgttactacggacgattgtgcagattatccatacttgccattccatgggggttatccacagggacttgaagcctgagaactttttgttgcttagcaaggatgagaattctcctctgaaagccaccgacttcgggttatccgtgttctacaaaccaggagaggtgttcaaagacattgtgggaagtgcttattacattgcaccagaggtgttgaggaggaagtatggaccagaggctgatatttggagcattggtgtcatgttgtatatcctcctgtgtggtgttccacctttttgggctgagtcagagaatgggattttcaatgccatcctaagtggacaggttgatttttcaagcgatccatggccagtcatctcaccacaggcaaaagacctcgttaggaagatgctcaactctgatccaaaacaaagattaaccgctgctcaagttctcaatcatccatggatcaaggaggatggagaagcaccggatgttcctcttgacaatgcagtgatgtctaggctcaagcagttcaaagcaatgaacaactttaagaaagttgctttacgggtgatagccgggtgcttatcagaggaagaaatcatggggttaaaagagatgttcaaaggaatggacactgacaacagtggaaccataactcttgaggaactaagacagggacttgctaagcaaggtacaaggttatccgaatacgaagtccagcaactaatggaagctgctgatgcggacggtaatggaacaatagactatggggagttcattgcagctacaatgcacatcaacaggctcgacagagaagagcatctctactcagccttccaacactttgacaaagacaacagtggatatatcacaacggaagagctagagcaagcccttcgggagtttggcatgaacgatggcagagacattaaggaaatcatttctgaggttgatggagacaatgatgggcggataaactacgaggaatttgtggcgatgatgagaaaaggaaacccagatcctaatcctaagaagcggcgtgaactatcattcaaatga

SEQ ID NO: 2017 - protein, 523 aa, Arabidopsis thaliana
MGNCCSHGRDSDDNKEEPRPENGGGGVGAAEASVRASKHPPASPPPATKQGPIGPVLGRPMEDVKSSYTLGKELGRGQFGVTHLCTQKATGLQFACKTIAKRKLVNKEDIEDVRREVQIMHHLTGQPNIVELKGAYEDKHSVHLVMELCAGGELFDRIIAKGHYSERAAASLLRTIVQIIHTCHSMGVIHRDLKPENFLLLSKDENSPLKATDFGLSVFYKPGEVFKDIVGSAYYIAPEVLRRKYGPEADIWSIGVMLYILLCGVPPFWAESENGIFNAILSGQVDFSSDPWPVISPQAKDLVRKMLNSDPKQRLTAAQVLNHPWIKEDGEAPDVPLDNAVMSRLKQFKAMNNFKKVALRVIAGCLSEEEIMGLKEMFKGMDTDNSGTITLEELRQGLAKQGTRLSEYEVQQLMEAADADGNGTIDYGEFIAATMHINRLDREEHLYSAFQHFDKDNSGYITTEELEQALREFGMNDGRDIKEIISEVDGDNDGRINYEEFVAMMRKGNPDPNPKKRRELSFK

SEQ ID NO: 2018 - DNA, 1473 bp, Arabidopsis thaliana
  CDS (1)..(1473)
atggcgaacaaaccaagaaccagatgggttcttccttacaagaccaaaaacgttgaagacaattactttcttggtcaagtccttggacaaggccaattcggaaccactttcctctgtacccataaacagacaggtcaaaagcttgcctgcaaatccatacccaaaaggaagctcctttgtcaagaagattacgacgacgttctgagagagatccagataatgcatcacttgtctgaataccccaacgttgtccgtatagagagtgcgtacgaggacaccaaaaacgtgcatcttgtgatggagctttgtgaaggaggtgagttgtttgatagaattgtgaagagaggtcattacagtgaaagagaagctgctaagcttatcaagaccattgttggggttgttgaggcgtgtcactctcttggtgttgttcatagagatcttaagcctgagaatttcttgttttcttcttctgatgaagatgcttctcttaaatctactgactttggcctctctgttttctgcacaccaggagaagcattttcggaactcgttggtagtgcttactatgtggcacctgaggttttacataagcattatggtcctgaatgtgacgtatggagtgctggagttatcctctacattctcttatgtggttttcctcctttttgggctgagagtgaaataggcatcttcaggaagattttacagggaaagttggagtttgagatcaatccttggcctagcatttcagagagtgccaaagatcttataaagaaaatgcttgaaagcaatcctaaaaagaggctaactgctcatcaagtgttgtgtcatccgtggattgtggatgataaggttgctccagataaacctttggactgcgcggtagtgtcccgcctgaagaagttctctgcaatgaacaaacttaagaagatggctttacgagttattgcagagagactatctgaggaagaaatcggtggtctcaaagaactgttcaaaatgatagacacagataaaagtgggactatcacgtttgaagagttaaaagatagtatgagacgtgttgggtcagagcttatggaatcagagatccaagaactcttgcgtgcggctgatgttgatgagagtggaacaattgactatggagagttcttagctgcaacaatccacttgaacaagctggagagagaggagaatctagtagctgcattctctttctttgataaggatgcaagtggttacatcactatcgaagagcttcaacaggcatggaaggagtttggtataaacgattctaatcttgatgaaatgatcaaagacattgatcaagataatgatggacaaatagactatggagaatttgtggcaatgatgaggaaaggaaatggcactggaggagggattggtcggagaactatgaggaactctctcaactttggaactactcttcctgatgagtctatgaatgtctga

SEQ ID NO: 2019 - protein, 490 aa, Arabidopsis thaliana
MANKPRTRWVLPYKTKNVEDNYFLGQVLGQGQFGTTFLCTHKQTGQKLACKSIPKRKLLCQEDYDDVLREIQIMHHLSEYPNVVRIESAYEDTKNVHLVMELCEGGELFDRIVKRGHYSEREAAKLIKTIVGVVEACHSLGVVHRDLKPENFLFSSSDEDASLKSTDFGLSVFCTPGEAFSELVGSAYYVAPEVLHKHYGPECDVWSAGVILYILLCGFPPFWAESEIGIFRKILQGKLEFEINPWPSISESAKDLIKKMLESNPKKRLTAHQVLCHPWIVDDKVAPDKPLDCAVVSRLKKFSAMNKLKKMALRVIAERLSEEEIGGLKELFKMIDTDKSGTITFEELKDSMRRVGSELMESEIQELLRAADVDESGTIDYGEFLAATIHLNKLEREENLVAAFSFFDKDASGYITIEELQQAWKEFGINDSNLDEMIKDIDQDNDGQIDYGEFVAMMRKGNGTGGGIGRRTMRNSLNFGTTLPDESMNV

SEQ ID NO: 2020 - DNA, 1785 bp, Arabidopsis thaliana
  CDS (1)..(1785)
atgggtcattgttacagccggaacatctccgccgtcgaggacgacgagatccccaccggtaacggcgaggtttcgaatcaaccatctcaaaatcaccggcatgcttcgattcctcagtctccggttgcttctggtactcctgaagtcaactcatataacattagccctttccaaagcccgttaccggcgggagtagctccatcaccggcgagaactccgggacggaagttcaaatggccgtttcctccaccgtcacctgcgaaaccgattatggcggctttgagacgacgacgtggcgctccgcctcagcctcgagatgagccgatcccggaggatagtgaagatgtagtagatcacggtggtgacagtggcggcggagagaggttagataagaatttcgggtttgggaagaacttcgaagggaagtatgagttagggaaagaagtagggcgagggcattttggtcatacttgttgggcaaaagcgaagaaaggcaagatgaagaaccaaaccgtggctgtcaaaatcatctctaaagctaagatgacgtcgacgttatctattgaagatgttcgtagagaagtgaaattgctgaaagctttatcagggcataggcatatggttaagttctatgatgtatatgaggatgctgataatgtctttgttgttatggagttatgcgaaggtggagagctattggatagaattttggcgagaggtggacgataccctgaagtcgatgccaaacgtattcttgtgcagattttgtctgcaacagcattttttcaccttcaaggtgtcgtgcaccgtgatctgaagccggagaattttctctttaccagcagaaatgaggatgcgatactcaaggtcatagattttggcttgtctgatttcattagatacgatcagcgtctcaatgatgttgtaggaagtgcatactatgttgcacctgaagtactccataggtcttacagcactgaagcagatatgtggagcatcggtgtcataagttacatacttctctgtggaagcagacctttctatggaagaactgagtctgcaatattccgttgtgtgcttagagcaaaccctaattttgaggatatgccttggccttctatatctcctactgccaaagacttcgtgaaaaggcttttgaacaaggaccataggaaacgaatgacagctgctcaagctctagctcatccgtggttacgtgacgaaaaccccggtttgcttcttgatttctcggtctacaagttggtcaagtcctatatccgtgcctcacctttccgacgatcagcacttaaggctctctcgaaagctatacctgatgaagaacttgtgttccttaaggcacagttcatgctcctggatcctaaagacggaggcctatcccttaactgtttcacaatggctttaacaagatatgctactgatgctatgatggaatcaaggcttcctgacattttaaatacgatgcaacctctggcgcaaaagaagcttgactttgaagagttctgtgcggctgcggtcagtgtttaccaactggaggctcttgaagaatgggaacagattgcaacttcagcatttgagcactttgaacatgaaggaaaccgaatcatatctgtccaagaactcgccggggagatgagcgtgggaccgagtgcatatcctctgctcaaggattggatccgaagttcggatggaaagctgagtttcttggggtacgctaagttcttgcatggtgtgaccgtacgaagctcaagctcgagacctaggtga

SEQ ID NO: 2021 - protein, 594 aa, Arabidopsis thaliana
MGHCYSRNISAVEDDEIPTGNGEVSNQPSQNHRHASIPQSPVASGTPEVNSYNISPFQSPLPAGVAPSPARTPGRKFKWPFPPPSPAKPIMAALRRRRGAPPQPRDEPIPEDSEDVVDHGGDSGGGERLDKNFGFGKNFEGKYELGKEVGRGHFGHTCWAKAKKGKMKNQTVAVKIISKAKMTSTLSIEDVRREVKLLKALSGHRHMVKFYDVYEDADNVFVVMELCEGGELLDRILARGGRYPEVDAKRILVQILSATAFFHLQGVVHRDLKPENFLFTSRNEDAILKVIDFGLSDFIRYDQRLNDVVGSAYYVAPEVLHRSYSTEADMWSIGVISYILLCGSRPFYGRTESAIFRCVLRANPNFEDMPWPSISPTAKDFVKRLLNKDHRKRMTAAQALAHPWLRDENPGLLLDFSVYKLVKSYIRASPFRRSALKALSKAIPDEELVFLKAQFMLLDPKDGGLSLNCFTMALTRYATDAMMESRLPDILNTMQPLAQKKLDFEEFCAAAVSVYQLEALEEWEQIATSAFEHFEHEGNRIISVQELAGEMSVGPSAYPLLKDWIRSSDGKLSFLGYAKFLHGVTVRSSSSRPR

SEQ ID NO: 2022 - DNA, 1572 bp, Arabidopsis thaliana
  CDS (1)..(1572)
atgggtgtctgtttctccgccattagagtcactggtgctagcagcagtagacgaagcagtcagaccaaatccaaggctgctcctactcccatcgataccaaggcctctaccaaacgccgaaccggctccatcccctgcggcaagcgtaccgattttggctactccaaagacttccacgatcactacaccatcggcaagttgctcggccatggtcaattcggctacacctacgtcgccatccacagacccaatggagatcgcgtcgccgtcaaaagactcgataagtctaagatggttcttcctattgctgttgaggatgtcaagcgtgaggttcagattcttattgctctctctggccacgagaatgttgttcagtttcacaatgcctttgaggatgacgattacgtctatattgttatggagttgtgcgaaggaggcgaattgctggataggatattatccaagaaaggtaatcggtactccgagaaagatgcagccgttgtcgttaggcagatgctcaaagttgcaggagaatgtcatctacacggtcttgtacatagagatatgaaaccagagaactttttgttcaaatcagctcaactagattcgcctctaaaggctacggattttggtttatcggattttatcaaaccagggaaaaggttccatgacattgttggtagcgcctattatgtggctcctgaggtattaaagcgcagatcagggcctgaatcagatgtatggagcattggtgtgattacgtatatattactttgtgggaggcggcctttttgggatagaactgaagatggtatatttaaagaggttttaagaaataaacctgacttcagccgtaaaccttgggcaactataagtgacagcgccaaagattttgtgaaaaagttacttgtaaaagacccacgagcacggctaactgctgcacaagcactatcacatgcgtgggttagagaaggcgggaatgctactgatatccctgtcgacatttcagttctgaacaacttaagacaatttgtgagatacagccgtctaaagcaatttgctttaagggcgcttgctagcacacttgacgaggcagagatctctgacctcagagatcaatttgatgcgattgatgtggataaaaatggcgtcattagtcttgaagagatgagacaggcacttgccaaagatcttccttggaaactgaaagactcacgagttgctgagatccttgaagcgattgatagcaacactgatgggttagtggacttcacagagtttgtagcagcagctctacatgttcatcaactagaagaacatgattcagagaaatggcagctaaggtcaagagcagcttttgagaaattcgacctagacaaagacgggtacataacgcctgaggaacttcgaatgcacacggggttaagaggatcaatagatccactgctggatgaagcagacatagacagagatgggaaaataagcctgcatgagttcaggagacttctaagaacagcgagcataagttcacagagagcaccaagccctgcaggtcacaggaatcttcgatag

SEQ ID NO: 2023 - protein, 523 aa, Arabidopsis thaliana
MGVCFSAIRVTGASSSRRSSQTKSKAAPTPIDTKASTKRRTGSIPCGKRTDFGYSKDFHDHYTIGKLLGHGQFGYTYVAIHRPNGDRVAVKRLDKSKMVLPIAVEDVKREVQILIALSGHENVVQFHNAFEDDDYVYIVMELCEGGELLDRILSKKGNRYSEKDAAVVVRQMLKVAGECHLHGLVHRDMKPENFLFKSAQLDSPLKATDFGLSDFIKPGKRFHDIVGSAYYVAPEVLKRRSGPESDVWSIGVITYILLCGRRPFWDRTEDGIFKEVLRNKPDFSRKPWATISDSAKDFVKKLLVKDPRARLTAAQALSHAWVREGGNATDIPVDISVLNNLRQFVRYSRLKQFALRALASTLDEAEISDLRDQFDAIDVDKNGVISLEEMRQALAKDLPWKLKDSRVAEILEAIDSNTDGLVDFTEFVAAALHVHQLEEHDSEKWQLRSRAAFEKFDLDKDGYITPEELRMHTGLRGSIDPLLDEADIDRDGKISLHEFRRLLRTASISSQRAPSPAGHRNLR

SEQ ID NO: 2024 - DNA, 1638 bp, Arabidopsis thaliana
  CDS (1)..(1638)
atgggtaactgtaacgcctgtgtaaggccagactcaaaagaatcaaaaccatcttcaaagccgaaaaaacccaatcgagatcggaaattaaacccattcgccggagatttcaccagatccccagctccaatacgtgttctcaaagatgtaatccctatgagcaatcaaactcagatcagcgacaaatacatcttaggtcgtgaattaggtcgaggcgaattcggaatcacttacctctgtactgatcgtgaaacccacgaagctttagcttgcaaatcgatttcaaagcgaaagcttcgaacagctgtcgatatcgaagacgttcgtcgtgaggtagcgattatgtctactttacctgagcatccaaacgtagttaagcttaaggctagttatgaggataacgagaacgtgcatctggttatggagctttgtgaaggaggtgagctttttgatcggattgttgctagaggacattacacggagcgtgctgctgcagctgttgcgagaacgattgctgaggttgtgatgatgtgtcactctaatggagttatgcatcgagatttgaaacctgagaatttcttgtttgctaataaaaaggagaattctccactaaaggctattgattttggcttgtctgtgttcttcaaacctggagataagtttacagagattgtaggaagtccgtattatatggctccagaagtgttgaagagagattatggaccaggggttgatgtgtggagtgccggagttattatctatatcttgctctgtggtgttcctccgttttgggctgagactgaacaaggtgttgctcttgcgatcttgcggggagttcttgattttaagagagacccttggcctcagatatcagagagtgccaagagccttgtgaagcagatgttggatcctgatccgactaagcggttaactgctcagcaagtgttagctcacccatggatacagaatgcaaagaaagctcccaatgttcctttaggagatatagtcagatctaggttgaagcagttctctatgatgaacagattcaaaaagaaagttcttcgtgtaattgcggagcacttgtctattcaagaggttgaagtgataaagaacatgttctcactgatggatgatgacaaggatggtaaaataacttacccggaactcaaagctgggcttcagaaggtcggttcacaacttggtgaaccagagatcaaaatgttgatggaagtggcggatgtcgatggaaatgggtttctggattatggagagtttgtagctgtgataattcacttgcagaagatagagaatgatgaacttttcaaactagcttttatgtttttcgacaaagatggaagtacatacattgaacttgatgagctacgggaagctttagcggatgagttaggcgagccagacgccagtgttctaagcgacatcatgcgtgaagttgacactgacaaggacggacgtataaactatgatgagtttgtgacgatgatgaaagctggaactgactggagaaaggcatcgagacaatattcaagagagaggttcaaaagcttaagcattaacttgatgaaagatgggtcattgcatctccatgacgctctcactggacaaactgttcctgtttaa

SEQ ID NO: 2025 - protein, 545 aa, Arabidopsis thaliana
MGNCNACVRPDSKESKPSSKPKKPNRDRKLNPFAGDFTRSPAPIRVLKDVIPMSNQTQISDKYILGRELGRGEFGITYLCTDRETHEALACKSISKRKLRTAVDIEDVRREVAIMSTLPEHPNVVKLKASYEDNENVHLVMELCEGGELFDRIVARGHYTERAAAAVARTIAEVVMMCHSNGVMHRDLKPENFLFANKKENSPLKAIDFGLSVFFKPGDKFTEIVGSPYYMAPEVLKRDYGPGVDVWSAGVIIYILLCGVPPFWAETEQGVALAILRGVLDFKRDPWPQISESAKSLVKQMLDPDPTKRLTAQQVLAHPWIQNAKKAPNVPLGDIVRSRLKQFSMMNRFKKKVLRVIAEHLSIQEVEVIKNMFSLMDDDKDGKITYPELKAGLQKVGSQLGEPEIKMLMEVADVDGNGFLDYGEFVAVIIHLQKIENDELFKLAFMFFDKDGSTYIELDELREALADELGEPDASVLSDIMREVDTDKDGRINYDEFVTMMKAGTDWRKASRQYSRERFKSLSINLMKDGSLHLHDALTGQTVPV

SEQ ID NO: 2026 - DNA, 1635 bp, Arabidopsis thaliana
  CDS (1)..(1635)
atgggcaattcatgtcgtggttcttttaaggacaaaatctacgagggcaatcatagtaggcccgaggagaattccaaatccaccaccactactgtttcctctgttcattctcctactacagaccaagatttctccaaacagaacaccaatccagctcttgtgattcctgttaaagaacccattatgcggcgtaacgttgacaatcaatcttactatgttcttggtcacaagactcctaacattcgtgatctttacacgttgagtcgtaagttaggacaaggacaattcgggacaacgtatttgtgtactgatattgccacaggtgttgactatgcttgtaagtctatatccaagaggaaattgatatctaaagaagatgttgaggatgttaggagggagattcagattatgcatcatttagctggtcacaagaatattgttactattaaaggagcttatgaggatcctttgtatgttcacattgtgatggagctttgtgctggtggtgagttgtttgataggattattcatagaggtcattacagcgagaggaaagctgctgagttgaccaagatcattgtcggtgttgttgaggcgtgtcattctcttggtgttatgcatagagatttaaagcctgagaatttcttgttggttaataaggatgatgatttctctcttaaggccattgattttggtctctctgttttcttcaaaccaggccaaatattcaaggatgttgttggaagtccatactatgttgctcctgaggttcttctaaaacattatggtccagaagctgatgtgtggactgctggtgttatactctatatcttactaagtggtgtcccgcctttctgggcagaaacacagcaaggaatatttgatgctgtgttgaagggatatattgactttgatacagacccgtggcctgtcatatccgacagtgctaaagatctgatccggaagatgttatgctctagtccttctgaacgtttgactgctcatgaagtcttgcgtcatccatggatctgtgagaatggagttgcaccggatagagcacttgacccggctgttttgtctcgtctaaaacagttttctgcaatgaataaattaaagaagatggctttaaaggtgatagctgagagcctctcagaagaagagattgcgggtttaagagcaatgtttgaggcaatggatactgataacagcggtgcaatcacttttgatgaactcaaagctggcttgagaagatatggatcaaccttgaaagacaccgagatccgagatcttatggaagcggctgatgtggacaacagcggtacaatagattacagcgagtttattgcagcgacgatccatctgaataaactagagagagaagagcatcttgtctctgcatttcagtactttgacaaagatggaagtggttacatcaccattgatgagctgcaacaatcttgcattgaacatgggatgaccgatgtttttcttgaagacataatcaaagaagtagatcaagacaacgatggacggattgattacgaagaatttgttgcgatgatgcaaaagggaaatgctggtgtagggagaagaacaatgaaaaatagtctaaacatcagcatgagagatgtgtag

SEQ ID NO: 2027 - protein, 544 aa, Arabidopsis thaliana
MGNSCRGSFKDKIYEGNHSRPEENSKSTTTTVSSVHSPTTDQDFSKQNTNPALVIPVKEPIMRRNVDNQSYYVLGHKTPNIRDLYTLSRKLGQGQFGTTYLCTDIATGVDYACKSISKRKLISKEDVEDVRREIQIMHHLAGHKNIVTIKGAYEDPLYVHIVMELCAGGELFDRIIHRGHYSERKAAELTKIIVGVVEACHSLGVMHRDLKPENFLLVNKDDDFSLKAIDFGLSVFFKPGQIFKDVVGSPYYVAPEVLLKHYGPEADVWTAGVILYILLSGVPPFWAETQQGIFDAVLKGYIDFDTDPWPVISDSAKDLIRKMLCSSPSERLTAHEVLRHPWICENGVAPDRALDPAVLSRLKQFSAMNKLKKMALKVIAESLSEEEIAGLRAMFEAMDTDNSGAITFDELKAGLRRYGSTLKDTEIRDLMEAADVDNSGTIDYSEFIAATIHLNKLEREEHLVSAFQYFDKDGSGYITIDELQQSCIEHGMTDVFLEDIIKEVDQDNDGRIDYEEFVAMMQKGNAGVGRRTMKNSLNISMRDV

SEQ ID NO: 2028 - DNA, 1608 bp, Arabidopsis thaliana
  CDS (1)..(1608)
atggggaattgttgtggcaatccgagttcggctacgaaccagagtaaacaagggaaacccaagaacaaaaacaatcctttttacagcaatgaatacgctacaacagatagatctggagctggttttaagctctctgtgctgaaagatcctacaggacatgatatatccttgcagtatgatcttggacgtgaggttggtcgaggcgagtttggtataacttacttgtgtactgataaggaaactggtgagaagtatgcctgcaagtccatatctaagaagaagctgagaacagcagttgatatagaggatgttaggagggaggttgagattatgaagcatatgcctaaacacccaaatgtcgtctctttgaaggattcctttgaggatgatgatgcggtgcatatagttatggagttgtgtgaaggaggggaactgtttgatcggattgttgcaagaggtcattacactgagcgggctgctgctgcggttatgaagactattgttgaagttgttcagatatgccataagcaaggagtgatgcatcgggatctcaaaccagagaactttctttttgcaaataagaaagagacatcagcccttaaggccattgattttggattatctgtattcttcaaacctggtgagcagtttaatgagattgttggaagtccttattacatggcacccgaggtgctgcggcgaaactatggtcctgagatcgatgtgtggagcgctggagttatcctctatatcctactttgtggtgttccgccattttgggcagagactgagcaaggggtggctcaagcgatcattagatcagttattgactttaagagagatccatggccaagagtttctgacagcgccaaagaccttgtgagaaagatgcttgaacctgatcccaaaaaacggcttactgctgcacaagttctcgaacatacttggatactgaatgcaaagaaggctccaaatgtctctcttggggagactgtgaaagcaagactaaagcagttttctgttatgaacaagctcaagaaacgagctctacgagtgatagctgaacatttgtcagtggaggaagcagcagggataaaggaagcatttgaaatgatggacgtaaacaagagaggcaagataaatctcgaggagcttaaatatggacttcaaaaagctggacaacagatagctgatactgatcttcaaattcttatggaagctactgatgttgatggggatgggacactgaactatagcgagtttgttgctgtttcagtccaccttaagaagatggcgaatgatgaacacttgcataaagcttttaacttctttgatcagaaccagagtggttacatagagattgacgaacttcgtgaagccttgaatgatgaattggataatactagcagtgaggaagtaatcgcagccatcatgcaagatgttgataccgacaaggatggacgaataagctatgaagagtttgttgcgatgatgaaagctgggacagattggagaaaagcgtcaagacagtattctcgggaaagattcaacagtttaagcctcaagttaatgagagatggttcattgcaattagaaggcgagacctaa

SEQ ID NO: 2029 - protein, 535 aa, Arabidopsis thaliana
MGNCCGNPSSATNQSKQGKPKNKNNPFYSNEYATTDRSGAGFKLSVLKDPTGHDISLQYDLGREVGRGEFGITYLCTDKETGEKYACKSISKKKLRTAVDIEDVRREVEIMKHMPKHPNVVSLKDSFEDDDAVHIVMELCEGGELFDRIVARGHYTERAAAAVMKTIVEVVQICHKQGVMHRDLKPENFLFANKKETSALKAIDFGLSVFFKPGEQFNEIVGSPYYMAPEVLRRNYGPEIDVWSAGVILYILLCGVPPFWAETEQGVAQAIIRSVIDFKRDPWPRVSDSAKDLVRKMLEPDPKKRLTAAQVLEHTWILNAKKAPNVSLGETVKARLKQFSVMNKLKKRALRVIAEHLSVEEAAGIKEAFEMMDVNKRGKINLEELKYGLQKAGQQIADTDLQILMEATDVDGDGTLNYSEFVAVSVHLKKMANDEHLHKAFNFFDQNQSGYIEIDELREALNDELDNTSSEEVIAAIMQDVDTDKDGRISYEEFVAMMKAGTDWRKASRQYSRERFNSLSLKLMRDGSLQLEGET

SEQ ID NO: 2030 - DNA, 1455 bp, Arabidopsis thaliana
  CDS (1)..(1455)
atgggttgctacagcagtaagaacctaaaacaatcaaaaagaaccattcttgagaaaccattcgttgacatcggaaaggtttacatcctcggggatgaattgggtcaaggccaattcggtataactcgaaaatgcgttgagaagacttcaggtaagacttacgcctgcaagaccattctcaagacgaatctaaagagtagagaagatgaagaagccgtgaagagagagattcgtatcatgaagcatttgtctggagaaccgaacattgttgagttcaagaaagcttacgaggacagagattctgtacatattgttatggaatattgtggtggtggagagttattcaaaaagatcgaagctttgtccaaagatggaaagtcttactccgagaaagaagctgttgaaatcattaggccgattgtgaatgttgtcaagaattgtcattacatgggtgtgatgcttcgtgatctaaagcctgagaatttcttgctctccagtaccgataagaatgctacggtcaaagctatcgacttcgggtgttctgttttcattgaagaaggagaagtacaccggaaattcgctgggagtgcttactacattgctcctgaagtgttacagggaaaatacggtaaagaagcggacatttggagtgcagggattatattgtacatcctactctgcggcaaacctccctttgtgacagaacctgaggcacagatgttctctgagataaagagtgccaaaatcgacgttgacagcgaatcatggaagtttatagatgtgaaggcaaaacatcttgtcaataggatgcttaacagaaaccccaaggaacgaatctctgctgcagaggttcttggacatccttggatgaaagacggagaagcttcagataagcctattgatggcgttgttttatctcgattgaagcaatttcgagatatgaacaagctaaagaaagtagctctaaaggttattgcagcaaatctatcggaagaggaaatcaaaggtcttaaaacactgttcaccaacattgataccgacaaaagtggcacaatcactcttgaagaactcaaaacaggtcttactagacttggatctaacctctctaaaaccgaagtggagcaactcatggaagctgctgatgtggatggtaatggaacaatcgacatagacgagtttatctctgccacgatgcatagatatagattggatagagatgatcatgtgtaccaagcattccaacactttgacaaagacaatgacgggcacataaccaaggaagagttggagatggcaatgaaagagcatggtgtgggagatgaagttagcatcaaacaaatcataaccgaagttgataccgataatgatgggaaaataaactttgaggaattccgcacaatgatgagaagtggcagcagcttgcagccacaaagggagcttcttccgatcaagtga

SEQ ID NO: 2031 - protein, 484 aa, Arabidopsis thaliana
MGCYSSKNLKQSKRTILEKPFVDIGKVYILGDELGQGQFGITRKCVEKTSGKTYACKTILKTNLKSREDEEAVKREIRIMKHLSGEPNIVEFKKAYEDRDSVHIVMEYCGGGELFKKIEALSKDGKSYSEKEAVEIIRPIVNVVKNCHYMGVMLRDLKPENFLLSSTDKNATVKAIDFGCSVFIEEGEVHRKFAGSAYYIAPEVLQGKYGKEADIWSAGIILYILLCGKPPFVTEPEAQMFSEIKSAKIDVDSESWKFIDVKAKHLVNRMLNRNPKERISAAEVLGHPWMKDGEASDKPIDGVVLSRLKQFRDMNKLKKVALKVIAANLSEEEIKGLKTLFTNIDTDKSGTITLEELKTGLTRLGSNLSKTEVEQLMEAADVDGNGTIDIDEFISATMHRYRLDRDDHVYQAFQHFDKDNDGHITKEELEMAMKEHGVGDEVSIKQIITEVDTDNDGKINFEEFRTMMRSGSSLQPQRELLPIK

SEQ ID NO: 2032 - DNA, 1602 bp, Arabidopsis thaliana
  CDS (1)..(1602)
atgggaaattgttgtgcgagcccgggttcggagactgggagtaagaaggggaaaccaaagatcaaaagtaacccgttttatagtgaagcatacactacgaatggatctggaactgggttcaagctctctgttttgaaagatccaacaggacatgatatatctcttatgtatgatctggggcgtgaggttggtcgcggagagtttggtattacttacttgtgcactgatatcaaaacgggcgagaagtatgcgtgcaagtctatatcaaagaagaagcttagaacagctgtggatatagaggatgttaggagggaagttgagataatgaaacatatgcctagacacccaaatatcgtgtcgctgaaggatgcctttgaggatgatgatgcagtgcatatagttatggagttgtgtgaaggaggtgagctgtttgatcggattgttgctagaggtcattatactgagcgagctgctgctgcagtgatgaagactattcttgaagttgttcagatatgccataagcatggagtgatgcatcgggatctaaagcctgagaactttctctttgcaaataaaaaagagacatcagcccttaaagccatagattttggattatcagtcttcttcaagcctggtgagggattcaacgagattgttggaagtccttattacatggcaccagaggtacttaggcgaaattacggacctgaggttgatatctggagtgctggagttatcctttatatcctgctctgtggtgtcccaccattttgggccgagactgagcaaggggtggctcaggcgatcattaggtcagttatcgactttaagagggatccatggccgagagtttctgagactgccaaagaccttgtgaggaagatgctcgaacctgaccccaaaaaacggctttctgctgcacaagtactcgaacattcttggatacaaaatgcgaagaaggctccaaatgtttcactcggcgagacggtgaaagcaagactcaaacagttttctgttatgaacaagctcaagaaaagagcgctacgggtgatagccgaacacttatcagtggaggaagtagctggcatcaaggaagcatttgagatgatggacagtaaaaagacgggaaagataaacctcgaggagcttaaatttggacttcataaactcggacagcagcagatacctgatactgatctacagattctgatggaagctgctgatgttgatggggatgggactttaaattatggggagtttgtggctgtctctgtgcatcttaagaaaatggcgaacgacgaacacttgcataaggcttttagcttttttgaccagaatcagagcgattacatagagattgaggagctgcgtgaggctttaaatgatgaggtggatactaacagtgaagaagttgttgcagctattatgcaagatgttgacacagacaaggacggacgaataagctatgaagagtttgcggcgatgatgaaagctggaacagattggaggaaagcgtcgaggcagtattcccgggaaagattcaacagtttgagcctcaagttaatgagagaaggttcattgcaattagaaggcgaaaattaa

SEQ ID NO: 2033 - protein, 533 aa, Arabidopsis thaliana
MGNCCASPGSETGSKKGKPKIKSNPFYSEAYTTNGSGTGFKLSVLKDPTGHDISLMYDLGREVGRGEFGITYLCTDIKTGEKYACKSISKKKLRTAVDIEDVRREVEIMKHMPRHPNIVSLKDAFEDDDAVHIVMELCEGGELFDRIVARGHYTERAAAAVMKTILEVVQICHKHGVMHRDLKPENFLFANKKETSALKAIDFGLSVFFKPGEGFNEIVGSPYYMAPEVLRRNYGPEVDIWSAGVILYILLCGVPPFWAETEQGVAQAIIRSVIDFKRDPWPRVSETAKDLVRKMLEPDPKKRLSAAQVLEHSWIQNAKKAPNVSLGETVKARLKQFSVMNKLKKRALRVIAEHLSVEEVAGIKEAFEMMDSKKTGKINLEELKFGLHKLGQQQIPDTDLQILMEAADVDGDGTLNYGEFVAVSVHLKKMANDEHLHKAFSFFDQNQSDYIEIEELREALNDEVDTNSEEVVAAIMQDVDTDKDGRISYEEFAAMMKAGTDWRKASRQYSRERFNSLSLKLMREGSLQLEGEN

SEQ ID NO: 2034 - DNA, 1593 bp, Arabidopsis thaliana
  CDS (1)..(1593)
atgggaaattgttgtggaacggctggatcgttgattcaagataagcagaagaaaggttttaaattgccaaatcctttctcaaacgagtacggcaaccaccacgatggccttaagcttatcgtgttgaaggaaccaacgggtcatgagatcaagcagaaatataaattaggtcgtgagttaggtcgaggagagttcggtgtgacgtatctgtgcaccgagatcgagaccggagagattttcgcatgcaaatcaatcttaaagaagaagctgaaaacgtcgattgatatagaggacgttaagagagaagttgagatcatgaggcaaatgcctgaacatcctaatattgttactttgaaagagacttatgaggatgataaagctgtgcatttggttatggagctttgtgaaggcggtgagcttttcgataggattgttgctagagggcattatacggagagagctgctgcttcggttattaaaacgatcatcgaggttgttcagatgtgtcataagcatggagtaatgcacagagatttaaaacctgagaacttcttgtttgcaaacaagaaggaaactgcatctttgaaggctattgattttggtctctctgttttctttaaaccaggtgatagatttaacgaaattgttgggagtccttactacatggctcctgaggtattaaggaggagttatggacaagaaattgacatttggagcgcaggagtgattctttacatattgctctgtggtgttccacctttttgggcagaaaccgaacatggagtcgcaaaagcaattcttaaatctgtaattgactttaaaagagacccctggcctaaagtttctgataatgcaaaagatctgatcaaaaagatgcttcatcctgatccaaggcgtcgtctaactgctcaacaagtgcttgatcatccgtggatacagaatggtaagaatgcttccaatgtatcattgggtgaaaccgtaagagcaaggcttaagcaattctctgttatgaacaagctcaagaaaagggcactcagggttatcgctgagcatctatcggttgaagaaacatcttgcataaaagaaagattccaagtaatggatacaagcaatagaggaaagattactatcaccgagctaggaatcggattgcagaaactcgggattgttgttcctcaagatgacattcaaatattgatggacgcgggagatgttgataaagatggatatttagacgtcaatgaatttgtagccatatcggtacacatcaggaagttaggcaacgacgagcacttaaagaaagcttttacgttctttgacaaaaacaagagtggttatatcgaaatagaggagttaagagatgctttggcagatgatgttgacactactagtgaagaagttgttgaagccattattcttgatgtcgataccaataaggatgggaaaataagttacgacgaatttgcaacgatgatgaaaacgggaacggattggagaaaagcttcgaggcagtactcgagggacctgtttaagtgtcttagtcttaagctcatgcaagatgggtccttgcagtctaatggagatacaaagtag

SEQ ID NO: 2035 - protein, 530 aa, Arabidopsis thaliana
MGNCCGTAGSLIQDKQKKGFKLPNPFSNEYGNHHDGLKLIVLKEPTGHEIKQKYKLGRELGRGEFGVTYLCTEIETGEIFACKSILKKKLKTSIDIEDVKREVEIMRQMPEHPNIVTLKETYEDDKAVHLVMELCEGGELFDRIVARGHYTERAAASVIKTIIEVVQMCHKHGVMHRDLKPENFLFANKKETASLKAIDFGLSVFFKPGDRFNEIVGSPYYMAPEVLRRSYGQEIDIWSAGVILYILLCGVPPFWAETEHGVAKAILKSVIDFKRDPWPKVSDNAKDLIKKMLHPDPRRRLTAQQVLDHPWIQNGKNASNVSLGETVRARLKQFSVMNKLKKRALRVIAEHLSVEETSCIKERFQVMDTSNRGKITITELGIGLQKLGIVVPQDDIQILMDAGDVDKDGYLDVNEFVAISVHIRKLGNDEHLKKAFTFFDKNKSGYIEIEELRDALADDVDTTSEEVVEAIILDVDTNKDGKISYDEFATMMKTGTDWRKASRQYSRDLFKCLSLKLMQDGSLQSNGDTK

SEQ ID NO: 2036 - DNA, 1686 bp, Arabidopsis thaliana
  CDS (1)..(1686)
atgcttcaaaaccaacataaaacgaccaaaaaccagagaaacaaaaacattggaacaaaatattttcttagaaaaaaaattatgggattttgcttctccaaatttggcaaatcacaaacacatgagatcccaatctcttcctcttccgattcaagccctcctcatcactaccaacctctccctaaaccaactgtttctcaaggtcaaaccagtaatcccacctccaatcctcagcccaaacccaaacccgctcctcctcctcctccgtcaacatcctccggttcacaaatcggtccaatcctaaaccgaccaatgatcgatctctcagctctctacgacctccacaaagaactcggccgtggccaattcggaatcacttacaaatgcacggacaaatccaacggtcgagaatacgcctgcaaatccatctcaaaacgtaaactcatacgtcgcaaagacatcgaagacgtgagacgtgaggtcatgatcttgcaacaccttactggtcaaccaaacatagtcgagtttcgaggcgcgtatgaagacaaagacaatcttcatttggttatggagctctgttctggaggagagctttttgatcgtattatcaagaaaggaagttactctgagaaagaagctgctaatatcttcagacagatcgttaatgttgttcatgtttgtcacttcatgggcgttgttcatagagacttaaagcctgagaatttcttgcttgttagtaacgaagaagattctccaatcaaagcaacagattttggactctctgttttcatcgaagaaggtaaagtgtatagagatatagttgggagcgcatactacgttgcacctgaagttctacatcgaaactacgggaaagaaatcgatgtatggagcgcgggtgttatgctttacattcttctcagtggtgttcctccattttggggagagaccgagaagactatatttgaggcgatcttagaaggaaagctggatcttgaaacttctccttggcctactatatcggaaagcgcaaaagatttgataagaaagatgttgataagagatcctaaaaaaaggataaccgcagctgaagcacttgagcatccatggatgacagacaccaaaatttctgataaaccaatcaatagtgctgttcttgttaggatgaagcaattccgcgcgatgaacaagctcaagaaacttgccttgaaggtgatagcggaaaacttatcggaagaagagataaaaggattaaagcaaacgtttaagaacatggatacagatgaaagtggcaccatcacttttgatgaactaagaaacgggttacatcgtcttggatctaagcttacggagtctgaaatcaaacaactcatggaagctgctgatgtggacaaaagtgggacgattgattacattgagtttgtaactgcaacaatgcatcgtcatagattggagaaagaagagaatttgatagaagcatttaaatacttcgacaaagacagaagcggttttatcacaagggacgagcttaaacactccatgactgagtatggcatgggtgatgatgcgaccatagatgaagttatcaatgatgttgataccgacaatgatgggaggataaactacgaggaatttgtggcgatgatgaggaaaggaactacagattcagatccaaagctgatcagatga

SEQ ID NO: 2037 - protein, 561 aa, Arabidopsis thaliana
MLQNQHKTTKNQRNKNIGTKYFLRKKIMGFCFSKFGKSQTHEIPISSSSDSSPPHHYQPLPKPTVSQGQTSNPTSNPQPKPKPAPPPPPSTSSGSQIGPILNRPMIDLSALYDLHKELGRGQFGITYKCTDKSNGREYACKSISKRKLIRRKDIEDVRREVMILQHLTGQPNIVEFRGAYEDKDNLHLVMELCSGGELFDRIIKKGSYSEKEAANIFRQIVNVVHVCHFMGVVHRDLKPENFLLVSNEEDSPIKATDFGLSVFIEEGKVYRDIVGSAYYVAPEVLHRNYGKEIDVWSAGVMLYILLSGVPPFWGETEKTIFEAILEGKLDLETSPWPTISESAKDLIRKMLIRDPKKRITAAEALEHPWMTDTKISDKPINSAVLVRMKQFRAMNKLKKLALKVIAENLSEEEIKGLKQTFKNMDTDESGTITFDELRNGLHRLGSKLTESEIKQLMEAADVDKSGTIDYIEFVTATMHRHRLEKEENLIEAFKYFDKDRSGFITRDELKHSMTEYGMGDDATIDEVINDVDTDNDGRINYEEFVAMMRKGTTDSDPKLIR

SEQ ID NO: 2038 - DNA, 1647 bp, Triticum aestivum
  CDS (1)..(1647)
atgggcaatcagaatgggacccccgggaacgattactacaaccggttcccgagggagcatccggcttccaggtatgccgatgggattgaagatgatagctactcagacttgaagaaatctgacaagccctggcccgatgctgactcgtttaggcccaccgccgctggtattctgaggcaagggttggatccgacatccatctctgtcctcgggcgccagacggcggacctaagggagcactatatccttggccggaagcttgggcagggccagtttgggactacgtacctctgcaccgagataagtacagggtgcgactttgcgtgcaagaccatcctcaagcgcaagctcatcaccaaggtggatgtcgaggatgtgcgccgtgagattcagacaatgcaccatctgtcgggacacaagaacgttgtctcgatcaaggatgtctatgaggacgtgcaggcggtccacattgtgatggagctcttgcctggcggggagctatttgaccgaattcaggggaacgggcgttacagtgagatgaaggctgcagagattacaagaattgttgtcagcattgtggctatgtgccattcacttggtgtgatgcaccgcgatctcaagccggaaaatttcctcctccttgacaaagatgatgacctgtccataaaagcaattgattttggcctatccatctacttcaagccaggccaggttttcagtgagctagttggcagcccgttctatgttgctcctgaggtgttgcacaaacgctatgggccagaatcggatgtgtggtcagctggagtgatactctatgtattgctaagtggggttccaccattttgggcagatacacagaaaggcatatttgatgcagttctgaaggggcaccttgatttggaatcagacccctggcctaagatatctgacagtgtaaaggatcttataagaaagatgctttgcaattgcccttcagagcgtttgaaagcccatgtagtgctacggcatccctggatctgccaaaatgggatggccactgatggagttttggatcctagtgttatctctcggctcaagcggttctctgcaatgaacaatctacagaaattggctctgagagtgatagctgagcgtctttcagaagaggagattgctggattaagagaattattcaagacagtggacataaaaaatagaggcgtaatcacttttggcgagcttaggaaaggtctgacaagatatggcaacgaattggtggataccgagatttgtgatataatggaagcggctgatacagacactgatgtaaccataaactatgaagaatttattgctgcaaccatgcctctaaacaagatagagcgggaagaacacttgaaggcagcttttacatattttgacaaagatggcagtggctatatcacagtcgacaagcttcaacgagcctgtgcagaatataacatggaaggcactctccttgaagagattattttagaggccgatcggaacaatgacggtcaaattgattatgccgaatttgtagccatgatgctaggcaacgctaatggtggcaatattggacttggacgtccaacaatggaaaccagtctgaatgtgaccttgagagatgcacctcaagtacattaa

SEQ ID NO: 2039 - protein, 548 aa, Triticum aestivum
MGNQNGTPGNDYYNRFPREHPASRYADGIEDDSYSDLKKSDKPWPDADSFRPTAAGILRQGLDPTSISVLGRQTADLREHYILGRKLGQGQFGTTYLCTEISTGCDFACKTILKRKLITKVDVEDVRREIQTMHHLSGHKNVVSIKDVYEDVQAVHIVMELLPGGELFDRIQGNGRYSEMKAAEITRIVVSIVAMCHSLGVMHRDLKPENFLLLDKDDDLSIKAIDFGLSIYFKPGQVFSELVGSPFYVAPEVLHKRYGPESDVWSAGVILYVLLSGVPPFWADTQKGIFDAVLKGHLDLESDPWPKISDSVKDLIRKMLCNCPSERLKAHVVLRHPWICQNGMATDGVLDPSVISRLKRFSAMNNLQKLALRVIAERLSEEEIAGLRELFKTVDIKNRGVITFGELRKGLTRYGNELVDTEICDIMEAADTDTDVTINYEEFIAATMPLNKIEREEHLKAAFTYFDKDGSGYITVDKLQRACAEYNMEGTLLEEIILEADRNNDGQIDYAEFVAMMLGNANGGNIGLGRPTMETSLNVTLRDAPQVH

SEQ ID NO: 2040 - DNA, 1617 bp, Medicago truncatula
  CDS (1)..(1617)
atggggtgtttgttaagtaaagacaaagattcagaaccagaacacaacaatggtggttatagatatggtgaacacaatcatagaaacaatcatgaacaagtcaacacatcaagaacagcaccaacaagttcttatcaacctcaaataccaaccaagccttcatcaatttctgctccaagtccaaaacctcttatcaagcaagacagtaacacaatcctaggaaaaggtttggaagatgtgaaacaattctacacactaggtaaagaattaggtagaggccaattcggagtaacgtttctatgcaccgagaattcaactggattgctttatgcttgcaagtcaatttccaagaggaaacttgtgagtaaatctgatagggaagatataaagagagagattcagatcatgcaacatttgagtggtcaaccaaatattgttgaatttaaaggagcttatgaggataggaattcagttcatgttgttatggaactttgtgctggtggtgaactttttgataggatcattgctaaaggacattatagtgaaaaagctgctgcttctatttgtagacagattgttaatgttgttaatatttgtcattttatgggagttatgcatagggatctgaaaccagagaatttcttgttggctagtaaagatgaaaatgcacttcttaaggctactgattttgggttggctgttttcattgaagaaggaaaggtgtatcgcgatatagtcggaagtgcttattatgttgctccagaagttcttcgtcgtagatgcgggaaagaaatagatatatggagtgcaggagttatactatatatcttacttagtggtgtccctccattttgggctgagactgaaaagggaatatttgatgcaatattggaaggtcatattgattttgaaagtgaaccgtggcctaaaatttcagacagcgccaaggatcttgttcgtaaaatgcttatacaggaaccgaagaaacgcattaccgctgcacaggttctagagcatccttggattaaagatggtaatgcttctgataagccaatagacagtgcagttctttcaagaatgaagcaattcagagctatgaataaactaaagaaacttgcattgaaggtcattgctgagaatatgtctgaagaagaaatccgaggtttgaaggcgatgtttacaaatatggacacagacaatagtggtacaatcacctatgaagaactaaaagcaggattacaaagacttggctcaaagctttcagaagctgaagttaagcaactcatggaagctgctgatgtagatggaaatggcacaattgattgcattgaattcatcactgctacaatgcatagacacaagttagaaagagatgaccatctttacaaggcattccaatattttgacaaagacagcagtgggtttattacaagagatgaactggaaacagccatgaaagaatatggtatgggagatgatgccacaatcaaggaaattatatctgaagttgatacaattatatctgaagtggacacagatcatgatggtagaatcaactatgaagaattctgtgcaatgatgagaagtggaaaccaacagcaagttaagctattctaa

SEQ ID NO: 2041 - protein, 538 aa, Medicago truncatula
MGCLLSKDKDSEPEHNNGGYRYGEHNHRNNHEQVNTSRTAPTSSYQPQIPTKPSSISAPSPKPLIKQDSNTILGKGLEDVKQFYTLGKELGRGQFGVTFLCTENSTGLLYACKSISKRKLVSKSDREDIKREIQIMQHLSGQPNIVEFKGAYEDRNSVHVVMELCAGGELFDRIIAKGHYSEKAAASICRQIVNVVNICHFMGVMHRDLKPENFLLASKDENALLKATDFGLAVFIEEGKVYRDIVGSAYYVAPEVLRRRCGKEIDIWSAGVILYILLSGVPPFWAETEKGIFDAILEGHIDFESEPWPKISDSAKDLVRKMLIQEPKKRITAAQVLEHPWIKDGNASDKPIDSAVLSRMKQFRAMNKLKKLALKVIAENMSEEEIRGLKAMFTNMDTDNSGTITYEELKAGLQRLGSKLSEAEVKQLMEAADVDGNGTIDCIEFITATMHRHKLERDDHLYKAFQYFDKDSSGFITRDELETAMKEYGMGDDATIKEIISEVDTIISEVDTDHDGRINYEEFCAMMRSGNQQQVKLF

SEQ ID NO: 2042 - DNA, 1605 bp, Oryza sativa subsp
  CDS (1)..(1605)
atggggaattcttgccaaaatggaacctatgggaacaattaccagaacagcaaccggtttcagaatgaccgttttgcttctcggtacgttgatgggaatgatactgaggattgctactcgggctcgtcaagggccagcttagcgggtgctctgcggcaagggctgaacctaaagtcccctgtccttggatacaagactccaaatgtaagggagctctatactcttggccgggagcttggacagggacagttcgggaaaacatacctctgcactgagattagcacagggtgtcaatatgcatgcaagactatcttaaagagtaatctccgatgtgtgtcagatatcgaggacgtgcgccgtgaaatccagataatgcaccatctttcgggccagaagaatatagtgacaatcaaggacacatatgaggatgagcaggccgtgcacatcgtcatggagctctgtgcaggtggtgagctcttcagcaagattcagaagcgaggtcattacagtgaacggaaggctgcagagcttataaaaattatagttggcatcatagaaacatgccattcacatggagtgatgcaccgggatctcaagccagaaaatttcctcttactggacgcagacgatgaattctcggttaaagcaattgactttggtctatctgtgttcttcagaccaggtcaggttttcagagaggtagtgggaagtccatattatattgctccagaggtattggagaagcgttatggaccagaggctgatatatggactgctggagtgattctctatgtattgctgactggtgttcctccattttgggcagatacacaaagcgggatatatgaaaaagtactggatggacgtattgattttaaatcaaaccggtggcccaggatatctgacagtgcaaaggatcttataaaaaagatgctctgcccttatccattagagcgtttgaaagcccatgaagtgctaaagcatccatggatatgtgataatggagtggctactaatcgagctctggatccaagtgtacttcctcgtctcaagcaattttctgcaatgaataggttaaagaaattgtctctccagattattgctgagcgtctttcagaagaggagattgttgggttaagagaaatgttcaaggctatggacaccaaaaacagaagtgtggttacatttggtgagcttaagggactgaaaagatacagctcagtgttcaaggatactgaaattaacgacttaatggaagcagctgatgacaccacctccaccatcaactgggaagagtttattgctgcagcagtgtctcttaataaaatagaacgtgagaaacacttgatggcagcctttacatactttgacaaagatggaagtggttttatcacagttgacaagcttcaaaaggcttgcatggaacgtaacatggaagatactttccttgaagagatgattctggaggttgatcaaaacaatgatggtcaaatcgattatgctgaatttgtcacaatgatgcaaagcaacaactttggacttgggtggcaaacggtggaaagcagcctgaatgtagccctgagggaggcaccccaagtatactga

SEQ ID NO: 2043 - protein, 534 aa, Oryza sativa subsp
MGNSCQNGTYGNNYQNSNRFQNDRFASRYVDGNDTEDCYSGSSRASLAGALRQGLNLKSPVLGYKTPNVRELYTLGRELGQGQFGKTYLCTEISTGCQYACKTILKSNLRCVSDIEDVRREIQIMHHLSGQKNIVTIKDTYEDEQAVHIVMELCAGGELFSKIQKRGHYSERKAAELIKIIVGIIETCHSHGVMHRDLKPENFLLLDADDEFSVKAIDFGLSVFFRPGQVFREVVGSPYYIAPEVLEKRYGPEADIWTAGVILYVLLTGVPPFWADTQSGIYEKVLDGRIDFKSNRWPRISDSAKDLIKKMLCPYPLERLKAHEVLKHPWICDNGVATNRALDPSVLPRLKQFSAMNRLKKLSLQIIAERLSEEEIVGLREMFKAMDTKNRSVVTFGELKGLKRYSSVFKDTEINDLMEAADDTTSTINWEEFIAAAVSLNKIEREKHLMAAFTYFDKDGSGFITVDKLQKACMERNMEDTFLEEMILEVDQNNDGQIDYAEFVTMMQSNNFGLGWQTVESSLNVALREAPQVY

SEQ ID NO: 2044 - DNA, 1653 bp, Oryza sativa subsp
  CDS (1)..(1653)
atgggcgcccgcgcctctcgccaccgccaatcccccgaccaatcccaatcccaatccccatccccacaccacaagcaccaccaccaccaccaaaccacccgggcccccaagcccaagcccaagccccagccaccgccgccgcagcagccgcgatctcagcctccgccgccgccgcggcaccagccccagcaggcgccccagcaggcggcggcggaggatggggtggggcgggtgctggggcggcccatggaggacgtccgtgcgacctacaccttcgggcgggagctggggcgggggcagttcggggtgacctacctcgccacccacaagcccaccggccgacgctacgccctgcaagtccatcgccgcccgcaagctcgcccggccccgacgacctcgacgacgtccgccgcgaggtccacatcatgcaccacctcaccggccaccgcaacatcgtcgagctgcgcgggcgcctacgaggaccgccactccgtcaacctcgtcatggagctctgcgagggcggcgagctcttcgaccgcatcatcgccaggggccactactccgagcgcgccgccgccgccctctgcagggagatcgtctccgtcgtccacagctgccactccatgggggtcatgcacagggacctcaagcccgagaacttcctcttcctcaacaagcgcgaggactccccgctcaaagccaccgattttggcctctccgtcttcttcaagcccggtgagcagttcagagatcttgttggaagtgcatattatgtggctcctgaggtcctaaaacgactatatggagctgaggcagacatatggagtgctggagttatcctttacatccttctatcaggggttcctccattctgggcagaaaacgaggacggtatatttgatgctgttctgcaaggtcatatcgacttctcatctgaaccatggccttctatatctagtggtgcaaaagacttggtcaagcggatgcttcggcaggacccaaaggagcggttaactgctgctgaaattttgaaccacccatggattagagaggatggagaggccccagataaaccacttgatattacagtgatcagtagaatgaagcagttcagagcaatgaacaaacttaagaaggttgccttgaaggtcgttgcagagaacttgtcagaggaagagattgtgggtttaaaggaaatgttcaaatctttagatactgataacagtgggacgataactcttgaagaactaagagctggtctaccaaagcttggcactaaaatttcggaatcagaattaaggcagttgatggaagcggctgatgttgatggaaatgggtccattgattatgttgaatttatatcagcaacgatgcacatgaatagattagagaaggaagatcacatatataaagcatttgaatattttgacaaggaccacagcgggttcataacagtcgatgaattggaagaagctctgacaaagtacgacatgggtgatgaagcgacaattaaagaaataattgctgaagtggatacagaccatgataatcgaattgattacattgaatatcttgaaaacattggaggagatttggttttcaagtatgctgaatgttgctcagccatctctaagatcatggatgctggctaa

SEQ ID NO: 2045 - protein, 550 aa, Oryza sativa subsp
MGARASRHRQSPDQSQSQSPSPHHKHHHHHQTTRAPKPKPKPQPPPPQQPRSQPPPPPRHQPQQAPQQAAAEDGVGRVLGRPMEDVRATYTFGRELGRGQFGVTYLATHKPTGRRYALQVHRRPQARPAPTTSTTSAARSTSCTTSPATATSSSCAGAYEDRHSVNLVMELCEGGELFDRIIARGHYSERAAAALCREIVSVVHSCHSMGVMHRDLKPENFLFLNKREDSPLKATDFGLSVFFKPGEQFRDLVGSAYYVAPEVLKRLYGAEADIWSAGVILYILLSGVPPFWAENEDGIFDAVLQGHIDFSSEPWPSISSGAKDLVKRMLRQDPKERLTAAEILNHPWIREDGEAPDKPLDITVISRMKQFRAMNKLKKVALKVVAENLSEEEIVGLKEMFKSLDTDNSGTITLEELRAGLPKLGTKISESELRQLMEAADVDGNGSIDYVEFISATMHMNRLEKEDHIYKAFEYFDKDHSGFITVDELEEALTKYDMGDEATIKEIIAEVDTDHDNRIDYIEYLENIGGDLVFKYAECCSAISKIMDAG

SEQ ID NO: 2046 - DNA, 1674 bp, Solanum tuberosum
  CDS (1)..(1674)
atgggcaacacatgccgtggatctattggaggcaaaacttttcagggttacactcagcctgaagatagttcctgctccaccaatcataacccttcttccggcaattcttattcttcttctgacaatttttctcccaccagtaacgctcaacagaatagcaatcacaagaaggagcattctttgtctcttgttagtcccagaaaagctagcatgaatcgttccgggagtaatcaggcttattatgtaatgggtcatatgaccccgaatattcgcgatctttatactttgggaaggaaattaggacaagggcagtttgggactacttatttatgcacagagaattctaccggtgctgagtatgcctgtaaatcaatctcgaagaggaagttgatttcgaaggaggatgtggaagatgttagaagggaaattcagataatgcatcatttgtctggtcataggaatattgttactattaaaggggcttatgaggatcctttatatgttcatattgtcatggagatatgtagtggcggtgagttgtttgatcggatcatacaacgaggacattacagtgagagaaaggcagctgaattgactaaaattattgttggggttgtggaggcgtgtcattctcttggtgttatgcatagagatctcaaacctgagaatttcttgttggttaataaggataatgatttctctctcaaggccattgattttggactctctgttttcttcaagccaggacaaatattcacagatgttgttggtagtccatattatgtggctcctgaggtgcttttgaagcattatggtcctgaagctgatgtgtggacagcaggagtcatactctacatactgctaagtggtgtgccaccattttgggctgaaacacagcagggaatatttgacgcagttctgaaagggcacattgattttgactcagatccttggccattgatatctgagagtgcaaaagatcttatccggaagatgttgtgcatgcagccctcggagcggttaactgctcatgaagtattgtgtcatccttggatttgcgaaaatggtgtcgctcctgatagagcactggatcctgcagtactttctcgcctaaaacagttctctgctatgaacaagttaaaaaagatggctttgcgggtgattgctgaaagcttgtctgaagaagagattgctggtctgagagagatgtttaaggccatggatactgacagtagtggtgcaattacatttgatgaactaaaagcagggttgagaaaatatggctctacgttaaaggatacggagatacgggaacttatggatgcggctgatgtggacaatagtggaactattgactatggagaattcattgcggcaactgttcatcttaataaattggagcgcgaggaacatctcatggccgcatttcaatattttgacaaggatggaagtggttacataacggttgatgaggtccaacaagcttgtatagagcataacatgacagatgtttactttgaggatattataagagaagtcgatcaggataatgatggacgaattgattatggagaatttgttgctatgatgcaaaaaggaaatccatgtatagggagacgaacaatgcgaaatagtctgaatttgagcatgagagatgcaccgggagctcagtag

SEQ ID NO: 2047 - protein, 557 aa, Solanum tuberosum
MGNTCRGSIGGKTFQGYTQPEDSSCSTNHNPSSGNSYSSSDNFSPTSNAQQNSNHKKEHSLSLVSPRKASMNRSGSNQAYYVMGHMTPNIRDLYTLGRKLGQGQFGTTYLCTENSTGAEYACKSISKRKLISKEDVEDVRREIQIMHHLSGHRNIVTIKGAYEDPLYVHIVMEICSGGELFDRIIQRGHYSERKAAELTKIIVGVVEACHSLGVMHRDLKPENFLLVNKDNDFSLKAIDFGLSVFFKPGQIFTDVVGSPYYVAPEVLLKHYGPEADVWTAGVILYILLSGVPPFWAETQQGIFDAVLKGHIDFDSDPWPLISESAKDLIRKMLCMQPSERLTAHEVLCHPWICENGVAPDRALDPAVLSRLKQFSAMNKLKKMALRVIAESLSEEEIAGLREMFKAMDTDSSGAITFDELKAGLRKYGSTLKDTEIRELMDAADVDNSGTIDYGEFIAATVHLNKLEREEHLMAAFQYFDKDGSGYITVDEVQQACIEHNMTDVYFEDIIREVDQDNDGRIDYGEFVAMMQKGNPCIGRRTMRNSLNLSMRDAPGAQ

SEQ ID NO: 2048 - DNA, 1608 bp, Solanum tuberosum
  CDS (1)..(1608)
atgggcaacgcatgccgtggatctttcggaggcaaaacttttcagggctaccctcagcctcaagatcattcagaatccaattccaatcccaaacataattccgattcccccaaaccaaaaaaggaacaacaacccctcgtcaccatgaatcgtacaagcactaaccagtcctattacgtcctcggtcataagacccctaacattcgcgatctatacaccctcggccgcaaactaggacaaggtcagtttggcaccacttatttatgcaccgaattgtcttccggtatcgactacgcctgtaaatctattgccaagagaaaactcatctctaaggaggatgtagaagatgtcaggagggaaattcagataatgcaccatttggctggtcacaaaaacatcgtttccatcaagggtgcttatgaggatcctttgtatgttcatattgtcatggaactttgtggtggcggtgaattgtttgaccgcatcattcaaagaggacactacactgagagaaaggctgccgatttgactaaaattattgtgggtgttgttgaggcatgccattcacttggagttatgcatagagatctcaaacctgagaatttcttgttggttaacaaggatgatgatttctctctcaaggccattgactttggactctcagtattctttaagccaggccaaattttcacagatgttgttgggagtccatactacgttgctcctgaggtgcttttgaagcattatggtccagaagcagatgtttggacagcaggggtcatactctatatcctgctaagtggagttccaccattctgggctgaaacacagcaggggatatttgatgcagttctgaaagggcacattgattttgactcagatccttggcctttattatcggagagtgcaaaagatctcatccggaagatgttatgcatgcgaccctcagagcggttaactgctcatgaagtattatgtcatccttggatttgtgaaaatggtgttgctcctgatagagctcttgatcctgcagtactttctcgcctcaaacacttttctgcaatgaacaaattaaaaaagatggctctgcgggtgattgctgaaagcttgtcagaggaggagattgccggtcttaaggagatgtttaaggccatggatactgataacagtggtgcaattacattcgatgaactaaaagctggtttgagaaaatatggctctactctgaaggatatagagatacgggaacttatggatgcggctgatgtggacaatagtggaactattgactatggagaattcatagcagcaactattcaccttaacaaattggaccgcgaggaacatctcatggcagcatttcagtattttgacaaggatggaagtggttatattactgtagatgagctccagcaggcgtgtgcagatcataacattacagatgtattctttgaggatattatcagagaagttgatcaggataatgatggacgcattgactatggagaatttgttgctatgatgcaaaaaggaaatccatgcataggaagacgaacgatgcgaaatagtctgaatttcagcatgagagatgcgcccggagctcattag

SEQ ID NO: 2049 - protein, 535 aa, Solanum tuberosum
MGNACRGSFGGKTFQGYPQPQDHSESNSNPKHNSDSPKPKKEQQPLVTMNRTSTNQSYYVLGHKTPNIRDLYTLGRKLGQGQFGTTYLCTELSSGIDYACKSIAKRKLISKEDVEDVRREIQIMHHLAGHKNIVSIKGAYEDPLYVHIVMELCGGGELFDRIIQRGHYTERKAADLTKIIVGVVEACHSLGVMHRDLKPENFLLVNKDDDFSLKAIDFGLSVFFKPGQIFTDVVGSPYYVAPEVLLKHYGPEADVWTAGVILYILLSGVPPFWAETQQGIFDAVLKGHIDFDSDPWPLLSESAKDLIRKMLCMRPSERLTAHEVLCHPWICENGVAPDRALDPAVLSRLKHFSAMNKLKKMALRVIAESLSEEEIAGLKEMFKAMDTDNSGAITFDELKAGLRKYGSTLKDIEIRELMDAADVDNSGTIDYGEFIAATIHLNKLDREEHLMAAFQYFDKDGSGYITVDELQQACADHNITDVFFEDIIREVDQDNDGRIDYGEFVAMMQKGNPCIGRRTMRNSLNFSMRDAPGAH

SEQ ID NO: 2050 - DNA, 1404 bp, Vitis vinifera
  CDS (1)..(1404)
  misc_feature (12)..(12): w is a or t
  misc_feature (92)..(92): r is g or a
atgggttgtttwagcagtaaggagaggccgccactcaagccttcacatcccaataccagagctattcagaagccagataccatattgggtargccatttgatgatattaagcattactatactcttggtaaggaactgggtagggggcagtttggaagaaagcttgtgactaaaaatgataaggaggatataaagagagagattcagatcatgcagcatctgactgggcagccaaacattgtggaattcaagggtgcttatgaggataggcactcagtgcaccttgtgatggagctctgtgctggtggggagctctttgatagaatcatttctcaggggcattactctgagagagctgctgcagcaatttgtagggctattgtgaatgttgtccacatctgccatttcatgggtgtgatgcatcgcgatctcaagcctgagaatttcttgttgtccagcaaggatgaagcagcaatgctgaaggcaactgattttgggttgtctgtcttcattgaggaaggaaaggtgtatcgtgatatagtaggtagtgcctactatgttgctccagaagtattacggcgtaattatgggaaggaaatagatatttggagtgcaggagttattttgtatattctactcagtggtgtacctccattttgggctgaaactgaaaagggaatatttgatgccatattgcaaggagaaattgacttcgaaagtcaaccatggccagctatatcaaatggtgccaaagatctagtcaggaagatgctgacacaggaccggaacaagcgtattacttctgcacaagttcttgagcatccatggataagagaagatggagaagcatcagacaagccaatagacagtgctgtactctctagaatgaagcaatttagggcaatgaacaagctcaagaagctcgcattgaaggttattgcagaaaatctatctgaagaagaaatcaaaggtcttaaagcaatgttcaccaacatggacactgacaagagtggtaccatcacttatgaagaactgaagagcggattggctcgacttggttcaaggctctcagagactgaagtccaacaactcatggaagctgctgatgtggatggcaatggaacaattgactacattgaatttatcactgctacaatgcacagacacagactagaaagagatgagcatctctataaagcttttaactattttgataaggataacagtggctttataacaagagatgaattggaaaatgccatgaaggagtatgggatgggtgatgaagacagcatcaaggaaataattaatgaggttgatacagataaggatgggaggatcaactataaggagttttgcacaatgatgagaagtggaacacaaccgccagtcaagctattttag

SEQ ID NO: 2051 - protein, 467 aa, Vitis vinifera
  misc_feature (4)..(4): The Xaa at location 4 stands for Leu, or Phe.
  misc_feature (31)..(31): The Xaa at location 31 stands for Arg, or Lys.
MGCXSSKERPPLKPSHPNTRAIQKPDTILGXPFDDIKHYYTLGKELGRGQFGRKLVTKNDKEDIKREIQIMQHLTGQPNIVEFKGAYEDRHSVHLVMELCAGGELFDRIISQGHYSERAAAAICRAIVNVVHICHFMGVMHRDLKPENFLLSSKDEAAMLKATDFGLSVFIEEGKVYRDIVGSAYYVAPEVLRRNYGKEIDIWSAGVILYILLSGVPPFWAETEKGIFDAILQGEIDFESQPWPAISNGAKDLVRKMLTQDRNKRITSAQVLEHPWIREDGEASDKPIDSAVLSRMKQFRAMNKLKKLALKVIAENLSEEEIKGLKAMFTNMDTDKSGTITYEELKSGLARLGSRLSETEVQQLMEAADVDGNGTIDYIEFITATMHRHRLERDEHLYKAFNYFDKDNSGFITRDELENAMKEYGMGDEDSIKEIINEVDTDKDGRINYKEFCTMMRSGTQPPVKLF

SEQ ID NO: 2052 - DNA, 1755 bp, Vitis vinifera
  CDS (1)..(1755)
  misc_feature (585)..(585): r is g or a
  misc_feature (705)..(705): r is g or a
atgggaatctgcgcctcaaagcctccgaagcagaatccgtacgccccggagtctttggaaccttctgcaacccctggagcagtcagcaaggatgaggcggaggggccggggaagcgctcgccgttcttccccttctacagtcccagtccggcgcactacctcttctccaagaagtctccggcggtgcggagcgccagctccacgccacggcggttcttcaagaggccgtttccgccgccgtctccggcgaagcatataaaggcggtgctggcccgaaggcagggaaagaaggcggccgcgataccggagggggagggggaggaggaagaagctgcggcgggaggtttggataagagtttcgggttctcgaagcagttcaccagtaagtatgaggttggcgaagaagtggggaggggacattttgggtatacttgttctgctaggttcaagaaaggtgagcgcaagggtcagcaagttgctgtcaaagtcatccctaaagccaagatgacaacagccattgcaatcgaggatgtgagaagggaggtgaaaatattgcgagccttgacaggacataagaatctagtrcaattctatgatgcatttgaagaccatgataacgtctatatagtaatggagttatgcgaaggaggcgagctcctggatagaatactttcaaggggtgggaaatactcagaagatgatgcragggctgtcatggtgcagatattgaatgttgtttcatttttccatctccagggtgtggtacacagagatcttaaaccagagaattttttgtttacttctaaggatgagaactctgagttgaaagctattgactttggcttatcagattttgtcaaaccagatgaaaggcttaatgacatagtgggaagtgcatactacgtgtcccctgaagttttgcatagatcttacagtacagaggctgatgtatggagtataggcgtgatagcatatattcttttgtgtggtagtcgtccattttgggcccgaactgagtcgggaatctttagggcagtgttaaaagctgatccaagttttgatgaagtaccatggccttccttatcttcagaggcaaaggactttgtcaagtgcctactaaataaagaccctcggaaacgaatcactgctgctcaggctctaagtcatccttggattcgaggttacaatggtgtgaaagtccctcttgatattctaatattcaaactcatgaaagcctatatgcggtcatcatctttgcgtaaggctgctttaagggcattgtcgaagacgctgactatggatgaactcttttatttgaaagaacagtttgcacacttggagccaaacaaaaatgggaccattaccttagagaatattaggacggccctgatgaaaaatgcaacagatgcaatgaaggagtctcgcatccctgattttcttgcgtcgctaaatgcacttcaatatagaaggatggatttcgaagaattctgtgcagctgcattaagtgtccatcagctggaggcactcgatcgttgggaacaacatgcacgttgtgcatatgaactctttgacaaggatggaaatagggctattatgattgaggaacttgcttcggaacttggccttggcccttctgttccagttcatgctgttctacatgactggataaggcacacagatgggaaactaagcttccttggatttgtcaaattgttgcatggtgtctccagcagagctcttgcaaaggcacagtaa

SEQ ID NO: 2053 - protein, 584 aa, Vitis vinifera
MGICASKPPKQNPYAPESLEPSATPGAVSKDEAEGPGKRSPFFPFYSPSPAHYLFSKKSPAVRSASSTPRRFFKRPFPPPSPAKHIKAVLARRQGKKAAAIPEGEGEEEEAAAGGLDKSFGFSKQFTSKYEVGEEVGRGHFGYTCSARFKKGERKGQQVAVKVIPKAKMTTAIAIEDVRREVKILRALTGHKNLVQFYDAFEDHDNVYIVMELCEGGELLDRILSRGGKYSEDDARAVMVQILNVVSFFHLQGVVHRDLKPENFLFTSKDENSELKAIDFGLSDFVKPDERLNDIVGSAYYVSPEVLHRSYSTEADVWSIGVIAYILLCGSRPFWARTESGIFRAVLKADPSFDEVPWPSLSSEAKDFVKCLLNKDPRKRITAAQALSHPWIRGYNGVKVPLDILIFKLMKAYMRSSSLRKAALRALSKTLTMDELFYLKEQFAHLEPNKNGTITLENIRTALMKNATDAMKESRIPDFLASLNALQYRRMDFEEFCAAALSVHQLEALDRWEQHARCAYELFDKDGNRAIMIEELASELGLGPSVPVHAVLHDWIRHTDGKLSFLGFVKLLHGVSSRALAKAQ

SEQ ID NO: 2054 - DNA, 1743 bp, Vitis vinifera
  CDS (1)..(1743)
  misc_feature (822)..(822): m is a or c
  misc_feature (1476)..(1476): w is a or t
  misc_feature (1660)..(1660): m is a or c
atggggaataactgtgtgggatccatggttcccgagcatggattgtttgaatcaatttctaattcaatttggtggacgagagcctcggagtgtatgacttctcattctaccggagaaggtgtcagcgaaacgcaaagtaaagagcagaaatctcctcctcctgttcaaaacaagcctccagaagaggtggagctaataaatccgccagaggtaatgaagataacaaaggaagagacgaaaccaacacccacaccgaagaggccactccttatgaagaggttaccaagtgctggacttgaggtggacttggttttgaaagacaaaactgatcatttgaaggaacactataatttggggcggaagcttgggcacggccagtttgggacaacttttctatgtgtagagaaagaaacaggcaaagagtacgcttgcaaatccattgcaaaaaggaaactgctgacaagagatgacattgaagacgtgaggagggaaatccagataatgcatcacttggcgggccactccaatatcatctccatcaagggagcttatgaggatgcggtggcagttcatcttgtcatggaattgtgtacggggggtgagctttttgataggattgccaagcgaggccattatacagaaagaaaggcagctcagcttgcaaggactataattggtgttgtagaagcctgccactctttaggggtcatgcaccgggaccttaagcctgagaattttctttttgtcaatgagcaagaggaatcacttcttaagacaatagactttgggttgtccgtattcttcaagccaggggagattttmactgatgtggttggaagcccatattatgtggcacctgaagttctgagaaagtgttatggtccagaagcagatgtttggagtgttggggtgatcatttatattctcttaagtggggtgcctccattttgggcagaaagtgagcaagagatatttcaagaagtactgcatggtgatcttaacttctcatcagatccatggcctcatatctctgaaagtgctaaggacttaattaggagaatacttgtcagagatcccaagaaacgcctaactgcccatgaagtcctgtgtcacccttggattcaggttgatggagtagctcctgacaaaacccttgattctgcagtcataagtcgcttgaagcagttttcagccatgaacaagcttaagaaaatggctcttagagtgattgctgagaatctctctgaagaagaaattgctggattgaaagaaatgttcaagattattgatacagacaatagtggtcagattacttttgaagaactcaaggctggactaaaaagatttggcgctaatcttaaggaagctgaaatttatgatctaatgcaggctgcagatgttgataatagtggaacaatcgattatggggagttcatagctgcaacattccatctaaacaaaattgagagagaagawcacctatttgctgctttttcctactttgacaaagatggaagtggctatatcactccagatgagctccaaaaagcctgtgaggagtttgggatggaggatgtccatttggaagaaatgatccaagaagttgaccaggacaatgacggccgcatagattataatgagtttgtggcaatgatgcagmaaggaaacaataatgattttggtaagaagggtctgcagaatggtattagctttgggtttaggcagccgctaccagtctattga

SEQ ID NO: 2055 - protein, 580 aa, Vitis vinifera
  misc_feature (274)..(274): The Xaa at location 274 stands for Leu, or Phe.
  misc_feature (492)..(492): The Xaa at location 492 stands for Asp, or Glu.
  misc_feature (554)..(554): The Xaa at location 554 stands for Gln, or Lys.
MGNNCVGSMVPEHGLFESISNSIWWTRASECMTSHSTGEGVSETQSKEQKSPPPVQNKPPEEVELINPPEVMKITKEETKPTPTPKRPLLMKRLPSAGLEVDLVLKDKTDHLKEHYNLGRKLGHGQFGTTFLCVEKETGKEYACKSIAKRKLLTRDDIEDVRREIQIMHHLAGHSNIISIKGAYEDAVAVHLVMELCTGGELFDRIAKRGHYTERKAAQLARTIIGVVEACHSLGVMHRDLKPENFLFVNEQEESLLKTIDFGLSVFFKPGEIXTDVVGSPYYVAPEVLRKCYGPEADVWSVGVIIYILLSGVPPFWAESEQEIFQEVLHGDLNFSSDPWPHISESAKDLIRRILVRDPKKRLTAHEVLCHPWIQVDGVAPDKTLDSAVISRLKQFSAMNKLKKMALRVIAENLSEEEIAGLKEMFKIIDTDNSGQITFEELKAGLKRFGANLKEAEIYDLMQAADVDNSGTIDYGEFIAATFHLNKIEREXHLFAAFSYFDKDGSGYITPDELQKACEEFGMEDVHLEEMIQEVDQDNDGRIDYNEFVAMMQXGNNNDFGKKGLQNGISFGFRQPLPVY

SEQ ID NO: 2056 - DNA, 1623 bp, Vitis vinifera
  CDS (1)..(1623)
atgggcaactgttgctcccaaggcaacaccaacgatggcccagctaatgacaagggagaaaccatccctgagcctacgaccaacccggaaactgctgcgcctgagagttcagccgcgcagaataagcctgcagccagttccactcctgctgcttcatccggagcgtctaccaagcctagcaagccaacccctataggacctgtgttgggcaggcctatggaagatgttcgtaccctttacactataggaaaggagctcggtcgcgggcagtttggtgttacccatttgtgtaccagcaaggcaaccggcgagcagtttgcttgtaagacaatagccaagcggaaacttgtaaacaaggaggatattgaggatgtcaggagggaagttcagatcatgcaccatttgacgggtcagcctaatatagtcgagcttaagggtgcctatgaggacaagcaatcggttcatctggtgatggagttgtgtgcaggaggagagctctttgatcgtattatctcaaaggggcattacaccgagcgtggtgcagcatctttgctgaggactattgttcagattgtccacacctgccattccatgggagttgtccatagggatctcaagcctgaaaatttccttctgctgaacaaggatgagaatgcacctctcaaggctacagatttcggtttatccgtgttcttcaaacaaggagaagtatttagagatattgttggtagtgcatattacattgcacctgaagtattgaagagaagatatggaccagaggtcgatatatggagtgttggggttatgttgtatatccttctatgtggagttcctcccttctggggcagagaaattggattaacagaatcggagcatgggatattcaatgcaatcttacgcggccacattgattttacaagcgacccatggcccactatttcatctggtgccaaggatcttgtcagaaagatgttaacttcagacccaaagcagaggataacagcattccaagttctgaatcatccatggattaaggaggatggagaagcacctgatactcctcttgacaatgcagtttttgaaaggttcaaacagtttagagcaatgaacaagttcaagaaagttgctcttcgggtcattgctggctgtctatcagaggaagaaatcatgggattgaagcaaatgtttaagggcatggacactgataatagtggaaccataacacttgaagagctgaagcaaggtctgtccaagcaagggactaagctgtctgaatatgaagttaaacagttgatggaagctgctgatgcagatggcaatggaaccattgactatgatgagtttatcacggcaacaatgcacctgaacagaatggacaaagaagaccatctttacacagccttccaatacttcgacaaagataacagcgggtatattacaaccgaagagttggagcaagctctccatgaatttggcatgcacgatggaagggacataaaagaaatccttaatgaagttgacggtgataatgatggccggatcaactacgatgagttcgtgacaatgatgagaaaagggaacccagaaccgaacccaaagaagagacgggatgtatttgtttga

SEQ ID NO: 2057 - protein, 540 aa, Vitis vinifera
MGNCCSQGNTNDGPANDKGETIPEPTTNPETAAPESSAAQNKPAASSTPAASSGASTKPSKPTPIGPVLGRPMEDVRTLYTIGKELGRGQFGVTHLCTSKATGEQFACKTIAKRKLVNKEDIEDVRREVQIMHHLTGQPNIVELKGAYEDKQSVHLVMELCAGGELFDRIISKGHYTERGAASLLRTIVQIVHTCHSMGVVHRDLKPENFLLLNKDENAPLKATDFGLSVFFKQGEVFRDIVGSAYYIAPEVLKRRYGPEVDIWSVGVMLYILLCGVPPFWGREIGLTESEHGIFNAILRGHIDFTSDPWPTISSGAKDLVRKMLTSDPKQRITAFQVLNHPWIKEDGEAPDTPLDNAVFERFKQFRAMNKFKKVALRVIAGCLSEEEIMGLKQMFKGMDTDNSGTITLEELKQGLSKQGTKLSEYEVKQLMEAADADGNGTIDYDEFITATMHLNRMDKEDHLYTAFQYFDKDNSGYITTEELEQALHEFGMHDGRDIKEILNEVDGDNDGRINYDEFVTMMRKGNPEPNPKKRRDVFV

SEQ ID NO: 2058 - DNA, 1647 bp, Vitis vinifera
  CDS (1)..(1647)
  misc_feature (356)..(356): y is t or c
atgggtttctgcttctccagacctcgtgatatcccaatctcttcttcttcctcctctgatggtgattttactaatcatcactaccaacccatacccatttcttcctccaaagagtcattggacatcccacctcctctttcaatgtctgtgcctaaaccacccacatcttcacaaattggaaccgttctaggcagaccattatgtgaaataacctcgatttatgatattggtaaagaactggggaggggtcagtttgggatcacctatctctgtactgagaagtccactggtttgaagtacgcttgtaagtcaatatccaagcggaagcttaagagtgggaaggatattgaggatgytaagagggagattttgattctagagcacctcactggacaacccaatatagtagagttcaagggtgcttatgaggacaagcagaatctgcatttagtgatggagttgtgttctgggggtgagctttttgatcggattacagcgaaaggtagttattccgagcgagaagcggcagatatctgtagacagattgtgaccgtggttcatgtttgtcattttatgggagtgatgcatagggacttgaagcctgagaatttcttgatggtgagccgggaggagaattccccgttgaaagccacagattttgggctctctgtcttcatagaggacaatgaagtgtacacggatgttgttggaagtgcatactatgtggctccagaggtgctgcgacggagctatgggaaagaaattgatgtctggagtgctggagtcattttatatattcttctaagtggggtgcctccattttggggtgagaatgaaaaaagtatatttgatgcagtattacaaggctacgttgattttgacagtgcaccatggccttctatatctagttctgcaaaggatctaataaaaaaaatgttaatgaaggaccctaaaagacggatcactgcttctgatgccctcaatcatccatggctcagagaagatggtgaggcgtcagacaaacctattgatagtgctgttctagtcaggatgaagcaattcagagcaatgaacaagttgaagaaacttgcattaaaggtaattgcagaaaacctatcagaagaagacatcaaagggttgaaacaaatgtttaacaacatggacactgatagaagtggcacaatcacattcgaagaactcaaaactggattgtctaggctggggtccaagctttctgagttagaaataaagcagctgatggatgctgttgatgttgatcagaatgggactcttgattatactgaattcattactgccactatgcagcggcaccgactagagaaagaagagaacttgttcaaagctttccagttttttgacaaggatagtagtgggtttataacaagagaggagctgaagcaagccatgacccagtatggaatgggggatgaagcgactatagatgaagtcatcgatgatgtggatactgataaagatgggagaattaattatgaggagtttgtggccatgatgaaaaagggaccacaagataccgaatcggcttcaggttggtggaatcgtttcgatttatttggttcctatgagagatcgagaaggtcgccgaatgtaggtagcaatgatgattga

SEQ ID NO: 2059 - protein, 548 aa, Vitis vinifera
  misc_feature (119)..(119): The Xaa at location 119 stands for Ala, or Val.
MGFCFSRPRDIPISSSSSSDGDFTNHHYQPIPISSSKESLDIPPPLSMSVPKPPTSSQIGTVLGRPLCEITSIYDIGKELGRGQFGITYLCTEKSTGLKYACKSISKRKLKSGKDIEDXKREILILEHLTGQPNIVEFKGAYEDKQNLHLVMELCSGGELFDRITAKGSYSEREAADICRQIVTVVHVCHFMGVMHRDLKPENFLMVSREENSPLKATDFGLSVFIEDNEVYTDVVGSAYYVAPEVLRRSYGKEIDVWSAGVILYILLSGVPPFWGENEKSIFDAVLQGYVDFDSAPWPSISSSAKDLIKKMLMKDPKRRITASDALNHPWLREDGEASDKPIDSAVLVRMKQFRAMNKLKKLALKVIAENLSEEDIKGLKQMFNNMDTDRSGTITFEELKTGLSRLGSKLSELEIKQLMDAVDVDQNGTLDYTEFITATMQRHRLEKEENLFKAFQFFDKDSSGFITREELKQAMTQYGMGDEATIDEVIDDVDTDKDGRINYEEFVAMMKKGPQDTESASGWWNRFDLFGSYERSRRSPNVGSNDD

SEQ ID NO: 2060 - DNA, 1686 bp, Vitis vinifera
  CDS (1)..(1686)
  misc_feature (132)..(132): w is a or t
  misc_feature (337)..(337): w is a or t
  misc_feature (340)..(340): y is t or c
  misc_feature (1542)..(1542): y is t or c
atgggcaacacatgccggggatctttcagagggaaatattttcagggctacggccagcccgaagaacaatcgacctccaagcgcaactctgaccgctcaaattccgattattcccccagcagcttgaactcwcagcagctcgtttctcaggaattcgccaaggaaaaccctaagaaagaaacccgtgtatccatccttagtccaaccaataaagacggcaccatgaggcgcggtgttgataaccaatcttattatgtgttgggtcataagactgctaatattcgcgacctttactcattggggcgtaaattgggacaaggacaatttggtacgactwatytatgtactgatatggccacaggcattgagtatgcctgcaaatcgatttcaaagagaaagttgatttctagggaagatgtagaggatgtgagaagggaaattcagataatgcatcatttggcaggtcacaagaatattgtgacgatcaagggtgcttatgaggatccattgtatgttcatatcgtgatggagctttgtgctgggggtgagttgtttgaccggatcattcagagggggcattacagtgagagaagggcagctgaattgacaaagattattgtaggggttgtcgaggcttgtcattcacttggggttatgcatagagatttaaagcctgagaatttcctattggttaacaaggatgatgatttctctctcaaagccattgattttggactctctgttttctttaaaccaggtcaagttttcactgatgtggttggaagtccatattatgttgctcctgaggtactttgcaagcattacgggccagaagcagatgtgtggacggcaggggtcatactgtatatattactaagtggtgtaccgccattttgggcagaaactcaacagggaatatttgatgcggtgctgaagggattcattgatttcgaatcagaaccatggccactaatatctgacagtgcaaaggatctgattcgcaaaatgctgtgttctcggcctgcagatcgcttgactgctcatgaagtattatgtcatccttggatatgcgagaatggagttgctccagacaggtcattagatccagctgtactttctcgtctcaaacagttctcggcaatgaataagttgaagaaaatggctttacgggtaatagctgaaagcctatcagaggaggagattgctggtttgagagagatgtttaaagcaatggatactgatagcagtggtgcaatcacatttgatgagctaaaagctggtttaagaagatatggttctaccttgaaagagtcagagatacgagatcttatggatgcagctgatgtggacaacagtgggaccattgattatggagaatttattgctgccacagttcatcttaataaactagaacgcgaggagcaccttgttgcagcatttcagtactttgacaaagatggaagtggctatataacagttgatgaactccagcaagcttgtgcagaacataatatgaccgatgttttccttgaagacattatyaaggaagttgatcaggataatgatggaaggatcgactacagtgaatttgttgctatgatgcaaaagggcaatgcagggattggaagaagaaccatgcgaaacagtctgaatatgagcatgagagatgcaccaggagctttttag

SEQ ID NO: 2061 - protein, 561 aa, Vitis vinifera
  misc_feature (113)..(113): The Xaa at location 113 stands for Asn, or Tyr.
MGNTCRGSFRGKYFQGYGQPEEQSTSKRNSDRSNSDYSPSSLNSQQLVSQEFAKENPKKETRVSILSPTNKDGTMRRGVDNQSYYVLGHKTANIRDLYSLGRKLGQGQFGTTXLCTDMATGIEYACKSISKRKLISREDVEDVRREIQIMHHLAGHKNIVTIKGAYEDPLYVHIVMELCAGGELFDRIIQRGHYSERRAAELTKIIVGVVEACHSLGVMHRDLKPENFLLVNKDDDFSLKAIDFGLSVFFKPGQVFTDVVGSPYYVAPEVLCKHYGPEADVWTAGVILYILLSGVPPFWAETQQGIFDAVLKGFIDFESEPWPLISDSAKDLIRKMLCSRPADRLTAHEVLCHPWICENGVAPDRSLDPAVLSRLKQFSAMNKLKKMALRVIAESLSEEEIAGLREMFKAMDTDSSGAITFDELKAGLRRYGSTLKESEIRDLMDAADVDNSGTIDYGEFIAATVHLNKLEREEHLVAAFQYFDKDGSGYITVDELQQACAEHNMTDVFLEDIIKEVDQDNDGRIDYSEFVAMMQKGNAGIGRRTMRNSLNMSMRDAPGAF

SEQ ID NO: 2062 - DNA, 1605 bp, Vitis vinifera
  CDS (1)..(1605)
atgggggcgtgcctctccgccaccaaagtcagaagctccaacagcaacaccaccgcaaacgccgcagccaccaagaatacccgccctagagggagctccaagactagcaataagaatcagcagaagaagccgcaggagggagacaggaatcggtcaaatcaacaacacaggaatcctcagccgcagaaggcgaaggattttgatgctcgctacaccatcggcaagttgttgggccacggccaatttgggtatacgtatgtcgccaccgataaggctaatggggatcgagttgcggttaagagaattgagaagaataagatgattcttcctattgctgttgaagacgttaagcgagaggtcaaaatattagaagcgcttaccggccatgagaatgtggttcagttccataatgcatttgaggatgattcttatgtctatatagttatggagttatgtgagggtggtgaattgttggatcggatattggccaagaaggatagccgttatagtgagaaagatgcagcaaaagttgtaaggcagatgctcaaagttgcagctgagtgtcatttacatggtctggtacaccgtgacatgaaaccagagaattttcttttcaagtcaaccaaagaggactcgcctttgaaggccacggattttggtctatcagacttcataaagcctgggaagaagtttcaagatattgttggtagtgcctactatgttgctcctgaagtattgagacggaaatcgggacctgaatcagatgtctggagtattggtgtcattacctacattttgctctgtgggaagcgccccttctgggataagactgaggatggaattttcaaggaggtccttaagaacaagcctgattttcgccgcaaaccatggccaaccataagcaatggtgctaaagattttgtaaagaagttactagtgaaagaccctcgggcaagacttactgctgctcaggccctatcacatccatgggttagagaaggaggagatgcctctgagattccgatcgatatttctgttctgtccaacatgcgtgaatttgtcaagtacagtcacttgaaacagtttgctttaagggcattggcgagcacgcttgatgatgaggaactggctgatcttagggatcaatttgatgctatcgatgtggataaaaatggctctattagccttgaagaaatgagacaggcccttgctaaagatcttccttggaagatgaaggaatcacgagttttagagattcttcaagcaattgacagcaatacagatgggcttgtggattttaccgagtttgttgcagccactctacacgtgcatcaattggaggaacatgactctgataagtggcgacagcggtcacaggctgcttttgacaaatttgatgtggatagggatgggttcataaccccagaggaacttaaactgcacacgggcttaagaggctcaattgacccactgctagaggaagctgatattgacaaagatgggaggataagcttggcagaattccgaaggcttctaagaacagcaagtattagttcgcgacaagtacctagctcatctggttttcggaatcctcggaaaatttag

SEQ ID NO: 2063 - protein, 534 aa, Vitis vinifera
MGACLSATKVRSSNSNTTANAAATKNTRPRGSSKTSNKNQQKKPQEGDRNRSNQQHRNPQPQKAKDFDARYTIGKLLGHGQFGYTYVATDKANGDRVAVKRIEKNKMILPIAVEDVKREVKILEALTGHENVVQFHNAFEDDSYVYIVMELCEGGELLDRILAKKDSRYSEKDAAKVVRQMLKVAAECHLHGLVHRDMKPENFLFKSTKEDSPLKATDFGLSDFIKPGKKFQDIVGSAYYVAPEVLRRKSGPESDVWSIGVITYILLCGKRPFWDKTEDGIFKEVLKNKPDFRRKPWPTISNGAKDFVKKLLVKDPRARLTAAQALSHPWVREGGDASEIPIDISVLSNMREFVKYSHLKQFALRALASTLDDEELADLRDQFDAIDVDKNGSISLEEMRQALAKDLPWKMKESRVLEILQAIDSNTDGLVDFTEFVAATLHVHQLEEHDSDKWRQRSQAAFDKFDVDRDGFITPEELKLHTGLRGSIDPLLEEADIDKDGRISLAEFRRLLRTASISSRQVPSSSGFRNPRKI

SEQ ID NO: 2064 - DNA, 1677 bp, Vitis vinifera
  CDS (1)..(1677)
  misc_feature (1197)..(1197): w is a or t
  misc_feature (1494)..(1494): y is t or c
atgggtaatacttgtgttggtccaagcatctccaagaatggtttcttccaatctgtgtcggctgcaatgtggcggagccgtgcaccggaaggctcggcttcttacacgaatggagaaactatggatgagccacaggctacaactaaagaacccggatcaccattgccagtccaaaacaaacccccagagcaaatgacaatccccaaggaggagcagcctacaaaacccaagaagccccatcaaattaagagggtgtcgagtgcagggcttaggatagaatctgtgttgcaaacaaaaaccggaaactttaagcaattttttattctggggaggaagcttggacaagggcaatttgggactacatttctttgtgtgcagaaagctaccaggaaagagtatgcgtgtaaatcaattgcgaaaaggaaattgttaacagatgaggacgtggaggatgtcagaagggaaattcagataatgcaccacctggcagggcatccaaatgtcatatctatcgagggagcttatgaggatgctgtggcagttcatgttgtcatggaactatgcaaaggtggggagctatttgataggattattcagcacggccattacactgaaagaaaggcagctgagcttactaggactatagttggggttgtggaggcttgtcattctcttggggtcatgcatcgagaccttaagcctgagaactttcttttagtcaatgaggaggaggattcacttctcaaaacaattgactttggattatcagttttcttcaagccaggggaaaaatttactgatgtggttggcagcccatactatgtcgcaccagaagttctgagaaagcgttatggtccagaagcagatgtttggagtgctggggtgatcctatacattttattgagtggagtgcctcccttttgggccgaaaccgagcaaggtatatttgaacaggtcttgcatggtgatcttgacttttcatcagacccttggccgagtatctcagaaagtgccaaagatttagtaaggagaatgcttgttcgagaccctagacggcggttgactgcacatgaagttttgtgtcacccttgggttcaggttgatggtgtagctcctgacaagcctcttgattcggcagttttaagtcgcttgaaacaattttcagcaatgaacaagctcaagaagatggctcttatwgtcattgcagagaacctatcagaagaagaaatagctggcttaaaagaaatgttcaagatgatagatacagacaacagtggccaaatcacttttgaagaactcaaggctggattaaaaagagttggtgctaatcttaaagagtctgaaatttatgatttaatgcatgcagctgatgttgataacaatggaaccattgattatggggagttcatagctgccacactacatctaaacaaagttgagagagaagatcatttatttgcagctttttcctactttgataaggatggaacctgygaagagtttggcttagaggatgtccgcctggaagaaatgatccgagaagttgatcaggacaatgatggacgcatagattacaatgagtttgtggccatgatgcaaaagggaaatccaggcattgggaagaagggcctgcaaaccagtttcagtatggggtttagagaggcgttaaaacattag

SEQ ID NO: 2065 - protein, 558 aa, Vitis vinifera
MGNTCVGPSISKNGFFQSVSAAMWRSRAPEGSASYTNGETMDEPQATTKEPGSPLPVQNKPPEQMTIPKEEQPTKPKKPHQIKRVSSAGLRIESVLQTKTGNFKQFFILGRKLGQGQFGTTFLCVQKATRKEYACKSIAKRKLLTDEDVEDVRREIQIMHHLAGHPNVISIEGAYEDAVAVHVVMELCKGGELFDRIIQHGHYTERKAAELTRTIVGVVEACHSLGVMHRDLKPENFLLVNEEEDSLLKTIDFGLSVFFKPGEKFTDVVGSPYYVAPEVLRKRYGPEADVWSAGVILYILLSGVPPFWAETEQGIFEQVLHGDLDFSSDPWPSISESAKDLVRRMLVRDPRRRLTAHEVLCHPWVQVDGVAPDKPLDSAVLSRLKQFSAMNKLKKMALIVIAENLSEEEIAGLKEMFKMIDTDNSGQITFEELKAGLKRVGANLKESEIYDLMHAADVDNNGTIDYGEFIAATLHLNKVEREDHLFAAFSYFDKDGTCEEFGLEDVRLEEMIREVDQDNDGRIDYNEFVAMMQKGNPGIGKKGLQTSFSMGFREALKH

SEQ ID NO: 2066 - DNA, 1449 bp, Vitis vinifera
  CDS (1)..(1449)
atggcctcaacgacggccgcccctgtcgtccatcgccctcttgcaggcaacggtcgagtactcggccggccgatggaggatgttcgacaaacctacatttttgggcgcgagctgggccgggggcagtttggtgtgacctacctggtgacgcataaggaaacgaaggagcaattcgcctgcaaatcgatcgcgacgaggaagctggtgaaccgcgatgacatcgaggatgtgcggagggaggtgcagatcatgcaccacctgaccgggcaccgcaatatcgtggagctcaagggcgcctacgaggatcgacactctgtgaatctggtgatggagctctgcgccggcggcgagctatttgatcggatcatcgctaaaggtcattactcggagcgggccgcggcggcgttgtgtcggcagatcgtgacggtggttcacaactgccataccatgggagtgatgcatagggatttgaagcctgaaaactttttgttcctgagtactgcggaggattcgccgttgaaggccacggattttggactttcggtcttctttaaaccaggagatgtatttaaagacctagttgggagtgcatattacgtagctcccgaagtgttgcgccgaagttatggagctgaggctgatatttggagtgcaggggtgatactgttcattctacttagtggggtcccaccattctggggagagaatgagcagagtatctttgacactattctacgaggacatattgatttctcgtcagatccttggccttccatatcaaatagtgctaaagatcttgtgaagaagatgctacgtgctgatcctaaagaaagacttactgcaattgatgtcctgaatcatccatggatgaaagaagatggggcatctgataagcccattgatattgctgtcttaactagagtgaagcagttcagggccatgaacaaactcaagaaagtggctctaaaggtaattgcagaaaatctttctgaagaagaaatcataggcttgaaggagatgttcaaatccatggacactgataacagtggaacaattacttatgaggagttgaaaaatggtcttccaaaattgggtaccaagctttctgaatctgaagtgaggcagttgatggaagcggctgatgtggatggaaatggaacaattgattacatcgagtttatatcagccacaatgcatatgaatagaatggaaagagaggaccacttatatagggcttttgaatattttgacaaggacaaaagcgggtatattacaatggaagaattggagcatgccctaaagaggtataatatgggtgatgaaaaaacaataaaggagatcattgcagaagttgacacagatcacgatggaagaatcaactatgaagagtttgcagctatgatgaggaaaggaaacccggatttgatcacaaacagacgtcggaaatga

SEQ ID NO: 2067 - protein, 482 aa, Vitis vinifera
MASTTAAPVVHRPLAGNGRVLGRPMEDVRQTYIFGRELGRGQFGVTYLVTHKETKEQFACKSIATRKLVNRDDIEDVRREVQIMHHLTGHRNIVELKGAYEDRHSVNLVMELCAGGELFDRIIAKGHYSERAAAALCRQIVTVVHNCHTMGVMHRDLKPENFLFLSTAEDSPLKATDFGLSVFFKPGDVFKDLVGSAYYVAPEVLRRSYGAEADIWSAGVILFILLSGVPPFWGENEQSIFDTILRGHIDFSSDPWPSISNSAKDLVKKMLRADPKERLTAIDVLNHPWMKEDGASDKPIDIAVLTRVKQFRAMNKLKKVALKVIAENLSEEEIIGLKEMFKSMDTDNSGTITYEELKNGLPKLGTKLSESEVRQLMEAADVDGNGTIDYIEFISATMHMNRMEREDHLYRAFEYFDKDKSGYITMEELEHALKRYNMGDEKTIKEIIAEVDTDHDGRINYEEFAAMMRKGNPDLITNRRRK

SEQ ID NO: 2068 - DNA, 1494 bp, Vitis vinifera
  CDS (1)..(1494)
atgaagaaatcgtccgcaggagcaccatcaaaacccacaaaaccggcatgggtcctcccctacaagacccaagacttgagaaccctgtacaccataggtcagaagctgggtcaagggcagtttgggacaacatttctgtgcacagacaaggccacgggccacaactatgcctgcaaatccatcccaaagaggaagctcttctgcaaggaggactatgatgatgtgtggagggagattcagataatgcaccacttgtctgagcacccaaatgtggtgaggatcaggggaacctatgaggaccccgtgtttgtgcatttggtcatggagttgtgtgagggaggtgagctttttgataggattgtgcagagggggcattacagtgagagagaggctgcaaagctgatcaagaccattgttggggtggttgaggggtgtcattcacttggggttatgcatagggatctcaagcccgagaacttcttgtttgataccactgctgaggatgctgctctcaaggccactgattttgggttgtctgttttctataagccaggtgaaaccttttctgatgtagttgggagtccctactatgttgcaccagaggtgttgtgcaagcattatggacctgaagcagatgtttggagtgcgggagttattttgtatatcttactaagtggggttccacctttttgggcagagactgaaacaggaatcttccgtcagatactacaaggaaagttagattttgaatctgaaccgtggccttgcatctcagaaactgccaaggaactattgcggaaaatgcttgataggaatccaaagaaaaggctaactgctcatgaagtcctttcccacccatgggtcgtagatgatagaatggccccagataaacctcttgattctgcagtgttatcacgtctgaagcagttctctgcaatgaacaaacttaaaaagatggctttgcgtgtcatagcagaggggctttctgaagaggagattggtggtttgcgggagttgttcaaaatgatagacacggacaatagtggaacaataacgtttgatgaattgaaagatggcttaaaaagagtgggctctgaactaatggagtctgaaatcagggatctcatgaatgcagctgacattgacaacagtggaacaatagattatggggaattccttgctgctactgtgcacttgaataagttggagagggaggaaaatttggtgtcagcattctccttttttgacaaagataaaagtggttacattaccattgatgagcttcaacaagcttgtaaagagtttggcttaagtgaggcccatcttgatgacatgatcaaagaaattgaccaagataatgatggacagatagattacggggaatttgctgcaatgatgaggaagggcaatggaggaatcgggcggagaaccatgagaaacaacttaaacttgggagatgttctagggataccagacatgcgcttgacaaactga

SEQ ID NO: 2069 - protein, 497 aa, Vitis vinifera
MKKSSAGAPSKPTKPAWVLPYKTQDLRTLYTIGQKLGQGQFGTTFLCTDKATGHNYACKSIPKRKLFCKEDYDDVWREIQIMHHLSEHPNVVRIRGTYEDPVFVHLVMELCEGGELFDRIVQRGHYSEREAAKLIKTIVGVVEGCHSLGVMHRDLKPENFLFDTTAEDAALKATDFGLSVFYKPGETFSDVVGSPYYVAPEVLCKHYGPEADVWSAGVILYILLSGVPPFWAETETGIFRQILQGKLDFESEPWPCISETAKELLRKMLDRNPKKRLTAHEVLSHPWVVDDRMAPDKPLDSAVLSRLKQFSAMNKLKKMALRVIAEGLSEEEIGGLRELFKMIDTDNSGTITFDELKDGLKRVGSELMESEIRDLMNAADIDNSGTIDYGEFLAATVHLNKLEREENLVSAFSFFDKDKSGYITIDELQQACKEFGLSEAHLDDMIKEIDQDNDGQIDYGEFAAMMRKGNGGIGRRTMRNNLNLGDVLGIPDMRLTN

SEQ ID NO: 2070 - DNA, 1665 bp, Zea mays
  CDS (1)..(1665)
atgggcaacgcatgcggcggcgcccttagatccaagcaccagcacagcttcaagcacgccgcgtcgtcgcagcgccaccacgcctcctccgagtacagcgccagcgccgcggccgacgactcgcccaggaagccgccaccgccgcccgccaccacggacgcccacgcgccgccgccgccgcccgccaccgccatgaggcgcggcggggccggcgcgccgccggacctggggtccgtgctcggccaccccacccccaacctccgcgacctctacgcgctcggcaggaagctcgggcaggggcagttcggcaccaccttcctctgcaccgagctcgccacgggggtcgactacgcctgcaagtccatctccaagcgcaagctcatcaccagggaggacgtcgacgacgtgcgccgcgagatccagatcatgcaccacctctccggccacaccaacgtcgtcgccatcaagggcgcctacgaggaccagctctacgtccacatcgtcatggagctctgcgccgggggcgagctcttcgaccggatcatacagcgcggccactacagcgagcgcaaggccgccgagctcaccaggatcatcgtcggcgtcgtcgaggcctgccactccctcggtgtcatgcaccgggacctcaagcccgagaacttcctgctcgtcaacaaggacgacgacctctcgctcaaggccatcgatttcggactctctgtcttcttcaagcctggtcaagttttcaccgatgttgttggtagcccatattatgtagctccagaagttttgttgaaaaattatggaccagcagctgatgtatggacagctggtgtcattctttacattctactaagtggcgtgcctccgttttgggcagaaacacaacaaggaatatttgatgctgtattgaaaggtgtcattgattttgattctgatccgtggcctgtcatatctgatagtgcaaaagatcttataagacggatgctgaatcctcgctctgccgagcgcttaacagcacatgaagttctatgccatccatggattcgtgaccatggagtagctcctgaccgtccactggatccagctgtcttatctcgcattaagcaattctctgcaatgaataagttgaagaaaatggctttgcgagtaatagctgagagcctatcagaagaggaaattgcggggttgaaggaaatgttccagaccatggacactgacaacagtggcgcaattacctacgatgaactaaaagaaggattgagaaaatatggttccacactgaaggacactgagattcgtgatcttatggatgcagctgatatcgacaacaatggaacaattgactacattgaattcattgctgcaactttgcatctcaataagctggagcgcgaagaacatctcgtggcagccttttcatatttcgacaaagatggtagtggctatatcacagtggacgaactacagcaagcttgcaaagagcataacatgccggatgcttttcttgatgatgtcatcaacgaagctgatcaggataacgatggccgcattgactatggagagtttgttgccatgatgaccaagggcaatatgggagttggtcgacggacaatgagaaacagcttgaatatcagcatgagggacgcacctggtgcattctga

SEQ ID NO: 2071 - protein, 554 aa, Zea mays
MGNACGGALRSKHQHSFKHAASSQRHHASSEYSASAAADDSPRKPPPPPATTDAHAPPPPPATAMRRGGAGAPPDLGSVLGHPTPNLRDLYALGRKLGQGQFGTTFLCTELATGVDYACKSISKRKLITREDVDDVRREIQIMHHLSGHTNVVAIKGAYEDQLYVHIVMELCAGGELFDRIIQRGHYSERKAAELTRIIVGVVEACHSLGVMHRDLKPENFLLVNKDDDLSLKAIDFGLSVFFKPGQVFTDVVGSPYYVAPEVLLKNYGPAADVWTAGVILYILLSGVPPFWAETQQGIFDAVLKGVIDFDSDPWPVISDSAKDLIRRMLNPRSAERLTAHEVLCHPWIRDHGVAPDRPLDPAVLSRIKQFSAMNKLKKMALRVIAESLSEEEIAGLKEMFQTMDTDNSGAITYDELKEGLRKYGSTLKDTEIRDLMDAADIDNNGTIDYIEFIAATLHLNKLEREEHLVAAFSYFDKDGSGYITVDELQQACKEHNMPDAFLDDVINEADQDNDGRIDYGEFVAMMTKGNMGVGRRTMRNSLNISMRDAPGAF

SEQ ID NO: 2072 - DNA, 1806 bp, Arabidopsis thaliana
  CDS (1)..(1806)
atgggtctatgtacttcgaaaccgaattcatctaattccgatcaaactccggcgaggaatagtccacttccggcgtctgaatccgtcaagccttcgagctcttccgttaatggtgaagatcagtgtgtaacaacaacgaacaatgaaggcaaaaagtctccgtttttccctttttatagtccaagtccagctcactatttcttctccaagaagactccggcgagatctccggcgactaattcgactaattcgactccgaagcgattctttaaacggccgtttcctcctccgtctccggctaaacatatcagagctgttttagcgagaaggcatggttctgtgaagcctaattcgtcggcgatccctgaaggtagtgaagctgaaggaggtggtgttggattggataaaagctttggtttttccaagagttttgcgagtaagtatgagcttggtgatgaagttggtcgtggtcattttggttatacttgtgctgctaagtttaagaagggtgataataaaggtcaacaagtcgcggttaaagtcattcccaaagcaaagatgacgacggctattgcaattgaagatgtgagaagggaagtgaagatattgagggctttgtctggtcataacaatcttcctcatttctatgatgcttatgaggatcatgataatgtctatatagtgatggaactatgtgaaggaggagagcttttggatagaatactttcaagaggtgggaagtacacagaggaggatgcaaagaccgttatgatacaaatattgaatgtggttgctttttgtcatctgcaaggcgttgtacacagagatcttaaaccagagaattttctttttacctcaaaagaagacacctctcaattgaaggcaatagatttcggtttgtcagattacgtgagaccagatgagaggctcaatgacattgttggtagtgcatactatgtagcacctgaagttctgcatagatcttacagtacagaagctgatatttggagtgttggtgtgattgtatatattctattgtgtggaagccgaccgttttgggctaggacagaatcaggaatctttcgtgctgttctaaaagctgatccaagttttgatgaccctccttggcctttgttatcttcagaggcaagagattttgtaaagcggttgctaaacaaagatccgcgtaaaagattaacagctgctcaagccttaagtcatccatggataaaggactcaaacgacgcaaaggttccaatggatattctggttttcaaacttatgagagcttatttacgatcatcatctctccgtaaagctgcattaagagctttatcgaaaacacttacggttgatgaactgttttatctgagagagcagtttgctttgttagaacctagtaagaacggaaccataagtctagaaaacatcaaatcagctctgatgaaaatggcaacagatgcgatgaaggactcacgtattccagagttcttaggacaactgagtgctcttcaatatagaagaatggactttgaggaattctgtgcagcggcattgagtgttcaccagctagaagctcttgatcgatgggaacaacacgctcgttgtgcttatgagcttttcgaaaaggaagggaaccgaccaatcatgatcgatgaactcgcttcggaacttggtcttggcccttctgtaccggttcacgcagtgcttcacgattggcttagacataccgatgggaagcttagctttctcggatttgtgaaattgcaacatggtgtgtctagccgcacgatcaaagctcattag

SEQ ID NO: 2073 - protein, 601 aa, Arabidopsis thaliana
MGLCTSKPNSSNSDQTPARNSPLPASESVKPSSSSVNGEDQCVTTTNNEGKKSPFFPFYSPSPAHYFFSKKTPARSPATNSTNSTPKRFFKRPFPPPSPAKHIRAVLARRHGSVKPNSSAIPEGSEAEGGGVGLDKSFGFSKSFASKYELGDEVGRGHFGYTCAAKFKKGDNKGQQVAVKVIPKAKMTTAIAIEDVRREVKILRALSGHNNLPHFYDAYEDHDNVYIVMELCEGGELLDRILSRGGKYTEEDAKTVMIQILNVVAFCHLQGVVHRDLKPENFLFTSKEDTSQLKAIDFGLSDYVRPDERLNDIVGSAYYVAPEVLHRSYSTEADIWSVGVIVYILLCGSRPFWARTESGIFRAVLKADPSFDDPPWPLLSSEARDFVKRLLNKDPRKRLTAAQALSHPWIKDSNDAKVPMDILVFKLMRAYLRSSSLRKAALRALSKTLTVDELFYLREQFALLEPSKNGTISLENIKSALMKMATDAMKDSRIPEFLGQLSALQYRRMDFEEFCAAALSVHQLEALDRWEQHARCAYELFEKEGNRPIMIDELASELGLGPSVPVHAVLHDWLRHTDGKLSFLGFVKLQHGVSSRTIKAH

SEQ ID NO: 2074 - DNA, 1479 bp, Zea mays
  CDS (1)..(1479)
atgaggcgcggcggggccggcgcgccgccggacctggggtccgtgctcggccacacaacccccaacctccgcgacctctacgcgctcggcaggaagctcgggcaggggcagttcggcaccacctacctctgcaccgagctcgccacggggatcgactacgcctgcaagtccatctccaagcgcaagctcatcaccaaggaggacgtcgacgacgtgcgccgcgagatccagatcatgcaccacctctccggccacaagaacgtcgtcgctatcaagggcgcgtacgaggaccaggtctacgtccacatcgtcatggagctctgtgccgggggcgagctcttcgaccggatcatacagcgcggacactacagcgagcgcaaggccgccgcgctcacaaggatcatcgtcggggtcgtcgaggcctgccactcgctcggggtcatgcaccgggacctcaagcccgagaacttcctgctcgccaacagggacgatgacctctcgctcaaggccatcgatttcggactctctgtctttttcaagcctggtcaagttttcaccgatgtagttggtagcccatattatgtagctccagaagttctgttgaaaagttatggaccagcagctgatgtatggacagccggtgtcattctttacattctactgagtggtgtgcctccattttgggcagaaacacaacaaggaatatttgatgctgtattgaagggtgccattgattttgattctgatccgtggcctgtcatatctgatagtgcaaaagatcttatcagacgaatgctgaatcctcgccctgccgagcgcttaacagcacatgaagttctatgccatccatggattcgtgatcatggagtagctcctgaccgtccactggatccagctgtcttatctcgcattaagcaattctctgcaatgaataagttgaagaaaatggctttacgagtaatagctgagagcctatcagaagaggaaattgcggggttgaaggaaatgttccagaccatggacactgacaacagtggcgcaattacttatgatgagctaaaagaaggattgagaaaatatggctccacactaaaggacactgagattcgtgatcttatggatgcagctgatattgacaacagtggaacaattgactacatagaattcattgctgcaactttgcatctcaataagctggagcgtgaggaacatctcgtggcagccttttcatatttcgacaaagatggtagtggctatatcacagtggacgaactacagctagcttgcaaagagcataacatgccggatgcttttcttgatgatgtcatcaacgaagctgatcaggacaatgatggccgcattgactatggagaatttgttgccatgatgaccaagggcaatatgggagtcggtcgaagaacaatgagaaacagcttgaatatcagcatgagggacgacctggtgtgttctgagacttaa

SEQ ID NO: 2075 - protein, 492 aa, Zea mays
MRRGGAGAPPDLGSVLGHTTPNLRDLYALGRKLGQGQFGTTYLCTELATGIDYACKSISKRKLITKEDVDDVRREIQIMHHLSGHKNVVAIKGAYEDQVYVHIVMELCAGGELFDRIIQRGHYSERKAAALTRIIVGVVEACHSLGVMHRDLKPENFLLANRDDDLSLKAIDFGLSVFFKPGQVFTDVVGSPYYVAPEVLLKSYGPAADVWTAGVILYILLSGVPPFWAETQQGIFDAVLKGAIDFDSDPWPVISDSAKDLIRRMLNPRPAERLTAHEVLCHPWIRDHGVAPDRPLDPAVLSRIKQFSAMNKLKKMALRVIAESLSEEEIAGLKEMFQTMDTDNSGAITYDELKEGLRKYGSTLKDTEIRDLMDAADIDNSGTIDYIEFIAATLHLNKLEREEHLVAAFSYFDKDGSGYITVDELQLACKEHNMPDAFLDDVINEADQDNDGRIDYGEFVAMMTKGNMGVGRRTMRNSLNISMRDDLVCSET

SEQ ID NO: 2076 - DNA, 1473 bp, Glycine max
  CDS (1)..(1473)
atgcagaagcatggttttgcatcaaagcgcaacgtgttgccgtatcaaacggcgaggctaagggaccactacgttctggggaagaagctggggcaagggcaattcgggacgacgtacctgtgcacccacaaggtgacggggaagctctacgcgtgcaaatcgatcccgaagaggaagcttatgtgccaggaggattacgatgatgtgtggagggagattcagatcatgcaccatttgtcggagcatccaaacgttgtccagatacaaggcacgtacgaggattccgtgttcgtgcaccttgtcatggaactatgtgccggcggggagcttttcgacaggatcattcagaaggggcattacagcgagagagaggctgccaagttgataaagaccattgttggggtggtggaggcgtgccactctcttggggtcatgcatagggatctcaagcctgagaatttcttgtttgatacccctggcgaagatgcccagatgaaggccaccgattttggcctctctgtcattctacaagccagacaagcctttcatgatgtagtaggaagtccctactatgttgccccagaggtgttgtgcaagcaatatggacctgaagtggacgtatggagtgctggtgttatcctatacatcttactgagtggggtgccacctttctgggctgaaaccgaagcaggaattttcagacagattttaaatggagatcttgattttgtttctgaaccgtggccaagtatctcagaaaatgctaaagaattggtaaaacagatgttggatagggaccctaagaaaagaatttctgctcatgaagttttatgtaacccttgggttgttgatgacattgcacctgacaaacctctggactctgctgttttgacacgcctaaagcatttctcagcaatgaataaacttaagaagatggcattacgggtcatagcagagaggctttcagaggaagaaataggtggattgaaagagttgtttaaaatgattgacacagacaatagtgggacaataacttttgaggaactgaaggaggggttgaaaagtgtgggctctaatctcatggaatctgaaattaaatcacttatggaagcggctgatatagacaacaatggatcaatagactatggtgaatttcttgctgctacactgcacttgaataagatggaaagagaggagaatttggttgctgctttcgcctattttgataaagatggtagtggttacatcaccattgacgagcttcaacaggcttgtaaggacttcagcctaggtgatgtgcatctggatgagatgatcaaagagattgatcaagataatgatgggaggattgattatgcggagtttgcagcaatgatgaaaaagggtgatccaaatatgggtagaagcagaaccatgaaaggcaatttgaacttcaatattgcagatgcatttggaatgaaagactcttcttga

SEQ ID NO: 2077 - protein, 490 aa, Glycine max
MQKHGFASKRNVLPYQTARLRDHYVLGKKLGQGQFGTTYLCTHKVTGKLYACKSIPKRKLMCQEDYDDVWREIQIMHHLSEHPNVVQIQGTYEDSVFVHLVMELCAGGELFDRIIQKGHYSEREAAKLIKTIVGVVEACHSLGVMHRDLKPENFLFDTPGEDAQMKATDFGLSVILQARQAFHDVVGSPYYVAPEVLCKQYGPEVDVWSAGVILYILLSGVPPFWAETEAGIFRQILNGDLDFVSEPWPSISENAKELVKQMLDRDPKKRISAHEVLCNPWVVDDIAPDKPLDSAVLTRLKHFSAMNKLKKMALRVIAERLSEEEIGGLKELFKMIDTDNSGTITFEELKEGLKSVGSNLMESEIKSLMEAADIDNNGSIDYGEFLAATLHLNKMEREENLVAAFAYFDKDGSGYITIDELQQACKDFSLGDVHLDEMIKEIDQDNDGRIDYAEFAAMMKKGDPNMGRSRTMKGNLNFNIADAFGMKDSS

SEQ ID NO: 2078 - DNA, 1617 bp, Glycine max
  CDS (1)..(1617)
atggttacagacatgctgggactggtggtgtgcacaaccaagaagactcatgaacctttggtcaaccaatcaagagcacctgcaaatcaaccttatcatttacatgaaaagcatgctgcatccactgctcagacagtgcctcaaaatatgccatggaagcctcctggtccagcccttagtcctaaacctgttgttggtgttaggcaagacacaattcttgggaagcagtttgaggatgtgaagcagttccacacacttgggaaggagttgggtagagggcaatttggtgtgacatatctttgcactgagaattcgaccggattgcagtatgcctgcaagtccatttccaagaggaaacttgcgagcaaatctgataaggaggacataaagagggagattcagattatgcagcatttgagtggtcaacccaacattgttgagttcaaaggggcttatgaggataggagctcagttcatgttgtgatggagctgtgtgcaggtggggaactttttgataggattattgccaaggggcattacagtgagaaggctgctgcttcaatttgcagacaaattgtaaatgttgttcatatctgtcatttcatgggtgtgatgcatagggatctgaaaccagagaattttttgctatctagtagggacgaaaatgcacttctcaaggcaaccgattttggcttgtcagttttcattgaagaaggaaaggtatatcgggatatagttggtagtgcttactatgttgctcctgaagttctgcggcgcagatgtgggaaggaaatagatatatggagtgcaggagtcatattgtatatcttacttagtggagtccctccattttgggctgagactgagaagggaatatttgatgccatattggaaggtcacattgattttgaaagtcaaccatggcctaacatctcagacagtgccaaggatcttgttcgtaagatgcttatacaggatccaaagaaacgcattacctctgctcaagttcttgagcacccatggattaaagatggaaatgcttcagacaagccgatagacagtgcagtcctttccagaatgaagcaatttagagcaatgaataagctaaagaaacttgccttgaaggtcattgctgagaatatgtctgcagaagagatccaaggtttgaaggcaatgtttacaaatatggacactgacaagagtggtacaatcacctatgaagaacttaagtcaggattgcatagacttggctcaaagcttacagaggctgaagtgaagcaacttatggaagctgctgatgtagatggaaatggctcaattgactacatagaattcatcactgctacaatgcatagacacaaattagaaagagatgaccaacttttcaaggccttccaatattttgataaagacaacagtgggtttattacaagagatgaattggaatcagccatgaaagaatatggtatgggtgatgatgcaacaatcaaggaaatcatatctgaagttgatacaattatatctgaagtggatacagatcatgatggtagaatcaactatgaagaattctctgcgatgatgaagagtgggaaccaacaacaaggcaagctattctaa

SEQ ID NO: 2079 - protein, 538 aa, Glycine max
MVTDMLGLVVCTTKKTHEPLVNQSRAPANQPYHLHEKHAASTAQTVPQNMPWKPPGPALSPKPVVGVRQDTILGKQFEDVKQFHTLGKELGRGQFGVTYLCTENSTGLQYACKSISKRKLASKSDKEDIKREIQIMQHLSGQPNIVEFKGAYEDRSSVHVVMELCAGGELFDRIIAKGHYSEKAAASICRQIVNVVHICHFMGVMHRDLKPENFLLSSRDENALLKATDFGLSVFIEEGKVYRDIVGSAYYVAPEVLRRRCGKEIDIWSAGVILYILLSGVPPFWAETEKGIFDAILEGHIDFESQPWPNISDSAKDLVRKMLIQDPKKRITSAQVLEHPWIKDGNASDKPIDSAVLSRMKQFRAMNKLKKLALKVIAENMSAEEIQGLKAMFTNMDTDKSGTITYEELKSGLHRLGSKLTEAEVKQLMEAADVDGNGSIDYIEFITATMHRHKLERDDQLFKAFQYFDKDNSGFITRDELESAMKEYGMGDDATIKEIISEVDTIISEVDTDHDGRINYEEFSAMMKSGNQQQGKLF

SEQ ID NO: 2080 - DNA, 1737 bp, Tortula ruralis
  CDS (1)..(1737)
atgggcaacagttgtgtaggagcggctgggtactttcagggcttcaccagtgtgatcgcactgggagggcgtagctccagatcccctagtgaggtatcacccactccatccaaggcagagtccagaggggggagcagggcagaggcggagtccccggagactcaacggaaaccgccacgcccagctcacattcctgctgtggaaccggccgaaactcagcaattcaaagaagtgatcgaagccatgaagaaagggagagagatgaagcccgtccctggccagagtctgactcactctgtgctgcagcggaagacagagaacctcagagacctgtatgttctgggaaagaagctggggcaaggtcaattcggcaccacctacctgtgcattgagaaggccaccaacagggagtacgcatgcaagtctattgccaagcggaagcttatctccaaggaagacgtggatgacgttcgccgtgaactgcagatcatgcatcacctttcaggacatccgaacattgtcatgatcaagggggcgtatgaggatcctgcttcagtgcatctggtgatggagctttgtgcaggcggtgagctgtttgaccgcatcattcaacgaggacagtactcggaagccaaagcggcagtgctcactcgtactatcgtgggcgtggttgagacctgccattctcttggcgtgatgcacagagatttgaagccggagaacttcctgttttcgagtacgaaggaggatgcggctctgaaaacgactgattttgggctatcagtgttctttaaacctggagaagttttcagagatgtggttggaagcccttactatgtggcacctgaagtgttgaggaagaactatggcccggaagcggatgtgtggagtgcgggtgtgatactttacatccttctcagcggagtccctccattctgggcagagacggagcagggcatctttgagcaggttttgaaatcagagcttgattttgcatcagatccatggcctaagatttctgatagcgccaaggatttgatccgcaaaatgctcacgccccaggcttcgaagaggttgaaagcccatcaagtgttggcacatccttggatctgcgaggacggagtagcgcccgacagacccatcgattccgcagtgcaatcccggctcaagcacttctccgcaatgaacaagctgaagaagatcgccatccgggtgatcgcggagtccttgtcggaggaggagatcgcaggtctgaaggagatgttcaagatgatggacacggacaactcagggtccatcagctacgaggagctgaaggcgggtctgaagaaagtgggttccaatctcaaagaggaagacgttcggcagctcatggacgccgctgacgtcgacggcagtggggcaatcgattatggtgagtttctggccgccactctccacctgaacaaggtcgaacgcgatgagaacatgttcgccgccttctcgtacctggacaaggacaacagcggctatctgacggtcgatgagctgcaacatgcgttggccgaattcaacatgggagacgtatccgtggaggagctgctcagggaggtcgaccagaacaacgatggtcagattgattacaccgagttcgtcaccatgatgcgcaagggcaatatgggcggcggtgctggtcgctcatcgctacgcaacagccagcagttgagtctgaccgacgtgttggggatcggaggatag

SEQ ID NO: 2081 - protein, 578 aa, Tortula ruralis
MGNSCVGAAGYFQGFTSVIALGGRSSRSPSEVSPTPSKAESRGGSRAEAESPETQRKPPRPAHIPAVEPAETQQFKEVIEAMKKGREMKPVPGQSLTHSVLQRKTENLRDLYVLGKKLGQGQFGTTYLCIEKATNREYACKSIAKRKLISKEDVDDVRRELQIMHHLSGHPNIVMIKGAYEDPASVHLVMELCAGGELFDRIIQRGQYSEAKAAVLTRTIVGVVETCHSLGVMHRDLKPENFLFSSTKEDAALKTTDFGLSVFFKPGEVFRDVVGSPYYVAPEVLRKNYGPEADVWSAGVILYILLSGVPPFWAETEQGIFEQVLKSELDFASDPWPKISDSAKDLIRKMLTPQASKRLKAHQVLAHPWICEDGVAPDRPIDSAVQSRLKHFSAMNKLKKIAIRVIAESLSEEEIAGLKEMFKMMDTDNSGSISYEELKAGLKKVGSNLKEEDVRQLMDAADVDGSGAIDYGEFLAATLHLNKVERDENMFAAFSYLDKDNSGYLTVDELQHALAEFNMGDVSVEELLREVDQNNDGQIDYTEFVTMMRKGNMGGGAGRSSLRNSQQLSLTDVLGIGG

SEQ ID NO: 2082 - DNA, 1590 bp, Fragaria ananassa
  CDS (1)..(1590)
atgggtaattgctgtgtcacccctccccagacgggttcgccgttaaagaacaagaagaataagccaaacccgtttgcgatagactacgttgtcgccaatggcggcaagctctccgttttgaagaacccaaccggcactgaaatcgagcagacttacgagctgggccgcgagctcggccgcggagagttcgggattacgtatctgtgtactgacaaggccaccaacgagaactacgcttgcaaatcgatatcgaagcagaaactgaggacggctgtggatattgaagatgtgaggagggaagttgagatcatgaagcacttgcctaagcatcccaatattgtgagcttgaaagatacttacgaggatgataatgctgtccatcttgttatggagctctgtgagggcggtgagctttttgatcggatcgtgtctaggggacattacactgagcgtgctgctgctgctgtcactaagactattgtggaagttgttcagatgtgccacaagcatggtgtgatgcaccgggatcttaaacctgagaactttttgtttgcaaacaagaaagaaacagcgcccttgaaggcaattgattttgggttgtcagtgttctttaagcctggtgaaagattcagtgaaattgttggaagtccatactacatggctcctgaggtgctaagacgcaattatggtcctgaagttgatgtgtggagtgctggagttatactttacatcttactttgtggtgttccgcctttctgggcagaaactgaacagggagttgcacaagcaattatacggtctgttgtagattttaagagggacccctggcctaaggtttctgataatgcaaaagaccttgtgaaaaagatgcttgatcctgacccgaagcggaggcttacagctcagcaagttctagatcatacttggttgcaaaatgcaaagagagctccaaatgtttctttaggtgaaacagtgagagcaaggctcaagcagttctctgtaatgaacaagcttaagaaaagtgcactgaaggtcatagctgagcatttgtcacaggaggaagttgctggcatacaagagggatttaagatcatggatactagcaataagggcaagattaacattgatgagctaagagttgggttacataaactaggccatcagattcctgatgctgatgttcatatcctaatggaagctggtgatgtagataatgatgggtatctggactatggggagtttgttgccatttctgttcacctaagaaggatgggcaatgatgatgagcaccttcgcaaagcttttgacttctttgatcaaaacaaaagtgggttcattgaagtcgaggagttgcgaactgccttggctactgaagttgatgaccacgttgaagatgttattagtgccattatcagtgacgtggatacagacaaggatggaaaaataagttacgaggagtttgccaccatgatgaaggccggcacagattggagaaaggcctcaaggcagtattcacgagagcggttcaatagtctcagtttgaaattgatgagggatggatcattggaaggtaaaaccgagagcaaatga

SEQ ID NO: 2083 - protein, 529 aa, Fragaria ananassa
MGNCCVTPPQTGSPLKNKKNKPNPFAIDYVVANGGKLSVLKNPTGTEIEQTYELGRELGRGEFGITYLCTDKATNENYACKSISKQKLRTAVDIEDVRREVEIMKHLPKHPNIVSLKDTYEDDNAVHLVMELCEGGELFDRIVSRGHYTERAAAAVTKTIVEVVQMCHKHGVMHRDLKPENFLFANKKETAPLKAIDFGLSVFFKPGERFSEIVGSPYYMAPEVLRRNYGPEVDVWSAGVILYILLCGVPPFWAETEQGVAQAIIRSVVDFKRDPWPKVSDNAKDLVKKMLDPDPKRRLTAQQVLDHTWLQNAKRAPNVSLGETVRARLKQFSVMNKLKKSALKVIAEHLSQEEVAGIQEGFKIMDTSNKGKINIDELRVGLHKLGHQIPDADVHILMEAGDVDNDGYLDYGEFVAISVHLRRMGNDDEHLRKAFDFFDQNKSGFIEVEELRTALATEVDDHVEDVISAIISDVDTDKDGKISYEEFATMMKAGTDWRKASRQYSRERFNSLSLKLMRDGSLEGKTESK

SEQ ID NO: 2084 - DNA, 1629 bp, Oryza sativa
  CDS (1)..(1629)
atggggaatcagtgccagaacgggactcttgggagtgattaccacaatcggttcccaagggagcatgccgttgggtacgttcagggggatagctacttggacttgaagaagttcgatgatacttggcctgaggtgaacaacttcaagcctactgctgctagtattctcaggcgggggttggatcctacatctatcaatgtccttgggcggaagacagcggacctaagggagcattatatcattggtcggaagcttggtcagggccagtttggcacaacttacctctgtaccgagatcaatacagggtgtgagtatgcttgcaagaccatcccaaagcgcaagctcatcaccaaggaggatgtagaagatgtgcgccgtgagattcagataatgcaccatttgtcgggccacaagaatgttgttgcaatcaaggatgtctatgaggatgggcaagcggtgcacattgtgatggagctctgcgctggtggggagctctttgacaggattcaggagaaggggcattacagcgagcggaaggctgcagagcttataagaataattgtcagcattgtggctatgtgccattcgctcggggtgatgcaccgtgatcttaagccagaaaatttcctccttttggataaagatgatgatctgtcaataaaggcaatagattttggtctatccgtgttcttcaaaccaggtcaggttttcactgagctggttgggagtccatattatgttgctcctgaggtattgcacaaacgttatggaccagaatctgatgtgtggtcagctggagtgatactttacgttttgctgagtggagtgccaccattttgggcagagacacaacaaggaatatttgatgcagttctgaagggtcacattgattttcaatctgatccatggccaaagatatctgacagtgcaaaggatcttataagaaaaatgctctctcattgcccttcggagcgtttgaaggcccatgaagtgctaaggcatccttggatctgtgaaaatggagttgccactgatcaagctctggatcccagtgttatctctcggctcgaacaattctctgcaatgaacaagttaaagaagttggctctgagagtgatagctgagcgtctttcagaggaggagattgctgggttaagagaaatgttcaaggcagtggacacaaaaaatagaggtgttatcactttcggtgagcttagagaaggtttaagaagatttggcgctgaatttaaggatacagagattggtgatataatggaagcggcacacaacgacaataatgttacaatccattatgaagaatttattgctgcaactctacctcttaacaagatggaacgtgaggagcacctgctggcagctttcacatattttgacaaagatgggagtggttatatcacagttgacaagcttcgacgagcttgtggagaacataacatggaggattcactccttgaagagattatttcacaggttgatcaaaacaatgacggccaaattgactacgccgaatttgttgccatgatgccaggcagcaacgttggactacggtggcaaacaatggaaagcagtttgaatgtagcattaagagacgcacctcaagtacattga

SEQ ID NO: 2085 - protein, 542 aa, Oryza sativa
MGNQCQNGTLGSDYHNRFPREHAVGYVQGDSYLDLKKFDDTWPEVNNFKPTAASILRRGLDPTSINVLGRKTADLREHYIIGRKLGQGQFGTTYLCTEINTGCEYACKTIPKRKLITKEDVEDVRREIQIMHHLSGHKNVVAIKDVYEDGQAVHIVMELCAGGELFDRIQEKGHYSERKAAELIRIIVSIVAMCHSLGVMHRDLKPENFLLLDKDDDLSIKAIDFGLSVFFKPGQVFTELVGSPYYVAPEVLHKRYGPESDVWSAGVILYVLLSGVPPFWAETQQGIFDAVLKGHIDFQSDPWPKISDSAKDLIRKMLSHCPSERLKAHEVLRHPWICENGVATDQALDPSVISRLEQFSAMNKLKKLALRVIAERLSEEEIAGLREMFKAVDTKNRGVITFGELREGLRRFGAEFKDTEIGDIMEAAHNDNNVTIHYEEFIAATLPLNKMEREEHLLAAFTYFDKDGSGYITVDKLRRACGEHNMEDSLLEEIISQVDQNNDGQIDYAEFVAMMPGSNVGLRWQTMESSLNVALRDAPQVH

SEQ ID NO: 2086 - DNA, 1611 bp, Arabidopsis thaliana
  CDS (1)..(1611)
atgggtctctgtttctcgtctcctaaagccaccagacgtggcaccggtagtcggaaccctaatcctgattctccgacgcaggggaaggcgagtgagaaggttagtaataaaaacaagaagaatacgaagaagatccaattgaggcaccaaggagggatcccgtacggtaaacgcatcgattttgggtacgctaaggatttcgataaccgatacaccattgggaaattgctcggacatggccagtttggctttacctacgtcgccaccgataacaacaatggcaatcgcgttgcagtcaagagaatcgacaaggccaagatgactcaaccgattgaagtggaagatgtgaagcgagaggttaagatactacaagctttaggtgggcatgagaatgtggtaggctttcacaatgcatttgaggacaagacctatatttacattgtcatggagttatgtgacggtggtgaattgctagatcgaatactagctaaccgttacaccgagaaagatgcagcggttgtggtgagacaaatgctgaaagttgcagctgaatgtcatttacgaggtctagttcaccgcgacatgaagccagagaattttctgttcaaatcaaccgaagaaggttcatctctaaaggctacagattttggtctgtcggacttcataaagccaggagtgaaatttcaggatatagtaggaagcgcatactacgttgcacctgaagtgttgaaacgtaggtcaggacctgaatcagacgtttggagtattggtgtcatcacttacattctgctctgcgggagaagacccttctgggataagactcaagacggaatattcaatgaggtcatgaggaaaaaacctgatttcagagaagtcccatggccaaccattagcaacggtgccaaagatttcgtgaagaagttgttagttaaggagcctcgggcacggttaacagcagctcaagcgctatcacattcatgggtgaaagaaggaggtgaggcctcagaggttccaatagacatatctgttcttaacaatatgcgtcagtttgtgaaattcagccgtctgaagcagattgcacttagggctctggcgaaaacaattaatgaggatgagctggatgatctcagagaccagtttgatgcgattgacattgacaagaacggttctataagccttgaggaaatgaggcaggctcttgcgaaagatgttccttggaaactcaaagatgcaagagttgcagagattctccaagcgaatgatagcaacactgatggtttggtggatttcactgagtttgtggtggctgctttgcacgtgaaccaattggaggagcatgactctgagaagtggcaacagaggtcaagagcagcatttgacaagtttgacatagacggagatgggtttataactcccgaagaacttagattgaatcaatgtttgcagcaaacgggtttaaaaggctccatcgaaccacttcttgaagaggccgacgtagatgaagatgggagaatcagcatcaatgagtttcgcagacttttgagaagtgcaagcctcaagtcaaaaaatgttaaaagccctcctggttaccagctttcacaaaagatgtaa

SEQ ID NO: 2087 - protein, 536 aa, Arabidopsis thaliana
MGLCFSSPKATRRGTGSRNPNPDSPTQGKASEKVSNKNKKNTKKIQLRHQGGIPYGKRIDFGYAKDFDNRYTIGKLLGHGQFGFTYVATDNNNGNRVAVKRIDKAKMTQPIEVEDVKREVKILQALGGHENVVGFHNAFEDKTYIYIVMELCDGGELLDRILANRYTEKDAAVVVRQMLKVAAECHLRGLVHRDMKPENFLFKSTEEGSSLKATDFGLSDFIKPGVKFQDIVGSAYYVAPEVLKRRSGPESDVWSIGVITYILLCGRRPFWDKTQDGIFNEVMRKKPDFREVPWPTISNGAKDFVKKLLVKEPRARLTAAQALSHSWVKEGGEASEVPIDISVLNNMRQFVKFSRLKQIALRALAKTINEDELDDLRDQFDAIDIDKNGSISLEEMRQALAKDVPWKLKDARVAEILQANDSNTDGLVDFTEFVVAALHVNQLEEHDSEKWQQRSRAAFDKFDIDGDGFITPEELRLNQCLQQTGLKGSIEPLLEEADVDEDGRISINEFRRLLRSASLKSKNVKSPPGYQLSQKM

SEQ ID NO: 2088 - DNA, 1662 bp, Arabidopsis thaliana
  CDS (1)..(1662)
atgggatgtctctgcatcaatctgaagaagaaggtcaagaaaccaacaccagacatcagtggagaacaaaacacagaggtaaagagcagagaaataacaccaaaagaacaacctcgtcaaagacaaccagctccaagagccaagttccagattgtggtgcaacctcataaactcccacttccacttcctcagcctcaagaaaaacaaaagctgatcaatcatcaaaaacagagcaccctgcaacaaccagaaccgatcttagggagaccatttgaagatattaaggagaagtatagtcttggtcgcgaattaggtcgtggccaattcggtataacgtatatatgtacagagatttcatcaggcaagaactttgcttgtaaatccatcttgaagagaaagctcatcagaactaaggcaagagacagagaggatgtaagaagggagatacagataatgcactacttatcaggacaaccaaacattgtggaaatcaaaggagcttatgaagacagacaaagtgttcatcttgtaatggagctttgcgaaggcggtgagctttttgataagatcactaaacgaggacattactcagagaaagcagccgcggagatcattagaagtgtggttaaagttgtacagatttgtcatttcatgggtgtgattcatcgcgaccttaaacccgaaaacttcttgttgtccagtaaagatgaagcttcctcaatgctcaaggctactgattttggtgtttcagttttcatcgaagaagggaaagtgtatgaagacattgttggaagtgcatattacgttgcaccggaggttctgaagagaaactacggcaaagcaatcgatatttggagcgccggagttattctctacatccttctctgcggaaatcctccattttgggcagagactgataagggaatatttgaggagattttgagaggagagattgattttgagtcggaaccatggccgtcgatttcggagagtgctaaggatttggtgagaaacatgttaaagtatgatcccaagaaacggtttactgcggctcaagtcctagaacatccttggatacgagaaggtggagaagcttctgataaaccaatcgatagtgctgttttgtcgcggatgaagcaactccgagctatgaataagcttaagaagcttgcatttaaatttatcgcgcaaaatctcaaagaagaggaactaaagggtctcaagacaatgttcgcaaacatggataccgataagagcggtacaatcacttacgacgaattgaaatccggactggaaaaactcggttcgaggttaaccgaaaccgaagttaagcagctcttggaagatgctgatgtcgatgggaacggtactattgattacattgagttcatttcagctactatgaaccggttcagagtagaaagagaggataatttgttcaaagcttttcaacatttcgataaagataacagcgggtttatttcgagacaagaattagaaacagctatgaaagagtataatatgggagatgatattatgatcaaagagattatctcagaagttgatgctgataatgatggaagtataaattatcaagagttttgcaatatgatgaagagctgctcacaatcacaccaatcaaaattggttcaaccgaattaa

SEQ ID NO: 2089 - protein, 553 aa, Arabidopsis thaliana
MGCLCINLKKKVKKPTPDISGEQNTEVKSREITPKEQPRQRQPAPRAKFQIVVQPHKLPLPLPQPQEKQKLINHQKQSTLQQPEPILGRPFEDIKEKYSLGRELGRGQFGITYICTEISSGKNFACKSILKRKLIRTKARDREDVRREIQIMHYLSGQPNIVEIKGAYEDRQSVHLVMELCEGGELFDKITKRGHYSEKAAAEIIRSVVKVVQICHFMGVIHRDLKPENFLLSSKDEASSMLKATDFGVSVFIEEGKVYEDIVGSAYYVAPEVLKRNYGKAIDIWSAGVILYILLCGNPPFWAETDKGIFEEILRGEIDFESEPWPSISESAKDLVRNMLKYDPKKRFTAAQVLEHPWIREGGEASDKPIDSAVLSRMKQLRAMNKLKKLAFKFIAQNLKEEELKGLKTMFANMDTDKSGTITYDELKSGLEKLGSRLTETEVKQLLEDADVDGNGTIDYIEFISATMNRFRVEREDNLFKAFQHFDKDNSGFISRQELETAMKEYNMGDDIMIKEIISEVDADNDGSINYQEFCNMMKSCSQSHQSKLVQPN

SEQ ID NO: 2090 - DNA, 1623 bp, Nicotiana tabacum
  CDS (1)..(1623)
  misc_feature (191)..(191): n is a, g, c or t
  misc_feature (200)..(200): n is a, g, c or t
atgggtggttgttttagcaagaagtatagacaagaaggtgctaatggggggtatagggcaacaagaagaaatgctaatcaagaatatcagaagccaccacaacatcaaccagaaaggccatatcagccacagcctcaacctcagcctcagcctcagccacgcccacagccacaagcacatactgttaccgngcagccggnacaaacccaagatcaaatgcaaggaccccatttgaataacatattaggaaagccttttgaagatattaggaagcaatatacacttgggaaagaattaggtaggggtcagtttggagtgacatatcattgtactgagaattccacggggaacccttatgcttgtaagtctatattgaaaaggaagcttgtgcgtaagaatgatagggaggatatgaagagggaaattcaaattatgcagcatttaagtggccagccaaatatcgtggaatttaaaggcgcgtatgaggataggcattcagtgcacctcgtgatggaactttgtgctggaggagagttgtttgataggattattgctcggggatattattcggagaaggatgctgctgagattattagacagattgcaaatgttgttaacatttgccatttcatgggtgttatgcatagggatcttaagccagagaatttcttactgactagtaaggatgaaaatgcaaagctcaaggcaaccgattttggactttctgtcttcattgaagaagggaaggtgtaccgggatatagttggtagtgcatattatgttgcccctgaagtattgcggcgtagttatgggaaggaagcagatgtatggagtgcaggtgttattttgtatattctactcagcggcgtgcctccattttgggctgaaactgaaaagggaatatttaatgccatactaaaaggagaaattgactttcaaagtgatccatggccatccatatcaaatagtgccaaggaccttataagaaaaatgctcacgcaggagccaaggaagagaatgacttcagcacaagttcttgaacatccatggcttcgaatgggagaagcatcagacaagccaatagacagtgcagtgctgtccagaatgaaacagttcagagcaatgaacaagctcaagaaacttgcattgaaggtcattgcggaaaatttatctgaagaagaaattaagggtctaaaagctatgtttgcgaacattgatacagacaatagtggcacaatcacttatgaagaattgaagtcgggattggctcggcttggatcaaagctaacagagaccgaagtcaagcaactcatggaagctgctgatgtggatggaaatggaacaatcgactacatcgagtttattactgcaacaatgcatagacatcggcttgaaagggatgagcatctctttaaagcatttcagtatttcgacaaggaccacagtggctttatcacgagagatgaactggaaagcgccatgaaggagtacggtatgggcgatgaggcgaccataaaggaaataattgcagaggtggacactgataatgatggtaggatcaattatgaggagttctgtgctatgatgagaagtggaacacaaccacagccgaagcttttctag

SEQ ID NO: 2091 - protein, 540 aa, Nicotiana tabacum
  misc_feature (64)..(64): The Xaa at location 64 stands for Ala, Glu, Gly, or Val.
  misc_feature (67)..(67): The Xaa at location 67 stands for Ala, Glu, Gly, or Val.
MGGCFSKKYRQEGANGGYRATRRNANQEYQKPPQHQPERPYQPQPQPQPQPQPRPQPQAHTVTXQPXQTQDQMQGPHLNNILGKPFEDIRKQYTLGKELGRGQFGVTYHCTENSTGNPYACKSILKRKLVRKNDREDMKREIQIMQHLSGQPNIVEFKGAYEDRHSVHLVMELCAGGELFDRIIARGYYSEKDAAEIIRQIANVVNICHFMGVMHRDLKPENFLLTSKDENAKLKATDFGLSVFIEEGKVYRDIVGSAYYVAPEVLRRSYGKEADVWSAGVILYILLSGVPPFWAETEKGIFNAILKGEIDFQSDPWPSISNSAKDLIRKMLTQEPRKRMTSAQVLEHPWLRMGEASDKPIDSAVLSRMKQFRAMNKLKKLALKVIAENLSEEEIKGLKAMFANIDTDNSGTITYEELKSGLARLGSKLTETEVKQLMEAADVDGNGTIDYIEFITATMHRHRLERDEHLFKAFQYFDKDHSGFITRDELESAMKEYGMGDEATIKEIIAEVDTDNDGRINYEEFCAMMRSGTQPQPKLF

SEQ ID NO: 2092 - DNA, 1920 bp, Zea mays
  CDS (1)..(1920)
atggggaacacgtgcgtcggccccagcatcaccatgaacggcttcttccagtccgtgtccacggcgctgtggaagacgccgcaggaaggcgacgcgctgcccgccgccgccaatggccccggcgggccagccggggccggttcgcagtcggcgctgccgaagccggcgtccgacgtgcaccacgtcgccgtgcagagcgaggcccctgagcccgtcaagatcgccgcctaccactcggagccggcgcccgccgtgcggagcgaggcccctgagcccgtcaagatcgccgcctctcactcggagccggcgcccatggccgccaagcctggtggcgccgccgccaacgccagccccagccccagccccaggccgcgtccgcaggtgaagcgcgtgtcgagcgccgggctgctgctggggtcggtgctgaggcgcaagacggagaacctcaaggacaagtacagcctggggcggcggctcgggcaggggcagttcggcacgacgcacctgtgcgtggagcgcgccacggggaaggagctcgcgtgcaagtcgatcctgaagcgcaagctgggcagcgacgacgacgtggaggacgtgcggcgggagatccagataatgcaccacctggcgggccaccccagcgtggtcggcatccgcggcgcgtacgaggacgccgtggccgtgcacctcgtcatggagctctgcggcggcggcgagctgttcgaccggatcgtgcggaggggccactacaccgagaggaaggccgccgagctcgcccgcgtcatcgtcggcgtcgtggaggcgtgccactccatgggcgtcatgcaccgggacctcaagcccgagaacttcctcttcgctgaccactcggaggaggccgctctcaagaccattgacttcggtctctccatcttctttcgccctggccaaattttcaccgacgtcgtgggcagcccttactacgtggcgccggaggtactgaagaagagatacgggccagaggcggacgtctggagcgctggcgtaatcatctacatcctgctgtgcggagtgccgccattctgggcagagaacgagcagggcatattcgaggaggttctgcacgggaggctggacttcgagtcggagccgtggcccagcatctccgacggcgccaaggatctcgtgaggaggatgcttgtcagggacccgaggaagagactgaccgctcacgaagttctacggcatccgtgggttcaggtcggtggagtggctcctgacaggccgctggactcggccgttctgtctcgcatgaagcagttctcggctatgaataagctgaagaagatggctcttagggtgatcgccgagaacctgtcggaggacgagatcgccgggctgagggagatgttcaagatgatcgacgcggacaacagcgggcagatcacgttcgaggagctcaaggttggcctggagaaggtgggcgccaacctgcaggagtcggagatctacgcgctcatgcaagccgcggacgtggacaacaacggcacgatcgactacggcgagttcatcgcggccacgctgcacctgaacaaggtggagcgggaggaccacctgttcgcggcgttccagtacttcgacaaggacggcagcggctacatcaccgccgacgagctgcaggtggcgtgcgaggagttcggcctgggcgacgtccagctggaggacttgatcggggaagtcgaccaggacaacgacgggcgcatagactacaacgagttcgtggcgatgatgcagaagccgacggtggggggatcccgaagaaggccgatctgcagaacagcttcagcatcgggttcagcatcgggttcagggaggcgctcaggatggcctagacctctgtgtctctggcttccctgctgcctgcgtgtaggtgtagatgattga

SEQ ID NO: 2093 - protein, 639 aa, Zea mays
MGNTCVGPSITMNGFFQSVSTALWKTPQEGDALPAAANGPGGPAGAGSQSALPKPASDVHHVAVQSEAPEPVKIAAYHSEPAPAVRSEAPEPVKIAASHSEPAPMAAKPGGAAANASPSPSPRPRPQVKRVSSAGLLLGSVLRRKTENLKDKYSLGRRLGQGQFGTTHLCVERATGKELACKSILKRKLGSDDDVEDVRREIQIMHHLAGHPSVVGIRGAYEDAVAVHLVMELCGGGELFDRIVRRGHYTERKAAELARVIVGVVEACHSMGVMHRDLKPENFLFADHSEEAALKTIDFGLSIFFRPGQIFTDVVGSPYYVAPEVLKKRYGPEADVWSAGVIIYILLCGVPPFWAENEQGIFEEVLHGRLDFESEPWPSISDGAKDLVRRMLVRDPRKRLTAHEVLRHPWVQVGGVAPDRPLDSAVLSRMKQFSAMNKLKKMALRVIAENLSEDEIAGLREMFKMIDADNSGQITFEELKVGLEKVGANLQESEIYALMQAADVDNNGTIDYGEFIAATLHLNKVEREDHLFAAFQYFDKDGSGYITADELQVACEEFGLGDVQLEDLIGEVDQDNDGRIDYNEFVAMMQKPTVGGSRRRPICRTASASGSASGSGRRSGWPRPLCLWLPCCLRVGVDD

SEQ ID NO: 2094 - DNA, 1878 bp, Zea mays
  CDS (1)..(1878)
atggggcagtgctacgggaaggcgcgcggcgcgtcctcgcgggcggaccacgacgccgacccctcgggggcggggtcggtcgcgccgccatccccgctgccggccaacggcgcgccgctgcccgccacgcccaggcgccacaagtccggatccaccacgccggtgcaccaccaccaggcggcgacgcccggcgccgccgcctggcctagtccgtacccggccggcggcgccagcccgctccccgcgggcgtgtcgccgtcgccggcccggtccacgccccggaggttcttcaagcggcccttcccgccgccctcgcccgccaagcacatcaaggccacgctcgccaagcgcctcggcgggggcaagcccaaggagggcaccataccggaggagggcggcgcgggggccggggccggggccggcgccggcgccggcgcggccgttggtgccgccgattccgccgaggccgaccgcccgttggacaaaacgttcggcttcgccaagaactttggggccaagtacgatctcgggaaggaggtcgggaggggccactttggccacacctgctccgccgtcgtcaagaagggcgagcacaagggccataccgtcgccgtcaagatcatctccaaagctaagatgacaacggccatttccattgaagatgttcgtagggaggtcaagattttgaaagccctatcagggcacgataatctcgtcagattctatgatgcatgtgaggacgccctcaatgtctacattgtcatggaattatgtgaaggtggagagttgctagacagaattttagcaagaggtgggagatatacagaagaagatgccaaagcgatcattgtacagattttgagcgtagtggccttctgtcatcttcagggagtagtgcatcgtgatttgaagccagagaattttctcttcacaacaagagatgaaagcgctcctatgaagttgattgactttggtctgtcagattttattagaccagatgaaaggctcaatgatattgttggaagtgcttattatgttgctccagaggttctacacagatcatacagtatggaagcagacatttggagtataggtgttataacatacattctgctctgtggcagtcggccattctgggcaaggacagaatctgggatcttccggtccgtattgagggctgatcccaattttgacgattcaccatggccttcagtatcggctgaggctaaggattttgtgaagagatttctgaacaaagattaccgcaaaagaatgactgctgtccaagcactgactcacccttggttacgagatgaacaaaggcaaattccattggacatactcattttcagattagttaagcagtatctccgtgctactcctcttaaacgtttggcattaaaggcactatctaaggctttaagcgaggatgaacttttgtatcttaggttgcagtttaagctgcttgaacccagagatgggttcgtgtcactcgacaactttcggacggctctgacaagatactcaactgacgccatgagagaatcaagggttcttgagtttcagcatgcgttggaaccacttgcgtacagaaagatggactttgaagaattctgtgctgcagcaatcagcccgtaccagctggaagctttggaaaggtgggaagaaattgctggaacagcttttcagcactttgaacaagagggcaaccgagttatatcagttgaggagttagcacaggaactaaatctcgcgccgacacattactccattgtgcaagactggatcagaaaatcggacggcaagcttaactttcttgggttcaccaaatttttgcacggtgtcacgatacggggttcaaatacaagacgacactaa

SEQ ID NO: 2095 - protein, 625 aa, Zea mays
MGQCYGKARGASSRADHDADPSGAGSVAPPSPLPANGAPLPATPRRHKSGSTTPVHHHQAATPGAAAWPSPYPAGGASPLPAGVSPSPARSTPRRFFKRPFPPPSPAKHIKATLAKRLGGGKPKEGTIPEEGGAGAGAGAGAGAGAAVGAADSAEADRPLDKTFGFAKNFGAKYDLGKEVGRGHFGHTCSAVVKKGEHKGHTVAVKIISKAKMTTAISIEDVRREVKILKALSGHDNLVRFYDACEDALNVYIVMELCEGGELLDRILARGGRYTEEDAKAIIVQILSVVAFCHLQGVVHRDLKPENFLFTTRDESAPMKLIDFGLSDFIRPDERLNDIVGSAYYVAPEVLHRSYSMEADIWSIGVITYILLCGSRPFWARTESGIFRSVLRADPNFDDSPWPSVSAEAKDFVKRFLNKDYRKRMTAVQALTHPWLRDEQRQIPLDILIFRLVKQYLRATPLKRLALKALSKALSEDELLYLRLQFKLLEPRDGFVSLDNFRTALTRYSTDAMRESRVLEFQHALEPLAYRKMDFEEFCAAAISPYQLEALERWEEIAGTAFQHFEQEGNRVISVEELAQELNLAPTHYSIVQDWIRKSDGKLNFLGFTKFLHGVTIRGSNTRRH

SEQ ID NO: 2096 - DNA, 1722 bp, Cucurbita pepo
  CDS (1)..(1722)
atggggaatacttgtgtaggaccaagtatttcaaagaatggattctttgaatctgtttctgctgctatgtggcgatctaaaacgccggagaactcggtttctaatcatactaatggagaaaatgttcgagaggtagtagctagcgaacccgaatcgcctttgcctgttcaaaaccaacctcctgaaaaagtgacaatgccagaatcagtagctaaaccagaaccgcctatggaaccgaaggtgcgccctgttatgaagagggtgggtagtgctgggcttcgaggtggttcggttctacagacgaaaacgggaaactttaaggagtattatagcttgggtaaaaaattaggccaaggacaatttgggacaacatatatgtgtgtggagaaggcaactgggaaagagtatgcttgtaagtctattgcaaagaggaagttggttaatgaggatgatgttgaagatgtgagaagggaaattcagataatgcaccatttgtctggacacccgaatgttatatcgatcaagggggcgtacgaggatgccgttgcagttcaggtagtcatggagttgtgtgctggaggtgagctatttgataggatcattcaacgtggacattataccgaaagaaaggctgctgagcttactaggaccatagtcggggttttggaggcatgtcacgctcttggagttatgcaccgtgaccttaagcccgagaattttctctttgttagcaaggaagaggaatcacttctcaagacaattgattttggactatcaatgttcttcaaaccaggcgaaaagtttaatgatgtggtcgggagtccgtactatgttgcacctgaagttttgcggaagcgatatggtccagaagcagatgtttggagtgctggagtaattgtatacattctgttaagtggagtgcctcccttttgggctgagtctgaggaagggatatttgaagaggtcctgcacggcgatcttgacttctcctccgacccttggcccagcatctccgacagtgcgaaagatttggttagaagaatgcttgttcgagacccgagaaagagactgacagcatatgaagttttgtgccacccttgggttcaagttgatggtgtcgctcctgacaagccgcttgactcggcagtcttgactcgcttgaagcagttttcagccatgaacaagctcaagaaaatggctatcaaggtcattgcagagagcttatctgaagaagaaattgctggactcaaggaaatgttcaagatgatagatactgacaacagcggccaaatcacatttgaagaactcaaagctggattgaaaaagtttggagctaatcttaaggagtccgaaatttacgacctaatgcaagcagcggatatagacaacaacggaaccatcgactacggggagttcgtagctgccacattgcatctaaacaaaatcgagaaggaagatcatcttctagcagcgttttcatatttcgacaaagatggaagcgggttcattacccacgacgagcttcaacaagcatgtaaagagttcgggatagaggatcttcaaatggaagaaatgatgcgcgaggtcgatcaaaacaatgacggaagcatcgactataacgagttcgtggcgatgatgcaaaaaggaaatgtagtgaatactggcaagaaagggctacaaagtagcttcagcattggctttagggaggctctaaaactctag

SEQ ID NO: 2097 - protein, 573 aa, Cucurbita pepo
MGNTCVGPSISKNGFFESVSAAMWRSKTPENSVSNHTNGENVREVVASEPESPLPVQNQPPEKVTMPESVAKPEPPMEPKVRPVMKRVGSAGLRGGSVLQTKTGNFKEYYSLGKKLGQGQFGTTYMCVEKATGKEYACKSIAKRKLVNEDDVEDVRREIQIMHHLSGHPNVISIKGAYEDAVAVQVVMELCAGGELFDRIIQRGHYTERKAAELTRTIVGVLEACHALGVMHRDLKPENFLFVSKEEESLLKTIDFGLSMFFKPGEKFNDVVGSPYYVAPEVLRKRYGPEADVWSAGVIVYILLSGVPPFWAESEEGIFEEVLHGDLDFSSDPWPSISDSAKDLVRRMLVRDPRKRLTAYEVLCHPWVQVDGVAPDKPLDSAVLTRLKQFSAMNKLKKMAIKVIAESLSEEEIAGLKEMFKMIDTDNSGQITFEELKAGLKKFGANLKESEIYDLMQAADIDNNGTIDYGEFVAATLHLNKIEKEDHLLAAFSYFDKDGSGFITHDELQQACKEFGIEDLQMEEMMREVDQNNDGSIDYNEFVAMMQKGNVVNTGKKGLQSSFSIGFREALKL

SEQ ID NO: 2098 - DNA, 1878 bp, Isatis tinctoria
  CDS (1)..(1878)
atgggtaatacttgtgttggaccaagcagaaatgggttcttgcaatccgtttcggctgcaatgtggcggcctcgggatgcagatgattcggtttctcagagcaatggagatactgcaagtgaagctgtttcaggagagcttcgatctccatcatctgatcaggtccagaataaacctcctgagcagctcacaatgccaaagccagggactaacatcgagataaaggcgaaatccgatgtagagattcagcctgaaatcaagctggaaacgcaagaggtgacaaaaccggagtccaagccggagaccaagtcagagactaagcctgagaccaagtcggagactaagccggagaccaagtcagagactaagccggagacaaaagctgatactccggctaagcctaagaaacctaaacacatgaagagagtgtccagtgcaggtcttaggactgagtcggtgttgcagaggaaaactgaaaactttaaggaattctattccttgggaaggaaacttggacaagggcaatttgggacgacttttctatgcgtggagaagacttcagggaaggagtttgcctgcaagtctattgctaagaggaagctgttgaccgatgaggacgtggaagatgtgagaagggaaattcagattatgcatcacttggctggtcacccgaatgtcatatccattaaaggagcttatgaggatgttctggcggtgcaccttgttatggagtgttgtgcaggtggcgagctttttgacagaataattcaacgcggtcactacacagagaggaaagctgctgagctcactagaaccatagtcggggtggtagaggcttgtcattctcttggtgttatgcatcgagacctcaagcccgagaattttctgtttgtcagtaaacacgaagattcactcttgaagacgattgattttggactctctatgttctttaagccagatgatgtttttacagatgttgttggtagcccgtattatgtagctccggaagttcttcgaaagcattatggtcctgaagctgatgtctggagtgctggagtgattgtatacattttgttaagtggagttcctccattctgggctgaatccgaacaaggtattttcgaacaggtcctccatggtgatcttgacttttcatccgatccctggccgagcatatctgaaagtgcaaaagacttagtgaggaaaatgcttgttcgggatcccaagagaagactaactgcacaccaagtattatgtcatccatgggtacaaatcgacggcgtggctccagacaaacctctagattctgctgttctgagccgtatgaagcaattttctgcaatgaacaagttcaagaaaatggctcttagagtcattgctgagagcttatctgaagaggaaatagccggcttgaaagaaatgtttaatatgatagatgccgacaaaagcggtcagataactttcgaagaactgaaagcaggactaaaacgagtaggggcgaatctcaaagagtcagagattctcgacttgatgcaagctgctgatgtggacaacagtggaacaatagactacaaagagttcatagcagcaacattgcatttaaacaagatagagagagaagaccatttgtttgcagcctttacatactttgacaaagatgggagcggttatatcaccccggacgagcttcaacaagcttgtgaggagtttggagttgaggatgtccgcatagaagaaatgatgcgtgatgttgatcaagacaatgacgggcgaatagattataacgagtttgtggcgatgatgcagaaagggagcatcacaggagttccagtgaagatgggactagagaaaagctttagcattgctcttaaactctag

SEQ ID NO: 2099 - protein, 625 aa, Isatis tinctoria
MGNTCVGPSRNGFLQSVSAAMWRPRDADDSVSQSNGDTASEAVSGELRSPSSDQVQNKPPEQLTMPKPGTNIEIKAKSDVEIQPEIKLETQEVTKPESKPETKSETKPETKSETKPETKSETKPETKADTPAKPKKPKHMKRVSSAGLRTESVLQRKTENFKEFYSLGRKLGQGQFGTTFLCVEKTSGKEFACKSIAKRKLLTDEDVEDVRREIQIMHHLAGHPNVISIKGAYEDVLAVHLVMECCAGGELFDRIIQRGHYTERKAAELTRTIVGVVEACHSLGVMHRDLKPENFLFVSKHEDSLLKTIDFGLSMFFKPDDVFTDVVGSPYYVAPEVLRKHYGPEADVWSAGVIVYILLSGVPPFWAESEQGIFEQVLHGDLDFSSDPWPSISESAKDLVRKMLVRDPKRRLTAHQVLCHPWVQIDGVAPDKPLDSAVLSRMKQFSAMNKFKKMALRVIAESLSEEEIAGLKEMFNMIDADKSGQITFEELKAGLKRVGANLKESEILDLMQAADVDNSGTIDYKEFIAATLHLNKIEREDHLFAAFTYFDKDGSGYITPDELQQACEEFGVEDVRIEEMMRDVDQDNDGRIDYNEFVAMMQKGSITGVPVKMGLEKSFSIALKL

SEQ ID NO: 2100 - DNA, 1584 bp, Oryza sativa subsp
  CDS (1)..(1584)
atggggtcgtgttgcagcagagctacgtctccagattctggtcgaggaggagcaaacggttatggctattctcaccagacaaaacctgctcagacaactcctagctataaccatcctcagccgccgccgccagctgaggtgaggtacacaccatcagcaatgaaccctccggtagtcccacctgtggttgccccaccgaagcccaccccagacacaattcttggaaagctgtatgacgatgtgcgctcggtttactcccttggaaaggaactcggaaggggacagtttggggtgacatacctgtgcacggagatcgctagtggtaagcagtatgcttgcaaatccatctctaagcgcaagcttgtgagcaaggccgacaaggaggacattcgccgggagattcagatcatgcagcacctatctggacaacaaaacattgtcgagttccggggagcatatgaggacaagagcaatgtccatgttgtcatggagctctgcgctggtggggagctgtttgatcggatcattgccaaggggcactactcagagcgtgcggctgctaccatctgcagggcagtggtgaatgttgtcaacatttgccattttatgggagtgatgcatcgtgatttgaaaccggagaacttcttacttgcaaccaaagaagagaatgcaatgctcaaagccactgattttggtctctcagttttcattgaagaaggaaaaatgtatagagacattgttggaagtgcttattatgttgctcctgaagtccttcggcggaattatggtaaagagattgatgtatggagtgcaggcgttattttgtacattcttctcagtggtgttcctccattttgggctgaaactgaaaagggtatatttgatgctattcttcaaggggagattgactttgagagtcaaccatggccatcaatatccgagagtgctaaagaccttgttagaaagatgttgacacaagatccaaagaaaagaattacttcggcccaagttctccaacatccctggctcagagatggagaagcatctgacaaacctattgacagcgctgttctttctaggatgaagcaattcagagcaatgaacaagctgaaaaagatggctctgaaggttattgcttcaaaccttaatgaggaggagatcaagggcctgaagcaaatgttcacaaacatggacacagacaacagcgggaccatcacatatgaagaactcaaagcaggattagccaaacttggatcaaagctttcagaagctgaagtaaagcagttgatggaagctgctgatgtagacggcaatggatccatcgactatgttgaatttatcactgccacaatgcatagacacaagctcgaaagagatgagcatttgtttaaggcattccagtattttgacaaagacaacagtggctttatcacaagagatgaactggaatccgctttaatcgagcatgaaatgggcgatacgagtaccataaaggatattatatcagaagtcgacacggataatgatgggaggattaactacgaggaattttgcgctatgatgatagccgagatgatggattga

SEQ ID NO: 2101 - protein, 527 aa, Oryza sativa subsp
MGSCCSRATSPDSGRGGANGYGYSHQTKPAQTTPSYNHPQPPPPAEVRYTPSAMNPPVVPPVVAPPKPTPDTILGKLYDDVRSVYSLGKELGRGQFGVTYLCTEIASGKQYACKSISKRKLVSKADKEDIRREIQIMQHLSGQQNIVEFRGAYEDKSNVHVVMELCAGGELFDRIIAKGHYSERAAATICRAVVNVVNICHFMGVMHRDLKPENFLLATKEENAMLKATDFGLSVFIEEGKMYRDIVGSAYYVAPEVLRRNYGKEIDVWSAGVILYILLSGVPPFWAETEKGIFDAILQGEIDFESQPWPSISESAKDLVRKMLTQDPKKRITSAQVLQHPWLRDGEASDKPIDSAVLSRMKQFRAMNKLKKMALKVIASNLNEEEIKGLKQMFTNMDTDNSGTITYEELKAGLAKLGSKLSEAEVKQLMEAADVDGNGSIDYVEFITATMHRHKLERDEHLFKAFQYFDKDNSGFITRDELESALIEHEMGDTSTIKDIISEVDTDNDGRINYEEFCAMMIAEMMD

SEQ ID NO: 2102 - DNA, 1614 bp, Isatis tinctoria
  CDS (1)..(1614)
atgggcaattgctgcgggacggcggggtcgttggctcagaacgataacaataagccgaagaaaggaaggaagaagcaaaaccctttctcgatcgattacggtctccaccacggcggtggcggcggaggagctctcaagctcatcgtgctgagcgatccaacaggtcgggagatcgagcagaaatacaagctcgggagagagctgggccgtggagagttcggcgtcacgtatctgtgtaccgacaaggagaccgacgaggtgttggcgtgtaagtcgatcttgaagaagaagctgaggacggctgtggatatagaggacgttaggagagaggttgagatcatgaggcatatgcctgtgcatcccaatgtcgtcactttgaaagagacttatgaggatgagcatgctgtgcatctcgttatggagctttgcgaaggaggcgaattgtttgataggattgtcgccagagggcattacaccgagagagctgctgctgctgttactaagaccatcatggaggttgttcaggtgtgtcataacaatggggtgatgcacagggacctgaaacctgagaacttcttgtttgcgaacaagaaggagactgcacctcttaaggcgattgatttcggactctctgttttcttcaaaccaggcgagaggttcaacgaaatcgttggcagtccgtactacatggctcctgaggtgctaaaacgaaactatgggccagaagttgacatttggagtgcaggtgtaattctttacatactgctctgtggtgtcccgcctttctgggcagaaactgaacaaggagttgcacaagcaattattcgatctcaactggacttcagaagggacccatggcccaaggtttctgagaacgcaaaagaccttatcaggaaaatgcttgatcctgaccagaagcgtcgtctcacagctcagcaagtgcttgatcatccgtggttacagaatgcaaagactgctcccaatgtatcattaggtgaaacagtaagggcaagactgaagcagttcaccgtcatgaacaagctcaagaaacgagcactcagggttattgctgagcatttatcagatgaagaagcttctggtataagagaagggttccaaatcatggacacaagccaaagagggaagattaacatagacgagctaaaaatcgggttgcagaaacttggtcatgctattccccaagatgatttacaaattttgatggacgctggagatatcgataaagatggatatttggactgcgatgagttcattgccatatcggtgcatctcaggaagatgggcaacgacgagcatctcaagaaagcgtttgcgttctttgatcaaaatgataacggatatatcgaaatagaggagttgagggaagctttgtctgatgaagttggtacaagcgaagaggttgttgatgccattattcgcgatgttgataccgataaggatggaagaataagttacgaagagtttgcgacgatgatgaaaacgggaacagattggagaaaagcttcgaggcagtactcgagggaacggtttaacagtatcagtctcaaactgatgcaagatgcatcgttgcaagtcaatggcgatgcgagatga

SEQ ID NO: 2103 - protein, 537 aa, Isatis tinctoria
MGNCCGTAGSLAQNDNNKPKKGRKKQNPFSIDYGLHHGGGGGGALKLIVLSDPTGREIEQKYKLGRELGRGEFGVTYLCTDKETDEVLACKSILKKKLRTAVDIEDVRREVEIMRHMPVHPNVVTLKETYEDEHAVHLVMELCEGGELFDRIVARGHYTERAAAAVTKTIMEVVQVCHNNGVMHRDLKPENFLFANKKETAPLKAIDFGLSVFFKPGERFNEIVGSPYYMAPEVLKRNYGPEVDIWSAGVILYILLCGVPPFWAETEQGVAQAIIRSQLDFRRDPWPKVSENAKDLIRKMLDPDQKRRLTAQQVLDHPWLQNAKTAPNVSLGETVRARLKQFTVMNKLKKRALRVIAEHLSDEEASGIREGFQIMDTSQRGKINIDELKIGLQKLGHAIPQDDLQILMDAGDIDKDGYLDCDEFIAISVHLRKMGNDEHLKKAFAFFDQNDNGYIEIEELREALSDEVGTSEEVVDAIIRDVDTDKDGRISYEEFATMMKTGTDWRKASRQYSRERFNSISLKLMQDASLQVNGDAR

SEQ ID NO: 2104 - DNA, 1572 bp, Medicago truncatula
  CDS (1)..(1572)
atgggcaattgttgctctggtggtactgaagaccctgaagataagggagaaaacaatcaacaaaacaacgatgcaaatggagattcttcagctacaacgccgccaccatggtcaaaaccttcgcctcaaccttctaaaccatcaaaaccttccgcgatcggtcctgttcttggcaggccaatggaagatgttaaggctacttatagcatggggaaggaactagggagaggacaatttggtgtaacacatttgtgcacacacaaaaccactggaaaacaatatgcatgcaaaacaatagccaagagaaagcttgcgaataaggaagatattgaggatgttaggagggaggttcaaatcatgcatcaccttacaggacagcctaatattgtggaacttattggtgcttttgaagataaacaatctgttcatttggttatggagttgtgtgctggtggtgaacttttcgatcgaatcattgctaagggtcattacaccgaacgtgctgcagcttccttgttgagaaccattgttcaaattgttcatacttgtcattccatgggtgttattcatagagatcttaagcctgagaattttcttttgttgagcaaggatgagaattctcctctcaaagccactgatttcggtttatctgtcttttacaaacaaggtgaccagtttaaagatattgttggtagtgcatattacattgcacctgatgtgttgaagaggaaatatggaccagaagtagacatttggagtgttggtgtcatgttatatattcttctatgtggtgttccaccattttgggcagaatctgaaaatggtatattcaatgccatcctaagaggacatgttgacttttctagtgatccatggccctccatttcaccttcagcaaaggatcttgtaaggaaaatgttgaattcagatcccaagcaaaggattacagcatatgaagttctgaatcatccatggatcaaggaagacggagaagcaccagatacacctcttgacaatgcagtgctcaataggctcaaacagtttagagcaatgaaccaattcaagaaagttgctctaaaggttattgctagctgcttatcagaggaagaaatcatgggattgaagcagatgtttaagggtatggacactgacaatagtggaaccattacaattgaagagctcaagcaagggcttgcaaaacaaggaactagactgagtgaaacagaagttaagcaattaatggaagctgcagatgctgatggtaatggaatcattgactacgacgagttcatcacagcaactatgcacatgaaccgattgaacagagaagaacatgtttatactgccttccaattcttcgataaagataacagcgggtacatcaccattgaagaactagagcaagctctccatgagtataacatgcatgacggcagggacataaaagaaatcatttcagaagttgatgcagataacgatggtcggattaactacgatgaatttgttgcaatgatgggcaaaggaaacccagaagcaaataccaagaagaggcgtgattcgaccttgtattag

SEQ ID NO: 2105 - protein, 523 aa, Medicago truncatula
MGNCCSGGTEDPEDKGENNQQNNDANGDSSATTPPPWSKPSPQPSKPSKPSAIGPVLGRPMEDVKATYSMGKELGRGQFGVTHLCTHKTTGKQYACKTIAKRKLANKEDIEDVRREVQIMHHLTGQPNIVELIGAFEDKQSVHLVMELCAGGELFDRIIAKGHYTERAAASLLRTIVQIVHTCHSMGVIHRDLKPENFLLLSKDENSPLKATDFGLSVFYKQGDQFKDIVGSAYYIAPDVLKRKYGPEVDIWSVGVMLYILLCGVPPFWAESENGIFNAILRGHVDFSSDPWPSISPSAKDLVRKMLNSDPKQRITAYEVLNHPWIKEDGEAPDTPLDNAVLNRLKQFRAMNQFKKVALKVIASCLSEEEIMGLKQMFKGMDTDNSGTITIEELKQGLAKQGTRLSETEVKQLMEAADADGNGIIDYDEFITATMHMNRLNREEHVYTAFQFFDKDNSGYITIEELEQALHEYNMHDGRDIKEIISEVDADNDGRINYDEFVAMMGKGNPEANTKKRRDSTLY

SEQ ID NO: 2106 - DNA, 1554 bp, Medicago truncatula
  CDS (1)..(1554)
atgggcaaccgcatcagctccaaacacaaaccctcttccgattcccaaacccgttccaaatcagaaccctcacattccactcccacttccttccatcctcctaatcgaacccccaaacaatccactcacacccccaccccttcctcctcccccctcggccgcgtcttaggcaaacccatggaagacgtccgatcaacctacaccttcggccgtgaactcggtcgcggccaattcggtgtaacctacttagttacacacaaactcaccaaagaacaattcgcctgcaaatctatagccactcggaaactaatccgccgcgatgatcttgacgatattcgccgtgaagttcagatcatgcatcatctcaccggtcaccggaacattgttgagcttaaaggtgcttatgaggatcgtcattcggttaatcttatcatggagctttgtgctggtggtgagctttttgataggattatatccaaaggtcattactctgaacgtgctgcggctgagctgtgtcgccagattgtcactgttgttcataattgtcatactatgggtgttatgcatagggatttgaagcctgagaatttcttgtttcttagtaagcatgagaattcgccgcttaaagctacagattttggtctctccgtgtttttcaagcccgaagatgtattcaaagatcttgttgggagtgcatattatgttgctcctgaggtgttgcgtagaagctatggacctgaagctgatatttggagtgctgggattattttgtacattctcctctctggtgttcctcccttctgggcagaaaatgaacaaggtatcttcgatgctattcttcgtggacatcttgatttcgcatctgatccttggcctaaaatatcgagtattgctaaagatctgatcaaaaagatgttgcgagctgaccctaaagaacgaatttcagctgttgaagtccttgaccattcttggatgaaagaagatggagcatccgataagcctcttgatattgctgtcttaaccagaatgaaacaattcagggcaatgaacaagctaaagaaagtagctctaaaggttattgctgaaaatctttctgaagaagaaattataggcttgaaggaaatgtttaaatccatggatacagataacagtggaacaatcacttttgaagagttgaaagctggtctccccaaactaggtactaagatttcggaatctgaagtaaggcagttgatggaagcggctgatgttgacggaaatggaaccattgattatattgaatttataacagctaccatgcacttgaatagaatggaaagagaggaccacctatacaaagcttttgaatattttgacaacgacaaaagcgggtatattacaaaagaagagttggaatctgcccttacaaagtacaacatgggtgatgagaaaacaataaaggagataattgacgaagttgattcagacaatgatggaagaattaactatgaggagtttgtagccatgatgaggaaaggcaatccagacttgataaccaacaaacgtcgcaaataa

SEQ ID NO: 2107 - protein, 517 aa, Medicago truncatula
MGNRISSKHKPSSDSQTRSKSEPSHSTPTSFHPPNRTPKQSTHTPTPSSSPLGRVLGKPMEDVRSTYTFGRELGRGQFGVTYLVTHKLTKEQFACKSIATRKLIRRDDLDDIRREVQIMHHLTGHRNIVELKGAYEDRHSVNLIMELCAGGELFDRIISKGHYSERAAAELCRQIVTVVHNCHTMGVMHRDLKPENFLFLSKHENSPLKATDFGLSVFFKPEDVFKDLVGSAYYVAPEVLRRSYGPEADIWSAGIILYILLSGVPPFWAENEQGIFDAILRGHLDFASDPWPKISSIAKDLIKKMLRADPKERISAVEVLDHSWMKEDGASDKPLDIAVLTRMKQFRAMNKLKKVALKVIAENLSEEEIIGLKEMFKSMDTDNSGTITFEELKAGLPKLGTKISESEVRQLMEAADVDGNGTIDYIEFITATMHLNRMEREDHLYKAFEYFDNDKSGYITKEELESALTKYNMGDEKTIKEIIDEVDSDNDGRINYEEFVAMMRKGNPDLITNKRRK

SEQ ID NO: 2108 - DNA, 1599 bp, Triticum aestivum
  CDS (1)..(1599)
atgggccagtgttgcagcagagctacgtccccggattctgtccaaggaggagccaatggctatggctattctcaccagcccaaacaagcacaaacacctcctagttacaacaatgctcagccaccaccacaagctgaggtgaggtacacaccgccagcgatgaaccctcctgtagtcccacctgtggttgccccctcaaagcccatgccggacacgattctcggcaagcagtacgacgatgtgcgctctgtctacccgcttggcaaggaacttggtagggggcagttcggggtgacgtacctttgcactgagattagcactggcaggcagtatgcttgcaagtccatatccaagcgcaagctcgtgagtaaggccgataaggaggatatccgcagggagatccagatcatgcagcacctatctgggcagccaaacatagtggagttctgtggagcatatgaggacaagggcagcgtgcatgtcgtgatggagctctgtgcaggcggggagctgtttgatcggattattgccaaggggcactactcagagcgtgcagctgctacaatctgcagaggagttgtgaatgttgtcaatgtctgccatttcatgggagtgatgcaccgcgatctgaagccggagaacttcttgcttgcgaccaagaatgagaatgcagtgctcaaggccactgatttcgggctttcggtcttcattgaagaaggaaaaatgtatagggacatcgttggaagtgcttattatgttgctcctgaagtccttaggagaaactatggtaaagagatagatgtttggagtgcaggtgttattctgtacattcttctcagcggtgttcctccattctgggctgaaactgagaagggaatatttgatgctattcttcaaggggagattgactttgaaagtcagccatggccttcaatttctgagagcgctaaagaccttgtgaggaagatgttggcacaggatccaaagaaaagaattagtttagcccaagttcttcaacatccatggctcagggaaggagaagcatcagataaacctattgacagtgctgttctttctaggatgaagcaattcagagcaatgaataaactgaaaaagatggctctaaaggttatagcttcaaatcttaacgaggaagagatcaagggcctgaagcaaatgtttatgaacatggacacagacaacagtgggacaatcacatatgaggaactcaaagcaggactagccaaacttggaccgaagctctcagaagctgaagtaaagcagttgatggatgcggctgatgtggatggcaatggatcaattgactacgttgagttcataacagcaaccatgcatagacacaagctcgaaagagacgagcatttgttcaaggcgttccagtactttgacaaagacaacagtggcttcatcacaagagatgaactggagactgctttgattgagcatgaaatgggcgatgcggataccataaaggacatcatatcagaagtcgacacagataatgatgggaggattaactacgaggaattctgcgctatgatgagaggagggatgcagcagccaataaggctcaagtag

SEQ ID NO: 2109 - protein, 532 aa, Triticum aestivum
MGQCCSRATSPDSVQGGANGYGYSHQPKQAQTPPSYNNAQPPPQAEVRYTPPAMNPPVVPPVVAPSKPMPDTILGKQYDDVRSVYPLGKELGRGQFGVTYLCTEISTGRQYACKSISKRKLVSKADKEDIRREIQIMQHLSGQPNIVEFCGAYEDKGSVHVVMELCAGGELFDRIIAKGHYSERAAATICRGVVNVVNVCHFMGVMHRDLKPENFLLATKNENAVLKATDFGLSVFIEEGKMYRDIVGSAYYVAPEVLRRNYGKEIDVWSAGVILYILLSGVPPFWAETEKGIFDAILQGEIDFESQPWPSISESAKDLVRKMLAQDPKKRISLAQVLQHPWLREGEASDKPIDSAVLSRMKQFRAMNKLKKMALKVIASNLNEEEIKGLKQMFMNMDTDNSGTITYEELKAGLAKLGPKLSEAEVKQLMDAADVDGNGSIDYVEFITATMHRHKLERDEHLFKAFQYFDKDNSGFITRDELETALIEHEMGDADTIKDIISEVDTDNDGRINYEEFCAMMRGGMQQPIRLK

SEQ ID NO: 2110 - DNA, 1599 bp, Triticum aestivum
  CDS (1)..(1599)
atgggccagtgttgcagcagagctacgtccccggattctgtccaaggaggagccaatggctatggctattctcaccagccaaaacaagcacaaacacctcctagttacaacaatgctcagccaccaccacaagctgaggtgaggtacacaccgccagcgatgaaccctcctgtcgtcccacctgtggttgccccctcaaagcccatgccggacacgattctcggcaagcagtacgaggatgtgcgctctgtctactcccttggcaaggaacttggtagggggcagttcggggtgacgtacctttgcactgagattagcactggcaggcagtatgcttgcaagtccatatccaagcgcaagctcgtgagtaaggccgacaaggaggatatccgcagggagatccagatcatgcagcacctatctgggcagccgaacatagtggagttctgtggagcatatgaggacaagggcagcgtgcatgttgtgatggagctctgtgcaggcggggagctgtttgatcggattattgccaaggggcactactcagagcgtgcagctgctacaatctgcagaggagttgtgaatgttgtcaatgtttgccatttcatgggagtgatgcaccgcgatctgaagccagagaacttcttgctcgcgaccaaggatgagaatgctgtgctcaaggccactgatttcgggctttcggtcttcattgaagaaggaaaaatgtatagggacatcgttggaagtgcttattatgttgctcctgaagtccttaggagaaactatggtaaagagatagatgtttggagtgcaggtgttattctgtacattcttctcagcggtgttcctccattctgggctgaaactgagaagggaatatttgatgctattcttcaaggggagattgactttgaaagtcagccatggccatcaatttctgagagcgctaaagaccttgtgaggaagatgttggcacaggatccaaagaaaagaattagttcagcccaagttcttcaacatccatggctcagggaaggagaagcatcagataaacctattgacagtgctgttctttctaggatgaagcaattcagagcaatgaataaactgaaaaagatggctctaaaggttatagcttcaaatcttaatgaggaagagatcaagggcctgaagcaaatgtttatgaacatggacacagacaacagtgggacaatcacatatgaggaactcaaagcaggactagccaaacttggatcgaagctctcagaagctgaagtaaagcagttgatggatgcggctgatgtggatggcaatggatcaattgactacgttgagttcataacagcaaccatgcatagacacaagctcgaaagagacgagcatttgttcaaggcgttccagtactttgacaaagacaacagtggcttcatcacaagagatgaactggagactgctttgattgagcatgaaatgggcgatgcggataccataaaggacatcatatcagaagtcgacacagataatgatgggaggattaactacgaggaattctgcgctatgatgagaggagggatgcagcagccaataaggctcaagtag

SEQ ID NO: 2111 - protein, 532 aa, Triticum aestivum
MGQCCSRATSPDSVQGGANGYGYSHQPKQAQTPPSYNNAQPPPQAEVRYTPPAMNPPVVPPVVAPSKPMPDTILGKQYEDVRSVYSLGKELGRGQFGVTYLCTEISTGRQYACKSISKRKLVSKADKEDIRREIQIMQHLSGQPNIVEFCGAYEDKGSVHVVMELCAGGELFDRIIAKGHYSERAAATICRGVVNVVNVCHFMGVMHRDLKPENFLLATKDENAVLKATDFGLSVFIEEGKMYRDIVGSAYYVAPEVLRRNYGKEIDVWSAGVILYILLSGVPPFWAETEKGIFDAILQGEIDFESQPWPSISESAKDLVRKMLAQDPKKRISSAQVLQHPWLREGEASDKPIDSAVLSRMKQFRAMNKLKKMALKVIASNLNEEEIKGLKQMFMNMDTDNSGTITYEELKAGLAKLGSKLSEAEVKQLMDAADVDGNGSIDYVEFITATMHRHKLERDEHLFKAFQYFDKDNSGFITRDELETALIEHEMGDADTIKDIISEVDTDNDGRINYEEFCAMMRGGMQQPIRLK

SEQ ID NO: 2112 - DNA, 1788 bp, Medicago truncatula
  CDS (1)..(1788)
atgggactctgtcatggaaaacccattgaaacgtcacgtagagaaagagaaagagaaagagaaaattcaacaaatgaagaaattcttcaacttccaccaccaccatcaagctctcatcatcatcatgcaccaactaaatcatcatcaaagtttccattttttagtccaagtccattaccaagtttcttcaaaaattcacctgcaaattcaactgtgagttcaaattcaacccctctgcgaacccctcttcggatcttcaagcgaccctttcctccgccttcaccggcaaagcacattcgagcactgctagctagaagacacggctctgtgaagcctaatgaagctactatacctgaagggagtgagtgtgaagttgggttggataagagttttggattttctaagcattttgtgacgaattttgagcttggacaagaagtgggtcgtggccattttggttatacttgctctgctaagggtaaaaaaggaagctttaagggtcttgatgttgctgttaaagtcattcctaaatctaagatgacaacagcaattgctatagaggatgtaagaagagaagtgaagatattgcgagctctaactgggcataagaatttggtacaattctacgaagcttacgaagacgaagaaaatgtttatgtagttatggaattatgcaaaggaggcgaattgttagataagattctttccaggggtggaaagtacccggaagaggatgccagagttgttttgattcagatattaagtgtggtagcttactgtcatctacagggtgttgtacaccgcgatctcaagccagagaattttctttttagttctgaggatgaaaattctacattgaaggccattgactttggactctctgattatgtaaagccagatgagagattgaatgatattgttggaagtgcttattacgttgcacctgaagttttgcatagatcttatgggactgaagcagatatgtggagcatcggtgtaattgcttatattctgttatgtggaagccgtcctttttgggccaggactgaatctggcatatttcgggctgtccttaaggcagatccaagtttcgatgaagctccctggccttctttatcggctgatgcaaaagattttgtaaaaaggctgttgaataaagattaccgtaaaagactaaccgctgctcaggctctcagtcatccgtggctggtgaatcacttagaggacataaagataccatttgacatgataatccacaagctcatcaaaacttacatatgctcgtcttctttacgcaaatcagcattaggggctcttgcaaagacattgacattagtgcagctagcatatctcagagaacaatttactctattagggccaaacaaaagtgggctaatctctatgcagaacttcaagacggctgttttaagaagcgccactgatgcctcgaaggattcacgggtcttagattatgcgaacatggttagctcaatccagtatcgaaaattagattttgaggaattttgcgctgctgctataagtgtccatcaactggagggaatggacacttgggagcaacatgcaaggcgtgcctacgagctgtttgaaaaggatggaaataggccaattatgatcgaagagcttgcctcggaacttggacttagcccctcagtacctattcacgtggtactccaagattggataagacactcagatggaaagctaagtttcttagggtttgtcagactcctgcatggagtttcttctcgcacatttcacaaggcttga

SEQ ID NO: 2113 - protein, 595 aa, Medicago truncatula
MGLCHGKPIETSRRERERERENSTNEEILQLPPPPSSSHHHHAPTKSSSKFPFFSPSPLPSFFKNSPANSTVSSNSTPLRTPLRIFKRPFPPPSPAKHIRALLARRHGSVKPNEATIPEGSECEVGLDKSFGFSKHFVTNFELGQEVGRGHFGYTCSAKGKKGSFKGLDVAVKVIPKSKMTTAIAIEDVRREVKILRALTGHKNLVQFYEAYEDEENVYVVMELCKGGELLDKILSRGGKYPEEDARVVLIQILSVVAYCHLQGVVHRDLKPENFLFSSEDENSTLKAIDFGLSDYVKPDERLNDIVGSAYYVAPEVLHRSYGTEADMWSIGVIAYILLCGSRPFWARTESGIFRAVLKADPSFDEAPWPSLSADAKDFVKRLLNKDYRKRLTAAQALSHPWLVNHLEDIKIPFDMIIHKLIKTYICSSSLRKSALGALAKTLTLVQLAYLREQFTLLGPNKSGLISMQNFKTAVLRSATDASKDSRVLDYANMVSSIQYRKLDFEEFCAAAISVHQLEGMDTWEQHARRAYELFEKDGNRPIMIEELASELGLSPSVPIHVVLQDWIRHSDGKLSFLGFVRLLHGVSSRTFHKA

SEQ ID NO: 2114 - DNA, 1545 bp, Triticum aestivum
  CDS (1)..(1545)
atgcagccggacgcgagcggcaacgctggcggcggcggcgcgaatccgaggccgaagctgccgccggtggccgtcgcgccggcgccgtccgggcggccggcgtccgtgctgccgcacaagacggccaacgtgcgggaccactaccgcatcggcaagaagctggggcaggggcagttcggcaccacctacctgtgcgtggccaaggaggacggcggcgagttcgcgtgcaagtccatccccaagcgcaagctgctgtgccgcgaggactacgaggacgtctggcgcgagatccagatcatgcaccacctctcggagcaccccaacgtcgtccgcatccgtggcgcctacgaggacgcgctcttcgtgcacattgtcatggagctctgcgccggcggggagctcttcgaccgcatcgtggccaaggggcactacaccgagcgtgccgcagcgcagctcatcaggacgatcgttggggtcgtagaggcatgccactcgctcggcgtcatgcaccgggacctcaagccggagaacttcctgtttgccagcactgccgaggacgccccgctcaagactaccgatttcgggttatccatgttctacaagcccggtgacaaattctctgatgttgttgggagcccctactatgttgcacctgaggtgcttcagaaatgctatggtccagaagctgatgtctggagtgctggggtgattctgtacattttgctatgtggcgtcccccctttctgggcagaaactgaagcaggaatcttcagacagatccttcgaggcaaacttgattttgagtctgagccctggcctagtatctctgacagcgctaaagatctagtccgtactatgctttgcagggatcctacaaagcgactctctgctcatgaggttctctgtcacccatggattgttgatgatgctgtggcgcctgataagcctatagattctgctgttctgtcaagactgaagcatttttctgcaatgaacaagctcaagaagatggcattgagggttattgctgaaagcctgtctgaggaagagattggaggtctaagggagctgttcaaaatgattgatgccgacaatagtggaactataacatttgatgagctgaaagatggcttgaaaagggtgggctcagagctaaccgaacatgaaatccaggctttaatggatgcggcggacatcgacaacagcggaacgattgattatggtgaattcatcgcagctacattgcacatgaataaactagagagggaggagaacttggtgtcagcattctcgttttttgacaaggatggaagtggatttatcaccatcgatgagctatcacatgcatgccgtcaatttggcctggatgatgttcaccttgaggatatgatcaaagatgtcgatcagaacaatgatgggcaaatcgattacagtgagttcacagcgatgatgagaaagggcaatgcgggtgcaacagggaggcgaaccatgaggaacagcttgaatctgaatctcggtgacatcttgaatcccagcaacagctaa

SEQ ID NO: 2115 - protein, 514 aa, Triticum aestivum
MQPDASGNAGGGGANPRPKLPPVAVAPAPSGRPASVLPHKTANVRDHYRIGKKLGQGQFGTTYLCVAKEDGGEFACKSIPKRKLLCREDYEDVWREIQIMHHLSEHPNVVRIRGAYEDALFVHIVMELCAGGELFDRIVAKGHYTERAAAQLIRTIVGVVEACHSLGVMHRDLKPENFLFASTAEDAPLKTTDFGLSMFYKPGDKFSDVVGSPYYVAPEVLQKCYGPEADVWSAGVILYILLCGVPPFWAETEAGIFRQILRGKLDFESEPWPSISDSAKDLVRTMLCRDPTKRLSAHEVLCHPWIVDDAVAPDKPIDSAVLSRLKHFSAMNKLKKMALRVIAESLSEEEIGGLRELFKMIDADNSGTITFDELKDGLKRVGSELTEHEIQALMDAADIDNSGTIDYGEFIAATLHMNKLEREENLVSAFSFFDKDGSGFITIDELSHACRQFGLDDVHLEDMIKDVDQNNDGQIDYSEFTAMMRKGNAGATGRRTMRNSLNLNLGDILNPSNS

SEQ ID NO: 2116 - DNA, 1542 bp, Triticum aestivum
  CDS (1)..(1542)
atgcagccggacgcgagcggcaacgctggcggcggcgcgaatccgaggccgaagctgccgccggtggccgccgcgccggcgccgtccgggcggccggcgtccgtgctgccgcacaagacggccaacgtgcgggaccactaccgcatcgggaagaagctggggcaggggcagttcggcaccacctacctgtgcgtggccaaggaggacggcggcgagttcgcgtgcaagtccatccccaagcgcaagctgctgtgccgcgaggactacgaggacgtctggcgcgagatccagatcatgcaccacctctccgagcaccccaacgtcgtccgcatccgtggcgcctacgaggacgcgctcttcgtgcacattgtcatggagctctgcgccggcggggagctcttcgaccgcatcgtggccaaggggcactacaccgagcgtgctgcagcgcagctcatcaggacgatcgttggggtcgtagaggcatgccactcgctcggcgtcatgcaccgggatctcaagccggagaacttcctgtttgccagcactgccgaggacgccccgctcaagaccaccgattttgggctatccatgttctacaagcccggtgacaaattctctgatgttgttgggagcccctactatgttgcacctgaggtgcttcagaaatgctatggtccagaagctgatgtctggagtgctggggtgattctgtacattttgctatgtggtgtcccccctttctgggcagaaactgaagcaggaatcttcagacagatccttcgaggcaaacttgattttgagtctgagccctggcctagtatctctgacagcgctaaagatctagtccgtactatgctttgcagggatcctacaaagcgactctctgctcatgaggttctttgtcacccatggattgttgatgatgctgtggcgcctgataagcctatagattctgctgttttgtcaagactgaagcatttttctgcaatgaacaagctcaagaagatggcattgagggttattgctgaaagcctatctgaggaagagattggaggtctaagggagctgttcaaaatgattgatgccgacaatagtggaactataacatttgatgagctgaaagatggcttgaaaagggtgggctcagagctaaccgaacatgaaatccaggctttaatggatgcggcggacatcgacaacagcggaacgattgattatggtgaattcatcgcagctacattgcacatgaataaactagagagggaggagaacttggtgtcagcattctcgttttttgacaaggatggaagtggattcatcaccatcgatgagctatcacatgcatgccgcaaatttggtctggatgatgttcaccttgaggatatgatcaaagatgtcgatcagaacaatgacgggcaaatcgattacagtgagttcacagcgatgatgagaaagggtaatgccagcgcaacagggaggcgaaccatgaggaacagcttgaatctgaatctcggcgacatcttgaatcccagcaacagctaa

SEQ ID NO: 2117 - protein, 513 aa, Triticum aestivum
MQPDASGNAGGGANPRPKLPPVAAAPAPSGRPASVLPHKTANVRDHYRIGKKLGQGQFGTTYLCVAKEDGGEFACKSIPKRKLLCREDYEDVWREIQIMHHLSEHPNVVRIRGAYEDALFVHIVMELCAGGELFDRIVAKGHYTERAAAQLIRTIVGVVEACHSLGVMHRDLKPENFLFASTAEDAPLKTTDFGLSMFYKPGDKFSDVVGSPYYVAPEVLQKCYGPEADVWSAGVILYILLCGVPPFWAETEAGIFRQILRGKLDFESEPWPSISDSAKDLVRTMLCRDPTKRLSAHEVLCHPWIVDDAVAPDKPIDSAVLSRLKHFSAMNKLKKMALRVIAESLSEEEIGGLRELFKMIDADNSGTITFDELKDGLKRVGSELTEHEIQALMDAADIDNSGTIDYGEFIAATLHMNKLEREENLVSAFSFFDKDGSGFITIDELSHACRKFGLDDVHLEDMIKDVDQNNDGQIDYSEFTAMMRKGNASATGRRTMRNSLNLNLGDILNPSNS

SEQ ID NO: 2118 - DNA, 1599 bp, Triticum aestivum
  CDS (1)..(1599)
atgggccagtgttgcagcagagctacgtccccggattctgtccaaggaggagccaatggctatggctattctcaccagcccaaacaagcacaaacacctcctagttacaacaatgctcagccaccaccacaagctgaggtgtggtacacaccgccagcgatgaaccctcctgtagtcccacctgtggttgccccctcaaagcccatgccggacacgattctcggcaagcagtaccaggatgtgcgctctgtctactcgcttggcaaggaacttggtagggggcagttcggggtgacgtacctttgcactgagattagcactggcaggcagtatgcttgcaagtccatatccaagcgcaagctcgtgagtaaggccgataaggaggatatccgcagggagatccagatcatgcagcacctatctgggcagccaaacatagtggagttctgtggagcatacgaggacaagggcagcgtgcatgttgtaatggagctctgtgcaggcggggagctgtttgatcggattattgccaaggggcactactcagagcgcgcagctgctacaatctgcagaggagttgtgaatgttgtgaatgtttgccatttcatgggagtgatgcaccgcgatctggagccggaaaacttcttgctcgcgaccaaggatgagaatgcagtgctcaaggccactgatttcgggctttcggtcttcattgaagaaggaaaaatgtatagggacatcgttggaagtgcttattatgttgctcctgaagtccttaggagaaactatggtaaagagatagatgtttggagtgcaggtgttattctgtacattcttctcagcggtgttcctccattctgggctgaaactgaaaagggaatatttgatgctattcttcaaggggagattgactttgaaagtcagccatggccatcaatttctgagagcgctaaagaccttgtgaggaagatgttggcgcaggatccaaagaaaagaattagttcagcccaagttcttcaacatccatggctcagggaaggagaagcatcagataaacctattgacagtgctgttctttctaggatgaagcaattcagagcaatgaataaactgaaaaagatggctctaaaggttatagcttcaaatcttaacgaggaagagatcaagggcctgaagcaaatgtttatgaacatggacacagacaacagtgggacaatcacatatgaggaactcaaagcaggactagccaaacttggatcgaagctctcagaagctgaagtaaagcagttgatggatgcggctgatgtggatggcaatggatcaattgactacgttgagttcataacagcaaccatgcatagacacaagctcgaaagagacgagcatttgttcaaggcgttccagtactttgacaaagacaacagtggcttcattacaagagatgaactggagactgctttgattgagcatgaaatgggcgacgcggataccataaaggacatcatatcagaagtcgacacagataatgatgggaggattaactacgaggaattctgcgctatgatgagaggagggatgcagcagccaataaggctcaagtag

SEQ ID NO: 2119 - protein, 532 aa, Triticum aestivum
MGQCCSRATSPDSVQGGANGYGYSHQPKQAQTPPSYNNAQPPPQAEVWYTPPAMNPPVVPPVVAPSKPMPDTILGKQYQDVRSVYSLGKELGRGQFGVTYLCTEISTGRQYACKSISKRKLVSKADKEDIRREIQIMQHLSGQPNIVEFCGAYEDKGSVHVVMELCAGGELFDRIIAKGHYSERAAATICRGVVNVVNVCHFMGVMHRDLEPENFLLATKDENAVLKATDFGLSVFIEEGKMYRDIVGSAYYVAPEVLRRNYGKEIDVWSAGVILYILLSGVPPFWAETEKGIFDAILQGEIDFESQPWPSISESAKDLVRKMLAQDPKKRISSAQVLQHPWLREGEASDKPIDSAVLSRMKQFRAMNKLKKMALKVIASNLNEEEIKGLKQMFMNMDTDNSGTITYEELKAGLAKLGSKLSEAEVKQLMDAADVDGNGSIDYVEFITATMHRHKLERDEHLFKAFQYFDKDNSGFITRDELETALIEHEMGDADTIKDIISEVDTDNDGRINYEEFCAMMRGGMQQPIRLK

SEQ ID NO: 2120 - DNA, 1599 bp, Triticum aestivum
  CDS (1)..(1599)
atgggccagtgttgcagcagagctacgtccccggattctgtccaaggaggagccaatggctatggctattctcaccagccaaaacaagcacaagcacctcctagttacaacaatgctcagccaccaccacaagctgaggtgaggtacacaccgccagcgatgaaccctcctgtagtcccacctgtggttgccccctcaaagcccatgccggacacgattctcggcaagcagtacgaggatgtgcgctctgtctactcccttggcaaggaacttggtagggggcagttcggggtgacgtacctttgcactgagattagcactggcaggcagtatgcttgcaagtccatatccaagcgcaagctcgtgagtaaggctgacaaggaggatatccgcagggagatccagatcatgcagcacctatctgggcagccaaacatagtggagttctgtggagcatatgaggacaagggcagcgtgcatgtcgtgatggagctctgtgcaggcggggagctgtttgatcggattattgccaaggggcactactcagagcgtgcagctgctacaatctgcagaggagttgtgaatgttgtcaatgtttgccatttcatgggagtgatgcaccgcgatctgaagccggagaacttcttgcttgcgaccaaggatgagaatgcagtgctcaaggccactgatttcgggctttcggtcttcattgaagaaggaaaaatgtatagggacatcgttggaagtgcttattatgttgctcctgaagtccttaggagaaactatggtaaagagatagatgtttggagtgcaggtgttattctgtacattcttctcagcggtgttcctccattctgggctgaaactgagaagggaatatttgatgctattcttcaaggggagattgactttgaaagtcagccatggccttcaatttctgagagcgctaaagaccttgtgaggaagatgttggcacaggatccaaagaaaagaattagttcagcccaagttcttcaacatccatggctcagggaaggagaagcatcagataaacctattgacagtgctgttctttctaggatgaagcaattcagagcaatgaataaactgaaaaagatggctctaaaggttatagcttcaaatcttaatgaggaagagatcaagggcctgaagcaaatgtttatgaacatggacacagacaacagtgggacaatcacatatgaggaactcaaagcaggactagccaaacttggatcgaagctctcagaagctgaagtaaagcagttgatggatgcggctgatgtggatggcaatggatcaattgactacgttgagttcataacagcaaccatgcatagacacaagctcgaaagagacgagcatttgttcaaggcgttccagtactttgacaaagacaacagtggcttcatcacaagagatgaactggagactgctttgattgagcatgaaatgggcgatgcggataccataaaggacatcatatcagaagtcgacacagataatgatgggaggattaactacgaggaattctgcgctatgatgagaggagggatgcagcagccaataaggctcaagtag

SEQ ID NO: 2121 - protein, 532 aa, Triticum aestivum
MGQCCSRATSPDSVQGGANGYGYSHQPKQAQAPPSYNNAQPPPQAEVRYTPPAMNPPVVPPVVAPSKPMPDTILGKQYEDVRSVYSLGKELGRGQFGVTYLCTEISTGRQYACKSISKRKLVSKADKEDIRREIQIMQHLSGQPNIVEFCGAYEDKGSVHVVMELCAGGELFDRIIAKGHYSERAAATICRGVVNVVNVCHFMGVMHRDLKPENFLLATKDENAVLKATDFGLSVFIEEGKMYRDIVGSAYYVAPEVLRRNYGKEIDVWSAGVILYILLSGVPPFWAETEKGIFDAILQGEIDFESQPWPSISESAKDLVRKMLAQDPKKRISSAQVLQHPWLREGEASDKPIDSAVLSRMKQFRAMNKLKKMALKVIASNLNEEEIKGLKQMFMNMDTDNSGTITYEELKAGLAKLGSKLSEAEVKQLMDAADVDGNGSIDYVEFITATMHRHKLERDEHLFKAFQYFDKDNSGFITRDELETALIEHEMGDADTIKDIISEVDTDNDGRINYEEFCAMMRGGMQQPIRLK

SEQ ID NO: 2122 - DNA, 1677 bp, Trifolium pratense
  CDS (1)..(1677)
atgggttgtcacggtagtaaggaagcgaaaaaatccgccgcagaacatagccgccaccgccaccaatcatccgccgcagctggtggtgctgctaccggcggtactaatttccagtatcaaattgttcaaccttcttcctctcacgttcaaacttcaccaccaccaaaaccaaaaccagaatcacattcacactcacattcacatgcttcaacagtgactacaacaacaacatcaaatccaaaaccctctgcttctgagaatgtgagaacagtgcagaaaccagacacaacaatattaggaaaaccctttgaagatattaaaaagttctatactttaggtaaagaattgggtagaggtcaatttgggattacttatttttgtactgagaattcaactggtttaaattatgcttgtaaatctatattaaagaggaaacttgtttctaaagctgatagagaagatattaagagagagattcagattttgcagcatttatctggtcaacctaacattgttgaatttaaaggtgcttatgaggataggttttctgttcatcttgttatggaactttgtgctggtggagagttgtttgatagaattattgctcaaggtcattattcagagagagctgctgcatctatttgtagggctgttgttaatgttgtgcacatttgtcattttatgggtgtattgcatcgcgatttgaagccggaaaatttcttgctttctagtaaagatgaaggagcagcacttaaagctactgattttggactttctgttttcattgaagaaggaaaggtttaccgtgatatggtaggaagtgcttactatgttgctcctgaggtattgcgtcgtaattatggaaaggaaatagacatttggagtgcaggcatcatattgtatattctccttagtggtgtaccacctttttgggctgaaactgaaaagggaatatttaatgccatattggaaggtgaacttgactttgttagtgaaccatggccatcaatatcagacagtgctaaagatctagtcagaaagatgctgacacaggatccaaagaagagaattacttctacccaagtccttgaacacccgtggatgagagaaggtggagaggcctctgataaaccgattgatagtgctgttctatctagaatgaaacaattcagggcaatgaataagttcaagaaacttgcattgaaggttatggctgaaaatctatcagaagaagagattaaaggtctcaaggcaatgtttgcaaatatggacactgatggtagtggcaccatcacctatgaagaactgaagtcaggcctagcacgaattggatcacgattgtctgagcctgaagtgaagcaacttatggaagctgctgatgttgatggaaatggctcaatcgactatcttgaattcatatcagctacaatgcatagacacagacttgaacgagatgaacatctttacaaagcattccagtattttgataaagacaatagtgggcatattactagagaagaattggagactgccatgacaaagcatggaatgggtgatgaagcaacaataaaggaaattatttctgaggtggatacagataatgatgggagaataaactatgaggaattctgtgcaatgatgagaagtggaatgccacaccaggcacaactattttaa

SEQ ID NO: 2123 - protein, 558 aa, Trifolium pratense
MGCHGSKEAKKSAAEHSRHRHQSSAAAGGAATGGTNFQYQIVQPSSSHVQTSPPPKPKPESHSHSHSHASTVTTTTTSNPKPSASENVRTVQKPDTTILGKPFEDIKKFYTLGKELGRGQFGITYFCTENSTGLNYACKSILKRKLVSKADREDIKREIQILQHLSGQPNIVEFKGAYEDRFSVHLVMELCAGGELFDRIIAQGHYSERAAASICRAVVNVVHICHFMGVLHRDLKPENFLLSSKDEGAALKATDFGLSVFIEEGKVYRDMVGSAYYVAPEVLRRNYGKEIDIWSAGIILYILLSGVPPFWAETEKGIFNAILEGELDFVSEPWPSISDSAKDLVRKMLTQDPKKRITSTQVLEHPWMREGGEASDKPIDSAVLSRMKQFRAMNKFKKLALKVMAENLSEEEIKGLKAMFANMDTDGSGTITYEELKSGLARIGSRLSEPEVKQLMEAADVDGNGSIDYLEFISATMHRHRLERDEHLYKAFQYFDKDNSGHITREELETAMTKHGMGDEATIKEIISEVDTDNDGRINYEEFCAMMRSGMPHQAQLF

SEQ ID NO: 2124 - DNA, 1545 bp, Ipomoea nil
  CDS (1)..(1545)
atggggagttgtaacagcataccttcgtcgccctttgccgccacttcagccggcggagaaagcgatccaccgccgccgaaaaatgacatcaccgtccttccgccctcccagcctccccctccacgtcccttcctctccggcgtcggccgcgtccttgggcgccccatggaggacgtccactccacctacatttttgggggggagctaggtcggggacagttcggggtcacctacctagtcacccaccgcaagacgcgcgagcgcctcgcctgcaagtcaatcgccacgcgcaagcttctctccaaggacgacgttgacgatgtccggcgtgaggtccagattatgcaccacctcaccggccaccgcaacatcgtcgagctcaagggaacctatgaggaccgcaaccacgtccacctagtcatggagctctgcgctggcggcgagctcttcgaccgtatcatcgccaagggccactactccgaacgcgccgccgccggcctctgccgtcagatggttaccgttcttcactactgtcactctatgggggttatgcaccgggatttgaagcctgagaatttcttgttcttgagctccgatgagaattcgccattgaaggctactgattttggcttgtcagtcttctttaaaccaggagatacattcaaggacctggtaggtagtgcatattatgtggctcctgaagttttgcgccgaaattatggacctgaagccgatatttggagtgctggagtgatactgtacattttactcagtggcgttcccccattttggggagagaatgagcagagcatctttgatgctgttcttcggggacatctagatttttcttctgatccttggccatcaatatctagtagtgctaaagatcttgttaagaagatgctacgttcggatcccaaagaaagactttctgctactgatgtcctgaatcatccttggatgagagaagatggtgatgcatctgacaagcctattgacattgctgccttaagtagaatgaaacagttccgtgctatgaacaagctcaagaaagtagctcttaaggtaattgccgaaaatctttctgaagaagaaattattggtttgaaggaaatgttcaaatcaatagacacagatgacagtggcacaattacttatgaagaactgaaagctggtcttacaaaaatgggcaccaagctctcagagtcagaagttaggcaattgatggaagcggctgatgttgatggaaatggaactattgattatcttgagttcatcacagctacgatgcatatgaaccgtgtggaaagagaagaccacttgtacaaggcttttgagtattttgacaaggacaagagcgggtatattactatggaagaattggagcattccctgaagaaatacaacattaccgatgaaaagacaataaaggagatcattgtagaagttgacacagataacgatgggaaaatcaattatgatgaatttgtggcgatgatgaggaaaggcacccctgacttggtcattaataggcgtcgtagatga

SEQ ID NO: 2125 - protein, 514 aa, Ipomoea nil
MGSCNSIPSSPFAATSAGGESDPPPPKNDITVLPPSQPPPPRPFLSGVGRVLGRPMEDVHSTYIFGGELGRGQFGVTYLVTHRKTRERLACKSIATRKLLSKDDVDDVRREVQIMHHLTGHRNIVELKGTYEDRNHVHLVMELCAGGELFDRIIAKGHYSERAAAGLCRQMVTVLHYCHSMGVMHRDLKPENFLFLSSDENSPLKATDFGLSVFFKPGDTFKDLVGSAYYVAPEVLRRNYGPEADIWSAGVILYILLSGVPPFWGENEQSIFDAVLRGHLDFSSDPWPSISSSAKDLVKKMLRSDPKERLSATDVLNHPWMREDGDASDKPIDIAALSRMKQFRAMNKLKKVALKVIAENLSEEEIIGLKEMFKSIDTDDSGTITYEELKAGLTKMGTKLSESEVRQLMEAADVDGNGTIDYLEFITATMHMNRVEREDHLYKAFEYFDKDKSGYITMEELEHSLKKYNITDEKTIKEIIVEVDTDNDGKINYDEFVAMMRKGTPDLVINRRRR

SEQ ID NO: 2126 - DNA, 1854 bp, Gossypium hirsutum
  CDS (1)..(1854)
atgggtctttgcacctccaaaccctccccaaacccttctgattctacaaatgcctctatcaatacccggaataacgatatctaccgcaagcctaactctgtttcggcttctcctttacctgatggagtaaactccaaggaagatcaaggtaaacaaggagaagaagaaaaagaaagctccaatcccaacaatgaaggcaagaaatcgccgtttttcccgttttatagtcccagtccagctcactacttgttttccaaaaagtctcctgcgagatcttcaaccaattccactccaaaacggtttttcaggaggccattccctccgccgtctccggcgaagcatattagggcagtgcttgcgcggaggcacgggtctgtgaagccgaatgaggccgcgatcccggaaggaagcgacgcagaggcagcgggagctaccggtaccggactggataagagcttcggcttctcgaagcacttcgggagcaaatatgagctcggagacgaagtaggaagaggccatttcggttatacttgtacggcgaagtttaagaaaggagagcttaaaggacaacaagttgccgttaaagttatacctaaagcgaagatgactactgcaattgccattgaggatgttagaagggaggtaaaaatattaagagctctatctggacatagcaatttagtacaattctatgatgcctacgaggaccatgataatgtctacatagtgatggaattatgtgaaggaggggagctcttggacagaattctttctaggggcggaaaatacactgaggatgatgcaaaagctgtgatgattcagatacttaacgttgttgctttttgccatctccagggtgttgtgcaccgggatcttaaacctgagaatttcttgtttacatcaaaggatgaaaattcacaattgaaggctatagactttggcttgtctgattttgtgaaaccggatgaaaggcttaatgacattgttggtagtgcatactatgtagcaccagaagttctacataggtcttacagtacagaagcagatgtctggagtataggtgtgattgcttatattcttttgtgtggtagtcgtccattttgggctcgaacagagtctgggatttttcgagctgttctaaaagctgatccaagttttgatgaagcaccttggccatctctatcttctgaggctagggattttgtgaagcgtttactgaataaggacccaaggaaaagattgactgcagcccaagctctgagtcatccctggataaaaaagtataacgatgtaaaagtgcccttggatatactgatattcaaactcatgaaggcttatctgcgttcttcatctcttcggaaggctgctttaagggccctgtctaaaactttgactgtggatgagctgttttacttgaaggagcagtttgcattattggaaccaaataaaaatggcactataagcttagaaaatatcaaagcggttctgatgaaaaatgcaacagatgctatgaaggatgctcgcatccctgagtttcttgcatcgctaaatgcacttcaatacagacggatggactttgatgagttctgtgcggctgcattaactgttcatcagctggaggctcttgatcggtgggaacagcatgcacgttgtgcttacgaaatctttgagaaggaaggaaacagacctattgtcattgaagagctagcttcggagctcggactgagcccatctgtgcctgttcatgctgttcttcatgactggattaggcacactgatgggaagctaagttttctcggatttgtcaaattattgcacggtgtatctagccgaaccatcgcaaaagctcaatag

SEQ ID NO: 2127 - protein, 617 aa, Gossypium hirsutum
MGLCTSKPSPNPSDSTNASINTRNNDIYRKPNSVSASPLPDGVNSKEDQGKQGEEEKESSNPNNEGKKSPFFPFYSPSPAHYLFSKKSPARSSTNSTPKRFFRRPFPPPSPAKHIRAVLARRHGSVKPNEAAIPEGSDAEAAGATGTGLDKSFGFSKHFGSKYELGDEVGRGHFGYTCTAKFKKGELKGQQVAVKVIPKAKMTTAIAIEDVRREVKILRALSGHSNLVQFYDAYEDHDNVYIVMELCEGGELLDRILSRGGKYTEDDAKAVMIQILNVVAFCHLQGVVHRDLKPENFLFTSKDENSQLKAIDFGLSDFVKPDERLNDIVGSAYYVAPEVLHRSYSTEADVWSIGVIAYILLCGSRPFWARTESGIFRAVLKADPSFDEAPWPSLSSEARDFVKRLLNKDPRKRLTAAQALSHPWIKKYNDVKVPLDILIFKLMKAYLRSSSLRKAALRALSKTLTVDELFYLKEQFALLEPNKNGTISLENIKAVLMKNATDAMKDARIPEFLASLNALQYRRMDFDEFCAAALTVHQLEALDRWEQHARCAYEIFEKEGNRPIVIEELASELGLSPSVPVHAVLHDWIRHTDGKLSFLGFVKLLHGVSSRTIAKAQ

SEQ ID NO: 2128 - DNA, 1599 bp, Hordeum brevisubulatum
  CDS (1)..(1599)
atgggccagtgttgcagcagagctacgtccccagattctgtccaaggaggagccaatggctatggctattctcaccagccaaaacaagcacaagcacctcctagttacaacaatgctcagccaccaccacgagctgaggtgaggtacacaccgccagcgatgaaccctcctgtagtcccacctgtggttgccccctcaaagcccatgccggacacgattctcggaaagcagtacgaggacgtgcgctctgtctactcccttggcaaggaacttggtagggggcagttcggggtgacgtacctttgcactgagattagcactggcaggcagtatgcttgcaagtccatatccaagcgcaagctcgtgagtaaggccgacaaggaggatatccgcagggagatccagatcatgcagcacctatctggacagccaaacatagtggagttctgtggagcgtacgaggacaagggcagcgtgcatgttgtgatggagctctgtgcaggcggggagctgtttgatcggattattgccaagggacactactcagagcgtgcagctgctacaatctgcagaggagttgtgaatgttgtcaatgtttgccatttcatgggagtgatgcaccgtgatctgaagccggagaacttcttgctcgcaaccaaggatgagaatgcagttctcaaggccactgattttgggctttcggtcttcattgaagaaggaaaaatgtatagggacatcgttggaagtggcttattatgttgctccgaagtccttaggagaaattatggtaaagagatagatgtttggagtgcaggtgttattctgtatattcttctcagcggcgttcccccattctgggctgaaactgagaaggggatatttgatgctattcttcaaggggagattgactttgagagtcagccatggccatcaatttctgagagtgctaaagaccttgtgaggaagatgttggcacaggatccaaagaaaagaattagttcagcccaagttctccgacatccatggctcagggaaggagaagcatcagacaaacctattgacagtgctgttctttctaggatgaagcaattcagagcaatgaataaactgaaaaagatggccctaaaggttatagcttcaaatcttaatgaggaagagatcaagggcctgaagcaaatgtttatgaacatggacacagacaacagtgggacattcacatatgaggaactcaaagcaggactagccaaacttggatcgaagctgtcagaagctgaagtaaagcagttgatggatgcggctgatgtggatggcaatggatcaattgactacgttgagttcataacagcaacaatgcatcgacacaagctcgaaagagacgagcatttgttcaaggcgttccagtactttgacaaagacaacagtggcttcatcacaagagatgaactggagactgctttgattgagcatgaaatgggcgatgcggataccataaaggacatcatatcggaagttgacactgataatgatgggaggattaactacgaggaattctgcgctatgatgagaggagggatacagcagccaataaagctcaagtag

SEQ ID NO: 2129 - protein, 532 aa, Hordeum brevisubulatum
MGQCCSRATSPDSVQGGANGYGYSHQPKQAQAPPSYNNAQPPPRAEVRYTPPAMNPPVVPPVVAPSKPMPDTILGKQYEDVRSVYSLGKELGRGQFGVTYLCTEISTGRQYACKSISKRKLVSKADKEDIRREIQIMQHLSGQPNIVEFCGAYEDKGSVHVVMELCAGGELFDRIIAKGHYSERAAATICRGVVNVVNVCHFMGVMHRDLKPENFLLATKDENAVLKATDFGLSVFIEEGKMYRDIVGSGLLCCSEVLRRNYGKEIDVWSAGVILYILLSGVPPFWAETEKGIFDAILQGEIDFESQPWPSISESAKDLVRKMLAQDPKKRISSAQVLRHPWLREGEASDKPIDSAVLSRMKQFRAMNKLKKMALKVIASNLNEEEIKGLKQMFMNMDTDNSGTFTYEELKAGLAKLGSKLSEAEVKQLMDAADVDGNGSIDYVEFITATMHRHKLERDEHLFKAFQYFDKDNSGFITRDELETALIEHEMGDADTIKDIISEVDTDNDGRINYEEFCAMMRGGIQQPIKLK

SEQ ID NO: 2130 - DNA, 1692 bp, Oryza sativa
  CDS (1)..(1692)
atgggcaactgctgcgtgtcccggccgtccggcgccgacaagcggcggcgctgcggcagctccaccgccccgcacacccgcggcggcaggcgggtgatcggcgccgccaacatgcggtgcctctccacggtctcctccgtgtcggacgcggcgcgcgccgtgatgtcgaacgagccggcgaccgtgctgggcaacagcggcagcagcggcaacggcggcgtgatggcggcggaggagatgctgcggcggtacgagatcggggaggagctgggtcggggggagttcggggtgacgcggcggtgccgggacgcggtgacgggggagcggctggcgtgcaagtcgatcagcaagcggaagctccggagcagcgtggacgtggaggacgtgcggcgggaggtggccatcatgcggtcgctgccggcgcacgccaacgtggtgaggctccgggaggcgttcgaggacgccgacgccgtccacctcgtcatggaggtctgcgagggcggcgagctcttcgaccgcatcgtcgcccgcggccattacaccgagcgcgccgccgccgccgtcatgcgcaccatcatggacgtcgtccagcactgtcacaagaacggcgtcatgcatcgggacctcaaacctgagaactttctgtatgccaatgcatctgagaactcccctctcaaggtcatcgacttcggcctctcagtatgcttcaaacctggtgcaagattcaatgagattgttggatctccctactacatggcaccagaagtcctgaagagaaactatggacaagaaatagacatatggagtgcaggagtcatactgtacatcttgctatgtggtgttcctcctttctgggccgagaccgacgaagggatcgcacaggccatcatccggtcacatatcgacttccaaagagagccttggccaaaggtgtcagataatgccaaggatcttgtaaggaggatgcttgatccaaacccatatactcggttgacggctcaacaggttctagagcatccttggatacagaatgcaagtgcagctcccaacattcctttgggagaagcagtcaggtccaggctgaagcaattcactgttatgaacaagttcaagaagaaggccttacttgtggtggcggagtacttaccaaccgaagagctggatgcaatcagggagctgttcaatatgttggacaccaaaaagaaggggcacttgacactagaagagctcagaaagggactgcaagtgatagggcacaacatccatgacacagatgtcgatatgctcatggaagctgcagacatagatggaaatggcatactggactgcaaggagtttgtgacagtatccattcacctgaagaaaatccgtagcgaggagcaccttccgaaggtgttcagcttcttcgacaagaacggcagcgggtacatagagattgaagagttgaaagaagccctctccccaagaggtgaccagaagtcgatcgacgacatatttctggatgttgacatagacaaggatgggaagataagctacgaggagtttgagttaatgatgtcagccggaatggactggaggaatgcatcccggcaatactcgagagcagtttacaacactctcagccgcaagatattcaaggaagtgtccctgaagcttgatcacagtggtccacttgttgcagcaggaaaatag

SEQ ID NO: 2131 - protein, 563 aa, Oryza sativa
MGNCCVSRPSGADKRRRCGSSTAPHTRGGRRVIGAANMRCLSTVSSVSDAARAVMSNEPATVLGNSGSSGNGGVMAAEEMLRRYEIGEELGRGEFGVTRRCRDAVTGERLACKSISKRKLRSSVDVEDVRREVAIMRSLPAHANVVRLREAFEDADAVHLVMEVCEGGELFDRIVARGHYTERAAAAVMRTIMDVVQHCHKNGVMHRDLKPENFLYANASENSPLKVIDFGLSVCFKPGARFNEIVGSPYYMAPEVLKRNYGQEIDIWSAGVILYILLCGVPPFWAETDEGIAQAIIRSHIDFQREPWPKVSDNAKDLVRRMLDPNPYTRLTAQQVLEHPWIQNASAAPNIPLGEAVRSRLKQFTVMNKFKKKALLVVAEYLPTEELDAIRELFNMLDTKKKGHLTLEELRKGLQVIGHNIHDTDVDMLMEAADIDGNGILDCKEFVTVSIHLKKIRSEEHLPKVFSFFDKNGSGYIEIEELKEALSPRGDQKSIDDIFLDVDIDKDGKISYEEFELMMSAGMDWRNASRQYSRAVYNTLSRKIFKEVSLKLDHSGPLVAAGK

SEQ ID NO: 2132 - DNA, 1452 bp, Arabidopsis thaliana
  CDS (1)..(1452)
atgcggcgtaacgttgacaatcaatcttactatgttcttggtcacaagactcctaacattcgtgatctttacacgttgagtcgtaagttaggacaaggacaattcgggacaacgtatttgtgtactgatattgccacaggtgttgactatgcttgtaagtctatatccaagaggaaattgatatctaaagaagatgttgaggatgttaggagggagattcagattatgcatcatttagctggtcacaagaatattgttactattaaaggagcttatgaggatcctttgtatgttcacattgtgatcgagctttgtgctggtggtgagttgtttgataggattattcatagaggtcattacagcgagaggaaagctgctgagttgaccaagatcattgtcggtgttgttgagccgtgtcattctcttggtgttatgcatagagatttaaagcctgagaatttcttgttggttaataaggatgatgatttctctcttaaggccattgattttggtctctctgttttcttcaaaccaggccaaatattcaaggatgttgttggaagtccatactatgttgctcctgaggttcttctaaaacattatggtccagaagctgatgtgtggactgctggtgttatactctatatcttactaagtggtgtcccgcctttctgggcagaaacacagcaaggaatatttgatgctgtgttgaagggatatattgactttgatacagacccgtggcctgtcatatccgacagtgctaaagatctgatccggaagatgttatgctctagtccttctgaacgtttgactgctcatgaagtcttgcgtcatccatggatctgtgagaatggagttgcaccggctagagcacttgacccggctgttttgtcccgtctaaaacagttttctgcaatgaataaattaaagaagatggctttaaaggtgatagctgagagcctctcagaagaagagattgcgggtttaagagcaatgtttgaggcaatggatactgataacagcggtgcaatcacttttgatgaactcaaagctggcttgagaaaatatggatctacccttgaaagcacagagatccatgatcttatggatgcggctgatgtagacaacagtgggacaatagattacagcgagtttattgcagcgacgatccatctgaataaactagagagagaagagcatcttgtctctgcatttcagtactttgacaaagatggaagtggttacatcaccattgatgagctgcaacaatcttgcattgaacatgggatgaccgatgtttttcttgaagacataatcaaagaagtagatcaagacaacgatggacggattgattacgaagaatttgttgcgatgatgcaaaagggaaatgctggtgtagggagaagaacaatgaaaaatagtctaaacatcagcatgagagatgtgtag

SEQ ID NO: 2133 - protein, 483 aa, Arabidopsis thaliana
MRRNVDNQSYYVLGHKTPNIRDLYTLSRKLGQGQFGTTYLCTDIATGVDYACKSISKRKLISKEDVEDVRREIQIMHHLAGHKNIVTIKGAYEDPLYVHIVIELCAGGELFDRIIHRGHYSERKAAELTKIIVGVVEPCHSLGVMHRDLKPENFLLVNKDDDFSLKAIDFGLSVFFKPGQIFKDVVGSPYYVAPEVLLKHYGPEADVWTAGVILYILLSGVPPFWAETQQGIFDAVLKGYIDFDTDPWPVISDSAKDLIRKMLCSSPSERLTAHEVLRHPWICENGVAPARALDPAVLSRLKQFSAMNKLKKMALKVIAESLSEEEIAGLRAMFEAMDTDNSGAITFDELKAGLRKYGSTLESTEIHDLMDAADVDNSGTIDYSEFIAATIHLNKLEREEHLVSAFQYFDKDGSGYITIDELQQSCIEHGMTDVFLEDIIKEVDQDNDGRIDYEEFVAMMQKGNAGVGRRTMKNSLNISMRDV

SEQ ID NO: 2134 - DNA, 1776 bp, Chlamydomonas eugametos
  CDS (1)..(1776)
atggcagctaagttcgttgagggcacactggatgtcacgctcaagagcgcgagtgatctccgcgaggatatgtctgtcaagctggacgcctactgcgtcgtgtcctgtgctagcacggcacaccgcagcaacaccgtcacagacgctgggaagacaatgaattgggagcagacgtttcacttcgacaaagttgcatcaacatctgtgttgaagctggagtcttcgatgagaagaacgccgtcggaccgtagctcttgcgcttgcaagattcctctcacacgggcttgcacctcggggtcagatgaggtgtgcgtgccagtgctggacaagaagggcaagcccattggcgagacgcatgtcagcatgacctttaaggccacgtccatggcggatgggccaacaaagggcaactggatccttcctacctatgcgaacaaggactgttggaaggactacgagcagggcaaggtggtgggcaagggctcattcggcaccacctaccttgtcaccaagaaggatacccaagagcagtatgcagtcaaggtcatctccaagcgcaagctgaccaccatggaggaggtggaggacatccagcgtgaggtgcgcatcatgcaccacctggctggccaccccaacgtcgtgcagctcaagaacgtgtacgaggataagagctacgtgtacctggtcatggatgcttgcatgggtggagagctgtttgacgcgatcgtggagcgcgggacgtacagcgagaaggacgcacgcgcgcttatgcgcacgattgtgagcgtcgtggctcattgccatgacatgggcgtgatccaccgtgatctcaagcctgaaaacttcctgttgctggacaagtcggcgaacccggtgctcaagtccatcgactttggtctgtcgtcgttctaccaggagggccaagtgtttcacgacattgtcggcagccccttctacgtcgcccccgaggtcgtgcgccgctcttacggcaaggaggcggacatctggagctgcggcgtgatcctctacatcctgttgtgtggctacccccccttccacggtgacaacgagacaaagatctttgaggcaatcatgaacaagtccctagacttccagtcagacccctggcccaaggtctcggaacctgccaaggaatgcattcgccgcatgcttgaccgcaaccccaagacgagagcctctgcgcagcagacgctggagcacgagtggatgcgtgagaacggtgtggccactgagaagcgcctggagatggaggtgctgaccagtatgaagaagttcagtgctggcaacaggctcaagaaggaggcggcaaagatcattgctgcaaacctccccactgacgagatctgcgggctgcgcgagatgttcatcgccattgacgtcgaccacagcggcagcatcacagcggaagagtttgccaacgcgctgcgcatgaagggcaacagcctccccgaggacgaggtgcagaggctcgtgtccaacgcggacgtggatggggacggcacatgcgactacgaggagttcttagctgccaccatcaaccagagcaagctggagcgtgaggacaggctcaagattgcgtttgagcattttgacctggaccacgacggcagcattacccatgacgagctcatgcagagcctggccaacctcggcatcaacgacgcgggcatcaaggagatcattgcggatgtggacagggatggcaacggccagatcgactacaatgagttctgcctgatgatgcgcaacctgtga

SEQ ID NO: 2135 - protein, 591 aa, Chlamydomonas eugametos
MAAKFVEGTLDVTLKSASDLREDMSVKLDAYCVVSCASTAHRSNTVTDAGKTMNWEQTFHFDKVASTSVLKLESSMRRTPSDRSSCACKIPLTRACTSGSDEVCVPVLDKKGKPIGETHVSMTFKATSMADGPTKGNWILPTYANKDCWKDYEQGKVVGKGSFGTTYLVTKKDTQEQYAVKVISKRKLTTMEEVEDIQREVRIMHHLAGHPNVVQLKNVYEDKSYVYLVMDACMGGELFDAIVERGTYSEKDARALMRTIVSVVAHCHDMGVIHRDLKPENFLLLDKSANPVLKSIDFGLSSFYQEGQVFHDIVGSPFYVAPEVVRRSYGKEADIWSCGVILYILLCGYPPFHGDNETKIFEAIMNKSLDFQSDPWPKVSEPAKECIRRMLDRNPKTRASAQQTLEHEWMRENGVATEKRLEMEVLTSMKKFSAGNRLKKEAAKIIAANLPTDEICGLREMFIAIDVDHSGSITAEEFANALRMKGNSLPEDEVQRLVSNADVDGDGTCDYEEFLAATINQSKLEREDRLKIAFEHFDLDHDGSITHDELMQSLANLGINDAGIKEIIADVDRDGNGQIDYNEFCLMMRNL

SEQ ID NO: 2136 - DNA, 1599 bp, Petunia integrifolia subsp
  CDS (1)..(1599)
atggggaactgttgttcaaggggccaacctaatgaatcaaatgatcatacagaatccatcagcactgccaaaaatggtgacggaaaagtcatgcaaggtggttcagttacaccaccaaaaactccacctcctgcatcacctgacccttcttctaaaccatctaaaacttctcctataggcccagttttaggaagaccaatggaagatgttagaaaaacatattctattggtaaagaattaggaaggggtcaatttggtgtaacacatttatgtacacacaaacaaagtggtgaacaatttgcatgtaagactatagcaaaaagaaaattggttaataaagaagatattgaagatgtgaagagggaagtacaaattatgcatcatttaacaggtcaacaaaatattgttgaattaaaaggtgcttatgaagataaacattcagtacatttggttatggaattatgtgcgggtggtgaactttttgataggattattgctaaaggacattatactgaacgtgctgctgcaacattacttagaacaattgtgcaaattggtcatacttgtcattctatgggtgtcattcatagagatctcaagcctgagaatttcctattacttaataaagatgaagattcacctctcaaggctacagattttggtctatccgtgttctataagcaaggggatgtgtttaaggacattgtgggtagtgcctattacattgcacctgaagtcttgaaaagaagatatggtccagaagttgatatatggagtgttggagttatgttatatattcttctttctggtgttcctcctttttgggcagaaactgaacatggaatattcaatgcaatattgcgaggacatattgatttttcatgtgatccatggcctgcaatttctcatggagccaaggaccttgtcaggaagatgttgactatagaccccaagcaaaggttaacagcaatccaagtattaaatcatccttggatcaaggaggatggagacgcaccagatacaccacttgataatgctgttttgagtaggctcaaacaattcagagctatgaacaatttcaagaaagttgctcttcgggtaatcgcagggtgcttatcagaagaagaaattatgggattaaagcaaatgttcaaaagcatggacaccgataacagtggagcaataacattagaggagctaaagacaggactagccaaacaagggactaaactatctgattatgagattcaacaattaatggaagctgctgatgctgatggaaatggaaccatagattatgaagagtttattacagcaacaatgcacatgaacagaatggacaaagaagaacatctttacacagcattccaatattttgataaggataatagtgggtacattacagtagaggagttagagcaagctttaagagaatttggtattactgatggaaaggatataaaggatattgttgctgaagttgactctaataatgatggtcgaattaactatgatgagtttgtagctatgatgaaaaaaggaactccagatacagcagcaaatctaaagaaaaggagggagtcctttgatgcgaaatag

SEQ ID NO: 2137 - protein, 532 aa, Petunia integrifolia subsp
MGNCCSRGQPNESNDHTESISTAKNGDGKVMQGGSVTPPKTPPPASPDPSSKPSKTSPIGPVLGRPMEDVRKTYSIGKELGRGQFGVTHLCTHKQSGEQFACKTIAKRKLVNKEDIEDVKREVQIMHHLTGQQNIVELKGAYEDKHSVHLVMELCAGGELFDRIIAKGHYTERAAATLLRTIVQIGHTCHSMGVIHRDLKPENFLLLNKDEDSPLKATDFGLSVFYKQGDVFKDIVGSAYYIAPEVLKRRYGPEVDIWSVGVMLYILLSGVPPFWAETEHGIFNAILRGHIDFSCDPWPAISHGAKDLVRKMLTIDPKQRLTAIQVLNHPWIKEDGDAPDTPLDNAVLSRLKQFRAMNNFKKVALRVIAGCLSEEEIMGLKQMFKSMDTDNSGAITLEELKTGLAKQGTKLSDYEIQQLMEAADADGNGTIDYEEFITATMHMNRMDKEEHLYTAFQYFDKDNSGYITVEELEQALREFGITDGKDIKDIVAEVDSNNDGRINYDEFVAMMKKGTPDTAANLKKRRESFDAK

SEQ ID NO: 2138 - DNA, 1596 bp, Zea mays
  CDS (1)..(1596)
atggggcagtgttgtagcagagctcccgccccggactctggacggggaggcaccaatggttatggctattctaaccaggcaaagccagcgcaaacaccttcgagttacaaccctcctcagcagccggccgaggtgaggtacacgccgccggcgacgaaccctccggtagtcccacctgtgcctgtgccaccgaagcccacggcggacacgattcttggcaaacagtacgaggacgtgcgctctgtctactccctcggaaaggagcttggccggggccagttcggggtgacatacctctgcacagaggttgcctctggtaagcagtacgcctgcaagtccatctccaagcgcaagcttaccagcaaggcagacagggaggacattcgaagagagatccagatcatgcagcatctgtctggacagccaaacattgttgagttccggggagcatacgaggacaagagcaatgtccatgtggtgatggagctctgcgcaggtggggagctcttcgatcgcatcattgccaaggggcactacacagagcgtgcagctgctacaatctgcagagcagttgtgaatgttgtcaacatttgccacttcatgggtgtgatgcaccgtgacctgaaaccggagaacttcttgcttgcgagcaaggaggagaatgcaatgctcaaggccactgattttgggctttccgtcttcatcgaagaaggaaagatgtacagggacatcgttggaagtgcttattatgttgcgcctgaagtccttaagcggagctatggaaaagagatagatgtttggagcgcaggtgttattttgtacattcttctcagtggtgtgcctccattttgggctgaaactgaaaaggggatatttgatgctattctgcatgaggagattgactttgaaagtcaaccttggccatcaatttctgagagtgctaaagacttggttagaaagatgttgacacgagatccaaagaaaagactgacttcagctcaagttcttcaacattcatggctcagagaaggtggaggtgcatctgataagcctatcgacagtgctgttctttctagaatgaagcagttcagagcaatgaataagctgaaaaagatggccctaaaggttattgcctcaaaccttaacgaggaagagatcaaggggctaaagcaaatgttcatgaacatggacacagacaatagtggcacaatcacgtatgaagaactcaaagcaggactagccaaacttggatcaaagctgtcggaagctgaagtaaagcagttgatggaggctgctgatgttgatgggaatggatccatcgactatgttgagttcatcactgccacaatgcatagacacaagctcgaaagagacgagtatttgtttaaggcattccagtacttcgataaagataacagcggtttcatcacaagagatgagctggagtctgctttgatcgagcatgagatgggtgacacgagtacaataaaggagatcatatcagaagtggacacagacaatgatgggaggattaactatgaggagttctgcgcaatgatgagaggagggatgcagcagccaatgaggctcaagtag

SEQ ID NO: 2139 - protein, 531 aa, Zea mays
MGQCCSRAPAPDSGRGGTNGYGYSNQAKPAQTPSSYNPPQQPAEVRYTPPATNPPVVPPVPVPPKPTADTILGKQYEDVRSVYSLGKELGRGQFGVTYLCTEVASGKQYACKSISKRKLTSKADREDIRREIQIMQHLSGQPNIVEFRGAYEDKSNVHVVMELCAGGELFDRIIAKGHYTERAAATICRAVVNVVNICHFMGVMHRDLKPENFLLASKEENAMLKATDFGLSVFIEEGKMYRDIVGSAYYVAPEVLKRSYGKEIDVWSAGVILYILLSGVPPFWAETEKGIFDAILHEEIDFESQPWPSISESAKDLVRKMLTRDPKKRLTSAQVLQHSWLREGGGASDKPIDSAVLSRMKQFRAMNKLKKMALKVIASNLNEEEIKGLKQMFMNMDTDNSGTITYEELKAGLAKLGSKLSEAEVKQLMEAADVDGNGSIDYVEFITATMHRHKLERDEYLFKAFQYFDKDNSGFITRDELESALIEHEMGDTSTIKEIISEVDTDNDGRINYEEFCAMMRGGMQQPMRLK

SEQ ID NO: 2140 - DNA, 1824 bp, Zea mays
  CDS (1)..(1824)
atggggcagtgctacgggaaggcaggcggcgcgtcgtcgcggcgggcggaccacgacgacgcggtcgcgccgccgtccccgctgccggccaacggcgcgccgacgccgccgcagcagcccgccacgcccgggcgccgcaagtccggatcggccacgccggtgcaccaccaggcggcgacgaccgcctggcccagcccgtaccccgccggcggggccagcccgctccccgcgggcgtgtcgccgtcgcccgccaggtccacgccccgcaggttcttcaagcggcccttcccgccgccctcgcccgccaagcacatcaaggccacgctcgccaagcgcctcggcgggggcaagcccaaggagggcaccataccggaggagggcggcgccggcgtcgccgccgactccgccgaggccgagcgcccgttggacaagacgttcggcttcgccaacaacttcggggccaagtacgacctcgggaaggaggtcgggaggggacactttggccacacctgctccgccctggtcaagaagggcgagtacaagggccatgccgtagccgtcaagatcatctccaaagctaagatgacgacagccatttccattgaagatgttcgtagggaagtcaagattttgaaagctctatcagggcacaataatctcgtcaaattctatgatgcatgtgaggacgccctcaatgtctacattgtcatggaattatgtgaaggtggagagttgctagatagaattttggctagaggcgggagatatacagaagtagatgccaaagctatcgttgtacagattttgagtgtagtgtccttctgtcatcttcagggagtagttcatcgtgatttgaagccagagaattttcttttcgcaacaagagatgaaagtgctcctatgaagttaattgactttggtctgtctgattttattagaccagatgaaaggctcaatgatattgttgggagcgtatattatgtcgctccagaggttctacacagatcgtacagtatggaagcagacatttggagtataggtgtcataacatacattctgctctgtggcagtcggccattttgggcaaggacagaatctgggatctttcggtccgtattaagggctgatcccaactttgacgattcaccatggccttcagtatcggctgaagctaaggattttgtgaagagatttctgaacaaggattaccgtaaaagaatgactgctgtccaagcactgactcacccttggttacgagatgaacaaaggcaaattccattggacatactcgttttcagattagttaagcaatatcttcgtgctactcctcttaaacgtttggcattaaaggcactatctaaggctttaagggaggatgaactgttgtatcttagattgcagtttaagctgctcgagcccagagacgggctcgtatcgctcgacaactttcggacggctctgacgagatacgtaactgatgctatgagagaatcaagggttcttgagtttttgcacgcgttggacccgcttgcgtacagaaagatggacttggaagaattctgtgcggcagcaatcagcccgtaccagctggaggctttggaaagctgggaagaaatcgctggaacggcttttcagcacttcgaacaggagggcaaccgagttatatctgtggaggagttggcgcaggaactaaacctcgccccgactcactactccatcgtgcaagactggatcagaaagtccgacggcaagcttaactttcttgggttcaccaaatttttgcacggtgtcacgatacggggctcaaacacgagacgacactaa

SEQ ID NO: 2141 - protein, 607 aa, Zea mays
MGQCYGKAGGASSRRADHDDAVAPPSPLPANGAPTPPQQPATPGRRKSGSATPVHHQAATTAWPSPYPAGGASPLPAGVSPSPARSTPRRFFKRPFPPPSPAKHIKATLAKRLGGGKPKEGTIPEEGGAGVAADSAEAERPLDKTFGFANNFGAKYDLGKEVGRGHFGHTCSALVKKGEYKGHAVAVKIISKAKMTTAISIEDVRREVKILKALSGHNNLVKFYDACEDALNVYIVMELCEGGELLDRILARGGRYTEVDAKAIVVQILSVVSFCHLQGVVHRDLKPENFLFATRDESAPMKLIDFGLSDFIRPDERLNDIVGSVYYVAPEVLHRSYSMEADIWSIGVITYILLCGSRPFWARTESGIFRSVLRADPNFDDSPWPSVSAEAKDFVKRFLNKDYRKRMTAVQALTHPWLRDEQRQIPLDILVFRLVKQYLRATPLKRLALKALSKALREDELLYLRLQFKLLEPRDGLVSLDNFRTALTRYVTDAMRESRVLEFLHALDPLAYRKMDLEEFCAAAISPYQLEALESWEEIAGTAFQHFEQEGNRVISVEELAQELNLAPTHYSIVQDWIRKSDGKLNFLGFTKFLHGVTIRGSNTRRH

SEQ ID NO: 2142 - DNA, 1464 bp, Phaseolus aureus
  CDS (1)..(1464)
atgcgccgcggcctagacaaccaggcatattatgtcttgggccataagactcccaacattcgtgatctatacactcttggccgcaaattgggacagggacaatttggcaccacttatttatgcaccgagaattctacttccaatgaatatgcctgcaaatctatctccaaaagaaagttgatttccaaggaggatgttgaggatgtcaggagggaaattcagataatgcatcatttagctggtcacaagaacattgtcaccattaagggtgcttacgaggatcctctctatgtgcatatagtcatggagctttgttctgggggtgagttgtttgatcgcatcatccagaggggccactataccgagaggaaggctgcagagttgaccaaaattattgttggggttgttgaggcttgtcattcccttggggtcatgcacagagatctcaagccagaaaactttcttttggtcaataaagatgatgatttctctcttaaagcaattgactttggcctctccgttttcttcaaacccggtcaaattttcactgatgtagtcggcagcccatactatgttgctcctgaggttctcctcaagcactatgggcctgaagcagacgtgtggacagccggtgtcatactgtacatattgcttagtggtgtaccaccattttgggcagagacccaacaaggtatatttgatgcagtattgaagggacatatagattttgactcagatccttggcctctaatatctgacagtggaaaagatctgatcagaaagatgctgtgttctcagccttcagaacggttgactgctcatcaagtgttatgtcatccttggatatgtgaaaatggagttgcacctgacagggcaatagaccctgctgttctttctcgtcttaaacagttttctgcaatgaataagctgaagaagatggcattgcgggtgattgctgaaagtctatctgaagaggagattgctggattgagagaaatgtttcaggctatggataccgataacagtggtgcaatcacttttgatgaactcaaagctggtctaagaagatatggttctacccttaaagatgtagaaatacgtgatctgatggaagcggctgatgtcgacaaaagtggaaccatagattatggggagtttattgctgctacagttcatctcaacaaactagaacgtgaagaacatcttattgcagcattccaatattttgacaaggatggcagtggttatattacggttgatgaacttcaacaagcttgtgcagaacataacatgactgatgcttttcttgaagatattattagggaagttgatcaagataatgatggaaggattgattatggtgaatttgctgcaatgatgcaaaaaggcaatgctggaattggtaggaggactatgcgcaatagtctgaatttaagcatgagggacgcatctagtgctcaatag

SEQ ID NO: 2143 - protein, 487 aa, Phaseolus aureus
MRRGLDNQAYYVLGHKTPNIRDLYTLGRKLGQGQFGTTYLCTENSTSNEYACKSISKRKLISKEDVEDVRREIQIMHHLAGHKNIVTIKGAYEDPLYVHIVMELCSGGELFDRIIQRGHYTERKAAELTKIIVGVVEACHSLGVMHRDLKPENFLLVNKDDDFSLKAIDFGLSVFFKPGQIFTDVVGSPYYVAPEVLLKHYGPEADVWTAGVILYILLSGVPPFWAETQQGIFDAVLKGHIDFDSDPWPLISDSGKDLIRKMLCSQPSERLTAHQVLCHPWICENGVAPDRAIDPAVLSRLKQFSAMNKLKKMALRVIAESLSEEEIAGLREMFQAMDTDNSGAITFDELKAGLRRYGSTLKDVEIRDLMEAADVDKSGTIDYGEFIAATVHLNKLEREEHLIAAFQYFDKDGSGYITVDELQQACAEHNMTDAFLEDIIREVDQDNDGRIDYGEFAAMMQKGNAGIGRRTMRNSLNLSMRDASSAQ

SEQ ID NO: 2144 - DNA, 1704 bp, Nicotiana tabacum
  CDS (1)..(1704)
atgggcagctgtttttctagctccaaagttagtggctcaaatagcaataccccttctacaactactacaaatgtaaatgttcatcacaaccgtccttcaacaacaacaacaacaactgttacatcaagaaaacaagaggggtcaaattataatagagataaaggtaatattaatacaaaaaacagccaccaaaaacaacaacctaggagttctcagcagaatgttgttgttaagccaagttcaagaagacaaagtggaggggttattccttgtgggaaaagaacagattttgggtatgataaagattttgataagaggtatactattggtaaattgttgggtcatggccaatttgggtatacatatgttgctacagatagatcttctggagatcgtgttgctgttaagaaaattgagaaaaacaagatggttcttccaattgcggttgaggacgtgaaacgagaagtcaagatattgaaggccttagctggtcacgagaatgtggttcaattctataattcatttgaggatgataattatgtctacatcgtaatggagttatgtgagggtggagaactattggaccgaatcttgtccaaaaaagatagtcgatatactgagaaagatgcggcgatagttgtacgccagatgctaaaagtggctgctgagtgtcatttacatggtctggtgcatcgagatatgaaacctgagaattttctctttaagctcttcaaaggtggattcgccattaaaagcacagattttggtctttcagacttcataagaccagggaaaaagttccaagacattgttggcagtgcatattatgtagccccagaggtgttaaagcgtagatcaggacctgaatcagatgtatggagtataggtgtaattacatacattttgctatgcggccgtcgccgcttctgggacaaaactgaggatggtatattcaaggaggtcctacgaaacaagcctgattttcgtcgcaagccatggccaaacataagcaacagtgctaaagattttgtaaagaaattactggtgaaggatccgcgcgctagacttactgccgctcaggccctatcgcatccatgggtccgagaaggaggtatcgcatctgagatcccactcgacatttctgttttatccaacatgcggcaatttgtcagatatagtcgcctaaaacagttcgctttacgggcgttagctagcacgcttgatgaggaggagctctctgatctgaaggatcaattttctgcaattgatgtggataagaatggtgtcatcagtctcgaagaaatgagacaggcccttgccaaggatctcccatggaaaatgaaagagtcacgagttcttgagattcttcaagcgattgatagtaacacagacgggcttgttgatttcccggagtttgtggccgccactctacatgtccatcagttggaggagcataattctacaaaatggcagcaaagatcgcaagctgcttttgagaaatttgatgttgatagagatggattcataaccccggaagaacttaaaatgcacacgggtttgaaaggatcgatagacccacttttagaggaagcggacattgacaaagacgggaagataagcctgtcagaattccgtaggcttttaagaactgctagtatgagttcaccaacggtgagagattcacggagaaatgtagctttgtaa

SEQ ID NO: 2145 - protein, 567 aa, Nicotiana tabacum
MGSCFSSSKVSGSNSNTPSTTTTNVNVHHNRPSTTTTTTVTSRKQEGSNYNRDKGNINTKNSHQKQQPRSSQQNVVVKPSSRRQSGGVIPCGKRTDFGYDKDFDKRYTIGKLLGHGQFGYTYVATDRSSGDRVAVKKIEKNKMVLPIAVEDVKREVKILKALAGHENVVQFYNSFEDDNYVYIVMELCEGGELLDRILSKKDSRYTEKDAAIVVRQMLKVAAECHLHGLVHRDMKPENFLFKLFKGGFAIKSTDFGLSDFIRPGKKFQDIVGSAYYVAPEVLKRRSGPESDVWSIGVITYILLCGRRRFWDKTEDGIFKEVLRNKPDFRRKPWPNISNSAKDFVKKLLVKDPRARLTAAQALSHPWVREGGIASEIPLDISVLSNMRQFVRYSRLKQFALRALASTLDEEELSDLKDQFSAIDVDKNGVISLEEMRQALAKDLPWKMKESRVLEILQAIDSNTDGLVDFPEFVAATLHVHQLEEHNSTKWQQRSQAAFEKFDVDRDGFITPEELKMHTGLKGSIDPLLEEADIDKDGKISLSEFRRLLRTASMSSPTVRDSRRNVAL

SEQ ID NO: 2146 - DNA, 1575 bp, Capsicum annuum
  CDS (1)..(1575)
atgggtaattgttgtgcagtaccaaaaacttcagacacagaggagaagaaaagggggaaaaataagccaaatccattttctgttgattatgctcatgggaacggacacaagtcctatgtgttggataatccaaccggctgtgatatcgaggcaacgtatgagctagggcgtgagcttgggagaggtgaatttggggttacgtatttgtctaccgacaaagcaactggagatgtatatgcttgtaaatcgatatccaagaagaaacttaggactcgagtggatatcgaggatgtaaggagagaagttgagatcatgaagcatttgcctaagcatcctaatattgtcaccttaaaggatacttatgaggatgataatgcagtacatatagttatggagctgtgtgagggcggtgagctatttgatcggattgttgcgagggggcattatactgagagggcagcagctgctgtgactcgcacaattgttgaagtgattcagatgtgccataagcacggagtcatgcatcgtgacctcaaacctgaaaacttcttgtttgaaaacaagaaagagacagcaccattgaaggcaattgattttggtctctcagtattctttaagcctggtgaaagatttaacgaaattgtgggaagtccatactacatggcacccgaggtgctgaagagagattatggtccagaagtagatgtatggagtgctggagtaattctctacatcttgctgtgtggtgttccaccattttgggcagaaactgaacaaggagttgctcaagcgatcattcgttctgttgtgaatttcaaaagagacccttggcctaaggtctccgacaatgcaaaagaccttgtgaagaggatgcttaaccctgatcctagcaagaggcttactgctcaagaagttctagatcatccctggatacaaaatgcaaagaagaatccaaatgtttctttgggtgaaacagtgaaagcaaggctcaagcaattttctatgatgaacaagctaaagaaaagagctttaagggtgattgctgagcatttgactgtggacgaagtggctggaataaaggagggattccagttgatggatataggtaacaaagggaagattgacattaacgagttgagagtggggttgcagaaacttggccatcaaattcccgaatctgatgtgcaaattcttatggatgttggtgatgttgataaagatggatttttggactacggggagtttgtagcaatttcagtccacttaagaaagatggcaaatgaggagcacctgaaggcggcgtttgaattttttgataagaaccaaaacggatatatagagattgacgagttaagggaggctttagatgacgagattgaaaccaacagcgaagaagttatcaatgctattatgcaagatgtagacactgacaaggatggacggataagttacgatgagttctctgcaatgatgaaagctggcacagattggaggaaggcgtcaagacagtattcacgagagcgatataatagtctcagcttgaaactaatgaaggatggatccttacaaagctag

SEQ ID NO: 2147 - protein, 524 aa, Capsicum annuum
MGNCCAVPKTSDTEEKKRGKNKPNPFSVDYAHGNGHKSYVLDNPTGCDIEATYELGRELGRGEFGVTYLSTDKATGDVYACKSISKKKLRTRVDIEDVRREVEIMKHLPKHPNIVTLKDTYEDDNAVHIVMELCEGGELFDRIVARGHYTERAAAAVTRTIVEVIQMCHKHGVMHRDLKPENFLFENKKETAPLKAIDFGLSVFFKPGERFNEIVGSPYYMAPEVLKRDYGPEVDVWSAGVILYILLCGVPPFWAETEQGVAQAIIRSVVNFKRDPWPKVSDNAKDLVKRMLNPDPSKRLTAQEVLDHPWIQNAKKNPNVSLGETVKARLKQFSMMNKLKKRALRVIAEHLTVDEVAGIKEGFQLMDIGNKGKIDINELRVGLQKLGHQIPESDVQILMDVGDVDKDGFLDYGEFVAISVHLRKMANEEHLKAAFEFFDKNQNGYIEIDELREALDDEIETNSEEVINAIMQDVDTDKDGRISYDEFSAMMKAGTDWRKASRQYSRERYNSLSLKLMKDGSLQS

SEQ ID NO: 2148 - DNA, 1809 bp, Zea mays
  CDS (1)..(1809)
atgggagggtgtcacgcgaagccgctcacccacgacgcggaccgctcgccgccgcacgcagcgccggcgaccccgcccccgggctccgccacgcccgccacccccggccccgggaagaagcactgggcggtgtccccgttcttcgcgttctccacgccgagcccgagccccgcgcaccacctcttcggcggctccgcggcatcgccgcgcaagtcccccgctccgccgggctccgcgcccaccaccccggccaggcggctcctgaggctgcccttcccgccgccgtcgcccgccaagcacatccgggcggcgctcgccaggcgccacggcccgccgcggccgtctatccccgaggaaggcggcggcgagggggagggcggcggcggcggaggcaggggcctcgacaaggggtttgggttcaacaaggggtttgcggccaagtatgacttgggggatgaggtcggacgggggcacttcggctacacctgcgccgccacggttaagaagggcgcgcgcaagggggagtccgtcgccgtcaaggtcatccccaaagcaaagatgactacatccattgctatagaggatgtccgaagggaggttaaaatcttgaaagctttagcaggaaacaaaaacttggtccaattttatgatgcctacgaggacaacgacaacgtgtatatagtaatggagctgtgcgaaggtggagagctacttgacagaatactttccagaggcgggaagtactccgaggatgatgcaaaagctgtcctggtgcaaatattaaatgtcgtcgctttttgccacattcaaggagtggttcatcgagatctcaaaccagagaattttctttttacatcaaaagatgatgattcccatcttaaggccattgattttggcctatcagactttgtaaaaccagatgagaggctcaatgacatagttggaagtgcttattatgttgctccagaagttctgcatagatgctatagcacagaagctgatgtttggagcataggtgtaattgcatatatccttctttgtggcagtcgtccattttgggcacgcacggaatctggcatattccgttcggttctcaaagccgatcccagttacaatgaggcaccatggccttctctgactccggaagcaatggattttgtcaagcgattgctgtgcaaggatccgcgtagaaggatgactgcagctcaggctttaagtcatccatggatcagaaattataatgacattaagctgccgttggacattcttatattccgacttatcaaagcttatattcgctcctcatctttacggaaagctgctctgagggctctgtcaaagaccttaaccgtagacgagcttttctacctgaaatcacagttttctctattggaaccagacaggaatgggtgcatcactcttgacaatatcagaatggccttaacgagagaagctactgatgcaatgaaggaatcgcgagttcaagatattcttgtttcgttgagcgcccttcagtacagaagaatggaattccaagagttctgtgcagcagcagttagtgtgcatcagcttgaagcattggatagatgggagcaacatgcgagatctgcttatgaacattttgagaaggaaggcaaccgagctattgtaatagatgaattagcttctgaattgggcctcagcccttcagtgccactgcatgtcgttctgcaagattggatcaggcatacggatgggaaattgagctttctcggatttgtcaagttattgcatggcatgtccagcaggtccctgtcaaagatgagatag

SEQ ID NO: 2149 - protein, 602 aa, Zea mays
MGGCHAKPLTHDADRSPPHAAPATPPPGSATPATPGPGKKHWAVSPFFAFSTPSPSPAHHLFGGSAASPRKSPAPPGSAPTTPARRLLRLPFPPPSPAKHIRAALARRHGPPRPSIPEEGGGEGEGGGGGGRGLDKGFGFNKGFAAKYDLGDEVGRGHFGYTCAATVKKGARKGESVAVKVIPKAKMTTSIAIEDVRREVKILKALAGNKNLVQFYDAYEDNDNVYIVMELCEGGELLDRILSRGGKYSEDDAKAVLVQILNVVAFCHIQGVVHRDLKPENFLFTSKDDDSHLKAIDFGLSDFVKPDERLNDIVGSAYYVAPEVLHRCYSTEADVWSIGVIAYILLCGSRPFWARTESGIFRSVLKADPSYNEAPWPSLTPEAMDFVKRLLCKDPRRRMTAAQALSHPWIRNYNDIKLPLDILIFRLIKAYIRSSSLRKAALRALSKTLTVDELFYLKSQFSLLEPDRNGCITLDNIRMALTREATDAMKESRVQDILVSLSALQYRRMEFQEFCAAAVSVHQLEALDRWEQHARSAYEHFEKEGNRAIVIDELASELGLSPSVPLHVVLQDWIRHTDGKLSFLGFVKLLHGMSSRSLSKMR

SEQ ID NO: 2150 - DNA, 1677 bp, Triticum aestivum
  CDS (1)..(1677)
  misc_feature (958)..(958): y is t or c
  misc_feature (1173)..(1173): r is g or a
atgggcaacgcatgcggcggttcccttagatccaagtacctgcacagcttcaagcaccccgcctcccagcgccacgaccccgaccgcgactacgaccacaccgccgccgccgactcgcccaagaagcagccaggctcccagccgaccgccacagccgccgccaagacggacggccacgcggcccccgcgcagcccgccgcggccatgaggcgcggcggggcgggcgcgccggccgacctcggctcggtcctcggccaccccacgcccaacctgcgcgacctctacgcgctgggccggaagctcgggcagggccagttcggcaccacctacctctgcaccgagctggccacgggggccgactacgcctgcaagtccatctccaagcgcaagctcatcaccaaggaggacatcgacgacgtgcgccgcgagatccagatcatgcaccacctctccggccaccgcaacgtcgtcgccatcaagggcgcctacgaggaccagctctacgtgcacatcgtcatggagctctgcgccgggggcgagctcttcgaccgcatcatacagcgcggccactacagcgagcgcaaggccgccgagctcaccaggatcatcgtcggggtcgtcgaggcctgccactcgctcggggtcatgcaccgggacctaaagcccgagaacttcctgctcgccaacaaggacgacgacctctcgcttaaggccatcgatttcggcctctccgtcttcttcaagcctggccaaattttcaccgatgttgttggaagcccatattatgtagccccagaagtgctgtgcaaaaaatatggaccagaagctgatgtatggaccgctggtgtaattctctacattctgctaagtggtgtacccccactttgggcagagacacagcaaggaatatttgatgctgtactgaaaggtgtcatcgattttgactctgaaccctggyctgtgatatctgacagtgcaaaagatctgataacaagaatgctcaatcctcgcccagctggacgcttgacagcacacgaagttctatgccatccatggattcgtgatcagggagttgctcctgatcgtcctcttgacacagctgtcttatctcgcattaagcaattctctgcgatgaataagttgaagaagatggctttgcgggtaatagctgaragcctctcagaggaggaaattgcagggttgaaggaaatgttccagactatggacgctgataacagtggtgcaattacatatgatgagctcaaagaaggcttgagaaaatatggctccacattgaaggatactgagattcgtgatcttatggatgcggcggacgtggacaacagtgggaccattgactatatagagttcatcgctgcaacactgcatctgaataaactggagcgtgaggagcatctggtggcagccttttcgtattttgacaaagatggaagtggttacatcacagtggatgaactgcagcaagcttgccaagagcataacatgccagatgcttttcttgatgatgtcattaaagaagctgaccaggacaatgatggtcgcattgactatggagaatttgttgccatgatgaccaagggcaatatgggggtcgggcgaagaacaatgagaaacagcctgaatatcagcatgagagacgcacctggtgcaatctag

SEQ ID NO: 2151 - protein, 558 aa, Triticum aestivum
  misc_feature (320)..(320): The Xaa at location 320 stands for Pro, or Ser.
MGNACGGSLRSKYLHSFKHPASQRHDPDRDYDHTAAADSPKKQPGSQPTATAAAKTDGHAAPAQPAAAMRRGGAGAPADLGSVLGHPTPNLRDLYALGRKLGQGQFGTTYLCTELATGADYACKSISKRKLITKEDIDDVRREIQIMHHLSGHRNVVAIKGAYEDQLYVHIVMELCAGGELFDRIIQRGHYSERKAAELTRIIVGVVEACHSLGVMHRDLKPENFLLANKDDDLSLKAIDFGLSVFFKPGQIFTDVVGSPYYVAPEVLCKKYGPEADVWTAGVILYILLSGVPPLWAETQQGIFDAVLKGVIDFDSEPWXVISDSAKDLITRMLNPRPAGRLTAHEVLCHPWIRDQGVAPDRPLDTAVLSRIKQFSAMNKLKKMALRVIAESLSEEEIAGLKEMFQTMDADNSGAITYDELKEGLRKYGSTLKDTEIRDLMDAADVDNSGTIDYIEFIAATLHLNKLEREEHLVAAFSYFDKDGSGYITVDELQQACQEHNMPDAFLDDVIKEADQDNDGRIDYGEFVAMMTKGNMGVGRRTMRNSLNISMRDAPGAI

SEQ ID NO: 2152 - DNA, 1482 bp, Vicia faba
  CDS (1)..(1482)
atgtcgaattccaacaacccgccacccccgaaacccacctgggtcctcccatacataacagaaaatatccgtgaactctacaccttaggtagaaaactgggtcaaggccaattcggcaccacctatctctgcacacacaacccaaccggtaaaacctacgcttgcaaatcaatcccaaagaagaaacttttatgcaaagaggattacgatgatgtgtggagagagattcagataatgcaccatttatctgagcatcctaatgttgtcaggatccatgggacttatgaggattcggtttctgttcatttggttatggagctttgtgaaggtggtgagttgtttgataggattgtgaacaaggggcattatagtgagagggaagctgctaagctgattaggactattgtcgaggttgtggaaaattgtcattctcttggtgttatgcatagggaccttaagccggagaattttttgtttgatactgttgaggaagatgctgttcttaaaactactgattttgggctctctgctttttacaagccaggtgaaatctttagtgatgttgttggaagcccatactatgttgcaccagaggttttgcacaagcattatggacccgaggctgatgtgtggagtgccggggttattttgtacattttattaagcggggtgccgccattttgggctgagacagaaatagggatcttcaaacagattttgcagggacgacttgatttccagtctgagccatggcctgggatttcagacagcgccaaggatctaattcgaaaaatgcttgataggaatccgaaaactaggtttacagctcaccaagtgctatgtcatccatggattgtcgatgatagcattgcaccagacaaacctcttgattctgctgttttatctcgcttgaagcagttctctgcaatgaataaacttaaaaagatggctttacgtgttattgcggagaggctgtctgaggaagaaattggtggtttgaaagagttgttcaagatgcttgatgctgacagcagtggaaccataacattagacgagctaaaagaaggcttaaagcgagtaggatctgaacttatggaatctgaaatcaaggatcttatggacgcagcagatatcgataataatggcacgctcgactatggtgaattcattgctgctactgtccacttaaacaagctggagagagaggaaaatctcttgtctgcattctcctactttgacaaagatggaagtggttacataaccattgacgagattcacgtagcttgtaaggagtttggtttggatgatatccatattgatgaaatggtcaaggaaattgatcaagacaacgatggacaaatagattatggagaatttgctgctatgatgagaaaaggcaatggcgggatgggaagacgaaccatgacaagccgactcaatttcagaaatgctctcggaatcataggcaatgaatccaattaa

SEQ ID NO: 2153 - protein, 493 aa, Vicia faba
MSNSNNPPPPKPTWVLPYITENIRELYTLGRKLGQGQFGTTYLCTHNPTGKTYACKSIPKKKLLCKEDYDDVWREIQIMHHLSEHPNVVRIHGTYEDSVSVHLVMELCEGGELFDRIVNKGHYSEREAAKLIRTIVEVVENCHSLGVMHRDLKPENFLFDTVEEDAVLKTTDFGLSAFYKPGEIFSDVVGSPYYVAPEVLHKHYGPEADVWSAGVILYILLSGVPPFWAETEIGIFKQILQGRLDFQSEPWPGISDSAKDLIRKMLDRNPKTRFTAHQVLCHPWIVDDSIAPDKPLDSAVLSRLKQFSAMNKLKKMALRVIAERLSEEEIGGLKELFKMLDADSSGTITLDELKEGLKRVGSELMESEIKDLMDAADIDNNGTLDYGEFIAATVHLNKLEREENLLSAFSYFDKDGSGYITIDEIHVACKEFGLDDIHIDEMVKEIDQDNDGQIDYGEFAAMMRKGNGGMGRRTMTSRLNFRNALGIIGNESN

SEQ ID NO: 2154 - DNA, 1872 bp, Oryza sativa subsp
  CDS (1)..(1872)
atggggcagtgctacggcaagggcgcgtcggggaggacggcggacgatgagggcggggtggtgacggagcaccagtcgccgccgccggcgaacgggctgccgtcgacgccgccgcggcagcaggcgcaggcgcaggcgcagcaggtggggacgccgaggcggcgtgggagtaagtccggatcgacgacgccggggcaccagacgcctggggtggcgtggccgagcccgtacccgtccgggggcgcgagcccgctgccggccggggtgtcgccgtcgccggcgaggtcgacgcccaggaggttcttcaagcggccgttcccgccgccgtcgccggccaagcacataaaggccacgctcgccaagaggctgggtggggggaagcccaaggaagggacgataccggaggagggaggcgtgggcgctggcggcggcggtggaggggccgcggatggggcggagacggagaggccattggacaagacgttcgggttctcgaagaacttcggcgcgaagtacgagctcgggaaggaggtggggaggggccacttcggacacacttgctccgccgtcgtcaagaagggcgagtacaagggacagaccgtcgccgtcaagatcatcgccaaagctaagatgacaacggcaatatccattgaggatgttcgtagagaagtaaaaattttgagagcgttatcagggcacaataatctcgtcaaattctatgatgcatgtgaggatggcctcaatgtctacattgtcatggaattatgtgagggaggagaattgctagacagaatattagccagaggcgggagatacacagaggaagatgccaaagcgattgttgtacagattttgagcgtagtagccttctgtcatcttcagggggtagtgcatcgtgatttgaagccagagaatttccttttcacaaccagggatgaaaatgctcccatgaagttgattgattttggtctctctgatttcattagaccagatgaaaggcttaatgatattgttggaagtgcatattatgttgccccagaggttttacacagatcatatagtatggaagcagacatttggagtataggtgtcataacgtacattctgctctgtggcagtcggccattctgggcacgaacagaatcaggaatattccgatctgtgttgagagctgatcccaactttgatgattcaccgtggcctacagtatcagctgaagctaaggattttgtgaagagatttctgaacaaagattaccgcaaaagaatgaccgctgttcaagcactgactcatccttggttgcgagatgaacaaaggcagatcccgctggacatactcatcttcagattaattaagcaatacctccgcgctacacctcttaaacggttggcattaaaggcactatccaaggctttaagggaagatgaacttttgtatctcaaactgcagtttaaactgctcgaacctagagatgggtttgtatcacttgacaactttcggacggcactaacgcgatatttaactgatgctatgaaggaatcgagggttcttgaatttttgcatgcgttggaaccacttgcatacagaagaatggactttgaagagttctgtgccgcagcaatcagtccttaccagcttgaggcactggaaaggtgggaggagattgctggaacagctttccagcaatttgaacaagagggcaaccgagtcatatcagttgaggaattagcacaggaattaaatcttgctccaactcattactccatcgttcaagactggatcagaaaatccgatggcaagctaaactttctcgggtttaccaaatttttacatggtgtcacaataaggggctcaaatacaagacggcattaa

SEQ ID NO: 2155 - protein, 623 aa, Oryza sativa subsp
MGQCYGKGASGRTADDEGGVVTEHQSPPPANGLPSTPPRQQAQAQAQQVGTPRRRGSKSGSTTPGHQTPGVAWPSPYPSGGASPLPAGVSPSPARSTPRRFFKRPFPPPSPAKHIKATLAKRLGGGKPKEGTIPEEGGVGAGGGGGGAADGAETERPLDKTFGFSKNFGAKYELGKEVGRGHFGHTCSAVVKKGEYKGQTVAVKIIAKAKMTTAISIEDVRREVKILRALSGHNNLVKFYDACEDGLNVYIVMELCEGGELLDRILARGGRYTEEDAKAIVVQILSVVAFCHLQGVVHRDLKPENFLFTTRDENAPMKLIDFGLSDFIRPDERLNDIVGSAYYVAPEVLHRSYSMEADIWSIGVITYILLCGSRPFWARTESGIFRSVLRADPNFDDSPWPTVSAEAKDFVKRFLNKDYRKRMTAVQALTHPWLRDEQRQIPLDILIFRLIKQYLRATPLKRLALKALSKALREDELLYLKLQFKLLEPRDGFVSLDNFRTALTRYLTDAMKESRVLEFLHALEPLAYRRMDFEEFCAAAISPYQLEALERWEEIAGTAFQQFEQEGNRVISVEELAQELNLAPTHYSIVQDWIRKSDGKLNFLGFTKFLHGVTIRGSNTRRH

SEQ ID NO: 2156 - DNA, 1632 bp, Malus domestica
  CDS (1)..(1632)
atgggttgctacagcagcaaagagaatgctccgaaacccggttcaaaggggttcgggtcatcccagccttaccagcagccgcagacggctgctcagcctcagaaagtctcatcccaacaaccccataacccaccaccaccacccagaccacagccccagcagagggcacagccagcgccccaaccaagggcacagtaccagcagccaagccctcctccagcaaaaccggcgccgcagccgaatagcattctggggaagccctttgatgacattaagcagtactacacactcggcaaagaactgggcaggggccaattcggtatcacatacttgtgcactgagaactccaccggccacagctacgcctgcaagtcgatcctgaaacgcaaacttgtgagcaaaaacgacagggacgacatcaagagagagattcagataatgcagcatttgtctgggcagccaaacattgtggagatcaagggggcttatgaggacaggtactctgtgcatttggtgatggagctctgcgccggaggggaacttttcgatcgaattatagcgcagggacagtattcggagagggctgccgctgcgattctgcgtgacattgtgaatgttgtgcacatttgtcacttcatgggcgtgctgcaccgtgatctcaagccggagaatttcttgttgtctagcaaggatgagaaggcaatgctgaaggcaacggatttcggtttgtctgttttcattgaggaaggaaaggtgtaccgtgatatagtcggcagtgcttactatgttgcccctgaagtcttgcggcgtagttatggaaaggaaatagacatttggagtgcaggagtcattctgtatattctactcagcggtgtacctccattttgggctgaaactgagaggggtatattcgatgccatattggaaggagtaatagactttgatagtcaaccatggccatcaatatcagacagtgctaaagatttagttagaaagatgctgacacaggacccaagaaagagaattacttctgcagaagttctcgagcacccgtggctcagagtaggcggagtagcatcagacaagccattagatagtgcagttctctctagaatgaagcagtccagggcaatgaataagctcaagcaacttgctttgaaggtcatagcagagaatctatctgaggaagaaattaaaggccttaaaacaatgttcaccaatatggacactgacaaaagtggtacaataacttacgaagaactgaagacaggtttagcgcgtattgggtcacggctgtcagaagccgaagttaggcaactcatggatgctgctgatgtcgatggaaatggatcaattgactacattgaatttatatctgctactatgcatagacaaagattagaaagagacgagcacctgtacaaagcatttcagtacttcgacaaggatagcagcgggtacattacaagagatgaattagaggctgctatgaaggagcatggaatgggtgatgacaacaccatcagagagataatttctgaggttgatgccgataatgatgggaggatcaactattcggaattctgtgcaatgatgagaagtggggctcaacaaccagcaaagctcttttaa

SEQ ID NO: 2157 - protein, 543 aa, Malus domestica
MGCYSSKENAPKPGSKGFGSSQPYQQPQTAAQPQKVSSQQPHNPPPPPRPQPQQRAQPAPQPRAQYQQPSPPPAKPAPQPNSILGKPFDDIKQYYTLGKELGRGQFGITYLCTENSTGHSYACKSILKRKLVSKNDRDDIKREIQIMQHLSGQPNIVEIKGAYEDRYSVHLVMELCAGGELFDRIIAQGQYSERAAAAILRDIVNVVHICHFMGVLHRDLKPENFLLSSKDEKAMLKATDFGLSVFIEEGKVYRDIVGSAYYVAPEVLRRSYGKEIDIWSAGVILYILLSGVPPFWAETERGIFDAILEGVIDFDSQPWPSISDSAKDLVRKMLTQDPRKRITSAEVLEHPWLRVGGVASDKPLDSAVLSRMKQSRAMNKLKQLALKVIAENLSEEEIKGLKTMFTNMDTDKSGTITYEELKTGLARIGSRLSEAEVRQLMDAADVDGNGSIDYIEFISATMHRQRLERDEHLYKAFQYFDKDSSGYITRDELEAAMKEHGMGDDNTIREIISEVDADNDGRINYSEFCAMMRSGAQQPAKLF

SEQ ID NO: 2158 - DNA, 1587 bp, Oryza sativa subsp
  CDS (1)..(1587)
atgggcaactgctgcccgccggggtcatcctccgagcccgacccgccgccggcgtcctccggctcctcccgccccgccggcagcgccggcgccgcggcctcgccggcgacaatatccccctccgccgcgccggcgcccgccaagccgcccgcgcccatcggccccgtcctcgggcgccccatggaggacgtcaagtcgatctacaccgtgggcaaggagctcgggcgcgggcagttcggcgtcacgtcgctgtgcacccacaaggcgacggggcagcggttcgcgtgcaagacgatcagcaagcggaagctgtcgaccaaggaggacgtcgaggacgtccgccgcgaggtgcagatcatgtaccacctcgccggccagcccggggtggtggagctcaagggcgcgtacgaggacaagcacgccgtccacctcgtcatggagctctgtgccggcggcgagctgttcgaccggatcatcgccaagggccactacaccgagcacgccgcctcctcgctcctccgcaccatcgtcgagatcatccacacctgccactccatgggcgtcatccaccgcgacctcaagcccgagaacttcctcctcctcagcaaggacgagcacgcccctctcaaggccaccgacttcggcctctccgtcttcttcaaagaaggtgaggtgttcagggacatcgtcgggagcgcctactacatcgcgccggaggtgctcaagcggagctacggcccggaggcggacatctggagcatcggcgtcatgctctacatccttctctgcggagttcctcccttctgggcaggcaagctgctgctgttcatcgccatgcacggcatcttcaactccatcttgagagggcatgtcgacttcagcagcgagccatggtcgcgcatctcgcatggcgccaaggaccttgtcaggcggatgctccattctgaccccaagcagaggatttctgcatatgacgtgctcaatcatccatggataaaggaagacggcgaggcgcccgatacgccgctcgacaatgctgttcttggcaggctcaagcagttcagagctatgaaccagttcaagaaggctgctctaagggttatcgccggatgcttgtcggaggaggagatcagggggctcaaggagatgttcaagagcatggattccgacaacagcggcacgatcaccgtcgacgagctgaggaaagggctggccaagaagggtaccaagctcaccgaagctgaagttcagcagctaatggaagctgctgatgcagacggcaacgggacaatcgattacgaggagttcatcactgcgacgatgcacatgaacaggatggacagggaggagcacctctacaccgcgttccagtacttcgacaaggacaacagcgggtacatcacgatcgaagagctcgagcaagcgctgagagagaaagggttgatggacggcagggagatcaaggacatcatatccgaagtcgacgccgacaacgacgggaggatcaactacacggagttcgtggccatgatgaggaaaggcgacccggaggcgaacccgaagaagcggcgcgacgtcgtgctgtag

SEQ ID NO: 2159 - protein, 528 aa, Oryza sativa subsp
MGNCCPPGSSSEPDPPPASSGSSRPAGSAGAAASPATISPSAAPAPAKPPAPIGPVLGRPMEDVKSIYTVGKELGRGQFGVTSLCTHKATGQRFACKTISKRKLSTKEDVEDVRREVQIMYHLAGQPGVVELKGAYEDKHAVHLVMELCAGGELFDRIIAKGHYTEHAASSLLRTIVEIIHTCHSMGVIHRDLKPENFLLLSKDEHAPLKATDFGLSVFFKEGEVFRDIVGSAYYIAPEVLKRSYGPEADIWSIGVMLYILLCGVPPFWAGKLLLFIAMHGIFNSILRGHVDFSSEPWSRISHGAKDLVRRMLHSDPKQRISAYDVLNHPWIKEDGEAPDTPLDNAVLGRLKQFRAMNQFKKAALRVIAGCLSEEEIRGLKEMFKSMDSDNSGTITVDELRKGLAKKGTKLTEAEVQQLMEAADADGNGTIDYEEFITATMHMNRMDREEHLYTAFQYFDKDNSGYITIEELEQALREKGLMDGREIKDIISEVDADNDGRINYTEFVAMMRKGDPEANPKKRRDVVL

SEQ ID NO: 2160 - DNA, 1605 bp, Nicotiana plumbaginifolia
  CDS (1)..(1605)
atggggaactgttgttcaaggggccaacctgatgataatgaacatacaagtaataatgatcaaaaatccaataccaaaaatgatcaatcaatttcaaataattctcaacaacaacaaaataatggttcaattacaccatcaaaatcacctgatccttcatcaaaaccatcaaaaaattccccaattggtccagttttaggcagaccaatggaagatgttagaaaaacatattcaataggtaaagaattagggaggggtcaatttggtattacacatttatgtacacataaacaaagtggtgaacaatttgcatgtaaaactatagcaaaaaggaaattggttaataaagaagatattgaagatgttaagagagaagtacaaattatgcatcatttaacaggtcaacaaaatattgttgaattaaaaggggcttatgaagataaacattcagttcatttggttatggaattatgtgctggtggtgaattatttgatagaattattgctaaaggacattatactgaaagggctgctgcaactttattaagaacaattgtgcaaattgtacatacttgtcattctatgggtgttattcatagagatcttaagcctgagaatttcctcctacttaataaagatgaagattcacctctcaaggctacagattttggtctttctgtgttttacaaacaaggagatgtatttaaggacattgtgggtagtgcatattacattgcacctgaagtgttgaaaagaagatatggtccagaagttgatatatggagtgtgggagttatgttgtatattcttctttctggtgttcctcctttttgggcagaaactgaacatggaatattcaatgcaatattgagaggacatgttgatttttcaagtgatccatggcctgcaatttcccatggtgccaaagacattgtcaagaagatgttgactatagaccctaagcagaggttgacagcaatccaagtcctaaatcatccatggatcaaggaggatggagaagcaccagatacaccacttgataatgctgttttgagtaggctcaaacaattcagagctatgaacaacttcaagaaagttgctctccgggtaattgcagggtgtctatcagaggaagaaattatgggattgaagcaaatgttcaaaagcatggatactgataacagtggagcaataacacttgaagagctaaaacaaggacttgccaaacaaggaacaaaattatctgatcatgagattgaacagttaatggaagctgctgatgctgatggaaatggaaccatagattatgaagagtttattacagcaacaatgcacatgaacagaatggacaaagaagaacatctttacactgcattccaatattttgacaaggataatagcgggttcattacaatagaagagttagagcaagctttaagagaatttggaatgactgatggaaaggatataaaggaaattgttgctgaagttgactctaataatgatggtcgaattaactatgaagagtttgtagctatgatgagaaaaggaactccagaaactgcagcaaatctaaagaaaagaagggagtcatttgttgcataa

SEQ ID NO: 2161 - protein, 534 aa, Nicotiana plumbaginifolia
MGNCCSRGQPDDNEHTSNNDQKSNTKNDQSISNNSQQQQNNGSITPSKSPDPSSKPSKNSPIGPVLGRPMEDVRKTYSIGKELGRGQFGITHLCTHKQSGEQFACKTIAKRKLVNKEDIEDVKREVQIMHHLTGQQNIVELKGAYEDKHSVHLVMELCAGGELFDRIIAKGHYTERAAATLLRTIVQIVHTCHSMGVIHRDLKPENFLLLNKDEDSPLKATDFGLSVFYKQGDVFKDIVGSAYYIAPEVLKRRYGPEVDIWSVGVMLYILLSGVPPFWAETEHGIFNAILRGHVDFSSDPWPAISHGAKDIVKKMLTIDPKQRLTAIQVLNHPWIKEDGEAPDTPLDNAVLSRLKQFRAMNNFKKVALRVIAGCLSEEEIMGLKQMFKSMDTDNSGAITLEELKQGLAKQGTKLSDHEIEQLMEAADADGNGTIDYEEFITATMHMNRMDKEEHLYTAFQYFDKDNSGFITIEELEQALREFGMTDGKDIKEIVAEVDSNNDGRINYEEFVAMMRKGTPETAANLKKRRESFVA

SEQ ID NO: 2162 - DNA, 1587 bp, Nicotiana plumbaginifolia
  CDS (1)..(1587)
atgggtaattgctgtgtgaaacccggcaaatctgctgaaaaaaagaagaacaaaaagaacaaaccaaaccccttttcaattgattatggggcatctgggggtggagttaagcttgttgtattgaaagaaccaacagggcagaacatacacgacaagtatgatttgggtcgtgagctcggaagaggagaatttggggttacttacctatgcactgaagtggacacaggcgataagtatgcctgcaaatcaatatccaaaaagaagttaaggactgcagtcgatatcgatgatgttaggagagaggttgagatcatgaagcatttgcctaagcatcctaatattgtgactttaaaggatacatatgaggatgataatgcagtgcatattgtgatggaactgtgtgagggtggtgagttgtttgaccgtatcgtagctagaggtcactataccgagagggcagctgctggaattttgaggactgtcgttgaagtcgttcagatgtgtcacaggcatggggttatgcatcgtgatctcaaacctgagaactttctttttggtaacaagaaagaaacagctccactgaaagcaattgactttgggttgtcagttttctttaagcctggggaacgctttaatgagatagttggaagtccttattacatggctccagaggttctaaagcgtaattatggaccagaggttgacgtctggagtgctggagttatactctacattcttctttgtggtgttccacccttctgggcagagactgaacaaggagtagcccaagcaattattcgttctgttattgatttcaagagggatccatggcctaaagtttctgataatgcaaaggatcttgtaaagaaaatgcttgatccagatccaagtcgacggctcacagctgagcgagttcttgagcatccctggttacaaaatataaagaaagcaccaaacgtctcattaggcgagactgtaaaagcaaggctcaagcagttttcagtgatgaacaagctcaagaaaaaagctctaacggttatagctgagtttttgtctgcggaggaagtggcgggaatgagggacgcatttgaaatgatggatactggaaagaagggccagataaaccttggagaacttaaagatggtttacagaagcttggccatcagacctctgatgttgatcttcagattctcatggaagctgccgatgttgatggagatggaagtttaaattatgcagagttcgttgctgtatctgttcatcttagaaagatggctaatgatgaacacctgcacaaagcattttcatttttcgacaaaaaccaaagtggttacatagaaatcgaagagctgcgttgtgccttaagcgatgaggacgacaacactagtgaggaagtcatcaatgccattatgcatgatgttgacacggataaggatggtcgcattagttacgaggaatttgctgcgatgatgaaggctggtacggattggagaaaagcatcgcgacagtattctcgtgaacggtttaacagcctcagcttaaaattgatgagggatggctcgttacaactcgaaaacaaagcctag

SEQ ID NO: 2163 - protein, 528 aa, Nicotiana plumbaginifolia
MGNCCVKPGKSAEKKKNKKNKPNPFSIDYGASGGGVKLVVLKEPTGQNIHDKYDLGRELGRGEFGVTYLCTEVDTGDKYACKSISKKKLRTAVDIDDVRREVEIMKHLPKHPNIVTLKDTYEDDNAVHIVMELCEGGELFDRIVARGHYTERAAAGILRTVVEVVQMCHRHGVMHRDLKPENFLFGNKKETAPLKAIDFGLSVFFKPGERFNEIVGSPYYMAPEVLKRNYGPEVDVWSAGVILYILLCGVPPFWAETEQGVAQAIIRSVIDFKRDPWPKVSDNAKDLVKKMLDPDPSRRLTAERVLEHPWLQNIKKAPNVSLGETVKARLKQFSVMNKLKKKALTVIAEFLSAEEVAGMRDAFEMMDTGKKGQINLGELKDGLQKLGHQTSDVDLQILMEAADVDGDGSLNYAEFVAVSVHLRKMANDEHLHKAFSFFDKNQSGYIEIEELRCALSDEDDNTSEEVINAIMHDVDTDKDGRISYEEFAAMMKAGTDWRKASRQYSRERFNSLSLKLMRDGSLQLENKA

SEQ ID NO: 2164 - DNA, 1557 bp, Triticum aestivum
  CDS (1)..(1557)
atgggcaaccgcacctcgcgccaccgccgcgccgccgcggaccagccggccacggcccctccgccgacggcccagcccaaaccccagccgccgccgaagccccagacggcgccggccccggccccgacgccggaagcgggacaggtggccatgggccgcgttctgggacgcccgatggaggacgtgcgcgcgacctacaccttcggccgcgagctcggccgggggcagttcggggtcacctacctcgtcacgcacaaggctacgggccagcgcttcgcctgcaagtccatcgccacgcggaagctcgtccaccgcgatgacatcgaggatgtgcagcgggaggtgcagatcatgcaccacctcacgggtcaccgcaacatcgtcgagctccgcggcgcctacgaggaccgccactcggtcaacctcatcatggagctatgtgagggcggggagctattcgaccgcatcatcgcgcgggggcactactccgagcgagccgccgccctgctctgccgcgagatggtctccgtcgtgcacagctgccactccatgggggttttccaccgggatctcaagcccgagaactttttgtttctcaacaacaaggaggactcgccgctcaaggccactgacttcggtctctccgtcttcttcaaacacggggagcagtttaaggatctcgttggaagtgcgtattatgttgctcctgaggtactgaagcggcactatggagcagaagctgacatatggagtgcggggattattctgtacatccttctgtctggtgttcctcctttttgggcagacaatgaggatggcatatttgaggctgtcttgcttggtcacatagatttctcatctgatccctggccttcaatatctaatggtgcaaaagatttggtgaagaagatgttgcggcaagaccccaaagagcgcttgactgctgcagaaattttgaatcacccatggattagggaagatggagaggctccagataagccacttgacattactgttatcagtagaatgaagcagttccgggcgatgaacaagcttaagaaagttgcattgaagatcgttgcagagaacttgtctgaggaagagataacaggcttgaaagaaatgttcagatccctggacactgataacagtgggacaattactcttgaagagctaagatctggtttaccaaaacttggcaccaaaatttctgaatcagaaattacacagttaatggaggcggctgatgttgatggaaatgggaccattgattattctgagttcgtatcagcgacaatgcacatgaatagattggagaaggaagaccacatacttaaagcatttgaatattttgataaggaccacagcggatacataacagtagatgagctggaagaagctctgaagaagtatgacatgggggatgataaaacaattaaagatattatcgctgaagttgatacagatcatgatggaagaatcaactaccaggagttcgttgccatgatgagaaacaacagcccggagattgttccaaatcggcggcgcatgttctaa

SEQ ID NO: 2165 - protein, 518 aa, Triticum aestivum
MGNRTSRHRRAAADQPATAPPPTAQPKPQPPPKPQTAPAPAPTPEAGQVAMGRVLGRPMEDVRATYTFGRELGRGQFGVTYLVTHKATGQRFACKSIATRKLVHRDDIEDVQREVQIMHHLTGHRNIVELRGAYEDRHSVNLIMELCEGGELFDRIIARGHYSERAAALLCREMVSVVHSCHSMGVFHRDLKPENFLFLNNKEDSPLKATDFGLSVFFKHGEQFKDLVGSAYYVAPEVLKRHYGAEADIWSAGIILYILLSGVPPFWADNEDGIFEAVLLGHIDFSSDPWPSISNGAKDLVKKMLRQDPKERLTAAEILNHPWIREDGEAPDKPLDITVISRMKQFRAMNKLKKVALKIVAENLSEEEITGLKEMFRSLDTDNSGTITLEELRSGLPKLGTKISESEITQLMEAADVDGNGTIDYSEFVSATMHMNRLEKEDHILKAFEYFDKDHSGYITVDELEEALKKYDMGDDKTIKDIIAEVDTDHDGRINYQEFVAMMRNNSPEIVPNRRRMF

SEQ ID NO: 2166 - DNA, 1542 bp, Oryza sativa subsp
  CDS (1)..(1542)
atgcagccggacccgagcgggagcggcggcgacggcaacgccaatgcgaaggcgaagctggcgccgccgccggtgacggcggcgggaggtcggccggtgtcggtgctgccgcacaagacggcgaacgtgcgcgaccactaccgcatcgggaaggagctcgggcaggggcagttcgggacgacgtacctgtgcgtggacaaggcgagcggcggcgagttcgcgtgcaagtccatccccaagcggaagctgctgtgccgggaggactacgaggacgtgtggcgcgagatccagatcatgcaccacctctccgagcaccccaacgtcgtccgtatccgcggcgcctacgaggacgcgctgttcgtccacatcgtcatggagctctgcgccggcggcgagctcttcgaccgcatcgtcgccaagggccactacaccgagcgcgccgccgcgcagctcatccgcaccatcgtcgccgtcgtcgagggatgccactcgctcggcgtcatgcaccgggacctcaagcccgagaacttcctcttcgccagcgccgccgaggacgcccccctcaaggccactgatttcggcctctccatgttctacaagcctggtgataagttctctgatgttgttgggagcccctattatgttgcacctgaggtacttcagaaatgctatggtccagaatctgatgtctggagtgctggtgtaattctttacattttgctatgtggtgttccaccattttgggcagaaactgaagctggaattttcaggcagattctacgaggcaaacttgattttgaatctgaaccctggcctagcatctctgacagtgctaaagatctagtccgtaatatgctttgccgggatcctacaaagagacttacagcccatgaggttctctgtcatccatggattgttgatgatgctgtggcacctgacaagcctattgattctgctgttttgtcaagactgaagcacttttcggcaatgaacaagctcaagaagatggcattgagggttattgctgaaagcctgtctgaggaagagattggaggactaaaggagctattcaaaatgattgatactgacgatagtggaactataacttttgatgagctgaaagagggcttgaaaagggtgggttcagaattaacagaacatgaaatccaggctttaatggaagcggctgatatcgacaacagtggaaccatcgactatggtgaattcattgctgctactctccacatgaataagctagagagggaggaaaacttagtatcagcattctcatttttcgacaaagatggaagtggtttcataactattgatgagctgtcacaagcatgccgcgaatttggccttgatgatcttcaccttgaggatatgattaaagatgttgatcaaaacaatgacggacaaattgactacagcgagttcacggcgatgatgagaaagggcaatgctggtggagctggaaggagaaccatgaggaacagcttgcagttgaatcttggtgagatcttgaaccccagcaacagctaa

SEQ ID NO: 2167 - protein, 513 aa, Oryza sativa subsp
MQPDPSGSGGDGNANAKAKLAPPPVTAAGGRPVSVLPHKTANVRDHYRIGKELGQGQFGTTYLCVDKASGGEFACKSIPKRKLLCREDYEDVWREIQIMHHLSEHPNVVRIRGAYEDALFVHIVMELCAGGELFDRIVAKGHYTERAAAQLIRTIVAVVEGCHSLGVMHRDLKPENFLFASAAEDAPLKATDFGLSMFYKPGDKFSDVVGSPYYVAPEVLQKCYGPESDVWSAGVILYILLCGVPPFWAETEAGIFRQILRGKLDFESEPWPSISDSAKDLVRNMLCRDPTKRLTAHEVLCHPWIVDDAVAPDKPIDSAVLSRLKHFSAMNKLKKMALRVIAESLSEEEIGGLKELFKMIDTDDSGTITFDELKEGLKRVGSELTEHEIQALMEAADIDNSGTIDYGEFIAATLHMNKLEREENLVSAFSFFDKDGSGFITIDELSQACREFGLDDLHLEDMIKDVDQNNDGQIDYSEFTAMMRKGNAGGAGRRTMRNSLQLNLGEILNPSNS

SEQ ID NO: 2168 - DNA, 1563 bp, Oryza sativa subsp
  CDS (1)..(1563)
atgggcgcgtgcttctcatcccacactgcgaccgccgccgccgatggcgggagcgggaagcggcagcagcggaagggggatcacaaggggaagctccccgatggcggcggcggcgagaaggagaaggaggcggcgcgggtggagttcgggtacgagagggacttcgaggggaggtaccaggtcgggaggctgctcggccacggccagttcggctacaccttcgccgccaccgaccgggcctccggtgaccgcgtcgccgtcaagcgcatcgacaaggccaagatggttcgccctgttgctgtggaggatgtaaagagagaagtgaagattcttaaagaacttaaaggccatgagaatattgttcacttctacaatgcgtttgaagatgactcatatgtatatattgtgatggaactatgtgagggtggtgaactattggaccggattttggcaaaaaagaacagccgttatagtgagaaagatgctgcagtggtggtgcggcagatgctcaaagtggcagctgagtgccatctgcatgggctagttcaccgagatatgaagcccgagaacttccttttcaaatcaaccaaggaggactcacctttaaaggcaacagattttggtctgtcagacttcataaaaccagggaaaaagtttcacgatatagttggcagtgcctattatgtagcaccagaagttttaaaacgacggtctggccctgagtcagatgtttggagcataggagtcataacttatattttgctctgtgggagacgccctttttggaataagacagaggatggcatattcagagaggtactaagaaacaagcctgattttcgtaagaagccttggccaggcatcagttcaggtgctaaagatttcgttaaaaagttacttgtaaagaacccaagggcaagattaaccgctgctcaagctctctcgcatccatgggtaagagaaggaggagaagcatctgagatccctgttgatatatctgtattgtccaacatgcgtcagtttgtcaagtacagccgttttaagcaatttgctctgagggctttagcaagtacactaaaagaggaagaactagcagatctgaaggaccagttcgatgcaattgatgttgataaaagtggatcaattagtattgaggaaatgcggcatgcccttgcaaaggatcttccttggagattgaagggcccccgtgttctcgagattatccaagcaatcgacagcaacactgatggtcttgtggactttgaagagtttgtagcagcaaccctccatatacatcaaatggctgagcttgactctgaaaggtggggcctacgctgccaggctgctttcagcaaatttgatctggatggtgacggatacatcactccagatgaactcagaatgcacactggcttgaagggttccatcgagccattgctggaggaggccgacatcgacaaagacgggagaataagcttgtcggagttccgcaagctcctgcggacagcgagcatgagcaaccttcccagtccaagaggacctccaaatccacaacccctgtga

SEQ ID NO: 2169 - protein, 520 aa, Oryza sativa subsp
MGACFSSHTATAAADGGSGKRQQRKGDHKGKLPDGGGGEKEKEAARVEFGYERDFEGRYQVGRLLGHGQFGYTFAATDRASGDRVAVKRIDKAKMVRPVAVEDVKREVKILKELKGHENIVHFYNAFEDDSYVYIVMELCEGGELLDRILAKKNSRYSEKDAAVVVRQMLKVAAECHLHGLVHRDMKPENFLFKSTKEDSPLKATDFGLSDFIKPGKKFHDIVGSAYYVAPEVLKRRSGPESDVWSIGVITYILLCGRRPFWNKTEDGIFREVLRNKPDFRKKPWPGISSGAKDFVKKLLVKNPRARLTAAQALSHPWVREGGEASEIPVDISVLSNMRQFVKYSRFKQFALRALASTLKEEELADLKDQFDAIDVDKSGSISIEEMRHALAKDLPWRLKGPRVLEIIQAIDSNTDGLVDFEEFVAATLHIHQMAELDSERWGLRCQAAFSKFDLDGDGYITPDELRMHTGLKGSIEPLLEEADIDKDGRISLSEFRKLLRTASMSNLPSPRGPPNPQPL

SEQ ID NO: 2170 - DNA, 1800 bp, Oryza sativa subsp
  CDS (1)..(1800)
atggggggatgccacgcgaagccgctgacgcacgaggaggccgacggcgcctgctcgcccccgcgcgagcggccgcagccgccggccacgccgccgcgggggtccggcgcggccacccccgcgtggaagacgaagccgtgggcgtcgcccttcttcgggttctccacgcccagcccgagccctgcgcaccacctcttctcggcctcctccccgcggaggtcccccgccccgtccgcgcccaccacgcccgcgaggcggttgctgcggctgccgttcccgccgccgtcgcccgccaagcacatccggcaggcgctcgcgcggcgccacgggcccccgcggccgccgatccccgaggagggcggcgacgtggaaggggagggcggccgcgggctcgacaaggggttcgggttcaacaaggggttcgcggcgaagtacgacatgggggacgaggtggggagaggccacttcggctacacctgcgccgcgaagatcaagaagggggcgcgcaagggggacgcggtcgccgtcaaggtcatccccaaggccaagatgacaacatccattgctatagaggatgtccgaagggaggtgaaaatattgaaagctttggcgggacacaagaacttggttcaattttatgatgcctatgaggacaatgacaatgtgtacatagtaatggagttgtgtgaaggaggagagcttctggatagaatactttccagaggtgggaagtactctgaggatgatgcaaaagcggttctggtgcaaatattaaatgtcgtttcattttgccacattcaaggagtggttcatcgggatctcaagccagagaattttctatttacttcaaaagatgagaactctcaacttaaggctattgattttggcttatcagattttgtaaaaccagatgagaggctaaatgatattgttggaagtgcttattatgttgctcctgaagttctgcacagatgctatagcacagaagctgatgtctggagtataggtgtaattgcatatattctcctttgtggcagtcgtccattttgggcacgcactgaatctggcatattccgttccgttctcaaagctgaccccagttataatgaggcaccttggccttctcttactctggaagcaatggattttgttaagcgcttgctttgcaaggatccacgtagaagaatgactgcagcacaggctttaagtcatccatggatcagaaattacaatgacattaagctgccactggacatccttatattccgacttatcaaagcttatattcgttcctcatcattgcgaaaagctgctctaagggctctatcgaagactttgactgttgatgagcttttctatctgaaaggacagttttctctgttggaaccagacagaaatggatgcatcactctagataatatcagaatggccttaacaagagaagccacttatgctatgaaggaatcacgagttcaggagattcttgtctcgttaagcgctcttcagtacagaagaatggactttcaagagttctgtgcagcagcagttagtgtgcaccagcttgaagcattagatagatgggagcaacatgcccgttccgcttatgatttctttgagaaggatggcaatcgagctatcgtaattgatgaactagcttctgaactgggtctcagcccttcagtgccattgcatgttgttctgcaagattggatcaggcacaccgacgggaaattgagtttccttggatttgtcaagttattgcatggcatgtccagcaggtccttgtcaaagatgagatag

SEQ ID NO: 2171 - protein, 599 aa, Oryza sativa subsp
MGGCHAKPLTHEEADGACSPPRERPQPPATPPRGSGAATPAWKTKPWASPFFGFSTPSPSPAHHLFSASSPRRSPAPSAPTTPARRLLRLPFPPPSPAKHIRQALARRHGPPRPPIPEEGGDVEGEGGRGLDKGFGFNKGFAAKYDMGDEVGRGHFGYTCAAKIKKGARKGDAVAVKVIPKAKMTTSIAIEDVRREVKILKALAGHKNLVQFYDAYEDNDNVYIVMELCEGGELLDRILSRGGKYSEDDAKAVLVQILNVVSFCHIQGVVHRDLKPENFLFTSKDENSQLKAIDFGLSDFVKPDERLNDIVGSAYYVAPEVLHRCYSTEADVWSIGVIAYILLCGSRPFWARTESGIFRSVLKADPSYNEAPWPSLTLEAMDFVKRLLCKDPRRRMTAAQALSHPWIRNYNDIKLPLDILIFRLIKAYIRSSSLRKAALRALSKTLTVDELFYLKGQFSLLEPDRNGCITLDNIRMALTREATYAMKESRVQEILVSLSALQYRRMDFQEFCAAAVSVHQLEALDRWEQHARSAYDFFEKDGNRAIVIDELASELGLSPSVPLHVVLQDWIRHTDGKLSFLGFVKLLHGMSSRSLSKMR

SEQ ID NO: 2172 - DNA, 1623 bp, Cicer arietinum
  CDS (1)..(1623)
atgggtaattgttgcgctacccctccggtaaccggagaagaaacaaacaacaacaaaaagaaaaacaacaaaaaacctaaaaaggaaaatcccttcgcaatcgattacaatttcaacgcgaacaacacgaactcaaaactcaccgttttgaaggatccaacgggacgcgaaatcgaggttcgatacgagctaggtcgtgaactaggtcgaggcgagttcggaataacgtacctctgtacggacaaagaaaacggagaagaactagcgtgtaagtcgatatcgaagaagaagctaagaacattggtggatattgaagatgttaggagagaagttgaaataatgaaacacatgcccaaacatcctaatattgttacgttgaaagatacttatgaagatgataatgctgttcaccttgttatggagctttgtgaaggtggtgaactttttgatcggattgttgcgcgtggtcattatactgaacgcgccgccgccgctgttaccaaaaccatcgttgaagttgttcagatgtgccacaaacacggagtgatgcatagggatctcaagcctgagaactttttgtttgcaaataagaaggagacagcagcattgaaagctatagattttggattgtcagtgttttttacaccaggggaaaaatttaatgagatagttggaagtccatattacatggctcctgaggtattgaagcgaaattacggcccagaggttgatatctggagtgctggagtaattctatacatcttactttgtggtgtccctccattttgggcagaaactgagcaaggagttgcacaagcaatcatacgatctgttgttgatttcaaaagggatccatggcctaaagtttccgataatgcaaaagaccttgtgaagaggatgctaaatcccgaccctaagcggcgacttactgcacaggaagtattagatcatccatggttacaaaatgcaaagaaagctcccaatgtttcattaggagaaacagttagagcaaggcttaagcaattttccgtaatgaacaagcttaagaaaagagctttgagggtcattgcagagcatttgtcagtagaagaagctgctggactaaaagagggattcaagctcatggatacaagcaacaaaggcaagattaacattgatgagctgcgaataggattgcataaactaggccatcaaattcctgatgcagatgtccagattcttatggaagctggcgatgtagacagggatggacacttggattatggagagtatgttgccatttcagttcatttgagaaagatgggaaatgatgagcatcttcacaaagccttcgattttttcgatcagaaccaaactgggtatattgagattgaggagctgcgcaatgccttatctgatgaaattgaaacaaatagtgaagaagtgattagtgcaattatgcatgacgtggatacagataaggatggaaagataagttacgaggaatttgcttcaatgatgaagctgggaacagattggagaaaggcgtccaggcagtattcgcgagagaggttcaacagtctcagcctgaaattgatgagggatggttcattgcaattaaccaatgaaaaccaatgccagtag

SEQ ID NO: 2173 - protein, 540 aa, Cicer arietinum
MGNCCATPPVTGEETNNNKKKNNKKPKKENPFAIDYNFNANNTNSKLTVLKDPTGREIEVRYELGRELGRGEFGITYLCTDKENGEELACKSISKKKLRTLVDIEDVRREVEIMKHMPKHPNIVTLKDTYEDDNAVHLVMELCEGGELFDRIVARGHYTERAAAAVTKTIVEVVQMCHKHGVMHRDLKPENFLFANKKETAALKAIDFGLSVFFTPGEKFNEIVGSPYYMAPEVLKRNYGPEVDIWSAGVILYILLCGVPPFWAETEQGVAQAIIRSVVDFKRDPWPKVSDNAKDLVKRMLNPDPKRRLTAQEVLDHPWLQNAKKAPNVSLGETVRARLKQFSVMNKLKKRALRVIAEHLSVEEAAGLKEGFKLMDTSNKGKINIDELRIGLHKLGHQIPDADVQILMEAGDVDRDGHLDYGEYVAISVHLRKMGNDEHLHKAFDFFDQNQTGYIEIEELRNALSDEIETNSEEVISAIMHDVDTDKDGKISYEEFASMMKLGTDWRKASRQYSRERFNSLSLKLMRDGSLQLTNENQCQ

SEQ ID NO: 2174 - DNA, 1671 bp, Cicer arietinum
  CDS (1)..(1671)
atgggttgtcaaggtagcaaggagaagaacaaacctacgcctgattttactgcccgccaccatggatcatccgctactgctgcttccgccagtggtgttgccactaataatcaccagtaccactctgttcaaccatcttcaactcatgttcaaacaccacctccaaaaccagactcaaatccaaaacccactgtcactacccagaatgtcaaaacagttcacaaaacagacacaaccatattaggtaaaccctttgatgatataaagaaacattacactttaggtcaagaattaggtagagggcaatttgggattacttatttttgcactgagaattcaactggcaacacttatgcttgcaaatcaatattaaagaggaaacttgtgtctaaatctgatagagaagatattaagagagagattcagattcttcagcatttgtctggtcaaccaaacattgttgaattcaaaggtgcttatgaggatagattctctgtgcatcttgtcatggaactttgtgctggtggagagttatttgatagaatcattgctcaaggtcactattcagagagagctgctgcatccatttgtagggctgttgttaatgttgtgcatatttgtcatttcatgggtgttttgcatcgcgatttgaagcccgagaatttcttgctctctagtaaggatgaaggagcaacacttaaagctactgattttggactttctgttttcattgaagaaggaaaggtttatcgcgatatggtaggcagtgcttactacgttgctcctgaggtactgcgtcgtagttatggaaaggaaattgacatttggagtgcaggcatcatcttgtatattctccttagtggtgtaccacctttttgggctgaaactgaaaagggaatatttaatgccatactggaaggagaacttgactttgctagtgaaccatggccatcaatatcagacagtgctaaagatctagtcaggaagatgcttaatcacgatccaaagaagaggattacttctgcacaagtccttgaacacccgtggatgagagaaggtggagaggcctctgataaaccgattgatagtgcagttctttctagaatgaaacaattcagggcaatgaataagctcaagaagcttgcattgaagattattgctgaaaatctatcagaagaggagattaaaggtctcaaggcaatgtttgcaaatatggacactgacaatagtggtaccatcacctatgaagaattgaagactggcttggctcgaatcggatcacggttgtctgagaccgaagtgaagcaacttatggagctggctgatgttgatggaaatgggtcgattgactatcttgaattcatatcggctacaatgcataggcacagacttgaacgggatgaacacctttacaaagcattccagtattttgataaggacaacagtgggcatattactagagaagaattggagactgccatgacacagcatggaatgggtgatgaagcaacaataaaggacataatttctgaggtggatacagatcatgatgggagaataaactatgaggaattttgtgcaatgatgagaagcggaatgccaccaccagggaccactattataaatctacagagtgaattcgatttcatatgttcatgcaattcattatga

SEQ ID NO: 2175 - protein, 556 aa, Cicer arietinum
MGCQGSKEKNKPTPDFTARHHGSSATAASASGVATNNHQYHSVQPSSTHVQTPPPKPDSNPKPTVTTQNVKTVHKTDTTILGKPFDDIKKHYTLGQELGRGQFGITYFCTENSTGNTYACKSILKRKLVSKSDREDIKREIQILQHLSGQPNIVEFKGAYEDRFSVHLVMELCAGGELFDRIIAQGHYSERAAASICRAVVNVVHICHFMGVLHRDLKPENFLLSSKDEGATLKATDFGLSVFIEEGKVYRDMVGSAYYVAPEVLRRSYGKEIDIWSAGIILYILLSGVPPFWAETEKGIFNAILEGELDFASEPWPSISDSAKDLVRKMLNHDPKKRITSAQVLEHPWMREGGEASDKPIDSAVLSRMKQFRAMNKLKKLALKIIAENLSEEEIKGLKAMFANMDTDNSGTITYEELKTGLARIGSRLSETEVKQLMELADVDGNGSIDYLEFISATMHRHRLERDEHLYKAFQYFDKDNSGHITREELETAMTQHGMGDEATIKDIISEVDTDHDGRINYEEFCAMMRSGMPPPGTTIINLQSEFDFICSCNSL

SEQ ID NO: 2176 - DNA, 1533 bp, Zea mays
  CDS (1)..(1533)
atgcagccggacccgagcgggaacgccaatgcgaagacgaaactgccgcagctggtgacggcgccggctccgtcgtcggggcgtccggcgtccgtgcttccgtacaagacggcgaacgtgcgggaccactaccgcatcggcaagaaactggggcaggggcagttcggcaccacgtaccagtgcgtgggcaaggcggacggcgctgagtacgcatgcaagtccatccccaagcgcaagctgctgtgccgggaggactacgaggacgtctaccgcgagatccagatcatgcaccacctctccgagcaccccaacgtcgtccgcatccgcggcgcctacgaggacgcgctcttcgtgcacatcgtcatggagctctgcgccggcggcgagctcttcgaccgcatcgtcgccaagggccactacagtgagcgcgcggctgcgaagctcatcaagaccattgtcggggtcgtggagggatgtcactcgctcggcgtcatgcaccgggacctcaagccggagaattttctctttgccagcaccgccgaggaagccccactcaaggccactgactttgggctttccatgttctacaagcccggtgataaattctctgatgtcgttggaagtccatactatgttgcaccagaggtgcttcagaaatgctatggtccagaagctgatgtgtggagcgcaggagtaattctgtacattttgctttgtggtgtgcccccgttttgggcagaaactgaggctggaatcttcaggcagattctgcgaggcaaacttgattttgaatctgaaccctggcctagtatttctgatagtgctaaggatctggtctgcaatatgcttacacgggatcctaaaaagagatttagtgctcatgaggttctctgtcacgcatggattgttgacgatgccgtggcacctgataagcctattgattctgctgttctctcaaggctgaagcatttttcggcaatgaacaagctcaagaagatggcattaagggttattgctgaaagcctgtctgaggaagagattggaggtctcaaggagttgttcaagatgattgatactgacagtagtgggactataacatttgatgagctgaaagatggcttgaaaagggtaggctctgaattaacagagaacgaaatccaggctctaatggaagcagctgatattgataacagcggaaccatcgactacggcgaattcattgcagctacgttgcacatgaacaaactggagagggaggaaaacttggtttcagcattctcgttttttgacaaagatggaagtggctttataaccatcgatgagctgtcacaagcatgtcgcgaatttggtctcgatgacctccacctcgaggatatgattaaagatgttgaccagaacaatgatggccaaatcgactacagcgagttcacggcgatgatgaggaagggcaatgctggtgcaacaggaaggagaaccatgaggaacagcttgcacttgaatctcggcgaactcttgaatcccagcaaaacctag

SEQ ID NO: 2177 - protein, 510 aa, Zea mays
MQPDPSGNANAKTKLPQLVTAPAPSSGRPASVLPYKTANVRDHYRIGKKLGQGQFGTTYQCVGKADGAEYACKSIPKRKLLCREDYEDVYREIQIMHHLSEHPNVVRIRGAYEDALFVHIVMELCAGGELFDRIVAKGHYSERAAAKLIKTIVGVVEGCHSLGVMHRDLKPENFLFASTAEEAPLKATDFGLSMFYKPGDKFSDVVGSPYYVAPEVLQKCYGPEADVWSAGVILYILLCGVPPFWAETEAGIFRQILRGKLDFESEPWPSISDSAKDLVCNMLTRDPKKRFSAHEVLCHAWIVDDAVAPDKPIDSAVLSRLKHFSAMNKLKKMALRVIAESLSEEEIGGLKELFKMIDTDSSGTITFDELKDGLKRVGSELTENEIQALMEAADIDNSGTIDYGEFIAATLHMNKLEREENLVSAFSFFDKDGSGFITIDELSQACREFGLDDLHLEDMIKDVDQNNDGQIDYSEFTAMMRKGNAGATGRRTMRNSLHLNLGELLNPSKT

SEQ ID NO: 2178 - DNA, 1614 bp, Capsicum annuum
  CDS (1)..(1614)
atgggcaacgcatgccgtggatctttccgagccaaaacttttcagggcagctaccctcagaaccattccacttccaagcatagtaaagtagaagaagaacaacaaccagacccagcccccctcgtcgtcaaagatcatagcaccagcaccaagaatatgaaccatcgcagcagcgctaaccagtcgtgttgcgttctgggtcataagacccctaacattcgggatctctacgctctcggtcgtaaacttggacaaggccagtttgggaccacttatttatgcaccgaattgtccacctgtatcgactacgcctgtaaatctattgccaagagaaaactcatctccaaagaagacgttgaagatgtccgcagggaaattcagataatgcaccatttggctggtcacaagaacatcgtttccatcaagggtgcttatgaggatcccttgtatgttcatattgtcatggagctttgtggcggcggtgagttgttcgaccgcatcattcaaagaggacactataccgagagaaaggctgctgatttgactaaaattattgttggtgttgttgaggcatgccattttatgcatagagatctcaaacctgagaatttcttgttggttaacaaggacgatgatttctctctcaaggccattgactttggactctctgtattctttaagccaggccaaattttcacagatgttgttgggagtccatattacgttgctcctgaggtgcttctgaagaattacggtccagaagcagatgtttggacagcaggagtcatactctatatcctgctaagtggtgttccaccattctgggctgaaacacagcaggggatatttgatgcagttctgaaagggcacattgattttgactcagatccttggcctttaatatctgagagtgcaaaagatctcatccggaagatgttatgcatgcgaccctcagagcggttaactgctcatgaagtactatgtcatccttggatttgtgaaaacggtgttgctccagatagagcacttgatcctgcagtactttctcgcctcaaacacttttctgcaatgaacaagttaaaaaagatggctctgcgggtgattgctgaaagcttgtcggaggaagagattgccggtcttaaggagatgtttaaggccatggatactgataatagtggtgcaattacattcgatgaactaaaagctggtttgagaaaatacggctctactctaaaggatatagagatacgggaacttatggatgcggctgacgtggacaatagtggaactattgactatggagaattcattgcagcaactattcaccttaacaaactggaccgcgaggaacatctcatggcagcatttcagtattttgacaaggatggaagtggttatattacagttgatgagctccagcaggcatgtgcagatcataacattacggatgtattatttgaggatattatcagagaagttgatcaagataccgatggacgcattgattatggagaatttgttgctatgatgcaaaaaggaaatccatgcataggaagacgaactatgcgaaatagtttgaatttcagcatgagagatgcgcccggagctcattag

SEQ ID NO: 2179 - protein, 537 aa, Capsicum annuum
MGNACRGSFRAKTFQGSYPQNHSTSKHSKVEEEQQPDPAPLVVKDHSTSTKNMNHRSSANQSCCVLGHKTPNIRDLYALGRKLGQGQFGTTYLCTELSTCIDYACKSIAKRKLISKEDVEDVRREIQIMHHLAGHKNIVSIKGAYEDPLYVHIVMELCGGGELFDRIIQRGHYTERKAADLTKIIVGVVEACHFMHRDLKPENFLLVNKDDDFSLKAIDFGLSVFFKPGQIFTDVVGSPYYVAPEVLLKNYGPEADVWTAGVILYILLSGVPPFWAETQQGIFDAVLKGHIDFDSDPWPLISESAKDLIRKMLCMRPSERLTAHEVLCHPWICENGVAPDRALDPAVLSRLKHFSAMNKLKKMALRVIAESLSEEEIAGLKEMFKAMDTDNSGAITFDELKAGLRKYGSTLKDIEIRELMDAADVDNSGTIDYGEFIAATIHLNKLDREEHLMAAFQYFDKDGSGYITVDELQQACADHNITDVLFEDIIREVDQDTDGRIDYGEFVAMMQKGNPCIGRRTMRNSLNFSMRDAPGAH

SEQ ID NO: 2180 - DNA, 1614 bp, Glycine max
  CDS (1)..(1614)
atggttacagacatgctgggactggtggtgtgcacaaccaagaagactcatgaacctttggtcaaccaatcaagagcacctgcaaatcaaccttatcatttacatgaaaagcatgctgcatccactgctcagacagtgcctcaaaatatgccatggaagcctcctggtccagcccttagtcctaaacctgttgttggtgttaggcaagacacaattcttgggaagcagtttgaggatgtgaagcagttctacacacttgggaaggagttgggtagagggcaatttggtgtgacatatctttgcactgagaattcgaccggattgcagtatgcctgcaagtccatttccaagaggaaacttgcgagcaaatctgataaggaggacataaagagggagattcagattatgcagcatttgagtggtcaacccaacattgttgagttcaaaggggcttatgaggataggagctcagttcatgttgtgatggagctgtgtgcaggtggggaactttttgataggattattgccaaggggcattacagtgagaaggctgctgcttcattttgcagacaaattgtaaatgttgttcatatctgtcttttgggtgtgatgcatagggatctgaaaccagagaattttttgctatctagtagggacgaaaatgcacttctcaaggcaaccgattttggcttgtcagttttcattgaagaaggaaaggtatatcgggatatagttggtagtgcttactatgttgctcctgaagttctgcggcgcagatgtgggaaggaaatagatatatggagtgcaggagtcatattgtatatcttacttagtggagtccctccattttgggctgagactgagaagggaatatttgatgccatattggaaggtcacattgattttgaaagtcaaccatggcctaacatctcagacagtgccaaggatcttgttcgtaagatgcttatacaggatccaaagaaacgcattacctctgctcaagttcttgagcacccatggattaaagatggaaatgcttcagacaagccgatagacagtgcagtcctttccagaatgaagcaatttagagcaatgaataagctaaagaaacttgccttgaaggtcattgctgagaatatgtctgcagaagagatccaaggtttgaaggcaatgtttacaaatatggacactgacaagagtggtacaatcacctatgaagaacttaagtcaggattgcatagacttggctcaaagcttacagaggctgaagtgaagcaacttatggaagctgctgatgtagatggaaatggctcaattgactacatagaattcatcactgctacaatgcatagacacaaattagaaagagatgaccaacttttcaaggccttccaatattttgataaagacaacagtgggtttattacaagagatgaattggaatcagccatgaaagaatatggtatgggtgatgatgcaacaatcaaggaaatcatatctgaagttgatacaattatatctgaagtggatacagatcatgatggtagaatcaactatgaagaattctctgcgatgatgaagagtgggaaccaacaacaaggcaagctattctaa

SEQ ID NO: 2181 - protein, 537 aa, Glycine max
MVTDMLGLVVCTTKKTHEPLVNQSRAPANQPYHLHEKHAASTAQTVPQNMPWKPPGPALSPKPVVGVRQDTILGKQFEDVKQFYTLGKELGRGQFGVTYLCTENSTGLQYACKSISKRKLASKSDKEDIKREIQIMQHLSGQPNIVEFKGAYEDRSSVHVVMELCAGGELFDRIIAKGHYSEKAAASFCRQIVNVVHICLLGVMHRDLKPENFLLSSRDENALLKATDFGLSVFIEEGKVYRDIVGSAYYVAPEVLRRRCGKEIDIWSAGVILYILLSGVPPFWAETEKGIFDAILEGHIDFESQPWPNISDSAKDLVRKMLIQDPKKRITSAQVLEHPWIKDGNASDKPIDSAVLSRMKQFRAMNKLKKLALKVIAENMSAEEIQGLKAMFTNMDTDKSGTITYEELKSGLHRLGSKLTEAEVKQLMEAADVDGNGSIDYIEFITATMHRHKLERDDQLFKAFQYFDKDNSGFITRDELESAMKEYGMGDDATIKEIISEVDTIISEVDTDHDGRINYEEFSAMMKSGNQQQGKLF

SEQ ID NO: 2182 - DNA, 1473 bp, Glycine max
  CDS (1)..(1473)
atgcagaagcatggttttgcatcaaagcgcaacgtgttgccgtatcaaacggcgaggctaagggaccactacgttctggggaagaagctggggcaagggcaattcgggacgacgtacctgtgcacccacaaggtgacggggaagctctacgcgtgcaaatcgatcccgaagaggaagcttatgtgccaggaggattacgatgatgtgtggagggagattcagatcatgcaccatttgtcggagcatccaaacgttgtccagatacaaggcacgtacgaggattccgtgttcgtgcaccttgtcatggaactatgtgccggcggggagcttttcgacaggatcattcagaaggggcattacagcgagagagaggctgccaagttgataaagaccattgttggggtggtggaggcgtgccactctcttggggtcatgcatagggatctcaagcctgagaatttcttgtttgatacccctggcgaagatgcccagatgaaggccaccgattttggcctctctgtcttctacaagccaggacaagcctttcatgatgtagtaggaagtccctactatgttgccccagaggtgttgtgcaagcaatatggacctgaagtggacgtatggagtgctggtgttatcctatacatcttactgagtggggtgccacctttctgggctgaaaccgaagcaggaattttcagacagattttaaatggagatcttgatttcgtttctgaaccgtggccaagtatctcagaaaatgctaaagaattggtaaaacagatgttggatagggaccctaagaaaagaatttctgctcatgaagttttatgtaacccttgggttgttgatgacattgcacctgacaaacctctggactctgctgttttgacacgcctaaagcatttctcagcaatgaataaacttaagaagatggcattacgggtcatagcagagaggctttcagaggaagaaataggtggattgaaagagttgtttaaaatgattgacacagacaatagtgggacaataacttttgaggaactgaaggaggggttgaaaagtgtgggctctaatctcatggaatctgaaattaaatcacttatggaagcggctgatatagacaacaatggatcaatagactatggtgaatttcttgctgctacactgcacttgaataagatggaaagagaggagaatttggttgctgctttcgcctattttgataaagatggtagtggttacatcaccattgacgagcttcaacaggcttgtaaggacttcagcctaggtgatgtgcatctggatgagatgatcaaagagattgatcaagataatgatgggaggattgattatgcggagtttgcagcaatgatgaaaaagggtgatccaaatatgggtagaagcagaaccatgaaaggcaatttgaacttcaatattgcagatgcatttggaatgaaagactcttcttga

SEQ ID NO: 2183 - protein, 490 aa, Glycine max
MQKHGFASKRNVLPYQTARLRDHYVLGKKLGQGQFGTTYLCTHKVTGKLYACKSIPKRKLMCQEDYDDVWREIQIMHHLSEHPNVVQIQGTYEDSVFVHLVMELCAGGELFDRIIQKGHYSEREAAKLIKTIVGVVEACHSLGVMHRDLKPENFLFDTPGEDAQMKATDFGLSVFYKPGQAFHDVVGSPYYVAPEVLCKQYGPEVDVWSAGVILYILLSGVPPFWAETEAGIFRQILNGDLDFVSEPWPSISENAKELVKQMLDRDPKKRISAHEVLCNPWVVDDIAPDKPLDSAVLTRLKHFSAMNKLKKMALRVIAERLSEEEIGGLKELFKMIDTDNSGTITFEELKEGLKSVGSNLMESEIKSLMEAADIDNNGSIDYGEFLAATLHLNKMEREENLVAAFAYFDKDGSGYITIDELQQACKDFSLGDVHLDEMIKEIDQDNDGRIDYAEFAAMMKKGDPNMGRSRTMKGNLNFNIADAFGMKDSS

SEQ ID NO: 2184 - DNA, 1524 bp, Glycine max
  CDS (1)..(1524)
  misc_feature (1179)..(1179): n is a, g, c or t
atggctgcgaaatctagttcgagttcgacaacaaacgtggtgactctgaaggcggcgtgggttctcccgcagcgcacgcagaacatccgtgaggtgtacgaggtggggcggaagttggggcagggtcaattcgggactaccttcgagtgcacgcgccgcgcgtccggggggaaattcgcgtgcaagtcaattcccaagcggaagctgctgtgcaaggaggactacgaggacgtgtggcgggagattcagataatgcaccacttgtcggagcacgcgcacgttgtccgcatcgaagggacgtacgaggattcctcggcggtgcacctcgtcatggagttgtgtgagggtggggagttgtttgacaggatcgtgcagaagggacactacagcgagagacaggcggcgaggttgataaagacgattgttgaggttgttgaagcgtgtcactcgcttggggtcatgcatagggacctcaagcctgagaacttcctctttgatactgttgatgaggatgctaagcttaaggccactgatttcggcttgtctgttttttacaagcctggtgaatccttttgtgatgttgtcgggagcccatactatgttgcaccagaggtcttgcgcaagcactatggacctgaatcagacgtgtggagtgctggggttattctgtacatcttattaagtggggtgccaccattttgggccgaatctgaaccggggatcttccgacagattttactaggaaaacttgattttcattctgagccttggcctagcatttcagacagtgccaaggatctaattcggaaaatgcttgatcaaaatccaaaaacaaggcttacagcacatgaagtactccgccacccatggattgttgatgacaacattgcacctgataaacctcttgattctgcagttttatcacgtctgaaacaattctctgccatgaataaattgaaaaagatggcattgcgtgttattgctgagaggctatctgaagaagaaattggtggactgaaagagttattcaagatgattgacacagacaacagtggaaccataacgtttgatgagttaaaagatggtttgaagcgagtaggatctgaacttatggagtctgaaatcaaggatcttatggatgctgcggatattgataaaagtgggacaattgattatggngaattcattgctgccactgtccatttaaataagctggagagagaggaaaacctagtgtcggccttctcctattttgacaaagatggcagtggttacataacccttgatgagatacaacaagcttgtaaggactttggtttagatgatgtccatattgatgacatgatcaaggaaattgatcaagataacgatgggcaaatagattatggggaatttgctgccatgatgagaaagggcaatggaggaattggaaggcgaactatgagaaaaacactaaatttaagagatgctcttggattagtagacaatgggtccaatcaagttattgagggctactttaagtaa

SEQ ID NO: 2185 - protein, 507 aa, Glycine max
MAAKSSSSSTTNVVTLKAAWVLPQRTQNIREVYEVGRKLGQGQFGTTFECTRRASGGKFACKSIPKRKLLCKEDYEDVWREIQIMHHLSEHAHVVRIEGTYEDSSAVHLVMELCEGGELFDRIVQKGHYSERQAARLIKTIVEVVEACHSLGVMHRDLKPENFLFDTVDEDAKLKATDFGLSVFYKPGESFCDVVGSPYYVAPEVLRKHYGPESDVWSAGVILYILLSGVPPFWAESEPGIFRQILLGKLDFHSEPWPSISDSAKDLIRKMLDQNPKTRLTAHEVLRHPWIVDDNIAPDKPLDSAVLSRLKQFSAMNKLKKMALRVIAERLSEEEIGGLKELFKMIDTDNSGTITFDELKDGLKRVGSELMESEIKDLMDAADIDKSGTIDYGEFIAATVHLNKLEREENLVSAFSYFDKDGSGYITLDEIQQACKDFGLDDVHIDDMIKEIDQDNDGQIDYGEFAAMMRKGNGGIGRRTMRKTLNLRDALGLVDNGSNQVIEGYFK

SEQ ID NO: 2186 - DNA, 1647 bp, Spirodela oligorhiza
  CDS (1)..(1647)
atgggtgtctgcttcagcaaggcctctaagccttctggtaatggctaccagcctccgccgccgcagccgtacaagcccccgccgccgccggctgctcgcccagcgcagccgtcggtccaaatcccgcagacccaccatacccagcagaggcagcagagcgaccatcaatccgcgtctcaggcagcgccgtctcccgcgaagcagcatctcccttctccccgcaacagtcctgccgcggccgtctcggcggcgacgccggcgaccgtgctgggcaagccctttgaagacgttaaggctaagtacacgatcggtaaggtgctggggagaggccagttcggcgtcacctacctctgcacctgcaactccacgggagcgaagtacgcctgcaagtcgatctcgaagaggaagctggtgaaccggaacgacagggaggacgtgaagagggagatccagataatgcagcacctgagcgggcaggagaacatcgtggagtttaagggggcgtacgaggacaggcattcggtgcatgtggtgatggagctctgcgcaggaggggagctttttgataggataatcgccaaggggcactattcagagagggcggcggcggcgatgtgcaggtcgatcgtgaatgtggtgaacatctgccatttcatgggggtcatgcaccgagatctcaagccggagaacttcctgctctccaccaaggacccgggtgcggcactcaaggccacagatttcgggctctccgtcttcatcgaggaaggcaaagtgtacagaagcatagtgggcagcgcatactatgtcgctcctgaagtgctaatgcgctcttacggcaaggagatcgacgtctggagcgccggaatcatcgtctacatccttctctccggcgtgccgcctttctggggcgagacagagaagaagatctttgactccatcatgaaggacgacatcgacttccagtctgatccctggccgtcgatctctgccagtgcaaaagatctcgtctcaaagatgctgacaagggatcctaagaagaggatcactgcggcccaagttctcgatcacccatggatcagagtggacggcgaggcgtcggataagccaatcgacagtgcagtgttgtctaggatgaaacagttcagggctatgaataagctcaagaagatggctctcaaggtcatcgcagagagcctatcggaagaggagattaaggggctgaggcagatgtttcagaacatggacaccgatcaaagcgggacgatcacctatgaagagctcaagaccgggcttgctcgacttgggtcgagactttcagaggccgaagtcaaacagctcatggatgctgctgatgtggatgggaatggatccattgactacattgagttcatcacggccacgatgcaccggcacaagctagagagagaggagcacctttactcggcgttcagttactttgacaaggataatagcgggtacatcactagggatgagttaaagcaggcactggaggagcatgggatgggtgatgccgacagcattagagagataatatctgaagtggacacggacaacgatgggaggattaattacgatgagttttgcgccatgatgaggagtgggacgcatcctccgggtagaccttaa

SEQ ID NO: 2187 - protein, 548 aa, Spirodela oligorhiza
MGVCFSKASKPSGNGYQPPPPQPYKPPPPPAARPAQPSVQIPQTHHTQQRQQSDHQSASQAAPSPAKQHLPSPRNSPAAAVSAATPATVLGKPFEDVKAKYTIGKVLGRGQFGVTYLCTCNSTGAKYACKSISKRKLVNRNDREDVKREIQIMQHLSGQENIVEFKGAYEDRHSVHVVMELCAGGELFDRIIAKGHYSERAAAAMCRSIVNVVNICHFMGVMHRDLKPENFLLSTKDPGAALKATDFGLSVFIEEGKVYRSIVGSAYYVAPEVLMRSYGKEIDVWSAGIIVYILLSGVPPFWGETEKKIFDSIMKDDIDFQSDPWPSISASAKDLVSKMLTRDPKKRITAAQVLDHPWIRVDGEASDKPIDSAVLSRMKQFRAMNKLKKMALKVIAESLSEEEIKGLRQMFQNMDTDQSGTITYEELKTGLARLGSRLSEAEVKQLMDAADVDGNGSIDYIEFITATMHRHKLEREEHLYSAFSYFDKDNSGYITRDELKQALEEHGMGDADSIREIISEVDTDNDGRINYDEFCAMMRSGTHPPGRP

SEQ ID NO: 2188 - DNA, 1638 bp, Arabidopsis thaliana
  CDS (1)..(1638)
atgggtaactgtaacgcctgtgtaaggccagactcaaaagaatcaaaaccatcttcaaagccgaaaaaacccaatcgagatcggaaattaaacccattcgccggagatttcaccagatccccagctccaatacgtgttctcaaagatgtaatccctatgagcaatcaaactcagatcagcgacaaatacatcttaggtcgtgaattaggtcgaggcgaattcggaatcacttacctctgtactgatcgtgaaacccacgaagctttagcttgcaaatcgatttcaaagcgaaagcttcgaacagctgtcgatatcgaagacgttcgtcgtgaggtagcgattatgtctactttacctgagcatccaaacgtagttaagcttaaggctagttatgaggataacgagaacgtgcatctggttatggagctttgtgaaggaggtgagctttttgatcggattgttgctagaggacattacacggagcgtgctgctgcagctgttgtgagaacgattgctgaggttgtgatgatgtgtcactctaatggagttatgcatcgagatttgaaacctgagaatttcttgtttgctaataaaaaggagaattctccactaaaggctattgattttggcttgtctgtgttcttcaaacctggagataagtttacagagattgtaggaagtccgtattatatggctccagaagtgttgaagagagattatggaccaggggttgatgtgtggagtgccggagttattatctatatcttgctctgtggtgttcctccgttttgggctgagactgaacaaggtgttgctcttgcgatcttgcggggagttcttgattttaagagagacccttggcctcagatatcagagagtgccaagagccttgtgaagcagatgttggatcctgatccgactaagcggttaactgctcagcaagtgttagctcacccatggatacagaatgcaaagaaagctcccaatgttcctttaggagatatagtcagatctaggttgaagcagttctctatgatgaacagattcaaaaagaaagttcttcgtgtaattgcggagcacttgtctattcaagaggttgaagtgataaagaacatgttctcactgatggatgatgacaaggatggtaaaataacttacccggaactcaaagctgggcttcagaaggtcggttcacaacttggtgaaccagagatcaaaatgttgatggaagtggcggatgtcgatggaaatgggtttctggattatggagagtttgtagctgtgataattcacttgcagaagatagagaatgatgaacttttcaaactagcttttatgtttttcgacaaagatggaagtacatacattgaacttgatgagctacgggaagctttagcggatgagttaggcgagccagacgccagtgttctaagcgacatcatgcgtgaagttgacactgacaaggacggacgtataaactatgatgagtttgtgacgatgatgaaagctggaactgactggagaaaggcatcgagacaatattcaagagagaggttcaaaagcttaagcattaacttgatgaaagatgggtcattgcatctccatgacgctctcactggacaaactgttcctgtttaa

SEQ ID NO: 2189 - protein, 545 aa, Arabidopsis thaliana
MGNCNACVRPDSKESKPSSKPKKPNRDRKLNPFAGDFTRSPAPIRVLKDVIPMSNQTQISDKYILGRELGRGEFGITYLCTDRETHEALACKSISKRKLRTAVDIEDVRREVAIMSTLPEHPNVVKLKASYEDNENVHLVMELCEGGELFDRIVARGHYTERAAAAVVRTIAEVVMMCHSNGVMHRDLKPENFLFANKKENSPLKAIDFGLSVFFKPGDKFTEIVGSPYYMAPEVLKRDYGPGVDVWSAGVIIYILLCGVPPFWAETEQGVALAILRGVLDFKRDPWPQISESAKSLVKQMLDPDPTKRLTAQQVLAHPWIQNAKKAPNVPLGDIVRSRLKQFSMMNRFKKKVLRVIAEHLSIQEVEVIKNMFSLMDDDKDGKITYPELKAGLQKVGSQLGEPEIKMLMEVADVDGNGFLDYGEFVAVIIHLQKIENDELFKLAFMFFDKDGSTYIELDELREALADELGEPDASVLSDIMREVDTDKDGRINYDEFVTMMKAGTDWRKASRQYSRERFKSLSINLMKDGSLHLHDALTGQTVPV

SEQ ID NO: 2190 - DNA, 1785 bp, Oryza sativa subsp
  CDS (1)..(1785)
atgggtctctgtcatggcaagccgagccaaatcccggagcccgaggcggaggaggcggcggcggcggccggtgtagccgtcgccggcgccgcctcgccgggtccggctgcggcggcggcggcggcggcggcggcgaagccgggcacgccgaagcagccgaagttcccgttctacctgccgagcccgctgccggcgtcgagctacaagagctcgccggcgaactcgagcgtggcgtcgacgccggcgcgcggcgggttgaagcggccgttccccccgccgtcgccggcgaagcacatccgcgcgctcctggcgcggcggcacgggtcggtgaagcccaacgaggcgcccatcccggagggcggcgagaccgaggtcggcctcgacaagggcttcggcttctccaagcacttcttcgccaagtacgagctcggcgacgaggtcggccgcggccacttcggctacacctgctccgccaaggccaagaagggcgaccacaagggccacgacgtcgccgtcaaggtcatccccaaagccaagatgacgactgctattgccattgaagatgtcagaagagaagtcagaatattgagttcgctgacaggacacagtaacctagtgcagttctatgatgctttcgaggatgaagataatgtgtatatagttatggagctatgtaaaggaggtgaactactggataggattttggcaagaggtggaaaatactctgaggaagatgcaaaggttgttatggtgcaaattttgagtgttgtgtcattttgccatctccaaggtgttgtccatcgtgatctgaaaccagagaattttcttttcacctcaaaggatgaaaactctgccttgaaggtcatagactttggcttgtctgactttgtgaagccagatgaaagacttaatgacattgtcggaagtgcatattatgttgctcctgaggtgcttcatcgatcttatggcactgaggcagatatgtggagcattggagtgattgcctacattttgctttgtgggagccgtcctttctgggcacgcaccgaatcaggaatatttcgagctgtgctgaaggcagaaccaagttttgatgaggctccatggcctactctcactgccgaagcaaaagactttgtaaaacgactgcttaataaggattaccgcaagaggatgactgctgcacaagctctcagtcatccgtggatccgaaattctcaacaagtgaaaatacctttagatatgataatctacaagcttatgcgagcttatatcagttcgtcttccttgcggaagtccgctttgagggccctagctaagacattgacggcaaatcaactgttctatctaagagagcaatttgaattgttgggtccaaacaagaatggttatatctccttgcaaaatttgaaaacggccttggtaaagaattctacagatgcaatgaaggattctagggttattgactttgttaacacggtgtgcactcttcagtacagaaaattggattttgaagagttcgctgcttctgccgtcagcgtttatcagatggaagctttggaaacatgggagcagcacgcacggcgtgcatacgagctattcgataaggagggcaaccgacctattgtaattgaggagcttgcatcggaacttggacttggtccatcagtccctcttcatgttgtactccaagattggatcagacacgccgatgggaagcttagtttccttggattcattaaacttttgcacggagtttcttcgcgatcgatcccgaaagcctaa

SEQ ID NO: 2191 - protein, 594 aa, Oryza sativa subsp
MGLCHGKPSQIPEPEAEEAAAAAGVAVAGAASPGPAAAAAAAAAAKPGTPKQPKFPFYLPSPLPASSYKSSPANSSVASTPARGGLKRPFPPPSPAKHIRALLARRHGSVKPNEAPIPEGGETEVGLDKGFGFSKHFFAKYELGDEVGRGHFGYTCSAKAKKGDHKGHDVAVKVIPKAKMTTAIAIEDVRREVRILSSLTGHSNLVQFYDAFEDEDNVYIVMELCKGGELLDRILARGGKYSEEDAKVVMVQILSVVSFCHLQGVVHRDLKPENFLFTSKDENSALKVIDFGLSDFVKPDERLNDIVGSAYYVAPEVLHRSYGTEADMWSIGVIAYILLCGSRPFWARTESGIFRAVLKAEPSFDEAPWPTLTAEAKDFVKRLLNKDYRKRMTAAQALSHPWIRNSQQVKIPLDMIIYKLMRAYISSSSLRKSALRALAKTLTANQLFYLREQFELLGPNKNGYISLQNLKTALVKNSTDAMKDSRVIDFVNTVCTLQYRKLDFEEFAASAVSVYQMEALETWEQHARRAYELFDKEGNRPIVIEELASELGLGPSVPLHVVLQDWIRHADGKLSFLGFIKLLHGVSSRSIPKA

SEQ ID NO: 2192 - DNA, 1749 bp, Arabidopsis thaliana
  CDS (1)..(1749)
atgggaagttgtgtttcgtcgccattgaaaggctctccttttggaaagagaccggtaagaaggcgacacagtagtaatagcagaacatcctctgttcctcgtttcgattcttcaactaatctttcccggagattgattttccagccaccaagccgcgttctccccgagcctatcggtgatggaattcacctcaagtatgatttgggaaaagaactaggccgtggtgaatttggtgtcactcatgaatgtatcgagatcagtacccgagaaagatttgcgtgtaagaggatatcgaaggagaagctaaggacggagatagatgtggaggatgtgagaagagaggttgagatcatgagatgtttaccaaaacatcctaatattgttagctttaaggaagcttttgaggacaaagacgctgtctatcttgtcatggagatttgtgaaggaggtgaactttttgaccgcattgtctctagagggcattacactgaacgcgccgctgcatctgttgctaaaaccattcttgaagttgtcaaggtgtgtcatgaacatggagtgattcatcgtgatcttaaaccagagaacttcctcttttcgaatggaactgagactgcacaactcaaagccattgattttggtctctccattttcttcaaaccggcccagcggttcaatgagattgtgggaagtccttactacatggctccagaggttttgagacgaaattacggtcctgagatcgatgtttggagtgctggtgttatactctatatcttgctttgtggtgttcctcccttttgggcagaaaccgaggaaggaatcgcgcacgctattgtgagagggaacatcgatttcgagagagatccatggccaaaagtctcacatgaagccaaggaactcgttaagaacatgcttgatgcaaatccttatagcagactcacagtccaagaagtgcttgaacatccatggatccggaacgcagagagagcaccaaatgtgaatcttggagataacgtcaggaccaagattcaacaattcttgttgatgaacaggttcaagaagaaagtcctcaggattgtagcggacaatctaccaaacgaggagatagcagcgatagtacagatgtttcaaacaatggacgctgataagaatggtcacttgacttttgaggagctaagagatggactgaagaagattggacaagttgttcccgatggcgatgtgaagatgctaatggatgcagcggatacagatggaaatgggatgttgagctgtgatgagtttgtgacactctcaatacatttgaagagaatgggatgtgatgagcatttgcaggaagcattcaagtattttgacaagaacgggaacggatttatcgagctagatgagctcaaggtagctctttgcgatgataagctaggccacgctaacggtaacgaccagtggatcaaagatatcttctttgacgtcgacctcaacaaggatggacggataagctttgatgagtttaaggcaatgatgaaatcagggacggattggaaaatggcgtcgaggcagtactcgagggcgttgttgaatgctctaagcatcaagatgttcaaagaagattttggggacaatggtcctaagtcacattccatggagttccctatagcaaggaagagggctaagctgcttgatgctcccaagaacaaatcaatggagcttcagatctccaaaacctataaaccctcaggtctaagaaactaa

SEQ ID NO: 2193 - protein, 582 aa, Arabidopsis thaliana
MGSCVSSPLKGSPFGKRPVRRRHSSNSRTSSVPRFDSSTNLSRRLIFQPPSRVLPEPIGDGIHLKYDLGKELGRGEFGVTHECIEISTRERFACKRISKEKLRTEIDVEDVRREVEIMRCLPKHPNIVSFKEAFEDKDAVYLVMEICEGGELFDRIVSRGHYTERAAASVAKTILEVVKVCHEHGVIHRDLKPENFLFSNGTETAQLKAIDFGLSIFFKPAQRFNEIVGSPYYMAPEVLRRNYGPEIDVWSAGVILYILLCGVPPFWAETEEGIAHAIVRGNIDFERDPWPKVSHEAKELVKNMLDANPYSRLTVQEVLEHPWIRNAERAPNVNLGDNVRTKIQQFLLMNRFKKKVLRIVADNLPNEEIAAIVQMFQTMDADKNGHLTFEELRDGLKKIGQVVPDGDVKMLMDAADTDGNGMLSCDEFVTLSIHLKRMGCDEHLQEAFKYFDKNGNGFIELDELKVALCDDKLGHANGNDQWIKDIFFDVDLNKDGRISFDEFKAMMKSGTDWKMASRQYSRALLNALSIKMFKEDFGDNGPKSHSMEFPIARKRAKLLDAPKNKSMELQISKTYKPSGLRN

SEQ ID NO: 2194 - DNA, 1569 bp, Ceratopteris richardii
  CDS (1)..(1569)
atggggaactgttgcggaacagatggattcaaacatgaaaggcctcttcctgcccacccaaatcgtcaaggagaagacaaaaccggtgcgccgaaggtaatttcgcacacaaagctctcgtcatgtggtgagcagagcgtcaatgagaagtatcaccttggaagagagcttggtcgtggtgaatttggcatcacttacttatgcacagatcgggagactgacgaagtgctagcatgtaaatctatttctaaagggaagcttaggacacccatagacattgaagatgttcgaagagaggtggatattatgagacatcttcctaaacatccaaacattgtgactttggaaggggtgtatgaggatgagaatgcagtgcatcttgtcatggaactatgtgaaggtggtgaattgttcgatcgcattgtagcaagaggtcactacagcgagagagctgcagctgcggtcatgcgtaccattcttgaagttgtacaggtttgccataggcatggtgtcatgcaccgcgaccttaagccagaaaattttctgtttgcaaacaagaaagaaaattcgcccttaaaggctattgattttggattatccatcttcttcaaacctggggagaagtttaccgaaatagtaggaagtccatactatatggcacctgaggtactgaaaagaagttatgggccagaagttgatatatggagtgcaggagttatactttacattcttttatgcgggagtccccccttttgggctgagaccgaacaattagtagcccaggccatcttacgtggtaatgtggacttcaacagagatccttggccaaatgtttcagaaaatgctaaggcgctagtgcggcaaatgcttgaaccagatccaagcaaaagattgacagctcaacaagtccttgatcattcgtggcttgtgaatgcaagaaaagctccagatgtccctcttggtgatgctgtttgtgctcgactcaaacagttctctgctatgaacaaactgaagaaaagggctttaagagtgattgcagagctcttgacaggtgaagaagttgagggcatcagagctatgtttaacatgatggatgtagagaggactggttctcttacgtttgggcaattgaaagcagggctttataagcttggttcgcagctccctgaatctgaaatccaacaattaatggaagctgctgatgtgaatgggaatggaactctcgactatggtgaatttgttgctatcactgtacatcttcaaaggatggacaatgatgagtgcctaaggaaagcttttaattttttcgatctaaatggtgatggattcatagaccgtagtgaactgcatgaaatgctggaagctgatcttggggaagtaggcactgacataattgatgacataatccaagaggttgacattgataaggatggaaggataagttatgatgagtttgcaagcatgatgagaactggcacagactggagaaaagtatctagaaatttctcgagggagagatatgcgagcttgagcattaagctgatgcaggaagggtcattaaaactgtag

SEQ ID NO: 2195 - protein, 522 aa, Ceratopteris richardii
MGNCCGTDGFKHERPLPAHPNRQGEDKTGAPKVISHTKLSSCGEQSVNEKYHLGRELGRGEFGITYLCTDRETDEVLACKSISKGKLRTPIDIEDVRREVDIMRHLPKHPNIVTLEGVYEDENAVHLVMELCEGGELFDRIVARGHYSERAAAAVMRTILEVVQVCHRHGVMHRDLKPENFLFANKKENSPLKAIDFGLSIFFKPGEKFTEIVGSPYYMAPEVLKRSYGPEVDIWSAGVILYILLCGSPPFWAETEQLVAQAILRGNVDFNRDPWPNVSENAKALVRQMLEPDPSKRLTAQQVLDHSWLVNARKAPDVPLGDAVCARLKQFSAMNKLKKRALRVIAELLTGEEVEGIRAMFNMMDVERTGSLTFGQLKAGLYKLGSQLPESEIQQLMEAADVNGNGTLDYGEFVAITVHLQRMDNDECLRKAFNFFDLNGDGFIDRSELHEMLEADLGEVGTDIIDDIIQEVDIDKDGRISYDEFASMMRTGTDWRKVSRNFSRERYASLSIKLMQEGSLKL

SEQ ID NO: 2196 - DNA, 1629 bp, Oryza sativa
  CDS (1)..(1629)
atggggaatcagtgccagaacgggactcttgggagtgattaccacaatcggttcccaagggagcatgccgttgggtacgttcagggggatagctacttggacttgaagaagttcgatgatacttggcctgaggtgaacaacttcaagcctactgctgctagtattctcaggcgggggttggatcctacatctatcaatgtccttgggcggaagacagcggacctaagggagcattatatcattggtcggaagcttggtcagggccagtttggcacaacttacctctgtaccgagatcaatacagggtgtgagtatgcttgcaagaccatcccaaagcgcaagctcatcaccaaggaggatgtagaagatgtgcgccgtgagattcagataatgcaccatttgtcgggccacaagaatgttgttgcaatcaaggatgtctatgaggatgggcaagcggtgcacattgtgatggagccctgcgctggtggggagctctttgacaggattcaggagaaggggcattacagcgagcggaaggctgcagagcttataagaataattgtcagcattgtggctatgtgccattcgctcggggtgatgcaccgtgatcttaagccagaaaatttcctccttttggataaagatgatgatctgtcaataaaggcaatagattttggtctatccgtgttcttcaaaccaggtcaggttttcactgagctggttgggagtccatattatgttgctcctgaggtatggcacaaacgttatggaccagaatctgatgtgtggtcagctggagtgatactttacgttttgctgagtggagtgccaccattttgggcagagacacaacaaggaatatttgatgcagttctgaagggtcacattgattttcaatctgatccatggccaaagatatctgacagtgcaaaggatcttataagaaaaatgctctctcattgcccttcggagcgtttgaaggcccatgaagtgctaaggcatccttggatctgtgaaaatggagttgccactgatcaagctctggatcccagtgttatctctcggctcaaacaattctctgcaatgaacaagttaaagaagttggctctgagagtgatagctgagcgtctttcagaggaggagattgctgggttaagagaaatgttcaaggcagtggacacaaaaaatagaggtgtaatcactttcggtgagcttagagaaggtttaagaagatttggcgctgaatttaaggatacagagattggtgatataatggaagcggcacacaacgacaataatgtaacaatccattatgaagaatttattgctgcaactctacctcttaacaagatagaacgtgaggagcacctgctggcagcttttacatattttgacaaagatgggagtggttatatcacagttgacaagcttcaacgagcttgtggagaacataacatggaggattcactccttgaagagattatttcagaggttgatcaaaacaatgacggccaaattgactacgccgaatttgtagccatgatgcaaggcagcaacgttggactagggtggcaaacaatggaaagcagtttgaatgtagcattaagagacgcacctcaagtacattga

SEQ ID NO: 2197 - protein, 542 aa, Oryza sativa
MGNQCQNGTLGSDYHNRFPREHAVGYVQGDSYLDLKKFDDTWPEVNNFKPTAASILRRGLDPTSINVLGRKTADLREHYIIGRKLGQGQFGTTYLCTEINTGCEYACKTIPKRKLITKEDVEDVRREIQIMHHLSGHKNVVAIKDVYEDGQAVHIVMEPCAGGELFDRIQEKGHYSERKAAELIRIIVSIVAMCHSLGVMHRDLKPENFLLLDKDDDLSIKAIDFGLSVFFKPGQVFTELVGSPYYVAPEVWHKRYGPESDVWSAGVILYVLLSGVPPFWAETQQGIFDAVLKGHIDFQSDPWPKISDSAKDLIRKMLSHCPSERLKAHEVLRHPWICENGVATDQALDPSVISRLKQFSAMNKLKKLALRVIAERLSEEEIAGLREMFKAVDTKNRGVITFGELREGLRRFGAEFKDTEIGDIMEAAHNDNNVTIHYEEFIAATLPLNKIEREEHLLAAFTYFDKDGSGYITVDKLQRACGEHNMEDSLLEEIISEVDQNNDGQIDYAEFVAMMQGSNVGLGWQTMESSLNVALRDAPQVH

SEQ ID NO: 2198 - DNA, 1572 bp, Arabidopsis thaliana
  CDS (1)..(1572)
atgggtgtctgtttctccgccattagagtcactggtgctagcagcagtagacgaagcagtcagaccaaatccaaggctgctcctactcccatcgataccaaggcctctaccaaacgccgaaccggctccatcccctgcggcaagcgtaccgattttggctactccaaagacttccacgatcactacaccatcggcaagttgctcggccatggtcaattcggctacacctacgtcgccatccacagacccaatggagatcgcgtcgccgtcaaaagactcgataagtctaagatggttcttcctattgctgttgaggatgtcaagcgtgaggttcagattcttattgctctctctggccacgagaatgttgttcagtttcacaatgcctttgaggatgacgattacgtctatattgttatggagttgtgcgaaggaggcgaattgctggataggatattatccaagaaaggtaatcggtactccgagaaagatgcagccgttgtcgttaggcagatgctcaaagttgcaggagaatgtcatctacacgatcttgtacatagagatatgaaaccagagaactttttgttcaaatcagctcaactagattcgcctctaaaggctacggattttggtttatcggattttatcaaaccagggaaaaggttccatgacattgttggtagcgcctattatgtggctcctgaggtattaaagcgcagatcagggcctgaatcagatgtatggagcattggtgtgattacgtatatattactttgtgggaggcggcctttttgggatagaactgaagatggtatatttaaagaggttttaagaaataaacctgacttcagccgtaaaccttgggcaactataagtgacagcgccaaagattttgtgaaaaagttacttgtaaaagacccacgagcacggctaactgctgcacaagcactatcacatgcgtgggttagagaaggcgggaatgctactgatatccctgtcgacatttcagttctgaacaacttaagacaatttgtgagatacagccgtctaaagcaatttgctttaagggcgcttgctagcacacttgacgaggcagagatctctgacctcagagatcaatttgatgcgattgatgtggataaaaatggcgtcattagtcttgaagagatgagacaggcacttgccaaagatcttccttggaaactgaaagactcacgagttgctgagatccttgaagcgattgatagcaacactgatgggttagtggacttcacagagtttgtagcagcagctctacatgttcatcaactagaagaacatgattcagagaaatggcagctaaggtcaagagcagcttttgagaaattcgacctagacaaagacgggtacataacgcctgaggaacttcgaatgcacacggggttaagaggatcaatagatccactgctggatgaagcagacatagacagagatgggaaaataagcctgcatgagttcaggagacttctaagaacagcgagcataagttcacagagagcaccaagccctgcaggtcacaggaatcttcgatag

SEQ ID NO: 2199 - protein, 523 aa, Arabidopsis thaliana
MGVCFSAIRVTGASSSRRSSQTKSKAAPTPIDTKASTKRRTGSIPCGKRTDFGYSKDFHDHYTIGKLLGHGQFGYTYVAIHRPNGDRVAVKRLDKSKMVLPIAVEDVKREVQILIALSGHENVVQFHNAFEDDDYVYIVMELCEGGELLDRILSKKGNRYSEKDAAVVVRQMLKVAGECHLHDLVHRDMKPENFLFKSAQLDSPLKATDFGLSDFIKPGKRFHDIVGSAYYVAPEVLKRRSGPESDVWSIGVITYILLCGRRPFWDRTEDGIFKEVLRNKPDFSRKPWATISDSAKDFVKKLLVKDPRARLTAAQALSHAWVREGGNATDIPVDISVLNNLRQFVRYSRLKQFALRALASTLDEAEISDLRDQFDAIDVDKNGVISLEEMRQALAKDLPWKLKDSRVAEILEAIDSNTDGLVDFTEFVAAALHVHQLEEHDSEKWQLRSRAAFEKFDLDKDGYITPEELRMHTGLRGSIDPLLDEADIDRDGKISLHEFRRLLRTASISSQRAPSPAGHRNLR

SEQ ID NO: 2200 - DNA, 1677 bp, Cucurbita maxima
  CDS (1)..(1677)
atgggcaatacctgccgtggatctttcaaagggaatatatttcagggatacagccagcccgaggagagctcaaccccaaattttaagcgcaacatcaacggttcctctgaccattccccttccagcatcaacactaacaatctaatttcccaagcctttgctgaagagaacaaaaccaaatcaaaggacaacgattgcaagaaagactacacaatgaggaaaagcgccgagaatcaagcctattatgttttgggtcataagactgccaatattcgtgatctgtatacactcggtcgcaagttaggacaaggacagtttggaactacttatttatgcactgagattatgactggcatcgagtatgcttgtaagtctatctccaagaggaagttgattgcgaaggaggatgtggaggacgttcggcgggagattcagatcatgcaccatttggcaggtcataagaatattgttaccatcaagggtgcttatgaagattctttgtatgttcatattgttatggagctttgtagtggcggtgagttgttcgataggatcatccaaagggggcattacagtgagagaaaagctgctgaattgaccaggattattgttggtgttgttgagacttgccattcgcttggagttatgcatagagatttgaagccagaaaatttcttgttggttaataaggatgatgacttctctcttaaagctattgattttggcctctctgttttcttcaaaccaggtcaaatcttcactgatgttgttggaagcccatactatgttgctccagaggtactgctcaagcattatgggccagcagcggacgtgtggactgcaggagttatactgtatatattgctaagtggcgtgccaccgttttgggcagaaactcaacaaggaatatttgatgctgtgcttaagggacatatcgacttcgactctgacccttggcccctaatatctgacagtgcaaaggatctaataaggaagatgctatgttctcgaccatcagatcggttgactgcacatgaagtattatgccacccttggatttgcgaaaatggagttgctcctgatagggctctcgatccagctgtactttctcgactcaaacaattctctgcaatgaacaagttaaagaagatggcattacgagtgattgctgaaagcctttccgaagaggagattgctggcctaagagaaatgtttacagctatggacactgataacagtggtgcaattacgtttgatgaacttaaagctggtttgagaagatatggttcaaccttgaaagataccgaaatacgtgacctcatggaagcggctgatattgacaatagtgggactatagattatggggagtttattgctgcaaccattcatctcaacaaactagagcgtgaagaacaccttgttgcagcgtttagatactttgacaaagatggaagtggttacatcacagtagatgaactgcagcaagcttgtgcagaacataatatgactgacgcgtaccttgaggatataatcagagaagttgatcaagataatgatggaaggattgattatagcgagtttgttgccatgatgcagaaaggcaatgcaggaattggaagacgaactatgagaaacagtttgaatttgagcatgagagacggacctggtgctctttag

SEQ ID NO: 2201 - protein, 558 aa, Cucurbita maxima
MGNTCRGSFKGNIFQGYSQPEESSTPNFKRNINGSSDHSPSSINTNNLISQAFAEENKTKSKDNDCKKDYTMRKSAENQAYYVLGHKTANIRDLYTLGRKLGQGQFGTTYLCTEIMTGIEYACKSISKRKLIAKEDVEDVRREIQIMHHLAGHKNIVTIKGAYEDSLYVHIVMELCSGGELFDRIIQRGHYSERKAAELTRIIVGVVETCHSLGVMHRDLKPENFLLVNKDDDFSLKAIDFGLSVFFKPGQIFTDVVGSPYYVAPEVLLKHYGPAADVWTAGVILYILLSGVPPFWAETQQGIFDAVLKGHIDFDSDPWPLISDSAKDLIRKMLCSRPSDRLTAHEVLCHPWICENGVAPDRALDPAVLSRLKQFSAMNKLKKMALRVIAESLSEEEIAGLREMFTAMDTDNSGAITFDELKAGLRRYGSTLKDTEIRDLMEAADIDNSGTIDYGEFIAATIHLNKLEREEHLVAAFRYFDKDGSGYITVDELQQACAEHNMTDAYLEDIIREVDQDNDGRIDYSEFVAMMQKGNAGIGRRTMRNSLNLSMRDGPGAL

SEQ ID NO: 2202 - DNA, 1716 bp, Cucurbita maxima
  CDS (1)..(1716)
atgggcaatacctgccgtggatctttcaaagggaatatatttcagggctacagccagcccgaggacagctcaacactctattctaagcgcaataacagcagttcttcagcccgatcgaattctgatatttcccctaccagtataaacactcacaatttaattgcacaagagttttccaaagagaacaagacgaaatccaaggataacgattacaatcaagccttcttaagccccaccaagaaagacttcacaatgaggaaaagcgctgagaatcaagcctattatgttttgggtcataagactgcaaacattcgagatctctatacgctcggtcggaaattaggacagggacagtttggaactacttatttgtgcactgagattaccactggcattgagtatgcttgtaagtctatctcgaagaggaagttgattgcgaaggaggatgtcgaggacgttcgacgggagattcagatcatgcaccatttggcaggtcataagaatattgtaaccatcaagggtgcttatgaagattctttgtatgttcatattgtaatggagctttgtagcggcggggagttgttcgacaggatcatccataggggacattacagtgagaggaaagctgctgagttaaccaggattattgtcggggttgtcgagacttgccattcgcttggagttatgcatagagatttgaagccagagaatttcttgttggttaacaaggatgatgacttctctcttaaagctattgattttggcctctctgttttcttcaaaccaggtcaaattttcactgatgttgttggaaggccatactatgttgctccagaggtacttcttaagcactatggaccggcagcggacgtgtggactgcaggagttatcttgtatatattgctgagtggtgtgccaccattttgggcagaaactcaacaaggaatatttgatgctgtgctgaagggacatatcgacttcgactcagacccttggcccctaatatctgacagtgcaaaggatattatcagaaagatgctatgttctcgaccatcagatcgtttgactgctcatgaagtattatgtcatccttggatttgcgaaaatggggttgctcctgatagggctctcgatcctgccgtactttctcgactcaaacaattctctgcaatgaataagttaaagaagatggcattacgagtgattgctgaaagcctctctgaagaggagattgctggccttagagaaatgtttacagctatggacactgataacagtggcgcaattacctttgatgaactcaaagctggtttgagaagatatggttcgaccttgaaagatattgaaatacgcgaccttatggatgcggctgacattgacaatagtgggactatcgactatggagaatttattgctgcaaccattcatctcaacaaactagagcgtgaagaacaccttgttgctgcatttcgatactttgacaaagatggaagtggttacatcacagttgatgagctgcagcaagcttgtgcagaacataatatgaccgacgcatacctcgaggacgtaatcagagaagttgaccaagataatgatggaaggatcgattatggtgagtttgttgccatgatgcagaaaggcaatgcaggagttggaagacgaactatgagaaacagtttgaatttgagcatgagagacggacccggtgctctttag

SEQ ID NO: 2203 - protein, 571 aa, Cucurbita maxima
MGNTCRGSFKGNIFQGYSQPEDSSTLYSKRNNSSSSARSNSDISPTSINTHNLIAQEFSKENKTKSKDNDYNQAFLSPTKKDFTMRKSAENQAYYVLGHKTANIRDLYTLGRKLGQGQFGTTYLCTEITTGIEYACKSISKRKLIAKEDVEDVRREIQIMHHLAGHKNIVTIKGAYEDSLYVHIVMELCSGGELFDRIIHRGHYSERKAAELTRIIVGVVETCHSLGVMHRDLKPENFLLVNKDDDFSLKAIDFGLSVFFKPGQIFTDVVGRPYYVAPEVLLKHYGPAADVWTAGVILYILLSGVPPFWAETQQGIFDAVLKGHIDFDSDPWPLISDSAKDIIRKMLCSRPSDRLTAHEVLCHPWICENGVAPDRALDPAVLSRLKQFSAMNKLKKMALRVIAESLSEEEIAGLREMFTAMDTDNSGAITFDELKAGLRRYGSTLKDIEIRDLMDAADIDNSGTIDYGEFIAATIHLNKLEREEHLVAAFRYFDKDGSGYITVDELQQACAEHNMTDAYLEDVIREVDQDNDGRIDYGEFVAMMQKGNAGVGRRTMRNSLNLSMRDGPGAL

SEQ ID NO: 2204 - DNA, 1656 bp, Oryza sativa subsp
  CDS (1)..(1656)
atggggaactgctgccgctcgccggccgccgcggcgcgggaggacgtcaagtcgtctcacttccccgcatcggccgggaagaagaagccccaccaggcgcggaacggcggcgtggggggaggcggcggcgggggcggcggcggcggaggaggaggaggagcggggcagaagcggctccccgtgctcggggaggaagggtgcgagctgatcggagggatcgacgacaagtacgcgctggaccgggagctcgggcggggggagttcggggtgacgtacctgtgcatggatcgggacaccaaggagctgctcgcctgcaagtccatctccaagcggaagctgaggacggcggtcgacgtggaggacgtgcgccgggaggtcgccatcatgcgccacctccccaagagcgccagcatcgtgtcgctgcgggaggcgtgcgaggacgagggcgccgtgcacctcgtcatggagctctgcgaaggcggggagctcttcgaccgcatcgtcgcgcggggccactacacggagcgcgccgccgccaatgtcacccgcaccatcgtggaggtcgtccagctctgccaccgccacggcgttatccaccgggacctcaagcccgagaacttcctcttcgccaacaagaaggagaactcgccgctcaaggccatcgatttcggcctctccatcttcttcaagcccggtgagaagttttctgaaattgtgggaagcccatattacatggctccagaggtattgaagagaaactatggtccggaaatagatatttggagtgcaggagttatcttgtatattttgttatgtggagttcctccattttgggctgagactgagcaaggggtggcacaagccattcttcgtggaaatatcgatttcaaacgcgaaccctggccaaatgtttcagaaaatgctaaagatttggttcgacgcatgttggagcctgatccaaaactcaggttaactgcaaagcaagttcttgaacatccatggcttcaaaatgctaagaaagctccaaatgttcctcttggagatattgtgaagtcaaggctcaaacaattttctagaatgaatagattcaaaagaagagcactaagggtcattgccgatcatttatctgctgaggaagttgaggacataaaggagatgttcaaggctatggacactgataacgatggcattgtatcttatgaagaattaaagagcgggatagcaaaatttggttctcatctggcagaatcggaagtgcagatgcttatcgaagctgtggatacaaatggtaaggatgctctagattatggtgaatttttggctgtctctcttcatttgcaaaggatggcaaatgatgagcacctccggcgagccttcctattttttgacaaggatggcaatggctacatagagcctgaagagcttcgagaggctctagtggacgatggagcaggtgacagcatggaagtggtgaacgacatattgcaagaagttgacactgataaggatggcaagattagctatgacgaatttgtagcaatgatgaagacgggcacagattggagaaaggcgtcccggcattactctagaggaagattcaacagccttagcatgaagcttataaaggatgggtccgtaaaactggtcaatgagtga

SEQ ID NO: 2205 - protein, 551 aa, Oryza sativa subsp
MGNCCRSPAAAAREDVKSSHFPASAGKKKPHQARNGGVGGGGGGGGGGGGGGGAGQKRLPVLGEEGCELIGGIDDKYALDRELGRGEFGVTYLCMDRDTKELLACKSISKRKLRTAVDVEDVRREVAIMRHLPKSASIVSLREACEDEGAVHLVMELCEGGELFDRIVARGHYTERAAANVTRTIVEVVQLCHRHGVIHRDLKPENFLFANKKENSPLKAIDFGLSIFFKPGEKFSEIVGSPYYMAPEVLKRNYGPEIDIWSAGVILYILLCGVPPFWAETEQGVAQAILRGNIDFKREPWPNVSENAKDLVRRMLEPDPKLRLTAKQVLEHPWLQNAKKAPNVPLGDIVKSRLKQFSRMNRFKRRALRVIADHLSAEEVEDIKEMFKAMDTDNDGIVSYEELKSGIAKFGSHLAESEVQMLIEAVDTNGKDALDYGEFLAVSLHLQRMANDEHLRRAFLFFDKDGNGYIEPEELREALVDDGAGDSMEVVNDILQEVDTDKDGKISYDEFVAMMKTGTDWRKASRHYSRGRFNSLSMKLIKDGSVKLVNE

SEQ ID NO: 2206 - DNA, 1662 bp, Solanum lycopersicum
  CDS (1)..(1662)
atgggtggttgttttagcaagaagtatacccaacaagatgctaatgggcatagggcaggaagaagagttaatcaagcatatcaaaaaccaccacaaccccagccagaaaggccatatcagcctcagccccagcaggaaaggccatatcagccaccgccacagccagcatatcagccaccgccacagccaaagccacaacctcagccccaccctgttcctgttactgtgcagtctggacagccccaagaccaaatgcaaggaccccatatgaataacatattgggaaagccttttgaggaaattagaaagctctatacacttgggaaagaattgggtaggggtcagtttggagtgacttactattgtactgagaactcaactgggaacccttatgcttgcaagtccatacttaagaggaagcttgtaagcaagaatgatagggaggatatgaagagggaaattcagattatgcagcatttgagtgggcagccaaacattgtggaattcaagggtgcttatgaagataggcagtcagtacaccttgtgatggaactttgtgctggaggagagttgtttgacaggattatcgcccgtggatattactcagagaaggatgctgctgagattattagacagattgtaaatgttgttaacatttgccatttcatgggtgtcatgcatagggatctcaagccagagaatttcttactgactagtaaggatgaaaatgctatgttgaaggcaactgattttggactttctgtcttcattgaagaagggaaggtgtaccgtgatatagttggtagtgcatattatgttgcccctgaagtgttgcggcgtagttatgggaaggaagcagatgtatggagtgcaggtgttattttgtatattctgctcagtggtgtacctccattttgggctgaaactgaaaagggaatatttaataccatactaaaaggagaaattgacttccaaagtgatccatggccatcaatatcaaatagtgccaaggaccttattcggaaaatgctaacgcaggagccaaggaagagaattacttccgcgcaagttcttgaacatccatggcttcgacttggagaagcatcagataagccaatagacagtgcagtcctgtccagaatgaagcagttcagagcaatgaacaagctcaaaaaactcgcattgaaggtcattgcggaaaatttatctgaagaagaaatcaagggtctgaaagctatgtttcacaacattgatacggacaatagtggcacaatcacttatgaagaactgaagtcgggattggctcggcttggatcaaagctaacggagactgaagtcaagcaactcatggaagctgctgatgtggatggaaatggatcaattgattacattgagtttattactgcaacgatgcatagacatcggctagaaagggatgagcatctttttaaagcttttcagcattttgacaaggaccatagtggattcatcacgcgagatgaattggaaaacgctatgaaggaatatggtatgggtgatgaggccaccatcaaggagataatcgcagaggtggacactgacaatgacggtaggatcaattacgaggagttctgtgctatgatgagaagtggaacaacacaaccacaacaaaagcttttctag

SEQ ID NO: 2207 - protein, 553 aa, Solanum lycopersicum
MGGCFSKKYTQQDANGHRAGRRVNQAYQKPPQPQPERPYQPQPQQERPYQPPPQPAYQPPPQPKPQPQPHPVPVTVQSGQPQDQMQGPHMNNILGKPFEEIRKLYTLGKELGRGQFGVTYYCTENSTGNPYACKSILKRKLVSKNDREDMKREIQIMQHLSGQPNIVEFKGAYEDRQSVHLVMELCAGGELFDRIIARGYYSEKDAAEIIRQIVNVVNICHFMGVMHRDLKPENFLLTSKDENAMLKATDFGLSVFIEEGKVYRDIVGSAYYVAPEVLRRSYGKEADVWSAGVILYILLSGVPPFWAETEKGIFNTILKGEIDFQSDPWPSISNSAKDLIRKMLTQEPRKRITSAQVLEHPWLRLGEASDKPIDSAVLSRMKQFRAMNKLKKLALKVIAENLSEEEIKGLKAMFHNIDTDNSGTITYEELKSGLARLGSKLTETEVKQLMEAADVDGNGSIDYIEFITATMHRHRLERDEHLFKAFQHFDKDHSGFITRDELENAMKEYGMGDEATIKEIIAEVDTDNDGRINYEEFCAMMRSGTTQPQQKLF

SEQ ID NO: 2208 - DNA, 1797 bp, Solanum lycopersicum
  CDS (1)..(1797)
atggggcagtgttgcagtaagggtgtttctggtgaaaatggtggtagcgttgttgctatcggagatggaaactctgcggtatctaccaacaatcgccctaaaccaccaccttcaccggtacgtcaatcagtcgggaatgggatgagttacaccaacaacagtacgccagctcactcatttacagccagtccgtttcagagcccgtatcctgctggaatagctccatcgccatctccggttggaacgccgagaaggaaattcaagtggccatttccaccgccgtcgccggcgaaacctatactatcagcgatctttaagcgtcagggagggacgtcggtaaagccgaaagaagggccaataccggaagatgaaggtggtgaaggcgagagacagcttgataaaagcttcggctatccaaaaaatttgacatcaaagtatgaattgggaaaggaggtgggtcgagggcatttcggccatacttgttgggcaaaaggtaaaaaaggcgaactcaaaaatcagccagtggctgtgaagatcatttccaaagctaagatgacaaccgctatttctatcgaagatgttcgaagggaggtgaagatattgaaagccttatctggacatcagaatcttgtcaagttttatgatgcatttgaggatgccaataatgtctacatagtaatggagttatgtgaaggcggggaactattggacagaattctatcaagaggtgggagatacacagaggaggatgccaaaagtattgtggttcaaatactaaatgttgtcgccttttgtcatcttcaaggtgtggtgcaccgcgatctgaagcctgagaactttctttttgcaaagaaagatgaagattcaccaatgaaggtgattgattttggtctatcagatttcattaaaccagatcagcgtcttaacgatattgttggcagtgcatattatgttgcacctgaagtacttcataggtcatatagcattgaagcagatatgtggagtattggtgtgataacttatatcttgttatgtggaagtagacctttctgggcacgtacagagtctggcattttccgttctgtgttacgagctgatcctaattttgaggactcgccttggcctgcagtgtcagcagaggccagagattttgtgaaaaggcttttgaataaagaccataggaagagaatgactgcttctcaagcactgactcatccatggttaaggactgaaaatccttttgtacccttagacatattgatctttaaattagtcaagtcttatattcgaacatcacccttgaaacgtgcagcactgaaggctctttcaaaagcattgacagaagaagaattaatatacctcaaggctcaattcaatttattggaaccgaaagctggttttgtgtcactcgataattttaggatggcacttatgaaacaaacgactgatgccatgagggaggccagagttcttgacatcataaatttgctggaaccattatcttataagcaaatggattttgaagagttctgtgctgctgcaattagtacatatcagcttgaggctcttgaaaactgggaacatattgctagtgccgctttcaattattttgagcaagaaggaaaccgtgtcatttctgttgaggaattagcacaggaaatgaatttgggccctacggcttatgcttttctcaaggattggatcagaccatccgataggaaattgagtttccttgggtataccaagtttttgcatggtgtgacgatgcgaagttcaagcacaagacatcatcgataa

SEQ ID NO: 2209 - protein, 598 aa, Solanum lycopersicum
MGQCCSKGVSGENGGSVVAIGDGNSAVSTNNRPKPPPSPVRQSVGNGMSYTNNSTPAHSFTASPFQSPYPAGIAPSPSPVGTPRRKFKWPFPPPSPAKPILSAIFKRQGGTSVKPKEGPIPEDEGGEGERQLDKSFGYPKNLTSKYELGKEVGRGHFGHTCWAKGKKGELKNQPVAVKIISKAKMTTAISIEDVRREVKILKALSGHQNLVKFYDAFEDANNVYIVMELCEGGELLDRILSRGGRYTEEDAKSIVVQILNVVAFCHLQGVVHRDLKPENFLFAKKDEDSPMKVIDFGLSDFIKPDQRLNDIVGSAYYVAPEVLHRSYSIEADMWSIGVITYILLCGSRPFWARTESGIFRSVLRADPNFEDSPWPAVSAEARDFVKRLLNKDHRKRMTASQALTHPWLRTENPFVPLDILIFKLVKSYIRTSPLKRAALKALSKALTEEELIYLKAQFNLLEPKAGFVSLDNFRMALMKQTTDAMREARVLDIINLLEPLSYKQMDFEEFCAAAISTYQLEALENWEHIASAAFNYFEQEGNRVISVEELAQEMNLGPTAYAFLKDWIRPSDRKLSFLGYTKFLHGVTMRSSSTRHHR

SEQ ID NO: 2210 - DNA, 1587 bp, Arabidopsis thaliana
  CDS (1)..(1587)
atgggaaattgttgctctcacggacgggactcagccgataacggagacgcattggaaaacggagcttccgcttcaaatgctgccaattcgactggtccaaccgcggaagcttctgtaccacaatcaaaacatgcacctccttctcctcctcctgcaaccaaacaaggccctataggccctgtcttaggtcgacccatggaagatgtaaaagcttcatattctttagggaaagagctcgggcgaggccaatttggtgtcacacacctctgcacacagaagtcaacaggtcatcaatttgcttgcaagacgattgcaaaaagaaagcttgtaaacaaggaagacattgaggatgtaagaagagaagtgcagataatgcatcacttgactggtcaaccaaacattgtggagcttaaaggggcttatgaggataagcattccgtgcatttggttatggagctttgcgcaggtggagagttgttcgataggattattgctaaaggacattactcggagagagcagctgcttcgttgctaagaacgattgttcagattgtgcatacttgccattccatgggggtgattcacagggatttgaagccagagaactttctcttgctcaacaaagatgagaattctcctctcaaagctactgactttgggttgtcggttttctacaagccaggagaggtattcaaggatattgtggggagtgcttattacatcgcacctgaggttttgaaaagaaagtatggaccagaggcagatatttggagtattggtgtcatgttgtatatcctcttatgtggtgtcccgccattctgggctgagtcggagaacgggatattcaacgcaatccttaggggacatgttgatttctcaagtgatccatggccatccatctcgcctcaggcaaaggatcttgttaagaagatgctcaactctgatccaaagcaaagactaactgctgctcaagttctcaaccatccatggatcaaggaggatggagaggcaccagatgttcctcttgataatgcggtgatgtccaggctcaaacaattcaaagcaatgaacaatttcaagaaagttgcattacgggtgatagcaggctgcttatcagaggaagagatcatggggttgaaggagatgtttaaaggtatggatactgatagtagtggaacaattacactcgaggagttaagacaaggacttgctaagcaaggtacaaggttgtcagaatatgaagttcagcagttaatggaagctgctgatgctgatggtaatggaacaatagactatggcgagtttatcgcagccacaatgcatatcaacagacttgacagagaagaacatctttactcagccttccaacactttgacaaagacaacagtggatatatcacaatggaagagctagagcaagccctacgggagtttggcatgaatgatggcagagacattaaggagatcatttccgaggttgatggagacaatgatggtcggataaactatgatgaatttgtggcaatgatgagaaaaggaaacccggatccaatcccaaagaagcggcgtgaactttcattcaaatga

SEQ ID NO: 2211 - protein, 528 aa, Arabidopsis thaliana
MGNCCSHGRDSADNGDALENGASASNAANSTGPTAEASVPQSKHAPPSPPPATKQGPIGPVLGRPMEDVKASYSLGKELGRGQFGVTHLCTQKSTGHQFACKTIAKRKLVNKEDIEDVRREVQIMHHLTGQPNIVELKGAYEDKHSVHLVMELCAGGELFDRIIAKGHYSERAAASLLRTIVQIVHTCHSMGVIHRDLKPENFLLLNKDENSPLKATDFGLSVFYKPGEVFKDIVGSAYYIAPEVLKRKYGPEADIWSIGVMLYILLCGVPPFWAESENGIFNAILRGHVDFSSDPWPSISPQAKDLVKKMLNSDPKQRLTAAQVLNHPWIKEDGEAPDVPLDNAVMSRLKQFKAMNNFKKVALRVIAGCLSEEEIMGLKEMFKGMDTDSSGTITLEELRQGLAKQGTRLSEYEVQQLMEAADADGNGTIDYGEFIAATMHINRLDREEHLYSAFQHFDKDNSGYITMEELEQALREFGMNDGRDIKEIISEVDGDNDGRINYDEFVAMMRKGNPDPIPKKRRELSFK

SEQ ID NO: 2212 - DNA, 1788 bp, Arabidopsis thaliana
  CDS (1)..(1788)
atggggcaatgttacgggaaggttaatcagagtaagcaaaatggtgaagaagaagctaacacggctacttatgttgtttccggcgacgggaatcagattcagcctctaactccggttaattacggtcgagctaagaacactccagctaggtcatcgaatccgagtccttggcctagtcctttccctcacggatcagcgagccctcttccttctggtgtttctccttctccggccagaacttccactccgaggaggtttttccgacggcctttcccgccgccttctccagccaaacacattaaggcttctttgatcaaacgtcttggagtgaagcctaaggaaggtccgatccctgaggagagaggaactgagccggagcagtcgcttgataagagctttggttatggcaagaattttggtgctaagtacgaattggggaaagaagtgggtcgagggcattttggtcatacttgttctggccgtggtaagaagggagatattaaggatcatcctattgctgtcaagatcatctccaaggctaagatgacaacagcaattgcaattgaagatgttcgcagggaggtgaagttactgaaatcattatctggacacaaatatttaatcaaatattatgatgcatgtgaggacgccaataacgtatacatagtcatggagttgtgtgatggtggagaacttttggacagaattttagcaaggggtggtaaatacccggaggatgatgcaaaggcgattgtcgtacaaattctaactgttgtttcattttgtcatctccaaggagttgtgcaccgtgacttaaagccagagaattttctatttacatcaagccgcgaagactcagacttgaaacttattgattttggtctctcagactttattagacctgatgaaagactgaatgatatagttggaagtgcctactatgtcgcgcctgaagttttacacaggtcatatagccttgaggctgatatatggagtattggagttattacatatatactcttatgtggaagccgacctttttgggcacggacagaatctggaatctttcgcactgtactaagaactgaaccaaactatgatgacgtaccttggccttcttgttcatcagaaggtaaagattttgtgaaacgacttctcaacaaagactataggaagcgaatgtctgcagttcaagctttgactcatccgtggttacgggatgatagtcgtgtgattcctttagacattttgatctataagttggtcaaagcctacttgcacgcgacacctcttagacgagctgctttaaaggcgctagcaaaagcattgaccgagaacgagctagtctatcttagagcacagttcatgctgttgggaccaaacaaagatggtagcgtctctctcgaaaacttcaagacggcgcttatgcaaaacgcaacagacgcaatgagagaatcaagagttcctgaaatacttcacactatggaatctctagcgtataggaagatgtatttcgaagagttctgtgcagcagcaattagcatccatcaactagaagctgttgacgcgtgggaagagatagcaacggcaggtttccagcattttgaaaccgagggaaaccgagtgatcacaatcgaagaactagcaagggaactgaatgtgggtgcgtctgcgtatggacacttgagagattgggtaagaagcagtgacgggaagctgagttacttagggttcactaagttcttgcacggagttactcttcgtgctgctcacgcaagacctcgctag

SEQ ID NO: 2213 - protein, 595 aa, Arabidopsis thaliana
MGQCYGKVNQSKQNGEEEANTATYVVSGDGNQIQPLTPVNYGRAKNTPARSSNPSPWPSPFPHGSASPLPSGVSPSPARTSTPRRFFRRPFPPPSPAKHIKASLIKRLGVKPKEGPIPEERGTEPEQSLDKSFGYGKNFGAKYELGKEVGRGHFGHTCSGRGKKGDIKDHPIAVKIISKAKMTTAIAIEDVRREVKLLKSLSGHKYLIKYYDACEDANNVYIVMELCDGGELLDRILARGGKYPEDDAKAIVVQILTVVSFCHLQGVVHRDLKPENFLFTSSREDSDLKLIDFGLSDFIRPDERLNDIVGSAYYVAPEVLHRSYSLEADIWSIGVITYILLCGSRPFWARTESGIFRTVLRTEPNYDDVPWPSCSSEGKDFVKRLLNKDYRKRMSAVQALTHPWLRDDSRVIPLDILIYKLVKAYLHATPLRRAALKALAKALTENELVYLRAQFMLLGPNKDGSVSLENFKTALMQNATDAMRESRVPEILHTMESLAYRKMYFEEFCAAAISIHQLEAVDAWEEIATAGFQHFETEGNRVITIEELARELNVGASAYGHLRDWVRSSDGKLSYLGFTKFLHGVTLRAAHARPR

SEQ ID NO: 2214 - DNA, 1587 bp, Arabidopsis thaliana
  CDS (1)..(1587)
atgggaaactgttgcagatctcccgcagcagttgctagagaagacgtgaaatccaactattccggccacgatcacgcccgcaaagacgccgccggcggtaaaaaatcggcgccgattcgagttctaagcgatgttcccaaggaaaacatcgaggaccgttacttactcgacagagaactcggccgcggcgagtttggtgtcacttacctctgtatcgagaggtcctcgcgtgacctactcgcttgcaaatcgatctccaagaggaagcttagaactgctgtggatattgaagatgttaaaagagaagtagcgattatgaagcatttgcctaagagttcgagtattgttactttgaaagaagcttgtgaggatgataatgctgtgcatttggttatggagctttgtgaaggtggcgagcttttcgatcggattgttgcgagaggtcattatacggagcgtgctgctgctggtgttactaagactattgttgaggttgtgcagctttgtcataagcatggtgtgattcatagagatttgaagcccgagaactttttgtttgctaataagaaggagaactcgcctttgaaagctattgattttggattgtcgattttcttcaagccaggtgagaaattctctgagattgttgggagtccatattacatggcacctgaggtgcttaagcggaattatggacccgaaatagatatttggagtgctggagtgattctttatattctcttgtgtggagttcctccgttctgggcagagtcagaacagggagttgctcaggctattctgcgtggagtaattgattttaagagggaaccgtggccaaacatttctgagaccgctaagaatctagtcagacaaatgttagagcctgatccaaagcgtcggctgactgcaaagcaagtgcttgagcacccatggattcagaacgcaaagaaagctcccaatgttcctcttggagatgttgtgaagtcgaggttgaagcaattttcagtgatgaaccgattcaagagaaaagctttaagggttattgccaaatttttatctacggaagaagtagaagacatcaaagtaatgttcaacaagatggatactgataatgatggtatagtttccattgaggagttgaaagccggacttcgtgattttagtacacagctagcggaatcagaagttcagatgcttattgaagcggtggatactaaaggaaaaggaactctagactatggagaatttgtagcagtgtctctccacctgcaaaaggtagcaaacgatgagcatctccgcaaagccttctcttactttgacaaggatggaaatgggtacattttgccccaggagctttgtgacgccttaaaggaagatggaggagatgactgtgtggatgtcgccaatgatatattccaagaagttgacacagacaaggatgggagaataagctacgaagagtttgcggcaatgatgaaaacaggaacggattggagaaaggcgtctcgtcattactcaagagggagattcaatagcctaagcatcaagctaatgaaggacgggtctttgaacctaggcaacgaatag

SEQ ID NO: 2215 - protein, 528 aa, Arabidopsis thaliana
MGNCCRSPAAVAREDVKSNYSGHDHARKDAAGGKKSAPIRVLSDVPKENIEDRYLLDRELGRGEFGVTYLCIERSSRDLLACKSISKRKLRTAVDIEDVKREVAIMKHLPKSSSIVTLKEACEDDNAVHLVMELCEGGELFDRIVARGHYTERAAAGVTKTIVEVVQLCHKHGVIHRDLKPENFLFANKKENSPLKAIDFGLSIFFKPGEKFSEIVGSPYYMAPEVLKRNYGPEIDIWSAGVILYILLCGVPPFWAESEQGVAQAILRGVIDFKREPWPNISETAKNLVRQMLEPDPKRRLTAKQVLEHPWIQNAKKAPNVPLGDVVKSRLKQFSVMNRFKRKALRVIAKFLSTEEVEDIKVMFNKMDTDNDGIVSIEELKAGLRDFSTQLAESEVQMLIEAVDTKGKGTLDYGEFVAVSLHLQKVANDEHLRKAFSYFDKDGNGYILPQELCDALKEDGGDDCVDVANDIFQEVDTDKDGRISYEEFAAMMKTGTDWRKASRHYSRGRFNSLSIKLMKDGSLNLGNE

SEQ ID NO: 2216 - DNA, 1809 bp, Nicotiana tabacum
  CDS (1)..(1809)
atgggtgcttgcacttcaaaaccctcaaatttttccgtcgatgacattaccgtcgccggcgacggcgctatatttccggtgaaatctggaccgagcaatgacgacgatgttaacagccatcagacgaagaatgacgaacctagtgtgggtaaaaagtcaccctttttccccttctacagtccaagtccggcgcattatttgttctcaaagaaatctccggctacgaatgccagctctaattctactcccatgaggttcttcaaacggccgttccctccgccttctccggcgaagcacatccgttctctgttggccaggcgacatggcaccgtaaaaccgaacgagtctgcaatacccgaagggaatgaatctgaggtcggagatggaggaggcgcggggctagataagagctttggattttcgaagaattttgtgaacaagtatgagatgggagaggaagtaggaagagggcattttgggtatacttgtaaagctaagtttaagaaaggtgaagtcaagggacaagaggttgctgttaaagtcatccccaaatcaaagatgactactgcaatagccattgaggatgtgagaagggaggtgaagatattaagagctttgacgggacataataatttagtaaagttttatgatgcatatgaagaccccaacaatgtgtacatagtcatggagctatgtgaaggaggcgagcttttggatagaatactctcgagaggtgggaagtacacagaagatgatgcaaagtctgtaatgatacaaatactgaaagttgttgcattttgccatcttcaaggtgtggtgcaccgggatctcaaaccagagaacttcttattcacatctaaggatgaaaacgcacaacttaaagcaatagactttggattgtctgattttgtgaagccagatgaaagacttaatgatattgtcggtagtgcatattatgtagcgccggaggttctacacagatcttacagtacagaggctgatgtgtggagtataggtgtcatagcatatatcctgttgtgtggaagccgtcctttttgggctcgaacagaatctgggatatttagagctgtcctaaaagctgatccaagttttgacgaacagccttggcctacattatcttctgaggcaaaagactttgtgaaacgtctgttgaataaagatccccggaaaagaatgaccgcagctcaggctttgggtcacccatggataaagaatagtcacaacatggaggagcctttggatattttgatattcaaactaatgaaagcttacatgaggtcctctgctcttagaaaagctgcactacgggctttatcaaagacattgactgtagatgagctattttatctgaaggagcagtttgcgttgctggaaccaaacaaaaatggcaccataagcttcaataacattaaaacggccctgatgaaacatgcaacagatgctatgaaggaagctcgcatgcatgattttcttgcatcgcttaatgcactgcaatacaggaggatggattttgaggaattctgtgctgctgcattaagtgttcatcagcttgaggctcttgaccgatgggaacaacatgcacgttgtgcctatgaaatttttgagaaggaaggcaatagggctattatgatagaagaattagcttcggaacttggtcttagcccttctgttccagtccatgctgttctacatgactggcttaggcatactgatggaaagctcagttttcttggttttgcaaagttgttgcatggagtgtccagccgctcaattacaaaagttcaatga

SEQ ID NO: 2217 - protein, 602 aa, Nicotiana tabacum
MGACTSKPSNFSVDDITVAGDGAIFPVKSGPSNDDDVNSHQTKNDEPSVGKKSPFFPFYSPSPAHYLFSKKSPATNASSNSTPMRFFKRPFPPPSPAKHIRSLLARRHGTVKPNESAIPEGNESEVGDGGGAGLDKSFGFSKNFVNKYEMGEEVGRGHFGYTCKAKFKKGEVKGQEVAVKVIPKSKMTTAIAIEDVRREVKILRALTGHNNLVKFYDAYEDPNNVYIVMELCEGGELLDRILSRGGKYTEDDAKSVMIQILKVVAFCHLQGVVHRDLKPENFLFTSKDENAQLKAIDFGLSDFVKPDERLNDIVGSAYYVAPEVLHRSYSTEADVWSIGVIAYILLCGSRPFWARTESGIFRAVLKADPSFDEQPWPTLSSEAKDFVKRLLNKDPRKRMTAAQALGHPWIKNSHNMEEPLDILIFKLMKAYMRSSALRKAALRALSKTLTVDELFYLKEQFALLEPNKNGTISFNNIKTALMKHATDAMKEARMHDFLASLNALQYRRMDFEEFCAAALSVHQLEALDRWEQHARCAYEIFEKEGNRAIMIEELASELGLSPSVPVHAVLHDWLRHTDGKLSFLGFAKLLHGVSSRSITKVQ

SEQ ID NO: 2218 - DNA, 1719 bp, Nicotiana tabacum
  CDS (1)..(1719)
atgggtaataactgtttttctagctcaaaagttagtggttctaacagcaacaccccctccaccaccgccacagccaccaccgtgaatgtccggaggaacaaagcaaatccaccttctacatccacaattacatcaacaaaacaagaagggtctcattgcaataaacagaaagttaaagataaccacaaaagccaacaccaaaaacaacaacctagaaattctcagcaaaatgttaagaagcataataatgggaggagacagaagagtggggttattgcttgtgggaaaagaactgattttgggtatgataaagattttgataagaggtttaccattgggaagttgttgggtcatggccaatttggttatacctacgttgccacccacaagtctaatggagatcgcgtcgctgtcaagagaattgagaagaacaagatggttcttccgattgcagttgaggatgtaaaacgagaagtcaagatattgaaggccttatccggtcatgagaatgtggttcaattcaataatgcatttgaggatgataactacgtctacatagtaatggagttatgtgagggtggagaactcttggaccgcattttggccaaaaaggacagccgttatgccgagaaagatgcagcaatagttgtacgtcagatgctaaaagaagccgctcaatgtcatttacatggtttggtgcatcgtgatatgaaacctgagaattttctctttaaatcttcaaaggaggattcaccattgaaggccacagattttggtctttcagacttcataagaccagggaagaagttccaagatattgttggtagtgcatattacgtagcgccagaggtattaaagcgtagatcaggacccgaatcagatgagtggagtattggtgttattacatacattttgctctgtggccgtcgccgcttctgggataaaacagaggatggcatattcaaggaggtactaagaaacaagcctgattttcgtcgcaagccgtggccaactatcagcaacagtgctaaagattttgttaagaaattattggtgaaggatcctcgtgctagacttactgctgcccaggccctatcgcatccatgggtccgcgaaggaggtgatgcatctgagattccactggacatttctgtcttatcaaacatgcgacaatttgtcaagtacagtcgattaaaacagtttgctttacgggcattggctagcacagttgatgaggaggagctggcagatgtgcgggatcagttttctgcaattgatgtggataaaaatggtgtcattagccttgaagaaatgagacaggcccttgctaaggatcttccctggaagatgaaagagtcacgggttcttgagattcttcaagcgattgatagtaactctgatgggctacttgatttcccagagtttgtcgcagccactctacatgtccatcagttggaggagcataattctataaaatggcaggaaagatcgcaagctgcttttgaggaatttgatgttgatagagatggattcataactccagaagaacttagaatgcatactggattaaagggctccatagacccacttctagaagaagcagatatcgacaaagatgggaagataagcttgtcggaatttcgtaggcttctaagaactgcaagtataagctcgcggatggtgactagtccaactgttagaggctctcggaaaagttag

SEQ ID NO: 2219 - protein, 572 aa, Nicotiana tabacum
MGNNCFSSSKVSGSNSNTPSTTATATTVNVRRNKANPPSTSTITSTKQEGSHCNKQKVKDNHKSQHQKQQPRNSQQNVKKHNNGRRQKSGVIACGKRTDFGYDKDFDKRFTIGKLLGHGQFGYTYVATHKSNGDRVAVKRIEKNKMVLPIAVEDVKREVKILKALSGHENVVQFNNAFEDDNYVYIVMELCEGGELLDRILAKKDSRYAEKDAAIVVRQMLKEAAQCHLHGLVHRDMKPENFLFKSSKEDSPLKATDFGLSDFIRPGKKFQDIVGSAYYVAPEVLKRRSGPESDEWSIGVITYILLCGRRRFWDKTEDGIFKEVLRNKPDFRRKPWPTISNSAKDFVKKLLVKDPRARLTAAQALSHPWVREGGDASEIPLDISVLSNMRQFVKYSRLKQFALRALASTVDEEELADVRDQFSAIDVDKNGVISLEEMRQALAKDLPWKMKESRVLEILQAIDSNSDGLLDFPEFVAATLHVHQLEEHNSIKWQERSQAAFEEFDVDRDGFITPEELRMHTGLKGSIDPLLEEADIDKDGKISLSEFRRLLRTASISSRMVTSPTVRGSRKS

SEQ ID NO: 2220 - DNA, 1800 bp, Nicotiana tabacum
  CDS (1)..(1800)
atggggcactgctgcagtaagggtgttaccgccgataatgacggtcacgtcgtctccgttgttgacggaaactcatccgtctccacaaacaaccgccccaaaccatcaccgtcaccggcacgtccacagtccgtcgggaacgggacgagttacactaacaacaacacgccagctcactcatttacaaccagtccttttcagagcccataccctgccggaatacctccctccccgtctccggtcggaacggcgagaaggaaattcaagtggccatttccaccgccgtcgccggcgaagcctatattatcggcgatccttaagcggcagggaacgacgtcagcaaagccaaaagaagggccaataccggaagatgaaggtggtgaaggtgagagacagctggataaaagctttggttatccaaagaacttgacggcaaagatagagcttggaaaggaagtaggtcgagggcattttggacatacttgttgggctaaaggtaaaaaaggcgaacttaaaaatcaaccggtcgctgtgaagatcatttcaaaagctaagatgacaacagctatatctattgaagatgttcgcagggaggtgaagatattgaaggccttgtctggacatcagaatcttgtcaagttttatgatgcctttgaggatgccaacaatgtctacatagtaatggagttatgtgaaggaggggttctattggacaggattctatcaagaggcgggagatacacagaggaggatgccaaaagtatactggttcaaatactaaatgttgtcgccttttgtcatcttcaaggtgtggtccaccgtgatctgaagccagagaacttcctttttacgaagaaagaagaggatgcaccaatgaaggttattgattttggtctatcagacttcatcagaccagatcaacgtcttaatgatattgttggcagtgcatactatgttgcacctgaagtacttcataggtcatacagtattgaagcagatatgtggagtattggtgtgataacgtatatcttattgtgtggaagtagacctttctgggcacgtacagagtcaggcatttttcgatccgtgttacgagctgatcctaattttgaggactcaccttggccttcagtgtctgcagaggccagagattttgtgaaaaggcttttgaataaagaccataggaagagaatgaccgcttctcaagcattggctcatccatggttaaggacggaaaatcctgttttacctttagacatattgatctttaaattagtcaagtcttatactcgagcctcacccttgaaacgtgcagcattgaaggctctttcaaaagcattgacagaagaagagttaatctacctcagggctcaattcaatttattggaaccgaaagatggtcgtgtgtcactcaacaattttaagatggcacttactaaacaaatgactgatgccatgagggagtcaagagtttttgacatcttaaatttgatggaaccattatcctataaaccactggattttgaagagttctgtgctgccgcaattagtacatatcagcttgaggctcttgaaaattgggaacaaattgctagtgccgcttttgagcattttgagcaagaaggaaaccgtgtcatttccgttgaggaattagcacaggaaatgaatttgggcccaactgcttatgcttttctcaaggattgtatcagaccatctgatagaaaactaagtttccttgggtataccaaatatttgcatggtgtgactattcgtggttcaagcacaagacatcatcgataa

SEQ ID NO: 2221 - protein, 599 aa, Nicotiana tabacum
MGHCCSKGVTADNDGHVVSVVDGNSSVSTNNRPKPSPSPARPQSVGNGTSYTNNNTPAHSFTTSPFQSPYPAGIPPSPSPVGTARRKFKWPFPPPSPAKPILSAILKRQGTTSAKPKEGPIPEDEGGEGERQLDKSFGYPKNLTAKIELGKEVGRGHFGHTCWAKGKKGELKNQPVAVKIISKAKMTTAISIEDVRREVKILKALSGHQNLVKFYDAFEDANNVYIVMELCEGGVLLDRILSRGGRYTEEDAKSILVQILNVVAFCHLQGVVHRDLKPENFLFTKKEEDAPMKVIDFGLSDFIRPDQRLNDIVGSAYYVAPEVLHRSYSIEADMWSIGVITYILLCGSRPFWARTESGIFRSVLRADPNFEDSPWPSVSAEARDFVKRLLNKDHRKRMTASQALAHPWLRTENPVLPLDILIFKLVKSYTRASPLKRAALKALSKALTEEELIYLRAQFNLLEPKDGRVSLNNFKMALTKQMTDAMRESRVFDILNLMEPLSYKPLDFEEFCAAAISTYQLEALENWEQIASAAFEHFEQEGNRVISVEELAQEMNLGPTAYAFLKDCIRPSDRKLSFLGYTKYLHGVTIRGSSTRHHR

SEQ ID NO: 2222 - DNA, 1788 bp, Arabidopsis thaliana
  CDS (1)..(1788)
atggggcaatgttacgggaaggttaatcagagtaagcaaaatggtgaagaagaagctaacacgactacttatgttgtttccggcgacgggaatcagattcagcctctaactccggttaattacggtcgagctaagaacactccagctaggtcatcgaatccgagtccttggcctagtcctttccctcacggatcagcgagccctcttccttctggtgtttctccttctccggccagaacttccactccgaggaggtttttccgacggcctttcccgccgccttctccagccaaacacattaaggcttctttgatcaaacgtcttggagtgaagcctaaggaaggtccgatccctgaggagagaggaactgagccggagcagtcgcttgataagagctttggttatggcaagaattttggtgctaagtacgaattggggaaagaagtgggtcgagggcattttggtcatacttgttctggccgtggtaagaagggagatattaaggatcatcctattgctgtcaagatcatctccaaggctaagatgacaacagcaattgcaattgaagatgttcgcagggaggtgaagttactgaaatcattatctggacacaaatatttaatcaaatattatgatgcatgtgaggacgccaataacgtatacatagtcatggagttgtgtgatggtggagaacttttggacagaattttagcaaggggtggtaaatacccggaggatgatgcaaaggcgattgtcgtacaaattctaactgttgtttcattttgtcatctccaaggagttgtgcaccgtgacttaaagccagagaattttctatttacatcaagcgcggaagactcagacttgaaacttattgattttggtctctcagactttattagacctgatgaaagactgaatgatatagttggaagtgcctactatgtcgcgcctgaagttttacacaggtcatatagccttgaggctgatatatggagtattggagttattacatatatactcttatgtggaagccgacctttttgggcacggacagaatctggaatctttcgcactgtactaagaactgaaccaaactatgatgacgtaccttggccttcttgttcatcagaaggtaaagattttgtgaaacgacttctcaacaaagactataggaagcgaatgtctgcagttcaagctttgactcatccgtggttacgggatgatagtcgtgtgattcctttagacattttgatctataagttggtcaaagcctacttgcacgcgacacctcttagacgagctgctttaaaggcgctcaagaaagcattgaccgagaacgagctagtctatcttagagcacagttcatgctgttgggaccaaacaaagatggtagcgtctctctcgaaaacttcaagacggcgcttatcgaaaacgcaacagacgcaatgagagaatcaagagttcctgaaatacttcacactatggaatctctagcgtataggaagatgtatttcgaagagttctgtgcagcagcaattagcatccatcaactagaagctgttgacgcgtgggaagagatagcaacggcaggtttccagcattttgaaaccgagggaaaccgagtgatcacaatcgaagaactagcaagggaactgaatgtgggtgcgtctgcgtatggacacttgagagattgggtaagaagcagtgacgggaagctgagttacttagggttcactaagttcttgcacggagttactcttcgtgctgctcacgcaagacctcgctag

SEQ ID NO: 2223 - protein, 595 aa, Arabidopsis thaliana
MGQCYGKVNQSKQNGEEEANTTTYVVSGDGNQIQPLTPVNYGRAKNTPARSSNPSPWPSPFPHGSASPLPSGVSPSPARTSTPRRFFRRPFPPPSPAKHIKASLIKRLGVKPKEGPIPEERGTEPEQSLDKSFGYGKNFGAKYELGKEVGRGHFGHTCSGRGKKGDIKDHPIAVKIISKAKMTTAIAIEDVRREVKLLKSLSGHKYLIKYYDACEDANNVYIVMELCDGGELLDRILARGGKYPEDDAKAIVVQILTVVSFCHLQGVVHRDLKPENFLFTSSAEDSDLKLIDFGLSDFIRPDERLNDIVGSAYYVAPEVLHRSYSLEADIWSIGVITYILLCGSRPFWARTESGIFRTVLRTEPNYDDVPWPSCSSEGKDFVKRLLNKDYRKRMSAVQALTHPWLRDDSRVIPLDILIYKLVKAYLHATPLRRAALKALKKALTENELVYLRAQFMLLGPNKDGSVSLENFKTALIENATDAMRESRVPEILHTMESLAYRKMYFEEFCAAAISIHQLEAVDAWEEIATAGFQHFETEGNRVITIEELARELNVGASAYGHLRDWVRSSDGKLSYLGFTKFLHGVTLRAAHARPR

SEQ ID NO: 2224 - DNA, 1491 bp, Solanum tuberosum
  CDS (1)..(1491)
atggaaccaaaaccagcaactgagcccaagaaatcatctgtttgggttcttccttacaagactcaaagccttcagagtctttacacaataggcaaaaagttaggccaaggtcaatttggaactacacatctttgtatagaaaaatcaagtggcaatctttacgcttgtaagacaatacccaaaaagaaactgatctgtaaagaagattatgaggatgtttggaaagagattcaaataatgcatcatttatctgaacacccaaatgtggtaagaataaagggtacttatgaagatgcattatatgtgcatatagttatggagctttgtgctggtggagagctttttgataggattgttgagaaaggacattatagtgaaagagaagctgctaagttgattaaaacaattgttggtgttgttgaggcttgtcattcattaggtgttatgcatagagatctcaagcccgagaatttcttgtttctcagttctgatgaggatgctgctctcaaggccactgattttggcctctctgttttctacaaaccaggtgaaacattttcagatgttgttggaagtccttattatgttgccccagaggttttatgcaagcactatggacatgaatcagatgtatggagtgcaggagttatcttgtacatattacttagtggtgttccccctttttgggcagaaactgatatgggaatatttcgtcagatactgcgaggcaaactagatcttgaatctgaaccttggcctggaatttcagatagtgccaaggatttgatacgtaaaattcttgataggaatccaaagaggaggttaactgcccatgaagttttgtgccatccatggattgtggatgacacagtggctcctgataaacctcttgactctgcagttctttcacgcctcaagcagttctcagcaatgaacaaactaaagaaaatggctttacgtgtgattgccgagaggctttcagaagaagaaatcggtggtctcaaggagctattcaaaatgttagacacagacaatagtggaacaataaccttcgaggaattaaaagagggtttgaggcgagtaggttctgaactgatggagtctgagatcaaggatcttatggatgcggcagacattgacaacaatggaacaatagactatggggaatttattgctgctactgttcatttgaacaaattggaaagggaagagaatctgttatcagccttctcttattttgacaaagatggtagtggatacataactatcgaagaacttcagcaagcctgcaaagaatttggtcttagcgagctcaatcttgatgaaattattaaagatattgatcaagataatgatggacagatagactataaggaattttctgcaatgatgaggaaaggcacaggtggagccgttggaaggaggaccataagaaacaatttgaatttaggagaagcactaggactcgtacagagtgaagaaatcttatga

SEQ ID NO: 2225 - protein, 496 aa, Solanum tuberosum
MEPKPATEPKKSSVWVLPYKTQSLQSLYTIGKKLGQGQFGTTHLCIEKSSGNLYACKTIPKKKLICKEDYEDVWKEIQIMHHLSEHPNVVRIKGTYEDALYVHIVMELCAGGELFDRIVEKGHYSEREAAKLIKTIVGVVEACHSLGVMHRDLKPENFLFLSSDEDAALKATDFGLSVFYKPGETFSDVVGSPYYVAPEVLCKHYGHESDVWSAGVILYILLSGVPPFWAETDMGIFRQILRGKLDLESEPWPGISDSAKDLIRKILDRNPKRRLTAHEVLCHPWIVDDTVAPDKPLDSAVLSRLKQFSAMNKLKKMALRVIAERLSEEEIGGLKELFKMLDTDNSGTITFEELKEGLRRVGSELMESEIKDLMDAADIDNNGTIDYGEFIAATVHLNKLEREENLLSAFSYFDKDGSGYITIEELQQACKEFGLSELNLDEIIKDIDQDNDGQIDYKEFSAMMRKGTGGAVGRRTIRNNLNLGEALGLVQSEEIL

SEQ ID NO: 2226 - DNA, 1737 bp, Solanum tuberosum
  CDS (1)..(1737)
atggggaacacttgtgtaggaccaagcatttctaaaaatgggatctttcaatcagtttcagcagcaatgtggcgatcccggtcgcccgatgacactgcttccaccactaatggtgaaagtgctagaattgaaacaccaatttctgttaaagaacctgattcacctttgccagttcaagagccaccagaacaaatgacaatgcctaagtcagaaaagaaagaagaagaaaaagaacaaccaaaaaagcccaaaaagcctgctgaaatgaagagggtgtcaagtgctggccttaggacagattctgtgttacaaaagaaaactggaaacttaaaggagtttttcagtataggaaagaaattaggacaaggtcaatttggaactacatttaaatgtgtcgaaaaggcaacagggaaggaatatgcttgcaaatcgattgctaagaggaagttgttaacagatgatgatgtggaagatgttagaagggaagtacagataatgcaccatttggcaggacatcctcatgttatatcgataaaaggtgcttatgaggatgctgtagctgttcatgtagttatggagttttgtgctgggggtgagcttttcgataggattattcaacgggggcactatacggaaagaaaagcagctgagcttactaggactattgttggggttgtagaagcttgtcattctcttggtgtcatgcatcgtgatcttaagcctgaaaattttctctttgttgatcagaaggaggattcacttctcaaagcaattgactttgggttatcgatattcttcaaaccaggcgacagatttactgatgttgttggcagcccatactatgtcgcaccagaagttctccgaaaacgttatggtcctgaagctgatgtttggagtgctggtgttattctctacatcttattaagtggagtacctcctttctgggctgaaaatgagcaaggaatatttgaacaagtcctgcacggtgatcttgacttcaagtcagacccatggccaagtatttcagaagatgcaaaagacttgatgaggagaatgctcgttcgagatccgagaagacgtttaactgcacatgaagttttatgccatccttgggtacaagttgatggtgtggctcccgataagcctctggattctgcagttctgagtagaatgaagcaattttctgcaatgaacaagctcaagaaaatggctttgagagtcattgctgaaagcctatccgaagaagaaattgctggtcttaaagaaatgttcaagatgatagacacagacaatagcggtcaaataacttttgaggagctcaaagaagggttaaaacgatttggctctaatctgaaggagaccgagatctatgatcttatgcaggcagctgacgttgataacagtggaacaattgattatggtgaatttatagctgcaacattacatatgaacaaaattgaaagacaagatcatctttttgctgctttctgttacttcgataaagatggaagtggctacatcactgcggatgagcttcaacaagcttgtgaagaatttggcattggggatgtccgcatggaagaaatgatcagagaagctgaccaagacaatgacgggcgcattgactacaatgagtttgttgctatgatgcaaaagggaaatccagtgctaggtggtggcaagaaaggtctagagcatagtttcagcattggattcagagaagcagtaaaactatag

SEQ ID NO: 2227 - protein, 578 aa, Solanum tuberosum
MGNTCVGPSISKNGIFQSVSAAMWRSRSPDDTASTTNGESARIETPISVKEPDSPLPVQEPPEQMTMPKSEKKEEEKEQPKKPKKPAEMKRVSSAGLRTDSVLQKKTGNLKEFFSIGKKLGQGQFGTTFKCVEKATGKEYACKSIAKRKLLTDDDVEDVRREVQIMHHLAGHPHVISIKGAYEDAVAVHVVMEFCAGGELFDRIIQRGHYTERKAAELTRTIVGVVEACHSLGVMHRDLKPENFLFVDQKEDSLLKAIDFGLSIFFKPGDRFTDVVGSPYYVAPEVLRKRYGPEADVWSAGVILYILLSGVPPFWAENEQGIFEQVLHGDLDFKSDPWPSISEDAKDLMRRMLVRDPRRRLTAHEVLCHPWVQVDGVAPDKPLDSAVLSRMKQFSAMNKLKKMALRVIAESLSEEEIAGLKEMFKMIDTDNSGQITFEELKEGLKRFGSNLKETEIYDLMQAADVDNSGTIDYGEFIAATLHMNKIERQDHLFAAFCYFDKDGSGYITADELQQACEEFGIGDVRMEEMIREADQDNDGRIDYNEFVAMMQKGNPVLGGGKKGLEHSFSIGFREAVKL

SEQ ID NO: 2228 - DNA, 1737 bp, Nicotiana tabacum
  CDS (1)..(1737)
atggggaacacttgtgtaggaccaagcatttctaaaaatgggatctttcaatcagtttcagcagcaatgtggcgatcccggtcgcccgatgacactgcttccaccactaatggtgaaagtgctagaattgaaacaccaatttctgttaaagaacctgattcacctttgccagttcaagagccaccagaacaaatgacaatgcctaagtcagaaaagaaagaagaagaaaaagaacaaccaaaaaagcccaaaaagcctgctgaaatgaagagggtgtcaagtgctggccttaggacagattctgtgttacaaaagaaaactggaaacttaaaggagtttttcagtataggaaagaaattaggacaaggtcaatttggaactacatttaaatgtgtcgaaaaggcaacagggaaggaatatgcttgcaaatcgattgctaagaggaagttgttaacagatgatgatgtggaagatgttagaagggaagtacagataatgcaccatttggcaggacatcctcatgttatatcgataaaaggtgcttatgaggatgctgtagctgttcatgtagttatggagttttgtgctgggggtgagcttttcgataggattattcaacgggggcactatacagaaagaaaagcagctgagcttactaggactattgttggagttgtagaagcttgtcattctcttggtgtcatgcatcgtgatcttaagcctgaaaattttctctttgttgatcagaaggaggattcacttctcaaagcaattgactttgggttatcgatattcttcaaaccaggcgacagatttactgatgttgttggcagtccatattatgttgcaccagaagttctccgaaaacgttatggtcctgaagctgatgtttggagtgctggtgtaattatctacatcttattaagtggagtacctcctttctgggctgaaaatgagcaaggaatatttgaacaagtcctgcacggtgatcttgacttcacgtcagacccatggccaagtatttcagaagatgcaaaagacttgatgaggagaatgctcgttcgagatccgagaagacgtttaactgcacatgaagttttatgccatccttgggtacaagttgatggtgtggctcccgataagcctctggattctgcagttctgagtagaatgaagcaattttctgcaatgaacaagctcaagaaaatggctttgagagtcattgctgaaagcctatccgaagaagaaattgctggtcttaaagaaatgttcaagatgatagacacagacaatagcggtcaaataacttttgaggagctcaaagatgggttaaaacgatttggctctaatctgaaggagtccgagatctatgatcttatgcaggcagctgacgttgataacagtggaacaattgattatggtgaatttatagctgcaacattacatatgaacaaaattgaaagacaagatcatctttttgctgctttctgttacttcgataaagatggaagtggctacatcactgcggatgagcttcaacaagcttgtgaagaatttggcattggggatgtccgcatggaagaaatgatcagagaagctgaccaagacaatgacgggcgcattgactacaatgagtttgttgctatgatgcaaaagggaaatccagtgctaggtggtggcaagaaaggtctagagcatagtttcagcattggattcagagaagcagtaaaactatag

SEQ ID NO: 2229 - protein, 578 aa, Nicotiana tabacum
MGNTCVGPSISKNGIFQSVSAAMWRSRSPDDTASTTNGESARIETPISVKEPDSPLPVQEPPEQMTMPKSEKKEEEKEQPKKPKKPAEMKRVSSAGLRTDSVLQKKTGNLKEFFSIGKKLGQGQFGTTFKCVEKATGKEYACKSIAKRKLLTDDDVEDVRREVQIMHHLAGHPHVISIKGAYEDAVAVHVVMEFCAGGELFDRIIQRGHYTERKAAELTRTIVGVVEACHSLGVMHRDLKPENFLFVDQKEDSLLKAIDFGLSIFFKPGDRFTDVVGSPYYVAPEVLRKRYGPEADVWSAGVIIYILLSGVPPFWAENEQGIFEQVLHGDLDFTSDPWPSISEDAKDLMRRMLVRDPRRRLTAHEVLCHPWVQVDGVAPDKPLDSAVLSRMKQFSAMNKLKKMALRVIAESLSEEEIAGLKEMFKMIDTDNSGQITFEELKDGLKRFGSNLKESEIYDLMQAADVDNSGTIDYGEFIAATLHMNKIERQDHLFAAFCYFDKDGSGYITADELQQACEEFGIGDVRMEEMIREADQDNDGRIDYNEFVAMMQKGNPVLGGGKKGLEHSFSIGFREAVKL

SEQ ID NO: 2230 - DNA, 1746 bp, Nicotiana tabacum
  CDS (1)..(1746)
atggggaacacttgtgttggaccaagtatttctaaaaatggtctttttcagtcagtttcagctgcaatgtggcgaactcgggcgccagatgattctggttccaccactaatggtgatagtgccagaggtgaaacaacagaatccggaaaagaccctgatttggttgtccaaaataagccaccagaacagataacaatgcctaagtctgagcaaaaggaagaggagccggcgaaaaaggaagagggaccggtaaagcctaagaagccggtagagatgaagagggtaggtagtgcaggccttaggactgattctgtattacagaagaaaactggcaacttaaaggagtttttcagtataggaaagaaattaggacaaggacaattcggaactacgtttaaatgtgtcgaaaaggcaacagggaaggagtacgcttgcaaatcgattgctaagaggaagttgttgacagatgatgatgtggaagatgttagaagggaagttcagataatgcaccacttggcggggcatccaaatgttatatcgataaaaggggcttatgaggatgctgtagctgttcatgtcgttatggaatattgtgctggaggtgagcttttcgataggattattcagcgggggcactatactgaaagaaaagcggctgagctcaccaggactattgttggagttctagaaacttgtcattctctgggcgtcatgcatcgtgatcttaagcctgaaaattttctttttgttaatcagaaggaggattcactactcaaaacaattgactttggattgtcaattttcttcaaaccaggtgacagatttaatgatgttgttggtagtccttactatgttgcaccagaagttctcaaaaaacgctatggtcccgaagctgatgtttggagtgctggtgtgattgtgtacattttattaagtggagtacctcctttctgggctgaaaatgagcaaggaatattcgaagaagtcctacatggtgatctcgacttctcatcagatccatggcctagtatttcagaagatgcaaaagacttagtcaggagaatgcttgttcgagatcccaaaaaacgtttaactgctcatgaagtcttgtgccatcgttgggttcaagttgatggtgtggcaccagataagcctctggattctgcagttctgagtcgaatgaaacaattttctgcaatgaacaagctcaagaaaatggctttgagagtcatcgccgaaagcctatctgaagaagaaattgctggtctgaaagaaatgttcaggatgatagatacagacaatagtggtcaaataacctttgaggagctcaaagttggattaaaaagagttggcgctaatctcaaggagtccgagatctatgatcttatgcaggcagcagatgttgataacagcggcacaattgattatggggaatttatagctgcaacattacattttaacaaaattgaaagagaagatcatctatttgctgctttctcttactttgataaagatggcagtggctacattaccgcagacgagcttcaacaagcttgtgaggaatttggtattggggatgtccatctagaagatatgataagagacgctgatcaggacaatgatggacgaattgattacaatgagttcgttgctatgatgcaaaagggaaacccggtgattggtgggggcaagaaaggtctagaacacagtttcagcaccggatttagagaggctctaagactttag

SEQ ID NO: 2231 - protein, 581 aa, Nicotiana tabacum
MGNTCVGPSISKNGLFQSVSAAMWRTRAPDDSGSTTNGDSARGETTESGKDPDLVVQNKPPEQITMPKSEQKEEEPAKKEEGPVKPKKPVEMKRVGSAGLRTDSVLQKKTGNLKEFFSIGKKLGQGQFGTTFKCVEKATGKEYACKSIAKRKLLTDDDVEDVRREVQIMHHLAGHPNVISIKGAYEDAVAVHVVMEYCAGGELFDRIIQRGHYTERKAAELTRTIVGVLETCHSLGVMHRDLKPENFLFVNQKEDSLLKTIDFGLSIFFKPGDRFNDVVGSPYYVAPEVLKKRYGPEADVWSAGVIVYILLSGVPPFWAENEQGIFEEVLHGDLDFSSDPWPSISEDAKDLVRRMLVRDPKKRLTAHEVLCHRWVQVDGVAPDKPLDSAVLSRMKQFSAMNKLKKMALRVIAESLSEEEIAGLKEMFRMIDTDNSGQITFEELKVGLKRVGANLKESEIYDLMQAADVDNSGTIDYGEFIAATLHFNKIEREDHLFAAFSYFDKDGSGYITADELQQACEEFGIGDVHLEDMIRDADQDNDGRIDYNEFVAMMQKGNPVIGGGKKGLEHSFSTGFREALRL

SEQ ID NO: 2232 - DNA, 1746 bp, Nicotiana benthamiana
  CDS (1)..(1746)
atggggaacacttgtgttgggccaagtatttctaaaattggtctttttcagtcagtttcagctgcaatgtggcgaactcggatgccggacgattctggttccaccactaatggtgatagtgccagaggtgaaacagcagaatctagtaaagatcctaatttggttgtcccaagtaagccaccagaacagataacaatgcctaagtctgatcaaaaggaagaggaaccagcgaaaaaggaagagggaccggaaaagccgaagaaaccagtacagatgaagagggtaggtagtgcaggccttaggactgattctgtattacagaagaaaactggtaacttaaaggagtttttcagtataggaaagaaattaggacaaggacaatttggaacaacatttaaatgtgtcgaaaaggcaacagggaaggagtacgcttgcaaatcgattgctaagaggaagttgttaacagatgatgatgtggaagatgttagaagggaaattcagataatgcaccacttggcggggcatccgaatgttatatcgataaaaggggcttacgaggatgctgtagccgttcatgtcgttatggaatattgtgctggaggtgagcttttcgataggattattcagcgcgggcactatacagaaagaaaagcagctgagctcaccaggactattgttggagttctagaagcttgtcattctctgggcgtaatgcatcgtgatcttaagcctgaaaattttctttttgtcaatcagaaggaggattcattactcaaaacaattgactttggattgtcaattttcttcaaaccaggtgacagatttaatgatgttgttggcagtccttactatgttgcaccagaagttctcaaaaaacgctatggtcccgaagctgatgtttggagtgctggtgtgattgtgtacattttattaagtggagtacctcctctctgggctgaaaatgagcaaggaatattcgaagaagtcctacatggtgatcttgacttctcatcagatccatggccaagtatttcagaagatgcaaaagacttggtcaggagaatgcttgttcgagatcccaaaaaacgtttaactgctcatgaagtcttgtgccatcgttgggttcaagttgatggtgtggcaccagataagcctctggattctgcagttccgagtcgaatggaacaattttctgcaatgaacaagctcaagaaaatggctttgagagtcatcgctgaaagcctatctgaagaagaaattgctggtctgaaagaaatgttcaggatgatagatactgacaatagtggtcaaataacctttgaggagcttaaagttggattaaaaagagttggcgctaatctcaaggaatctgagatctatgatcttatgcaggcagcagatgttgataacagcggcacaattgattatggggaatttatagctgcaacattacattttaacaaaattgaaagagaagatcatctatttgctgctttctcttactttgataaagattgcagtggctacattactgcagacgagcttcaacaagcttgtgaggaatttggcattggggacgtccacctggaagatatgataagagacgccgatcaggacaatgatggacgaattgattacaatgagttcgtcgctatgatgcaaaaggggaatccggtgatcggtggtggcaagaaaggtctagaacacagtttcagcaccggatttagagaggctctaagactttag

SEQ ID NO: 2233 - protein, 581 aa, Nicotiana benthamiana
MGNTCVGPSISKIGLFQSVSAAMWRTRMPDDSGSTTNGDSARGETAESSKDPNLVVPSKPPEQITMPKSDQKEEEPAKKEEGPEKPKKPVQMKRVGSAGLRTDSVLQKKTGNLKEFFSIGKKLGQGQFGTTFKCVEKATGKEYACKSIAKRKLLTDDDVEDVRREIQIMHHLAGHPNVISIKGAYEDAVAVHVVMEYCAGGELFDRIIQRGHYTERKAAELTRTIVGVLEACHSLGVMHRDLKPENFLFVNQKEDSLLKTIDFGLSIFFKPGDRFNDVVGSPYYVAPEVLKKRYGPEADVWSAGVIVYILLSGVPPLWAENEQGIFEEVLHGDLDFSSDPWPSISEDAKDLVRRMLVRDPKKRLTAHEVLCHRWVQVDGVAPDKPLDSAVPSRMEQFSAMNKLKKMALRVIAESLSEEEIAGLKEMFRMIDTDNSGQITFEELKVGLKRVGANLKESEIYDLMQAADVDNSGTIDYGEFIAATLHFNKIEREDHLFAAFSYFDKDCSGYITADELQQACEEFGIGDVHLEDMIRDADQDNDGRIDYNEFVAMMQKGNPVIGGGKKGLEHSFSTGFREALRL

SEQ ID NO: 2234 - DNA, 1590 bp, Arabidopsis thaliana
  CDS (1)..(1590)
atgggccacagacacagcaagtccaaatcctccgatccgccaccgtcctcctcctcctcttcctccggcaacgtagtccaccatgttaaacctgccggagaacgccgcggatcatccggttccggaaccgtcggatcgtcaggctccggaacaggcggatctcgttccaccacatctactcagcagaatggtcggatcttaggtcggccgatggaggaagtacggagaacctatgagtttggtcgtgagcttggtcgtggccagtttggtgtcacgtacctcgtaactcacaaagagacgaaacaacaggtcgcttgcaagtcaatccctacgcgccgccttgttcacaaagacgacattgaagatgttcgccgtgaagtccagattatgcaccatctcagcggtcaccggaacatagtggacttgaagggagcctacgaggacagacactctgtgaatctgataatggagttgtgtgaaggaggggaattgttcgataggatcatttctaaaggtctttactcagagagagctgctgcggatttgtgtaggcagatggtgatggttgtgcatagttgtcattctatgggtgtaatgcaccgagacttgaagcccgaaaactttctctttcttagtaaagatgagaactcaccattgaaagctacagactttggtctctctgtcttcttcaagccaggtgataagtttaaggatcttgttggaagtgcatactatgttgccccagaagttctaaaacggaactatggaccagaggctgatatctggagtgctggtgtgattctatacatccttctcagtggtgttccgcctttctggggagaaaatgaaacggggatctttgatgccattcttcaagggcaacttgatttttcagctgatccatggccagcactatcagatggtgccaaagatcttgtgagggaaatgttaaaatatgaccctaaagatcggcttacagctgcggaagtgctaaatcatccgtggattagagaagatggggaggcatcagacaaaccgcttgacaatgcggtgttatccaggatgaaacaattccgggcgatgaacaaactaaaaaaaatggccctgaaggttatcgctgagaacctttctgaagaagaaatcattggtcttaaagagatgttcaaatctctagacactgataacaatggaatagtcaccttggaggaattgagaaccggtctcccaaaacttggttcaaagatctctgaagctgaaataaggcagttaatggaagcagctgatatggatggagatggatcaattgattacttggagtttatatcagccacaatgcatatgaacagaatcgaacgtgaggatcacttgtacaccgcattccagttctttgacaatgacaacagcggctacataacaatggaagagctagagctagccatgaagaaatacaacatgggtgatgataaatccatcaaagagatcattgctgaagtagacaccgatcgtgacggaaaaatcaactacgaagaatttgtagcgatgatgaagaagggaaatccagaattggtgccaaaccgacgcagaatgtga

SEQ ID NO: 2235 - protein, 529 aa, Arabidopsis thaliana
MGHRHSKSKSSDPPPSSSSSSSGNVVHHVKPAGERRGSSGSGTVGSSGSGTGGSRSTTSTQQNGRILGRPMEEVRRTYEFGRELGRGQFGVTYLVTHKETKQQVACKSIPTRRLVHKDDIEDVRREVQIMHHLSGHRNIVDLKGAYEDRHSVNLIMELCEGGELFDRIISKGLYSERAAADLCRQMVMVVHSCHSMGVMHRDLKPENFLFLSKDENSPLKATDFGLSVFFKPGDKFKDLVGSAYYVAPEVLKRNYGPEADIWSAGVILYILLSGVPPFWGENETGIFDAILQGQLDFSADPWPALSDGAKDLVREMLKYDPKDRLTAAEVLNHPWIREDGEASDKPLDNAVLSRMKQFRAMNKLKKMALKVIAENLSEEEIIGLKEMFKSLDTDNNGIVTLEELRTGLPKLGSKISEAEIRQLMEAADMDGDGSIDYLEFISATMHMNRIEREDHLYTAFQFFDNDNSGYITMEELELAMKKYNMGDDKSIKEIIAEVDTDRDGKINYEEFVAMMKKGNPELVPNRRRM

SEQ ID NO: 2236 - DNA, 1548 bp, Solanum tuberosum
  CDS (1)..(1548)
atgggtatttgtgctagtaaaggtaaacccaataatgctaataatgggcaccatggatcaggatcaggaggagttccaactcatagaaatgaaattcagtatacaaaatctccagggcctgaagctcaattgcatgtgagacctccaccaagcccaaaaccagctgtaaggtatgatacaattcttggtaagccatatgaagatgttaagttgcactatactcttggtaaagaattgggtaggggtcaatttggtgttacatatctttgtactgaaattgtaactggtcaacaatatgcttgtaaatcgatatcgaaaaagaagcttgttactaaggctgataaggatgatatgaggagggagattaagattatgcagcatttgagtggacaacctaatattgttgaatttaaaggtgcttatgaggataaaggttcagtgtatcttgtgatggagttgtgtggagggggagagctattcgatcgaattatagcaaaagggcattacagtgaaagagctgctgcaacaatgtgtagggctattgtcaatgttgtgcacgtttgcaattttatgggcgtgttgcatcgtgatctcaagcctgaaaactttttgttgtctgataagagtgaaaatgctgcactaaagattactgattttgggctgtcagtattcattcaagaaggtaagtcgtacaaggatatagttgggagtgcttactatgttgcccctgaggttttaaggaggtgttatggcaaggagatagatatttggagtgcaggtgttatgctttatatactactcagtggtgtgcctccgttttgggcagaaaccgaaaagggtatatttgatgccatacttaaagggaccattgactttgaaagcaagccttggccgtctgtatcaagtagtgccaaggacctagtacagaagatgctgactaaagatccaaagaaacggattacagctgcacaagttcttgagcatccttggctgaaagaaggtggtgttgcatcagacaaaccattagagggtgctgtcctgtcaagaatgaagcaattcagagctatgaacaaactcaagaaactcgctttgaaggtcattgccgagaatctctctgccgaagaaattcacgggctcaaagcaatgttccacaatattgatactgataatagtggcactatcacttacgaagaactgaagagtggattggctaaacttgggtcaaagctcactgaggctgaagtcaagcaattgatggaagctgctgatgtagatggaaatggctcaatcgactacactgaattcatcaccgccaccatgcataagcacaggctagaaagagacgaaaatctatatactgcatttcagtatttcgataaagatggcagtgggttcattacaagagatgaactcgaggcagctatgcaagaacatggaataggcgatccatcctgtataagggaaatcatatctgaagtggacacagacaatgatggaagaatcaattatgaggaattctgtacaatgatgagaagtggagccaaataa

SEQ ID NO: 2237 - protein, 515 aa, Solanum tuberosum
MGICASKGKPNNANNGHHGSGSGGVPTHRNEIQYTKSPGPEAQLHVRPPPSPKPAVRYDTILGKPYEDVKLHYTLGKELGRGQFGVTYLCTEIVTGQQYACKSISKKKLVTKADKDDMRREIKIMQHLSGQPNIVEFKGAYEDKGSVYLVMELCGGGELFDRIIAKGHYSERAAATMCRAIVNVVHVCNFMGVLHRDLKPENFLLSDKSENAALKITDFGLSVFIQEGKSYKDIVGSAYYVAPEVLRRCYGKEIDIWSAGVMLYILLSGVPPFWAETEKGIFDAILKGTIDFESKPWPSVSSSAKDLVQKMLTKDPKKRITAAQVLEHPWLKEGGVASDKPLEGAVLSRMKQFRAMNKLKKLALKVIAENLSAEEIHGLKAMFHNIDTDNSGTITYEELKSGLAKLGSKLTEAEVKQLMEAADVDGNGSIDYTEFITATMHKHRLERDENLYTAFQYFDKDGSGFITRDELEAAMQEHGIGDPSCIREIISEVDTDNDGRINYEEFCTMMRSGAK

SEQ ID NO: 2238 - DNA, 1596 bp, Arabidopsis thaliana
  CDS (1)..(1596)
atgggttgcttcagcagtaaacaccggaaaactcaaaacgacggcggagaaaaatcaatcccgatcaatccagttcaaacccatgtagtccccgagcatcgtaaacctcaaaccccaacaccaaaacccatgactcaaccaatccatcagcagatttcaacaccgtcttcaaatccagtctcagttcgagatccagatacgattttaggtaaaccattcgaagacatcaggaaattttacagcttggggaaagaattaggtcgaggtcaatttgggattacgtatatgtgtaaagagattggtactggtaacacttatgcttgcaaatcgattcttaagaggaagctaattagtaagcaagataaagaagatgtgaagagagagattcagataatgcagtatttgtctggacaacctaacattgttgagatcaaaggtgcttatgaagatagacaatctatacatttggttatggagttgtgtgctggtggtgagttgtttgataggattatagctcaaggtcattactctgagagagctgctgctggtatcattaggtctattgtcaatgttgttcagatttgtcattttatgggtgtggttcatcgagatctcaagcctgagaatttcttgctttcgagtaaagaggagaatgctatgcttaaagctactgatttcggtttgtccgtcttcatcgaagaaggaaaagtttaccgggatatagttgggagtgcttactacgttgctccagaagtattaaggcgaagttacggaaaagaaatcgacatttggagtgcaggtgtcattttatacatcctactcagcggtgtacctcctttttgggccgaaaatgagaaaggaatattcgatgaggtcataaaaggcgaaattgattttgtaagtgagccatggccttctatatctgaaagcgcgaaagatcttgttaggaagatgctaaccaaagacccgaagagacgaatcacggctgcacaggttcttgaacatccttggatcaaagggggagaagcaccagacaagcctattgatagcgctgtgttatcccgcatgaagcaattccgagcaatgaacaagcttaagaagctagctctaaaggttatcgcggagagtctatcagaagaggagattaaaggtcttaaaaccatgtttgcgaatatagataccgacaaaagcgggacaatcacttatgaagaactcaaaactgggctaactagacttgggtctagactctcggaaactgaagttaagcaactcatggaagccgctgacgtcgatggtaatggaacaatcgactactacgagtttatctctgcgacaatgcatagatacaaattagatcgagatgagcatgtatacaaagcattccaacactttgataaagacagcagcgggcacataactagagatgagttggaaagtgccatgaaggaatatggaatgggagatgaagctagcatcaaagaagttatatccgaagttgataccgacaatgatggaagaataaactttgaagaattttgcgcgatgatgagaagtggcagcacgcagccacaggggaaactgcttccattccattga

SEQ ID NO: 2239 - protein, 531 aa, Arabidopsis thaliana
MGCFSSKHRKTQNDGGEKSIPINPVQTHVVPEHRKPQTPTPKPMTQPIHQQISTPSSNPVSVRDPDTILGKPFEDIRKFYSLGKELGRGQFGITYMCKEIGTGNTYACKSILKRKLISKQDKEDVKREIQIMQYLSGQPNIVEIKGAYEDRQSIHLVMELCAGGELFDRIIAQGHYSERAAAGIIRSIVNVVQICHFMGVVHRDLKPENFLLSSKEENAMLKATDFGLSVFIEEGKVYRDIVGSAYYVAPEVLRRSYGKEIDIWSAGVILYILLSGVPPFWAENEKGIFDEVIKGEIDFVSEPWPSISESAKDLVRKMLTKDPKRRITAAQVLEHPWIKGGEAPDKPIDSAVLSRMKQFRAMNKLKKLALKVIAESLSEEEIKGLKTMFANIDTDKSGTITYEELKTGLTRLGSRLSETEVKQLMEAADVDGNGTIDYYEFISATMHRYKLDRDEHVYKAFQHFDKDSSGHITRDELESAMKEYGMGDEASIKEVISEVDTDNDGRINFEEFCAMMRSGSTQPQGKLLPFH

SEQ ID NO: 2240 - DNA, 1794 bp, Oryza sativa
  CDS (1)..(1794)
atgggtctctgccatggcaagtcggcggcggtgctggagccaacggtggaggaggaggaggagggggcgacgcgcgtagccgaggccgcggcggcgccggcgaagccagcgtcgcctgcgccttcggcggcggcggcggcggcgaagcccgggacgccgaagcagcacaagttcccgttctacctgccgagcccgctcccggcgtcgagctacaagggctcgccggcgaactcgagcgtggcgtcgacgcccgcgcgcggcgggttcaagcggccgttcccgccgccgtcgccggcgaagcacatccgcgcgctcctggcgcggcgccacggctcggtgaagccgaacgaggcgtccatcccggagtccggcgagcccggcgtggcgctggacaagggcttcggcttctccaggcacttcgccgccaagtacgagctcggccgcgaggttggccgcggccacttcggctacacctgcgccgccacctgcaagaagggcgagctcaagggcgacgacgtcgcggtcaaggtcatccccaaggccaagatgactactgctattgccattgaagatgtcaggagagaagtcagaatattgagttctttggcagggcacagcaacttagtgcagttttatgatgcttatgaggatgaagaaaatgtatatatagttatggagttatgcaaaggaggtgaactgctggacaggattttggctagaggtggaaaatattctgaggaagatgcaaaggttgttatgcgccaaatcctaagtgttgcttcattttgtcatcttcagggtgttgttcatcgggatctgaaaccagagaatttccttttctcgtcaaaggatgagaactctgccatgaaggtcatagacttcggtttgtctgactttgtaaagccagatgagaggcttaatgacattgtcggaagtgcatattatgttgctcctgaagtgctccatcgatcttatggcactgaggcagatatgtggagcattggagtaatagtgtatattttgctttgtggcagccgtcctttctgggcacgtactgagtcaggaatattccgagctgtgctgaaagcagaccctagttttgaggaagccccatggccaaccctctctgctgaagcaaaagactttgtaaggaggctgctcaataaagattaccgcaagaggatgactgctgcacaagccctctgtcatccatggattcgtggtactgaagaagtgaagcttcctttggacatgataatttataggcttatgagggcttacataagttcatcttctttacggagagctgcattgagggcccttgccaagacattgacaacagatcaaatctattacctaagagaacagtttgaattgataggcccaaacaagagcgatcttattactttgcaaaatttgaagacggccttgatgaagaactccacaaatgcaatgaaggattctagggtggttgactttgttaacacaatatccaatattcagtacagaaagttggattttgaggagttttctgctgctgccatcagtgtttaccagatggaaggtttggaaacctgggaacaacatgcccggcaagcgtacgagttctttgataaggagggtaaccgaccaattgtgatcgacgagctcgcatcgggacttggattgggtccttcggttcccctacatgttgttctccaagattggatcagacatcctgatggaaaactcagcttccttgggttcatgaaactattgcatggagtttcttcgcgtaccatcccaaaaacctga

SEQ ID NO: 2241 - protein, 597 aa, Oryza sativa
MGLCHGKSAAVLEPTVEEEEEGATRVAEAAAAPAKPASPAPSAAAAAAKPGTPKQHKFPFYLPSPLPASSYKGSPANSSVASTPARGGFKRPFPPPSPAKHIRALLARRHGSVKPNEASIPESGEPGVALDKGFGFSRHFAAKYELGREVGRGHFGYTCAATCKKGELKGDDVAVKVIPKAKMTTAIAIEDVRREVRILSSLAGHSNLVQFYDAYEDEENVYIVMELCKGGELLDRILARGGKYSEEDAKVVMRQILSVASFCHLQGVVHRDLKPENFLFSSKDENSAMKVIDFGLSDFVKPDERLNDIVGSAYYVAPEVLHRSYGTEADMWSIGVIVYILLCGSRPFWARTESGIFRAVLKADPSFEEAPWPTLSAEAKDFVRRLLNKDYRKRMTAAQALCHPWIRGTEEVKLPLDMIIYRLMRAYISSSSLRRAALRALAKTLTTDQIYYLREQFELIGPNKSDLITLQNLKTALMKNSTNAMKDSRVVDFVNTISNIQYRKLDFEEFSAAAISVYQMEGLETWEQHARQAYEFFDKEGNRPIVIDELASGLGLGPSVPLHVVLQDWIRHPDGKLSFLGFMKLLHGVSSRTIPKT

SEQ ID NO: 2242 - DNA, 1566 bp, Solanum lycopersicum
  CDS (1)..(1566)
atgggtatttgtgctagtaaaggtaaacctaataatgctaataatgggcaccatggatcaggatcaggaggagttccaattcatagaaatgagattcagtataccaaatctccagggcctgaagctcaattacatgtgagacctccaccaagcccaaaaccagctgtgaggtatgatactattcttggtaagccatatgaagatgttaagttgcactatactcttggtaaagaattgggtaggggtcaatttggtgttacatatctttgtactgaaattgcaactggtcaacaatatgcttgtaaatcgatatcgaaaaagaagcttgttactaaggctgataaggatgatatgaggagggagattaagattatgcagcatttgagtggacaacctaatattgttgaatttaaaggtgcttatgaggataaaggttcagtgtatcttgtgatggagttgtgtggagggggagagctattcgataggattatagcaaaggggcattacagtgaaagagctgctgcaacaatgtgtagggctattgtcaatgttgtgcacgtttgccattttatgggcgtgttgcatcgtgatctcaagcctgaaaactttttgttgtctgataagagtgaaaatgctgctctaaagattactgattttgggctgtcggtattcattcaagaaggtaagtcgtacaaagatatagttgggagtgcttactatgttgcccctgaggttctaaggaggtgttatggcaaggaaatagacatttggagtgcaggtgttatgctttatatactactcagtggtgtgcctccattttgggcagaaaccgagaagggtatatttgatgccatacttaaagggaccattgactttgaaagcaagccttggccatctgtatcaagtagtgccaaggaccttgtacagaagatgctgactaaagatccaaagaaacggattacagctgcacaggttcttgagcatccttggctgaaggaaggtggtgttgcatcagacaaaccattagatggtgctgtcctatcaagaatgaagcaattcagagctatgaacaaactcaagaaactcgctttgaaggtcattgccgagaatctctctgcggaagaaattcacgggctcaaagcaatgttccacaatattgacactgataatagtggcactataacttatgaagaactgaagagtggattggctaaacttgggtcaaagctcaccgaggctgaagtcaagcaattgatggaagctgctgatgtagatggaaatggctcaatcgactacactgaattcatcaccgccaccatgcataagcacaggctagaaagagacgaaaatctatatactgcatttcagtatttcgataaagatagcagtgggttcattacaagagatgaactcgaggctgctatggaagaacatggaataggtgatccatcctgtattagggaaatcatatctgaagtggacacagacaatgatggaagaatcaattatgaggaattctgtacaatgatgagaagtggagccaaacaaccaggcaaggtcttctag

SEQ ID NO: 2243 - protein, 521 aa, Solanum lycopersicum
MGICASKGKPNNANNGHHGSGSGGVPIHRNEIQYTKSPGPEAQLHVRPPPSPKPAVRYDTILGKPYEDVKLHYTLGKELGRGQFGVTYLCTEIATGQQYACKSISKKKLVTKADKDDMRREIKIMQHLSGQPNIVEFKGAYEDKGSVYLVMELCGGGELFDRIIAKGHYSERAAATMCRAIVNVVHVCHFMGVLHRDLKPENFLLSDKSENAALKITDFGLSVFIQEGKSYKDIVGSAYYVAPEVLRRCYGKEIDIWSAGVMLYILLSGVPPFWAETEKGIFDAILKGTIDFESKPWPSVSSSAKDLVQKMLTKDPKKRITAAQVLEHPWLKEGGVASDKPLDGAVLSRMKQFRAMNKLKKLALKVIAENLSAEEIHGLKAMFHNIDTDNSGTITYEELKSGLAKLGSKLTEAEVKQLMEAADVDGNGSIDYTEFITATMHKHRLERDENLYTAFQYFDKDSSGFITRDELEAAMEEHGIGDPSCIREIISEVDTDNDGRINYEEFCTMMRSGAKQPGKVF

SEQ ID NO: 2244 - DNA, 1512 bp, Arabidopsis thaliana
  CDS (1)..(1512)
atgggaaactgttgcagatctcccgcagcagttgctagagaagacgtgaaatccaactattccggccacgatcacgcccgcaaagacgccgccggcggtaaaaaatcggcgccgattcgagttctaagcgatgttcccaaggaaaacatcgaggaccgttacttactcgacagagaactcggccgcggcgagtttggtgtcacttacctctgtatcgagaggtcctcgcgtgacctactcgcttgcaaatcgatctccaagaggaagcttagaactgctgtggatattgaagatgttaaaagagaagtagcgattatgaagcatttgcctaagagttcgagtattgttactttgaaagaagcttgtgaggatgataatgctgtgcatttggttatggagctttgtgaaggtggcgagcttttcgatcggattgttgcgagaggtcattatacggagcgtgctgctgctggtgttactaagactattgttgaggttgtgcagctttgtcataagcatggtgtgattcatagagatttgaagcccgagaactttttgtttgctaataagaaggagaactcgcctttgaaagctattgattttggattgtcgattttcttcaagccaggtgagaaattctctgagattgttgggagtccatattacatggcacctgaggtgcttaagcggaattatggacccgaaatagatatttggagtgctggagtgattctttatattctcttgtgtggagttcctccgttctgggcagagtcagaacagggagttgctcaggctattctgcgtggagtaattgattttaagagggaaccgtggccaaacatttctgagaccgctaagaatctagtcagacaaatgttagagcctgatccaaagcgtcggctgactgcaaagcaagtgcttgagcacccatggattcagaacgcaaagaaagctcccaatgttcctcttggagatgttgtgaagtcgaggttgaagcaattttcagtgatgaaccgattcaagagaaaagctttaagggttattgccgaatttttatctacggaagaagtagaagacatcaaagtaatgttcaacaagatggatactgataatgatggtatagtttccattgaggagttgaaagccggacttcgtgattttagtacacagctagcggaatcagaagttcagatgcttattgaagcggtggatactaaaggaaaaggaactctagactatggagaatttgtagcagtgtctctccacctgcaaaaggagctttgtgacgccttaaaggaagatggaggagatgactgtgtggatgtcgccaatgatatattccaagaagttgacacagacaaggatgggagaataagctacgaagagtttgcggcaatgatgaaaacaggaacggattggagaaaggcgtctcgtcattactcaagagggagattcaatagcctaagcatcaagctaatgaaggacgggtctttgaacctaggcaacgaatag

SEQ ID NO: 2245 - protein, 503 aa, Arabidopsis thaliana
MGNCCRSPAAVAREDVKSNYSGHDHARKDAAGGKKSAPIRVLSDVPKENIEDRYLLDRELGRGEFGVTYLCIERSSRDLLACKSISKRKLRTAVDIEDVKREVAIMKHLPKSSSIVTLKEACEDDNAVHLVMELCEGGELFDRIVARGHYTERAAAGVTKTIVEVVQLCHKHGVIHRDLKPENFLFANKKENSPLKAIDFGLSIFFKPGEKFSEIVGSPYYMAPEVLKRNYGPEIDIWSAGVILYILLCGVPPFWAESEQGVAQAILRGVIDFKREPWPNISETAKNLVRQMLEPDPKRRLTAKQVLEHPWIQNAKKAPNVPLGDVVKSRLKQFSVMNRFKRKALRVIAEFLSTEEVEDIKVMFNKMDTDNDGIVSIEELKAGLRDFSTQLAESEVQMLIEAVDTKGKGTLDYGEFVAVSLHLQKELCDALKEDGGDDCVDVANDIFQEVDTDKDGRISYEEFAAMMKTGTDWRKASRHYSRGRFNSLSIKLMKDGSLNLGNE

SEQ ID NO: 2246 - DNA, 1545 bp, Ipomoea batatas
  CDS (1)..(1545)
atgggtaaccgtacaagcagacataagcatggtgaaaagcacagatcagaagctggaagccatcagactcacattgagtacacaaagtcacctgggcagggagctggactgcctgtacggccaccatcaatcccaaaatcagtttcaaagtcagatgcaattctgggtaaggcatatgaggatgttagggcacattacagtctggggaaagaactgggtaggggtcaatttggggttacctatttgtgtactgagattagaactggaaagcagtatgcctgcaagtcaatttccaagaaaaagcttgtgactaagggggataaggatgatatgaggagggaggttcagattatgcagcacttgagtgggcagcctaatattgttgagttcaagggggcttatgaggatgctaattctgtgtatcttgtgatggagttgtgtgctggtggagagcttttcgatcggattattgctaaggggcactatagcgaaagggctgctgcctctctttgcaggtctatagtgaatgttgttcatacttgccattttatgggcgtgatgcaccgcgatttgaagcccgagaatttcttgttgtctgataaaactgaaaatgctgccttgaaggctactgattttggcttatcagtgttcattgaagaaggaagggtgtataaggatttagtcgggagtgcttactatgttgctcccgaggtcttggggagaaagtatgggaaggaagcggatgtttggagtgcaggtgttatgttgtatattttactcagtggtgtgcctcccttctgggctgaaactgagcgggggatctttaatgctatacttaaaggagaactcgacttccaaacgaaaccttggccttctatatcgagcattgccaaggacctagtacgagggatgctagccccagacccgaagagacgccttactgctgcccaggttcttgagcatccatggatgcgagaagatggagaagcatctgacagaccactagatagcgctgttctctcaagaatgaagcaattcagagcaatgaacaaactcaagaaacttgccctgaagtttattgcagaaaatctctcagaagaagaaattcatggactgaaagcaatgttcacgaatatcgacactgacaacagtggtacaattacatacgaagaactgaagaagggattggcccaactcggggcaaatctcacagaggctgaagttaagcagttgatggaagctgctgatgtagatggaaatggctcgatagactacatcgaattcatcactgctacaatgcacaagcacaggctagaaagagaagaaaatctatacaaagcatttcagtattttgataaagatagcagtggatttatcacgagagatgaactagagactgctatgaaggaacacggaatagctgatgcagcaactataaaggaaataatatctgaagtcgatgcagatcatgatggaagaatcaactatgaagagttttgcacaatgatgagatcaggaaccaaacagcaagccaagctgttctaa

SEQ ID NO: 2247 - protein, 514 aa, Ipomoea batatas
MGNRTSRHKHGEKHRSEAGSHQTHIEYTKSPGQGAGLPVRPPSIPKSVSKSDAILGKAYEDVRAHYSLGKELGRGQFGVTYLCTEIRTGKQYACKSISKKKLVTKGDKDDMRREVQIMQHLSGQPNIVEFKGAYEDANSVYLVMELCAGGELFDRIIAKGHYSERAAASLCRSIVNVVHTCHFMGVMHRDLKPENFLLSDKTENAALKATDFGLSVFIEEGRVYKDLVGSAYYVAPEVLGRKYGKEADVWSAGVMLYILLSGVPPFWAETERGIFNAILKGELDFQTKPWPSISSIAKDLVRGMLAPDPKRRLTAAQVLEHPWMREDGEASDRPLDSAVLSRMKQFRAMNKLKKLALKFIAENLSEEEIHGLKAMFTNIDTDNSGTITYEELKKGLAQLGANLTEAEVKQLMEAADVDGNGSIDYIEFITATMHKHRLEREENLYKAFQYFDKDSSGFITRDELETAMKEHGIADAATIKEIISEVDADHDGRINYEEFCTMMRSGTKQQAKLF

SEQ ID NO: 2248 - DNA, 1629 bp, Medicago sativa
  CDS (1)..(1629)
atggggtgtttgttaagtaaagacaaagattcagaacaagaacacaacaatggtggttatagatatgctgaatcttctggtatgcacaatcataggaacaatcatgaacaagtcaacacatcaagaacagcaccaacaagttcttatcaacctcaaataccaaccaagccttcatcaatttctgctccaagtccaaaacctcttatcaagcaagacacaaacacaatcctaggaaaaggtttggaagatgtgaaacaattctacacactaggtaaagaattaggtagaggccaattcggagtaacgtttctatgcaccgagaattcaactggattgctttatgcttgcaagtcaatttccaagaggaaacttgtgagtaaatctgatagggaagatataaagagagagattcagatcatgcaacatttgagtggtcaaccaaatattgttgaatttaaaggagcttatgaagataggaattcagttcatgttgttatggaactttgtgctggtggtgaactttttgataggatcattgctaaaggacattatagtgaaaaagctgctgcttctatttgtagacagattgttaatgttgtgaatatttgtcattttatgggagttatgcatagggatctcaagccagagaatttcttgttggctagtaaagatgaaaatgcacttcttaaggccactgattttggtttgtctgttttcattgaagaaggaagggtgtatcgcgatatagttggaagtgcttattatgtggctccagaagttcttcgtccgagatgcggaaaggaaatagatatatggagtgcaggagttatactatatatcttacttagcggtgtacctccattttgggctgagactgaaaagggaatatttgatgcaatattggaaggtcatattgattttgaaagtgaaccatggcctaaaatttcagacagcgccaaggatcttgttcgtaaaatgcttatacaggaaccgaagaaacgcattactgctgcacaggttctagagcacccttggattaaaggtggaaatgcttctgataagcctatagacagtgcagttctttctagaatgaagcaattcagagctatgaataaactaaagaaacttgcattgaaggtcattgctgagaatatgtctgaagaagaaatccgaggtttgaaggcgatgtttacaaatatggacacagacaatagtggtacaatcacctatgaagaactaaaagcaggattgcaaagacttggctcaaagctttcagaagctgaggttaagcaactcatggaagctgctgatgtagatggaaatggcacaattgattgcattgaattcatcactgctacaatgcatagacacaagttagaaagagatgaccatctttataaggcatttcaatattttgataaagacagcagtgggtttattacaagagatgaactggaaactgcaatgaaagaatatggtatgggagatgatgccacaatcaaggaaattatatctgaagttgatacaattatatctgaagtcgacacagatcatgatggtagaatcaactatgaagaattctgtgcaatgatgagaagtggaaaccaacagcaagttaagctattctaa

SEQ ID NO: 2249 - protein, 542 aa, Medicago sativa
MGCLLSKDKDSEQEHNNGGYRYAESSGMHNHRNNHEQVNTSRTAPTSSYQPQIPTKPSSISAPSPKPLIKQDTNTILGKGLEDVKQFYTLGKELGRGQFGVTFLCTENSTGLLYACKSISKRKLVSKSDREDIKREIQIMQHLSGQPNIVEFKGAYEDRNSVHVVMELCAGGELFDRIIAKGHYSEKAAASICRQIVNVVNICHFMGVMHRDLKPENFLLASKDENALLKATDFGLSVFIEEGRVYRDIVGSAYYVAPEVLRPRCGKEIDIWSAGVILYILLSGVPPFWAETEKGIFDAILEGHIDFESEPWPKISDSAKDLVRKMLIQEPKKRITAAQVLEHPWIKGGNASDKPIDSAVLSRMKQFRAMNKLKKLALKVIAENMSEEEIRGLKAMFTNMDTDNSGTITYEELKAGLQRLGSKLSEAEVKQLMEAADVDGNGTIDCIEFITATMHRHKLERDDHLYKAFQYFDKDSSGFITRDELETAMKEYGMGDDATIKEIISEVDTIISEVDTDHDGRINYEEFCAMMRSGNQQQVKLF

SEQ ID NO: 2250 - DNA, 1545 bp, Cucumis sativus
  CDS (1)..(1545)
atgggccaccccctcgaccactccgacgcccaccaccgacctccctctaacggcgtcatcaaagttctcccacccgattccgacccttctcttccaccgcccctgcccaaacaacttcccacctcctccgccccgcccgcccttggccgcgttctggctcgtcccttttccgacgtccgctccttttactccttccgtggcgaactgggtcgtggccaatttggtgttacttacttagtaacacacaaggaaacgaaacaggattttgcttgtaaatcaatcgctactagaaaattgattgatcaggacgatgttgaagatgttcgtcgtgaggttcagattatgcatcatcttactggccaccctcacattgttgagcttaaagaagtttatgaagaccggcattatgtcaatttgattatggagctttgcgccggcggtgagttgttcgatcggattattgctaaaggccactattctgaatgcaccgcagcctccctttgccgccagattgtgacggtagttcataattgtcactccatgggagttatgcacagagacttgaagcccgagaacttcttgtttctcagtgctgatgagaattcacctctcaaggctacggattttgggctttccgtcttcttcaaaccaggtgatgtttttaaagatctagttggaagtgcatactacgtagctccagaagttcttcgacgaagatatggtcctgaggcggctgtttggagtgctggtgtcatactatacatcctactcagtggagttcctcctttctgggcagagaatgatcaaggtatttttgatgctgttcttcggggacatattgacttctcatcagatccttggccttccatatcaagtggtgccaaagatctgataagaaaactcttgcattctgatcctaaagagcgattatccgccattgaagccctaaatcatccatggatgaaagaagatggggaagcttctgacaagcctcttgatattgctgttttgactagaatgaaacagtttagagcaatgaacaaactcaagaaagtcgctcttaaggtaattgctgaaaatctttctgaagaagagattgtgggactaaaggagatgttcaagtcgatggatactgataatagtggaactatcacttttgaggagttaaaggccggtcttcctaagctgggtacaaagctttctgagtctgaagtgaggcagctgatggaagcggcagatgtggatggaaatgggtcgatcgactacatcgagttcattactgctgctatgcacatgaacagagtagaaagagaggatcacttatttaaagcttttgagtactttgacaaagacaagagcggatatatcacaatggaggagttggagactgcccttaagaagtacaatatgggtgatgaaacaacaataaaggagatcattgcagaagttgacactgataatgacggacgcataaactacgatgaagtcgttgcaatgatgaggaaaggcaatcaggaattgacgacaaccagtcggcaaaaatga

SEQ ID NO: 2251 - protein, 514 aa, Cucumis sativus
MGHPLDHSDAHHRPPSNGVIKVLPPDSDPSLPPPLPKQLPTSSAPPALGRVLARPFSDVRSFYSFRGELGRGQFGVTYLVTHKETKQDFACKSIATRKLIDQDDVEDVRREVQIMHHLTGHPHIVELKEVYEDRHYVNLIMELCAGGELFDRIIAKGHYSECTAASLCRQIVTVVHNCHSMGVMHRDLKPENFLFLSADENSPLKATDFGLSVFFKPGDVFKDLVGSAYYVAPEVLRRRYGPEAAVWSAGVILYILLSGVPPFWAENDQGIFDAVLRGHIDFSSDPWPSISSGAKDLIRKLLHSDPKERLSAIEALNHPWMKEDGEASDKPLDIAVLTRMKQFRAMNKLKKVALKVIAENLSEEEIVGLKEMFKSMDTDNSGTITFEELKAGLPKLGTKLSESEVRQLMEAADVDGNGSIDYIEFITAAMHMNRVEREDHLFKAFEYFDKDKSGYITMEELETALKKYNMGDETTIKEIIAEVDTDNDGRINYDEVVAMMRKGNQELTTTSRQK

SEQ ID NO: 2252 - DNA, 1824 bp, Zea mays
  CDS (1)..(1824)
atggggcagtgctacgggaaggcaggcggcgcgtcgtcgcggcgggcggaccacgacgacgcggtcgcgccgccgtccccgctgccggccaacggcgcgccgacgccgccgcagcagcccgccacgcccgggcgccgcaagtccggatcggccacgccggtgcaccaccaggcggcgacgaccgcctggcccagcccgtaccccgccggcggggccagcccgctccccgccggcgtgtcgccgtcgcccgccaggtccacgccccgcaggttcttcaagcggcccttcccgccgccctcgcccgccaagcacatcaaggccacgctcgccaagcgcctcggcgggggcaagcccaaggagggcaccataccggaggagggcggcgccggcgtggccgccgactccgccgaggccgagcgcccgttggacaagacgttcggcttcgccaacaacttcggggccaagtacgacctcgggaaggaggtcgggaggggacactttggccacacctgctccgccctggtcaagaagggcgagtacaagggccatgccgtagccgtcaagatcatctccaaagctaagatgacgacagccatttccattgaagatgttcgtagggaagtcaggattttgaaagctctatcagggcacaataatctcgtcaaattctatgatgcatgtgaggacgccctcaatgtctacattgtcatggagttatgtgaaggtggagagttgctagatagaattttggctagaggcgggagatatacagaagaagatgccaaagctatcgttgtacagattttgagtgtagtgtccttctgtcatcttcagggagtagttcatcgtgatttgaagccagagaattttcttttcgcaacaagagatgaaagcgctcctatgaagttaattgactttggtctgtcagattttattagaccagatgaaaggctcaatgatattgttgggagcgcatattatgtcgctccagaggttctacacagatcgtacagtatggaagcagacatttggagtataggtgttataacatacattctgctctgtggctgtcggccattttgggcaaggacagaatctgggatctttcggttcgtattaagggctgatcccaactttgacgattcaccatggccttcagtatcggctgaagctaaggattttgtgaagagatttgtgaacaaggattaccgtaaaagaatgactgctgtccaagcactgactcacccttggttacgagatgaacaaaggcaaattcaattggacatactcgttttcagattagttaagcaatatcttcgtgctactcctcttaaacgtttggcattaaaggcactatctaaggctttaagggaggatgaactgttgtatcttagattgcagtttaagctgctcgagcccagagacgggctcgtgtcgctcgacaactttcggacggctctgacgagatacgtaactgacgccatgagagaatcaagggttcttgagtttttgcacgcgttggacccgcttgcgtacagaaagatggacttggaagaattctgtgcggcagcaatcagcccgtaccagctggaggctttggaaagctgggaagaaatcgctggaacagcttttcagcacttcgaacaggagggcaaccgagttatatctgtggaggagttggcgcaggaactaaacctcgccccgactcactactccatcgtgcaagactggatcagaaagtccgacggcaagcttaactttcttgggttcaccaaatttttgcacggtgtcacgatacggggctcaaacacgagacgacactaa

SEQ ID NO: 2253 - protein, 607 aa, Zea mays
MGQCYGKAGGASSRRADHDDAVAPPSPLPANGAPTPPQQPATPGRRKSGSATPVHHQAATTAWPSPYPAGGASPLPAGVSPSPARSTPRRFFKRPFPPPSPAKHIKATLAKRLGGGKPKEGTIPEEGGAGVAADSAEAERPLDKTFGFANNFGAKYDLGKEVGRGHFGHTCSALVKKGEYKGHAVAVKIISKAKMTTAISIEDVRREVRILKALSGHNNLVKFYDACEDALNVYIVMELCEGGELLDRILARGGRYTEEDAKAIVVQILSVVSFCHLQGVVHRDLKPENFLFATRDESAPMKLIDFGLSDFIRPDERLNDIVGSAYYVAPEVLHRSYSMEADIWSIGVITYILLCGCRPFWARTESGIFRFVLRADPNFDDSPWPSVSAEAKDFVKRFVNKDYRKRMTAVQALTHPWLRDEQRQIQLDILVFRLVKQYLRATPLKRLALKALSKALREDELLYLRLQFKLLEPRDGLVSLDNFRTALTRYVTDAMRESRVLEFLHALDPLAYRKMDLEEFCAAAISPYQLEALESWEEIAGTAFQHFEQEGNRVISVEELAQELNLAPTHYSIVQDWIRKSDGKLNFLGFTKFLHGVTIRGSNTRRH

SEQ ID NO: 2254 - DNA, 1647 bp, Marchantia polymorpha
  CDS (1)..(1647)
atgggcaactgcgtgggaggccatagtgatcgtaagaatgcgctcaatcccaacgagcctgcggcgacgaatgtgcaacgcggaacgggtgctcctcaaggttcccacggaggttcaggtgccgctggtgtatccgctcaagcatctcatccagctccgctgggcggcatctctgccaaacaaaagcccacgttgactggcaatgtgctcggcaggccactggaagatgtgcgatccatttacaccctcggacgggaactgggtcgtggtcagtttggtgtcacgcatttgtgtacgcacaaggttacaggtgagcttttagcctgcaagtcaattgcgaagaggaagttgaccaataaggatgacgtagaggatgttcggagggaagtgcagatcatgcaccacttagaggggcagaagaacattgtcgaattgaagggggcctatgaggataaacacaacgtgcatctcgtcatggagctttgtgctggcggagaactcttcgaccgcattattcagcggggccactacagtgagagggctgctgcagctctatgtagaactatagtgcaagtggttcagacgtgccattctctgggagttatgcaccgggatctgaagcccgagaattttctgcttgctaacaagaaggaggatgcacccctgaaggcgacggattttggtctttctgtcttcttcaagcctggagaagtgtttacagatatcgttggaagtgcttactacgtggcaccagaggttttgcgtcgtaactatgggccagaggctgatgtttggagtgccggagtcattctttacattcttttgtgcggagtccctcctttctgggcagaaaccgaacaaggtatttttgatgccgtaatgcacggtcatattgatttcactagtgatccttggccttcaatttctcaaaaggcgaaagatctggtaaagaggatgctcaaacagaacccaaaggagcgattgacggcccatgaagttttaagtcacccatggattagtgttgacggagaggcaccagacaaaccacttgacaacgccgtgttgtctagattgaagcaattcaccgctatgaacaagctcaagaaacttgctctgaaggttatcgcagagagtctctctgaagaagagatcatgggattgaaggagatgtttaagagtatggacacagacaacagtggtacaatcacgttcgaggagttgaaggatggtcttcaaaagcagggatcaaacctggcagagtcagaagtgcggcagctaatggcagctgctgatgttgatggtgatggtactattgattatttggagtttatcacggcaaccatgcatctgaataagatagacaaagaggatcatctgtatgctgccttccaacactttgatggggacaacagtgggttcatcaccatggaagagcttgaacaggctttaattaagcacgggatgggagatcctgatactctgaaagaaattattagggaggttgacactgatcatgatggacgaatcaactacgacgagttcgttgccatgatgcgtaaaggtacccctggacaccaagagggccacaggaggagtataagtaatatggcacctgtaggggccccgaggcaacaccatcacaaatga

SEQ ID NO: 2255 - protein, 548 aa, Marchantia polymorpha
MGNCVGGHSDRKNALNPNEPAATNVQRGTGAPQGSHGGSGAAGVSAQASHPAPLGGISAKQKPTLTGNVLGRPLEDVRSIYTLGRELGRGQFGVTHLCTHKVTGELLACKSIAKRKLTNKDDVEDVRREVQIMHHLEGQKNIVELKGAYEDKHNVHLVMELCAGGELFDRIIQRGHYSERAAAALCRTIVQVVQTCHSLGVMHRDLKPENFLLANKKEDAPLKATDFGLSVFFKPGEVFTDIVGSAYYVAPEVLRRNYGPEADVWSAGVILYILLCGVPPFWAETEQGIFDAVMHGHIDFTSDPWPSISQKAKDLVKRMLKQNPKERLTAHEVLSHPWISVDGEAPDKPLDNAVLSRLKQFTAMNKLKKLALKVIAESLSEEEIMGLKEMFKSMDTDNSGTITFEELKDGLQKQGSNLAESEVRQLMAAADVDGDGTIDYLEFITATMHLNKIDKEDHLYAAFQHFDGDNSGFITMEELEQALIKHGMGDPDTLKEIIREVDTDHDGRINYDEFVAMMRKGTPGHQEGHRRSISNMAPVGAPRQHHHK

SEQ ID NO: 2256 - DNA, 1647 bp, Marchantia polymorpha
  CDS (1)..(1647)
atgggcaactgcgtgggaggccatagtgatcgtaagaatgcgctcaatcccaacgagcctgcggcgacgaatgtgcaacgcggaacgggtgctcctcaaggttcccacggaggttcaggtgccgctggtgtatccgctcaagcatctcatccagctccgctgggcggcatctctgccaaacaaaagcccacgttgactggcaatgtgctcggcaggccactggaagatgtgcgatccatttacaccctcggacgggaactgggtcgtggtcagtttggtgtcacgcatttgtgtacgcacaaggttacaggtgagcttttagcctgcaagtcaattgcgaagaggaagttgaccaataaggatgacgtagaggatgttcggagggaagtgcagatcatgcaccacttagaggggcagaagaacattgtcgaattgaagggggcctatgaggataaacacaacgtgcatctcgtcatggagctttgtgctggcggagaactcttcgaccgcattattcagcggggccactacagtgagagggctgctgcagctctatgtagaactatagtgcaagtggttcagacgtgccattctctgggagttatgcaccgggatctgaagcccgagaattttctgcttgctaacaagaaggaggatgcacccctgaaggcgacggattttggtctttctgtcttcttcaagcctggagaagtgtttacagatatcgttggaagtgcttactacgtggcaccagaggttttgcgtcgtaactatgggccagaggctgatgtttggagtgccggagtcattctttacattcttttgtgcggagtccctcctttctgggcagaaaccgaacaaggtatttttgatgccgtaatgcacggtcatattgatttcactagtgatccttggccttcaatttctcaaaaggcgaaagatctggtaaagaggatgctcaaacagaacccaaaggagcgattgacggcccatgaagttttaagtcacccatggattagtgttgacggagaggcaccagacaaaccacttgacaacgccgtgttgtctagattgaagcaattcaccgctatgaacaagctcaagaaacttgctctgaaggttatcgcagagagtctctctgaagaagagatcatgggattgaaggagatgtttaagagtatggacacagacaacagtggtacaatcacgttcgaggagttgaaggatggtcttcaaaagcagggatcaaacctggcagagtcagaagtgcggcagctaatggcagctgctgatgtggatggaaatggcactattgactacttggagttcataacggcaaccatgcacttgaataagatagagaaggaagatcatctttacgctgcctttcagcattttgatgaggacagcagtgggttcatcaccatggaagagcttgaacaggctttaattaagcacgggatgggagatcctgatactctgaaagaaattattagggaggttgacactgatcatgatggacgaatcaactacgacgagttcgttgccatgatgcgtaaaggtacccctggacaccaagagggccacaggaggagtataagtaatatggcacctgtaggggccccgaggcaacaccatcacaaatga

SEQ ID NO: 2257 - protein, 548 aa, Marchantia polymorpha
MGNCVGGHSDRKNALNPNEPAATNVQRGTGAPQGSHGGSGAAGVSAQASHPAPLGGISAKQKPTLTGNVLGRPLEDVRSIYTLGRELGRGQFGVTHLCTHKVTGELLACKSIAKRKLTNKDDVEDVRREVQIMHHLEGQKNIVELKGAYEDKHNVHLVMELCAGGELFDRIIQRGHYSERAAAALCRTIVQVVQTCHSLGVMHRDLKPENFLLANKKEDAPLKATDFGLSVFFKPGEVFTDIVGSAYYVAPEVLRRNYGPEADVWSAGVILYILLCGVPPFWAETEQGIFDAVMHGHIDFTSDPWPSISQKAKDLVKRMLKQNPKERLTAHEVLSHPWISVDGEAPDKPLDNAVLSRLKQFTAMNKLKKLALKVIAESLSEEEIMGLKEMFKSMDTDNSGTITFEELKDGLQKQGSNLAESEVRQLMAAADVDGNGTIDYLEFITATMHLNKIEKEDHLYAAFQHFDEDSSGFITMEELEQALIKHGMGDPDTLKEIIREVDTDHDGRINYDEFVAMMRKGTPGHQEGHRRSISNMAPVGAPRQHHHK

SEQ ID NO: 2258 - DNA, 1362 bp, Arabidopsis thaliana
  CDS (1)..(1362)
atgatgattctccataaacctccatcttctgaaatcttacattttgacaatctgacttcctcgaacagtaagaacctaaaacaatcaaaaagaaccattcttgagaaaccattcgttgacatcggaaaggtttacatcctcggggatgaattgggtcaaggccaattcggtataactcgaaaatgcgttgagaagacttcaggtaagacttacgcctgcaagaccattctcaagacgaatctaaagagtagagaagatgaagaagccgtgaagagagagattcgtatcatgaagcatttgtctggagaaccgaacattgttgagttcaagaaagcttacgaggacagagattctgtacatattgttatggaatattgtggtggtggagagttattcaaaaagatcgaagctttgtccaaagatggaaagtcttactccgagaaagaagctgttgaaatcattaggccgattgtgaatgttgtcaagaattgtcattacatgggtgtgatgcttcgtgatctaaagcctgagaatttcttgctctccagtaccgataagaatgctacggtcaaagctatcgacttcgggtgttctgttttcattgaagaagaacctgaggcacagatgttctctgagataaagagtgccaaaatcgacgttgacagcgaatcatggaagtttatagatgtgaaggcaaaacatcttgtcaataggatgcttaacagaaaccccaaggaacgaatctctgctgcagaggttcttggacatccttggatgaaagacggagaagcttcagataagcctattgatggcgttgttttatctcgattgaagcaatttcgagatatgaacaagctaaagaaagtagctctaaaggttattgcagcaaatctatcggaagaggaaatcaaaggtcttaaaacactgttcaccaacattgataccgacaaaagtggcacaatcactcttgaagaactcaaaacaggtcttactagacttggatctaacctctctaaaaccgaagtggagcaactcatggaagctgctgatgtggatggtaatggaacaatcgacatagacgagtttatctctgccacgatgcatagatatagattggatagagatgatcatgtgtaccaagcattccaacactttgacaaagacaatgacgggcacataaccaaggaagagttggagatggcaatgaaagagcatggtgtgggagatgaagttagcatcaaacaaatcataaccgaagttgataccgataatgatgggaaaataaactttgaggaattccgcacaatgatgagaagtggcagcagcttgcagccacaaagggagcttcttccgatcaagtga

SEQ ID NO: 2259 - protein, 453 aa, Arabidopsis thaliana
MMILHKPPSSEILHFDNLTSSNSKNLKQSKRTILEKPFVDIGKVYILGDELGQGQFGITRKCVEKTSGKTYACKTILKTNLKSREDEEAVKREIRIMKHLSGEPNIVEFKKAYEDRDSVHIVMEYCGGGELFKKIEALSKDGKSYSEKEAVEIIRPIVNVVKNCHYMGVMLRDLKPENFLLSSTDKNATVKAIDFGCSVFIEEEPEAQMFSEIKSAKIDVDSESWKFIDVKAKHLVNRMLNRNPKERISAAEVLGHPWMKDGEASDKPIDGVVLSRLKQFRDMNKLKKVALKVIAANLSEEEIKGLKTLFTNIDTDKSGTITLEELKTGLTRLGSNLSKTEVEQLMEAADVDGNGTIDIDEFISATMHRYRLDRDDHVYQAFQHFDKDNDGHITKEELEMAMKEHGVGDEVSIKQIITEVDTDNDGKINFEEFRTMMRSGSSLQPQRELLPIK

SEQ ID NO: 2260 - DNA, 1683 bp, Arabidopsis thaliana
  CDS (1)..(1683)
atgggtaattgttgcggaacagcaggatcattggctcaaaacgataacaaacccaaaaaaggaaggaagaagcaaaaccctttctcgattgattacggtcttcaccacggtggtggagatggaggtggaagacctcttaagcttatcgttttgaatgatccaacaggtcgtgagatcgagtctaaatacacgttggggagagagctaggtcgtggagaattcggtgttacgtatctatgtactgataaggagacagacgacgtttttgcttgtaaatcgattttgaagaagaagctgaggacagctgttgatattgaagatgttaggagagaggttgagattatgaggcatatgcctgagcatcctaatgttgttactttgaaggagacttatgaggatgagcatgctgttcatttggttatggagctttgtgaaggtggtgaattgtttgataggattgttgctagagggcattatactgagagagctgctgctgctgtcactaagaccatcatggaagttgttcaggtgtgtcataagcatggggtaatgcacagggacctgaaacctgagaacttcttgtttggaaacaagaaggagactgcacctcttaaggcgattgattttggtctctctgttttctttaaaccaggcgagaggtttaacgaaatcgttggtagtccgtactacatggctcccgaggtgctaaaacggaattatggtccagaagttgatatttggagtgcaggtgtaattctttacatactgctatgtggtgtcccgcctttctgggcagaaactgaacaaggagttgcacaagcaattattcgatctgtactagacttcagaagggacccatggcccaaggtttctgaaaacgcaaaagaccttatcaggaaaatgcttgatcctgaccaaaagcgtcgtcttacagctcaacaagtcctagatcacccgtggttacagaatgcaaagacagcccccaatgtatcattgggtgaaacagtgagggcaaggttgaagcagttcaccgtcatgaacaagctcaagaaacgagcactcagggttattgctgagcatttatcagatgaagaagcttcaggtataagagaagggttccaaataatggacacaagccaaagagggaagattaacatcgacgagcttaaaatcgggttgcagaaacttggtcatgccattccgcaagatgatttacaaattttgatggatgctggagacatcgatagagatggatatttggactgtgacgagtttattgccatatcggtacacctaaggaaaatgggcaatgacgagcatctcaagaaagcgtttgcgttctttgatcaaaacaataacggatatatcgaaatagaggagttaagggaagccttgtctgacgaacttggtacaagtgaagaagttgttgatgccattatccgtgatgttgacaccgacaaggatggaagaataagttacgaagagtttgtaacgatgatgaaaacaggaacagattggagaaaagcttcgagacagtactcgagagaacggtttaacagtatcagtctcaaactgatgcaagatgcgtcgttgcagagttgtgtgtttgatatcctggctaatgagcgagctgagtatggggatcaagagagaaaaaccgtgttggcctttggctgtgtgtag

SEQ ID NO: 2261 - protein, 560 aa, Arabidopsis thaliana
MGNCCGTAGSLAQNDNKPKKGRKKQNPFSIDYGLHHGGGDGGGRPLKLIVLNDPTGREIESKYTLGRELGRGEFGVTYLCTDKETDDVFACKSILKKKLRTAVDIEDVRREVEIMRHMPEHPNVVTLKETYEDEHAVHLVMELCEGGELFDRIVARGHYTERAAAAVTKTIMEVVQVCHKHGVMHRDLKPENFLFGNKKETAPLKAIDFGLSVFFKPGERFNEIVGSPYYMAPEVLKRNYGPEVDIWSAGVILYILLCGVPPFWAETEQGVAQAIIRSVLDFRRDPWPKVSENAKDLIRKMLDPDQKRRLTAQQVLDHPWLQNAKTAPNVSLGETVRARLKQFTVMNKLKKRALRVIAEHLSDEEASGIREGFQIMDTSQRGKINIDELKIGLQKLGHAIPQDDLQILMDAGDIDRDGYLDCDEFIAISVHLRKMGNDEHLKKAFAFFDQNNNGYIEIEELREALSDELGTSEEVVDAIIRDVDTDKDGRISYEEFVTMMKTGTDWRKASRQYSRERFNSISLKLMQDASLQSCVFDILANERAEYGDQERKTVLAFGCV

SEQ ID NO: 2262 - DNA, 1788 bp, Dunaliella tertiolecta
  CDS (1)..(1788)
atggcgagcgtggactgcacgttggtctctgcgaggggcattaaagacgtggagatagttggcaagcagagcccctatgccgtgctgactgtgggccccaagacattcaaaagcgggacggcaaacggaggtggtagcgacccggtttggaaccagactttctcattcacaaacgtcacccccgattcatccgtcaagttggagatattcaactccaacgtagtgctgagggatgtcgctattggtggatgtaaggctcccatggacaaggcgttatcagctggcaaggacgagctcaccctccccatcatcaccaagaaaggcaagccccatggtgaagtcaagctgatactgaccctcaagcccgatgccacaaagcaaatggtgactagccacaagacaaggaaggcagctggggcctggatcctgcccacctacggcaataccgactgctggaaggattatgagcctggcacactccttgggaagggcacctttggcaccacctacctcgcgacagagaagaagacggggcagaagtgcgctgtcaaggtcatctcaaagcgcaagctgaccacaccagatgaggtagatgatgtaaagaaagaggtgcagatcatgcaccacctggctggccaccccaacgtggtcggcttaaaaggagtgtacgaggacaaaagcaatgtctgcttagcaatggaggttgccacaggtggcgagctgtttgactccatcgtcaagcgtggccactacagtgagcgcgatgcggcagagctgatacgtacgattgtgagcgttgttgcgcactgccacaacatgggcgtcatccatagggacctcaagcccgagaacttcctgctgtccgacaagtcccccagagctcagctaaaggcaacggacttcggtctcagctccttcttccaggagggccaagtattcactgacattgtgggttctgcgtattacgttgcccccgaagtcctgcgtcgctcctatggcaaggaagcggacatttggagctgcggcatcatcctgtacatcctgctgtgcgggttccccccattccatggcgacagtgagaagaagattttcgaggccatcatcagcaagtctgtggactttaacacgcagccgtggcccaggatctcagctcctgccaaggactgtgtgaagcgcatgttgcagcgcgacccgaagaagcgtgcgaccgccaacgagatcatgcagcacgactggatgcgtgagaatggtgtggccagtgatgagcctctggagatggaggtcgtgtcgcgcatcaagaacttcagtggcatgaacaagctcaagaaggaggccctcaaggtcatcgctgtaaacctgcccatcgatgaaatctctggtatgcgggagatgttcatggacatcgacaaagacaagagcggcaacatcacgattgacgaatttgcggcggcacttcacaagaagggccagattgtgacggagaaggagattgagaagatcatgaaggaggctgatgtggatggggacggcaccatcgactatgaggagttcctggctgccaccatcaacctgggcaaactgcaacgagaggaaaacctgaagactgcatttgagcactttgatttggacggcaacggtgaaatctcgcataacgagctcgtccagtgtctgtctaagctgggcatcaacgacgcgcacgttaaggatatcatcaaggaggtagatgcagatggcaacggccagatcgactacaacgagttttgcatcatgatgcgcaacctggattaa

SEQ ID NO: 2263 - protein, 595 aa, Dunaliella tertiolecta
MASVDCTLVSARGIKDVEIVGKQSPYAVLTVGPKTFKSGTANGGGSDPVWNQTFSFTNVTPDSSVKLEIFNSNVVLRDVAIGGCKAPMDKALSAGKDELTLPIITKKGKPHGEVKLILTLKPDATKQMVTSHKTRKAAGAWILPTYGNTDCWKDYEPGTLLGKGTFGTTYLATEKKTGQKCAVKVISKRKLTTPDEVDDVKKEVQIMHHLAGHPNVVGLKGVYEDKSNVCLAMEVATGGELFDSIVKRGHYSERDAAELIRTIVSVVAHCHNMGVIHRDLKPENFLLSDKSPRAQLKATDFGLSSFFQEGQVFTDIVGSAYYVAPEVLRRSYGKEADIWSCGIILYILLCGFPPFHGDSEKKIFEAIISKSVDFNTQPWPRISAPAKDCVKRMLQRDPKKRATANEIMQHDWMRENGVASDEPLEMEVVSRIKNFSGMNKLKKEALKVIAVNLPIDEISGMREMFMDIDKDKSGNITIDEFAAALHKKGQIVTEKEIEKIMKEADVDGDGTIDYEEFLAATINLGKLQREENLKTAFEHFDLDGNGEISHNELVQCLSKLGINDAHVKDIIKEVDADGNGQIDYNEFCIMMRNLD

SEQ ID NO: 2264 - DNA, 1572 bp, Oryza sativa
  CDS (1)..(1572)
atgggcgcgtgcttctcatcccacactgcgaccgccgccgccgatggcgggagcgggaagcggcagcagcggaagggggatcacaaggggaagctccccgatggcggcggcggcgagaaggagaaggaggcggcgcgggtggagttcgggtaccagagggacttcgaggggaggtaccaggtcgggaggctgctcggccacggccagttcggctacaccttcgccgccaccgaccgggcctccggtgaccgcgtcgccgtcaagcgcatcgacaaggccaagatggttcgccctgttgctgtggaggatgtaaagagagaagtgaagattcttaaagaacttaaaggccatgagaatattgttcacttctacaatgcgtttgaagatgactcatatgtatatattgtgatggaactatgtgagggtggtgaactattggaccggattttggcaaaaaagaacagccgttatagtgagaaagatgctgcagtggtggtgcggcagatgctcaaagtggcagctgagtgccatctgcatgggctagttcaccgagatatgaagcccgagaacttccttttcaaatcaaccaaggaggactcacctttaaaggcaacagattttggtctgtcagacttcataaaaccagggaaaaagtttcacgatatagttggcagtgcctattatgtagccccagaagttttaaaacgacggtctggccctgagtcagatgtttggagcataggagtcataacttatattttgctctgtgggagacgccctttttggaataagacagaggatggcatattcagagaggtactaagaaacaagcctgattttcgtaagaagccttggccaggcatcagttcaggtgctaaagatttcgttaaaaagttacttgtaaagaacccaagggcaagattaaccgctgctcaagctctctcgcatccatgggtaagagaaggaggagaagcatctgagatccctgttgatatatctgtattgtccaacatgcgtcagtttgtcaagtacagccgttttaagcaatttgctctgagggctttagcaagtacactaaaagaggaagaactagcagatctgaaggaccagttcgatgcaattgatgttgataaaagtggatcaattagtattgaggaaatgcggcatgcccttgcaaaggatcttccttggagattgaagggcccccgtgttctcgagattatccaagcaatcgacagcaacactgatggtcttgtggactttgaagagtttgtagcagcaaccctccatatacatcaaatggctgagcttgactctgaaagggggggcctacgctgccaggctgctttcagcaaatttgatctggatggggacggatacatcactccagatgaactcagaatgcacactggcttgaagggttccatcgagccattgctggaggaggccgacatcgacaaagacgggagaataagcttgtcggagttccgcaagctcctgcggacagcgagcatgagcaaccttccagtccaagaggacctccaaatccacaacccctgtgaacgtcggtaa

SEQ ID NO: 2265 - protein, 523 aa, Oryza sativa
MGACFSSHTATAAADGGSGKRQQRKGDHKGKLPDGGGGEKEKEAARVEFGYQRDFEGRYQVGRLLGHGQFGYTFAATDRASGDRVAVKRIDKAKMVRPVAVEDVKREVKILKELKGHENIVHFYNAFEDDSYVYIVMELCEGGELLDRILAKKNSRYSEKDAAVVVRQMLKVAAECHLHGLVHRDMKPENFLFKSTKEDSPLKATDFGLSDFIKPGKKFHDIVGSAYYVAPEVLKRRSGPESDVWSIGVITYILLCGRRPFWNKTEDGIFREVLRNKPDFRKKPWPGISSGAKDFVKKLLVKNPRARLTAAQALSHPWVREGGEASEIPVDISVLSNMRQFVKYSRFKQFALRALASTLKEEELADLKDQFDAIDVDKSGSISIEEMRHALAKDLPWRLKGPRVLEIIQAIDSNTDGLVDFEEFVAATLHIHQMAELDSERGGLRCQAAFSKFDLDGDGYITPDELRMHTGLKGSIEPLLEEADIDKDGRISLSEFRKLLRTASMSNLPVQEDLQIHNPCERR

SEQ ID NO: 2266 - DNA, 1455 bp, Arabidopsis thaliana
  CDS (1)..(1455)
atgaagcacagcggtgggaaccaagcctgctatgttcttggtcaaaagaccccaagcatccgagatctctactcgttgggacacaaactaggtcaaggacagtttgggacgacttacatgtgcaaagagatctcaacagggcgtgaatacgcatgcaagtctataacaaaacgaaagttgatatcaaaggaagatgtggaagacgtacgcagggaaattcaaatcatgcaccatctggctggctacaagaacattgtcaccattaaaggtgcttacgaggatccattgtatgttcacatcgtgatggagctttgctcaggtggggaattgtttgacagaattatccagagaggacattacagcgagagaaaagcagctgagctgataaagatcatcgttggtgttgttgaggcttgccattcgcttggtgtcatgcatagagatctaaagcccgaaaatttcttgttggttaacaaggacgacgacttctctctcaaagccattgattttgggctttccgtgttcttcaaaccaggtcaaatattcgaggatgtggttggaagtccgtattatgttgctcctgaggttctgctcaagcactacggacccgaggctgatgtgtggaccgcaggggtcatactgtacatattggtgagcggagtccctccgttctgggcagaaacacagcaagggatatttgatgcagtgctgaagggacatattgactttgactccgacccttggcccctaatatccgactctgcaaaaaacttgatccgtggcatgctatgttcccggccctctgagcgactgacagctcatcaagtattgcgccatccttggatctgtgaaaatggagttgcgccagacagagcactagatcctgctgtgctttctcgtcttaaacagttctctgcgatgaataaactaaagcagatggctttacgggtaatagctgagagtctctcggaggaagaaattgctggactgaaggaaatgttcaaagcaatggacacggataacagtggagcgattacgtttgacgagctgaaagccgggttgcgaagatatggttcaaccctcaaggatactgagattcgtgaccttatggaggctgcagatattgacaagagtgggaccatagattatggtgaattcattgctgcaacaatccatctgaacaaattagagcgtgaagaacatcttctgtcagccttcaggtactttgacaaagatgggagcggttacatcactatcgatgagctacagcacgcatgtgctgaacagggaatgagtgatgtctttctagaagatgtgatcaaggaagtcgaccaagacaatgatggaaggattgactacggggagtttgtagctatgatgcagaaaggcattgttggaagaacaatgaggaaaagcataaacatgagcatcaggaacaatgccgtctcgcagtga

SEQ ID NO: 2267 - protein, 484 aa, Arabidopsis thaliana
MKHSGGNQACYVLGQKTPSIRDLYSLGHKLGQGQFGTTYMCKEISTGREYACKSITKRKLISKEDVEDVRREIQIMHHLAGYKNIVTIKGAYEDPLYVHIVMELCSGGELFDRIIQRGHYSERKAAELIKIIVGVVEACHSLGVMHRDLKPENFLLVNKDDDFSLKAIDFGLSVFFKPGQIFEDVVGSPYYVAPEVLLKHYGPEADVWTAGVILYILVSGVPPFWAETQQGIFDAVLKGHIDFDSDPWPLISDSAKNLIRGMLCSRPSERLTAHQVLRHPWICENGVAPDRALDPAVLSRLKQFSAMNKLKQMALRVIAESLSEEEIAGLKEMFKAMDTDNSGAITFDELKAGLRRYGSTLKDTEIRDLMEAADIDKSGTIDYGEFIAATIHLNKLEREEHLLSAFRYFDKDGSGYITIDELQHACAEQGMSDVFLEDVIKEVDQDNDGRIDYGEFVAMMQKGIVGRTMRKSINMSIRNNAVSQ

SEQ ID NO: 2268 - DNA, 1599 bp, Solanum tuberosum
  CDS (1)..(1599)
atgggtgtttgtttgagcaaaagtaaaccagcagagtctaagtctgatgggcattatagatcaggtgggagtgatgggggtggagttgggggtaaagggcataatcatggaacccatcaagctcaaattcagtatactaaatctccaggcccagaaactcaattacccttgaggcctcaagcaagtcctaaaccagttttcaagcaagaaaccattttgggtaaggcatttgaggatgttaaggcacactatacactaggtaaagaattgggtagaggtcaatatggggttacatttctttgtactgaaatagcaactggtcatcaatatgcttgtaagtcaatatcaaagaagaaacttgttactaaatctgataaagctgatatgagaagagagattcagattatgcagcatttaagtggacaaccaaatattgttgaatttaaaggtgcttatgaggataagaattcagtgtgtcttgttatggagttgtgtgctggtggagagttatttgataggatcatagctaaggggcattatactgaaagagctgctgcatcaatgtgtagagctattgttaatgttgtacatgtttgccattttatgggtgttatgcatcgtgatcttaagcctgagaactttctcttgtcagacaagagtgaaaatgctgctttgaaggcaacagattttgggctgtccgtgttcattgaagaaggtaaggtgtacaaggatatagttgggagtgcttactatgttgcccctgaagtcttacggaagagttatggcaaggaaatagatgtttggagtgcaggtgttatgttgtatatactactcagtggtgtgcctcccttttgggcagaaaccgagagaggtatatttgatgccatattaaaagaagacattgactttgaaagtcaaccttggccttctatcacaagtagtgccaaggacctggtccgaaagatgctcaataaagacccaaagcaacgtatttctgctgctcaagttcttgagcatccttggctcaaggtaggtggagtagcatcagataaaccattagataatgctgtcctctcaagaatgaagcaattcagagctatgaacaaactcaagagacttgctttaaaggtcattgctgagaatctctcagcagatgaaattcaggggctcaaatcaatgttccataacatagacaccgataatagtggaacgatcacgtatgaagaattgaagagcggattggccagacttggatcaaagctcacagaggcggaagtaaagcaattgatggaagctgctgatgtggatggaaatggctcgatcgactatattgagttcatcactgctaccatgcataaacatagacttgaaagagatgaaaatctatacaaagcatttcagtatttcgataaagatgggagcgggttcatcacaagagatgaactcgaaacatctatggaagagcatggaataggcgatccagctagtataagggagataatagctgaagtagacgctgataatgatggaagaatcaactatgaggaattttgtacaatgatgagaagtggagctaaacaaccaggcaagctcttctaa

SEQ ID NO: 2269 - protein, 532 aa, Solanum tuberosum
MGVCLSKSKPAESKSDGHYRSGGSDGGGVGGKGHNHGTHQAQIQYTKSPGPETQLPLRPQASPKPVFKQETILGKAFEDVKAHYTLGKELGRGQYGVTFLCTEIATGHQYACKSISKKKLVTKSDKADMRREIQIMQHLSGQPNIVEFKGAYEDKNSVCLVMELCAGGELFDRIIAKGHYTERAAASMCRAIVNVVHVCHFMGVMHRDLKPENFLLSDKSENAALKATDFGLSVFIEEGKVYKDIVGSAYYVAPEVLRKSYGKEIDVWSAGVMLYILLSGVPPFWAETERGIFDAILKEDIDFESQPWPSITSSAKDLVRKMLNKDPKQRISAAQVLEHPWLKVGGVASDKPLDNAVLSRMKQFRAMNKLKRLALKVIAENLSADEIQGLKSMFHNIDTDNSGTITYEELKSGLARLGSKLTEAEVKQLMEAADVDGNGSIDYIEFITATMHKHRLERDENLYKAFQYFDKDGSGFITRDELETSMEEHGIGDPASIREIIAEVDADNDGRINYEEFCTMMRSGAKQPGKLF

SEQ ID NO: 2270 - DNA, 1605 bp, Mesembryanthemum crystallinum
  CDS (1)..(1605)
atggggatttgtgctagcaaaaacaaggctacacagccagaggacaatggatacacaccagcaaatggggttggttcaaacaaccaatcaaagccaccagcccagcaaaactaccaccagcagccaccacagcaaccggtggcgccgccacaaccagcttctcacccaccagttaggatgcccagcccaaaaccagccccaaaagttgagccaaatacaattttgggtaaaccctttgaggatgtgaaggtgtactacacattggggagagaactgggtaggggtcaatttggggttacctatctgtgcactgacaaaaagactggccaacaatatgcttgcaagtcaatctctaagaagaagcttgtgaccaaggctgataaggatgatatgaggagagagattcagatcatgcagcatatgagtggtcaacctaacattgtggaatttaagggtgcttatgaggataaaacatctgtgaatcttgtgatggagctttgtgctggtggggagttgtttgataggattattgctaaggggcattatagtgaaaaggctgctgccactatgttgaggcagattgttaatgttgttcatgtgtgtcactttatgggtgtgatgcatagggatctgaagcctgagaacttcttgctctctagcaaggatgagaattctctcttgaaggccactgattttgggttgtctgtgtttattgaagaaggtaaagtctaccgggatatagtaggcagtgcttactatgtcgctcctgaggtattgcgtcgtaggtatgggaaggagattgatgtttggagtgctggagtcatgttgtacatcttactcagtggtgtgccccccttttgggcagaaacggagaaagggatctttgatgctattttgcaaggccatattgatttcgaaagcaaaccatggccatcaatttcaaatggtgccaaggacctagtgagaaaaatgttgacacaggatcccaagaaacggattactgctgctcaagttcttgagcacccatggctaagagatggtgaagcatcagacaagccaatagacagtgctgttctcctcaggatgaagcaattcagagtcatgaacaagctcaagaagctcgctctaaaggtcattgctgaaaatcttcctgatgaagagatccaagggctgaaacaaatgttcgcgaatatggacactgatggtagtgggtcaattacctatgaagaactgagggagggattggctcgacttggatcaaagcttactgaaactgaagtgaaggcgctcatggaagctgctgatcaagatggaagtggatcaatagactactatgagttcattacagccacaatgcataggtacaggttagagagagatgagcatctttacaaggcattccaatatttcgacaaagacaatagtgggtttatcacaacagatgaactagaaacagcaatgaaagagtatgggattgctgatgagaattgcattgcagagatattgttggaagtagacactgataatgatggaagaataaactatgatgagttcagcgcaatgatgagaagtgggactcaaaacccggttaccaaactcatttag

SEQ ID NO: 2271 - protein, 534 aa, Mesembryanthemum crystallinum
MGICASKNKATQPEDNGYTPANGVGSNNQSKPPAQQNYHQQPPQQPVAPPQPASHPPVRMPSPKPAPKVEPNTILGKPFEDVKVYYTLGRELGRGQFGVTYLCTDKKTGQQYACKSISKKKLVTKADKDDMRREIQIMQHMSGQPNIVEFKGAYEDKTSVNLVMELCAGGELFDRIIAKGHYSEKAAATMLRQIVNVVHVCHFMGVMHRDLKPENFLLSSKDENSLLKATDFGLSVFIEEGKVYRDIVGSAYYVAPEVLRRRYGKEIDVWSAGVMLYILLSGVPPFWAETEKGIFDAILQGHIDFESKPWPSISNGAKDLVRKMLTQDPKKRITAAQVLEHPWLRDGEASDKPIDSAVLLRMKQFRVMNKLKKLALKVIAENLPDEEIQGLKQMFANMDTDGSGSITYEELREGLARLGSKLTETEVKALMEAADQDGSGSIDYYEFITATMHRYRLERDEHLYKAFQYFDKDNSGFITTDELETAMKEYGIADENCIAEILLEVDTDNDGRINYDEFSAMMRSGTQNPVTKLI

SEQ ID NO: 2272 - DNA, 1485 bp, Arabidopsis thaliana
  CDS (1)..(1485)
atgggttgcttcagcagtaaggagctacaacaatcgaaaagaaccattcttgagaaacctttagttgacatcacaaagatttatatcctcggggaggaattgggtagaggtaatttcggtctaacccgaaagtgcgttgagaaatctacaggtaagacattcgcctgcaaaaccattctcaagacaaagctaaaggacgaagaatgtgaagaagacgtgaagagagagattcggattatgaagcaattgtctggagaaccaaacattgtcgagttcaagaatgcttacgaggacaaagattctgtacatattgttatggaatattgtggtggtggagagttatacgacaagatcctagctttgtacgatgttgggaagtcttactcggagaaagaagctgctggaatcattaggtcgattgtgaatgttgtgaagaattgccattacatgggtgtgatgcatcgtgatctaaagcctgagaatttcttgcttacgagtaacgatgacaatgctacggtcaaagttattgactttgggtgttctgtgttcattgaagaaggaaaagtataccaggatttagctgggagtgattactacattgctcctgaagtgttacagggaaattacggtaaagaagcggacatttggagtgcagggattatattatacatcctactctgtggcaaatctccctttgtgaaagaacctgagggacagatgttcaatgagattaagagtttggaaatcgactacagcgaggaaccatggcctcttagagattcaagggcaatacatcttgtcaagaggatgcttgatagaaaccccaaggaacgaatctctgctgcagaggttcttggacatccttggatgaaagaaggagaagcttcggataagcctattgatggcgttgttttatcccgtttgaagagatttcgagatgcgaacaagtttaagaaggtagttctaaagtttattgcagcaaatctatcagaagaggaaatcaaaggtcttaagacactgttcaccaacatagatactgacaaaagtggaaatattactcttgaagaactcaaaacaggtcttactagacttggatctaacctctctaaaaccgaagtggagcaactcatggaagctgctgatatggatggtaatggaacaatcgacatagacgagtttatttctgcaacgatgcatagatacaaattggatagagatgaacatgtgtacaaagcattccaacactttgacaaagacaacgacgggcacataacgaaggaagagttggagatggcgatgaaggaggatggtgcgggagatgaaggtagcatcaaacaaatcatagccgatgctgataccgataatgtaacgacgatgcatagacacagattggaacgagatgaacattttcagaaagcattgttgataaagacaacaacggtttgcagccacaagggaaacttcttcgtatccattgatcattaa

SEQ ID NO: 2273 - protein, 494 aa, Arabidopsis thaliana
MGCFSSKELQQSKRTILEKPLVDITKIYILGEELGRGNFGLTRKCVEKSTGKTFACKTILKTKLKDEECEEDVKREIRIMKQLSGEPNIVEFKNAYEDKDSVHIVMEYCGGGELYDKILALYDVGKSYSEKEAAGIIRSIVNVVKNCHYMGVMHRDLKPENFLLTSNDDNATVKVIDFGCSVFIEEGKVYQDLAGSDYYIAPEVLQGNYGKEADIWSAGIILYILLCGKSPFVKEPEGQMFNEIKSLEIDYSEEPWPLRDSRAIHLVKRMLDRNPKERISAAEVLGHPWMKEGEASDKPIDGVVLSRLKRFRDANKFKKVVLKFIAANLSEEEIKGLKTLFTNIDTDKSGNITLEELKTGLTRLGSNLSKTEVEQLMEAADMDGNGTIDIDEFISATMHRYKLDRDEHVYKAFQHFDKDNDGHITKEELEMAMKEDGAGDEGSIKQIIADADTDNVTTMHRHRLERDEHFQKALLIKTTTVCSHKGNFFVSIDH

SEQ ID NO: 2274 - DNA, 1695 bp, Solanum tuberosum
  CDS (1)..(1695)
atgggtagttgtttttcaagctccaaagttagtggctcaaatagcaataccccttcaaccaacaataccgccacaaacacaaacacaacggtaaatgttcatccaaaccgcagggaaacctcaaaagcaccttcaacaacggttgttaattcaagaaatcaagaagggtcgaattataatcgaggtaaaggtaatattaaccagaaaaaccaacaaaaacaacctaggaattcacagcagaatgttaagccaagttcaagaagacaaggtggggttattccttgtgggaaaagaacagattttgggtatgataaagattttgaaaagagatatacaattgggaaattgttgggtcatggtcaatttggttatacatatgttgctacagataaatcttcaggagatcgtgtggctgtcaaaagaattgagaaaaacaagatggttcttcccattgcggttgaggatgtgaaacgagaagtcaagatattgaaggccttaggtcgtcatgagaatgtggttcaattctataattcattcgaggatcataattatgtctacatcgtaatggagttatgtgaaggtggagaactattggacgattgtcaaaagacagtcggtatacgagaagatgcagcaatagtcgtaccccagatgctaaaagtggcagctgagtgtcatttacatggtttggtgcatcgtgatatgaaacctgagaattttctctttaagtctacaaaggaggattcaccattaaaagccacagattttggatcttcagacttcatcagaccaggaaaagtccaagacattgtcggtagtgcatattatgtagctccagaggtattaaagcgtagatcaggacctgaatcagatgtgtggagtattggcgtaattacatacattttgctatgtggtcgtcggcctttctgggacaaaactgaggatggtatattcaaggaggtcctacggaacaaacctgattttcgtcgcaagccatggtctaacataagcaacagtgctaaagattttgtaaagaaattactggtgaaggatcctcgcgctagacttactgctgctcaggccctatcacatccttgggtccgagagggaggggatgcatctgagattccactggacatttctgttttatccaacatgcggcaatttgtcagatacagtcatctaaaacagtttgctttacgggcgttacgtagcacacttgatgaggaggagatcgctgatctgcgggatcaattttctgcaattgatgtggataagaatggtgtcatcagtctcgaagaaatgagacaggcccttgcgaaggatctcccatggaaaatgaaagaatcacgagttcttgagattcttcaagcgattgacagtaacacagatgggcttgttgattttccggagtttgtggctgccactctacatgtccatcagttggaggagcataattctgcaaagtggcagcaaagatcacaagctgcttttgagaaatttgatgttgatagagatggattcattactccagaagaacttaaaatgcacacgggcttgagaggctccatagatccacttctagaggaagcagatattgacaaagacggaaagataagcatatcagaatttcgtagacttttaagaactgctagtatgacttcaccaacggtgagagattcacggggtatgtag

SEQ ID NO: 2275 - protein, 564 aa, Solanum tuberosum
MGSCFSSSKVSGSNSNTPSTNNTATNTNTTVNVHPNRRETSKAPSTTVVNSRNQEGSNYNRGKGNINQKNQQKQPRNSQQNVKPSSRRQGGVIPCGKRTDFGYDKDFEKRYTIGKLLGHGQFGYTYVATDKSSGDRVAVKRIEKNKMVLPIAVEDVKREVKILKALGRHENVVQFYNSFEDHNYVYIVMELCEGGELLDDCQKTVGIREDAAIVVPQMLKVAAECHLHGLVHRDMKPENFLFKSTKEDSPLKATDFGSSDFIRPGKVQDIVGSAYYVAPEVLKRRSGPESDVWSIGVITYILLCGRRPFWDKTEDGIFKEVLRNKPDFRRKPWSNISNSAKDFVKKLLVKDPRARLTAAQALSHPWVREGGDASEIPLDISVLSNMRQFVRYSHLKQFALRALRSTLDEEEIADLRDQFSAIDVDKNGVISLEEMRQALAKDLPWKMKESRVLEILQAIDSNTDGLVDFPEFVAATLHVHQLEEHNSAKWQQRSQAAFEKFDVDRDGFITPEELKMHTGLRGSIDPLLEEADIDKDGKISISEFRRLLRTASMTSPTVRDSRGM

SEQ ID NO: 2276 - DNA, 1833 bp, Arabidopsis thaliana
  CDS (1)..(1833)
atgggtaatacttgtgttggaccaagcagaaatggcttcttgcaatctgtttcagctgcaatgtggcggccaagagatggagatgattcggcttccatgagtaatggagatattgcaagtgaagctgtttcgggagagcttcgatctcgattatctgatgaagtccagaataaacctcctgaacaggtcacaatgccgaagccagggactgacgtcgagaccaaggacagagagattcgaactgaaagcaagcctgaaacgctagaggagataagccttgagtccaaaccagagactaagcaggagaccaagtcagagaccaagccggagtcaaaacctgatcctccagctaaacctaagaagcctaaacacatgaagagagtgtcaagtgcagggcttaggactgagtcagtgttgcagaggaagactgaaaacttcaaggaattctattccttgggaaggaaactcggacaagggcaatttgggacgacttttttatgtgtcgagaagactacggggaaggagtttgcctgcaagtcgattgctaagaggaagctattgactgatgaggacgttgaggatgtgagaagagaaattcagataatgcatcacttggctggtcaccctaatgtcatctccatcaaaggagcttatgaggatgttgtggcagtgcaccttgtaatggagtgttgtgcaggcggcgagctttttgacaggatcattcaacgcggtcactacacagagaggaaagcggctgagctcactagaaccattgttggggttgtagaggcttgccattctcttggtgttatgcatcgagacctcaagcccgagaattttctgtttgtcagtaaacacgaagattccctcttgaagacgattgattttggactctccatgttctttaaaccagacgatgtttttacagatgttgttggtagcccatattatgttgccccagaagttcttcgaaagcgttatggccctgaagctgatgtctggagtgctggagtgattgtgtacattttattaagcggagttcctccattctgggctgaaaccgaacaaggtattttcgaacaggtactccacggtgatcttgacttttcgtccgatccatggccaagtatatctgaaagtgcaaaggatttagtgaggaaaatgcttgtcagggatcccaagaaaaggttaactgcccaccaagtattatgtcatccatgggttcaagtcgacggtgtggctccagacaagcctttggattctgctgttctgagccgtatgaagcagttttctgcaatgaacaagttcaagaaaatggctcttagagtcattgctgagagcttatctgaagaagaaatcgccggcttgaaagaaatgtttaatatgatagatgcggacaagagtggtcagataactttcgaagaactgaaagcaggactaaaacgagtaggggcgaatctcaaagagtctgaaattctcgacttgatgcaagctgctgatgtggacaacagcggaacaatagattacaaagagttcatagctgcaacattacatctaaacaaaatagagagagaggaccatttgtttgcagcctttacatactttgacaaagatgggagcggctatatcaccccagacgagcttcaacaagcttgtgaggagtttggtgttgaggatgtccgcatagaagaactgatgcgcgatgttgatcaagacaatgacgggcgaatagactacaacgagtttgtggcgatgatgcagaaaggaagcatcacaggaggacctgtgaaaatgggtctagagaaaagctttagcattgctcttaaactctag

SEQ ID NO: 2277 - protein, 610 aa, Arabidopsis thaliana
MGNTCVGPSRNGFLQSVSAAMWRPRDGDDSASMSNGDIASEAVSGELRSRLSDEVQNKPPEQVTMPKPGTDVETKDREIRTESKPETLEEISLESKPETKQETKSETKPESKPDPPAKPKKPKHMKRVSSAGLRTESVLQRKTENFKEFYSLGRKLGQGQFGTTFLCVEKTTGKEFACKSIAKRKLLTDEDVEDVRREIQIMHHLAGHPNVISIKGAYEDVVAVHLVMECCAGGELFDRIIQRGHYTERKAAELTRTIVGVVEACHSLGVMHRDLKPENFLFVSKHEDSLLKTIDFGLSMFFKPDDVFTDVVGSPYYVAPEVLRKRYGPEADVWSAGVIVYILLSGVPPFWAETEQGIFEQVLHGDLDFSSDPWPSISESAKDLVRKMLVRDPKKRLTAHQVLCHPWVQVDGVAPDKPLDSAVLSRMKQFSAMNKFKKMALRVIAESLSEEEIAGLKEMFNMIDADKSGQITFEELKAGLKRVGANLKESEILDLMQAADVDNSGTIDYKEFIAATLHLNKIEREDHLFAAFTYFDKDGSGYITPDELQQACEEFGVEDVRIEELMRDVDQDNDGRIDYNEFVAMMQKGSITGGPVKMGLEKSFSIALKL

SEQ ID NO: 2278 - DNA, 1542 bp, Zea mays
  CDS (1)..(1542)
atggttatggctattctaaccaggcaaagccggcgcaagcacctccgagtttacaaccctcctcagcaggcggccgaggtgaggtacacaccatcggcgacgaactcttcggcagtcccacccgtggctgtgccgccgaagccaacggcggacacgattcttggcaagcagtacgaggacgtgcgctctgtctactccttcgggaaggagcttggccggggccagttcggggtgacatacctctgcacagagattgcctctgggaggcagtacgcctgcaagtccatctccaagcgcaagctcgtcagcaaggcagacagggaggacattcgaagggagatccagatcatgcagcacctgtctgggcagccaaacattgtcgagttccggggagcatacgaggacaagagcaatgtccatgtggtgatggagctctgcgcaggtggggagctcttcgatcgcatcattgcaaaggggcactacacagaacgtgcggctgctacaatctgcagagcagttgtgaatgttgtcaacatttgccacttcatgggtgtgatgcatcgtgatctgaaacccgagaacttcttgcttgcgaccatggaggagaatgcaatgctcaaggccactgattttgggctttctgtcttcattgaagaaggaaagatgtacagggacattgttggaagtgcttactatgttgctcctgaagtccttaggcggagctatggaaaagagatagatgtttggagtgcaggtgttattttgtacattcttctcagtggcgtgcctccattttgggctgaaattgaaaaggggatatttgatgctattctgcatgaggagattgactttgaaagtcaaccttggccatcaatttctgagagtgctaaagacttggtgagaaagatgttgacacgagatccaaagaaaagactgacttcagcccaagttcttcaacatcagtggctcagagaaggtggggaggcatctgataagcctatcgacagtgctgttctatctagaatgaagcaattcagagcaatgaataagctgaaaaagatggccctaaaggttattgcttcaaaccttaacgaggaagagatcaaggggctaaagcaaatgttcatgaacatggacacagacaatagtggcacaatcacatacgaagaactcaaagcaggattagccaaacttggatcaaagctgtcagaagctgaagtaaagcagttgatggaggctgctgatgttgatgggaatggatctattgactatgtggagttcatcactgccacaatgcatagacacaagctcgaaagggacgagcatttgttcaaggcattccagtactttgacaaagataacagcggcttcatcacaagggatgaactggaatctgctttgattgagcatgagatgggcgacacgagtacaataagggagatcatatcagaagttgacacagataatgatgggaggattaactatgaggagttttgtgcaatgatgagaggagggatgcagcagccaatgaggctcaagtag

SEQ ID NO: 2279 - protein, 513 aa, Zea mays
MVMAILTRQSRRKHLRVYNPPQQAAEVRYTPSATNSSAVPPVAVPPKPTADTILGKQYEDVRSVYSFGKELGRGQFGVTYLCTEIASGRQYACKSISKRKLVSKADREDIRREIQIMQHLSGQPNIVEFRGAYEDKSNVHVVMELCAGGELFDRIIAKGHYTERAAATICRAVVNVVNICHFMGVMHRDLKPENFLLATMEENAMLKATDFGLSVFIEEGKMYRDIVGSAYYVAPEVLRRSYGKEIDVWSAGVILYILLSGVPPFWAEIEKGIFDAILHEEIDFESQPWPSISESAKDLVRKMLTRDPKKRLTSAQVLQHQWLREGGEASDKPIDSAVLSRMKQFRAMNKLKKMALKVIASNLNEEEIKGLKQMFMNMDTDNSGTITYEELKAGLAKLGSKLSEAEVKQLMEAADVDGNGSIDYVEFITATMHRHKLERDEHLFKAFQYFDKDNSGFITRDELESALIEHEMGDTSTIREIISEVDTDNDGRINYEEFCAMMRGGMQQPMRLK

SEQ ID NO: 2280 - DNA, 1599 bp, Daucus carota
  CDS (1)..(1599)
atgggaggttgtttcagcaagaaagagtatcaagcagatggtaatgggtatagatcagctcccactgcttaccatactgttactgaccaaagctatgaaaagtcatctcaaaggtctcagcctcaggctcagccacagcctcaggttcagcaaacagggccttcacttaagcccaggcaagttcatagacctgagtcaaacactattttaggcaagccatttgaagatattaggggtaagtatactcttgggaaagaattgggcaggggtcaatttggttgtgtatatcaatgtactgagaattcaagtggtcaattatatgcttgtaagtctattttaaagagaaagcttgttagtaagaatgataaggaggatataaagagggagattcagattttgcagcatttgagtgggcaaccgaatattgtggagtttaaaggtgtttttgaggataggcaatctgtgcaccttgtgatggagctttgtgctggtggggagttgtttgacaggattatagctcaaggacattactcggagagagcggctgctacgatttgtaggcagattgtgaatgttgtccatgtttgtcattttatgggggtgatgcatagggatcttaagcctgaaaatttcttgctttcgagtaaggataaagatgcaatgctgaaggcgactgatttcgggttatctgtcttcattgaagaaggaaaggtatatcgtaatatagttggtagtgcttactatgttgctcctgaagtactacgacgtagttatggaaaggagattgatatctggagcgctggagttattttgtatatactacttagcggggtacctccattttgggcagagaatgaaaaaggaatatttgatgcaatactggaaggagtgattgactttgaaagtgaaccatggccatcagtctcaaacagtgcaaaagaccttgttagaaagatgctgacacaggatccaaggagaaggattacttctgcacaagttcttgatcatccctggatgagagaaggtggagaagcatcagacaagccaatagatagtgcagtcctctctagaatgaagcagttcagagcaatgaacaagctcaaacaacttgcacttaaggtcatcgctgaaagtctatccgaggaagaaattaaaggtcttaaatccatgtttgcaaacatggacacggacaaaagtggtacaatcacttatgaggaattgaaatcaggtttggcacggctaggctcaaagctatcagaagtggaggtccaacaattgatggatgctgctgatgtagatggaaatggtacaattgactaccttgaatttattactgctactatgcataggcacaagcttgaaagttatgagcatcaagcatttcagtattttgacaaggataatagcggcttcattactaaagatgaactggaatctgcaatgaaagagtatggaatgggtgacgaagccactatcaaggacataatctctgaagtagattcagataatgatggaaggattaattacgatgagttctgtgcgatgatgagaagggcacgcaacagaaggaagctttttagtgtctcgctaacctcttag

SEQ ID NO: 2281 - protein, 532 aa, Daucus carota
MGGCFSKKEYQADGNGYRSAPTAYHTVTDQSYEKSSQRSQPQAQPQPQVQQTGPSLKPRQVHRPESNTILGKPFEDIRGKYTLGKELGRGQFGCVYQCTENSSGQLYACKSILKRKLVSKNDKEDIKREIQILQHLSGQPNIVEFKGVFEDRQSVHLVMELCAGGELFDRIIAQGHYSERAAATICRQIVNVVHVCHFMGVMHRDLKPENFLLSSKDKDAMLKATDFGLSVFIEEGKVYRNIVGSAYYVAPEVLRRSYGKEIDIWSAGVILYILLSGVPPFWAENEKGIFDAILEGVIDFESEPWPSVSNSAKDLVRKMLTQDPRRRITSAQVLDHPWMREGGEASDKPIDSAVLSRMKQFRAMNKLKQLALKVIAESLSEEEIKGLKSMFANMDTDKSGTITYEELKSGLARLGSKLSEVEVQQLMDAADVDGNGTIDYLEFITATMHRHKLESYEHQAFQYFDKDNSGFITKDELESAMKEYGMGDEATIKDIISEVDSDNDGRINYDEFCAMMRRARNRRKLFSVSLTS

SEQ ID NO: 2282 - DNA, 1527 bp, Glycine max
  CDS (1)..(1527)
atggctgcgaaatctagttcgagttcgacaacaacaaacgtggtgactctgaaggcggcgtgggttctcccgcagcgcacgcagaacatccgtgaggtgtacgaggttgggcggaagctcgggcagggccaattcgggaccaccttcgagtgcacgcgccgtgcgagtggtgggaagttcgcgtgcaagtcgattccgaagcggaagctgctgtgcaaggaggactacgaggacgtgtggcgggagattcagataatgcaccacttgtcggaacacgccaacgttgtccgcatcgaagggacgtacgaggattccacggccgtgcacctggtcatggagttgtgcgagggtggagagttgtttgacaggatcgtgcagaagggacactacagcgagagacaggcggcgaggttgataaagacgattgttgaggttgttgaggcgtgtcactcgctaggggtcatgcatagggaccttaagcctgagaatttcttgtttgataccattgatgaggatgctaagcttaaggccaccgatttcggcttgtctgttttttacaagcctggtgaatccttttgtgatgttgtcgggagcccatactatgtcgcaccagaggtcttgcgcaagctctatggacctgaatcagatgtttggagtgcaggggttattctgtacatcttattaagtggggtgccaccattttgggccgaatctgaaccggggatcttccgacagattttactaggaaaacttgattttcattctgagccttggcctagcatttcagacagtgccaaggatctaattcggaaaatgcttgatcaaaatccaaaaacaaggcttacagcacatgaagtactccgccacccatggattgttgatgacaacattgcacctgataaacctcttgattctgcagttttatcacgtctgaaacaattctctgccatgaataaattgaaaaagatggcattgcgtgttattgctgagaggctatctgaagaagaaattggtggactgaaagagttattcaagatgattgacacagacaacagtggaaccataacgtttgatgagttaaaagatggtttgaagcgagtaggatctgaacttatggagtctgaaatcaaggatcttatggatgctgcggatattgataaaagtgggacaattgattatggtgaattcattgctgccactgttcatttaaataagctggagagagaggaaaacctagtgtcggccttctcctattttgacaaagatggcagtggttacataacccttgatgagatacaacaagcttgtaaggactttggtttagatgatatccatattgacgacatgatcaaggaaattgatcaagataacgatgggcaaatagattatggggaatttgctgccatgatgagaaagggcaatggaggaattggaaggcgaactatgagaaaaacactaaatttaagagatgctcttggattagtagacaatgggtccaatcaagttattgagggctactttaagtaa

SEQ ID NO: 2283 - protein, 508 aa, Glycine max
MAAKSSSSSTTTNVVTLKAAWVLPQRTQNIREVYEVGRKLGQGQFGTTFECTRRASGGKFACKSIPKRKLLCKEDYEDVWREIQIMHHLSEHANVVRIEGTYEDSTAVHLVMELCEGGELFDRIVQKGHYSERQAARLIKTIVEVVEACHSLGVMHRDLKPENFLFDTIDEDAKLKATDFGLSVFYKPGESFCDVVGSPYYVAPEVLRKLYGPESDVWSAGVILYILLSGVPPFWAESEPGIFRQILLGKLDFHSEPWPSISDSAKDLIRKMLDQNPKTRLTAHEVLRHPWIVDDNIAPDKPLDSAVLSRLKQFSAMNKLKKMALRVIAERLSEEEIGGLKELFKMIDTDNSGTITFDELKDGLKRVGSELMESEIKDLMDAADIDKSGTIDYGEFIAATVHLNKLEREENLVSAFSYFDKDGSGYITLDEIQQACKDFGLDDIHIDDMIKEIDQDNDGQIDYGEFAAMMRKGNGGIGRRTMRKTLNLRDALGLVDNGSNQVIEGYFK

SEQ ID NO: 2284 - DNA, 1809 bp, Daucus carota
  CDS (1)..(1809)
atggggatttgtgtttccaaaccctcccctgaacctgatttacacaatcaccacacctctattccggtcaacgacacttctcttccaccccaggataactcaattccccccaaggatattgctattccagctcaggataataacaaaccgcctgggaagaaatctccatttttaccgttttacagtcccagtccggcgcattttctgttctcgaagaagtcgccggcggttggatctccggcggccggaagctccaattcgacgccgaagcggctgtttccgtttccgccgccgtcgccggcgaagcacattaaggctgcttgggcgaggcggcatggctcggtgaagcctaatgaggcggcgataccggagaacaatgaggtggatggcggtgccggattggataagagtttcgggttttcgaagaagtttgggagtaagtttgaggttggggaggaagttgggagagggcattttgggtatacttgtagagctaagtttaagaaaggggagtttaaggggcaggatgttgctgttaaggtcattccgaaagctaagatgaccacggccatagccattgaagatgtcagaagggaagtgaaaattttaagagctttgacaggacataacaatcttgtacagttttatgatgcattcgaagatcatactaatgtctacgttgtgatggagttatgtgaaggaggtgagcttttggatagaattctttcaagaggtggaaaatacacagaagatgatgccaaggccgttatgatacaaatattaaatgtcgttgcattttgccatctacagggtgtggtgcaccgagatcttaagccagagaatttcttgtttaaatcaaaggatgaggactcacaactgaaggctattgattttggattatcagattatgtgaagccagatgaaaggctaaatgatattgttggcagcgcatactatgtggctccagaagttttacatagatcttacagtactgaggctgatgtctggagtatcggtgtgatatcatatatcctattatgtggcagccgtccattttgggctcgaactgagtctgggatctttcgagctgttctaaaagctaatcttagttttgatgaaccaccctggccttctgtatcttctgaggctaaagattttgtcaagcgtctattaaataaagatccaagaaaaagaatgaccgctgctcaagccctgtgccattcatggatcaagaatagtaatgatataaagtttccactggacatactggtatttaaactcatgaaagtttatatgcgttcatctcctcttcgaaaagcggctttacgggctttatctaagacattgacagttgatgagctcttctatttgaaggagcaatttgtgttgttggaaccaactaagaacggaactataagcttggaaaacatcaaacaggccttgatgagaaattcaacggatgccatgaaggattctcgtgtgcttgatcttttagtgtcgctcaatgcacttcaatatagaaggatggattttgaggaattctgtgcagcagctttgagtgttcatcagctggaggcacttgaccgatgggagcaacatgctcgttgcgcctatgatctatttgagaaagatggcaatagggcgattatgattgaggagctggcttctgagctcggccttggcccatctatccctgttcatgcagtactgcatgactggatcaggcacacagatggaaagctaagttttcttggttatgtgaaactgttgcacggcgtgtctactcgagccatagccaaagctcaataa

SEQ ID NO: 2285 - protein, 602 aa, Daucus carota
MGICVSKPSPEPDLHNHHTSIPVNDTSLPPQDNSIPPKDIAIPAQDNNKPPGKKSPFLPFYSPSPAHFLFSKKSPAVGSPAAGSSNSTPKRLFPFPPPSPAKHIKAAWARRHGSVKPNEAAIPENNEVDGGAGLDKSFGFSKKFGSKFEVGEEVGRGHFGYTCRAKFKKGEFKGQDVAVKVIPKAKMTTAIAIEDVRREVKILRALTGHNNLVQFYDAFEDHTNVYVVMELCEGGELLDRILSRGGKYTEDDAKAVMIQILNVVAFCHLQGVVHRDLKPENFLFKSKDEDSQLKAIDFGLSDYVKPDERLNDIVGSAYYVAPEVLHRSYSTEADVWSIGVISYILLCGSRPFWARTESGIFRAVLKANLSFDEPPWPSVSSEAKDFVKRLLNKDPRKRMTAAQALCHSWIKNSNDIKFPLDILVFKLMKVYMRSSPLRKAALRALSKTLTVDELFYLKEQFVLLEPTKNGTISLENIKQALMRNSTDAMKDSRVLDLLVSLNALQYRRMDFEEFCAAALSVHQLEALDRWEQHARCAYDLFEKDGNRAIMIEELASELGLGPSIPVHAVLHDWIRHTDGKLSFLGYVKLLHGVSTRAIAKAQ

SEQ ID NO: 2286 - DNA, 1557 bp, Oryza sativa
  CDS (1)..(1557)
atgggcaaccgcacgtcgcgccaccaccgcgccgctcccgagcagccgccgccccagcccaagccgaagcctcagccgcagcagcagcagcagcagtggccgaggccgcagcagccgaccccgccgccggcggcggcgccggacgcggcgatggggagggtgctggggcggccgatggaggacgtccgcgcgacctacaccttcgggcgcgagctcgggcggggccagttcggggtcacctacctcgtcacccacaaggccacggggaagcgcttcgcctgcaagtccatcgccacgcggaagctcgcccaccgcgacgacatcgaggacgtgcgccgggaggtgcagatcatgcaccacctcacgggccaccgcaacatcgtcgagctccggggcgcctacgaggaccgccactcggtcaacctcatcatggagctctgcgagggcggggagctcttcgaccgcatcatcgccagggggcactactccgagcgcgccgccgccgcgctctgccgcgagatcgtcgccgtcgtgcacagctgccactccatgggggtcttccaccgggatctcaagccggagaactttttgttcctcagtaaaagcgaggactcgccgctcaaggccactgacttcggtctttccgttttcttcaagcctggggagcattttaaggaccttgttggaagtgcgtattatgttgcacctgaggtgctgaaacgaaactatggagcagaggctgacatatggagtgctggcgttattctttacatccttctttctggtgttccacctttttgggcagagagtgaagatggtatatttgatgccgtattacgtggtcacattgatttctcgtctgaaccttggccttcgatatccaatggtgcaaaagatttggttaagaagatgttgcggcaagacccaaaagagcgccttacttctgctgaaattttgaaccacccatggattagagaggatggagaagccccagacaagccacttgacattacagttatcagcaggatgaagcagttcagggcaatgaacaagcttaagaaagttgcattgaaggttgttgcagagaacttgtcagatgaagagattacaggcttaaaagaaatgttcagatccttggatactgataacagtgggacaataactcttgaggagctaagatctggtttaccaaaacttggcaccaaaatttctgaatcagaaattagacagctgatggaggcggctgatgttgatggaaatggaaccattgactatgctgagttcatatcagcgacaatgcacatgaacagattggagaaggaagaccacatacttaaagcatttgagtattttgataaggaccacagcggatacataacagtagatgagttggaagaagctctgaagaagtatgatatgggggacgataaaacgattaaggaaatcatcgctgaagtagatactgatcatgatggaagaattaactaccaggagtttgtcgccatgatgaggaacaacaaccctgagattgctcccaaccggcggcgcatgttctaa

SEQ ID NO: 2287 - protein, 518 aa, Oryza sativa
MGNRTSRHHRAAPEQPPPQPKPKPQPQQQQQQWPRPQQPTPPPAAAPDAAMGRVLGRPMEDVRATYTFGRELGRGQFGVTYLVTHKATGKRFACKSIATRKLAHRDDIEDVRREVQIMHHLTGHRNIVELRGAYEDRHSVNLIMELCEGGELFDRIIARGHYSERAAAALCREIVAVVHSCHSMGVFHRDLKPENFLFLSKSEDSPLKATDFGLSVFFKPGEHFKDLVGSAYYVAPEVLKRNYGAEADIWSAGVILYILLSGVPPFWAESEDGIFDAVLRGHIDFSSEPWPSISNGAKDLVKKMLRQDPKERLTSAEILNHPWIREDGEAPDKPLDITVISRMKQFRAMNKLKKVALKVVAENLSDEEITGLKEMFRSLDTDNSGTITLEELRSGLPKLGTKISESEIRQLMEAADVDGNGTIDYAEFISATMHMNRLEKEDHILKAFEYFDKDHSGYITVDELEEALKKYDMGDDKTIKEIIAEVDTDHDGRINYQEFVAMMRNNNPEIAPNRRRMF

SEQ ID NO: 2288 - DNA, 1548 bp, Oryza sativa
  CDS (1)..(1548)
atgggcaactgctgtcctggctctggggatgcggagcccgcctcctccgacgcctccaccggcaacggctcgtcctccttcaaggccggcgcgtcgccgtcgtcggcgcccgcgcagaacaagccgccggcgcccatcgggcccgtgctcggccgccccatggaggacgtccggagcatctacaccatcggcaaggagctcgggcgcgggcagttcggcgtcacctccctgtgcacccacaaggcgacggggcagaagttcgcgtgcaagaccatcgccaagcggaagctgtccaccaaggaggacgtggaggacgtgcggcgggaggtgcagatcatgtaccacctcgccgggcagcccaacgtggtggagctcaagggcgcctacgaggacaagcagtccgtccacctcgtcatggagctctgcgccggcggcgagctcttcgaccggatcatcgccaagggccactacaccgagcgcgccgccgcctcgctcctccgcaccatcgtcgagatcatccacacctgccactccctcggcgtcatccaccgcgacctcaagcccgagaacttcctcctcctcagcaaggacgaggacgcccctctcaaggccaccgacttcggcctctccgtcttcttcaagcaaggagaggtgttcaaggacatcgtcggcagcgcgtactacatcgcgccggaggtgctgaagcggagctacggccccgaggcggacatctggagcgtcggcgtcatcctctacatcctcctctgcggtgttcctccattctgggctgaatcggagcatggcatcttcaattccatcctgagagggcaggtggacttcaccagtgacccatggccacgcatttcagctagcgccaaggaccttgtcaggaagatgctcaactccgaccccaagaagagaatttcagcctacgaagtcctcaatcacccgtggatcaaggaagatggagaagcacctgacacgccgcttgacaacgctgtcatgaacaggctcaagcagttcagggctatgaaccaattcaagaaagcagcgctaagggtcattgctggatgcttgtcggaggaagagatcagagggctgaaggagatgttcaagagcatggactctgacaacagcggcaccattaccgtcgatgagctgcgcaaagggctgtccaagcaagggaccaagctcacggaggccgaagtgcagcagctaatggaggctgccgacgcggacgggaacggaaccatcgattacgacgagttcatcacagcgacgatgcacatgaacaggatggacagagaggagcatctttacaccgcgtttcagtatttcgacaaggacaacagcggctgcatttcgaaggaggagctcgagcaagcgctgagggagaaaggtcttctcgatggcagagacatcaaagacatcatatcagaagtcgacgccgataacgatggaaggatagactacagcgagttcgcggcgatgatgcggaagggaaacccggaggccaatcccaagaagcgacgggacgttgtgatatag

SEQ ID NO: 2289 - protein, 515 aa, Oryza sativa
MGNCCPGSGDAEPASSDASTGNGSSSFKAGASPSSAPAQNKPPAPIGPVLGRPMEDVRSIYTIGKELGRGQFGVTSLCTHKATGQKFACKTIAKRKLSTKEDVEDVRREVQIMYHLAGQPNVVELKGAYEDKQSVHLVMELCAGGELFDRIIAKGHYTERAAASLLRTIVEIIHTCHSLGVIHRDLKPENFLLLSKDEDAPLKATDFGLSVFFKQGEVFKDIVGSAYYIAPEVLKRSYGPEADIWSVGVILYILLCGVPPFWAESEHGIFNSILRGQVDFTSDPWPRISASAKDLVRKMLNSDPKKRISAYEVLNHPWIKEDGEAPDTPLDNAVMNRLKQFRAMNQFKKAALRVIAGCLSEEEIRGLKEMFKSMDSDNSGTITVDELRKGLSKQGTKLTEAEVQQLMEAADADGNGTIDYDEFITATMHMNRMDREEHLYTAFQYFDKDNSGCISKEELEQALREKGLLDGRDIKDIISEVDADNDGRIDYSEFAAMMRKGNPEANPKKRRDVVI

SEQ ID NO: 2290 - DNA, 1569 bp, Oryza sativa
  CDS (1)..(1569)
atgggcgcgtgcttctcatcccacactgcgaccgccgccgccgatggcgggagcgggaagcggcagcagcggaagggggatcacaaggggaagctccccgatggcggcggcggcgagaaggagaaggaggcggcgcgggtggagttcgggtacgagagggacttcgaggggaggtaccaggtcgggaggctgctcggccacggccagttcggctacaccttcgccgccaccgaccgggcctccggtgaccgcgtcgccgtcaagcgcatcgacaaggccaagatggttcgccctgttgctgtggaggatgtaaagagagaagtgaagattcttaaagaacttaaaggccatgagaatattgttcacttctacaatgcgtttgaagatgactcatatgtatatattgtgatggaactatgtgagggtggtgaactattggaccggattttggcaaaaaagaacagccgttatagtgagaaagatgctgcagtggtggtgcggcagatgctcaaagtggcagctgagtgccatctgcatgggctagttcaccgagatatgaagcccgagaacttccttttcaaatcaaccaaggaggactcacctttaaaggcaacagattttggtctgtcagacttcataaaaccagggaaaaagtttcacgatatagttggcagtgcctattatgtagcaccagaagttttaaaacgacggtctggccctgagtcagatgtttggagcataggagtcataacttatattttgctctgtgggagacgccctttttggaataagacagaggatggcatattcagagaggtactaagaaacaagcctgattttcgtaagaagccttggccaggcatcagttcaggtgctaaagatttcgttaaaaagttacttgtaaagaacccaagggcaagattaaccgctgctcaagctctctcgcatccatgggtaagagaaggaggagaagcatctgagatccctgttgatatatctgtattgtccaacatgcgtcagtttgtcaagtacagccgttttaagcaatttgctctgagggctttagcaagtacactaaaagaggaagaactagcagatctgaaggaccagttcgatgcaattgatgttgataaaagtggatcaattagtattgaggaaatgcggcatgcccttgcaaaggatcttccttggagattgaagggcccccgtgttctcgagattatccaagcaatcgacagcaacactgatggtcttgtggactttgaagagtttgtagcagcaaccctccatatacatcaaatggctgagcttgactctgaaaggtggggcctacgctgccaggctgctttcagcaaatttgatctggatggtgacggatacatcactccagatgaactcagaatggtgcagcacactggcttgaagggttccatcgagccattgctggaggaggccgacatcgacaaagacgggagaataagcttgtcggagttccgcaagctcctgcggacagcgagcatgagcaaccttcccagtccaagaggacctccaaatccacaacccctgtga

SEQ ID NO: 2291 - protein, 522 aa, Oryza sativa
MGACFSSHTATAAADGGSGKRQQRKGDHKGKLPDGGGGEKEKEAARVEFGYERDFEGRYQVGRLLGHGQFGYTFAATDRASGDRVAVKRIDKAKMVRPVAVEDVKREVKILKELKGHENIVHFYNAFEDDSYVYIVMELCEGGELLDRILAKKNSRYSEKDAAVVVRQMLKVAAECHLHGLVHRDMKPENFLFKSTKEDSPLKATDFGLSDFIKPGKKFHDIVGSAYYVAPEVLKRRSGPESDVWSIGVITYILLCGRRPFWNKTEDGIFREVLRNKPDFRKKPWPGISSGAKDFVKKLLVKNPRARLTAAQALSHPWVREGGEASEIPVDISVLSNMRQFVKYSRFKQFALRALASTLKEEELADLKDQFDAIDVDKSGSISIEEMRHALAKDLPWRLKGPRVLEIIQAIDSNTDGLVDFEEFVAATLHIHQMAELDSERWGLRCQAAFSKFDLDGDGYITPDELRMVQHTGLKGSIEPLLEEADIDKDGRISLSEFRKLLRTASMSNLPSPRGPPNPQPL

SEQ ID NO: 2292 - DNA, 1650 bp, Oryza sativa
  CDS (1)..(1650)
atggggaacacgtgcggcgtcacgcttagatccaagtacttcgccagcttccgcggcgcgtcgcagcggcatgatgaggcggggtacgcgcccgtcgccaccagcgccgccgccgccgccgccgccgatgagccggccgggaagaaggccccgcgcggttctgcggcggcggcggacgcgccgcacgccgcgtccatgaagcgcggggcgcccgcgcccgcggagctgacggccaacgtgctcgggcacccgaccccgagcctgagcgagcactacgcgctcgggcgcaagctcgggcaggggcagttcggcaccacctacctctgcaccgacctcgccaccggggtggactacgcctgcaagtccatagccaagcggaagctcatcaccaaggaggacgtcgaggacgtccgccgcgagatccagatcatgcaccacctcgcgggccaccggaacgtcgtcgccatcaagggcgcctacgaggacccgcagtacgttcacattgtgatggagctctgcgccgggggcgagctgttcgaccgcatcatcgagcgcgggcaattcagcgagcgcaaagcggccgagctcacgcgaatcatcgttggtgtcatcgaggcgtgccactcgctcggggttatccatagggatctcaagcccgagaacttcttgctggcgaataaagacgacgatttgtcgctcaaggccatcgatttcggcttgtctgtgttcttcaagcctggtcaagtttttactgatgttgttggaagcccatactacgtggccccagaagtgttgcgtaaatgctacggaccagaagctgatgtttggacagctggtgtgattctttacatactattaagtggtgtaccgccattttgggcagagacgcagcaagggatatttgatgcagtgttaaaaggtgtaattgattttgattccgatccctggcctgtgatttctgatagtgcaaaggatcttataagaagaatgttgaatcctcgccccaaggagcgcctaacagctcatgaagttttatgtcatccgtggatttgtgaccatggagtcgctcctgatcgacctcttgatcctgctgtactttctcgcattaagcagttttcagcaatgaataagttaaagaagatggctttgcgagtaattgctgaaagcctttcagaggaggagattgcaggattgaaggaaatgttcaaggcaatggacacagataatagtggtgcaattacatatgatgaactcaaagaaggcatgagaaaatatggctcaacactaaaggatactgagattcgtgatcttatggaggcggcggatgtggacaacagtggaaccattgattatatagaattcattgctgctactctgcatctcaataaactagagcgagaggaacatctagtggcagccttttcttatttcgacaaagatggcagtggttatattacggtggatgagcttcagcaagcttgcaaagagcataacatgccagatgcttttctcgatgacgtcattaaagaagctgatcaggataatgatggtcgcattgactacggggaattcgttgccatgatgacaaagggcaatatgggtgttgggaggagaacaatgagaaacagcttgaatataagcatgagatga

SEQ ID NO: 2293 - protein, 549 aa, Oryza sativa
MGNTCGVTLRSKYFASFRGASQRHDEAGYAPVATSAAAAAAADEPAGKKAPRGSAAAADAPHAASMKRGAPAPAELTANVLGHPTPSLSEHYALGRKLGQGQFGTTYLCTDLATGVDYACKSIAKRKLITKEDVEDVRREIQIMHHLAGHRNVVAIKGAYEDPQYVHIVMELCAGGELFDRIIERGQFSERKAAELTRIIVGVIEACHSLGVIHRDLKPENFLLANKDDDLSLKAIDFGLSVFFKPGQVFTDVVGSPYYVAPEVLRKCYGPEADVWTAGVILYILLSGVPPFWAETQQGIFDAVLKGVIDFDSDPWPVISDSAKDLIRRMLNPRPKERLTAHEVLCHPWICDHGVAPDRPLDPAVLSRIKQFSAMNKLKKMALRVIAESLSEEEIAGLKEMFKAMDTDNSGAITYDELKEGMRKYGSTLKDTEIRDLMEAADVDNSGTIDYIEFIAATLHLNKLEREEHLVAAFSYFDKDGSGYITVDELQQACKEHNMPDAFLDDVIKEADQDNDGRIDYGEFVAMMTKGNMGVGRRTMRNSLNISMR

SEQ ID NO: 2294 - DNA, 1638 bp, Oryza sativa
  CDS (1)..(1638)
atgggcaactactactcgtgcggcgcctcgtccacgtccagcccgacctcaccgtccttggtcgactactactactgctatcatcggtatccaagcagttgcagtagtacaagcacagcaacaagtagcggggggaggatgccgatccgcagccaccagcagaggctgtcgtccccgacggcggtgctggggcacgagacgccggcgctgcgggaggtgtacacggtggggcggaagctggggcaggggcagttcgggacgacgtacctgtgcacgcaggtgtcgacgggggcggagtacgcgtgcaagtcgatcgcgaagaggaagctgctgagcccggaggacgtggaggacgtgcggcgggagatacagataatgcaccacctggcggggcacgggagcgtggtgaccatccagggcgcgtacgaggacaacctgtacgtgcacatcgtgatggagctgtgcgagggcggggagctgttcgaccgcatcgtggagcgcggctacttctcggagcgcaaggccgcggagatcacgcgcgtcatcgtcggggtggtggaggcgtgccactccctgggcgtcatgcaccgcgacctcaagcccgagaacttcctcctcaaggaatcctcctcctcctcctcgctcaaggccatcgacttcggcctctccgtcttcttcaagcccgggcaggtgttcagcgacgtggtggggagcccctactacgtggcgccggaggtgctgtgcaagcactacggccccgaggcggacgtgtggacggcgggcgtcatcgtctacatcctcctcagcggggtgccccccttctgggcggagacgcagcagggcatcttcgacgccgtcctccggggatccctcgacttcgactccgacccatggcccaccatctccgacagcgccaaggacctcatccgccgcatgctccgctccccgcccagggaacgcctcaccgcccaccaggtgctttgccacccctgggtctgcgacgacggcgtcgcccccgaccgccccctcgcccccgccgtcctctcccgcctcaagcagttctccgccatgaacaggctcaagaagatggcgctgcgtgtcatcgcccggaacctctccgaggaggagctcgctggcctcaaggagatgttcaaggccatggacaccgacgccagcggcgccatcaccttcgacgagctcaaggaaggactccgcagatacggctccaacctcagggaggctgagatcagggatctcatggacgccgccgacgttgacaaaagcggcaccatcgactacgacgagttcatcgccgccaccgtccacctcaacaagctggagcgcgaggagcacctgctcgccgccttcgcctacttcgaccgcgacggcagcggctacatcaccgtcgacgagctcgagcacgcctgcagggaccacaacatggccgacgttggcatcgacgacatcatccgcgaagtcgaccaagacaacgacggccgcatcgactacggcgagttcgtcgcaatgatgaagaagggcgctatcgatatcatcggcaacggaaggctcaccattggaaggccaactacggctacttccgacgatccttctccaacaatctcttcttcctctagatga

SEQ ID NO: 2295 - protein, 545 aa, Oryza sativa
MGNYYSCGASSTSSPTSPSLVDYYYCYHRYPSSCSSTSTATSSGGRMPIRSHQQRLSSPTAVLGHETPALREVYTVGRKLGQGQFGTTYLCTQVSTGAEYACKSIAKRKLLSPEDVEDVRREIQIMHHLAGHGSVVTIQGAYEDNLYVHIVMELCEGGELFDRIVERGYFSERKAAEITRVIVGVVEACHSLGVMHRDLKPENFLLKESSSSSSLKAIDFGLSVFFKPGQVFSDVVGSPYYVAPEVLCKHYGPEADVWTAGVIVYILLSGVPPFWAETQQGIFDAVLRGSLDFDSDPWPTISDSAKDLIRRMLRSPPRERLTAHQVLCHPWVCDDGVAPDRPLAPAVLSRLKQFSAMNRLKKMALRVIARNLSEEELAGLKEMFKAMDTDASGAITFDELKEGLRRYGSNLREAEIRDLMDAADVDKSGTIDYDEFIAATVHLNKLEREEHLLAAFAYFDRDGSGYITVDELEHACRDHNMADVGIDDIIREVDQDNDGRIDYGEFVAMMKKGAIDIIGNGRLTIGRPTTATSDDPSPTISSSSR

SEQ ID NO: 2296 - DNA, 1695 bp, Oryza sativa
  CDS (1)..(1695)
atggggaatcagtgccagaacgggactcttgggagtgattaccacaatcggttcccaagggagcatgccgttgggtacgttcagggggatagctacttggacttgaagaagttcgatgatacttggcctgaggtgaacaacttcaagcctactgctgctagtattctcaggcgggggttggatcctacatctatcaatgtccttgggcggaagacagcggacctaagggagcattatatcattggtcggaagcttggtcagggccagtttggcacaacttacctctgtaccgagatcaatacagggtgtgagtatgcttgcaagaccatcccaaagcgcaagctcatcaccaaggaggatgtagaagatgtgcgccgtgagattcagataatgcaccatttgtcgggccacaagaatgttgttgcaatcaaggatgtctatgaggatgggcaagcggtgcacattgtgatggagctctgcgctggtggggagctctttgacaggattcaggagaaggggcattacagcgagcggaaggctgcagagcttataagaataattgtcagcattgtggctatgtgccattcgctcggggtgatgcaccgtgatcttaagccagaaaatttcctccttttggataaagatgatgatctgtcaataaaggcaatagattttggtctatccgtgttcttcaaaccaggtcaggttttcactgagctggttgggagtccatattatgttgctcctgaggtattgcacaaacgttatggaccagaatctgatgtgtggtcagctggagtgatactttacgttttgctgagtggagtgccaccattttgggcagagacacaacaaggaatatttgatgcagttctgaagggtcacattgattttcaatctgatccatggccaaagatatctgacagtgcaaaggatcttataagaaaaatgctctctcattgcccttcggagcgtttgaaggcccatgaagtgctaaggcatccttggatctgtgaaaatggagttgccactgatcaagctctggatcccagtgttatctctcggctcaaacaattctctgcaatgaacaagttaaagaagttggctctgagagtgatagctgagcgtctttcagaggaggagattgctgggttaagagaaatgttcaaggcagtggacacaaaaaatagaggtgtaatcactttcggtgagcttagagaaggtttaagaagatttggcgctgaatttaaggatacagagattggtgatataatggaagcggcacacaacgacaataatgtaacaatccattatgaagaatttattgctgcaactctacctcttaacaagatagaacgtgaggagcacctgctggcagcttttacatattttgacaaagatgggagtggttatatcacagttgacaagcttcaacgagcttgtggagaacataacatggaggattcactccttgaagagattatttcagaggttgatcaaaacaatgacggccaaattgactacgccgaatttgtagccatgatgcaaggcagcaacgttggactagggtggcaaacaatggaaagcagtttgaatgtgcattcgctttgttggttgttctttcaacgacctgtattacgcaatgaaagtcgtcatgtttgcgtaactctaatctcaatgcttgcgttcctataa

SEQ ID NO: 2297 - protein, 564 aa, Oryza sativa
MGNQCQNGTLGSDYHNRFPREHAVGYVQGDSYLDLKKFDDTWPEVNNFKPTAASILRRGLDPTSINVLGRKTADLREHYIIGRKLGQGQFGTTYLCTEINTGCEYACKTIPKRKLITKEDVEDVRREIQIMHHLSGHKNVVAIKDVYEDGQAVHIVMELCAGGELFDRIQEKGHYSERKAAELIRIIVSIVAMCHSLGVMHRDLKPENFLLLDKDDDLSIKAIDFGLSVFFKPGQVFTELVGSPYYVAPEVLHKRYGPESDVWSAGVILYVLLSGVPPFWAETQQGIFDAVLKGHIDFQSDPWPKISDSAKDLIRKMLSHCPSERLKAHEVLRHPWICENGVATDQALDPSVISRLKQFSAMNKLKKLALRVIAERLSEEEIAGLREMFKAVDTKNRGVITFGELREGLRRFGAEFKDTEIGDIMEAAHNDNNVTIHYEEFIAATLPLNKIEREEHLLAAFTYFDKDGSGYITVDKLQRACGEHNMEDSLLEEIISEVDQNNDGQIDYAEFVAMMQGSNVGLGWQTMESSLNVHSLCWLFFQRPVLRNESRHVCVTLISMLAFL

SEQ ID NO: 2298 - DNA, 1629 bp, Oryza sativa
  CDS (1)..(1629)
atggggaatcagtgccagaacgggactcttgggagtgattaccacaatcggttcccaagggagcatgccgttgggtacgttcagggggatagctacttggacttgaagaagttcgatgatacttggcctgaggtgaacaacttcaagcctactgctgctagtattctcaggcgggggttggatcctacatctatcaatgtccttgggcggaagacagcggacctaagggagcattatatcattggtcggaagcttggtcagggccagtttggcacaacttacctctgtaccgagatcaatacagggtgtgagtatgcttgcaagaccatcccaaagcgcaagctcatcaccaaggaggatgtagaagatgtgcgccgtgagattcagataatgcaccatttgtcgggccacaagaatgttgttgcaatcaaggatgtctatgaggatgggcaagcggtgcacattgtgatggagctctgcgctggtggggagctctttgacaggattcaggagaaggggcattacagcgagcggaaggctgcagagcttataagaataattgtcagcattgtggctatgtgccattcgctcggggtgatgcaccgtgatcttaagccagaaaatttcctccttttggataaagatgatgatctgtcaataaaggcaatagattttggtctatccgtgttcttcaaaccaggtcaggttttcactgagctggttgggagtccatattatgttgctcctgaggtattgcacaaacgttatggaccagaatctgatgtgtggtcagctggagtgatactttacgttttgctgagtggagtgccaccattttgggcagagacacaacaaggaatatttgatgcagttctgaagggtcacattgattttcaatctgatccatggccaaagatatctgacagtgcaaaggatcttataagaaaaatgctctctcattgcccttcggagcgtttgaaggcccatgaagtgctaaggcatccttggatctgtgaaaatggagttgccactgatcaagctctggatcccagtgttatctctcggctcaaacaattctctgcaatgaacaagttaaagaagttggctctgagagtgatagctgagcgtctttcagaggaggagattgctgggttaagagaaatgttcaaggcagtggacacaaaaaatagaggtgtaatcactttcggtgagcttagagaaggtttaagaagatttggcgctgaatttaaggatacagagattggtgatataatggaagcggcacacaacgacaataatgtaacaatccattatgaagaatttattgctgcaactctacctcttaacaagatagaacgtgaggagcacctgctggcagcttttacatattttgacaaagatgggagtggttatatcacagttgacaagcttcaacgagcttgtggagaacataacatggaggattcactccttgaagagattatttcagaggttgatcaaaacaatgacggccaaattgactacgccgaatttgtagccatgatgcaaggcagcaacgttggactagggtggcaaacaatggaaagcagtttgaatgtagcattaagagacgcacctcaagtacattga

SEQ ID NO: 2299 - protein, 542 aa, Oryza sativa
MGNQCQNGTLGSDYHNRFPREHAVGYVQGDSYLDLKKFDDTWPEVNNFKPTAASILRRGLDPTSINVLGRKTADLREHYIIGRKLGQGQFGTTYLCTEINTGCEYACKTIPKRKLITKEDVEDVRREIQIMHHLSGHKNVVAIKDVYEDGQAVHIVMELCAGGELFDRIQEKGHYSERKAAELIRIIVSIVAMCHSLGVMHRDLKPENFLLLDKDDDLSIKAIDFGLSVFFKPGQVFTELVGSPYYVAPEVLHKRYGPESDVWSAGVILYVLLSGVPPFWAETQQGIFDAVLKGHIDFQSDPWPKISDSAKDLIRKMLSHCPSERLKAHEVLRHPWICENGVATDQALDPSVISRLKQFSAMNKLKKLALRVIAERLSEEEIAGLREMFKAVDTKNRGVITFGELREGLRRFGAEFKDTEIGDIMEAAHNDNNVTIHYEEFIAATLPLNKIEREEHLLAAFTYFDKDGSGYITVDKLQRACGEHNMEDSLLEEIISEVDQNNDGQIDYAEFVAMMQGSNVGLGWQTMESSLNVALRDAPQVH

SEQ ID NO: 2300 - DNA, 1803 bp, Oryza sativa
  CDS (1)..(1803)
atgggtctctgccatggcaagtcggcggcggtgctggagccaacggtggaggaggaggaggagggggcgacgcgcgtagccgaggccgcggcggcgccggcgaagccagcgtcgcctgcgccttcggcggcggcggcggcggcggcgccggcgaagcccgggacgccgaagcagcacaagttcccgttctacctgccgagcccgctcccggcgtcgagctacaagggctcgccggcgaactcgagcgtggcgtcgacgcccgcgcgcggcgggttcaagcggccgttcccgccgccgtcgccggcgaagcacatccgcgcgctcctggcgcggcgccacggctcggtgaagccgaacgaggcgtccatcccggagtccggcgagcccggcgtggcgctggacaagggcttcggcttctccaggcacttcgccgccaagtacgagctcggccgcgaggttggccgcggccacttcggctacacctgcgccgccacctgcaagaagggcgagctcaagggcgacgacgtcgccgtcaaggtcatccccaaggccaagatgactactgctattgccattgaagatgtcaggagagaagtcagaatattgagttctttggcagggcacagcaacttagtgcagttttatgatgcttatgaggatgaagaaaatgtatatatagttatggagttatgcaaaggaggtgaactgctggacaggattttggctagaggtggaaaatattctgaggaagatgcaaaggttgttatgcgccaaatcctaagtgttgcttcattttgtcatcttcagggtgttgttcatcgggatctgaaaccagagaatttccttttctcgtcaaaggatgagaactctgccatgaaggtcatagacttcggtttgtctgactttgtaaagccagatgagaggcttaatgacattgtcggaagtgcatattatgttgctcctgaagtgctccatcgatcttatggcactgaggcagatatgtggagcattggagtaatagtgtatattttgctttgtggcagccgtcctttctgggcacgtactgagtcaggaatattccgagctgtgctgaaagcagaccctagttttgaggaagccccatggccaaccctctctgctgaagcaaaagactttgtaaggaggctgctcaataaagattaccgcaagaggatgactgctgcacaagccctctgtcatccatggattcgtggtactgaagaagtgaagcttcctttggacatgataatttataggcttatgagggcttacataagttcatcttctttacggagagctgcattgagggcccttgccaagacattgacaacagatcaaatctattacctaagagaacagtttgaattgataggcccaaacaagagcgatcttattactttgcaaaatttgaagacggccttgatgaagaactccacaaatgcaatgaaggattctagggtggttgactttgttaacacaatatccaatattcagtacagaaagttggattttgaggagttttctgctgctgccatcagtgtttaccagatggaaggtttggaaacctgggaacaacatgcccggcaagcgtacgagttctttgataaggagggtaaccgaccaattgtgatcgacgagctcgcatcggaacttggattgggtccttcggttcccctacatgttgttctccaagattggatcagacatcctgatggaaaactcagcttccttgggttcatgaaactattgcatggagtttcttcgcgtaccatcccaaaaacctga

SEQ ID NO: 2301 - protein, 600 aa, Oryza sativa
MGLCHGKSAAVLEPTVEEEEEGATRVAEAAAAPAKPASPAPSAAAAAAAPAKPGTPKQHKFPFYLPSPLPASSYKGSPANSSVASTPARGGFKRPFPPPSPAKHIRALLARRHGSVKPNEASIPESGEPGVALDKGFGFSRHFAAKYELGREVGRGHFGYTCAATCKKGELKGDDVAVKVIPKAKMTTAIAIEDVRREVRILSSLAGHSNLVQFYDAYEDEENVYIVMELCKGGELLDRILARGGKYSEEDAKVVMRQILSVASFCHLQGVVHRDLKPENFLFSSKDENSAMKVIDFGLSDFVKPDERLNDIVGSAYYVAPEVLHRSYGTEADMWSIGVIVYILLCGSRPFWARTESGIFRAVLKADPSFEEAPWPTLSAEAKDFVRRLLNKDYRKRMTAAQALCHPWIRGTEEVKLPLDMIIYRLMRAYISSSSLRRAALRALAKTLTTDQIYYLREQFELIGPNKSDLITLQNLKTALMKNSTNAMKDSRVVDFVNTISNIQYRKLDFEEFSAAAISVYQMEGLETWEQHARQAYEFFDKEGNRPIVIDELASELGLGPSVPLHVVLQDWIRHPDGKLSFLGFMKLLHGVSSRTIPKT

SEQ ID NO: 2302 - DNA, 1725 bp, Oryza sativa
  CDS (1)..(1725)
atgggcaacacgtgctgcgtcgctccggctaccaccgatgaggtgggcgcgccgccgcgagatcatcatcacgcggccaagaagtcgccggcgccgtcggcgacgacgacgacggcgacgaggcagaggcatggccaagaacccaagcccaagcccaagcccagggcgagggcgaagcccaacccgtacgactgggcgccgccgcgggtgctgccggcgaggggcggcgccgccgcgtccgcggtgcgcgtgctggagggcgtggtgccgcaccacccgcggctgcgcgtcacggacaagtaccagctcggccgcgagctggggcgcggcgagttcggggtgacgcacctcgccacggaccgcgcgacgcgggagcggctggcgtgcaagtccatcccgaagcgccgcctccgcaccgccgtggacgtcgccgacgtgcggcgcgaggtggccatcatggcgtcgctcccggaccacccggcgctggtgcgcctccgcgccgcctacgaggacgccgacgcggtgcacctggtgatggagctctgcgacggcggcgagctgttcgaccggatcgtggcgaggggccggtacacggagcgcgccgcggccgccgcggcgcggacggtggcggaggtggtgcgcgcgtgccacgcccacggcgtgatgcaccgcgacctcaagccggagaacttcctctacgccggcaaggccgaggacgcgcagctcaaggccatcgatttcggcctctccgtcttcttccgacctggggagaggttcagggagatcgtggggagcccgtactacatggcgccggaggtgctccggcgagactacggcccggaggtggacatctggtccgccggcgtcatcctctacatcctcctgtgcggcgtcccgccgttctgggccgagacggagcagggcgtggcgcgcgccatcctccgcggcgccgccgacttcgaccgggagccatggccgcgcatctcccgcgccgccaagtccctcgtccgccagatgctcgacgtggacccgcgccgccgccccacggcgcagcaggtgctcgaccacccctggctccaccacgccgcccgcgcccccaacgtccccctcggcgacgtcgtccgcgcccgcctcaagcagttctccctcatgaaccgcctcaagaagaaggccatgcgggtgatcgcggaacacctgtcggtagaggaggtggaggtgatcaaggacatgttcgcgctcatggacaccgacaacaacggcagggtcacgctccaggagctcaaggacggcctcaccaaggtcggctccaagctcgccgagcccgagatggagcttctcatggaggccgcggatgtggatggcaatgggtacctggactacggcgagttcgtggcggtgaccatccacctgcagcgcctctccaacgacaaccacctccgcacggccttcctcttcttcgacaaggacggcagcggctacatcgaccgcgccgagctcgccgacgccctcgccgacgactccggccacgccgacgacgccgtgctcgaccacatccttagagaagtcgacaccgacaaggatgggcggatcagctacgaggagttcgtggcgatgatgaaatccgggacggattggaggaaggcgtcgcggcaatactcgagggagcggttcaagacgctcagcaacagcctcatcaaggacggctcgatcaccatggcgcgctag

SEQ ID NO: 2303 - protein, 574 aa, Oryza sativa
MGNTCCVAPATTDEVGAPPRDHHHAAKKSPAPSATTTTATRQRHGQEPKPKPKPRARAKPNPYDWAPPRVLPARGGAAASAVRVLEGVVPHHPRLRVTDKYQLGRELGRGEFGVTHLATDRATRERLACKSIPKRRLRTAVDVADVRREVAIMASLPDHPALVRLRAAYEDADAVHLVMELCDGGELFDRIVARGRYTERAAAAAARTVAEVVRACHAHGVMHRDLKPENFLYAGKAEDAQLKAIDFGLSVFFRPGERFREIVGSPYYMAPEVLRRDYGPEVDIWSAGVILYILLCGVPPFWAETEQGVARAILRGAADFDREPWPRISRAAKSLVRQMLDVDPRRRPTAQQVLDHPWLHHAARAPNVPLGDVVRARLKQFSLMNRLKKKAMRVIAEHLSVEEVEVIKDMFALMDTDNNGRVTLQELKDGLTKVGSKLAEPEMELLMEAADVDGNGYLDYGEFVAVTIHLQRLSNDNHLRTAFLFFDKDGSGYIDRAELADALADDSGHADDAVLDHILREVDTDKDGRISYEEFVAMMKSGTDWRKASRQYSRERFKTLSNSLIKDGSITMAR

SEQ ID NO: 2304 - DNA, 1800 bp, Oryza sativa
  CDS (1)..(1800)
atggggaacacgtgcgtcggccccagcatcagcaagaacggcttcttccagtccgtctccacggtgctctggaaggcgcgccaggacggcgacgacgcgctgcccggcgccaatggcgcccctgacggcggcggccagggccggttgccggcgccgccgccgccgacttccgacgcgccgctcgccgtccaaaacaagccccccgagcacgtcaagatcgtctcgaccacggacaccgcctccgccgagcaggacgcctccaagtcgagcgccggctcggactccggcgaggccgccaggccgcggccgagggtgccgccggtgaagcgcgtctccagcgccgggctgctcgtcggctcggtgctgaagcgcaagacggagagtctcaaggacaagtacagcctggggcggaagctcgggcaggggcagttcgggacgacgtacctgtgcgtggagcgcgccaccggcaaggagttcgcctgcaagtccatcctgaagcggaagctggtcaccgacgacgacgtcgaggacgtccgccgcgagatccagataatgtaccacctcgccggccaccccaacgtgatctccatcaggggcgcctacgaggacgccgtcgccgtgcacctcgtcatggagctctgcgccggcggcgagctgttcgaccggatcgtccagaaggggcactacaccgagcggaaggcggcggagctcgccagggtcatcgtcggcgtcgtcgaggtgtgccactccatgggcgtgatgcaccgtgatctcaagcccgagaacttcctcttcgccgaccagacggaggaggccgctctcaagaccattgactttggtctctccattttctttcgcccaggtcaagtattcactgatgttgttggtagcccttactatgtcgcgccagaagttctgaaaaagaaatatggtcaagaggcagatgtctggagcgctggtgtgataatttacatcttgttgtgtggtgtgccgccattttgggcagagaacgagcagggtatatttgaagaggttttgcatggtagacttgactttcagtcagaaccatggcctagcatctctgaaggtgccaaagatctcgtaaggagaatgcttgttagggacccgaagaagagattgacagctcatgaagttttaaggcatccatgggtccaggttggtggtttggctcctgacaagcccctggattctgctgttctatctcgtatgaagcaattctcagctatgaataagctgaaaaagatggctcttagggtcattgcagagaacctatctgaagacgaaatcgccggcctgaaagaaatgttcaagatgatcgacacagacaacagtggacagatcaccttcgaagaactcaaggttggtctgaaaaaagtcggtgctaacctccaagaatccgagatctacgcactcatgcaagccgcagatgtagataacagcggcacgatagattacggtgagttcatcgctgcaactctgcatatgaacaagatcgagcgggaggatcacctgttcgcggcgttccaatacttcgacaaggacggcagcggctacatcacggccgatgagctgcagctcgcctgcgaggagttcggcttgggagacgttcagctcgaggagatgatcagagaagtcgacgaagacaacgatggtcgcatagattacaacgagttcgtggcgatgatgcagaagccgacgatggggctcccggcgaagaagtccggcgggctgcagaacagtttcagcatcggcttcagggaggccttgaggatgtcttga

SEQ ID NO: 2305 - protein, 599 aa, Oryza sativa
MGNTCVGPSISKNGFFQSVSTVLWKARQDGDDALPGANGAPDGGGQGRLPAPPPPTSDAPLAVQNKPPEHVKIVSTTDTASAEQDASKSSAGSDSGEAARPRPRVPPVKRVSSAGLLVGSVLKRKTESLKDKYSLGRKLGQGQFGTTYLCVERATGKEFACKSILKRKLVTDDDVEDVRREIQIMYHLAGHPNVISIRGAYEDAVAVHLVMELCAGGELFDRIVQKGHYTERKAAELARVIVGVVEVCHSMGVMHRDLKPENFLFADQTEEAALKTIDFGLSIFFRPGQVFTDVVGSPYYVAPEVLKKKYGQEADVWSAGVIIYILLCGVPPFWAENEQGIFEEVLHGRLDFQSEPWPSISEGAKDLVRRMLVRDPKKRLTAHEVLRHPWVQVGGLAPDKPLDSAVLSRMKQFSAMNKLKKMALRVIAENLSEDEIAGLKEMFKMIDTDNSGQITFEELKVGLKKVGANLQESEIYALMQAADVDNSGTIDYGEFIAATLHMNKIEREDHLFAAFQYFDKDGSGYITADELQLACEEFGLGDVQLEEMIREVDEDNDGRIDYNEFVAMMQKPTMGLPAKKSGGLQNSFSIGFREALRMS

SEQ ID NO: 2306 - DNA, 1731 bp, Oryza sativa
  CDS (1)..(1731)
atgggcaacaactgcgtcggccccagcgccgccggccagaacgggttcttcgccaacgtcgccctctggcgacccaggcccgccgacgcggctccccccgccctcccgccgccctcctccgcgccgtccgaccaggcgcccgagcccgtcacaatccccccatcggagcactcctcccaccactcctcccgctccaccgacccgtcgacccccacctccgccgcggagcagccggcgaacaaggcggcgcccaaggtcaagcgcgtccagagcgccgggctgctcgccgattccgtcctcaagcgcgacgtcaacaccgcccgcctcaaggatctatacacgatcgggaagaagctagggcaggggcagttcggcaccacctacctctgcgtcgagaaggccacaggtcgggagttcgcctgcaagtccatcgccaagaggaagctgctcacgcaggaggacgtcgaggacgtgcgccgcgagatccagatcatgcaccacctcgcgggccacgccaacgtcgtctccatcgtcggggcctacgaggacgccgtcgcggtgcagctcgtcatggagctctgcgccggcggggagctgttcgacaggatcatccagagggggcattactccgagaaggccgcggcgcagctcgcgcgggtgatcgtcggcgtcatcgaggcgtgccactccctcggcgtgatgcacagggatctcaagccggagaatttcctcttcatccaccagaaggaggattcgcctctcaaggccatcgatttcggcctctccatcttcttcaagccaggtgagacatttacggatgttgttggaagcccgtactatgttgcacctgaggttcttatgaaacattatggtcgtgaggttgacgtctggagtgctggtgtgataatctacattttgttgagtggggttcctccattttgggatgaaagtgagcaagggatatttgaacaagttttgaaaggtgatctggacttctcatctgagccttggcctaatatctcagagagcgcaaaggatttggtcagaaaaatgcttattcgtgatccaaaaaagagattgactgcccatgaagccctatgtcatccttgggtctgtgttgatggagttgctcctgacaagcctcttgattccgctgtcttgagtcggttaaaacaattttctgcaatgaacaaactaaagaaaatggcgcttagggttattgctgagagtttatcagaagaagaaattgcaggattaaaagagatgttcaaaatgctagacactgacaacagcggtcatattacactggaagaactaaaaacaggcttgcagagagttggtgctaatttgatggactcggaaattgatgctctaatggaggcagcagatattgacaacagcggaacaattgattatggagaattcattgctgcaactttgcatataaacaaagtagagaaggaggataagctgtttgcagctttctcatactttgataaagatggcagcggttacattactcaagatgagcttcaaaaggcatgtgaggaattcggtataggtgatacccgtattgaggatattattggagacattgatcaggacaatgatggacggatcgactacaatgagtttgtcgaaatgatgcagaagggaaataatgcaatgggtaaaatgggtcagcatagtaccggaaactttggcctcggggaagcgctaaaacttcggtaa

SEQ ID NO: 2307 - protein, 576 aa, Oryza sativa
MGNNCVGPSAAGQNGFFANVALWRPRPADAAPPALPPPSSAPSDQAPEPVTIPPSEHSSHHSSRSTDPSTPTSAAEQPANKAAPKVKRVQSAGLLADSVLKRDVNTARLKDLYTIGKKLGQGQFGTTYLCVEKATGREFACKSIAKRKLLTQEDVEDVRREIQIMHHLAGHANVVSIVGAYEDAVAVQLVMELCAGGELFDRIIQRGHYSEKAAAQLARVIVGVIEACHSLGVMHRDLKPENFLFIHQKEDSPLKAIDFGLSIFFKPGETFTDVVGSPYYVAPEVLMKHYGREVDVWSAGVIIYILLSGVPPFWDESEQGIFEQVLKGDLDFSSEPWPNISESAKDLVRKMLIRDPKKRLTAHEALCHPWVCVDGVAPDKPLDSAVLSRLKQFSAMNKLKKMALRVIAESLSEEEIAGLKEMFKMLDTDNSGHITLEELKTGLQRVGANLMDSEIDALMEAADIDNSGTIDYGEFIAATLHINKVEKEDKLFAAFSYFDKDGSGYITQDELQKACEEFGIGDTRIEDIIGDIDQDNDGRIDYNEFVEMMQKGNNAMGKMGQHSTGNFGLGEALKLR

SEQ ID NO: 2308 - DNA, 1617 bp, Oryza sativa
  CDS (1)..(1617)
atgggcaactgctgcggcacgccggcgacggcggaggagggcgggaagaggaggaggagggggaagcagaagaaggcgaaccccttcaccgtcgcgtacaaccgcgcgccgtcgtcggcgggggcggcggcggggaggcccgggctgatggtgctgcgggacccgacggggcgggacctcggcgcgcggtacgagctcggcggcgagctggggcgcggcgagttcgggatcacgtacctgtgcacggaggcggagacgggggacaggtacgcgtgcaagtcgatatcgaagcggaagctgcggacgccggtggacgtggaggacgtgcggcgcgaggtggagatcatgcgccacatgccgtcgcatccgaacatcgtcagcctccgcgccgcctacgaggacgaggacaacgtgcacctcgtcatggagctctgcgagggcggcgagctcttcgacaggatcgtcgcgcggggccactacaccgagcgcgccgccgccgccgtcacgcgcaccatcgtcgaggtggttcagatgtgccacaggcatggtgtcatgcaccgcgaccttaaaccagaaaacttcctatatgctaacaagaaggatagttctcctctgaaggcaattgattttgggctatctgtgttcttcaggcctggtgagcggttcactgaaattgtaggcagtccatattacatggctccagaggttttaaagcgacactatggccctgaagttgatgtctggagtgcaggagtgatactttacatacttctttgcggtgtaccaccattttgggcagaaaccgagcagggagtagcgcaggcaattatacgctctgtggtagatttcaaaagagaaccatggcccagggtatctgagccagctaaagatcttgttaagcggatgttggacccaaatcccatgacaaggcttactgcagaacaagtacttgaacatccatggttacatgattctaaaaagatgcctgacattcctcttggtgatgctgtccgagctagactgcagcaatttgctgcgatgaacaagttaaagaagaaagcccttaaggtcattgctgagcatttgtctgcagaggaagcagctgacataaaggacatgtttgataaaatggatgtgagcaagaatggccagctgacctttgaggatttcaaggctggcatacgtaaacttgggaatcagatgcctgattcagatcttaagatattgatggatgctgctgatattgacaaaaatgggatcctggactatcaagaatttgttgctgtgtctatccatgtgaggaaaataggcaatgatgaacatatccagaaggctttctcatattttgaccaaaataagagtggttacatagaaattgaagagcttagagaggccttggttgatgaaatagatggcaatgatgaagacattattaatagcatcatccgtgatgtagatacagacaaggatgggaaaataagctacgacgagtttgccgtcatgatgaaggccggcactgactggaggaaggcatctaggcagtactcaagacaaaggttcagtaacctcagtctgaagcttcaaaaggacggatccatcagtgacgacacgcaatag

SEQ ID NO: 2309 - protein, 538 aa, Oryza sativa
MGNCCGTPATAEEGGKRRRRGKQKKANPFTVAYNRAPSSAGAAAGRPGLMVLRDPTGRDLGARYELGGELGRGEFGITYLCTEAETGDRYACKSISKRKLRTPVDVEDVRREVEIMRHMPSHPNIVSLRAAYEDEDNVHLVMELCEGGELFDRIVARGHYTERAAAAVTRTIVEVVQMCHRHGVMHRDLKPENFLYANKKDSSPLKAIDFGLSVFFRPGERFTEIVGSPYYMAPEVLKRHYGPEVDVWSAGVILYILLCGVPPFWAETEQGVAQAIIRSVVDFKREPWPRVSEPAKDLVKRMLDPNPMTRLTAEQVLEHPWLHDSKKMPDIPLGDAVRARLQQFAAMNKLKKKALKVIAEHLSAEEAADIKDMFDKMDVSKNGQLTFEDFKAGIRKLGNQMPDSDLKILMDAADIDKNGILDYQEFVAVSIHVRKIGNDEHIQKAFSYFDQNKSGYIEIEELREALVDEIDGNDEDIINSIIRDVDTDKDGKISYDEFAVMMKAGTDWRKASRQYSRQRFSNLSLKLQKDGSISDDTQ

SEQ ID NO: 2310 - DNA, 1602 bp, Oryza sativa
  CDS (1)..(1602)
atgggcaactgcttcaccaagacgtacgagatacccatcacgtcgggcacgatgcggcggccggcgtcgaccgcggagcgcagcaaggcgcgtggcggcgatgagccggggacgtggcggcggccgagcttcccgaggcacggggccccgccgcaccggccgccgacgggctcgtcttcggcggcgggggcgctgtcccggagggcgtccggcggcggcggggagatgggccccgtgctgcagagggcgatggtgagcgtgcggtcgctgtaccagctggaccggaagctggggagcgggcagttcgggacgacgtacctgtgcacggagcgcgcgacggggaaccggtacgcgtgcaagtcggtgtcgaagcggaagctggtgcggcgcaccgacgtggacgacgtgcgccgggagatcaccatcctgcagcacctcagcgggcagcccaacatcgcggagttcaggggcgcgtacgaggacaacgaccacgtgcacctcgtcatggagttctgctccggcggcgagctgttcgaccgcatcacggccaaggggagctactccgagcggcaggccgctgccgtgtgccgggacatcctcaccgtcgttcacgtctgccacttcatgggggtcatacaccgcgacctcaagccggagaacttcctgctcgccagcgccgacgacgacgcgccgctcaaggccatcgacttcggactctccgtcttcatcgaagaaggtaaagtgtacaaggacattgtcggaagtgcttattatgtggcgccagaagtgttacaacgaaattatgggaaagaagccgacatctggagcgctggggtgatattgtatatccttctatgcgggacgcccccattctgggcagagacagagaaaggcatattcgatgctatactggtcaaccaagttgatttcagtaccagcccgtggccttcgatatctgaaagtgcaaaggatcttatcagacaaatgttacatagagatccccagaagaggattactgcatcgcaggccttagaacatcgatggctcaaagaaggcggtgcatctgacagacctatcgatagcgcagtcctatcaagaatgaagcaattcaaggcaatgaacaagttaaagcaattagctcttaaggtaattgcagagaacctatcaccagaggaaatcaagggcttgaaacagatgttcaataacatggatacagacagaagtggcacaatcacggttgaagaactgaaggttggtctgacaaagctaggatcaagaattagtgaagccgaggttcagaagcttatggaagcagttgacgtagacaagagtggcagcattgattactcggagttcctcacagctatgataaataagcataaactggaaaaggaggaggatttacttcgtgcatttcaacattttgacaaagataacagcgggtacataacaagagatgaactggaacaagccatggcagagtacggaatgggtgatgaagcaaacattaaacaagtactggatgaagttgacaaagacaaggacgggagaattgactatgaagagtttgtggaaatgatgaggaaaggaatacaaacctga

SEQ ID NO: 2311 - protein, 533 aa, Oryza sativa
MGNCFTKTYEIPITSGTMRRPASTAERSKARGGDEPGTWRRPSFPRHGAPPHRPPTGSSSAAGALSRRASGGGGEMGPVLQRAMVSVRSLYQLDRKLGSGQFGTTYLCTERATGNRYACKSVSKRKLVRRTDVDDVRREITILQHLSGQPNIAEFRGAYEDNDHVHLVMEFCSGGELFDRITAKGSYSERQAAAVCRDILTVVHVCHFMGVIHRDLKPENFLLASADDDAPLKAIDFGLSVFIEEGKVYKDIVGSAYYVAPEVLQRNYGKEADIWSAGVILYILLCGTPPFWAETEKGIFDAILVNQVDFSTSPWPSISESAKDLIRQMLHRDPQKRITASQALEHRWLKEGGASDRPIDSAVLSRMKQFKAMNKLKQLALKVIAENLSPEEIKGLKQMFNNMDTDRSGTITVEELKVGLTKLGSRISEAEVQKLMEAVDVDKSGSIDYSEFLTAMINKHKLEKEEDLLRAFQHFDKDNSGYITRDELEQAMAEYGMGDEANIKQVLDEVDKDKDGRIDYEEFVEMMRKGIQT

SEQ ID NO: 2312 - DNA, 1656 bp, Oryza sativa
  CDS (1)..(1656)
atgggcaacgcatgcggcggttcccttagatccaagtacctgagcttcaagcagaccgcgtcgcagcgccacgacaccgacgacaacaacaacgccgccgcggccgactcgccgaagaagccctcccgccctccagcagccgccaagacggacgaccacccagtctccgcgtcggcgccggccgccgccatgaggcgcggccaggcgcccgccgacctcggctcggtgctcggccaccccacccccaacctccgcgacctctacgccatgggcaggaagctcgggcaggggcagttcggcaccacctacctctgcaccgagctgtccactggggtggactacgcctgcaagtccatttccaagcgcaagctcatcaccaaggaggacatcgaagacgttcgccgcgagatccagatcatgcaccatctctcgggccacaagaacgtcgtcgccatcaagggcgcctacgaggaccagctatacgtgcacatcgtcatggagctctgcgccggcggcgagctcttcgatcgcatcatacagcgcggccactacagcgagcggaaggccgccgagctcacgcggatcatcgttggggtcgtcgaggcctgccactcgctcggggtcatgcaccgggacctcaagccagaaaacttcctgcttgccaacaaggacgatgacctctcgctcaaggccatagattttggtctctcagtcttcttcaagcccggtcaaacttttaccgatgttgtcggaagcccatattacgtagctccagaagtgttgttgaaacactatggaccagaagctgatgtatggactgcaggtgtcattctctacattttactaagtggtgtacccccattctgggcagagacacaacaaggaatatttgatgctgtactaaaaggtttcattgattttgattctgatccttggcctgtgatctctgagagcgcaaaggatcttataacaaaaatgctcaatcctcgcccaaaggaacgcttaacagcacatgaagttctatgccatccatggattcgtgatcacggagttgctccagatcggcctcttgatccagctgtcctatctcgcatcaagcagttctctgcaatgaataagttgaagaagatggctttgcgggtaatagctgagagtctctcagaggaggaaatcgctgggttgaaggaaatgtttcagactatggatgctgataacagtggtgcgatcacatatgatgagcttaaagaaggcttgagaaaatatggctcaacacttaaggacaccgagattcgtgatcttatggatgcagcagatatagacaacagcggaacaattgattatatcgaattcattgctgcaacattgcatctcaataaactggagcgagaggaacatcttgtggcagctttttcatattttgacaaagatggaagtggttacatcacagtggatgaactgcagcaagcttgcaaagagcataacatgcccgatgcttttcttgatgatgtcatcaatgaagctgatcaggacaatgatgggcgcattgactatggagaatttgttgccatgatgaccaagggcaatatgggagtcggacgaagaacaatgagaaacagcttgaatatcagcatgagggacgcacctggtgcactctag

SEQ ID NO: 2313 - protein, 551 aa, Oryza sativa
MGNACGGSLRSKYLSFKQTASQRHDTDDNNNAAAADSPKKPSRPPAAAKTDDHPVSASAPAAAMRRGQAPADLGSVLGHPTPNLRDLYAMGRKLGQGQFGTTYLCTELSTGVDYACKSISKRKLITKEDIEDVRREIQIMHHLSGHKNVVAIKGAYEDQLYVHIVMELCAGGELFDRIIQRGHYSERKAAELTRIIVGVVEACHSLGVMHRDLKPENFLLANKDDDLSLKAIDFGLSVFFKPGQTFTDVVGSPYYVAPEVLLKHYGPEADVWTAGVILYILLSGVPPFWAETQQGIFDAVLKGFIDFDSDPWPVISESAKDLITKMLNPRPKERLTAHEVLCHPWIRDHGVAPDRPLDPAVLSRIKQFSAMNKLKKMALRVIAESLSEEEIAGLKEMFQTMDADNSGAITYDELKEGLRKYGSTLKDTEIRDLMDAADIDNSGTIDYIEFIAATLHLNKLEREEHLVAAFSYFDKDGSGYITVDELQQACKEHNMPDAFLDDVINEADQDNDGRIDYGEFVAMMTKGNMGVGRRTMRNSLNISMRDAPGAL

SEQ ID NO: 2314 - DNA, 1644 bp, Oryza sativa
  CDS (1)..(1644)
atgggtaactgctgccggtcgccggcggccgccgcgagggaggatgtgaagacatcgcacttccccgcctctaccggaggcgggaagaagaagccgcaccaggcgcggaacgggggaggcggaggtggtggtggaggagggggaggctgggagaagaagcggctgtcggtgctcggggaggaagggagcgaggtgaacggcgggatcgaggagaagtacgcgctggacagggagctggggcgcggcgagttcggggtgacgtacctgtgcatggaccggtgctcgcgggagctcctcgcgtgcaagtcgatctcgaagcggaagctgcggacgcccgtggacgtggaggacgtgcggcgggaggtggccatcatgcggcacctgcccaggagcgccagcatcgtgtcgctgcgggaggcgtgcgaggacgacggcgccgtgcacctcgtcatggagctgtgcgagggaggggagctgttcgaccgcatcgtcgccaggggccactacacggagcgcgcggcggcggcggtcacgcgcaccatcgtcgaggtcgtgcagctctgccaccgccacggcgtgatccaccgggacctcaagcccgagaacttcctcttcgccaacaagaaggagaattccccactcaaggccatcgacttcggcctctccatcttcttcaagcctggtgaaaaattttctgaaattgtgggaagtccatattacatggctcctgaagtgctgaagagaaactatggacctgaaatagacatatggagtgctggtgtcatcttgtatattttgttatgtggagttcctcctttttgggctgagactgaacaaggagtggcacaagctatacttcgtggaaatatagattttaagcgagaaccatggcccaatgtttctgataatgctaaagatctagttcgtcagatgcttcagcctgacccaaaactcaggctaacagcaaagcaagttcttgagcatacctggcttcaaaatgctaagaaagctccaaatgttccacttggagatattgtaaagtcaaggctgaaacagttttcaaggatgaatagattcaaaagaagagctctaagggttattgctgatcacttatcagccgaagaggttgaggacataaaggacatgttcaaggtgatggatacagataatgatggtatagtctcttatgaagagttaaagagtggaatcgcaaaatttggttcccatcttgcagaatctgaagtgcaaatgcttattgaagctgtggatacaaatggtaggggagcactagattatggtgaatttttggccgtttcacttcacttacaaaggatggcaaatggcgagcacctccggcgggccttcctatttttcgacaaggatggcaatggctatattgagcccgaggagcttcaggaggctctggtggaggatggggcaactgatatcatggaagtggtgaaggacatattgcaagaggttgacactgacaaggatggcaaaattagctatgaagaattcgtagcaatgatgaagactggcacagattggagaaaggcgtcacggcattattcaagaggacgtttcaacagccttagcataaggcttataaaggatggatctgtaaaattgggcaacgagtga

SEQ ID NO: 2315 - protein, 547 aa, Oryza sativa
MGNCCRSPAAAAREDVKTSHFPASTGGGKKKPHQARNGGGGGGGGGGGGWEKKRLSVLGEEGSEVNGGIEEKYALDRELGRGEFGVTYLCMDRCSRELLACKSISKRKLRTPVDVEDVRREVAIMRHLPRSASIVSLREACEDDGAVHLVMELCEGGELFDRIVARGHYTERAAAAVTRTIVEVVQLCHRHGVIHRDLKPENFLFANKKENSPLKAIDFGLSIFFKPGEKFSEIVGSPYYMAPEVLKRNYGPEIDIWSAGVILYILLCGVPPFWAETEQGVAQAILRGNIDFKREPWPNVSDNAKDLVRQMLQPDPKLRLTAKQVLEHTWLQNAKKAPNVPLGDIVKSRLKQFSRMNRFKRRALRVIADHLSAEEVEDIKDMFKVMDTDNDGIVSYEELKSGIAKFGSHLAESEVQMLIEAVDTNGRGALDYGEFLAVSLHLQRMANGEHLRRAFLFFDKDGNGYIEPEELQEALVEDGATDIMEVVKDILQEVDTDKDGKISYEEFVAMMKTGTDWRKASRHYSRGRFNSLSIRLIKDGSVKLGNE

SEQ ID NO: 2316 - DNA, 1569 bp, Oryza sativa
  CDS (1)..(1569)
atgggcaactgctgcccgccggggtcatcctccgagcccgacccgccgccggcgtcctccggctcctcccgccccgccggcagcgccggcgccgcggcctcgccggcgacaatatccccctccgccgcgccggcgcccgccaagccgcccgcgcccatcggccccgtcctcgggcgccccatggaggacgtcaagtcgatctacaccgtgggcaaggagctcgggcgcgggcagttcggcgtcacgtcgctgtgcacccacaaggcgacggggcagcggttcgcgtgcaagacgatcagcaagcggaagctgtcgaccaaggaggacgtcgaggacgtccgccgcgaggtgcagatcatgtaccacctcgccggccagcccggggtggtggagctcaagggcgcgtacgaggacaagcacgccgtccacctcgtcatggagctctgtgccggcggcgagctgttcgaccggatcatcgccaagggccactacaccgagcacgccgcctcctcgctcctccgcaccatcgtcgagatcatccacacctgccactccatgggcgtcatccaccgcgacctcaagcccgagaacttcctcctcctcagcaaggacgagcacgcccctctcaaggccaccgacttcggcctctccgtcttcttcaaagaaggtgaggtgttcagggacatcgtcgggagcgcctactacatcgcgccggaggtgctcaagcggagctacggcccggaggcggacatctggagcatcggcgtcatgctctacatccttctctgcggagttcctcccttctgggcagaatcggagcacggcatcttcaactccatcttgagagggcatgtcgacttcagcagcgagccatggtcgcgcatctcgcatggcgccaaggaccttgtcaggcggatgctccattctgaccccaagcagaggatttctgcatatgacgtgctcaatcatccatggataaaggaagacggcgaggcgcccgatacgccgctcgacaatgctgttcttggcaggctcaagcagttcagagctatgaaccagttcaagaaggctgctctaagggttatcgccggatgcttgtcggaggaggagatcagggggctcaaggagatgttcaagagcatggattccgacaacagcggcacgatcaccgtcgacgagctgaggaaagggctggccaagaagggtaccaagctcaccgaagctgaagttcagcagctaatggaagctgctgatgcagacggcaacgggacaatcgattacgaggagttcatcactgcgacgatgcacatgaacaggatggacagggaggagcacctctacaccgcgttccagtacttcgacaaggacaacagcgggtacatcacgatcgaagagctcgagcaagcgctgagagagaaagggttgatggacggcagggagatcaaggacatcatatccgaagtcgacgccgacaacgacgggaggatcaactacacggagttcgtggccatgatgaggaaaggcgacccggaggcgaacccgaagaagcggcgcgacgtcgtgctgtag

SEQ ID NO: 2317 - protein, 522 aa, Oryza sativa
MGNCCPPGSSSEPDPPPASSGSSRPAGSAGAAASPATISPSAAPAPAKPPAPIGPVLGRPMEDVKSIYTVGKELGRGQFGVTSLCTHKATGQRFACKTISKRKLSTKEDVEDVRREVQIMYHLAGQPGVVELKGAYEDKHAVHLVMELCAGGELFDRIIAKGHYTEHAASSLLRTIVEIIHTCHSMGVIHRDLKPENFLLLSKDEHAPLKATDFGLSVFFKEGEVFRDIVGSAYYIAPEVLKRSYGPEADIWSIGVMLYILLCGVPPFWAESEHGIFNSILRGHVDFSSEPWSRISHGAKDLVRRMLHSDPKQRISAYDVLNHPWIKEDGEAPDTPLDNAVLGRLKQFRAMNQFKKAALRVIAGCLSEEEIRGLKEMFKSMDSDNSGTITVDELRKGLAKKGTKLTEAEVQQLMEAADADGNGTIDYEEFITATMHMNRMDREEHLYTAFQYFDKDNSGYITIEELEQALREKGLMDGREIKDIISEVDADNDGRINYTEFVAMMRKGDPEANPKKRRDVVL

SEQ ID NO: 2318 - DNA, 1629 bp, Oryza sativa
  CDS (1)..(1629)
atgggcgcccgcgcctctcgccaccgccaatcccccgaccaatcccaatcccaatccccatccccacaccacaagcaccaccaccaccaccaaaccacccgggcccccaagcccaagcccaagccccagccaccgccgccgcagcagccgcgatctcagcctccgccgccgccgcggcaccagccccagcaggcgccccagcaggcggcggcggaggatggggtggggcgggtgctggggcggcccatggaggacgtccgtgcgacctacaccttcgggcgggagctggggcgggggcagttcggggtgacctacctcgccacccacaagcccaccggccgacgctacgcctgcaagtccatcgccgcccgcaagctcgcccgccccgacgacctcgacgacgtccgccgcgaggtccacatcatgcaccacctcaccggccaccgcaacatcgtcgagctgcgcggcgcctacgaggaccgccactccgtcaacctcgtcatggagctctgcgagggcggcgagctcttcgaccgcatcatcgccaggggccactactccgagcgcgccgccgccgccctctgcagggagatcgtctccgtcgtccacagctgccactccatgggggtcatgcacagggacctcaagcccgagaacttcctcttcctcaacaagcgcgaggactccccgctcaaagccaccgattttggcctctccgtcttcttcaagcccggtgagcagttcagagatcttgttggaagtgcatattatgtggctcctgaggtcctaaaacgactatatggagctgaggcagacatatggagtgctggagttatcctttacatccttctatcaggggttcctccattctgggcagaaaacgaggacggtatatttgatgctgttctgcaaggtcatatcgacttctcatctgaaccatggccttctatatctagtggtgcaaaagacttggtcaagcggatgcttcggcaggacccaaaggagcggttaactgctgctgaaattttgaaccacccatggattagagaggatggagaggccccagataaaccacttgatattacagtgatcagtagaatgaagcagttcagagcaatgaacaaacttaagaaggttgccttgaaggtcgttgcagagaacttgtcagaggaagagattgtgggtttaaaggaaatgttcaaatctttagatactgataacagtgggacgataactcttgaagaactaagagctggtctaccaaagcttggcactaaaatttcggaatcagaattaaggcagttgatggaagcggctgatgttgatggaaatgggtccattgattatgttgaatttatatcagcaacgatgcacatgaatagattagagaaggaagatcacatatataaagcatttgaatattttgacaaggaccacagcgggttcataacagtcgatgaattggaagaagctctgacaaagtacgacatgggtgatgaagcgacaattaaagaaataattgctgaagtggatacagaccatgatggaagaattaactaccaggagtttgttgccatgatgaagaacaacagccctgagattgttccaaatcgacggcggatgttttaa

SEQ ID NO: 2319 - protein, 542 aa, Oryza sativa
MGARASRHRQSPDQSQSQSPSPHHKHHHHHQTTRAPKPKPKPQPPPPQQPRSQPPPPPRHQPQQAPQQAAAEDGVGRVLGRPMEDVRATYTFGRELGRGQFGVTYLATHKPTGRRYACKSIAARKLARPDDLDDVRREVHIMHHLTGHRNIVELRGAYEDRHSVNLVMELCEGGELFDRIIARGHYSERAAAALCREIVSVVHSCHSMGVMHRDLKPENFLFLNKREDSPLKATDFGLSVFFKPGEQFRDLVGSAYYVAPEVLKRLYGAEADIWSAGVILYILLSGVPPFWAENEDGIFDAVLQGHIDFSSEPWPSISSGAKDLVKRMLRQDPKERLTAAEILNHPWIREDGEAPDKPLDITVISRMKQFRAMNKLKKVALKVVAENLSEEEIVGLKEMFKSLDTDNSGTITLEELRAGLPKLGTKISESELRQLMEAADVDGNGSIDYVEFISATMHMNRLEKEDHIYKAFEYFDKDHSGFITVDELEEALTKYDMGDEATIKEIIAEVDTDHDGRINYQEFVAMMKNNSPEIVPNRRRMF

SEQ ID NO: 2320 - DNA, 1707 bp, Oryza sativa
  CDS (1)..(1707)
atggggaacacctgcgtcggccccagctccgcggcggaccgccacggcttcttccactccgtctccctcgccgtgctctggcgccccggtggccgcgccgagccgtcgcagccgccgggttacccgcctcgggagtcgagccactcctccgtcacctcgtccacggcgcccgagcgcgtcaccatcgccgactccgacctctcctcctccacccccaacaagggcgggaataagcccaaggtgaggcgcgtccagagcgcggggctcctcgccgactccgtcctcaagcgcgactccgagcggctcaaggacctctacaccctggggaagaagctcgggcaggggcagttcgggaccacgtaccagtgcgtggagaaggccacggggaaggtgctcgcctgcaagtccatcgccaagcggaagctggtcagcgaggaggacgtggaggacgtgcgccgggagatccagatcatgcaccacctcgccggccacccgagcgtggtctccatcgtcggcgcgtacgaggacgccgtcgccgtgcacctcgtcatggagctctgcgctggcggggagctgtttgataggatcgtgcagcgcgggcactactccgagaaggcggccgcgcagctggcgcgggtgatcatcggtgtcgtcgaggcgtgccattcgctcggggtgatgcacagagacctcaagccggagaacttcttgtttgtcaaccataaggaggactcgccactcaagacgatcgattttgggctttccattttcttcaagccaggcgaaaattattcggatgttgttggaagtccttactatgttgcacctgaggttctgatgaagcattatggccgcgaggtggatgtatggagtgctggtgtaatcatttatatcttgcttagtggagttcctccattttgggatgaatctgaacaagggatatttgaaaaagttttgaaaggagatcttgatttttcatctgatccctggcctgctatctcagacagtgcaaaggatttggtgaggaaaatgttaaaccgtgatcccagaaagagattgactgcacatgaagctctatgtcatccttgggtttgtgttgatggagttgctcctgataaacctcttgattctgctgtcttaactagattgaagcaattttcagcaatgaacaagctaaagaagatggcccttagggtcattgctgaaaatttatcggaagatgaaattgcgggattgagagaaatgttcaaaatgttggacactgataatagtggtcagatcacattggaggaactaaaaactggcttgcggagagttggtgctaatttgaaggattcggaaattacaaccctaatggaagcggctgatattgataatagtggttcaatagattatggggagttcattgctgcaactatgcatctgaacaaagttgagagagaagataatctttttgcagcgttttcatactttgataaagacagcagtggttacattactcaagatgagctacaaaaagcctgtgaggaatttggcataggagatgcacatctggaggatatcatcaaagatattgatcaggacaatgatggccggatcgactacaatgaatttgtaacaatgatgcagaaagggaataatccactagggaaaaaggggcaaggccagctaagttttggtctaagggaagcattgaagcttggttaa

SEQ ID NO: 2321 - protein, 568 aa, Oryza sativa
MGNTCVGPSSAADRHGFFHSVSLAVLWRPGGRAEPSQPPGYPPRESSHSSVTSSTAPERVTIADSDLSSSTPNKGGNKPKVRRVQSAGLLADSVLKRDSERLKDLYTLGKKLGQGQFGTTYQCVEKATGKVLACKSIAKRKLVSEEDVEDVRREIQIMHHLAGHPSVVSIVGAYEDAVAVHLVMELCAGGELFDRIVQRGHYSEKAAAQLARVIIGVVEACHSLGVMHRDLKPENFLFVNHKEDSPLKTIDFGLSIFFKPGENYSDVVGSPYYVAPEVLMKHYGREVDVWSAGVIIYILLSGVPPFWDESEQGIFEKVLKGDLDFSSDPWPAISDSAKDLVRKMLNRDPRKRLTAHEALCHPWVCVDGVAPDKPLDSAVLTRLKQFSAMNKLKKMALRVIAENLSEDEIAGLREMFKMLDTDNSGQITLEELKTGLRRVGANLKDSEITTLMEAADIDNSGSIDYGEFIAATMHLNKVEREDNLFAAFSYFDKDSSGYITQDELQKACEEFGIGDAHLEDIIKDIDQDNDGRIDYNEFVTMMQKGNNPLGKKGQGQLSFGLREALKLG

SEQ ID NO: 2322 - DNA, 1602 bp, Oryza sativa
  CDS (1)..(1602)
atggggtcgtgttgcagcagagctacgtctccagattctggtcgaggaggagcaaacggttatggctattctcaccagacaaaacctgctcagacaactcctagctataaccatcctcagccgccgccgccagctgaggtgaggtacacaccatcagcaatgaaccctccggtagtcccacctgtggttgccccaccgaagcccaccccagacacaattcttggaaagccgtatgacgatgtgcgctcggtttactcccttggaaaggaactcggaaggggacagtttggggtgacatacctgtgcacggagatcgctagtggtaagcagtatgcttgcaaatccatctctaagcgcaagcttgtgagcaaggccgacaaggaggacattcgccgggagattcagatcatgcagcacctatctggacaacaaaacattgtcgagttccggggagcatatgaggacaagagcaatgtccatgttgtcatggagctctgcgctggtggggagctgtttgatcggatcattgccaaggggcactactcagagcgtgcggctgctaccatctgcagggcagtggtgaatgttgtcaacatttgccattttatgggagtgatgcatcgtgatttaaaaccggagaacttcttacttgcaaccaaagaagagaatgcaatgctcaaagccactgattttggtctctcagttttcattgaagaaggaaaaatgtatagagacattgttggaagtgcttattatgttgctcctgaagtccttcggcggaattatggtaaagagattgatgtatggagtgcaggcgttattttgtacattcttctcagtggtgttcctccattttgggctgaaactgaaaagggaatatttgatgctattcttcaaggggagattgactttgagagtcaaccatggccatcaatatccgagagtgctaaagaccttgttagaaagatgttgacacaagatccaaagaaaagaattacttcggcccaagttctccaacatccctggctcagagatggagaagcatctgacaaacctattgacagcgctgttctttctaggatgaagcaattcagagcaatgaacaagctgaaaaagatggctctgaaggttattgcttcaaaccttaatgaggaggagatcaagggcctgaagcaaatgttcacaaacatggacacagacaacagcgggaccatcacatatgaagaactcaaagcaggattagccaaacttggatcaaagctttcagaagctgaagtaaagcagttgatggaagctgctgatgtagacggcaatggatccatcgactatgttgaatttatcactgccacaatgcatagacacaagctcgaaagagatgagcatttgtttaaggcattccagtattttgacaaagacaacagtggcttcatcacaagagatgaactggaatccgctttaatcgagcatgaaatgggcgatacaagtaccataaaggatattatatcagaagtcgacacggataatgatgggaggattaactacgaggaattttgcgctatgatgagaggaggggggatgcagcagcctatgaggctcaaatag

SEQ ID NO: 2323 - protein, 533 aa, Oryza sativa
MGSCCSRATSPDSGRGGANGYGYSHQTKPAQTTPSYNHPQPPPPAEVRYTPSAMNPPVVPPVVAPPKPTPDTILGKPYDDVRSVYSLGKELGRGQFGVTYLCTEIASGKQYACKSISKRKLVSKADKEDIRREIQIMQHLSGQQNIVEFRGAYEDKSNVHVVMELCAGGELFDRIIAKGHYSERAAATICRAVVNVVNICHFMGVMHRDLKPENFLLATKEENAMLKATDFGLSVFIEEGKMYRDIVGSAYYVAPEVLRRNYGKEIDVWSAGVILYILLSGVPPFWAETEKGIFDAILQGEIDFESQPWPSISESAKDLVRKMLTQDPKKRITSAQVLQHPWLRDGEASDKPIDSAVLSRMKQFRAMNKLKKMALKVIASNLNEEEIKGLKQMFTNMDTDNSGTITYEELKAGLAKLGSKLSEAEVKQLMEAADVDGNGSIDYVEFITATMHRHKLERDEHLFKAFQYFDKDNSGFITRDELESALIEHEMGDTSTIKDIISEVDTDNDGRINYEEFCAMMRGGGMQQPMRLK

SEQ ID NO: 2324 - DNA, 1734 bp, Oryza sativa
  CDS (1)..(1734)
atgggtggctgctcctccgccttcgcggtttccaccaggatgatccgcttcagccgcggccgcgtgccggcggccatcctccccgtcaccagcaacgacgagccctgctgcagctgctcccctgaaaacaacaacaaaaacaacgacggcggcggaggcggatgcgacggcggcgagcaccagaaggggaagtcgtggaggaggtggcagtacaggagatgcggcggcggtggcggtggcgggggcgggaggaagaacgccatcctcggggacgcggccgacgtgaagacggcggcggggttcgcggagaggtacaggctgggggcggagctggggcgcggggagttcggggtgacgcggcggtgctccgacgcggccaccggggaggccctggcctgcaagacgatccgccggaagcggctgcgccggtgccgcggcgacgccgaggacgtgcggcgggaggtggagatcctccgccgcatctccgccctcggcgccggcgccgactccgtggtgcgactccgcgacgcctgcgaggactccgacggcgtccacctcgtcatggagctctgcgagggcggcgagctcttcgaccgcatcttcgcccgcggccactacaccgagcgcgccgccgccaagctcgcccgcaccatcgtcggcgtcgtccagctgtgccacgagaacggggtgatgcacagagacctgaagccggagaacttcctgttcgccaacaagtcggaggactcacctctcaaggccatcgatttcggcctctcggtgttcttcaagccaggagaaagattcacccaggtggttgggagcacatactacatggcaccagaggttctcaacagaagctatggcccagaagcagatgtctggagcgccggcgtcatcctctacatcctgctctgcggagttcctcctttctggggagacaatgatgagaaaacggtgacggcgatactccagggtgggatcaacttccagagggagccatggcccaaggtgtccccgcatgcaaaggaccttgtcagcaagatgcttgaccccgatccttctacccggttgacagcaaaggaagtccttgagcatccttggctcaagaatgccgatagggctccaaacgtttcgctcggagagattgttcgatccagactgatgcaattctcagccatgaataagttcaaaaagaaggcacttggagtcgttgccaagaatttaccggtggaggagatggataaatatactcagatgttccacaagatggacaaagacaacagcggtaatttgacgcttgaggatctgaagttgggcctccagataaatggtcatcctgttccagagacagagatcgaaatgctgttagaagctggtgacatagatggaaatggaacattagattgcgaggagtttgtaacggtattacttcacataaagaagatgagtaatgaggagtacctacctaaagctttcaagttcttcgacaaagatggtaatggtttcattgaaatggaggagttgatggatgctttaggtgatgaactgggccctactgagcaagtggttaaagatattattcgagacattgacactgataaggatggtcgcattagctatcaggagtttgaatcaatgatgatatctggatcagactggagaaatgcttcccgacgatactcaaaagcaaatttcagctccctcagtcgtaagctgtgcaaaggaaattcatga

SEQ ID NO: 2325 - protein, 577 aa, Oryza sativa
MGGCSSAFAVSTRMIRFSRGRVPAAILPVTSNDEPCCSCSPENNNKNNDGGGGGCDGGEHQKGKSWRRWQYRRCGGGGGGGGGRKNAILGDAADVKTAAGFAERYRLGAELGRGEFGVTRRCSDAATGEALACKTIRRKRLRRCRGDAEDVRREVEILRRISALGAGADSVVRLRDACEDSDGVHLVMELCEGGELFDRIFARGHYTERAAAKLARTIVGVVQLCHENGVMHRDLKPENFLFANKSEDSPLKAIDFGLSVFFKPGERFTQVVGSTYYMAPEVLNRSYGPEADVWSAGVILYILLCGVPPFWGDNDEKTVTAILQGGINFQREPWPKVSPHAKDLVSKMLDPDPSTRLTAKEVLEHPWLKNADRAPNVSLGEIVRSRLMQFSAMNKFKKKALGVVAKNLPVEEMDKYTQMFHKMDKDNSGNLTLEDLKLGLQINGHPVPETEIEMLLEAGDIDGNGTLDCEEFVTVLLHIKKMSNEEYLPKAFKFFDKDGNGFIEMEELMDALGDELGPTEQVVKDIIRDIDTDKDGRISYQEFESMMISGSDWRNASRRYSKANFSSLSRKLCKGNS

SEQ ID NO: 2326 - DNA, 1899 bp, Oryza sativa
  CDS (1)..(1899)
atggggcagtgttacgcgaggaacgtgccggtggatggggaggggggaggaggggtggtgacgacgacgacgacgacgaccatctcggtgagcgcgtcggcggcgggggaggaggtggaggtggggagagggggaggagggggaggagggaggaggagcgggaggccgtcgccggcggggacgccgaggaggaggggggcgacgccggcgaggtcgtcggtggcggggagcccgtgggcggggagcccgctccccgagggcatcgcaccgtcgcctgcgccgtcggcgaccacgccgaggcggttcttcaggcggccgttcccgccgccgtcgccggcgaagcacatcaaggcgtccctcgcgcgccgcctcgggcagcggtcgccggccacggcccaggcgcagcaggccgcgaagccgcccgccgaggtcccgatcccggagcacgggggcgggggcggcgccgccgccggggaggtggagcgggagctcgacaagagcttcggctatgaccgccacttcgccgccaagtacgagctggggaaggaggtgggtcgcggccacttcggccacacctgcctcgcgcgtgcccgcaagggcgacatgagaggccaactcctcgctgtcaaggtcatctccaaagccaagatgacaacagcaatatcaattgaggatgtgcgtagagaggtgaaaattctgaaggctttatctgggcattcgaatcttgtcaaattttatgatgcatgtgaggatgcccttaatgtctacataatcatggagttatgtgaaggtggggagttattggacagaattttgtccagaggtgggagatacactgaggaagatgctaaagttatcgttgaacaaatattaaatgttgtttctttctgccatcttcaaggcgttgttcaccgtgatttgaagccagagaatttcctattcagcactagagatgaccattcacctatgaagatcatcgactttggactttctgattttatacggccagatgaaagattaaatgatattgttggtagtgcatactatgttgctccagaagtcctacataggtcatatagcacggaagcagacatgtggagtattggtgttatcacttatatcttgctgtgcggtagcagaccattctgggcacgaactgaatcaggcattttccgctcagtgctgagagctgatcctaattttgatgatgcaccgtggtcttcaatatctcctgaagccaaagattttgtcaaaagacttcttaacaaggattacagaaaaagaatgactgctgcccaggcactctctcacccctggttgcgagatgagtgccgaccgatccctttggatatgctagtttttaagttgattaaggcatatcttcgctctacacctttcaagcgagcggcattgaaggctctgtccagagcaataacagaagatgagcttatctacatcagagcacagtacaacttgctagaaccaagtagtacagatggtcgactatgcattgaaaacttcaggatggctcttttacaaaactctacagatgctatgaaggaatccagagcccttgatatcttgaatgcgttggagccacttgcctacagaagaatggactttgaggagttccgggcggcgacaatcagtccttaccaacttgaggctttatcacggtgggaagaaatagctggcactgcgtttgagtactttgagcaggaaggcaaccgtcccatcacaattgaggagctggcacaggagatgaatctttcttccgcggcgtattctatcgtccgtgactggattagaccggctgatggcaagcttagctttctaggttataccaaatttttgcatggattgacgatgcgaagtagcaacgcgaggcggcaccattaa

SEQ ID NO: 2327 - protein, 632 aa, Oryza sativa
MGQCYARNVPVDGEGGGGVVTTTTTTTISVSASAAGEEVEVGRGGGGGGGRRSGRPSPAGTPRRRGATPARSSVAGSPWAGSPLPEGIAPSPAPSATTPRRFFRRPFPPPSPAKHIKASLARRLGQRSPATAQAQQAAKPPAEVPIPEHGGGGGAAAGEVERELDKSFGYDRHFAAKYELGKEVGRGHFGHTCLARARKGDMRGQLLAVKVISKAKMTTAISIEDVRREVKILKALSGHSNLVKFYDACEDALNVYIIMELCEGGELLDRILSRGGRYTEEDAKVIVEQILNVVSFCHLQGVVHRDLKPENFLFSTRDDHSPMKIIDFGLSDFIRPDERLNDIVGSAYYVAPEVLHRSYSTEADMWSIGVITYILLCGSRPFWARTESGIFRSVLRADPNFDDAPWSSISPEAKDFVKRLLNKDYRKRMTAAQALSHPWLRDECRPIPLDMLVFKLIKAYLRSTPFKRAALKALSRAITEDELIYIRAQYNLLEPSSTDGRLCIENFRMALLQNSTDAMKESRALDILNALEPLAYRRMDFEEFRAATISPYQLEALSRWEEIAGTAFEYFEQEGNRPITIEELAQEMNLSSAAYSIVRDWIRPADGKLSFLGYTKFLHGLTMRSSNARRHH

SEQ ID NO: 2328 - DNA, 1605 bp, Oryza sativa
  CDS (1)..(1605)
atggggaattcttgccaaaatggaacctatgggaacaattaccagaacagcaaccggtttcagaatgaccgttttgcttctcggtacgttgatgggaatgatactgaggattgctactcgggctcgtcaagggccagcttagcgggtgctctgcggcaagggctgaacctaaagtcccctgtccttggatacaagactccaaatgtaagggagctctatactcttggccgggagcttggacagggacagttcgggaaaacatacctctgcactgagattagcacagggtgtcaatatgcatgcaagactatcttaaagagtaatctccgatgtgtgtcagatatcgaggacgtgcgccgtgaaatccagataatgcaccatctttcgggccagaagaatatagtgacaatcaaggacacatatgaggatgagcaggccgtgcacatcgtcatggagctctgtgcaggtggtgagctcttcagcaagattcagaagcgaggtcattacagtgaacggaaggctgcagagcttataaaaattatagttggcatcatagaaacatgccattcacatggagtgatgcaccgggatctcaagccagaaaatttcctcttactggacgcagacgatgaattctcggttaaagcaattgactttggtctatctgtgttcttcagaccaggtcaggttttcagagaggtagtgggaagtccatattatattgctccagaggtattggagaagcgttatggaccagaggctgatatatggactgctggagtgattctctatgtattgctgactggtgttcctccattttgggcagatacacaaagcgggatatatgaaaaagtactggatggacgtattgattttaaatcaaaccggtggcccaggatatctgacagtgcaaaggatcttataaaaaagatgctctgcccttatccatcagagcgtttgaaagcccatgaagtgctaaagcatccatggatatgtgataatggagtggctactaatcgagctctggatccaagtgtacttcctcgtctcaagcaattttctgcaatgaataggttaaagaaattgtctctccagattattgctgagcgtctttcagaagaggagattgttgggttaagagaaatgttcaaggctatggacaccaaaaacagaagtgtggttacatttggtgagcttaagggactgaaaagatacagctcagtgttcaaggatactgaaattaacgacttaatggaagcagctgatgacaccacctccaccatcaactgggaagagtttattgctgcagcagtgtctcttaataaaatagaacgtgagaaacacttgatggcagcctttacatactttgacaaagatggaagtggttttatcacagttgacaagcttcaaaaggcttgcatggaacgtaacatggaagatactttccttgaagagatgattctggaggttgatcaaaacaatgatggtcaaatcgattatgctgaatttgtcacaatgatgcaaagcaacaactttggacttgggtggcaaacggtggaaagcagcctgaatgtagccctgagggaggcaccccaagtatactga

SEQ ID NO: 2329 - protein, 534 aa, Oryza sativa
MGNSCQNGTYGNNYQNSNRFQNDRFASRYVDGNDTEDCYSGSSRASLAGALRQGLNLKSPVLGYKTPNVRELYTLGRELGQGQFGKTYLCTEISTGCQYACKTILKSNLRCVSDIEDVRREIQIMHHLSGQKNIVTIKDTYEDEQAVHIVMELCAGGELFSKIQKRGHYSERKAAELIKIIVGIIETCHSHGVMHRDLKPENFLLLDADDEFSVKAIDFGLSVFFRPGQVFREVVGSPYYIAPEVLEKRYGPEADIWTAGVILYVLLTGVPPFWADTQSGIYEKVLDGRIDFKSNRWPRISDSAKDLIKKMLCPYPSERLKAHEVLKHPWICDNGVATNRALDPSVLPRLKQFSAMNRLKKLSLQIIAERLSEEEIVGLREMFKAMDTKNRSVVTFGELKGLKRYSSVFKDTEINDLMEAADDTTSTINWEEFIAAAVSLNKIEREKHLMAAFTYFDKDGSGFITVDKLQKACMERNMEDTFLEEMILEVDQNNDGQIDYAEFVTMMQSNNFGLGWQTVESSLNVALREAPQVY

SEQ ID NO: 2330 - DNA, 1626 bp, Oryza sativa
  CDS (1)..(1626)
atgggccagtgctgcacgggtggcgggaaggccgtcgccggcgacgaggcagagccggggacctccaaggcggcgccgccgagccgcggcacctcctccaaaaatgggtccgccaagcagcagccgtgctcgccggcggccaaggcggcggcgacggaagcggcggcggcggcgtcgtcgtccaagaagccggcaggccccatcggcgaggtgctggagcggccgatggaggaggttcgcacgacgtactccatcggcaaggagctcgggcgcgggcagttcggcgtgacccacctgtgcacccacaaggccaccggcgagaagctggcgtgcaagacgatcgcgaagcggaagctggcgaacaaggaggacgtcgacgacgtccgccgcgaggtgcagatcatgcaccacctctccggccagccaaacatcgtcgacctccgcggcgcctacgaggacaagcacaacgtccacctcgtgatggagctctgcgccggcggcgagctcttcgaccgcatcatcgcgcggggccactacacggagcgcgccgcggcggcgctcctccgcgccatcgtcgggatcgtgcacacctgccactccatgggggtgatccaccgggacctcaagccggagaacttcctgctgctgagcaagggggacgacgcgccgctcaaggccaccgacttcggcctctccgtcttcttcaaggaaggcgaggtgttccgcgacatcgtcggcagcgcctactacatcgcgccggaggtgctcaagaggaagtacggccccgaggccgacatctggagcatcggcgtcatgctctacatcttcctcgccggcgtgccgcccttctgggccgagtcggagaacgccatcttcaccgccatccttcgcggacagatcgacctcgccagtgagccatggccgaagatctcctctggagccaaggacctcgtcaggaagatgctcaacatcaaccccaaggagaggcttacagcattccaagtgctcaatcacccgtggatcaaagaagatggggatgctcctgatgtaccacttgacaatgttgttctcaacaggctcaagcagttcagggccatgaaccagttcaagaaagctgcactgaggattatagccggatgcctgtcagaggaggagatcaaggggctgaaggagatgttcaagaacatcgacaaggacaatagtgggaccattacgcttgaggagctcaaaaatgggttagcaaagcagggcaccaagttttcagacaacgaaattgagcaactgatggaagcagctgatgctgatggcaatggaattatcgactatgaggagttcgtcaccgcgacagtgcacatgaacaaaatggatcgagaagagcacctttacacggcattccagtactttgacaaggataatagtgggtacatcacaaaggaagagctcgagcaagccttgaaggaacaagggttatacgacgccaacgagatcaaggatgtcatcacagatgcagactctaataatgatgggcggatagattattcagagtttgtggccatgatgaggaaaggatcaggctgtgcagaagcaacaaacccaaagaagaagaggcgagatctagttctatag

SEQ ID NO: 2331 - protein, 541 aa, Oryza sativa
MGQCCTGGGKAVAGDEAEPGTSKAAPPSRGTSSKNGSAKQQPCSPAAKAAATEAAAAASSSKKPAGPIGEVLERPMEEVRTTYSIGKELGRGQFGVTHLCTHKATGEKLACKTIAKRKLANKEDVDDVRREVQIMHHLSGQPNIVDLRGAYEDKHNVHLVMELCAGGELFDRIIARGHYTERAAAALLRAIVGIVHTCHSMGVIHRDLKPENFLLLSKGDDAPLKATDFGLSVFFKEGEVFRDIVGSAYYIAPEVLKRKYGPEADIWSIGVMLYIFLAGVPPFWAESENAIFTAILRGQIDLASEPWPKISSGAKDLVRKMLNINPKERLTAFQVLNHPWIKEDGDAPDVPLDNVVLNRLKQFRAMNQFKKAALRIIAGCLSEEEIKGLKEMFKNIDKDNSGTITLEELKNGLAKQGTKFSDNEIEQLMEAADADGNGIIDYEEFVTATVHMNKMDREEHLYTAFQYFDKDNSGYITKEELEQALKEQGLYDANEIKDVITDADSNNDGRIDYSEFVAMMRKGSGCAEATNPKKKRRDLVL

SEQ ID NO: 2332 - DNA, 1542 bp, Oryza sativa
  CDS (1)..(1542)
atgcagccggacccgagcgggagcggcggcgacggcaacgccaatgcgaaggcgaagctggcgccgccgccggtgacggcggcgggaggtcggccggtgtcggtgctgccgcacaagacggcgaacgtgcgcgaccactaccgcatcgggaagaagctcgggcaggggcagttcgggacgacgtacctgtgcgtggacaaggcgagcggcggcgagttcgcgtgcaagtccatccccaagcggaagctgctgtgccgggaggactacgaggacgtgtggcgcgagatccagatcatgcaccacctctccgagcaccccaacgtcgtccgcatccgcggcgcctacgaggacgcgctgttcgtccacatcgtcatggagctctgcgccggcggcgagctcttcgaccgcatcgtcgccaagggccactacaccgagcgcgccgccgcgcagctcatccgcaccatcgtcgccgtcgtcgagggatgccactcgctcggcgtcatgcaccgggacctcaagcccgagaacttcctcttcgccagcgccgccgaggacgcccccctcaaggccactgatttcggcctctccatgttctacaagcctggtgataagttctctgatgttgttgggagcccctattatgttgcacctgaggtacttcagaaatgctatggtccagaatctgatgtctggagtgctggggtaattctttacattttgctatgtggtgttccaccattttgggcagaaactgaagctggaattttcaggcagattctacgaggcaaacttgattttgaatctgaaccctggcctagcatctctgacagtgctaaagatctagtccgtaatatgctttgccgggatcctacaaagagacttacagcccatgaggttctctgtcatccatggattgttgatgatgctgtggcacctgacaagcctattgattctgctgttttgtcaagactgaagcacttttcggcaatgaacaagctcaagaagatggcattgagggttattgctgaaagcctgtctgaggaagagattggaggactaaaggagctattcaaaatgattgatactgacgatagtggaactataacttttgatgagctgaaagagggcttgaaaagggtgggttcagaattaacagaacatgaaatccaggctttaatggaagcggctgatatcgacaacagtggaaccatcgactatggtgaattcattgctgctactctccacatgaataagctagagagggaggaaaacttagtatcagcattctcatttttcgacaaagatggaagtggtttcataactattgatgagctgtcacaagcatgccgcgaatttggccttgatgatcttcaccttgaggatatgattaaagatgttgatcaaaacaatgacggacaaattgactacagcgagttcacggcgatgatgagaaagggcaatgctggtggagctggaaggagaaccatgaggaacagcttgcagttgaatcttggtgagatcttgaaccccagcaacagctaa

SEQ ID NO: 2333 - protein, 513 aa, Oryza sativa
MQPDPSGSGGDGNANAKAKLAPPPVTAAGGRPVSVLPHKTANVRDHYRIGKKLGQGQFGTTYLCVDKASGGEFACKSIPKRKLLCREDYEDVWREIQIMHHLSEHPNVVRIRGAYEDALFVHIVMELCAGGELFDRIVAKGHYTERAAAQLIRTIVAVVEGCHSLGVMHRDLKPENFLFASAAEDAPLKATDFGLSMFYKPGDKFSDVVGSPYYVAPEVLQKCYGPESDVWSAGVILYILLCGVPPFWAETEAGIFRQILRGKLDFESEPWPSISDSAKDLVRNMLCRDPTKRLTAHEVLCHPWIVDDAVAPDKPIDSAVLSRLKHFSAMNKLKKMALRVIAESLSEEEIGGLKELFKMIDTDDSGTITFDELKEGLKRVGSELTEHEIQALMEAADIDNSGTIDYGEFIAATLHMNKLEREENLVSAFSFFDKDGSGFITIDELSQACREFGLDDLHLEDMIKDVDQNNDGQIDYSEFTAMMRKGNAGGAGRRTMRNSLQLNLGEILNPSNS

SEQ ID NO: 2334 - DNA, 1626 bp, Oryza sativa
  CDS (1)..(1626)
atgggccagtgctgcacgggtggcgggaaggccgtcgccggcgacgaggcagagccagggacctccaaggcggcgccgccgagccgcggcacctcctccaaaaatgggtccgccaagcagcagccgtgctcgccggcggccaaggcggcggcgacggaagcggcggcggcggcgtcgtcgtccaagaagccggcaggccccatcggcgaggtgctggagcggccgatggaggaggttcgcacgacgtactccatcggcaaggagctcgggcgcgggcagttcggcgtgacccacctgtgcacccacaaggccaccggcgagaagctggcgtgcaagacgatcgcgaagcggaagctggcgaacaaggaggacgtcgacgacgtccgccgcgaggtgcagatcatgcaccacctctctggccagcccaacatcgtcgacctccgcggcgcctacgaggacaagcacaacgtccacctcgtgatggagctctgcgccggcggcgagctcttcgaccgcatcatcgcgcgtggccactacacggagcgcgccgcggcggcgctcctccgcgccatcgtcgggatcgtgcacacctgccactccatgggggtgatccaccgggacctcaagccggagaacttcctgctgctgagcaaaggggacgacgcgccgctcaaggccaccgacttcggcctctccgtcttcttcaaggaaggcgaggtgttccgcgacatcgtcggcagcgcctactacatcgcgccggaggtgctcaagaggaagtacggccccgaggccgacatctggagcatcggcgtcatgctctacatcttcctcgccggcgtgccgcccttctgggccgagtcggagaacgccatcttcgccgccatccttcgcggacagatcgacctcgccagtgagccatggccgaagatctcctctggagccaaggacctcgtcaggaagatgctcaacatcaaccccaaggagaggcttacagcattccaagtgctcaatcacccgtggatcaaagaagatggggatgctcctgatgtaccacttgacaatgttgttctcaacaggctcaagcagttcagggccatgaaccagttcaagaaagctgcactgaggattatagccggatgcctgtcagaggaggagatcaaggggctgaaggagatgttcaagaacatcgacaaggacaatagtgggaccattacgcttgaggagctcaaaaatgggttagcaaagcagggcaccaagttttcagacaacgaaattgagcaacttatggaagcagctgatgctgatggcaatggaattatcgactatgaggagttcgtcaccgcgacggtgcacatgaacaaaatggatcgagaagagcacctttacacggcattccagtactttgacaaggataatagtgggtacatcacaaaggaagagctcgagcaagccttgaaggaacaagggttatacgacgccaacgagatcaaggatgtcatcacagatgcagactctaataatgatgggaggatagattattcagagtttgtggccatgatgaggaaaggatcaggctgtgcagaagcaacaaacccaaagaagaagaggcgagatctagttctatag

SEQ ID NO: 2335 - protein, 541 aa, Oryza sativa
MGQCCTGGGKAVAGDEAEPGTSKAAPPSRGTSSKNGSAKQQPCSPAAKAAATEAAAAASSSKKPAGPIGEVLERPMEEVRTTYSIGKELGRGQFGVTHLCTHKATGEKLACKTIAKRKLANKEDVDDVRREVQIMHHLSGQPNIVDLRGAYEDKHNVHLVMELCAGGELFDRIIARGHYTERAAAALLRAIVGIVHTCHSMGVIHRDLKPENFLLLSKGDDAPLKATDFGLSVFFKEGEVFRDIVGSAYYIAPEVLKRKYGPEADIWSIGVMLYIFLAGVPPFWAESENAIFAAILRGQIDLASEPWPKISSGAKDLVRKMLNINPKERLTAFQVLNHPWIKEDGDAPDVPLDNVVLNRLKQFRAMNQFKKAALRIIAGCLSEEEIKGLKEMFKNIDKDNSGTITLEELKNGLAKQGTKFSDNEIEQLMEAADADGNGIIDYEEFVTATVHMNKMDREEHLYTAFQYFDKDNSGYITKEELEQALKEQGLYDANEIKDVITDADSNNDGRIDYSEFVAMMRKGSGCAEATNPKKKRRDLVL

SEQ ID NO: 2336 - DNA, 1581 bp, Oryza sativa
  CDS (1)..(1581)
atgcagcctgacccgcagccgcatgggcgggggagggagaaggcggcgggggcgggcccgcggctcccgccgccggtgaccgcgccgtcggtggggcggccggcgtcggtgctcccccacaagacggcgaacgtgcgggaccactaccgcatcgggaagaagctggggcaggggcagttcgggaccacgtacctgtgcgtggggaagcccgacggcggcgagtacgcgtgcaagtccatccccaagcggaagctgctgtgccgggaggactacgaggacgtgtggcgcgagatccagatcatgcaccacctctccgagcacccaaacgtcgtccgcatccggggcgcctacgaggacgcgctgttcgtccacatcgtcatggagctctgcgccggcggcgagctcttcgaccgcatcgtcgccaagggccactacaccgagcgcgccgccgcgctgctcatcaggaccatcgtcggggtcgtcgaagggtgccactcgctcggcgtcatgcaccgcgacctcaagccggagaacttcctcttcgccagcaccgccgaggacgccccgctcaaggccaccgatttcgggctctccgtgttctacaagcccggtgacaaattttctgatgttgttgggagcccttattatgtcgcacctgaggtgcttcaaaaaatctatggcccagaagctgacgtctggagtgctggggtaatcctgtacattttgctgtgtggtgtgcccccattttgggcagaaactgaatctggaatcttcaggcaaattcttagaggcaaacttgatttggaatctgatccgtggcctagtatatctgatagtgctaaagatctagtccgtaatatgcttatccgtgatcctacaaagagatttactgctcacgaggttctctgtcatccatggattgttgatgatgctgtggcacctgataagcctattgattctgctgttttgtcaaggctgaaacacttttctgcaatgaacaagctcaagaagatggctttgagggttattgctgaaagcctatctgaagaagagatcggaggtttgaaggaattgtttaaaatgatcgatactgacaatagtgggacgataacttatgatgaactgaagaatggcctgaaaagggtgggctcagatctaatggaaccagaaatccaggctttaatggatgccgctgatattgacaacagtggaaccatcgactatggtgaattcttagcagctactttgcacatgaataaactggagagggaggaaaacttggtgtcagcattcacgttctttgataaggatggaagtggcttcataaccattgatgagctctcgcaagcctgcgaacagtttggcctttctgatgttcatcttgaggatatgatcaaagatgtggatcaaaataatgatggacaaattgattacagcgagtttgccgcgatgatgagaaagggcaatgctggtggagccaatgctggtggagtcacttctactggtggaacaggaaggagaacaatgaggaacagcttgcgtgtgaatcttggcgacatcttgaaacccaacgaaaactga

SEQ ID NO: 2337 - protein, 526 aa, Oryza sativa
MQPDPQPHGRGREKAAGAGPRLPPPVTAPSVGRPASVLPHKTANVRDHYRIGKKLGQGQFGTTYLCVGKPDGGEYACKSIPKRKLLCREDYEDVWREIQIMHHLSEHPNVVRIRGAYEDALFVHIVMELCAGGELFDRIVAKGHYTERAAALLIRTIVGVVEGCHSLGVMHRDLKPENFLFASTAEDAPLKATDFGLSVFYKPGDKFSDVVGSPYYVAPEVLQKIYGPEADVWSAGVILYILLCGVPPFWAETESGIFRQILRGKLDLESDPWPSISDSAKDLVRNMLIRDPTKRFTAHEVLCHPWIVDDAVAPDKPIDSAVLSRLKHFSAMNKLKKMALRVIAESLSEEEIGGLKELFKMIDTDNSGTITYDELKNGLKRVGSDLMEPEIQALMDAADIDNSGTIDYGEFLAATLHMNKLEREENLVSAFTFFDKDGSGFITIDELSQACEQFGLSDVHLEDMIKDVDQNNDGQIDYSEFAAMMRKGNAGGANAGGVTSTGGTGRRTMRNSLRVNLGDILKPNEN

SEQ ID NO: 2338 - DNA, 1692 bp, Oryza sativa
  CDS (1)..(1692)
atgggcaactgctgcgtgtcccggccgtccggcgccgacaagcggcggcgctgcggcagctccaccgccccgcacacccgcggcggcaggcgggtgatcggcgccgccaacatgcggtgcctctccacggtctcctccgtgtcggacgcggcgcgcgccgtgatgtcgaacgagccggcgaccgtgctgggcaacagcggcagcagcggcaacggcggcgtgatggcggcggaggagatgctgcggcggtacgagatcggggaggagctgggtcggggggagttcggggtgacgcggcggtgccgggacgcggtgacgggggagcggctggcgtgcaagtcgatcagcaagcggaagctccggagcagcgtggacgtggaggacgtgcggcgggaggtggccatcatgcggtcgctgccggcgcacgccaacgtggtgaggctccgggaggcgttcgaggacgccgacgccgtccacctcgtcatggaggtctgcgagggcggcgagctcttcgaccgcatcgtcgcccgcggccactacaccgagcgcgccgccgccgccgtcatgcgcaccatcatggacgtcgtccagcactgtcacaagaacggcgtcatgcatcgggacctcaaacctgagaactttctgtatgccaatgcatctgagaactcccctctcaaggtcatcgacttcggcctctcagtgtgcttcaaacctggtgcaagattcaatgagattgttggatctccctactacatggcaccagaagtcctgaagagaaactatggacaagaaatagacatatggagtgcaggagtcatactgtacatcttgctatgtggtgttcctcctttctgggccgagaccgacgaagggatcgcacaggccatcatccggtcacatatcgacttccaaagagagccttggccaaaggtgtcagataatgccaaggatcttgtaaggaggatgcttgatccaaacccatatactcggttgacggctcaacaggttctagagcatccttggatacagaatgcaagtgcagctcccaacattcctctgggagaagcagtcaggtccaggctgaagcaattcactgttatgaacaagttcaagaagaaggccttacttgtggtggcggagtacttaccaaccgaagagctggatgcaatcagggagctgttcaatatgttggacaccaaaaagaaggggcacttgacactagaagagctcagaaagggactgcaagtgatagggcacaacatccatgacacagatgtcgatatgctcatggaagctgcagacatagatggaaatggcatactggattgcaaggagtttgtgacagtatccattcacctgaagaaaatccgtagcgatgagcaccttccgaaggtgttcagcttcttcgacaagaacggcagcgggtacatagagatcgaagagttgaaagaagccctctccccaagaggtgaccagaagtcgatcgacgacatatttctggatgttgacatagacaaggatgggaagataagctacgaggagtttgagttaatgatgtcagccggaatggactggaggaatgcatcccggcaatactcgagagcagtttacaacactctcagccgcaagatattcaaggaagtgtccctgaagcttgatcacagtggtccacttgttgcagcaggaaaatag

SEQ ID NO: 2339 - protein, 563 aa, Oryza sativa
MGNCCVSRPSGADKRRRCGSSTAPHTRGGRRVIGAANMRCLSTVSSVSDAARAVMSNEPATVLGNSGSSGNGGVMAAEEMLRRYEIGEELGRGEFGVTRRCRDAVTGERLACKSISKRKLRSSVDVEDVRREVAIMRSLPAHANVVRLREAFEDADAVHLVMEVCEGGELFDRIVARGHYTERAAAAVMRTIMDVVQHCHKNGVMHRDLKPENFLYANASENSPLKVIDFGLSVCFKPGARFNEIVGSPYYMAPEVLKRNYGQEIDIWSAGVILYILLCGVPPFWAETDEGIAQAIIRSHIDFQREPWPKVSDNAKDLVRRMLDPNPYTRLTAQQVLEHPWIQNASAAPNIPLGEAVRSRLKQFTVMNKFKKKALLVVAEYLPTEELDAIRELFNMLDTKKKGHLTLEELRKGLQVIGHNIHDTDVDMLMEAADIDGNGILDCKEFVTVSIHLKKIRSDEHLPKVFSFFDKNGSGYIEIEELKEALSPRGDQKSIDDIFLDVDIDKDGKISYEEFELMMSAGMDWRNASRQYSRAVYNTLSRKIFKEVSLKLDHSGPLVAAGK

SEQ ID NO: 2340 - DNA, 1839 bp, Oryza sativa
  CDS (1)..(1839)
atgggcaacgtctgcatcggcccgcgccgcaacttcgccaagaacggcctcctcggcatcctgcggccgcgccacgccgcgccgtcctccccgtcgcagcccaccaccacctcccgctccatccccgtcgtgctcccctccgccccctcctccaagccgccgccgcccacccagaccgccccgcccgtacccgtcgtcatctccgagccgccgccaccgcagccgcagcccgaaccgcagcccgcggcgccgtcgcagccgccgccaccgcaggagcagccctcgccgccaccgcccgcgtcgtcgaacaccacccagcagcctccgccgccgcagcagcggcagcagtcgcgcgccaagaagccggcgcacatcaagcgcatctccagcgccggcctgcaggtggagtcggtgctccggcgaaagacggagaatctcaaggacaaatacagcctggggcgcaaactcggtcagggccagttcgggacgacgtacctgtgcgtcgacaaggcgaacggcggcgagtacgcgtgcaagtcgatcgccaagcggaagctactcaccgacgaggacgtggaggacgtccgccgcgagatccagatcatgcaccacctcgccggccaccccaacatcatctccatccgcggcgcctacgaggacgccgtggcggtgcacgtcgtcatggagctctgcgccggcggcgagctgttcgaccggatcgtgcgcaaggggcactacacggagcggcaggcggccgggctcgcccgcgtcatcgtcgccgtcgtcgagtcgtgccactcgctcggcgtcatgcaccgcgacctcaagcccgagaacttcctgttcgtcggcaacgaggaggacgcgccgctcaagaccatcgacttcggcctctccatgtttttccgcccaggcgaggtgttcaccgacgtggtggggagcccgtactacgtggcgccggaggtgctgaagaagagctacgggcaggaggccgacgtgtggagcgccggcgtcatcatctacatcctcctctgcggcgtgccgccgttctgggcagagacggagcaggggatattcgagcaggtgctgcacgggacgctggacttcgagtcggacccatggccgaacgtgtcggatggcgccaaggacctcctccgcaaggtgctcgtccgggaccccaagaagcggctcaccgcgcacgaagtcctatgccatccatggctgcagatgagcgggtcggcgccggacaagccgctggactcggcggtgctgtcgcggctgaggcagttctcggccatgaacaagctcaagaagatggcattgagagtgatcgcggagaacttgtcggaggaggagatcgccgggttgaaggagatgttcaagatgatggacacggacaacagcgggcagatcaactacgaggagctcaaggccgggttggagagagtgggtgccaacatgaaggagtctgaaatttatcagctcatgcaggctgctgatatcgacaatagtggcaccatagattatggagaattcatagctgccactctacacctcaacaaagttgaaagggaagatcatctatatgccgccttccaatacttcgacaaagatggcagtggatacatcacatctgatgagctccagcaagcctgcgatgagtttggtatcgaggatgttcgactcgaagacatgataggcgaagtagatcaggacaatgatgggcgtatagattacaacgagtttgtcgcgatgatgcagaaaacaacaacagggttcgggaagaaaggcggtcataattttagcggttttagggatgccttgaagtcacatagctga

SEQ ID NO: 2341 - protein, 612 aa, Oryza sativa
MGNVCIGPRRNFAKNGLLGILRPRHAAPSSPSQPTTTSRSIPVVLPSAPSSKPPPPTQTAPPVPVVISEPPPPQPQPEPQPAAPSQPPPPQEQPSPPPPASSNTTQQPPPPQQRQQSRAKKPAHIKRISSAGLQVESVLRRKTENLKDKYSLGRKLGQGQFGTTYLCVDKANGGEYACKSIAKRKLLTDEDVEDVRREIQIMHHLAGHPNIISIRGAYEDAVAVHVVMELCAGGELFDRIVRKGHYTERQAAGLARVIVAVVESCHSLGVMHRDLKPENFLFVGNEEDAPLKTIDFGLSMFFRPGEVFTDVVGSPYYVAPEVLKKSYGQEADVWSAGVIIYILLCGVPPFWAETEQGIFEQVLHGTLDFESDPWPNVSDGAKDLLRKVLVRDPKKRLTAHEVLCHPWLQMSGSAPDKPLDSAVLSRLRQFSAMNKLKKMALRVIAENLSEEEIAGLKEMFKMMDTDNSGQINYEELKAGLERVGANMKESEIYQLMQAADIDNSGTIDYGEFIAATLHLNKVEREDHLYAAFQYFDKDGSGYITSDELQQACDEFGIEDVRLEDMIGEVDQDNDGRIDYNEFVAMMQKTTTGFGKKGGHNFSGFRDALKSHS

SEQ ID NO: 2342 - DNA, 1737 bp, Brassica napus
  CDS (1)..(1737)
atggggatgtgccacggcaaacccatcgagcaccaatcaaaacagagcctcccatctcccgacgaacctcagcctcctcctcctcctcctccggcggcgaaatcctccggctttccgttttacagcccaagccctttacccagcttgttcaaatcctctccctccgtctcgtcgagcgcgagctcaacgcctctccgcatcttcaagagacctttccctcctccttcccctgccaagcacatacgcgctttcctcgcgcgtcgccacggctcctccgccaagccccccagcgaggtctcgatccccgaaggggaggagttcgagatcggtcttgataagagcttcgggttctcgaagcacttcgcgtcgcattacgagattgatggggaggtgggtcgggggcattttgggtatacttgctctgccaagggtaaaaagggaagcttgaagggtcaagaagttgctgttaaagtcatccctaagtcaaagatgacgactgcaattgcaattgaggacgttagtagagaagtgaagatactgcgagctctgactggtcacaagaacttagtccagttctatgacgcttttgaagatgatgaaaatgtttatattgtgatggagttatgtaaaggtggtgaactcttggacaaaatacttcaaaggggtggcaaatactcagaagatgatgctaaacaagttatggttcagattcttagtgtagtagcttactgtcatctacaaggtgtggttcaccgtgaccttaaacccgagaactttctcttcagcactaaggatgagacttctcctctaaaagcaatagactttggtctctctgattacgtcaagccagatgaaaggttgaatgatattgtaggaagtgcttactacgtagccccagaggttctgcaccgtacatacggaacagaagctgacatgtggagtataggagtgattgcttatattcttctctgtgggagcagacccttttgggcacgtactgaatccggaatctttagagctgttcttaaagcagaaccaaactttgaagaagctccttggccttcactatcacctgatgctgtagattttgtgaaaaaattgctgaataaagattaccgtaaaagactaaccgcagcacaggctttgtgtcatccgtggctggttgcttcccatgagctgaagataccatctgatatgatcatatacaagcttgtgaaagtgtacataatgtcaacttctttgagaaaatctgctttgcaggctcttgccaagacattaactgtaccacagttagcttatctgagggagcagtttacattgctggggccaagcaaaaatggatacatctcaatgcagaattacaaaacagcaatcctgaagactgcaacagatgctactaaggactcacgagtattagattttgttcacatgataagttgtcttcaatacaagaagctagactttgaagagttctgtgcatcagcattaagtgtttaccagctggaagcaatggaaacgtgggagcaacacgcacggcgtgcttacgagttgtttgagaaagatgggaatagacccatcatgattgaggaacttgcatcggaacttggactggggccatcagttccagtgcacgttgtgcttcaggattggataagacattcagatgggaagcttagtttcttgggttttgtcaggctactacacggcgtttcttctcggacgttacagaaagcttag

SEQ ID NO: 2343 - protein, 578 aa, Brassica napus
MGMCHGKPIEHQSKQSLPSPDEPQPPPPPPPAAKSSGFPFYSPSPLPSLFKSSPSVSSSASSTPLRIFKRPFPPPSPAKHIRAFLARRHGSSAKPPSEVSIPEGEEFEIGLDKSFGFSKHFASHYEIDGEVGRGHFGYTCSAKGKKGSLKGQEVAVKVIPKSKMTTAIAIEDVSREVKILRALTGHKNLVQFYDAFEDDENVYIVMELCKGGELLDKILQRGGKYSEDDAKQVMVQILSVVAYCHLQGVVHRDLKPENFLFSTKDETSPLKAIDFGLSDYVKPDERLNDIVGSAYYVAPEVLHRTYGTEADMWSIGVIAYILLCGSRPFWARTESGIFRAVLKAEPNFEEAPWPSLSPDAVDFVKKLLNKDYRKRLTAAQALCHPWLVASHELKIPSDMIIYKLVKVYIMSTSLRKSALQALAKTLTVPQLAYLREQFTLLGPSKNGYISMQNYKTAILKTATDATKDSRVLDFVHMISCLQYKKLDFEEFCASALSVYQLEAMETWEQHARRAYELFEKDGNRPIMIEELASELGLGPSVPVHVVLQDWIRHSDGKLSFLGFVRLLHGVSSRTLQKA

SEQ ID NO: 2344 - DNA, 1725 bp, Brassica napus
  CDS (1)..(1725)
atgggtctctgtttctcctccgccaaagtctccggccgccaacaccgcagcccccggagtcccaacccaccacatcatcccctcaccgtcgctaaacccaaaccgccgcaaacgccatgttcattcctagccgttacgatccagaaagaccacaaggcccaacagcgacgtaacgccgcgacgacggcgaataagaaaacgccgccgcagacgcaaacgcgacagacgccaacgcacgggaaggcgagagagaaggcgaagagacacggagaaaagatcccgtacggtaagcgcgtggatttcgggtacgctaaagatttcgataaccgttacaccatcgggaagttgctcggacatggccagttcggttatacgtacgtagctaccgataaaaagacaggagatcgtgtcgctgtgaagaaaatcgataaagccaagatgacactgccgatagctgtggaagatgttaggagagaggtgaagatacttcaagctttaactggtcatgaaaacgtggttcggttctacaatgccttcgaggacaagaactctgtttatatagccatggagttatgcgagggtggtgaattgctggatcggatattagccaagaaagatagtcattataccgagagagacgcggccgtggtagtgagacagatgctaaaagttgcagctgaatgtcatttacgtggtttggttcatagagatatgaaaccagagaattttctgttcaaatcaactgaagaagattcggctctaaaagctacagatttcggtttatcagacttcataaaaccaggcaagaagtttcatgatatagtagggagcgcgtattacgtagcacctgaagtattgaaacgaaggtcaggacctgaatcagatgtatggagtattggtgttatcagttacattcttctctgcgggagacgacctttctgggataagactgaagatggtattttcaaagaggtattgaagaacaaacctgacttcagaagaaaaccatggccaaccattagcaacagcgccaaagatttcgttaagaagttgttagtaaaagacccaagagctagattaacagctgcgcaggcactatcacatccatgggttagagaaggaggagatgcaactgagattcccatagacatatctgttctcagcaatatgcgtcagtttgttaaattcagccgcctcaagcaattcgcattaagggctcttgcaacgacgcttgatgaagaggagttggctgatcttagagaccagtttggtgcgatggatgctgataagaatggagccattagccttgacgagatgcggcaggcccttgcgaaagatcatccgtggaagcttaaagatgcacgagtcgctgagattcttcaagcgattgatagcaacacagatggatttgtggattttgaagagtttgttgctgctgcgttacacgtaaatcaactagaggagcatgattctgagaaatggcaacagagatcaagagcagcatttgagaaattcgatatagacggagatggatttataacagcagaagaacttcgaatgcatactggcttgaaagggtccattgagccactacttgaagaagcagacattgatcatgatggtaaaatcagtctccatgagtttcgtagacttttgaaaactgcgagtatcaaatcaagaaatgttagaaaccctcctggttatcttatttctcggaaagcctga

SEQ ID NO: 2345 - protein, 574 aa, Brassica napus
MGLCFSSAKVSGRQHRSPRSPNPPHHPLTVAKPKPPQTPCSFLAVTIQKDHKAQQRRNAATTANKKTPPQTQTRQTPTHGKAREKAKRHGEKIPYGKRVDFGYAKDFDNRYTIGKLLGHGQFGYTYVATDKKTGDRVAVKKIDKAKMTLPIAVEDVRREVKILQALTGHENVVRFYNAFEDKNSVYIAMELCEGGELLDRILAKKDSHYTERDAAVVVRQMLKVAAECHLRGLVHRDMKPENFLFKSTEEDSALKATDFGLSDFIKPGKKFHDIVGSAYYVAPEVLKRRSGPESDVWSIGVISYILLCGRRPFWDKTEDGIFKEVLKNKPDFRRKPWPTISNSAKDFVKKLLVKDPRARLTAAQALSHPWVREGGDATEIPIDISVLSNMRQFVKFSRLKQFALRALATTLDEEELADLRDQFGAMDADKNGAISLDEMRQALAKDHPWKLKDARVAEILQAIDSNTDGFVDFEEFVAAALHVNQLEEHDSEKWQQRSRAAFEKFDIDGDGFITAEELRMHTGLKGSIEPLLEEADIDHDGKISLHEFRRLLKTASIKSRNVRNPPGYLISRKA

SEQ ID NO: 2346 - DNA, 1650 bp, Brassica napus
  CDS (1)..(1650)
atgggcaattcatgccgtggttctttcaaggacaaaacctacgagggcaataacaacaacctgcccgaggagaattccatcaccatcacccacgattcctccgttcattccccgaccacagaacaagacttccctaaagaagacaacaacaacaacaacaagagtcctgttcttgtgcttcccgtgaaagaaccttttatgcgacgtaacatggacaaccaagcttactacgttctcggtcacaagactcctaacatccgtgatctttacaccttgagccgtaagttaggacaaggacagttcgggaccacgtatctctgcaccgaggtcgcaacgggtgttgactatgcttgcaagtctatatccaagaggaagttgatatctaaggaagatgttgaggatgttaggagggagattcagataatgcaccatttggctggtcacaagaacattgttacgataaaaggagcttatgaggaccctttgtatgttcacattgtgatggaggtttgtgctggtggtgagttgtttgataggattattcagagaggtcattacaccgagaggaaagctgctgagttgaccaagattgttgttggtgttgttgaggcgtgtcattcgcttggtgtcatgcatagagacttgaagcctgagaatttcttgttggttaataaggatgatgatttctctcttaaggccattgattttggtctctctgttttcttcaaaccaggccaaatatttaaggatgttgttggaagtccatactatgttgctcctgaggttcttcttaaacattatggtcctgaagctgatgtgtggactgctggtgttatactatatattctactaagtggtgtccctcctttttgggcagaaacacaacaaggaatatttgatgctgtcttgaaaggagatatagactttgagtcagatccgtggcctgtgatttccgacagtgctaaagatctgatcaggaagatgttatgctctaatccctctgaacgcttgacagctcatgaagtcatgcgtcatccatggatctgcgagaacggagttgcaccagacagagctcttgatcctgctgttctgtctcgtctcaaacagttttctgcaatgaataaattaaagaagatggctttaaaggtgatagctgagagtctctcagaagaagaaattgcaggtttaagagcaatgtttgaggcaatggatacagataacagcggtgcaatcacttttgatgaacttaaagctggtctgagaagatatggctctactttgaaagacactgagatccaagatcttatggaagcggctgatgtggataacagcggtacaatagattacagtgagttcattgcagcgaccatccatctgaataagctagacagagaagagcatcttgtctctgcgtttcagtactttgataaagatggaagtggttacatcaccattgatgagctgcaacaatcttgcgtggaacatgggatgaccgatgtttttcttgaagatgtaatcaaagaagttgatcaagacaatgatggacggattgactatggagaatttgttgcaatgatgcaaaagggaaatgctggtatcgggaggcgaacaatgagaaatagcctgaacatcagcatgagagatgcttag

SEQ ID NO: 2347 - protein, 549 aa, Brassica napus
MGNSCRGSFKDKTYEGNNNNLPEENSITITHDSSVHSPTTEQDFPKEDNNNNNKSPVLVLPVKEPFMRRNMDNQAYYVLGHKTPNIRDLYTLSRKLGQGQFGTTYLCTEVATGVDYACKSISKRKLISKEDVEDVRREIQIMHHLAGHKNIVTIKGAYEDPLYVHIVMEVCAGGELFDRIIQRGHYTERKAAELTKIVVGVVEACHSLGVMHRDLKPENFLLVNKDDDFSLKAIDFGLSVFFKPGQIFKDVVGSPYYVAPEVLLKHYGPEADVWTAGVILYILLSGVPPFWAETQQGIFDAVLKGDIDFESDPWPVISDSAKDLIRKMLCSNPSERLTAHEVMRHPWICENGVAPDRALDPAVLSRLKQFSAMNKLKKMALKVIAESLSEEEIAGLRAMFEAMDTDNSGAITFDELKAGLRRYGSTLKDTEIQDLMEAADVDNSGTIDYSEFIAATIHLNKLDREEHLVSAFQYFDKDGSGYITIDELQQSCVEHGMTDVFLEDVIKEVDQDNDGRIDYGEFVAMMQKGNAGIGRRTMRNSLNISMRDA

SEQ ID NO: 2348 - DNA, 1599 bp, Brassica napus
  CDS (1)..(1599)
atgggacacagacacagcaagtccaaatcctccggtccgccaccgtcctcctcctcctcctcttcctccaccaacgtcgtccaccatgtccaaccttccggagaacgccgcggatcttccggttctggccccacacccgtcggatcttcctcaaccggcggatcccgctccgccgcatctgctcagcagaacggtcggatcttaggccgtccgatggagaatgtcaggggaacgtacgatttcggcaaggagcttggtcgtggccagttcggagtcacgtatctcgtcactcacaaagagaccaaaaaactcttcgcctgcaagtcgatccccacgcgccgcctcgtccaccgtgacgacattgaagacgtccgccgtgaagtccagattatgcaccatctcagtggtcacaggaacatagtggacttgaagggagcttacgaggacagacactcggtgaatctgataatggagctgtgcgaaggaggggagcttttcgacaggatcatagcgaaaggccattacacggagagagccgctgcggatttgtgcaggcagatggtgatggttgtgcatagttgccactctatgggtgtgatgcaccgtgatttgaagcctgagaactttctctttctcagcaaagatgagaactctccgttgaaagctacagactttggtctatccgtcttctttaaaccaggagataagtttaaggatcttgttgggagtgcatactatgtggccccggaggttttgaaacggaactatggaccagaggctgatatctggagtgccggtgtgattctcttcatccttatcagcggtgttccgccgttttggggagaaaatgagacagggatctttgatgctattctaaaaggagagcttgacttctcagctgatccgtggccaacggtgtcggctggtgccaaagatcttgtgaagaaaatgttgaagtatgatcctaaagaccggcttacagctagcgaagtgctgaaccatccgtggattaaagaagatggagaggcctcagacaaaccgcttgacaatgctgtgttgtccaggatgaaacagttcagagccatgaacaaactaaagaaaatggcactgaatgtaattgcagagaacctgtctgaagaagaaatcattggtctgaaagagatgttcaaagctctagacaccgataaaaacggaatagtcaccttggaggaattgagaaccggtctcccaaagcttggcaataagatctctgaggctgaaataaaacagttaatggaagcagctgatatggatggagatggatcgatagattacttggagtttatatcagcgacaatgcatatgaacagaatcgaacgtgaggatcatttgtacactgctttccagtacttcgacaaggacaacagcgggtacataacaatggaagagctagagcaggccatgaagaaatacaacatgggtgatgacaaatccattaaagagatcattgctgaagttgacaccgatcgtgacgggaaaataaactacgaagagttcgtagcgatgatgaagaagggaaatccagaactggtgacgaaccgacgcagagtcaacatgtaa

SEQ ID NO: 2349 - protein, 532 aa, Brassica napus
MGHRHSKSKSSGPPPSSSSSSSSTNVVHHVQPSGERRGSSGSGPTPVGSSSTGGSRSAASAQQNGRILGRPMENVRGTYDFGKELGRGQFGVTYLVTHKETKKLFACKSIPTRRLVHRDDIEDVRREVQIMHHLSGHRNIVDLKGAYEDRHSVNLIMELCEGGELFDRIIAKGHYTERAAADLCRQMVMVVHSCHSMGVMHRDLKPENFLFLSKDENSPLKATDFGLSVFFKPGDKFKDLVGSAYYVAPEVLKRNYGPEADIWSAGVILFILISGVPPFWGENETGIFDAILKGELDFSADPWPTVSAGAKDLVKKMLKYDPKDRLTASEVLNHPWIKEDGEASDKPLDNAVLSRMKQFRAMNKLKKMALNVIAENLSEEEIIGLKEMFKALDTDKNGIVTLEELRTGLPKLGNKISEAEIKQLMEAADMDGDGSIDYLEFISATMHMNRIEREDHLYTAFQYFDKDNSGYITMEELEQAMKKYNMGDDKSIKEIIAEVDTDRDGKINYEEFVAMMKKGNPELVTNRRRVNM

SEQ ID NO: 2350 - DNA, 1632 bp, Brassica napus
  CDS (1)..(1632)
atgggtaactgtaacgtctgtgtgagaccccctaaccccgaagaatcgaaaccgaagaaaaccaaccaaaaccggaaattaaacccattcacctccgatttcatcagatcccccgctcgaacccgcgcccccaaggacgcggtaatccccacgagccaccagaccaagatcaccgacaagtacatcctcggccgagagctaggccgcggcgagttcgggatcacctacctctgcaccgaccgcgagtcccgcgaagccctggcctgcaaatcgatctccaagcggaagctccgcaccgccgtcgacgtcgaggacgtccgccgcgaggtctcgatcatgtccacactccccgaccaccccaacgtcgtcaagctcagggcgacttacgaggacggcgagagcgtgcatctggtcatggagctctgcgaaggcggcgagcttttcgacaggatcgtcgcgagggggcattacacggagcgtgcggctgcgggagttgcgaggacgatcgctgaggttgtgatgatgtgtcatgtgaatggagttgtgcatcgtgatttgaagcctgagaactttttgtttgctaacaagaaggagaactctgcgttgaaggctattgattttgggttgtctgtgttcttcaaacctggagaaaagtttaaggagattgtaggaagtccatattacatggctcctgaggtgttgaagagagattatggaccagaggttgatgtttggagtgctggagttatcatctacatcttgctctgtggtgttcctcccttttgggctgagacggaacaaggtgttgctcttgcgatcttgcggggagttattgactttaagagagacccttggcctcagatatcagagagcgccaagagccttgtgaggcagatgttgaatcctgatcccactaagcgtttaactgctcagcaagtgttagctcacccttgggtacagaatgcaaagaaagctccaaatgtaccattaggggatatagtcagatcaagattgaagcagttctctatgatgaatagattcaaaaagaaagttcttcgtgtaatagctgagcacttgtctattcaagaggttgaagtgatcaaggacatgttctcactgatggatgaagacaacgatggtagaataacttacctggagctcaaagctggacttcagaaggttggctcacagcttggtgaaccagagatcaaaatgttgatggaagtggctgatgttgatgggaatgggtttctggactacggagagtttgtagctgtgatcattcacttgcagaagatagagaacgacgagcttttcaaactagctttcatgttctttgacaaagatggaagtacatacatcgaacttgatgagctacgggaagctttaactgacgagttgggcgaacctgatgtcagtgttctaaacgacatcatgcgtgaagttgattctgacaaggatgggcgtataaactatgatgagtttgtgacgatgatgaaagcaggaaccgattggagaaaggcgtcgagacaatactcaagagagaggttcaaaagcttaagcattaacttgatgaaagatggttcattgcatctccatgatgctctcactggacaatctgtccctgtttga

SEQ ID NO: 2351 - protein, 543 aa, Brassica napus
MGNCNVCVRPPNPEESKPKKTNQNRKLNPFTSDFIRSPARTRAPKDAVIPTSHQTKITDKYILGRELGRGEFGITYLCTDRESREALACKSISKRKLRTAVDVEDVRREVSIMSTLPDHPNVVKLRATYEDGESVHLVMELCEGGELFDRIVARGHYTERAAAGVARTIAEVVMMCHVNGVVHRDLKPENFLFANKKENSALKAIDFGLSVFFKPGEKFKEIVGSPYYMAPEVLKRDYGPEVDVWSAGVIIYILLCGVPPFWAETEQGVALAILRGVIDFKRDPWPQISESAKSLVRQMLNPDPTKRLTAQQVLAHPWVQNAKKAPNVPLGDIVRSRLKQFSMMNRFKKKVLRVIAEHLSIQEVEVIKDMFSLMDEDNDGRITYLELKAGLQKVGSQLGEPEIKMLMEVADVDGNGFLDYGEFVAVIIHLQKIENDELFKLAFMFFDKDGSTYIELDELREALTDELGEPDVSVLNDIMREVDSDKDGRINYDEFVTMMKAGTDWRKASRQYSRERFKSLSINLMKDGSLHLHDALTGQSVPV

SEQ ID NO: 2352 - DNA, 1599 bp, Brassica napus
  CDS (1)..(1599)
atggggaactgttgcggcagtccaagttcagccaccatcgagagtggacatggcaaacccaagaacaaaaacaatccctttcacagcaacgaagcaaacggatctggagctggcttcaagctctctgtgctgaaagatccaacaggacacgacatatcttctcagtatgatcttggacgcgaggttggtcgaggggagtttggtgtgacttacttgtgtactgacatccaaacgggtgacaagtacgcttgcaagtccatatcgaagaagaagctgaggacagcggtggatataggggatgttaggagggaggttgagataatgagacatatgcctaaacacccaaacattgtctctttgaaggattcgttcgaggatgatgacgcggttcatatagttatggagttgtgtgaaggaggggagctgtttgatcggattgttgcgagagggcattacactgagagggctgctgctgcggttatgaagactattgttgaagttgttcagatatgtcataagcagggagtgatgcatagggatcttaaaccagagaactttctttttgctaataagaaagagacatcagctcttaaggctattgattttggattatctgtcttctttaaaccaggtgagcagtttaatgagattgtgggaagtccttattacatggcaccagaggtgctaagacgaaactatggacctgagatcgatgtctggagtgcaggagtcatcctctatatccttctttgtggtgtccctcctttttgggcagagactgagcaaggggtggctcaagcgatcattaggtcagtaattgactttaagagagatccatggccaagagtttccgaaagcgccaaggaccttgtgagaaagatgcttgaacctgatcccaagaaacggctttctgctgcagaagtactcgaacatacttggatactgaatgcaaagaaggctccgaatgtgtctcttggggagactgtgaaagcaaggctaaagcagttttctgttatgaacaagctcaagaaacgagctttacgagtgatagctgaacacttgtcagtggaagaagcagctgggataaaggaagcatttgaaatgatggacgttaacaagagaggcaagataaacctcgaggagcttaagtacggacttcaaaaagctggacagcagattgctgatgctgatcttcagattcttatggaagctactgatgttgatggggacgggacactgaactatggagagttcgtggctgtatcagtgcacttgaagaagatggcgaacgatgaacacttgcataaagcgttcaacttctttgataagaaccagagtggttacatagagcctgaagagcttcgtgaggctttgaatgatgaattggatgaaactagcagtgaggaagtcatcgctgccatcatgcatgatgttgatactgacaaggacgggcgaataagctatgaagagtttgcagcgatgatgaaagctgggacagactggaggaaagcgtcacggcagtattcgagggaaagattcaacagtttgagcctcaagttaatgagagatggttctttgcaactagcaggtgaggcttaa

SEQ ID NO: 2353 - protein, 532 aa, Brassica napus
MGNCCGSPSSATIESGHGKPKNKNNPFHSNEANGSGAGFKLSVLKDPTGHDISSQYDLGREVGRGEFGVTYLCTDIQTGDKYACKSISKKKLRTAVDIGDVRREVEIMRHMPKHPNIVSLKDSFEDDDAVHIVMELCEGGELFDRIVARGHYTERAAAAVMKTIVEVVQICHKQGVMHRDLKPENFLFANKKETSALKAIDFGLSVFFKPGEQFNEIVGSPYYMAPEVLRRNYGPEIDVWSAGVILYILLCGVPPFWAETEQGVAQAIIRSVIDFKRDPWPRVSESAKDLVRKMLEPDPKKRLSAAEVLEHTWILNAKKAPNVSLGETVKARLKQFSVMNKLKKRALRVIAEHLSVEEAAGIKEAFEMMDVNKRGKINLEELKYGLQKAGQQIADADLQILMEATDVDGDGTLNYGEFVAVSVHLKKMANDEHLHKAFNFFDKNQSGYIEPEELREALNDELDETSSEEVIAAIMHDVDTDKDGRISYEEFAAMMKAGTDWRKASRQYSRERFNSLSLKLMRDGSLQLAGEA

SEQ ID NO: 2354 - DNA, 1746 bp, Glycine max
  CDS (1)..(1746)
atggggaacacgtgtgttggtcctagcatttcaaaaaatggttttgttcaatcagtttctgcggcgatttggcggtcccaattgcctgaaggttcagtgtctaatagagaatctgtaaaagaggaagcaactagtgtgcccgaatcgcccttgcctgtccaaaacaagcctcctgagcagataactatgccgaaacaagaagccaaacaagagggaaaatcagaaatagaaccggaaaaggaacaggataagaagaaacagaagaaacgtggttcagtgaagagagtttctagcgcagggcttcgtgttgattctgtgttgcaaagagagaccgataatttcaaggagttcttcactcttgggagaaaacttggacagggtcagttcgggacaacgttcttgtgcgtggaaaaggcaacagggcaggagtacgcctgcaaatctattgcaaagaggaagctcgtcaccgatgatgatgtcgaggatgtgagaagagaaattcagataatgcaccacttggccgggcatcctaatgttatatccatcaaaggtgcatatgaggatgccgtggctgttcatgttgtgatggaattatgtgcaggtggagagcttttcgataggattattcagcgtggccattataccgagagacaggcagccaagcttactaagactatagttggcgttgtggaagcttgccattctcttggtgtgatgcacagagaccttaaacctgagaattttctctttgtcaatcagcacgaggattcccttctcaaaaccattgactttggattatctgtcttctttaagccaggtgatatatttaatgatgtggtgggcagcccatactatgttgccccggatgttttgcgaaagcgttatggtcctgaggcagatgtttggagtgctggtgttatcctttacattcttttgagtggagtacctccattttgggctgaaaacgaacaaggaatatttgaacaagttctgcgtggtgatcttgacttttcttctgatccctggccttcaatttctgaaagtgcaaaagatttagtaagaaaaatgcttgttcgcgaccctagaaggcggttgactgcacatcaagtattatgtcatccttggattcaagttgatggtgtagctcctgacaagccacttgattctgccgtattaagtcgcttgaagcaattttctgctatgaacaagctcaaaaaaatggcccttataattattgcagagagcttatctgaagaagaaatagctggcttaaaagaaatgttcaagatgatagatgcagataacagtggtcaaatcacttttgaagaacttaaagctggtttgaaaagagtcggcgctaatcttaaggagtctgaaatttatgatttaatgcaagcagctgatgttgataacagtgggacaattgattacggcgatttccttgctgcaacgttgcaccgcaacaaaattgaaagagaagataatctatttgcagccttttcttactttgataaagatggaagtggctatattactcaggaagaacttcaacaggcttgtgatgagtttggcataaaagatgtccgtttggaagagataatcaaggaaattgatgaagataatgatggacgcatagattacaatgagtttgtggctatgatgcagaaaggaaatcttccagcggttggtaagaagggcctagaaaatagcttcagcgttaagttcagggaggcattaaaattgtag

SEQ ID NO: 2355 - protein, 581 aa, Glycine max
MGNTCVGPSISKNGFVQSVSAAIWRSQLPEGSVSNRESVKEEATSVPESPLPVQNKPPEQITMPKQEAKQEGKSEIEPEKEQDKKKQKKRGSVKRVSSAGLRVDSVLQRETDNFKEFFTLGRKLGQGQFGTTFLCVEKATGQEYACKSIAKRKLVTDDDVEDVRREIQIMHHLAGHPNVISIKGAYEDAVAVHVVMELCAGGELFDRIIQRGHYTERQAAKLTKTIVGVVEACHSLGVMHRDLKPENFLFVNQHEDSLLKTIDFGLSVFFKPGDIFNDVVGSPYYVAPDVLRKRYGPEADVWSAGVILYILLSGVPPFWAENEQGIFEQVLRGDLDFSSDPWPSISESAKDLVRKMLVRDPRRRLTAHQVLCHPWIQVDGVAPDKPLDSAVLSRLKQFSAMNKLKKMALIIIAESLSEEEIAGLKEMFKMIDADNSGQITFEELKAGLKRVGANLKESEIYDLMQAADVDNSGTIDYGDFLAATLHRNKIEREDNLFAAFSYFDKDGSGYITQEELQQACDEFGIKDVRLEEIIKEIDEDNDGRIDYNEFVAMMQKGNLPAVGKKGLENSFSVKFREALKL

SEQ ID NO: 2356 - DNA, 1647 bp, Triticum aestivum
  CDS (1)..(1647)
atgggtaatcagaatgggacccctgggaatgattactgcagccggttccccagggagcatcctgcttccaggtacgccgatgggattgaagatgatagctactcagacttgaagaaatccgagaagccctggcccgatgccgactcgtttaagcccaccgccgctggtattctgaggcagggtttggatctgacatccatctctgtcctcgggcgcaagacggcggacctaagggagcattatatcattggccggaagcttgggcagggccagtttgggacgacatacctctgcaccgagataagtacagggtgcgacttcgcatgcaagaccatcctcaagcgcaagctcgtcaccaaggtggatgtcgaggatgtgcgccgtgagatccagataatgcaccatttgtcgggacacaagaacgttgtctcgatcaaggatgtctatgaggacgtgcaggcggtccacattgtgatggagctcttgcccggcggggagctctttgaccgaattcaggggaatgggcattacagcgagatgaaggctgcagagattacaagaattgttgtcagcattgtggctatgtgccattcacttggtgtgatgcaccgcgatctcaagccagaaaatttcctcctccttgacaaagatgatgacctgtccataaaagcaattgattttggcctatccgtttacttcaagccaggccaggttttcagtgagctagttggcagcccgttctatgttgctcctgaggtgctgcacaaacgctatgggccagaatctgatgtgtggtcagctggagtgatactctatgtgttgctaagtggggttccaccattttgggcagatacacagaaaggcatatttgatgcagttctgaaggggcaccttgatttggaatcagacccttggcctaagatatctgacggtgcaaaggatcttataagaaaaatgctttgcaattgcccttcagagcgtttgaaagcccatgaagtgctacggcatccctggatctgccaaaatggggtggccactgatggagttttggatcctagtgtcatctctcggctcaagcggttctctgcaatgaacaatctacagaaattagctctgagagtgatagctgagcgtctttcagaagaggagattgctggattaagagaattattcaagacagtggacataaaaaatagaggtgtgatcactttcggtgagcttaggaaaggtttgacaagatatggcaacgaattggtggataccgagatttgtgatataatggaagcggctgatacagacactgatgtaaccataaattatgaagaatttattgctgcaaccatgcctctaaacaagatagagcgggaagagcacttgaaggcagcttttacatattttgacaaagatggcagtggctatatcacagtcgacaagcttcaacgagcctgtgcagaatataacatggagggcactctccttgaagagattattttagaggccgaccagaacaatgacggtcaaattgattatgctgaatttgtagccatgatgcaaggcaacaccaacggtggcaatattggacttgggcgtccaacaatggaaaccagtctgaatgtgaccttgagagatgcagctcaagtacattaa

SEQ ID NO: 2357 - protein, 548 aa, Triticum aestivum
MGNQNGTPGNDYCSRFPREHPASRYADGIEDDSYSDLKKSEKPWPDADSFKPTAAGILRQGLDLTSISVLGRKTADLREHYIIGRKLGQGQFGTTYLCTEISTGCDFACKTILKRKLVTKVDVEDVRREIQIMHHLSGHKNVVSIKDVYEDVQAVHIVMELLPGGELFDRIQGNGHYSEMKAAEITRIVVSIVAMCHSLGVMHRDLKPENFLLLDKDDDLSIKAIDFGLSVYFKPGQVFSELVGSPFYVAPEVLHKRYGPESDVWSAGVILYVLLSGVPPFWADTQKGIFDAVLKGHLDLESDPWPKISDGAKDLIRKMLCNCPSERLKAHEVLRHPWICQNGVATDGVLDPSVISRLKRFSAMNNLQKLALRVIAERLSEEEIAGLRELFKTVDIKNRGVITFGELRKGLTRYGNELVDTEICDIMEAADTDTDVTINYEEFIAATMPLNKIEREEHLKAAFTYFDKDGSGYITVDKLQRACAEYNMEGTLLEEIILEADQNNDGQIDYAEFVAMMQGNTNGGNIGLGRPTMETSLNVTLRDAAQVH

SEQ ID NO: 2358 - DNA, 1599 bp, Linum usitatissimum
  CDS (1)..(1599)
atggggaactgctgtgcaagccctggcaacagctctcctaagaacaccaagaacaacaaagagaaaggcaagaacaacaaaggaagcaatccattcttcggaactgactatgtagtcaacgacaagaagctctacgtgttgagtgaacctactggtagggacatctcagctcactacgatctaggccgtgagcttggccgtggtgaattcggagtcacgtatttgtcaactgagatgaccactggggataagtatgcctgcaagtccatctccaagaagaagctgaggactgctattgatgttgaggatgtgaggagggaagttgagatcatgaagcacttgcctcaccacccaaatatcgtttcgattaaggatacttacgaggatgacagtgctgtccacattgttatggagctctgtgaaggtggggagctgttcgataggattgttgctagaggacattacactgaacgggctgctgctgctgttatgcggaccatcgttgaagttgttcagatgtgccataagcatggtgtgatgcaccgtgatctcaagccggagaactttctgtttgcaaataagaaggaagcgtccgctttgaaggcaatcgattttggattgtccgtcttctttaaacctggagagagattcaatgagatagtgggaagtccatattacatggcccccgaggtcctgaaacggaactatggccccgaagttgatgtatggagcgctggagttatcctctacatcttgctctgtggagttcctccattttgggcagaaaccgagcagggtgtggcacaggcgattatacgatcggtcatagacttcaagagggatccatggcctaaagtttcggataatgcaaaggatctcgtaaggaagatgcttaatcccgatcctaagcagcgccttacagctcagcaagtgcttgaccatacgtggctgcagaatgcgaagaaggctccgaatgtcccattgggcgagactgtgagaacccggctcaaacagttctctatgatgaacaaactcaagaaaagagcacttagggtgatagccgagcacttatcgttggaggaagttgctggcataaaggagacctttgacatgatggacacaagccaaaggggtaaaatcaacattgatgagctcagagttggacttcacaagcttggccagcagattaccgatccggatctgcaaattcttatggatgctgctgatatcgatggagatggaactctgaactatggagagtttgtcgcgatcaccatccacataaaaaagatggggaacgacgagcatctacacaaagcgttcgggttcttcgaccagaacaagacgggatacattgagatggaggagcttcgacaagcactgaatgacgacattgacacttgtagcgaagacgtgttgaatgccatcatgcacgatgtggacaccgacaaggacggccgaataagctacgaggagtttgcgacgatgatgaaggcagggactgactggagaaaagcttcgaggcaatattcgagagagagattcaacagtctaagcttgaagttgatgagagatggttcattgcaggtagctagctga

SEQ ID NO: 2359 - protein, 532 aa, Linum usitatissimum
MGNCCASPGNSSPKNTKNNKEKGKNNKGSNPFFGTDYVVNDKKLYVLSEPTGRDISAHYDLGRELGRGEFGVTYLSTEMTTGDKYACKSISKKKLRTAIDVEDVRREVEIMKHLPHHPNIVSIKDTYEDDSAVHIVMELCEGGELFDRIVARGHYTERAAAAVMRTIVEVVQMCHKHGVMHRDLKPENFLFANKKEASALKAIDFGLSVFFKPGERFNEIVGSPYYMAPEVLKRNYGPEVDVWSAGVILYILLCGVPPFWAETEQGVAQAIIRSVIDFKRDPWPKVSDNAKDLVRKMLNPDPKQRLTAQQVLDHTWLQNAKKAPNVPLGETVRTRLKQFSMMNKLKKRALRVIAEHLSLEEVAGIKETFDMMDTSQRGKINIDELRVGLHKLGQQITDPDLQILMDAADIDGDGTLNYGEFVAITIHIKKMGNDEHLHKAFGFFDQNKTGYIEMEELRQALNDDIDTCSEDVLNAIMHDVDTDKDGRISYEEFATMMKAGTDWRKASRQYSRERFNSLSLKLMRDGSLQVAS

SEQ ID NO: 2360 - DNA, 1596 bp, Zea mays
  CDS (1)..(1596)
atggggcagtgttacagcagagctacggccccggactctggacggggaggtgccaatggttatggctattctaaccaggcaaagccggcgcaagcacccccgagttacaaccctcctcagcaggcggccgaggtgaggtacacaccatcggcgacgaactcttcggcagtcccacccgtggctgtgccgccgaagccaacggcggacacgattcttggcaagcagtacgaggacgtgcgctctgtctactccctcgggaaggagcttggccggggccagttcggggtgacatacctctgcacagagattgcctctggtaggcagtacgcctgcaagtccatctccaagcgcaagctcgtcagcaaggcagacagggaggacattcgaagggagatccagatcatgcagcacctgtctgggcagccaaacattgttgagttccggggagcatacgaggacaagagcaatgtccatgtggtgatggagctctgcgcaggtggggagctcttcgatcgcatcattgcaaaggggcactacacagaacgtgcggctgctacaatctgcagagcagttgtgaatgttgtcaacatttgccacttcatgggtgtgatgcatcgtgatctgaaacccgagaacttcttgcttgcgaccaaggaggagaatgcaatgctcaaggccactgattttgggctttctgtcttcattgaagaaggaaagatgtacagggacattgttggaagtgcttactatgttgctcctgaagtccttagacggagctatggaaaagagatagatgtttggagtgcgggtgttattttgtacattcttctcagtggcgtgcctccattttgggctgaaactgaaaaggggatatttgatgctattctgcatgaggagattgactttgaaagtcaaccttggccatcaatttctgagagtgctaaagacttggtgagaaagatgttgacacgagatccaaagaaaagactgacttcagcccaagttcttcaacatcagtggctcagagaaggtggggaggcatctgataagcctatcgacagtgctgttctttctagaatgaagcaattcagagcaatgaataagctgaaaaagatggccctaaaggttattgcttcaaaccttaacgaggaagagatcaaggggctaaagcaaatgttcatgaacatggacacagacaatagtggcacaatcacatacgaagaactcaaagcaggattagccaaacttggatcaaagctgtcagaagctgaagtaaagcagttgatggaggctgctgatgttgatgggaatggatctattgactatgttgagttcatcactgccacaatgcatagacacaagctcgaaagggacgagcatttgttcaaggcattccagtactttgacaaagataacagcggcttcatcacaagggatgaactggaatctgctttgattgagcatgagatgggcgacacgagtacaataaaggagatcatatcagaagttgacacagataatgatgggaggattaactatgaggagttttgtgcaatgatgagaggagggatgcagcagccaatgaggctcaagtag

SEQ ID NO: 2361 - protein, 531 aa, Zea mays
MGQCYSRATAPDSGRGGANGYGYSNQAKPAQAPPSYNPPQQAAEVRYTPSATNSSAVPPVAVPPKPTADTILGKQYEDVRSVYSLGKELGRGQFGVTYLCTEIASGRQYACKSISKRKLVSKADREDIRREIQIMQHLSGQPNIVEFRGAYEDKSNVHVVMELCAGGELFDRIIAKGHYTERAAATICRAVVNVVNICHFMGVMHRDLKPENFLLATKEENAMLKATDFGLSVFIEEGKMYRDIVGSAYYVAPEVLRRSYGKEIDVWSAGVILYILLSGVPPFWAETEKGIFDAILHEEIDFESQPWPSISESAKDLVRKMLTRDPKKRLTSAQVLQHQWLREGGEASDKPIDSAVLSRMKQFRAMNKLKKMALKVIASNLNEEEIKGLKQMFMNMDTDNSGTITYEELKAGLAKLGSKLSEAEVKQLMEAADVDGNGSIDYVEFITATMHRHKLERDEHLFKAFQYFDKDNSGFITRDELESALIEHEMGDTSTIKEIISEVDTDNDGRINYEEFCAMMRGGMQQPMRLK

SEQ ID NO: 2362 - DNA, 1650 bp, Brassica napus
  CDS (1)..(1650)
atgggcaattcatgccgtggttctttcaaggacaaaacctacgagggcaataacaacaacctgcccgaggagaattccatcaccatcacccacgattcctccgttcattccccgaccacagaacaagacttccctaaagaagacaacaacaacaacaacaagagtcctgttcttgtgcttcccgtgaaagaaccttttatgcgacgtaacatggacaaccaagcttactacgttctcggtcacaagactcctaacatccgtgatctttacaccttgagccgtaagttaggacaaggacagttcgggaccacgtatctctgcaccgaggtcgcaacgggtgttgactatgcttgcaagtctatatccaagaggaagttgatatctaaggaagatgttgaggatgttaggagggagattcagataatgcaccatttggctggtcacaagaacattgttacgataaaaggagcttatgaggaccctttgtatgttcacattgtgatggaggtttgtgctggtggtgagttgtttgataggattattcagagagggcattacaccgagaggaaagctgccgagctgaccaagattgttgtcggtgttgttgaggcgtgccattcgcttggtgtcatgcatagagacttgaagcctgagaatttcttgttggttaataaggatgatgatttctctctcaaggccattgattttggtctctctgttttcttcaaaccaggccaaatattcaaggatgttgttggaagtccatactacgttgctccagaggttcttctaaaacattatggtccagaagctgatgtgtggactgctggtgttatactatatattctactaagtggtgtccctcccttttgggcagaaacacaacaaggaatatttgatgctgtcttgaaaggagatatagactttgagtcagacccgtggcctgtgatatccgacagtgctaaagatctgatcagcaagatgttatgctctaaaccctctgaacgcttgacagctcatgaagtcatgcgacatccatggatctgcgagaacggagttgcaccagacagagcacttgatccggctgttctgtctcgtctcaaacagttttctgcaatgaataaattaaagaagatggctttaaaggtgatagctgagagcctctcagaagaagaaattgcaggtttaagagcaatgtttgaggcaatggatacagataacagcggtgcaatcacttttgatgaactcaaagctggactgagaagatatggctcaactttgaaagacactgagatcaaagatcttatggaagcggctgatgtggacaacagcggtacaatagactacagtgaattcattgcagcgacgattcatctgaataagctagacagagaggagcaccttgtctctgcgttccagtactttgataaagatggaagtggttatatcaccattgatgagctgcaacaatcttgcgtggaacatgggatgaccgacgtttttcttgaagatgtaatcaaagaagttgatcaagacaatgatggacggattgactatggagaatttgttgcaatgatgcaaaagggaaatgctggtatcgggagacgaacaatgagaaatagcctgaacatcagcatgagagatgcatag

SEQ ID NO: 2363 - protein, 549 aa, Brassica napus
MGNSCRGSFKDKTYEGNNNNLPEENSITITHDSSVHSPTTEQDFPKEDNNNNNKSPVLVLPVKEPFMRRNMDNQAYYVLGHKTPNIRDLYTLSRKLGQGQFGTTYLCTEVATGVDYACKSISKRKLISKEDVEDVRREIQIMHHLAGHKNIVTIKGAYEDPLYVHIVMEVCAGGELFDRIIQRGHYTERKAAELTKIVVGVVEACHSLGVMHRDLKPENFLLVNKDDDFSLKAIDFGLSVFFKPGQIFKDVVGSPYYVAPEVLLKHYGPEADVWTAGVILYILLSGVPPFWAETQQGIFDAVLKGDIDFESDPWPVISDSAKDLISKMLCSKPSERLTAHEVMRHPWICENGVAPDRALDPAVLSRLKQFSAMNKLKKMALKVIAESLSEEEIAGLRAMFEAMDTDNSGAITFDELKAGLRRYGSTLKDTEIKDLMEAADVDNSGTIDYSEFIAATIHLNKLDREEHLVSAFQYFDKDGSGYITIDELQQSCVEHGMTDVFLEDVIKEVDQDNDGRIDYGEFVAMMQKGNAGIGRRTMRNSLNISMRDA

SEQ ID NO: 2364 - DNA, 1590 bp, Brassica napus
  CDS (1)..(1590)
atgggacacagacacagcaagtccaaatcctcaggtccgccaccgtcctcctcttcctccaccaacgtcgtccaccatgtcaaaccttccggagagcgccgcggatcttccggttctggctccgcacccgtcggatcttcctcaaccggcggatcccgctccgccgcatctgctcagcagaacggtcggatcttaggccgtccgatggagaatgtcaggggaacgtacgacttcggcaaggagcttggtcgtggccagttcggagtcacgtatctcgtcactcacaaagagaccaaaaaactcttcgcctgcaagtcgatccccacgcgccgcctcgtccaccgtgacgacattgaagacgttcgccgtgaagtccagattatgcaccatctcagtggtcacaggaacatagtggacttgaagggagcttacgaggacagacactcggtgaatctgataatggagctgtgcgaaggaggggagcttttcgacaggatcatagctaaaggccattacacggagagagccgctgcggatttgtgcaggcagatggtgatggttgtgcatagttgccactctatgggcgtgatgcaccgagacttgaagcccgaaaacttcctctttctcagcaaagatgagagctccccgttgaaagctacagactttggcctctccgtcttcttcaaaccaggagataagtttaaggatcttgttggaagtgcatactatgttgccccggaagttttaaaacggaactatggaccagaggctgatatctggagtgccggtgtgattctgtacatccttctcagtggtgtcccgccattttggggagaaaatgagacagggatcttcgatgccattctagaaggaaagcttgatttttcagctgatccatggcctgatgtatccaacggtgccaaagatcttgtgaagaagatgttgacgtatgaccctaaagaccggcttacagcgagtgaagtgctaaaccatccgtggattaaagaagacggagaggcgtcagacaaaccgcttgacaatgctgtgttatccaggatgaaacagttcagagccatgaacaaactcaagaaaatggcactcaaggtaatcgcagagaacctatctgaagaagaaatcattggtctgaaagagatgttcaaagctctagacaccgataaaaacggaatagtcaccttggaggaattgagaaccggtctcccaaaacttggcaataagatctctgaggctgaaataaaacagttaatggaagcagctgatatggatggagatggatcaatagattacttggagtttatatcagcaacaatgcatatgaacagaatcgaacgtgaggatcacttgtacactgctttccaatacttcgacaaggacaacagcggctacataacaatggaagagctagaacaagccatgaagaaatacaacatgggtgatgacaaatccatcaaagagatcattgctgaagtagacaccgatcgtgacggaaaaataaactacgaagaattcgtagcgatgatgaagaaaggaaatccagaactggtgacaaaccgacgcagagtcaacatgtaa

SEQ ID NO: 2365 - protein, 529 aa, Brassica napus
MGHRHSKSKSSGPPPSSSSSTNVVHHVKPSGERRGSSGSGSAPVGSSSTGGSRSAASAQQNGRILGRPMENVRGTYDFGKELGRGQFGVTYLVTHKETKKLFACKSIPTRRLVHRDDIEDVRREVQIMHHLSGHRNIVDLKGAYEDRHSVNLIMELCEGGELFDRIIAKGHYTERAAADLCRQMVMVVHSCHSMGVMHRDLKPENFLFLSKDESSPLKATDFGLSVFFKPGDKFKDLVGSAYYVAPEVLKRNYGPEADIWSAGVILYILLSGVPPFWGENETGIFDAILEGKLDFSADPWPDVSNGAKDLVKKMLTYDPKDRLTASEVLNHPWIKEDGEASDKPLDNAVLSRMKQFRAMNKLKKMALKVIAENLSEEEIIGLKEMFKALDTDKNGIVTLEELRTGLPKLGNKISEAEIKQLMEAADMDGDGSIDYLEFISATMHMNRIEREDHLYTAFQYFDKDNSGYITMEELEQAMKKYNMGDDKSIKEIIAEVDTDRDGKINYEEFVAMMKKGNPELVTNRRRVNM

SEQ ID NO: 2366 - DNA, 1608 bp, Brassica napus
  CDS (1)..(1608)
atggggaactgttgcggcagtccaagttcagccacaatagagagtaaacatggcaaacccaagaacaaaaacaacccctttcaaagcaacgagtacacaacagcaaacggatctggagctggcttcaagctctctgtgctgaaagatccaacaggacacgacatatcttctcagtatgatcttggacgcgaggttggtcgaggggagtttggtgtgacttacttgtgtaccgacatccaaacgggtgacaagtacgcttgcaagtccatatcgaagaagaagctgaggacagcggtggatataggggatgttaggagggaggttgagataatgagacatatgcctaaacacccaaacattgtcacgctcaaggatgccttcgaggatgatgacgcggtgcatatagtgatggagctgtgtgaaggaggggagctgtttgatcggattgttgcgagaggtcattatactgaacgggctgctgctgctgttatgaagactattcttgaagttgttcagatatgtcataagaatggagtgatgcatagggatcttaagccggagaactttctatttgctaataaaaaagagacatcaccacttaaggctattgattttggattatcagtcttctttaaacctggtgaggggtttaatgagattgttggaagtccttattacatggcaccagaagtgctaagacgaaactatggacctgagatcgatgtctggagtgcaggagtcatcctctatatccttctttgtggtgtccctcctttttgggcagagactgagcaaggggtggctcaagcgatcattaggtcagtcattgacttcaagagagatccatggccaagagtttccgaaagcgccaaagaccttgtgagaaagatgctcgaacctgaccccaaaaaacgcctttctgctgcagaagtactcgaacatccttggatacaaaatgcaaagaaggctccaaatgtttccctcggcgagactgtgaaagcaaggctcaaacagttttctgttatgaacaagctcaagaaacgagctctacgggtgatagccgaacatttatcagtagaggaagtagctggcataaaggaagcgtttgagatgatggacagtaacaaaacggggaagataaacctcgagcagcttaaacatggacttcataaactcggacagcagcagatggctgatgctgatctacagattttgatggaagctgctgatgtagatggggacgggactttgaattatggagagtttgtggctgtctctgtgcatcttaagaagatggcgaacgacgaacatttgcacaaggcttttagctttttcgaccagaaccagagcaattacatagagattgaggagctgcggcaggctttaaatgatgaggaggatacgagcagtgaagaagttattgcagccatcatgcaagatgttgacactgacaaggatgggagaataagctacgaagagtttgcagcaatgatgaaagctgggacagactggaggaaagcatcaagacagtattcgagggaaagattcaacagtttgagcctcaagttaatgagagacggttcattgcaattagaaggcgagacctga

SEQ ID NO: 2367 - protein, 535 aa, Brassica napus
MGNCCGSPSSATIESKHGKPKNKNNPFQSNEYTTANGSGAGFKLSVLKDPTGHDISSQYDLGREVGRGEFGVTYLCTDIQTGDKYACKSISKKKLRTAVDIGDVRREVEIMRHMPKHPNIVTLKDAFEDDDAVHIVMELCEGGELFDRIVARGHYTERAAAAVMKTILEVVQICHKNGVMHRDLKPENFLFANKKETSPLKAIDFGLSVFFKPGEGFNEIVGSPYYMAPEVLRRNYGPEIDVWSAGVILYILLCGVPPFWAETEQGVAQAIIRSVIDFKRDPWPRVSESAKDLVRKMLEPDPKKRLSAAEVLEHPWIQNAKKAPNVSLGETVKARLKQFSVMNKLKKRALRVIAEHLSVEEVAGIKEAFEMMDSNKTGKINLEQLKHGLHKLGQQQMADADLQILMEAADVDGDGTLNYGEFVAVSVHLKKMANDEHLHKAFSFFDQNQSNYIEIEELRQALNDEEDTSSEEVIAAIMQDVDTDKDGRISYEEFAAMMKAGTDWRKASRQYSRERFNSLSLKLMRDGSLQLEGET

SEQ ID NO: 2368 - DNA, 1743 bp, Brassica napus
  CDS (1)..(1743)
atgggtctctgctacagccggaacacctcctccgtcaaagacgacgagatccccgtcgagcagccgtcgcaaaccccccggcttgcttcgatccctcagtctcccgtcccctccgaagtcaactcctacgccagcagcccgttccagagccccttaccggcgggagtagctccgtcgccggcgagaactccgggacggaagttcaaatggccgtttccgccgccgtcccccgcgaagccgatcatggcggctctgaggcggagaagaggcgcgccgccgcggccgagagacgagccgatcccggaggacagcgaggacgttgacggcgtcggaggggagaggctggacaagaacttcgggttcgggaagaacatggaagggaagtacgagttggggaaggaggtggggcgagggcattttggtcatacttgctgggctaaggccaagaaagggaagatgaaggggcagacggtggctgtcaagatcatctccaaagctaagatgacatcggctttgtctattgaagatgttcgtagagaagtgaagttgctgaaagctttatctgggcataagcatatggttaagttctatgatgtgtatgaggacaatgataacgtctatgtagttatggagttgtgtgaaggaggagagttattggacaggatcttggcgagaggtggtaaataccctgaagtagacgccaaacgtattcttgtacagattctatctgcaacagcattttttcatctccaaggtgtagtgcaccgtgacctgaagccagagaactttctcttcaccagcagaaacgaggatgcagtactcaaggtcatagactttggcttgtctgatttcattagatacgatcaacggctcaatgatgtggtaggaagcgcatactatgtagcaccagaagtactccacaggtcttacagcactgaagcagatatgtggagcatcggtgtcataagctacatactactctgtggaagcagacctttctacggaagaactgaatctgcaatattccgttgtgtgcttagagcaaaccctaattttgaggatatgccttggccttcaatctctcctactggtaaagactttgtgaaaaggcttttgaacaaggatcataggaaacgaatgacagctgctcaagctctagctcatccatggttacgtgatgaaaaccctggtttgcttcttgatttctcggtttacaagttggtcagatcctatattcgtgcctcgcctttcagaagatcagcactcaaggctctcgccaaagctatacctgatgaggagcttgtgttccttaaggcacagttcatgctcctagaccctaaagatggaggcttatctcttaacaacttcacaacggctttaacaagatatgctactgatgctatgatggaatcaaagcttcctgacattttaaacacaatgcaaccgctggtgcaaaagaaactggactttgaagagttctgtgcggctggggtcagcgtttaccaactggaagctcttgaagaatgggaacagattgcaacttcagcgtttgagcactttgaacaagaaggaaaccgagtcatatccgtccaagaactcgctggggagatgagcgtgggaccaaatgcatatcctctgctcaaggattggatccggagttcagatgggaagctgagtttcttggggtacgctaagttcttgcatggtgtgactgtacgaagctcgagctcaagacctaggtga

SEQ ID NO: 2369 - protein, 580 aa, Brassica napus
MGLCYSRNTSSVKDDEIPVEQPSQTPRLASIPQSPVPSEVNSYASSPFQSPLPAGVAPSPARTPGRKFKWPFPPPSPAKPIMAALRRRRGAPPRPRDEPIPEDSEDVDGVGGERLDKNFGFGKNMEGKYELGKEVGRGHFGHTCWAKAKKGKMKGQTVAVKIISKAKMTSALSIEDVRREVKLLKALSGHKHMVKFYDVYEDNDNVYVVMELCEGGELLDRILARGGKYPEVDAKRILVQILSATAFFHLQGVVHRDLKPENFLFTSRNEDAVLKVIDFGLSDFIRYDQRLNDVVGSAYYVAPEVLHRSYSTEADMWSIGVISYILLCGSRPFYGRTESAIFRCVLRANPNFEDMPWPSISPTGKDFVKRLLNKDHRKRMTAAQALAHPWLRDENPGLLLDFSVYKLVRSYIRASPFRRSALKALAKAIPDEELVFLKAQFMLLDPKDGGLSLNNFTTALTRYATDAMMESKLPDILNTMQPLVQKKLDFEEFCAAGVSVYQLEALEEWEQIATSAFEHFEQEGNRVISVQELAGEMSVGPNAYPLLKDWIRSSDGKLSFLGYAKFLHGVTVRSSSSRPR

SEQ ID NO: 2370 - DNA, 1599 bp, Brassica napus
  CDS (1)..(1599)
atggggaactgttgcggcagtccaagttcagccaccatcgagagtggacatggcaaacccaagaacaaaaacaatccctttcacagcaacgaagcaaacggatctggagctggcttcaagctctctgtgctgaaagatccaacaggacacgacatatcttctcagtatgatcttggacgcgaggttggtcgaggggagtttggtgtgacttacttgtgtactgacatccaaacgggtgacaagtacgcttgcaagtccatatcgaagaagaagctgaggacagcggtggatataggggatgttaggagggaggttgagataatgagacatatgcctaaacacccaaacattgtctctttgaaggattcgttcgaggatgatgacgcggttcatatagttatggagttgtgtgaaggaggggagctgtttgatcggattgttgcgagagggcattacactgagagggctgctgctgcggttatgaagactattgttgaagttgttcagatatgtcataagcagggagtgatgcatagggatcttaaaccagagaactttctttttgctaataagaaagagacatcagctcttaaggctattgattttggattatctgtcttctttaaaccaggtgagcagtttaatgagattgtgggaagtccttattacatggcaccagaggtgctaagacgaaactatggacctgagatcgatgtctggagtgcaggagtcatcctctatatccttctttgtggtgtccctcctttttgggcagagactgagcaaggggtggctcaagcgatcattaggtcagtaattgactttaagagagatccatggccaagagtttccgaaagcgccaaggaccttgtgagaaagatgcttgaacctgatcccaagaaacggctttctgctgcagaagtactcgaacatacttggatactgaatgcaaagaaggctccgaatgtgtctcttggggagactgtgaaagcaaggctaaagcagttttctgttatgaacaagctcaagaaacgagctctacgagtgatagctgaacacttgtcagtggaggaagcagctgggataaaggaagcatttgaaatgatggacgttaacaagagaggcaagataaacctcgaggagcttaagtacggacttcaaaaagctggacagcagattgctgatgctgatcttcagattcttatggaagctactgatgttgatggggacgggacactgaactatggagagttcgtggctgtatcagtgcacttgaagaagatggcgaacgatgaacacttgcataaagcgttcaacttctttgataagaaccagagtggttacatagagcctgaagagcttcgtgaggctttgaatgatgaattggatgaaactagcagtgaggaagtcatcgctgccatcatgcatgatgttgatactgacaaggacgggcgaataagctatgaagagtttgcagcgatgatgaaagctgggacagactggaggaaagcgtcacggcagtattcgagggaaagattcaacagtttgagcctcaagttaatgagagatggttctttgcaattagaaggcgagacctga

SEQ ID NO: 2371 - protein, 532 aa, Brassica napus
MGNCCGSPSSATIESGHGKPKNKNNPFHSNEANGSGAGFKLSVLKDPTGHDISSQYDLGREVGRGEFGVTYLCTDIQTGDKYACKSISKKKLRTAVDIGDVRREVEIMRHMPKHPNIVSLKDSFEDDDAVHIVMELCEGGELFDRIVARGHYTERAAAAVMKTIVEVVQICHKQGVMHRDLKPENFLFANKKETSALKAIDFGLSVFFKPGEQFNEIVGSPYYMAPEVLRRNYGPEIDVWSAGVILYILLCGVPPFWAETEQGVAQAIIRSVIDFKRDPWPRVSESAKDLVRKMLEPDPKKRLSAAEVLEHTWILNAKKAPNVSLGETVKARLKQFSVMNKLKKRALRVIAEHLSVEEAAGIKEAFEMMDVNKRGKINLEELKYGLQKAGQQIADADLQILMEATDVDGDGTLNYGEFVAVSVHLKKMANDEHLHKAFNFFDKNQSGYIEPEELREALNDELDETSSEEVIAAIMHDVDTDKDGRISYEEFAAMMKAGTDWRKASRQYSRERFNSLSLKLMRDGSLQLEGET

SEQ ID NO: 2372 - DNA, 1590 bp, Brassica napus
  CDS (1)..(1590)
atggggaactgttgcagatctcccgccgctgtagccagagaagacgtcaaatccaactactccggccacgatcaccaccgcaaagacgcctccggcgggaaaaaaccggcgccgattcgagtcctcagcgacgtccccaaggagaacatcgaggaccgttacttactcgaccgagagctcggacgcggcgagttcggcgtcacgtacctctgcatcgagagatccacgcgcgacctcctcgcctgcaagtcgatctcgaagaggaagctcaggaccgccgtggacatcgaggacgtgaagagggaggtggcgattatgcagcatttgcctaagagctcgagcatcgtcactctgaaggaggcttgcgaggacgacaacgctgtgcatttggtgatggagctgtgcgaaggtggcgagcttttcgataggattgtggcgagagggcactacaccgagcgagccgccgcgggagtcacgaagacgatcatggaggtggtgcagctttgccacaagcacggggttattcatagagatttgaagccggagaactttttgttcgctaacaagaaggagaactctccgctcaaagctattgactttggattgtctatcttcttcaagccaggtgagaagttctcggagatagttgggagtccatattacatggcacctgaggtgctaaagaggagctatggacctgaaatagatatttggagtgctggagtcattctttatattctgctttgtggagttcctcctttctgggcagagtcggaacagggagttgctcaggctattttacgcgggataattgattttaagagggaaccgtggccaaacatttcggagactgctaagagtcttgtcagacaaatgttagagcctgatccaaagcgccggctgactgcaaagcaagtgcttgagcacccatggattcaaaacgccaagaaagctccaaatgttcctcttggagatgttgtgaagtccagattaaagcagttttcagtgatgaacagattcaagagaaaagctttgagggttattgctgaatttttatcttcacaagaagtagaagacatcaaagagatgttcaacaagatggatactgacaaagatggtattgttaccatcgaggagttgaaagctggacttcgcgattttggtacacagctagctgaatcagaagttcagatgcttattgaagcggtggatactaaagggaaaggaacactagactatggagaatttgttgcagtctctctccacctgcaaaaggtagcaaacgatgagcatctccgcaaagcattctcctactttgacaaggatggaaatgggtacattttcccccaagagctttgtgaagccttaaaggaagatggaggggatgactgtgtggatgtcgccaatgatatattccaagatgttgacactgacaaggatgggagaataagctacgaagagtttgcagcgatgatgaaagctgggacagactggaggaaagcatcgagacagtattccagggaaagattcaacagtttgagtctcaagttgatgagagacggttcattgcagttagaaggcgagaactga

SEQ ID NO: 2373 - protein, 529 aa, Brassica napus
MGNCCRSPAAVAREDVKSNYSGHDHHRKDASGGKKPAPIRVLSDVPKENIEDRYLLDRELGRGEFGVTYLCIERSTRDLLACKSISKRKLRTAVDIEDVKREVAIMQHLPKSSSIVTLKEACEDDNAVHLVMELCEGGELFDRIVARGHYTERAAAGVTKTIMEVVQLCHKHGVIHRDLKPENFLFANKKENSPLKAIDFGLSIFFKPGEKFSEIVGSPYYMAPEVLKRSYGPEIDIWSAGVILYILLCGVPPFWAESEQGVAQAILRGIIDFKREPWPNISETAKSLVRQMLEPDPKRRLTAKQVLEHPWIQNAKKAPNVPLGDVVKSRLKQFSVMNRFKRKALRVIAEFLSSQEVEDIKEMFNKMDTDKDGIVTIEELKAGLRDFGTQLAESEVQMLIEAVDTKGKGTLDYGEFVAVSLHLQKVANDEHLRKAFSYFDKDGNGYIFPQELCEALKEDGGDDCVDVANDIFQDVDTDKDGRISYEEFAAMMKAGTDWRKASRQYSRERFNSLSLKLMRDGSLQLEGEN

SEQ ID NO: 2374 - DNA, 1791 bp, Brassica napus
  CDS (1)..(1791)
atgggaggtcgaacctacaaaccctcctcctccgtgaaacccaaagacgcgttcccacaaaatgacgatactacccctgcccatcccggcaaatcaccggtccgtacctcaaccgccgtaaagacctctcctttcctcccattctacactccaagccccgccaggcaccgccgcaacaagacccgcgaccgagaaggaggaggagagagcaagagcgtcaccagcactccgctccgtcaactcgcgcgtgctttccaccctccgtcgccagcgaaacacatacgggatgttctgcggcggaggaaggggaaaaaggaagctactttgccggcggagaagaagcagacggaggaggagaaggagagagaggaggtggggctggacaagagattcggattctcaagggagtttcagagtaggatggagttaggggaagagattgggagagggcattttgggtatacttgctctgctaagttcaagaaaggagagctcaaggatcatgaggttgctgttaaagtcatccctaaatctaagatgacaactgcaatatctatagaggatgtaagaagagaagtgaaaatcctgcgggcgttatctggacataacaatctagtacaattctacgatgcgttcgaggacaatgccaacgtctacatcgtaatggagttatgtggaggtggtgaactccttgacagaatactagcaaggggagggaaatactcagaagatgatgcaaaagaagtccttacacagatccttaacgttgtagctttctgtcatctccaaggagttgttcatagagatctaaaaccagagaacttcttgtacacttccaaggaggacaactctcagttgaaagtcatagactttggtttatcagactttgtcagaccagacgaaagactaaacgatatagtgggcagtgcatactacgtagcccccgaagttctacacagatcttacaccacggaagcggatgtatggagtataggagtcatagcatacattctcctatgtggaagccgtcccttttgggcaagaactgaatcaggaatcttcagagcagttcttaaagctgatccgagttttaatgagcctccttggccttcattgtcctttgaagcaaaagattttgttaaacggttactgtacaaagatccacgaaagagaatgacagcctctcaagctttgatgcatccttggatctctggaagtaagaagatgaatatcccatttgatattctgatcttcaagcagatcaaagcatacttgaaatcttcttctttgcgcaaagctgctttgatggctctgtcaaagacgttaattacagatgaagttctttatctgaaagcacagtttgcactcttagcacccaatataaatggtctcatcactttggataacatcacatcggcacttgctataaacgcaacagaagtaatgaaggaatcacgcatccctgactttcttgcattgttgaatggacttgaatgcaaaggaatggactttgaagagttttgtgcagcttccatcagtgttcatcagcacgagtcacttgactgctgggagcagagcgttcgccatgcctatgagctctttgacatgaacggaaaccgagtcatcatcatcgaagaactcgcttccgaactcggtgttggatcatcaatccctgtacataccattctacatgactggataaggcacactgacggaaagctaagcttcttggggtttgtcaaactgttacacggtgtctctactctacagcctttagcgaaaacacggtga

SEQ ID NO: 2375 - protein, 596 aa, Brassica napus
MGGRTYKPSSSVKPKDAFPQNDDTTPAHPGKSPVRTSTAVKTSPFLPFYTPSPARHRRNKTRDREGGGESKSVTSTPLRQLARAFHPPSPAKHIRDVLRRRKGKKEATLPAEKKQTEEEKEREEVGLDKRFGFSREFQSRMELGEEIGRGHFGYTCSAKFKKGELKDHEVAVKVIPKSKMTTAISIEDVRREVKILRALSGHNNLVQFYDAFEDNANVYIVMELCGGGELLDRILARGGKYSEDDAKEVLTQILNVVAFCHLQGVVHRDLKPENFLYTSKEDNSQLKVIDFGLSDFVRPDERLNDIVGSAYYVAPEVLHRSYTTEADVWSIGVIAYILLCGSRPFWARTESGIFRAVLKADPSFNEPPWPSLSFEAKDFVKRLLYKDPRKRMTASQALMHPWISGSKKMNIPFDILIFKQIKAYLKSSSLRKAALMALSKTLITDEVLYLKAQFALLAPNINGLITLDNITSALAINATEVMKESRIPDFLALLNGLECKGMDFEEFCAASISVHQHESLDCWEQSVRHAYELFDMNGNRVIIIEELASELGVGSSIPVHTILHDWIRHTDGKLSFLGFVKLLHGVSTLQPLAKTR

SEQ ID NO: 2376 - DNA, 1461 bp, Brassica napus
  CDS (1)..(1461)
atggctaacaaaccaagaaccaggtgggttctcccttacaagaccaaaaacgtggaagacgattactctctcggcaaagtgctcggacaaggacaattcggaaccacttacctctgcacacacaaccagacaggtcaaaagctcgcctgcaaatccatacccaaaaggaagctcctttgccaagaagactacgacgacgttttgagggagatacagataatgcatcacttgtctgaataccccaacgttgtccggatacaagacacctacgaggattccagcagcgtccaccttgtgatggagctctgcgaaggaggtgagctgttcgatagaatcgtgaagaaaggtcattacagcgagagagaagctgctaagcttatcaagaccattgttggcgttgttgaggcttgtcactctcttggggtgttgcatagagatcttaagcctgagaacttcttgtttgcttcttgtgatgaagatgcttctcttaaatccactgactttggcctctctgttttctgcaaaccaggggcaacgttttcagaactagttgggagtgcatactatgtagcacctgaggttttacataagcattacagccgcgaatgtgaggtatggagcgctggagttatcctctacattctcttatgcggcttccctcctttctgggatgaaagtgagagtggcatcttcagaaagattctacagggaaaaatgaactttgagacaaatccctggcctagcatttcagagagtgccaaggatcttataatgaaaatgctcgagaaagatccaaagaaaagactaactgctcatcaagtcttgtgtcacccctggattgtggatgataaggttgctccagataaaccactggactgtgcagtactgtcacgcttgaaaaacttctctgcaatgaacaaactcaaaaaaatggctttacgagtgattgcagagagactatctgaggaagagataggtggactcaaagaactgttcaagatgatagacacagacaacagtggcaccatcacgtttgaagagttgaaagacactatgaaacgtgttggggcagaccttatggaatcagagatccaagaactcttgcgctcagctgatgttgatgagaatggatcaatagactatggagagtttttagctgcaacaatacacttgaacaagctggagagagaggagaatctagtggctgcattctctttctttgacaaagatggaagtggctacatcactgtggatgagctccagcaggctttgaaggagtttggtataaatgattcacatcttgatgaaatgatcaaagacattgaccaagacaatgatggacaaatagactatggagagtttgtggcaatgatgaggaaaggaaatgggagtggagggactggcaggagaacaatgaccaacactctcaactttgcaaattggaaagtagcctcttcctga

SEQ ID NO: 2377 - protein, 486 aa, Brassica napus
MANKPRTRWVLPYKTKNVEDDYSLGKVLGQGQFGTTYLCTHNQTGQKLACKSIPKRKLLCQEDYDDVLREIQIMHHLSEYPNVVRIQDTYEDSSSVHLVMELCEGGELFDRIVKKGHYSEREAAKLIKTIVGVVEACHSLGVLHRDLKPENFLFASCDEDASLKSTDFGLSVFCKPGATFSELVGSAYYVAPEVLHKHYSRECEVWSAGVILYILLCGFPPFWDESESGIFRKILQGKMNFETNPWPSISESAKDLIMKMLEKDPKKRLTAHQVLCHPWIVDDKVAPDKPLDCAVLSRLKNFSAMNKLKKMALRVIAERLSEEEIGGLKELFKMIDTDNSGTITFEELKDTMKRVGADLMESEIQELLRSADVDENGSIDYGEFLAATIHLNKLEREENLVAAFSFFDKDGSGYITVDELQQALKEFGINDSHLDEMIKDIDQDNDGQIDYGEFVAMMRKGNGSGGTGRRTMTNTLNFANWKVASS

SEQ ID NO: 2378 - DNA, 1638 bp, Brassica napus
  CDS (1)..(1638)
atgggcaattcatgccgccgatcttccaaagacaaaatccaccaaggcaataacaacaacactaagcctgaagacaacaactccaaatcctcagatcgctctacagagatcatcattcctcaagaactccccaaagaagctcacaacaaggatccagctctcgttatccctctaaaagaaccaatcatgagacgcaacatggacaaccaagcctactacgtcctcggccacaagaccccgaacatccgcgacctctacaaccttagccgcaagctaggacaaggccagttcggaacaacgtacctctgcacggagctcgccacgggggtcgactacgcttgcaagtcaatatccaagaggaagctgatctctaaagaagatgttgaggatgttagaagagagattcagatcatgcaccatttggctggtcacggtaacattgttaccatcaagggagcttatgaggactctctgtatgttcacattgtgatggagctttgcgctggaggggagttgtttgataggattattcagagagggcattatagtgagaggaaagctgctgagctgactaagatcattgtgggagttgtggaagcgtgtcattctctgggtgttatgcatagagacttgaagcctgagaatttcttgttggttaataaggatgatgatttctctctcaaggccattgattttggactctctatcttcttcaaaccaggtcaaatattcactgatgttgttgggagtccatactatgttgctcctgaggttttgctcaaacgttatgggcctgaagctgatgtgtggaccgctggtgttatactctatatattgctaagcggagtcccaccgttctgggcagaaacacagcaagggatatttgatgctgtgttgaagggatatatcgactttgattcggacccttggcctgtgatatcagacagtgctaaagacttgatccgcagaatgttatgctccaagcctgcagagcgcttgacagctcatgaagtcttgcgtcatccatggatctgtgagaacggtgtggcaccagatagagcacttgatccggctgtgctgtcacgtctcaagcagttctctgcaatgaataaactaaagaagatggctttgaaggtgatagctgagagcctctctgaagaagagattgctggtttaagggagatgtttcaggcaatggatactgataacagcggtgcaatcacgtttgatgaactcaaagctggactgaggaagtatggatccaccttgaaagacacagagatccatgatctaatggaagcggctgatgtggacaacagtgggacaatagattacagcgagttcattgcagcgaccatccatctcaacaaacttgaacgtgaagaacatcttgtggctgcgtttcagtactttgacaaagatggaagtggttacataacgatagatgagctgcaacaagcgtgtgttgaacatagtatgactgatgttttccttgaagacatcatcaaagaagttgatcaaaacaatgatggaaagattgattatggtgagtttgtggagatgatgcaaaagggaaatgctggtgttgggagaagaacgatgagaaatagtctgaacattagcatgagagacgcctag

SEQ ID NO: 2379 - protein, 545 aa, Brassica napus
MGNSCRRSSKDKIHQGNNNNTKPEDNNSKSSDRSTEIIIPQELPKEAHNKDPALVIPLKEPIMRRNMDNQAYYVLGHKTPNIRDLYNLSRKLGQGQFGTTYLCTELATGVDYACKSISKRKLISKEDVEDVRREIQIMHHLAGHGNIVTIKGAYEDSLYVHIVMELCAGGELFDRIIQRGHYSERKAAELTKIIVGVVEACHSLGVMHRDLKPENFLLVNKDDDFSLKAIDFGLSIFFKPGQIFTDVVGSPYYVAPEVLLKRYGPEADVWTAGVILYILLSGVPPFWAETQQGIFDAVLKGYIDFDSDPWPVISDSAKDLIRRMLCSKPAERLTAHEVLRHPWICENGVAPDRALDPAVLSRLKQFSAMNKLKKMALKVIAESLSEEEIAGLREMFQAMDTDNSGAITFDELKAGLRKYGSTLKDTEIHDLMEAADVDNSGTIDYSEFIAATIHLNKLEREEHLVAAFQYFDKDGSGYITIDELQQACVEHSMTDVFLEDIIKEVDQNNDGKIDYGEFVEMMQKGNAGVGRRTMRNSLNISMRDA

SEQ ID NO: 2380 - DNA, 1503 bp, Brassica napus
  CDS (1)..(1503)
atggagaaaccaagctctagacgaccttcaagcagcgtcctcccttacgaaacgccaaggctccgagatcactacctcctcggcaagaagctaggccaaggccaattcggcacgacctatctctgcaccgagaaatcaacctccgccaactacgcctgcaaatcgatccccaagcgcaagctcgtgtgccgagaagactacgaagatgtctggcgcgagattcagatcatgcaccacctctccgagcaccccaacgtggtccggatcaaggggacctacgaggactccgtcttcgtacacatcgtcatggaggtctgcgaaggaggagagctgttcgatcggatcgtggccaaagggcatttcagcgagcgtgaggcggcgaagctgataaagacgattcttgcggtggtggaggcatgccattcgcttggggttatgcatagagatctcaagcctgagaatttcttgtttgatagccctaaggaagatgccaagcttaaggctaccgattttggcttgtctgtcttctacaaaccaggacaatatctatacgacgtagtgggaagcccgtactacgttgcacccgaggttcttaaaaaatgttatggaccagagatagatgtgtggagcgctggtgttatcctctacatcttactaagtggtgttcctcctttctgggcagaaaccgagtcaggaatctttagacagattttgcaagggaagttagatttcaaatctgacccgtggcccactatctcagaaggtgccaaagatttgatttacaaaatgcttgacaggagccccaagaaacgcatctctgcacatgaagcattgtgtcacccgtggatcgttgatgagcaggctgcaccagacaagcctcttgatccagcagtcttgtcacgactaaagcagttctcacaaatgaacaagattaagaaaatggccttaagggtcatcgctgagaggctctcggaggaagaaattggtggtctgaaggaactgttcaagatgatagatacagacaacagtggaacaatcacctttgaagagcttaaagctggcctgaagagagtcggatctgaactaatggaatcagaaatcaagtctcttatggatgcggcggatatagataacagtgggacgatagactatggtgagtttctagcagcgacactacacatgaacaagatggagagagaagagaatctggtggcagcattttcatactttgacaaagacgggagcggatatatcaccatagatgagctgcaacaagcatgcacagagtttggtctatgtgacacacctcttgatgacatgatcaaggagattgatcttgacaacgacgggaagatagatttctcagaatttacggcaatgatgaagaaaggagatggagttgggagaagcagaaccatgatgaaaaacttgaacttcaacatagctgacgcttttggagttgaggaaactagcactgctgaaactgatgacaaaccaaactaa

SEQ ID NO: 2381 - protein, 500 aa, Brassica napus
MEKPSSRRPSSSVLPYETPRLRDHYLLGKKLGQGQFGTTYLCTEKSTSANYACKSIPKRKLVCREDYEDVWREIQIMHHLSEHPNVVRIKGTYEDSVFVHIVMEVCEGGELFDRIVAKGHFSEREAAKLIKTILAVVEACHSLGVMHRDLKPENFLFDSPKEDAKLKATDFGLSVFYKPGQYLYDVVGSPYYVAPEVLKKCYGPEIDVWSAGVILYILLSGVPPFWAETESGIFRQILQGKLDFKSDPWPTISEGAKDLIYKMLDRSPKKRISAHEALCHPWIVDEQAAPDKPLDPAVLSRLKQFSQMNKIKKMALRVIAERLSEEEIGGLKELFKMIDTDNSGTITFEELKAGLKRVGSELMESEIKSLMDAADIDNSGTIDYGEFLAATLHMNKMEREENLVAAFSYFDKDGSGYITIDELQQACTEFGLCDTPLDDMIKEIDLDNDGKIDFSEFTAMMKKGDGVGRSRTMMKNLNFNIADAFGVEETSTAETDDKPN

SEQ ID NO: 2382 - DNA, 1590 bp, Brassica napus
  CDS (1)..(1590)
atggggaactgttgcagatctcccgcagctgtagctcgagaagacgtgaaatcaaactactccggccacgatcacccccgcaaagactccaccaacggcaaaaaatcagctccgattcgagtcctcacggacgtccccaaggagaacatcgaggaccggtacttgctcgaccgagagctcggacgcggcgagttcggcgtcacctacctctgcatcgagagagccacgcgcgacctcctcgcgtgcaagtcgatctcgaagaggaagctcaggaccgccgtggatatcgaggacgtgaagagggaggtggcgattatgcagcatttgcctaagagctcgagcatcgtcactctgaaggaggcttgcgaggacgacaacgctgtgcacttggtgatggagttgtgtgaaggcggcgagcttttcgataggattgtggctagagggcactacacggagcgagccgcggcgggagtcacgaagacgatcatggaggttgtgcagctttgccataagcacggggttattcatagagatttgaagccggagaattttttgtttgctaacaagaaggagaactctccgctgaaagctattgactttggattgtctatcttcttcaagccaggtgagaagttctcggagatagttgggagtccatattacatggcacctgaggtgctaaagaggagctatggacctgaaatagatatttggagtgctggagtcattctttatattctgctttgtggagttcctcctttctgggcagagtcggaacagggagttgctcaggctattttacgcgggataattgattttaagagggaaccgtggccaaacatttcggagactgctaagagtcttgtcagacaaatgttagagcctgatccaaagcgccggctgactgcaaagcaagtgcttgagcacccatggattcaaaacgccaagaaagctccaaatgttcctcttggagatgttgtgaagtccagattaaagcagttttcagtgatgaacagattcaagagaaaagctttgagggttattgctgaatttttatcttcacaagaagtagaagacatcaaagagatgttcaacaagatggatactgacaaagatggtattgttaccatcgaggagttgaaagctggacttcgcgattttggtacacagctagctgaatcagaagttcagatgcttattgaagcggtggatactaaagggaaaggaacactagactatggagaatttgttgcagtctctctccacctgcaaaaggtagcaaacgatgagcatctccgcaaagcattctcctactttgacaaggatggaaatgggtacattttcccccaagagctttgtgaagccttaaaggaagatggaggggatgactgtgtggatgtcgccaatgatatattccaagatgttgacactgacaaggatgggagaataagctacgaagagtttgcagcgatgatgaaagctgggacagactggaggaaagcatcgagacagtattccagggaaagattcaacagtttgagtctcaagttgatgagagacggttcattgcagttagaaggcgagaactga

SEQ ID NO: 2383 - protein, 529 aa, Brassica napus
MGNCCRSPAAVAREDVKSNYSGHDHPRKDSTNGKKSAPIRVLTDVPKENIEDRYLLDRELGRGEFGVTYLCIERATRDLLACKSISKRKLRTAVDIEDVKREVAIMQHLPKSSSIVTLKEACEDDNAVHLVMELCEGGELFDRIVARGHYTERAAAGVTKTIMEVVQLCHKHGVIHRDLKPENFLFANKKENSPLKAIDFGLSIFFKPGEKFSEIVGSPYYMAPEVLKRSYGPEIDIWSAGVILYILLCGVPPFWAESEQGVAQAILRGIIDFKREPWPNISETAKSLVRQMLEPDPKRRLTAKQVLEHPWIQNAKKAPNVPLGDVVKSRLKQFSVMNRFKRKALRVIAEFLSSQEVEDIKEMFNKMDTDKDGIVTIEELKAGLRDFGTQLAESEVQMLIEAVDTKGKGTLDYGEFVAVSLHLQKVANDEHLRKAFSYFDKDGNGYIFPQELCEALKEDGGDDCVDVANDIFQDVDTDKDGRISYEEFAAMMKAGTDWRKASRQYSRERFNSLSLKLMRDGSLQLEGEN

SEQ ID NO: 2384 - DNA, 1791 bp, Brassica napus
  CDS (1)..(1791)
atgggaggtcgaacctacaaaccctcctcctccgtgaaacccaaagacgcgttcccacaaaatgacgatactacccctgcccatcccggcaaatcaccggtccgtacctcaaccgccgtgaagtcctctcctttcctcccattctacactccaagccccgccaggcaccgccggaacaagacccgcgacggaggaggaggaggagagagcaagagcgtcaccagcactccgctccgtcaactcgcgcgtgctttccaccctccgtcgccagcgaaacacatccgggatgttctgcggcggaggaaggggaaaaaggaagctactttgccggcggagaagaagcagacggaggaggagaaggagagagaggaggtggggctggacaagagattcggattctcaagggagtttcagagtaggatggagttaggggaagagattgggagagggcattttgggtatacttgctctgctaagttcaagaaaggagagctcaaggatcatgaggttgctgttaaagtcatccctaaatctaagatgacaactgcaatatctatagaggatgtaagaagagaagttaagatcctgcgggcgttatctggacataacaatctagtacaattctacgatgcgtttgaggacaatgctaacgtctacatcgttatggagttatgtggaggtggtgaactccttgacagaatactagcaaggggagggaaatactcagaagatgatgcaaaagaagtgcttatacagatccttaacgttgtagctttctgtcatctccaaggagttgttcatcgagatcttaaaccagagaacttcttgtacacttccaaggaggagaactctcagttgaaagtcatagactttggtttatcagactttgtcagaccagacgagagactaaacgatatagtgggtagtgcatactacgtagcccctgaagttctacacagatcttacaccacggaagcggatgtatggagtataggagtcatagcatacattctcctatgtggaagccgtcccttttgggcaagaactgaatcaggaatcttcagagcagttcttaaagctgatccgagttttgatgagcctccttggccttcattgtcctttgaagcaaaagattttgttaaacggttactgtacaaagatccacgaaagagaatgacagcctctcaagctttgatgcatccttggatctctggaagtaagaagatgaatatcccatttgatattctgatcttcaggcagatgaaagcatatttgaaatcttcttctttgcgcaaagctgctttgatggctctgtccaagacattgattacagatgaacttctttatctgaaagcacagtttgcgatcttagcacctaacaaaaacggtctcatcactctggataacatcagatcggcacttgcttcaaatgcaacagaagcaatgaaagaatcaaggataccagactttcttgcattgttaaatggacttgaatacaaagggatggattttgaagagttttgtgcagcttccattagtgttcatcagcatgagtcgcttgattgttgggagcagagcgttcgccatgcttatgagctctttgagatgaatggaaaccgagttatcgtcatcgaagaactcgcttccgaactcggtgttggatcatcgattccagtccataccatcctacatgactggataagacacactgatgggaagctaagcttcttgggttttgtcaaactgttgcacggtgtctctactcgacagcctttagctaaaacacggtga

SEQ ID NO: 2385 - protein, 596 aa, Brassica napus
MGGRTYKPSSSVKPKDAFPQNDDTTPAHPGKSPVRTSTAVKSSPFLPFYTPSPARHRRNKTRDGGGGGESKSVTSTPLRQLARAFHPPSPAKHIRDVLRRRKGKKEATLPAEKKQTEEEKEREEVGLDKRFGFSREFQSRMELGEEIGRGHFGYTCSAKFKKGELKDHEVAVKVIPKSKMTTAISIEDVRREVKILRALSGHNNLVQFYDAFEDNANVYIVMELCGGGELLDRILARGGKYSEDDAKEVLIQILNVVAFCHLQGVVHRDLKPENFLYTSKEENSQLKVIDFGLSDFVRPDERLNDIVGSAYYVAPEVLHRSYTTEADVWSIGVIAYILLCGSRPFWARTESGIFRAVLKADPSFDEPPWPSLSFEAKDFVKRLLYKDPRKRMTASQALMHPWISGSKKMNIPFDILIFRQMKAYLKSSSLRKAALMALSKTLITDELLYLKAQFAILAPNKNGLITLDNIRSALASNATEAMKESRIPDFLALLNGLEYKGMDFEEFCAASISVHQHESLDCWEQSVRHAYELFEMNGNRVIVIEELASELGVGSSIPVHTILHDWIRHTDGKLSFLGFVKLLHGVSTRQPLAKTR

SEQ ID NO: 2386 - DNA, 1596 bp, Brassica napus
  CDS (1)..(1596)
atgggaaactgttgtgcaacccctggttccgacaccaagtccaaagacgccaaaccaaagaccaaaaacaaccctttttacagcgaagcctacactacaacaaccggagctggcttcaagctctccgttttaaaagatccaacaggacatgacataaccctcatgtacgatcttggccgcgaggttggtcgtggagagttcggtatcacctacctctgcactgatatcaacaccggtgagaagtatgcgtgcaagtctatatccaagaagaagcttaggacggctgtggatatagaggatgttaggagagaagttgagatcatgaggcatatgcctgagcatcccaatgttgttactttgaaggagacttatgaggatgagcatgctgttcatttggttatggagctttgtgaaggtggggagttgtttgataggattgtggcgagagggcattacactgagagagctgctgctgttgtcactaagaccatcatggaagttgttcaggtgtgtcataaacatggggtaatgcacagggacctgaaacctgagaacttcttatttgcaaacaagaaggagactgcacctcttaaggctattgattttggactctctgttttcttcaaaccaggcgagaggttcaacgaaatcgttgggagtccgtactacatggctcctgaggtgctaaaacgaaactatgggcccgaagttgacatctggagtgctggtgtaattctttacatacttctctgtggtgttccacctttctgggcagaaactgaacaaggagttgcacaagcaattattcgatctcaattggacttcagaagggatccatggcccaaggtttctgaacacgccaaagaccttatcaggaaaatgcttgatcctgaccaaaagcgtcgtctcactgctcagcaagtgctagatcatccgtggttacagaatgcaaacacggctcccaatgtatcactaggtgaaacagtaagggcaaggttgaagcagttcactgtcatgaacaagctcaagaaacgagcactcagggttattgctgagcatctatcagatgaagaagcttctggtataagagaagggttccaaataatggacacaagccaaagagggaagatcaacatcgacgagctgaaaatagggttgcagaagcttggccataacattccccaagatgatatacaaatcttgatggacgctggagataccgataaagatggatacttggactgtgacgagttcattgccatatcagtgcatctcaggaaaatgggcaatgatgagcatctcaagaaagcgtttgcattctttgatcaagacaacaacgggtatattgaaatagaagagttaagggaagctttgtctgatgaagttggtacaagtgaagaggttgttgatgccattatccgtgatgttgatactgataaggatggaagaataagttatgaagaatttgcgacaatgatgaaaacaggaacagattggagaaaagcttctaggcagtactcaagggaacggtttaatagtatcagtcaaaaactgatgcaagatgcatcgttgcatgtcaatagcgaggcaatatga

SEQ ID NO: 2387 - protein, 531 aa, Brassica napus
MGNCCATPGSDTKSKDAKPKTKNNPFYSEAYTTTTGAGFKLSVLKDPTGHDITLMYDLGREVGRGEFGITYLCTDINTGEKYACKSISKKKLRTAVDIEDVRREVEIMRHMPEHPNVVTLKETYEDEHAVHLVMELCEGGELFDRIVARGHYTERAAAVVTKTIMEVVQVCHKHGVMHRDLKPENFLFANKKETAPLKAIDFGLSVFFKPGERFNEIVGSPYYMAPEVLKRNYGPEVDIWSAGVILYILLCGVPPFWAETEQGVAQAIIRSQLDFRRDPWPKVSEHAKDLIRKMLDPDQKRRLTAQQVLDHPWLQNANTAPNVSLGETVRARLKQFTVMNKLKKRALRVIAEHLSDEEASGIREGFQIMDTSQRGKINIDELKIGLQKLGHNIPQDDIQILMDAGDTDKDGYLDCDEFIAISVHLRKMGNDEHLKKAFAFFDQDNNGYIEIEELREALSDEVGTSEEVVDAIIRDVDTDKDGRISYEEFATMMKTGTDWRKASRQYSRERFNSISQKLMQDASLHVNSEAI

SEQ ID NO: 2388 - DNA, 1626 bp, Zea mays
  CDS (1)..(1626)
atgggaaactgctgccgctcgccggccgccgcggcgcgggaagacgtcaagtcgtcgcacttcccggcctccgccggcgggaagaagaagccccaccagcaggcgcggaacggcggccccggctccggggagaagaagcgtctgtcggtgctcggggaggaggggtgcgacgtgggcgcgggcgggatcgaggagaagtacgcgctggaccgggagctggggcgcggcgagttcggggtgacgtacctgtgcatggaccggggcacgcgggagctgctcgcctgcaagtccatctccaagcgcaagctgcggacggccgtcgacgtggaggacgtgcgccgggaggtggccatcatgcgccacctgcccaagagccccagcgtcgtgtccctgcgggaggcgtgcgaggacgagggcgccgtgcacctcgtcatggagctctgcgagggcggcgagctcttcgaccgcatcgtcgcgcgggggcactacaccgagcgcgccgccgccagtgtcacccgcaccatcgtcgaggtcgtccagctctgccaccgccacggcgtcatccaccgggacctcaagccggagaacttcctcttcgccaataagaaggagaactcgccgctcaaggccatcgacttcggtctctccatcttcttcaagcctggtgaaaagttttcagaaattgtgggaagtccctactacatggctcctgaagtcttgaagaggaactatggacctgaaatagacatatggagcgctggtgttatcttgtatattttgttatgtggcgttcctccgttttgggctgagactgaacaaggagttgcacaagctattctccggggaaatatagattttaagcgagaaccctggcccaatgtttctgacaatgctaaagatcttgttcggcagatgcttcaacctgatccaaaactcaggctaacagcaaagcaagttcttgagcatccctggcttcaaaatgctaagaaagctccaaatgttcctcttggagacattgtaaagtcaaggctgaaacagttttcaaggatgaacagattcaaaagaaaagctctaagggttattgctgatcacttgtcagctgaagaggttgaggacataaaggatatgttcaaggtgatggatactgataatgatggcatagtttcttatgaagagttaaagagtgggatcgcaaattttggttctcatcttgcagaatcagaagtgcaaatgcttatcgaagctgtggatacaaatggtagaggagcactagattacggtgaatttttggctgtctcgctccatttacaaaggatggcaaatgacgagcaccttcggcgggccttcctatttttcgacaaggatggcaacggtttcatcgagcccgaggagcttcaggaagccctgatggaggacgggggagctgataccatggacgtggtcaatgacatattgcaagaagttgacacagacaaggatgggaaaattagctacgacgaatttgtagcgatgatgaaaactggcacggactggaggaaggcatcgcggcactattcaagagggcgcttcaatagccttagcataaagcttataaaagacgggtctgtaaagctgggtagcgagtga

SEQ ID NO: 2389 - protein, 541 aa, Zea mays
MGNCCRSPAAAAREDVKSSHFPASAGGKKKPHQQARNGGPGSGEKKRLSVLGEEGCDVGAGGIEEKYALDRELGRGEFGVTYLCMDRGTRELLACKSISKRKLRTAVDVEDVRREVAIMRHLPKSPSVVSLREACEDEGAVHLVMELCEGGELFDRIVARGHYTERAAASVTRTIVEVVQLCHRHGVIHRDLKPENFLFANKKENSPLKAIDFGLSIFFKPGEKFSEIVGSPYYMAPEVLKRNYGPEIDIWSAGVILYILLCGVPPFWAETEQGVAQAILRGNIDFKREPWPNVSDNAKDLVRQMLQPDPKLRLTAKQVLEHPWLQNAKKAPNVPLGDIVKSRLKQFSRMNRFKRKALRVIADHLSAEEVEDIKDMFKVMDTDNDGIVSYEELKSGIANFGSHLAESEVQMLIEAVDTNGRGALDYGEFLAVSLHLQRMANDEHLRRAFLFFDKDGNGFIEPEELQEALMEDGGADTMDVVNDILQEVDTDKDGKISYDEFVAMMKTGTDWRKASRHYSRGRFNSLSIKLIKDGSVKLGSE

SEQ ID NO: 2390 - DNA, 1518 bp, Glycine max
  CDS (1)..(1518)
atggggaactgtaacagcgaaccctcttcccaaacccagccacattccgatcaccaccatcatcacccccaaccctccaacggcatcactgtccttcctcccaattcgaagccctccgtaggccgggttctgggccggcccatggaggacgcccgctccacctacaccttcggccgcgagctgggccgcgcccaattcggcgtgacctaccaagtgacccacaaacacacgaaacagcaattcgcgtgcaaatccatcgccacgcgcaagctcgtccaccgcgatgacttggaggacgtccggcgagaggtgcagatcatgcaccacctcaccggccaccgcaacatcgtggagctcaagggcgcttacgaggaccgccactccgtcaacctcatcatggagctctgcggcggcggcgagctcttcgaccgcatcatcgccaagggccactactccgagcgcgccgccgcagatctctgccgccagatcgtgacggtggtccacgattgccacaccatgggagtcatgcatagggacttgaagcccgagaatttcttgttgctcaacaagaacgatgattcccccctcaaggccacagattttggcctctccgtcttttttaagccaggggatgtgtttagagaccttgttgggagtgcttactatgttgctcctgaggtgctgagaagaagttatggacctgaagctgatatttggagtgctggagttatattgtacattctactttctggtgttccacctttttgggcagaaaatgaacagggtatatttgatgctattcttcgtggacatattgattttgcatcagatccttggccttccatatcgagtagtgccaaagatctggtcaagaagatgttacgagctgaccccaaacaaagactttcagcagttgaagtacttaatcatccttggatgagagaagatggagcatctgataaacctctagatgttgctgttttatccagaatgaaacaatttagggcaatgaacaagctaaagaaagttgctctgaaggttattgctgaaaacctttctgaagaagaaatcattggcttgaaggaaatgtttaaatccatggacacagataacagtggaacaatcacttttgaagagttgaaagctggtctgccaaaactgggtactaaggtttctgagtctgaagtaaggcagttgatggaagcggctgatgtagacggaaatgggaccattgattacattgaatttataacagctaccatgcacatgaatagaatggaaagagaggaccacctatataaagcttttgaatattttgacaaggatagaagcgggtacatcacaatggaagagttggaatctacccttaaaaaatataatatgggtgatgagaaaacaataaaggaaatcattgtggaagtcgatacagacaatgatggaagaattaattatgatgagtttgtagccatgatgaggaaaggcaaaccagatttagtaaccaacagacgtcgcaaatga

SEQ ID NO: 2391 - protein, 505 aa, Glycine max
MGNCNSEPSSQTQPHSDHHHHHPQPSNGITVLPPNSKPSVGRVLGRPMEDARSTYTFGRELGRAQFGVTYQVTHKHTKQQFACKSIATRKLVHRDDLEDVRREVQIMHHLTGHRNIVELKGAYEDRHSVNLIMELCGGGELFDRIIAKGHYSERAAADLCRQIVTVVHDCHTMGVMHRDLKPENFLLLNKNDDSPLKATDFGLSVFFKPGDVFRDLVGSAYYVAPEVLRRSYGPEADIWSAGVILYILLSGVPPFWAENEQGIFDAILRGHIDFASDPWPSISSSAKDLVKKMLRADPKQRLSAVEVLNHPWMREDGASDKPLDVAVLSRMKQFRAMNKLKKVALKVIAENLSEEEIIGLKEMFKSMDTDNSGTITFEELKAGLPKLGTKVSESEVRQLMEAADVDGNGTIDYIEFITATMHMNRMEREDHLYKAFEYFDKDRSGYITMEELESTLKKYNMGDEKTIKEIIVEVDTDNDGRINYDEFVAMMRKGKPDLVTNRRRK

SEQ ID NO: 2392 - DNA, 1746 bp, Glycine max
  CDS (1)..(1746)
atggggaacacgtgtgttggtcctagcatttcaaaaaatggttttgttcaatcagtttctgcggcgatttggcggtcccaattgcctgaaggttcagtgtctaatagagaatctgtaaaagaggaagcaactagtgtgcccgaatcgcccttgcctgtccaaaacaagcctcctgagcagataactatgccgaaacaagaagccaaacaagagggaaaatcagaaatagaaccggaaaaggaacaggataagaagaaacagaagaaacgtggttcagtgaagagagtttctagcgcagggcttcgtgttgattctgtgttgcaaagagagaccgataatttcaaggagttcttcactcttgggagaaaacttggacagggtcagttcgggacaacgttcttgtgcgtggaaaaggcaacagggcaggagtacgcctgcaaatctattgcaaagaggaagctcgtcaccgatgatgatgtcgaggatgtgagaagagaaattcagataatgcaccacttggccgggcatcctaatgttatatccatcaaaggtgcatatgaggatgccgtggctgttcatgttgtgatggaattatgtgcaggtggagagcttttcgataggattattcagcgtggccattataccgagagacaggcagccaagcttactaagactatagttggcgttgtggaagcttgccattctcttggtgtgatgcacagagaccttaaacctgagaattttctctttgtcaatcagcacgaggattcccttctcaaaaccattgactttggattatctgtcttctttaagccaggtgatatatttaatgatgtggtgggcagcccatactatgttgccccggatgttttgcgaaagcgttatggtcctgaggcagatgtttggagtgctggtgttatcctttacattcttttgagtggagtacctccattttgggctgaaaacgaacaaggaatatttgaacaagttctgcgtggtgatcttgacttttcttctgatccctggccttcaatttctgaaagtgcaaaagatttagtaagaaaaatgcttgttcgcgaccctagaaggcggttgactgcacatcaagtattatgtcatccttggattcaagttgatggtgtagctcctgacaagccacttgattctgccgtattaagtcgcttgaagcaattttctgctatgaacaagctcaaaaaaatggcccttataattattgcagagagcttatctgaagaagaaatagctggcttaaaagaaatgttcaagatgatagatgcagataacagtggtcaaatcacttttgaagaacttaaagctggtttgaaaagagtcggcgctaatcttaaggagtctgaaatttatgatttaatgcaagcagctgatgttgataacagtgggacaattgattacggcgagttccttgctgcaacgttgcaccgcaacaaaattgaaagagaagataatctatttgcagccttttcttactttgataaagatggaagtggctatattactcaggaagaacttcaacaggcttgtgatgagtttggcataaaagatgtccgtttggaagagataatcaaggaaattgatgaagataatgatggacgcatagattacaatgagtttgtggctatgatgcagaaaggaaatcttccagcggttggtaagaagggcctagaaaatagcttcagcgttaagttcagggaggcattaaaattgtag

SEQ ID NO: 2393 - protein, 581 aa, Glycine max
MGNTCVGPSISKNGFVQSVSAAIWRSQLPEGSVSNRESVKEEATSVPESPLPVQNKPPEQITMPKQEAKQEGKSEIEPEKEQDKKKQKKRGSVKRVSSAGLRVDSVLQRETDNFKEFFTLGRKLGQGQFGTTFLCVEKATGQEYACKSIAKRKLVTDDDVEDVRREIQIMHHLAGHPNVISIKGAYEDAVAVHVVMELCAGGELFDRIIQRGHYTERQAAKLTKTIVGVVEACHSLGVMHRDLKPENFLFVNQHEDSLLKTIDFGLSVFFKPGDIFNDVVGSPYYVAPDVLRKRYGPEADVWSAGVILYILLSGVPPFWAENEQGIFEQVLRGDLDFSSDPWPSISESAKDLVRKMLVRDPRRRLTAHQVLCHPWIQVDGVAPDKPLDSAVLSRLKQFSAMNKLKKMALIIIAESLSEEEIAGLKEMFKMIDADNSGQITFEELKAGLKRVGANLKESEIYDLMQAADVDNSGTIDYGEFLAATLHRNKIEREDNLFAAFSYFDKDGSGYITQEELQQACDEFGIKDVRLEEIIKEIDEDNDGRIDYNEFVAMMQKGNLPAVGKKGLENSFSVKFREALKL

SEQ ID NO: 2394 - DNA, 1650 bp, Glycine max
  CDS (1)..(1650)
atgggcaacacttgccgcggatctttgaaaggtaaatattctcagggcttgagccagcccgaagaccattcaaagcccaccaccacccattctgatccctcctccgaccacccctctaccaagcaatctgcagaaaactacaacaacaacaactatcttcccttcaacgccaagagagagtccatcatgcgccgcggcctcgacaaccaagcctattatgtcctaggccataagactcccaacattcgtgatctatacactcttggtcgtaaattgggacagggccaatttggcaccacttatttatgcaccgagaattctacctccattgaatatgcctgcaaatccatctccaaaaggaagttgatttccaaggaggacgtcgaggacgttaggagggaaattcagataatgcatcatttagctggtcacaagaacattgtcaccatcaagggtgcttatgaggatcctctctatgttcatattgtcatggagctttgttccgggggtgagttgtttgatcgcatcatccagaggggccactataccgagaggaaggccgcggagttgaccaaaattattgttggggttgttgaggctcgccattcccttggggtcatgcatagagatctcaagcctgaaaactttctcttggtcaacaaagatgatgatttctctcttaaagccattgactttggcctctccgttttcttcaaacccggtcaagttttcactgatgtagtcggcagcccatactatgttgctcctgaggttctcctcaaacattatgggcctgaagcagatgtgtggacagcgggtgtcatactgtacatattgcttagtggagtgccgccattttgggcagagacccagcagggtatatttgatgcagtattgaagggacttatagattttgactcagatccttggcctctaatatctgacagtgcaaaagatctgattagaaagatgctgtgttctcggccttcagaacggttgactgctcatcaagtgttatgtcatccttggatatgtgaaaatggagttgcccctgacaggtcactggaccctgctgttctttctcgtctcaaacagttttctgctatgaataagctaaagaagatggctctgcgagtgattgctgaaagtctatccgaagaggagattgccggtttgagagaaatgtttcaggctatggatactgataacagtggtgcaatcactttcgatgaactcaaagctggtctaagaagatatgggtctacccttaaggatatagaaatacgtgatcttatggaagcggctgatgtggacaaaagtggaaccatagattatggggagtttattgctgcaacatttcatctcaacaaactagagcgtgaagaacatcttattgcagcattccaatattttgacaaggatggtagtggctacattacagttgatgaacttcaacaagcttgtgcagaacataacatgactgatgcttttcttgaagatattattagagaagttgatcaagataatgatggaaggattgattatggtgaatttgctgccatgatgcaaaaaggcaacgctggaattggtaggaggactatgcgcaacagtctgaatttaagcatgagagatgcaccaagtgctcaatag

SEQ ID NO: 2395 - protein, 549 aa, Glycine max
MGNTCRGSLKGKYSQGLSQPEDHSKPTTTHSDPSSDHPSTKQSAENYNNNNYLPFNAKRESIMRRGLDNQAYYVLGHKTPNIRDLYTLGRKLGQGQFGTTYLCTENSTSIEYACKSISKRKLISKEDVEDVRREIQIMHHLAGHKNIVTIKGAYEDPLYVHIVMELCSGGELFDRIIQRGHYTERKAAELTKIIVGVVEARHSLGVMHRDLKPENFLLVNKDDDFSLKAIDFGLSVFFKPGQVFTDVVGSPYYVAPEVLLKHYGPEADVWTAGVILYILLSGVPPFWAETQQGIFDAVLKGLIDFDSDPWPLISDSAKDLIRKMLCSRPSERLTAHQVLCHPWICENGVAPDRSLDPAVLSRLKQFSAMNKLKKMALRVIAESLSEEEIAGLREMFQAMDTDNSGAITFDELKAGLRRYGSTLKDIEIRDLMEAADVDKSGTIDYGEFIAATFHLNKLEREEHLIAAFQYFDKDGSGYITVDELQQACAEHNMTDAFLEDIIREVDQDNDGRIDYGEFAAMMQKGNAGIGRRTMRNSLNLSMRDAPSAQ

SEQ ID NO: 2396 - DNA, 1884 bp, Zea mays
  CDS (1)..(1884)
atggggcagtgctacgggaaggcgcgcggcgcgtcctcgcgggcggaccacgacgccgacccctcgggggcggggtcggtcgcgccgccatccccgctgccggccaacggcgcgccgctgcccgccacgcccaggcgccacaagtccggatccaccacgccggtgcaccaccaccaggcggcgacgcccggcgccgccgcctggcctagcccgtacccggccggcggcgccagcccgctccccgcgggcgtgtcgccgtcgccggcccggtccacgccccggaggttcttcaagcggcccttcccgccgccctcgcccgccaagcacatcaaggccacgctcgccaagcgcctcggcgggggcaagcccaaggagggcaccataccggaggagggcggcgcgggggccggggccggggccggggccggcgccggcgccggcgcggccgttggtgccgccgattccgccgaggccgaccgcccgttggacaaaacgttcggcttcgccaagaactttggggccaagtacgatctcgggaaggaggtcgggaggggccactttggccacacctgctccgccgtcgtcaagaagggcgagcacaagggccataccgtcgccgtcaagatcatctccaaagctaagatgacaacggccatttccattgaagatgttcgtagggaggtcaagattttgaaagccctatcagggcacgataatctcgtcagattctatgatgcatgtgaggacgccctcaatgtctacattgtcatggaattatgtgaaggtggagagttgctagacagaattttagcaagaggtgggagatatacagaagaagatgccaaagcgatcattgtacagattttgagcgtagtggccttctgtcatcttcagggagtagtgcatcgtgatttgaagccagagaattttctcttcacaacaagagatgaaagcgctcctatgaagttgattgactttggtctgtcagattttattagaccagatgaaaggctcaatgatattgttggaagtgcttattatgttgctccagaggttctacacagatcatacagtatggaagcagacatttggagtataggtgttataacatacattctgctctgtggcagtcggccattctgggcaaggacagaatctgggatcttccggtccgtattgagggctgatcccaattttgacgattcaccatggccttcagtatcggctgaggctaaggattttgtgaagagatttctgaacaaagattaccgcaaaagaatgactgctgtccaagcactgactcacccttggttacgagatgaacaaaggcaaattccattggacatactcattttcagattagttaagcagtatctccgtgctactcctcttaaacgtttggcattaaaggcactatctaaggctttaagcgaggatgaacttttgtatcttaggttgcagtttaagctgcttgaacccagagatgggttcgtgtcactcgacaactttcggacggctctgacaagatactcaactgacgccatgagagaatcaagggttcttgagtttcagcatgcgttggaaccacttgcgtacagaaagatggactttgaagaattctgtgctgcagcaatcagcccgtaccagctggaagctttggaaaggtgggaagaaattgctggaacagcttttcagcactttgaacaagagggcaaccgagttatatcagttgaggagttagcacaggaactaaatctcgcgccgacacattactccattgtgcaagactggatcagaaaatcggacggcaagcttaactttcttgggttcaccaaatttttgcacggtgtcacgatacggggttcaaatacaagacgacactaa

SEQ ID NO: 2397 - protein, 627 aa, Zea mays
MGQCYGKARGASSRADHDADPSGAGSVAPPSPLPANGAPLPATPRRHKSGSTTPVHHHQAATPGAAAWPSPYPAGGASPLPAGVSPSPARSTPRRFFKRPFPPPSPAKHIKATLAKRLGGGKPKEGTIPEEGGAGAGAGAGAGAGAGAAVGAADSAEADRPLDKTFGFAKNFGAKYDLGKEVGRGHFGHTCSAVVKKGEHKGHTVAVKIISKAKMTTAISIEDVRREVKILKALSGHDNLVRFYDACEDALNVYIVMELCEGGELLDRILARGGRYTEEDAKAIIVQILSVVAFCHLQGVVHRDLKPENFLFTTRDESAPMKLIDFGLSDFIRPDERLNDIVGSAYYVAPEVLHRSYSMEADIWSIGVITYILLCGSRPFWARTESGIFRSVLRADPNFDDSPWPSVSAEAKDFVKRFLNKDYRKRMTAVQALTHPWLRDEQRQIPLDILIFRLVKQYLRATPLKRLALKALSKALSEDELLYLRLQFKLLEPRDGFVSLDNFRTALTRYSTDAMRESRVLEFQHALEPLAYRKMDFEEFCAAAISPYQLEALERWEEIAGTAFQHFEQEGNRVISVEELAQELNLAPTHYSIVQDWIRKSDGKLNFLGFTKFLHGVTIRGSNTRRH

SEQ ID NO: 2398 - DNA, 1524 bp, Glycine max
  CDS (1)..(1524)
atggcggcgaaatctagttcgagttcgacaacaaacgtggtgactctgaaggcggcgtgggttctcccgcagcgcacgcagaacatccgtgaggtgtacgaggtggggcggaagttggggcagggtcaattcgggactaccttcgagtgcacgcgccgcgcgtccggggggaaattcgcgtgcaagtcaattcccaagcggaagctgctgtgcaaggaggactacgaggacgtgtggcgggagattcagataatgcaccacttgtcggagcacgcgcacgttgtccgcatcgaagggacgtacgaggattcctcggcggtgcacctcgtcatggagttgtgtgagggtggggagttgtttgacaggatcgtgcagaagggacactacagcgagagacaggcggcgaggttgataaagacgattgttgaggttgttgaagcgtgtcactcgcttggggtcatgcatagggacctcaagcctgagaacttcctctttgatactgatgatgaggatgctaagcttaaggccactgatttcggcttgtctgttttttacaagcctggtgaatccttttgtgatgttgtcgggagcccatactatgttgcaccagaggtcttgcgcaagcactatggacctgaatcagacgtgtggagtgctggggttattctgtacatcttattaagtggggtgccaccattttgggctgaatctgaaccagggatcttccgacagattttactaggaaaacttgattttcaatctgagccttggcctaacatttcagacagtgccaaggatctaattcggaaaatgcttgatcaaaatccaaaaacaaggcttacagcacatgaagtactccgccacccatggattgttgatgacaacattgcacctgataaacctcttgattctgcagttttatcacgtctgaaacaattctctgcaatgaataaattgaaaaagatggcattgcgtgttattgcggagaggctatctgaagaagaaattggtggcctgaaagagttattcaagatgattgacacagacaacagtggaacgataacgtttgatgagttaaaagatggcttgaagcgagtaggatctgaacttatggagtctgaaatcaaggatcttatggatgctgcggatattgataaaagtgggacaattgattatggtgaattcattgctgccactgttcatttaaataagctggagagagaggaaaacctagtgtcagccttctcgtattttgacaaagatggcagtggttacataacccttgatgagatacaacaagcctgtaaggactttggtttagatgatgtccatattgatgacatgatcaaggaaattgatcaagataacgatgggcaaatagattatggggaatttgctgccatgatgagaaagggcaatggaggaattggaaggcgaactatgagaaaaacactaaatttaagagatgctcttggattagtagacaatgggtccaatcaagttattgagggctactttaagtaa

SEQ ID NO: 2399 - protein, 507 aa, Glycine max
MAAKSSSSSTTNVVTLKAAWVLPQRTQNIREVYEVGRKLGQGQFGTTFECTRRASGGKFACKSIPKRKLLCKEDYEDVWREIQIMHHLSEHAHVVRIEGTYEDSSAVHLVMELCEGGELFDRIVQKGHYSERQAARLIKTIVEVVEACHSLGVMHRDLKPENFLFDTDDEDAKLKATDFGLSVFYKPGESFCDVVGSPYYVAPEVLRKHYGPESDVWSAGVILYILLSGVPPFWAESEPGIFRQILLGKLDFQSEPWPNISDSAKDLIRKMLDQNPKTRLTAHEVLRHPWIVDDNIAPDKPLDSAVLSRLKQFSAMNKLKKMALRVIAERLSEEEIGGLKELFKMIDTDNSGTITFDELKDGLKRVGSELMESEIKDLMDAADIDKSGTIDYGEFIAATVHLNKLEREENLVSAFSYFDKDGSGYITLDEIQQACKDFGLDDVHIDDMIKEIDQDNDGQIDYGEFAAMMRKGNGGIGRRTMRKTLNLRDALGLVDNGSNQVIEGYFK

SEQ ID NO: 2400 - DNA, 1587 bp, Glycine max
  CDS (1)..(1587)
atgggttgtcatggtagcaaggagaaaaaatcaaacacttcctatggatcagcagccactggtagtggtagtggtagtggcagtggtggtggttacacactgttcagccatcaccacctactaccctcaggttcagcatcagcacagactccagaaaaccgaaaagcttctcctacagtgcagaagaaagcagacacaagcatcggggggaaaccctgtgacgacataaagaaatactacagtatagggaaggaattgggaaggggccaattcgggataacgtatctgtgcacggagaattcgagcggggggacgtacgcgtgcaagtcgatactgaagaggaagctggtctcgaaggcggacagggaggacatgaagagggagattcagatcatgcagcatttgtcggggcaacccaacattgtcgagttcaagggcgcctacgaggacagcttctccgtccaccttgtcatggaactctgcgccggcggggagctcttcgatcgtatcatcgcccagggtcactactccgagagagccgctgcctctctctgccgctccatcgtcaacgttgtccacatttgccacttcatgggcgtcatgcaccgcgatctcaagcccgaaaatttcttgctctctaccaaggacgaccacgccaccctcaaggccactgattttggtctctctgtcttcattgaacaagggaaggtttaccatgatatggttggcagtgcttactatgttgctcctgaggtattgcgtcgtagttatggaaaggaaatagatatttggagcgcaggcatcatattgtatattcttctgagtggtgtaccacctttttgggctgaaactgaaaagggaatatttaatgccatattggaaggtgaaattgattttgtaagtgaaccatggccatccatatcagacagtgctaaagacctagtcaggaagatgctgacacaggatccaaacaagcggattacttcttctcaagtccttgaacacccatggatgagagaaggtggagatgcatctgataaaccaatcgatagtgcagttctatccagaatgaaacaattcagggcaatgaataagctcaagaagctagcattgaaggttatcgctgaaaatctatcagaagaggagattaaaggtctcaaagcaatgtttgccaacatggacactgacaatagtggcactatcacctatgaagaaataaagactggcttggctcgaatcggatcaaaactgtctgaggctgaagtgaagcaactcatggatgctgctgatgttgatggaaatgggtcaattgactatcttgaaatcatttctgctacaatgcataggcacagacttgaacgtgatgaacatctttacaaagcattccagtattttgataaggataacagtggatatattactagagatgaattggagactgctatgacccaacatggaatgggtgatgaagcaacaataaaggaaataatctctgaggtggatacagataatgatgggagaataaactatgaggagttctgtgcaatgatgagaagtggaatgccacaccagggacagctactttaa

SEQ ID NO: 2401 - protein, 528 aa, Glycine max
MGCHGSKEKKSNTSYGSAATGSGSGSGSGGGYTLFSHHHLLPSGSASAQTPENRKASPTVQKKADTSIGGKPCDDIKKYYSIGKELGRGQFGITYLCTENSSGGTYACKSILKRKLVSKADREDMKREIQIMQHLSGQPNIVEFKGAYEDSFSVHLVMELCAGGELFDRIIAQGHYSERAAASLCRSIVNVVHICHFMGVMHRDLKPENFLLSTKDDHATLKATDFGLSVFIEQGKVYHDMVGSAYYVAPEVLRRSYGKEIDIWSAGIILYILLSGVPPFWAETEKGIFNAILEGEIDFVSEPWPSISDSAKDLVRKMLTQDPNKRITSSQVLEHPWMREGGDASDKPIDSAVLSRMKQFRAMNKLKKLALKVIAENLSEEEIKGLKAMFANMDTDNSGTITYEEIKTGLARIGSKLSEAEVKQLMDAADVDGNGSIDYLEIISATMHRHRLERDEHLYKAFQYFDKDNSGYITRDELETAMTQHGMGDEATIKEIISEVDTDNDGRINYEEFCAMMRSGMPHQGQLL

SEQ ID NO: 2402 - DNA, 1602 bp, Glycine max
  CDS (1)..(1602)
atgggcaactgctgcagatccccggccgctgtggcccgcgaggacgtcaaatcgagcttctccaacgccgaccacggcaagcgcggcggaggtggctccgcctccgccgccgccaagcagaaggccccgatcacggtgcttgccggcgtgccgaaagagaacatcgaggaccggtacctcgtggaccgcgagctcgggcgcggcgagttcggcgtgacgtacctctgcatcgaccgcgacacgcgcgagctgctcgcgtgtaagagcatctcgaagaggaagctccggacagccgtggacgtcgaggacgtgcgccgcgaggtcgccatcatgcgccacctgccggagagcccgagcatcgtgtcgctccgcgaggcctgtgaggacgacaatgccgtccacctcgtcatggagctctgcgagggcggcgaactcttcgaccggatcgtcgcccgcgggcactacaccgagcgcgccgccgccgccgtcacgcggacgatcgtcgaggtcgtgcagctctgccacaagcacggggtcatccaccgagacctcaagccggagaacttcttgttcgcgaacaagaaggagaattcgccgctcaaggctattgactttggcctctccatattcttcaagccaggtgagaggttctcagaaattgttggaagtccatattatatggctccagaagtgctcaagcggaattatggaccagaaatagatatatggagtgcaggagtaattctctacatcttattgtgtggtgttcccccattttgggctgaatctgagcaaggagttgcacaggccattcttcgaggacttatagattttaaaagggaaccatggcccagtatttctgaaagtgctaaaagccttgttaggcaaatgttagaaccagaccccaagcttcgattaactgccaaacaagtgcttgagcatccctggattcaaaatgctaagaaggctcctaatgttccacttggagatgttgtcaagtcaaggcttaagcaattttcaatgatgaacagattcaaaagaaaagcccttagggtcattgctgatttcttatccaatgaagaagttgaagacatcaaagatatgttcaagaagatggataatgataatgatggcattgtttccattgaagaactaaaagctggatttcgaaactttgggtctcaactggctgagtctgaagttcagttgcttattgaagctgtagatactaatggtaagggaacactagactacggagaattcgttgctgtttcccttcatttaagaaggatggctaatgacgatcatcttcacaaggccttctcctattttgacaaagatgggaatggatatattgaaccagatgagctacggaatgctttgatggaagatggagcagatgactgtacagatgtagcgaatgacattttcctagaagtagacacggacaaggatggacgtatcagctacgatgaatttgttgctatgatgaaaactggaacagattggagaaaagcatcaaggcattactcacgtggaagattcaatagcttgagcttaaagttgatgaaagacggttctttaaacttaggaaatgagtag

SEQ ID NO: 2403 - protein, 533 aa, Glycine max
MGNCCRSPAAVAREDVKSSFSNADHGKRGGGGSASAAAKQKAPITVLAGVPKENIEDRYLVDRELGRGEFGVTYLCIDRDTRELLACKSISKRKLRTAVDVEDVRREVAIMRHLPESPSIVSLREACEDDNAVHLVMELCEGGELFDRIVARGHYTERAAAAVTRTIVEVVQLCHKHGVIHRDLKPENFLFANKKENSPLKAIDFGLSIFFKPGERFSEIVGSPYYMAPEVLKRNYGPEIDIWSAGVILYILLCGVPPFWAESEQGVAQAILRGLIDFKREPWPSISESAKSLVRQMLEPDPKLRLTAKQVLEHPWIQNAKKAPNVPLGDVVKSRLKQFSMMNRFKRKALRVIADFLSNEEVEDIKDMFKKMDNDNDGIVSIEELKAGFRNFGSQLAESEVQLLIEAVDTNGKGTLDYGEFVAVSLHLRRMANDDHLHKAFSYFDKDGNGYIEPDELRNALMEDGADDCTDVANDIFLEVDTDKDGRISYDEFVAMMKTGTDWRKASRHYSRGRFNSLSLKLMKDGSLNLGNE

SEQ ID NO: 2404 - DNA, 1587 bp, Glycine max
  CDS (1)..(1587)
atgggttgttgtatgagtaaaaaagggtcagagccagaagaacacattgtttacagacatgttgcgggtgctgggggtgctggtgtgtacaataatcacaagagccatgaacccccttctcatcaaccttacccattacctgagaagcatgccccttggaggcctccaccaagcccaaaacatgttcacaagcatgacacaatcactgggaagccatttgaggatgttaaacagcactacacacttgggaaggaattggggagaggccaattcggggtgacttatctctgcactgagaattcaactggttttcagtatgcctgcaagtccatttcaaagaggaagcttgtgagcagagacgacaaggaggacatgaagagggagattcaaatcatgcagcatttgagtggacaatccaacattgtggagttcaaaggtgcttttgaggataagcaatcagttcatgtggttatggagctgtgtgctggtggtgaactttttgacaggattattgccaagggccactacagtgaaagggctgctgcttcaatatgtaggcaggttgttaaggttgttaacacctgccattttatgggtgtcattcatagggatctcaagccagagaatttcttgctatctagtaaggatgacaagggacttctcaaggccacggattttggcttgtcagtcttcattgaagaaggaaaggtgtatcgagatatagttggcagtgcttactatgttgctccagaagttctacgtcgtagctatgggaaggaagcagatatatggagtgcaggagttatattgtatatcttacttagtggtgtacctccattttgggcagagacggaaaagggaatatttgatgccatattgcaaggtcatattgattttgaaagtagtccatggccaagcatatcaaacagtgctaaagaccttgttcgcaaaatgcttataaaggatccaaagaaacgcattactgctgctcaggttctagagcacccatggcttaaagaaggtggaaatgcttctgacaagccaatagacagtgcagtgctttccagaatgaagcaattcagagcaatgaataaactaaaaaaactagccctcaaggtcattgctgaaaatctttctgaagaagagatccaaggcttgaaggcaatgttcacaaatattgacactgacaatagtggtacaatcacctatgaggaactgagggcaggattgcaaagacttggctcaaagcttactgaaactgaagtgcgacagcttatggatgccgctgatgtagatggaaatggcacaattgactacatagaattcatcactgctacaatgcatagacacaggttagaaagagatgagcatctttacaaggccttccaatattttgacaaagatggcagcgggtatatcacaagagatgaactggaaatagccatgaaggagtatggtatgggtgacgaggccacaatcagggaaattatatctgaagttgacacagataatgatggtagaatcaactatgaagaattttgtacaatgatgaggagtggaacccaacaacaaggcaagctattctga

SEQ ID NO: 2405 - protein, 528 aa, Glycine max
MGCCMSKKGSEPEEHIVYRHVAGAGGAGVYNNHKSHEPPSHQPYPLPEKHAPWRPPPSPKHVHKHDTITGKPFEDVKQHYTLGKELGRGQFGVTYLCTENSTGFQYACKSISKRKLVSRDDKEDMKREIQIMQHLSGQSNIVEFKGAFEDKQSVHVVMELCAGGELFDRIIAKGHYSERAAASICRQVVKVVNTCHFMGVIHRDLKPENFLLSSKDDKGLLKATDFGLSVFIEEGKVYRDIVGSAYYVAPEVLRRSYGKEADIWSAGVILYILLSGVPPFWAETEKGIFDAILQGHIDFESSPWPSISNSAKDLVRKMLIKDPKKRITAAQVLEHPWLKEGGNASDKPIDSAVLSRMKQFRAMNKLKKLALKVIAENLSEEEIQGLKAMFTNIDTDNSGTITYEELRAGLQRLGSKLTETEVRQLMDAADVDGNGTIDYIEFITATMHRHRLERDEHLYKAFQYFDKDGSGYITRDELEIAMKEYGMGDEATIREIISEVDTDNDGRINYEEFCTMMRSGTQQQGKLF

SEQ ID NO: 2406 - DNA, 1656 bp, Glycine max
  CDS (1)..(1656)
atgggttgttgtgcaagtaaagagtcagagccgcaacacaatggttacagacatgctgggactggtggtgtgcacaaccagaagactcatgaacctttggtcaaccaatcaagagcacctgcaaatcaaccttatcatttacatgaaaagcatgctgcatccactgctcagacagtgcctcagaatatgccatggaagcctcctggtccagcccttagtcctaaacctgttgttagtgttaggcaagacacaattcttgggaagcagtttgaggatgtgaagcagttctacacactcgggaaggaattgggtagagggcaatttggtgtgacatatctttgcactgagaattcaactgggttgcagtatgcctgcaagtccatttccaagaggaaacttgtgaagaaatctgataaggaggacataaagagggagattcagattatgcagcatttgagtggtcaacccaacattgttgagttcaaaggggcttatgaggataggagctcagttcatgttgtgatggagctgtgtgcaggtggggaactttttgataggattattgccaaggggcattacagtgagaaggctgctgcttcaatatgcagacaaattgtaaatgttgttcatatctgccatttcatgggtgtgatgcatagggatctgaaaccagagaatttcttgctatctagtagggatgaaaatgcacttctcaaggcaaccgattttggcttgtcagttttcattgaagaaggaaaggtatatcgggatatagttggtagtgcttactatgttgctcctgaagttctgcggcgcagatgtgggaaggaaatagatatatggagtgcaggagtcatattgtatatcttactgagtggagtccctccattttgggccgagactgagaagggaatatttgatgccatattggaaggtcacattgattttgaaagtcaaccatggcctaacatctcaaacaatgccaaggatcttgttcgtaagatgcttatacaggatccaaagaaacgcattacctctgctcaagttcttgagcacccatggattaaagatggaaatgcttcagacaagccgatagacagtgcagtcctttccagaatgaagcaatttagagcaatgaataagctaaagaaacttgccttgaaggtcattgctgagaatatgtctgcagaagagatccaaggtttgaaggcaatgtttacaaatatggacactgacaagagtggtacaatcacctatgaagaacttaagtcaggattgcatagacttggctcaaagcttacagaggctgaagtgaagcaacttatggaagctgctgatgtagatggaaatggctcaattgactacatagaattcatcactgctacaatgcatagacacaaattagaaagagatgaccaacttttcaaggccttccaatattttgataaagacaacagtgggtttattacaagagatgaattggaatcagccatgaaagaatatggtatgggtgatgatgcaacaatcaaggaaatcatatctgaagttgatacaattatatctgaagtggatacagatcatgatggtagaatcaactatgaagaattctctgcgatgatgaagagtgggaaccaacaacaaggcaagctattctaa

SEQ ID NO: 2407 - protein, 551 aa, Glycine max
MGCCASKESEPQHNGYRHAGTGGVHNQKTHEPLVNQSRAPANQPYHLHEKHAASTAQTVPQNMPWKPPGPALSPKPVVSVRQDTILGKQFEDVKQFYTLGKELGRGQFGVTYLCTENSTGLQYACKSISKRKLVKKSDKEDIKREIQIMQHLSGQPNIVEFKGAYEDRSSVHVVMELCAGGELFDRIIAKGHYSEKAAASICRQIVNVVHICHFMGVMHRDLKPENFLLSSRDENALLKATDFGLSVFIEEGKVYRDIVGSAYYVAPEVLRRRCGKEIDIWSAGVILYILLSGVPPFWAETEKGIFDAILEGHIDFESQPWPNISNNAKDLVRKMLIQDPKKRITSAQVLEHPWIKDGNASDKPIDSAVLSRMKQFRAMNKLKKLALKVIAENMSAEEIQGLKAMFTNMDTDKSGTITYEELKSGLHRLGSKLTEAEVKQLMEAADVDGNGSIDYIEFITATMHRHKLERDDQLFKAFQYFDKDNSGFITRDELESAMKEYGMGDDATIKEIISEVDTIISEVDTDHDGRINYEEFSAMMKSGNQQQGKLF

SEQ ID NO: 2408 - DNA, 1491 bp, Glycine max
  CDS (1)..(1491)
atggcgaagcctcacagcggcacccccgcggtcgcaccgaagcccgcgtgggtcctcccataccgaaccgagaatctccgcgaggtctacaccctaacccgaaaactaggccagggccaattcggaacaaccttcctctgcacgcacaacgccacgggacgcaccttcgcctgcaagtcaatcccgaagcggaagctgctctgcaaggaggactacgacgacgtatggagggagattcagataatgcaccacctctccgagcaccccaacgtcgttcgcatccacggcacctacgaggacgccgcctccgtccacctcgtcatggagctctgcgagggaggggagttgttcgacaggattgtgcagaaggggcactacagcgagcgccaggctgcgaagctcatcaagaccattgttgaggttgtggaggcttgccactcgcttggggtcatgcatagggacctcaagcctgagaactttctctttgatactgttgaggagggtgctaagctcaaaactactgattttgggctctccgtgttttataagccaggtgaaaccttttgtgacgttgttggaagcccgtactatgttgcaccagaggtcttgcgtaagcattatggtcctgaagcagacgtgtggagtgctggtgttattttgtacatcttattaagtggggtgccaccattttgggctgaaacagagcaggggattttccgacagattttgctaggaagactagatttccagtctgagccatggcctagcatttcagacagtgccaaagatctaattcgaaaaatgcttgatcggaatccaaaaacaagggttacagctcaccaagtactctgtcacccttggattgttgatgacaacattgcaccagataaacctcttgattctgctgttttatcacgcctgaagcagttctctgcaatgaataaacttaaaaagatggctttgcgtgttattgcagagaggctctctgaggaagaaattggtggtctgaaggaattattccggatgattgatgcagataacagtggtactataacatttgatgagctaaaagaaggcttaaagcgagtaggatctgaactaatggagtctgaaatcaaggatcttatggatgctgcagatattgataatagtgggacaatagactatggtgaattcattgctgctacggtccacttaaataagctggagagagaggaaaatttggtgtcagctttctcctattttgataaagatggaagtggttatataaccattgatgagatacaacaggcttgtaaggagttcggtttggatgatgtccatatcgatgaaattgtcaaggaaattgatcaagacgatgatggacagattgattatggggaatttgctgccatgatgagaaagggtaatggaggaattggcaggcgaaccatgaggagcacgctcaatttcagagatactctgggaattaaaggccatgggtccgattaa

SEQ ID NO: 2409 - protein, 496 aa, Glycine max
MAKPHSGTPAVAPKPAWVLPYRTENLREVYTLTRKLGQGQFGTTFLCTHNATGRTFACKSIPKRKLLCKEDYDDVWREIQIMHHLSEHPNVVRIHGTYEDAASVHLVMELCEGGELFDRIVQKGHYSERQAAKLIKTIVEVVEACHSLGVMHRDLKPENFLFDTVEEGAKLKTTDFGLSVFYKPGETFCDVVGSPYYVAPEVLRKHYGPEADVWSAGVILYILLSGVPPFWAETEQGIFRQILLGRLDFQSEPWPSISDSAKDLIRKMLDRNPKTRVTAHQVLCHPWIVDDNIAPDKPLDSAVLSRLKQFSAMNKLKKMALRVIAERLSEEEIGGLKELFRMIDADNSGTITFDELKEGLKRVGSELMESEIKDLMDAADIDNSGTIDYGEFIAATVHLNKLEREENLVSAFSYFDKDGSGYITIDEIQQACKEFGLDDVHIDEIVKEIDQDDDGQIDYGEFAAMMRKGNGGIGRRTMRSTLNFRDTLGIKGHGSD

SEQ ID NO: 2410 - DNA, 1620 bp, Glycine max
  CDS (1)..(1620)
atggggaactgcaacgcctgcgttcgagtcgatgacgtggcagactcaaaccgcggcaaaaagaataagaaaaccaaaccgaacccctacgcggaggaagagatacgctccggcgttccgatccgtgtgctgaaggacgtgacgtcacggagcctcatcggcgacaagtacgtgataggccgggagctaggtcgtggcgagttcgggataacgtacctctgcacggaccgcgaaacgaagcaggagctcgcgtgcaagtcgatctcgaagcggaagctgagaaccgcgatcgacgtggaggacgtgcggcgagaggtggcgatcatgtcgacgctgccggagcacgctaacgtggtgaagctgaaggcgacttacgaggacgaagagaacgttcatctcgttatggagctctgcgccggcggggagctcttcgaccggatcgtcgcgcgggggcactacagcgagcgtgccgccgcgaacgtggcgaggaccattgctgaggttgttaggatgtgtcacgccaatggtgttatgcatcgagaccttaaacctgagaattttctctttgcgaataagaaggagaattctgttctcaaggctattgactttggactctccgtgtttttcaagccaggggagaggttttcggagattgtggggagtccttactacatggcgccggaggtattgaaaaggaattatgggccagaggtggatgtgtggagtgctggggtgattctttatattttgttgtgtggagttcctccgttttgggcagaggacgaacgaggggtggctttggcaatattgaggggagtgatgaacttcaagagagaaccgtggcctcagatttcagatagtgctaagagtcttgtgcgccagatgttggagcatgatcctaagaagcgcttgacggctgaacaggtgcttgagcattcctggttacaaaatgcaaagaaagcttcaaatgttccattaggagatattgtgagaacaaggcttaggcaattctctttgatgaatagattaaaaaagagagcacttcgggtaattgcagagcatttgtctgttgaagaggtagaaataatcaaagacatgtttacattgatggacacaaacaaagatggcaaagtaacatatgaggagctgaaggttgggttacggaaggttggttcacaattggctgagccagagataaagatgctgatggaagtggctgatgttgatgggaatggagtacttgactatggagagtttgtagccgtgacaattcacttgcaaagaatggagaatgatgagcatttccgcaaagcattcatgtattttgacaaagatgggagtgggtatatcgagttaggggagctagagaaagcattaacagatgagtcgggagatactgatactgctgtattgaatgacatcatgcgtgaagttgacactgacagggatggtcgtatcagttatgaagagtttgtggccatgatgaaaactggaactgactggagaaaagcatctaggcagtattcaagggagagattcaagagcttgagcataaatttgatgaaggatggctcacttcagcttcatgacgatattagtggtcaagctgaagtggtttga

SEQ ID NO: 2411 - protein, 539 aa, Glycine max
MGNCNACVRVDDVADSNRGKKNKKTKPNPYAEEEIRSGVPIRVLKDVTSRSLIGDKYVIGRELGRGEFGITYLCTDRETKQELACKSISKRKLRTAIDVEDVRREVAIMSTLPEHANVVKLKATYEDEENVHLVMELCAGGELFDRIVARGHYSERAAANVARTIAEVVRMCHANGVMHRDLKPENFLFANKKENSVLKAIDFGLSVFFKPGERFSEIVGSPYYMAPEVLKRNYGPEVDVWSAGVILYILLCGVPPFWAEDERGVALAILRGVMNFKREPWPQISDSAKSLVRQMLEHDPKKRLTAEQVLEHSWLQNAKKASNVPLGDIVRTRLRQFSLMNRLKKRALRVIAEHLSVEEVEIIKDMFTLMDTNKDGKVTYEELKVGLRKVGSQLAEPEIKMLMEVADVDGNGVLDYGEFVAVTIHLQRMENDEHFRKAFMYFDKDGSGYIELGELEKALTDESGDTDTAVLNDIMREVDTDRDGRISYEEFVAMMKTGTDWRKASRQYSRERFKSLSINLMKDGSLQLHDDISGQAEVV

SEQ ID NO: 2412 - DNA, 1599 bp, Glycine max
  CDS (1)..(1599)
atgttcggccgcgccggcccggctgcagcgccgccggagccggtgacgccgcagaagaagcaaccgtcgcaggctaaacggcggcaagtgccggaggattcgcagaagaacccacgctccaaagacaaagcgggtgcgcgtcggcaagggacgcatgttccgtgcggaaagcgaacggatttcgggtacgagaaagacttcgagaatagattctcgctcgggaaattgttgggacatggacaattcggttacacctacgttggaatagacaaaacaaatggggatcgtgtcgccgttaagagactcgagaagagcaagatggttctgcctattgccgttgaggatgttaagcgagaggtcaagatattgaaagcacttactggccatgagaatgtggttcagttctataatgcttttgaagatggttcttatgtgtacatagttatggagttgtgcgagggtggagaactgctagatcggatattggccaagaaggacagtcgttatactgaaagagacgcagcggtggttgtaaggcagatgctcaaggttgcagctgagtgtcatttacatggtttggtacaccgggacatgaaaccagagaattttctttttaaatcaaccaaagaagattcacctttaaaggccactgattttggtttgtcagatttcataaaacctggaaaaaagtttcatgatattgttggcagtgcttactatgttgcacctgaagtgttaaaacgtaagtctggtcctcaatcagatgtgtggagtattggtgttattacatacatattgttgtgcggaagacgcccattttgggataagactgaggatggtatcttcaaggaggtcttacgtaagaagcccgattttcgtcggaaaccatggccaactattagtaatgctgcaaaagattttgtgaaaaaattactagtaaaggatcctcgggcgagattaactgctgctcaagctttatcacatccatgggttagagaaggaggagaagcattggagattcctattgatatatctgtcctgagcaacatgcggcagtttgtgaaatatagtcgattcaaacaatttgcactgagggcattggctagcacacttaatgaagaagagttggctgatataaaagatcaatttgatgctatagatgtagacaaaaatggttcgattagcctggaagagatgagacaggctcttgccaaagatcttccttggaaattgaaagaatcacgtgtactagagatattgcaagcgatagacaacaacactgatggtctagtggatttccgggagtttgtagcggctacattacacgtgcatcaattggaggaagactctgacaagtggcagcaactgtcacaggctgcttttgagaaatttgacctagataaagatggctatattactccggaagaacttagaatgcatacatgcttgagaggctccgttgatcctttgctagaggaagctgatattgacaaagatggaaaaataagcctaccagagtttcggagacttcttagaactgcaagcatgggttctcaaaatgtttcaagcccatctgttcatcggcggcagaggttctag

SEQ ID NO: 2413 - protein, 532 aa, Glycine max
MFGRAGPAAAPPEPVTPQKKQPSQAKRRQVPEDSQKNPRSKDKAGARRQGTHVPCGKRTDFGYEKDFENRFSLGKLLGHGQFGYTYVGIDKTNGDRVAVKRLEKSKMVLPIAVEDVKREVKILKALTGHENVVQFYNAFEDGSYVYIVMELCEGGELLDRILAKKDSRYTERDAAVVVRQMLKVAAECHLHGLVHRDMKPENFLFKSTKEDSPLKATDFGLSDFIKPGKKFHDIVGSAYYVAPEVLKRKSGPQSDVWSIGVITYILLCGRRPFWDKTEDGIFKEVLRKKPDFRRKPWPTISNAAKDFVKKLLVKDPRARLTAAQALSHPWVREGGEALEIPIDISVLSNMRQFVKYSRFKQFALRALASTLNEEELADIKDQFDAIDVDKNGSISLEEMRQALAKDLPWKLKESRVLEILQAIDNNTDGLVDFREFVAATLHVHQLEEDSDKWQQLSQAAFEKFDLDKDGYITPEELRMHTCLRGSVDPLLEEADIDKDGKISLPEFRRLLRTASMGSQNVSSPSVHRRQRF

SEQ ID NO: 2414 - DNA, 1590 bp, Glycine max
  CDS (1)..(1590)
atgggttgtcatggtagcaaggagaaaaaatcaaacacttcctatggatcagcagccactggtagtggtagtggtagtggcagtggtggtggttacaacactgttcagccatcaccacctactaccgatcaggttcaagcatcagcacagactccagaaaaccgaaaagcttctcctacagtgcagaagaaagcagacacaagcatcgtggggaaaccctttgacgacataaagaaatactacagtatagggaaggaattgggaaggggccaattcgggataacgtatctgtgcacggagaattcgagcggggggacgtacgcgtgcaagtcgatactgaagaggaagctggtctcgaaggcggacagggaggacatgaagagggagattcagatcatgcagcatttgtcggggcaacccaacattgtcgagttcaagggcgccttcgaggaccgcttctccgttcacctcgtcatggaactctgctccggcggggagctcttcgatcgtatcatcgcccagggtcactactccgagagagccgctgcctctctctgccgctccatcgtcaacgttgtccacatttgccacttcatgggcgtcatgcaccgcgatctcaagcccgagaatttcttgctctctaccaaggacgaccacgccaccctcaaggctactgattttggtctctctgtcttcattgaacaagggaaggtttaccatgatatggttggcagtgcttactatgttgctcctgaggtattgcgtcgtagttatggaaaggaaatagatatttggagcgcaggcatcatattgtatattcttctgagtggtgtaccgcctttttgggctgaaactgaaaagggaatatttaacgccatattggaaggtgaaattgattttgtaagtgaaccatggccatcgatatcagacagtgctaaagatctagtcaggaagatgctgacacaggatccaaagaagcggattacttctgctcaagttcttgaacacccatggatgagagaaggtggagacgcatctgataaaccaatcgatagtgcagttctatccagaatgaaacaattcagggcaatgaataagctcaagaagctagcattgaaggttatcgctgaaaatctatcagaagaggagattaaaggtctcaaagcaatgtttgccaatatggacactgacagtagtggcaccatcacctatgaagaactgaagactggcttggctcgaatcggatcaagactatccgaggctgaagtgaagcaactcatggatgctgctgatgttgatggaaatgggtcaattgactatcttgaattcatttctgctacaatgcataggcacagacttgaacgtgatgaacatctttacaaagcattccagtattttgataaggataacagtggatatattactagagatgaattggagactgctatgacccaacatggaatgggtgatgaagcaacaataaaggaaataatctctgaggtggatacagataatgatgggagaataaactatgaggagttctgtgcaatgatgagaagtggaatgccacaccagggacagctactttaa

SEQ ID NO: 2415 - protein, 529 aa, Glycine max
MGCHGSKEKKSNTSYGSAATGSGSGSGSGGGYNTVQPSPPTTDQVQASAQTPENRKASPTVQKKADTSIVGKPFDDIKKYYSIGKELGRGQFGITYLCTENSSGGTYACKSILKRKLVSKADREDMKREIQIMQHLSGQPNIVEFKGAFEDRFSVHLVMELCSGGELFDRIIAQGHYSERAAASLCRSIVNVVHICHFMGVMHRDLKPENFLLSTKDDHATLKATDFGLSVFIEQGKVYHDMVGSAYYVAPEVLRRSYGKEIDIWSAGIILYILLSGVPPFWAETEKGIFNAILEGEIDFVSEPWPSISDSAKDLVRKMLTQDPKKRITSAQVLEHPWMREGGDASDKPIDSAVLSRMKQFRAMNKLKKLALKVIAENLSEEEIKGLKAMFANMDTDSSGTITYEELKTGLARIGSRLSEAEVKQLMDAADVDGNGSIDYLEFISATMHRHRLERDEHLYKAFQYFDKDNSGYITRDELETAMTQHGMGDEATIKEIISEVDTDNDGRINYEEFCAMMRSGMPHQGQLL

SEQ ID NO: 2416 - DNA, 1656 bp, Glycine max
  CDS (1)..(1656)
atgggaaactgcaacgtgtgcgcgaaagctgacgtggtagaagatagcaataacaacaggaacaagaagtctaatgaaacgaaccgcgctaggaagaaagagccgaaaccattcacggacgaaccggcccggtcgacggcggctccgatccgggtcctgaaggacgtgattccaatgagccaccggacgcgcataagcgacaagtacatactgggccgggaactgggccggggcgagttcggaatcacctacctctgcacggaccgggagaggaaggaagcccttgcctgcaagtcgatctcgaagcggaagctccggactgccgtggacatcgacgacgtgcggcgcgaggtcgccatcatgtccacgctgccggagcaccccaacgtcgtgaagctgaaggcgacttacgaggacaacgagaacgtccacctcgtcatggagctctgcgaagggggagagctcttcgaccggattgtcgccaggggacactacagcgagcgcgccgccgccgccgtggcgcgcaccatcgccgaggttgttaggatgtgccacagcaatggcgtcatgcatagggacctcaagcctgagaatttcctcttcgcaaataagaaagagaattctgctctcaaggccatcgatttcggcctctccgtcttcttcaagccaggggagaggttttcagagattgttgggagtccttactacatggcgccggaggttttgaagcggaattacgggccggaggttgatgtgtggagtgctggggtgattctttatattttgttgtgtggggttcctccgttctgggcagagactgagcaaggtgtggctttggcgatcttgaggggtgtgattgacttcaagagggaaccttggccgcaaatatcggagagtgccaagagccttgtgcggcgaatgttggagccggatcctaaaaaccgcttgacagctgaacaggtgcttgaacatccctggctgcaaaatgcaaagaaagctccaaatgttccattaggagatattgtcaggtcaaggcttaagcagttttctgtgatgaatagattcaaaaagaaagctctgcgggtaattgcagatcatttatctgttgaagaggtagaaataatcaaagatatgtttacattgatggatactgacaaagatggcagagtaacgtttgaggaactaaaggctgggttgaggaaggttggttcacaattggctgagccagagataaagatgctgatggaagtggctgatgttgatgggaatggagtacttgactatggagagtttgtagctgttacaattcacttgcaaaaaatggagaatgatgagcatttccacaaagcattcaagttttttgacaaagatgggaatgggtatattgagttacgtgagctagaggaagcattagcagatgagtcaggagaaactgatgctgatgtattgaatgacatcatgcgtgaagttgacactgacaaggatggtcgcatcagttatgaggagtttgtggcgatgatgaaaactggaactgactggaggaaagcatctaggcaatattcaagggagagattcaagagtttgagcctaaatttgatgaaagatggctcgcttcagcttcatgatgaaattactggtcaagctgtggtggtttga

SEQ ID NO: 2417 - protein, 551 aa, Glycine max
MGNCNVCAKADVVEDSNNNRNKKSNETNRARKKEPKPFTDEPARSTAAPIRVLKDVIPMSHRTRISDKYILGRELGRGEFGITYLCTDRERKEALACKSISKRKLRTAVDIDDVRREVAIMSTLPEHPNVVKLKATYEDNENVHLVMELCEGGELFDRIVARGHYSERAAAAVARTIAEVVRMCHSNGVMHRDLKPENFLFANKKENSALKAIDFGLSVFFKPGERFSEIVGSPYYMAPEVLKRNYGPEVDVWSAGVILYILLCGVPPFWAETEQGVALAILRGVIDFKREPWPQISESAKSLVRRMLEPDPKNRLTAEQVLEHPWLQNAKKAPNVPLGDIVRSRLKQFSVMNRFKKKALRVIADHLSVEEVEIIKDMFTLMDTDKDGRVTFEELKAGLRKVGSQLAEPEIKMLMEVADVDGNGVLDYGEFVAVTIHLQKMENDEHFHKAFKFFDKDGNGYIELRELEEALADESGETDADVLNDIMREVDTDKDGRISYEEFVAMMKTGTDWRKASRQYSRERFKSLSLNLMKDGSLQLHDEITGQAVVV

SEQ ID NO: 2418 - DNA, 1602 bp, Glycine max
  CDS (1)..(1602)
atgggcaactgctgcagatccccggccgctgtggcccgcgaggacgtcaaatcgagcttctccaacgccgaccacggcaagcgcggcggaggtggctccgcctccgccgccgccaagcagaaggccccgatcacggtgcttgccggcgtgccgaaagagaacatcgaggaccggtacctcgtggaccgcgagctcgggcgcggcgagttcggcgtgacgtacctctgcatcgaccgcgacacgcgcgagctgctcgcgtgtaagagcatctcgaagaggaagctccggacagccgtggacgtcgaggacgtgcgccgcgaggtcgccatcatgcgccacctgccggagagcccgagcatcgtgtcgctccgcgaggcctgtgaggacgacaatgccgtccacctcgtcatggagctctgcgagggcggcgaactcttcgaccggatcgtcgcccgcgggcactacaccgagcgcgccgccgccgccgtcacgcggacgatcgtcgaggtcgtgcagctctgccacaagcacggggtcatccaccgagacctcaagccggagaacttcttgttcgcgaacaagaaggagaattcgccgctcaaggctattgactttggcctctccatattcttcaagccaggtgagaggttctcagaaattgttggaagtccatattatatggctccagaagtgctcaagcggaattatggaccagaaatagatatatggagtgcaggagtaattctctacatcttattgtgtggtgttcccccattttgggctgaatctgagcaaggagttgcacaggccattcttcgaggacttatagattttaaaagggaaccatggcccagtatttctgaaagtgctaaaagccttgttaggcaaatgttagaaccagaccccaagcttcgattaactgccaaacaagtgcttgagcatccctggattcaaaatgctaagaaggctcctaatgttccacttggagatgttgtcaagtcaaggcttaagcaattttcaatgatgaacagattcaaaagaaaagcccttagggtcattgctgatttcttatccaatgaagaagttgaagacatcaaagatatgttcaagaagatggataatgataatgatggcattgtttccattgaagaactaaaagctggatttcgaaactttgggtctcaactggctgagtctgaagttcagttgcttattgaagctgtagatagtaatggtaagggaacactagactacggggaattcgttgctgtttcccttcatttaagaaggatggctaatgacgatcatcttcacaaggccttctcctattttgacaaagatgggaatggatatattgaaccagatgagctacggaatgctttgatggaagatggagcagatgactgtacagatgtagcgaatgacattttcctagaagtagacacggacaaggatggacgtatcagctacgatgaatttgttgctatgatgaaaactggaacagattggagaaaagcatcaaggcattactcacgtggaagattcaatagcttgagcttaaagttgatgaaagacggttctttaaacttaggaaatgagtaa

SEQ ID NO: 2419 - protein, 533 aa, Glycine max
MGNCCRSPAAVAREDVKSSFSNADHGKRGGGGSASAAAKQKAPITVLAGVPKENIEDRYLVDRELGRGEFGVTYLCIDRDTRELLACKSISKRKLRTAVDVEDVRREVAIMRHLPESPSIVSLREACEDDNAVHLVMELCEGGELFDRIVARGHYTERAAAAVTRTIVEVVQLCHKHGVIHRDLKPENFLFANKKENSPLKAIDFGLSIFFKPGERFSEIVGSPYYMAPEVLKRNYGPEIDIWSAGVILYILLCGVPPFWAESEQGVAQAILRGLIDFKREPWPSISESAKSLVRQMLEPDPKLRLTAKQVLEHPWIQNAKKAPNVPLGDVVKSRLKQFSMMNRFKRKALRVIADFLSNEEVEDIKDMFKKMDNDNDGIVSIEELKAGFRNFGSQLAESEVQLLIEAVDSNGKGTLDYGEFVAVSLHLRRMANDDHLHKAFSYFDKDGNGYIEPDELRNALMEDGADDCTDVANDIFLEVDTDKDGRISYDEFVAMMKTGTDWRKASRHYSRGRFNSLSLKLMKDGSLNLGNE

SEQ ID NO: 2420 - DNA, 1587 bp, Glycine max
  CDS (1)..(1587)
atgggttgttgtatgagtaaaaaagggtcagagccagaagaacacattgtttacagacatgttgctggtgctgggggtgctggtgtgtacaataatcacaagagccatgaacccccttctcatcaaccttacccattacctgagaagcatgccccttggaggcctccaccaagcccaaaacatgttcacaagcatgacacaatcactgggaagccatttgaggatgttaaacagcactacacacttgggaaggaattggggagaggccaattcggggtgacttatctctgcactgagaattcaactggttttcagtatgcctgcaagtccatttcaaagaggaagcttgtgagcagagacgacaaggaggacatgaagagggagattcaaatcatgcagcatttgagtggacaatccaacattgtggagttcaaaggtgcttttgaggataagcaatcagttcatgtggttatggagctgtgtgctggtggtgaactttttgacaggattattgccaagggccactacagtgaaagggctgctgcttcaatatgtaggcaggttgttaaggttgttaacacctgccattttatgggtgtcattcatagggatctcaagccagagaatttcttgctatctagtaaggatgacaagggacttctcaaggccacggattttggcttgtcagtcttcattgaagaaggaaaggtgtatcgagatatagttggcagtgcttactatgttgctccagaagttctacgtcgtagctatgggaaggaagcagatatatggagtgcaggagttatattgtatatcttacttagcggtgtaccaccattttgggcagagacggaaaagggaatatttgatgtcatattgcaaggtcatattgattttgaaagtagtccatggccaagcatatcaaacagtgctaaggaccttgttcgcaaaatgcttataaaggatccaaagaaacgcattactgctgctcaggttctagagcacccatggcttaaagaaggtggaaatgcttctgacaagccaatagacagtgcagtgctttccagaatgaagcaattcagagcaatgaataaactaaaaaaactagccctcaaggtcattgctgaaaatctttctgaagaagagatccaaggcttgaaggcaatgttcacaaatatcgacactgacaatagtggtacaatcacctatgaggaactgagggcaggattgcaaagacttggctcaaagcttactgaaactgaagtgcgacagcttatggatgccgctgatgtagatggaaatggcacaattgactacatagaattcatcactgctacaatgcatagacacaggttagaaagagatgagcatctttacaaggccttccaatattttgacaaagatggcagcgggtatatcacaagagatgaactggaaatagccatgaaggagtatggtatgggtgacgaggccacaatcagggaaattatatctgaagttgacacagataatgatggtagaatcaactatgaagaattttgtacaatgatgaggagtggaacccaacaacaaggcaagctattctga

SEQ ID NO: 2421 - protein, 528 aa, Glycine max
MGCCMSKKGSEPEEHIVYRHVAGAGGAGVYNNHKSHEPPSHQPYPLPEKHAPWRPPPSPKHVHKHDTITGKPFEDVKQHYTLGKELGRGQFGVTYLCTENSTGFQYACKSISKRKLVSRDDKEDMKREIQIMQHLSGQSNIVEFKGAFEDKQSVHVVMELCAGGELFDRIIAKGHYSERAAASICRQVVKVVNTCHFMGVIHRDLKPENFLLSSKDDKGLLKATDFGLSVFIEEGKVYRDIVGSAYYVAPEVLRRSYGKEADIWSAGVILYILLSGVPPFWAETEKGIFDVILQGHIDFESSPWPSISNSAKDLVRKMLIKDPKKRITAAQVLEHPWLKEGGNASDKPIDSAVLSRMKQFRAMNKLKKLALKVIAENLSEEEIQGLKAMFTNIDTDNSGTITYEELRAGLQRLGSKLTETEVRQLMDAADVDGNGTIDYIEFITATMHRHRLERDEHLYKAFQYFDKDGSGYITRDELEIAMKEYGMGDEATIREIISEVDTDNDGRINYEEFCTMMRSGTQQQGKLF

SEQ ID NO: 2422 - DNA, 1527 bp, Glycine max
  CDS (1)..(1527)
atggctgcgaaatctagttcgagttcgacaacaacaaacgtggtgactctgaaggcggcgtgggttctcccgcagcgcacgcagaacatccgtgaggtgtacgaggttgggcggaagctcgggcagggccaattcgggaccaccttcgagtgcacgcgccgtgcgagtggtgggaagttcgcgtgcaagtcgattccgaagcggaagctgctgtgcaaggaggactacgaggacgtgtggcgggagattcagataatgcaccacttgtcggaacacgccaacgttgtccgcatcgaagggacgtacgaggattccacggccgtgcacctggtcatggagttgtgcgagggtggagagttgtttgacaggatcgtgcagaagggacactacagcgagagacaggcggcgaggttgataaagacgattgttgagggtggtgaggcgtgtcactcgctaggggtcatgcatagggaccttaagcctgagaatttcttgtttgataccattgatgaggatgctaagcttaaggccaccgatttcggcttgtctgttttttacaagcctggtgaatccttttgtgatgttgtcgggagcccatactatgtcgcaccagaggtcttgcgcaagctctatggacctgaatcagatgtttggagtgcaggggttattctgtacatcttattaagtggggtgccaccattttgggccgaatctgaaccggggatcttccgacagattttactaggaaaacttgattttcattctgagccttggcctagcatttcagacagtgccaaggatctaattcggaaaatgcttgatcaaaatccaaaaacaaggcttacagcacatgaagtactccgccacccatggattgttgatgacaacattgcacctgataaacctcttgattctgcagttttatcacgtctgaaacaattctctgcaatgaataaattgaaaaagatggcattgcgtgttattgctgagaggctatctgaagaagaaattggtggactgaaagagttattcaagatgattgacacagacaacagtggaaccataacgtttgatgagttaaaagatggtttgaagcgagtaggatctgaacttatggagtctgaaatcaaggatcttatggatgctgcggatattgataaaagtgggacaattgattatggtgaattcattgctgccactgtccatttaaataagctggagagagaggaaaacctagtgtcggccttctcctattttgacaaagatggcagtggttacataacccttgatgagatacaacaagcttgtaaggactttggtttagatgatatccatattgacgacatgatcaaggaaattgatcaagataacgatgggcaaatagattatggggaatttgctgccatgatgagaaaaggcaatggaggaattgggaggcgaactatgagaaaaacactaaatttaagagatgctcttggattagtagacaatgggtccaatcaagttattgagggctactttaagtaa

SEQ ID NO: 2423 - protein, 508 aa, Glycine max
MAAKSSSSSTTTNVVTLKAAWVLPQRTQNIREVYEVGRKLGQGQFGTTFECTRRASGGKFACKSIPKRKLLCKEDYEDVWREIQIMHHLSEHANVVRIEGTYEDSTAVHLVMELCEGGELFDRIVQKGHYSERQAARLIKTIVEGGEACHSLGVMHRDLKPENFLFDTIDEDAKLKATDFGLSVFYKPGESFCDVVGSPYYVAPEVLRKLYGPESDVWSAGVILYILLSGVPPFWAESEPGIFRQILLGKLDFHSEPWPSISDSAKDLIRKMLDQNPKTRLTAHEVLRHPWIVDDNIAPDKPLDSAVLSRLKQFSAMNKLKKMALRVIAERLSEEEIGGLKELFKMIDTDNSGTITFDELKDGLKRVGSELMESEIKDLMDAADIDKSGTIDYGEFIAATVHLNKLEREENLVSAFSYFDKDGSGYITLDEIQQACKDFGLDDIHIDDMIKEIDQDNDGQIDYGEFAAMMRKGNGGIGRRTMRKTLNLRDALGLVDNGSNQVIEGYFK

SEQ ID NO: 2424 - DNA, 1617 bp, Glycine max
  CDS (1)..(1617)
atgggttgtcaaggtagcaaggagaaaaaatcaaagacagaatttactacttcctatggatcagcagccactggtagtggtggtggtactagttacaacactgttcagcctccgccgccgccaccaccacctactactactgctactactactaatcaggttcaaacatcagcagcacccaaaccacaatcaaaagcttctcctacagtgcagcagaaagcagacacgaggattctggggaaaccctttgacgacataaaaaaatactacagtttagggaaggaattgggaagggggcaattcgggataacgtatctgtgcacggataatgcgagcggtgggacgtacgcgtgcaagtcgatactgaagaggaagctggtgtcgaaggcggacagggaggacatgaagagggagattcagatcatgcagcatttgtcggggcaacccaacattgtcgagtttaagggcgcctacgaggacaggttttccgtccaccttgtcatggaactctgcgccggcggggagctcttcgatcgtatcatcgcccagggtcattactccgagagagccgcttcctctctctgccgctccattgtcaatgttgtccacatttgccacttcatgggtgtcatgcaccgcgatctcaagcctgaaaatttcttgctctctagcaaggacgaccacgccactctcaaggccactgattttggtctctctgtcttcattgaacaagggaaggtttaccatgatatggttggcagtgcttactatgttgctcctgaggtattgcgtcgtagttatggaaaggaaatagatatttggagtgcaggcatcatattgtatattcttctgagtggtgtaccacctttttgggctgaaactgaaaagggaatatttaatgccatattggaaggtgaaattgattttgtaagtgaaccatggccatccatatcagacagtgctaaagacctagtcaggaagatgctgacacaggatccaaacaagcggattacttcttctcaagtccttgaacacccatggatgagagaaggtggagatgcatctgataaaccaatcgatagtgcagttctatccagaatgaaacaattcagggcaatgaataagctcaagaagctagcattgaaggttatcgctgaaaatctatcagaagaggagattaaaggtctcaaagcaatgtttgccaacatggacactgacaatagtggcactatcacctatgaagaattaaagactggcttggctcgaatcggatcaaaactgtctgaggctgaagtgaagcaactcatggatgcggctgatgttgacggaaatgggtcgattgactatcttgaattcatttcggctacaatgcataggcacagacttgaacgtgatgaacatctttacaaagcattccagtattttgataaggataacagtgggtatattacaagagatgaattggagattgctatgactcaaaatggaatgggtgatgaagcaacaataaaggaaataatctctgaggtggatgcagataatgatgggagaataaactatgaggaattctgtgcaatgatgagaagtggaatgccacaccagggacagcttctttaa

SEQ ID NO: 2425 - protein, 538 aa, Glycine max
MGCQGSKEKKSKTEFTTSYGSAATGSGGGTSYNTVQPPPPPPPPTTTATTTNQVQTSAAPKPQSKASPTVQQKADTRILGKPFDDIKKYYSLGKELGRGQFGITYLCTDNASGGTYACKSILKRKLVSKADREDMKREIQIMQHLSGQPNIVEFKGAYEDRFSVHLVMELCAGGELFDRIIAQGHYSERAASSLCRSIVNVVHICHFMGVMHRDLKPENFLLSSKDDHATLKATDFGLSVFIEQGKVYHDMVGSAYYVAPEVLRRSYGKEIDIWSAGIILYILLSGVPPFWAETEKGIFNAILEGEIDFVSEPWPSISDSAKDLVRKMLTQDPNKRITSSQVLEHPWMREGGDASDKPIDSAVLSRMKQFRAMNKLKKLALKVIAENLSEEEIKGLKAMFANMDTDNSGTITYEELKTGLARIGSKLSEAEVKQLMDAADVDGNGSIDYLEFISATMHRHRLERDEHLYKAFQYFDKDNSGYITRDELEIAMTQNGMGDEATIKEIISEVDADNDGRINYEEFCAMMRSGMPHQGQLL

SEQ ID NO: 2426 - DNA, 1620 bp, Glycine max
  CDS (1)..(1620)
atggggaactgcaacgcctgcgttcgagtcgatgacgtggcagactcaaaccgcggcaaaaagaataagaaaaccaaaccgaacccctacgcggaggaagagatacgctccggcgttccgatccgtgtgctgaaggacgtgacgtcacggagcctcatcggcgacaagtacgtgataggccgggagctaggtcgtggcgagttcgggataacgtacctctgcacggaccgcgaaacgaagcaggagctcgcgtgcaagtcgatctcgaagcggaagctgagaaccgcgatcgacgtggaggacgtgcggcgagaggtggcgatcatgtcgacgctgccggagcacgctaacgtggtgaagctgaaggcgacttacgaggacgaagagaacgttcatctcgttatggagctctgcgccggcggggagctcttcgaccggatcgtcgcgcgggggcactacagcgagcgtgccgccgcgaacgtggcgaggaccattgctgaggttgttaggatgtgtcacgccaatggtgttatgcatcgagaccttaaacctgagaattttctctttgcgaataagaaggagaattctgttctcaaggctattgactttggactctccgtgtttttcaagccaggggagaggttttcggagattgtggggagtccttactacatggcgccggaggtattgaaaaggaattatgggccagaggtggatgtgtggagtgctggggtgattctttatattttgttgtgtggagttcctccgttttgggcagaggacgaacgaggggtggctttggcaatattgaggggagtgatgaacttcaagagagaaccgtggcctcagatttcagatagtgctaagagtcttgtgcgccagatgttggagcatgatcctaagaagcgcttgacggctgaacaggtgcttgagcattcctggttacaaaatgcaaagaaagcttcaaatgttccattaggagatattgtgagaacaaggcttaggcaattctctttgatgaatagattaaaaaagagagcacttcgggtaattgcagagcatttgtctgttgaagaggtagaaataatcaaagacatgtttacattgatggacacaaacaaagatggcaaagtaacatatgaggagctgaaggttgggttacggaaggttggttcacaattggctgagccagagataaagatgctgatggaagtggctgatgttgatgggaatggagtacttgactatggagagtttgtagccgtgacaattcacttgcaaagaatggagaatgatgagcatttccgcaaagcattcatgtattttgacaaagatgggagtgggtatatcgagttaggggagctagagaaagcattaacagatgagtcgggagatactgatactgctgtattgaatgacatcatgcgtgaagttgacactgacaaggatggtcgcatcagttatgaagagtttgtggccatgatgaaaactggaactgactggagaaaagcatcaaggcagtattcaagggagagattcaagagcttgagcataaatttgatgaaggatggctcacttcagcttcatgacgatattagtggtcaagctgaagtggtttga

SEQ ID NO: 2427 - protein, 539 aa, Glycine max
MGNCNACVRVDDVADSNRGKKNKKTKPNPYAEEEIRSGVPIRVLKDVTSRSLIGDKYVIGRELGRGEFGITYLCTDRETKQELACKSISKRKLRTAIDVEDVRREVAIMSTLPEHANVVKLKATYEDEENVHLVMELCAGGELFDRIVARGHYSERAAANVARTIAEVVRMCHANGVMHRDLKPENFLFANKKENSVLKAIDFGLSVFFKPGERFSEIVGSPYYMAPEVLKRNYGPEVDVWSAGVILYILLCGVPPFWAEDERGVALAILRGVMNFKREPWPQISDSAKSLVRQMLEHDPKKRLTAEQVLEHSWLQNAKKASNVPLGDIVRTRLRQFSLMNRLKKRALRVIAEHLSVEEVEIIKDMFTLMDTNKDGKVTYEELKVGLRKVGSQLAEPEIKMLMEVADVDGNGVLDYGEFVAVTIHLQRMENDEHFRKAFMYFDKDGSGYIELGELEKALTDESGDTDTAVLNDIMREVDTDKDGRISYEEFVAMMKTGTDWRKASRQYSRERFKSLSINLMKDGSLQLHDDISGQAEVV

SEQ ID NO: 2428 - DNA, 1524 bp, Glycine max
  CDS (1)..(1524)
atggcggcgaaatctagttcgagttcgacaacaaacgtggtgactctgaaggcggcgtgggttctcccgcagcgcacgcagaacatccgtgaggtgtacgaggtggggcggaagttggggcagggtcaattcgggactaccttcgagtgcacgcgccgcgcgtccggggggaaattcgcgtgcaagtcaattcccaagcggaagctgctgtgcaaggaggactacgaggacgtgtggcgggagattcagataatgcaccacttgtcggagcacgcgcacgttgtccgcatcgaagggacgtacgaggattcctcggcggtgcacctcgtcatggagttgtgtgagggtggggagttgtttgacaggatcgtgcagaagggacactacagcgagagacaggcggcgaggttgataaagacgattgttgaggttgttgaagcgtgtcactcgcttggggtcatgcatagggacctcaagcctgagaacttcctctttgatactgttgatgaggatgctaagcttaaggccactgatttcggcttgtctgttttttacaagcctggtgaatccttttgtgatgttgtcgggagcccatactatgttgcaccagaggtcttgcgcaagcactatggacctgaatcagacgtgtggagtgctggggttattctgtacatcttattaagtggggtgccaccattttgggctgaatctgaaccagggatcttccgacagattttactaggaaaacttgattttcaatctgagccttggcctagcatttcagacagtgccaaggatctaattcggaaaatgcttgatcaaaatccaaaaacaaggcttacagcacatgaagtactccgccacccatggattgttgatgacaacattgcacctgataaacctcttgattctgcagttttatcacgtctgaaacaattctctgcaatgaataaattgaaaaagatggcattgcgtgttattgcggagaggctatctgaagaagaaattggtggactgaaagagttattcaagatgattgacacagacaacagtggaaccataacgtttgatgagttaaaagatggcttgaagcgagtaggatctgaacttatggagtctgaaatcaaggatcttatggatgctgcggatattgataaaagtgggacaattgattatggtgaattcattgctgccactgtccatttaaataagctggagagagaggaaaacctagtgtcggccttctcctattttgacaaagatggcagtggttacataacccttgatgagatacaacaagcttgtaaggactttggtttagatgatatccatattgacgacatgatcaaggaaattgatcaagataacgatgggcaaatagattatggggaatttgctgccatgatgagaaaaggcaatggaggaattgggaggcgaactatgagaaaaacactaaatttaagagatgctcttggattagtagacaatgggtccaatcaagttattgagggctactttaagtaa

SEQ ID NO: 2429 - protein, 507 aa, Glycine max
MAAKSSSSSTTNVVTLKAAWVLPQRTQNIREVYEVGRKLGQGQFGTTFECTRRASGGKFACKSIPKRKLLCKEDYEDVWREIQIMHHLSEHAHVVRIEGTYEDSSAVHLVMELCEGGELFDRIVQKGHYSERQAARLIKTIVEVVEACHSLGVMHRDLKPENFLFDTVDEDAKLKATDFGLSVFYKPGESFCDVVGSPYYVAPEVLRKHYGPESDVWSAGVILYILLSGVPPFWAESEPGIFRQILLGKLDFQSEPWPSISDSAKDLIRKMLDQNPKTRLTAHEVLRHPWIVDDNIAPDKPLDSAVLSRLKQFSAMNKLKKMALRVIAERLSEEEIGGLKELFKMIDTDNSGTITFDELKDGLKRVGSELMESEIKDLMDAADIDKSGTIDYGEFIAATVHLNKLEREENLVSAFSYFDKDGSGYITLDEIQQACKDFGLDDIHIDDMIKEIDQDNDGQIDYGEFAAMMRKGNGGIGRRTMRKTLNLRDALGLVDNGSNQVIEGYFK

SEQ ID NO: 2430 - DNA, 1587 bp, Glycine max
  CDS (1)..(1587)
atgggttgttgtatgagtaaaaaagggtcagagccagaagaacacattgtttacagacatgttgctggtgctgggggtgctggtgtgtacaataatcacaagagccatgaacccccttctcatcaaccttacccattacctgagaagcatgccccttggaggcctccaccaagcccaaaacatgttcacaagcatgacacaatcactgggaagccatttgaggatgttaaacagcactacacacttgggaaggaattggggagaggccaatttggggtgacttatctctgcactgagaattcaactgggttgcagtatgcctgcaagtccatttcaaggaggaagcttgtgagcagagctgacaaggaggacatgaagagggagattcaaatcatgcagcatttgagtggacagtccaacattgtggagttcaaaggcgcttttgaggataaacaatcagttcatgtggttatggagctgtgtgctggtggtgaactttttgacaggattattgccaagggccactacagtgaaagggctgctgcttcaatatgtaggcaggttgttaaggttgttaacacctgccattttatgggtgtcattcatagggatctcaagccagagaatttcttgctatctagtaaggatgacaagggacttctcaaggccacggattttggcttgtcagtcttcattgaagaaggaaaggtgtatcgagatatagttggcagtgcttactatgttgctccagaagttctacgtcgtagctatgggaaggaagcagatatatggagtgcaggagttatattgtatatcttacttagcggtgtaccaccattttgggcagagacggaaaagggaatatttgatgccatattgcaaggtcatattgattttgaaagtagtccatggccaagcatatcaaacagtgctaaagaccttgttcgcaaaatgcttataaaggatccaaagaaacgcattactgcttctcaggttctagagcacccatggcttaaagaaggtggaaatgcttctgacaagccaatagacagtgcagtgctttccagaatgaagcaattcagagcaatgaataaactaaaaaaactagccctcaaggtcattgctgaaaatctttctgaagaagagatccaaggtttgaaggcaatgttcacaaatattgacactgacaatagtggtacaatcacctatgaggaactgagggcaggattgcaaagacttggctcaaagcttactgaaactgaagtgcgacagcttatggatgctgctgatgtagatggaaatggcacaattgactacatagaattcatcactgctacaatgcatagacacaggttagaaagagatgagcaccttcacaaggccttccaatattttgacaaagatggcagcgggtatatcacaagagatgaactagaaacagccatgaaggagtatggtatgggcaacgaggccacaatcagggaaattatatctgaagttgacacagataatgatggtagaatcaactatgatgaattttgtacaatgatgaggagtggaacccaacaacaaggcaagctattctaa

SEQ ID NO: 2431 - protein, 528 aa, Glycine max
MGCCMSKKGSEPEEHIVYRHVAGAGGAGVYNNHKSHEPPSHQPYPLPEKHAPWRPPPSPKHVHKHDTITGKPFEDVKQHYTLGKELGRGQFGVTYLCTENSTGLQYACKSISRRKLVSRADKEDMKREIQIMQHLSGQSNIVEFKGAFEDKQSVHVVMELCAGGELFDRIIAKGHYSERAAASICRQVVKVVNTCHFMGVIHRDLKPENFLLSSKDDKGLLKATDFGLSVFIEEGKVYRDIVGSAYYVAPEVLRRSYGKEADIWSAGVILYILLSGVPPFWAETEKGIFDAILQGHIDFESSPWPSISNSAKDLVRKMLIKDPKKRITASQVLEHPWLKEGGNASDKPIDSAVLSRMKQFRAMNKLKKLALKVIAENLSEEEIQGLKAMFTNIDTDNSGTITYEELRAGLQRLGSKLTETEVRQLMDAADVDGNGTIDYIEFITATMHRHRLERDEHLHKAFQYFDKDGSGYITRDELETAMKEYGMGNEATIREIISEVDTDNDGRINYDEFCTMMRSGTQQQGKLF

SEQ ID NO: 2432 - DNA, 1779 bp, Zea mays
  CDS (1)..(1779)
atgggcctctgcctgggcaagtcggcagcggtccaggagccggcggtggcggaagacaacagcgtagccgatggcgcggcggcgggccgcggcgatgggccgcccgtgaaggcgcctcggacgcccaagcagcccaagttctccttctacctgccgagcccgctccagccctccagctacaagggctcgccggccaactccagcgccgcgtccacgccggcgcgcggcgggttcaagcgcccattcccgccgccgtcgcctgccaagcacatccgtgcgctgctggcgcggcgccacggctcggtcaagcctaacgaggcgtccatccccgaaggcggcgagctggacctggggctggacaagagcttcggctactccaggcacttcgcggccaagtacgaccttggccgggaggtggggcgcggccactttggcttcacctgcgctgccaagtgcaagaagggcgagctcaagggggaggacgtcgccgtcaaggtccttcccaaggccaagatgactactgctattgccattgaagatgtcagacgagaagtcagaatattgagttctttggcaggccacattaacctagtgcaattttatgatgcttttgaggatgaagaaaatgtatatgttgttatggaattatgcaaaggaggtgaactgctggacagaattttggctagaggtggcaaatattctgagggcgatgctaaggttattattcaccaaattctaagtgttgcttcattttgccatcttcagggtgttgttcaccgggatctgaaaccagagaattttcttttcatgtcaaaggatgagaattctgccttgaaagtcatagactttggtttatctgactttgttaaaccagacggcagacttaatgacattgttggaagtgcatattatgttgctcctgaagttctccatcgatcttatggcactgaggcagatatgtggagcattggagtaattgcatatattttgctttgtggaagccgccctttctgggcaagaaccgagtcaggaatttttagagctgtcctaaaagcagatcctagttttgatgaaatcccatggcctaccctttctgctgaagcgaaagacttcgtaaggaggctgctcaataaggattaccgcaagcggatgactgctgcacaagccctctgtcatccatggatccgtggtacacaggaagttaagatttatctagacatgataatctacaggcttatgagggcttacataagttcatcttctctacggaagtctgctttgagggctcttgcaaaggcactgacgacagatcaactcttctacctaagagagcagtttacattgttagatccaaacaagagtggccatatatccttgcaaaatatgaaggcggccttgatgaaaaattcctcgggtgcaatgaacgattctagggttcttgactttgttaactcaatatgcaatatccaatatggaaatattgattttgaagagttttctgctgcggccattagtgtatatcaaatggaaggcctggagacatggcaacaacatgctcaacaagcatatgaattgtttgacagggagggcaaccgcccgattgtgatcgaagaacttgcatcggaactcggacttggcccttcggttccacttcatgttgttctccaagactggatcagacattcagacggaaacctcagtttcctcggcttcataaaactattgcatggagtttcttcacgcacattccctaaagtccaagataaccgtttgcattga

SEQ ID NO: 2433 - protein, 592 aa, Zea mays
MGLCLGKSAAVQEPAVAEDNSVADGAAAGRGDGPPVKAPRTPKQPKFSFYLPSPLQPSSYKGSPANSSAASTPARGGFKRPFPPPSPAKHIRALLARRHGSVKPNEASIPEGGELDLGLDKSFGYSRHFAAKYDLGREVGRGHFGFTCAAKCKKGELKGEDVAVKVLPKAKMTTAIAIEDVRREVRILSSLAGHINLVQFYDAFEDEENVYVVMELCKGGELLDRILARGGKYSEGDAKVIIHQILSVASFCHLQGVVHRDLKPENFLFMSKDENSALKVIDFGLSDFVKPDGRLNDIVGSAYYVAPEVLHRSYGTEADMWSIGVIAYILLCGSRPFWARTESGIFRAVLKADPSFDEIPWPTLSAEAKDFVRRLLNKDYRKRMTAAQALCHPWIRGTQEVKIYLDMIIYRLMRAYISSSSLRKSALRALAKALTTDQLFYLREQFTLLDPNKSGHISLQNMKAALMKNSSGAMNDSRVLDFVNSICNIQYGNIDFEEFSAAAISVYQMEGLETWQQHAQQAYELFDREGNRPIVIEELASELGLGPSVPLHVVLQDWIRHSDGNLSFLGFIKLLHGVSSRTFPKVQDNRLH

SEQ ID NO: 2434 - DNA, 1614 bp, Zea mays
  CDS (1)..(1614)
atgggcaactgcttcaccaggaaatacgacgagcacgagcacgagataccaatcaccacggacccgccgcggcggacgtcgatgccggtgtaccggccgccccggccccgcgatgacaaggcgcaggaggtgccgctatactcgggctcggaccgccggccgtcctaccgtccgccgcggcttccggtcttcccgtcgggcccgggatcgacgggccggcggcggccgcccaccggccagacgggcacggtcctggaccggcacacggtggacgtgcggacgctgttccacctggagcggaagctggggagcgggcagttcggcaccacgtacctgtgcacggagcgcgcgacggggaagaagtacgcgtgcaagtcggtgtccaagcgcaagctggtgcggcgcgccgacatcgcggacatgcgccgggagatcaccatcctgcagcacctcagcggccagcccaacgtggcggagttcaagggcgcgttcgaggaccgcgacgacgtgcacgtcgtcatggagctctgctccggcggcgagctcttcgaccgcatcaccgccaaggggagctactccgagcgccaggccgccgccgtgtgccgcgacgtcctcaccgtcgtcaacgtctgccacttcatgggggtcatgcaccgcgacctcaagcccgagaacttcctgctcgccagccccgccgacgacgcgccgctcaaggccatcgacttcggcctgtccgtcttcatcgaagaaggcaaagtttacaaggacgtggtggggagcgcgtactacgtggcgcccgaggtgttgcgccggaactacggcagggagatcgacgtctggagtgctggcgtgatcctatacatccttctatgcgggtcgccgcctttctgggaagaaacgcagaaaggcatatttgacgcaatattggccgacgagctcgatctggtctcctccccgtggccctccatatctgaaagcgcgaaggatctcattagaaaaatgctgaacaaggaccctcagaggcgcattacggcttcacaggccctagaacatccatggctcaaaggtggtgcacctgacaggcctatcgacagcgcggtcctgtcaagaatgaagcagttcaaggcgatgaacaagctaaagcaacttgcactgaaggtaatcgcagagaacctaacagaggacgagatcaaggggctgaagcagatgttcaacaacatggatacagacaggagcggcacgatcacggtcgaggaactcaaggacgggctggcgaagctcgggtccaagattagcgaagcggaggttcagaagcttatggaagcagttgacgtggacaagagtggcagcattgactacaccgagttcctcactgccatgatgaacaggcataaactggagaaggaggaggatttgttccttgcttttcaacacttcgacaaagacgatagcgggtacataacaagagacgaactggaacaagccatggcggagtatggggtgggtgatgaagcaagcattaaggaagtgctggacgaagttgataaagacaaggatgggagaatcgactacgaagagtttgtagaaatgatgaggaagggaagttatacctga

SEQ ID NO: 2435 - protein, 537 aa, Zea mays
MGNCFTRKYDEHEHEIPITTDPPRRTSMPVYRPPRPRDDKAQEVPLYSGSDRRPSYRPPRLPVFPSGPGSTGRRRPPTGQTGTVLDRHTVDVRTLFHLERKLGSGQFGTTYLCTERATGKKYACKSVSKRKLVRRADIADMRREITILQHLSGQPNVAEFKGAFEDRDDVHVVMELCSGGELFDRITAKGSYSERQAAAVCRDVLTVVNVCHFMGVMHRDLKPENFLLASPADDAPLKAIDFGLSVFIEEGKVYKDVVGSAYYVAPEVLRRNYGREIDVWSAGVILYILLCGSPPFWEETQKGIFDAILADELDLVSSPWPSISESAKDLIRKMLNKDPQRRITASQALEHPWLKGGAPDRPIDSAVLSRMKQFKAMNKLKQLALKVIAENLTEDEIKGLKQMFNNMDTDRSGTITVEELKDGLAKLGSKISEAEVQKLMEAVDVDKSGSIDYTEFLTAMMNRHKLEKEEDLFLAFQHFDKDDSGYITRDELEQAMAEYGVGDEASIKEVLDEVDKDKDGRIDYEEFVEMMRKGSYT

SEQ ID NO: 2436 - DNA, 1542 bp, Triticum aestivum
  CDS (1)..(1542)
atgcagccggacgcgagcggcaacgctggcggcggcgcgaatccgaggccgaagctgccgccggtggccgccgcgccggcgccgtccgggcggccggcgtccgtgctgccgcacaagacggccaacgtgcgggaccactaccgcatcgggaagaagctggggcaggggcagttcggcaccacctacctgtgcgtggccaaggaggacggcggcgagttcgcgtgcaagtccatccccaagcgcaagctgctgtgccgcgaggactacgaggacgtctggcgcgagatccagatcatgcaccacctctccgagcaccccaacgtcgtccgcatccgtggcgcctacgaggacgcgctcttcgtgcacattgtcatggagctctgcgccggcggggagctcttcgaccgcatcgtggccaaggggcactacaccgagcgtgctgcagcgcagctcatcaggacgatcgttggggtcgtagaggcatgccactcgctcggcgtcatgcaccgggatctcaagccggagaacttcctgtttgccagcactgccgaggacgccccgctcaagaccaccgattttgggctatccatgttctacaagcccggtgacaaattctctgatgttgttgggagcccctactatgttgcacctgaggtgcttcagaaatgctatggtccagaagctgatgtctggagtgctggggtgattctgtacattttgctatgtggcgtcccccctttctgggcagaaactgaagcaggaatcttcagacagatccttcgaggcaaacttgattttgagtctgagccctggcctagtatctctgacagcgctaaagatctagtccgtactatgctttgcagggatcctacaaagcgactctctgctcatgaggttctctgtcacccatggattgttgatgattctgtggcgcctgataagcctatagattctgctgttctgtcaagactgaagcatttttctgcaatgaacaagctcaagaagatggcattgagggttattgctgaaagcctatctgaggaagagattggaggtctaagggagctgttcaaaatgattgatgccgacaatagtggaactataacatttgatgagctgaaagatggcttgaaaagggtgggctcagagctaaccgaacatgaaatccaggctttaatggatgcggcggacatcgacaacagcggaacgattgattatggtgaattcatcgcagctacattgcacatgaacaaactagagagggaggagaacttggtgtcagcattctcgttttttgacaaggatggaagtggatttatcaccatcgatgagctatcacaagcatgccgtcaatttggcctggatgacgttcaccttgaggatatgatcaaagatgtcgatcagaacaatgatgggcaaatcgattacagtgagttcacagcgatgatgagaaagggcaatgcgggtgcaacagggaggcgaaccatgaggaacagcttgaatctgaatctcggtgacatcttgaatcccagcaacagctaa

SEQ ID NO: 2437 - protein, 513 aa, Triticum aestivum
MQPDASGNAGGGANPRPKLPPVAAAPAPSGRPASVLPHKTANVRDHYRIGKKLGQGQFGTTYLCVAKEDGGEFACKSIPKRKLLCREDYEDVWREIQIMHHLSEHPNVVRIRGAYEDALFVHIVMELCAGGELFDRIVAKGHYTERAAAQLIRTIVGVVEACHSLGVMHRDLKPENFLFASTAEDAPLKTTDFGLSMFYKPGDKFSDVVGSPYYVAPEVLQKCYGPEADVWSAGVILYILLCGVPPFWAETEAGIFRQILRGKLDFESEPWPSISDSAKDLVRTMLCRDPTKRLSAHEVLCHPWIVDDSVAPDKPIDSAVLSRLKHFSAMNKLKKMALRVIAESLSEEEIGGLRELFKMIDADNSGTITFDELKDGLKRVGSELTEHEIQALMDAADIDNSGTIDYGEFIAATLHMNKLEREENLVSAFSFFDKDGSGFITIDELSQACRQFGLDDVHLEDMIKDVDQNNDGQIDYSEFTAMMRKGNAGATGRRTMRNSLNLNLGDILNPSNS

SEQ ID NO: 2438 - DNA, 1671 bp, Zea mays
  CDS (1)..(1671)
atgggcaacgcatgcggcggcgcccttagatccaagtaccagcacagcttcaagcacgccgcgtcgtcgcagcgccgcgcctcctccgagtacagcgccagcgccgtggccgacgactcgcccaggaagcccacgcagccgcccgccaccacggacgcccacgcgccgccaccgccgcccgccaccgccgcagccgccatgaggcgcggcggggccggcgcgccgccggacctggggtccgtgctcggccaccccacccccaacctccgcgacctctacgcgctcggcaggaagctcgggcaggggcagttcggcaccaccttcctctgcaccgagctcgccacgggggtcgactacgcctgcaagtccatctccaagcgcaagctcatcaccagggaggacgtcgacgacgtgcgccgcgagatccagatcatgcaccacctctccggccacaccaacgtcgtcgccatcaagggcgcctacgaggaccagctctacgtccacatcgtcatggagctctgcgccgggggcgagctcttcgaccggatcatacagcgcggacactacagcgagcgcaaggccgccgcgctcacaaggatcatcgtcggggtcgtcgaggcctgccactcgctcggggtcatgcaccgggacctcaagcccgagaacttcctgctcgccaacagggacgatgacctctcgctcaaggccatcgatttcggtctctctgtcttcttcaagcctggtcaagttttcaccgatgtagttggtagcccatattatgtagctccagaagttctgttgaaaagttatggacccgcagctgatgtatggacagccggtgtcattctttacattctactgagtggtgtgcctccattttgggcagaaacacaacaaggaatatttgatgctgtattgaagggtgccattgattttgattctgatccgtggcctgtcatatctgatagtgcaaaagatcttatcagacgaatgctgaatcctcgctctgccgagcgcttaacagcacatgaagttctatgccatccatggattcgtgatcatggagtagctcctgaccgtccactggatccagctgtcttatctcgcattaagcaattctctgcaatgaataagttgaagaaaatggctttacgagtaatagctgagagcctatcagaagaggaaattgcggggttgaaggaaatgttccagatcatggacactgacaacagtggcgcaatcacttatgatgagctaaaagaaggattgagaaaatatggctccacactaaaggacactgagattcgtgatcttatggaagcagctgatattgacaacagtggaacaattgactacatagaattcattgctgcaactttgcatctcaataagctggagcgtgaggaacatctcgtggcagccttttcatatttcgacaaagatggtagtggctatatcacagtggacgaactacagcaagcttgcaaagagcataacatgccggatgcttttcttgatgatgtcatcaacgaagctgatcaggacaatgatggccgcattgactatggagaatttgttgccatgatgaccaagggcaatatgggagtcggtcgaagaacaatgagaaacagcttgaatatcagcatgagggacgcacctggtgcgttctga

SEQ ID NO: 2439 - protein, 556 aa, Zea mays
MGNACGGALRSKYQHSFKHAASSQRRASSEYSASAVADDSPRKPTQPPATTDAHAPPPPPATAAAAMRRGGAGAPPDLGSVLGHPTPNLRDLYALGRKLGQGQFGTTFLCTELATGVDYACKSISKRKLITREDVDDVRREIQIMHHLSGHTNVVAIKGAYEDQLYVHIVMELCAGGELFDRIIQRGHYSERKAAALTRIIVGVVEACHSLGVMHRDLKPENFLLANRDDDLSLKAIDFGLSVFFKPGQVFTDVVGSPYYVAPEVLLKSYGPAADVWTAGVILYILLSGVPPFWAETQQGIFDAVLKGAIDFDSDPWPVISDSAKDLIRRMLNPRSAERLTAHEVLCHPWIRDHGVAPDRPLDPAVLSRIKQFSAMNKLKKMALRVIAESLSEEEIAGLKEMFQIMDTDNSGAITYDELKEGLRKYGSTLKDTEIRDLMEAADIDNSGTIDYIEFIAATLHLNKLEREEHLVAAFSYFDKDGSGYITVDELQQACKEHNMPDAFLDDVINEADQDNDGRIDYGEFVAMMTKGNMGVGRRTMRNSLNISMRDAPGAF

SEQ ID NO: 2440 - DNA, 1653 bp, Zea mays
  CDS (1)..(1653)
atgggtggctgccactccgccatcgcggccaccaagctgaagattctgcgccgcggaggccggggtgccgctgccgtcctccccgtcaccaaccacgacggcccgtgctgctcctccgaccacggcagcaaggagaagaagaagaaaaagaagggcgccaggaagggcaggaaacgcgcctccatcctgggcgacgccggcaccttcgacccggacttctcgcggcggtaccggctcggcgcggagctcgggcgcggcgagttcggcgtcacgcggcggtgcgaggacgccgccacgggggaggccctggcgtgcaagacgatccggcggaagcggctgctcctgcgcctcgccgggcccgacgcgaccgacgtgcagcgcgaggtggagatcacgcggcgcatgtcggaggtgagcgggggcagggtcgcgtgcctgcgcgaggcgtgcgaggacgacgacggtgtgcacctcgtcatggagctctgcgagggcggcgagctcttcgaccgcatcttcgagcggaagcactactccgagcgcgccgccgccaagctcgcccgcaccatcgtcgaggtcgtgcagctgtgccacgagaacggagtgatgcacagggacctgaagccggagaacttcctgttcgtgaacaagtcggaggagtcacctctcaaggccatcgacttcggcctctccgtgttcttcaagcctggagatcggttcaccgaagtggttggcagcgggtgttacatggctccagaggttctcaagagaagctatgggccagagatagacgtgtggagcgctggtgtcatcctgcacatccttctctgcgggttccctccgttttggggaggctccgatgagaaaattgcacagtcgatactccgtggggtaattaacttacagaaggatccatggcccaaggtctcccagagcgcaaaggatcttgtcacgaggatgcttgacccagatccttgtacacggttgacggcaaagcaagtccttgagcacccttggctcaagaatgctgataaggcttcaaatgtgtcactcggagaggttgttcggtcgaggctgaagcagttgtcgtctatgaacaagcttaagaagaaggcacttggagtcgtcgccatgaatttaccgatggaagagattggcaaattcaaagagatgttccatacaatggacaaaaacaaggacggtagtttgtcacttgaagagctgaaggagggtttccggataaacgatcatcctgttccagaggaagagataaagatgttgttacaagcgggcgatatacatggaactgacacattagattgtgaggaatttgtgacagtcttgcttcacattaaaaagatgagtaatgacgagtatctacctaaagctttcgagttcttcgacaaagacgggaatggttttattgaaatgtccgagttaatggagactctaagtgatggtgaactaaagcctgatgagcaattggttaacgacattattcaagaggttgacaaggataaggatggtcgcatcagttacccagagtttgaattgatgatgaaaagtggatcggactggaggaacgcctctagacgttactcaacagagaatttcagcagcctcagtcaaaaactgtgcaaagatactttatga

SEQ ID NO: 2441 - protein, 550 aa, Zea mays
MGGCHSAIAATKLKILRRGGRGAAAVLPVTNHDGPCCSSDHGSKEKKKKKKGARKGRKRASILGDAGTFDPDFSRRYRLGAELGRGEFGVTRRCEDAATGEALACKTIRRKRLLLRLAGPDATDVQREVEITRRMSEVSGGRVACLREACEDDDGVHLVMELCEGGELFDRIFERKHYSERAAAKLARTIVEVVQLCHENGVMHRDLKPENFLFVNKSEESPLKAIDFGLSVFFKPGDRFTEVVGSGCYMAPEVLKRSYGPEIDVWSAGVILHILLCGFPPFWGGSDEKIAQSILRGVINLQKDPWPKVSQSAKDLVTRMLDPDPCTRLTAKQVLEHPWLKNADKASNVSLGEVVRSRLKQLSSMNKLKKKALGVVAMNLPMEEIGKFKEMFHTMDKNKDGSLSLEELKEGFRINDHPVPEEEIKMLLQAGDIHGTDTLDCEEFVTVLLHIKKMSNDEYLPKAFEFFDKDGNGFIEMSELMETLSDGELKPDEQLVNDIIQEVDKDKDGRISYPEFELMMKSGSDWRNASRRYSTENFSSLSQKLCKDTL

SEQ ID NO: 2442 - DNA, 1596 bp, Zea mays
  CDS (1)..(1596)
atggggcagtgttgcagcagagctacggccccggactctggacggggaggtgccaatggttatggctattctaaccaggcaaagccggcgcaagcacctccgagttacaaccctcctcagcaggcggccgaggtgaggtacacaccatcggcgacgaactcttcggcagtcccacccgtggctgtgccgccgaagccaacggcggacacgattcttggcaagcagtacgaggacgtgcgctctgtctactccctcgggaaggagcttggccggggccagttcggggtgacatacctctgcacagagattgcctctggtaggcagtacgcctgcaagtccatctccaagcgcaagctcgtcagcaaggcagacagggaggacattcgaagggagatccagatcatgcagcacctgtctgggcagccaaacattgttgagttccggggagcatacgaggacaagagcaatgtccatgtggtgatggagctctgcgcaggtggggagctcttcgatcgcatcattgcaaaggggcactacacagaacgtgcggctgctacaatctgcagagcagttgtgaatgttgtcaacatttgccacttcatgggtgtgatgcatcgtgatctgaaacccgagaacttcttgcttgcgaccaaggaggagaatgcaatgctcaaggccactgattttgggctttctgtcttcattgaagaaggaaagatgtacagggacattgttggaagtgcttactatgttgctcctgaagtccttagacggagctatggaaaagagatagatgtttggagtgcgggtgttattttgtacattcttctcagtggcgtgcctccattttgggctgaaactgaaaaggggatatttgatgctattctgcatgaggagattgactttgaaagtcaaccttggccatcaatttctgagagtgctaaagacttggtgagaaagatgttgacacgagatccaaagaaaagactgacttcagcccaagttcttcaacatcagtggctcagagaaggtggggaggcatctgataagcctatcgacagtgctgttctttctagaatgaagcaattcagagcaatgaataagctgaaaaagatggccctaaaggttattgcttcaaaccttaacgaggaagagatcaaggggctaaagcaaatgttcatgaacatggacacagacaatagtggcacaatcacatacgaagaactcaaagcaggattagccaaacttggatcaaagctgtcagaagctgaagtaaagcagttgatggaggctgctgatgttgatgggaatggatctattgactatgttgagttcatcactgccacaatgcatagacacaagctcgaaagggacgagcatttgttcaaggcattccagtactttgacaaagataacagcggcttcatcacaagggatgaactggaatctgctttgattgagcatgagatgggcgacacgagtacaataaaggagatcatatcagaagttgacacagataatgatgggaggattaactatgaggagttttgtgcaatgatgagaggagggatgcagcagccaatgaggctcaagtag

SEQ ID NO: 2443 - protein, 531 aa, Zea mays
MGQCCSRATAPDSGRGGANGYGYSNQAKPAQAPPSYNPPQQAAEVRYTPSATNSSAVPPVAVPPKPTADTILGKQYEDVRSVYSLGKELGRGQFGVTYLCTEIASGRQYACKSISKRKLVSKADREDIRREIQIMQHLSGQPNIVEFRGAYEDKSNVHVVMELCAGGELFDRIIAKGHYTERAAATICRAVVNVVNICHFMGVMHRDLKPENFLLATKEENAMLKATDFGLSVFIEEGKMYRDIVGSAYYVAPEVLRRSYGKEIDVWSAGVILYILLSGVPPFWAETEKGIFDAILHEEIDFESQPWPSISESAKDLVRKMLTRDPKKRLTSAQVLQHQWLREGGEASDKPIDSAVLSRMKQFRAMNKLKKMALKVIASNLNEEEIKGLKQMFMNMDTDNSGTITYEELKAGLAKLGSKLSEAEVKQLMEAADVDGNGSIDYVEFITATMHRHKLERDEHLFKAFQYFDKDNSGFITRDELESALIEHEMGDTSTIKEIISEVDTDNDGRINYEEFCAMMRGGMQQPMRLK

SEQ ID NO: 2444 - DNA, 1614 bp, Zea mays
  CDS (1)..(1614)
atgggcaactgctgccgctcgccggccgccgtcgcgcgggaggacgtcagctcctcgcacttccccgcatccaacgcgaagaagaagccgcaccaagcgcggaacggcggcgccggcggcgggcagaagcggctctcggttctgggcgacgaggggtgcgaggtcgtcgggatcgacgacaagtacgtcctggacagggagctcggccgcggggagttcggggtcacgtacctgtgtatggatcgggacaccaaggagctgctcgcctgcaagtccatctccaagcgcaagctgcggacggccgtcgacgtggaggacgtgcgccgggaggtggccatcatgcgccacctgcccaagagccccagcgtcgtgtccctgcgggaggcgtgcgaggacgacggcgccgtccacctcgtcatggagctctgcgagggcggcgagctcttcgaccgcatcgtcgcgcggggccactacaccgagcgcgccgccgccagtgtcacccgcaccatcctcgaggtcgtccagctctgccaccgccacggcgtcatccaccgcgacctcaagccggagaacttcctcttcgccaataagaaggagaactcgccgctcaaggccatcgacttcggtctctccatcttcttcaagcctggtgaaaagttttcagaaattgtgggaagcccctattacatggctcctgaagtattgaagagaaactatgggccagaaatagacatatggagtgcgggagttatcctgtatattttattatgtggagtccctccattttgggctgagactgaacaaggggtggcgcaggctattcttcgtggaaatatcgattttaagcgggaaccctggcctaatgtttcggaaaatgcaaaagatttagttcgacacatgttggagcctgatccaaagctcaggctaactgcaaagcaggttcttgaacatcattggcttcaaaatgcaaagaaggctcctaatgtccctcttggagatattgtaaagtcaaggctcaaacaattttctaggatgaatagattcaaaagaagggctctaagggtcattgctgatcatttgtctgctgaggaagttgaggatataaaggatatgttcaagactatggatactgacaatgatggaattgtatcttatgaagaactgaagactggaatagcaaaacttggttctcatcttgcggaatcagaagtacagatgctcattgaagctgtggacacaaacgggaggggggcactagactacggggaatttctggccgtctcgctccacctgcagaggatggcgaacgacgagcatctccggcgggccttcctgttcttcgacaaggacggcaacggtttcatcgagcccgaggagcttcgagaggctctggtggacgacggggcggccgacagcatggaggaagtggtgaacgacatactgcaagaagtcgacaccgacaaggacggcaagatcagctacgaggagtttgtggcgatgatgaagaccggcacggactggagaaaggcgtcccggcactactcgagagggaggttcaacagcctcagcatgaagcttataaaggacgggtcggtaaagctgggtgtcgagtga

SEQ ID NO: 2445 - protein, 537 aa, Zea mays
MGNCCRSPAAVAREDVSSSHFPASNAKKKPHQARNGGAGGGQKRLSVLGDEGCEVVGIDDKYVLDRELGRGEFGVTYLCMDRDTKELLACKSISKRKLRTAVDVEDVRREVAIMRHLPKSPSVVSLREACEDDGAVHLVMELCEGGELFDRIVARGHYTERAAASVTRTILEVVQLCHRHGVIHRDLKPENFLFANKKENSPLKAIDFGLSIFFKPGEKFSEIVGSPYYMAPEVLKRNYGPEIDIWSAGVILYILLCGVPPFWAETEQGVAQAILRGNIDFKREPWPNVSENAKDLVRHMLEPDPKLRLTAKQVLEHHWLQNAKKAPNVPLGDIVKSRLKQFSRMNRFKRRALRVIADHLSAEEVEDIKDMFKTMDTDNDGIVSYEELKTGIAKLGSHLAESEVQMLIEAVDTNGRGALDYGEFLAVSLHLQRMANDEHLRRAFLFFDKDGNGFIEPEELREALVDDGAADSMEEVVNDILQEVDTDKDGKISYEEFVAMMKTGTDWRKASRHYSRGRFNSLSMKLIKDGSVKLGVE

SEQ ID NO: 2446 - DNA, 1593 bp, Zea mays
  CDS (1)..(1593)
atgggcaaccgtgcgtcgcgccaccaccgccaagccgccgagcagcaaccggcgacgccgaccctgccgaagccccagccccagatccagccgccgcctccgcctccgccgacgcagacgcagcagtaccagcaggcgccgccgcagtcgcagcagaagccgaagccggcggcggacgtgggggcggtggggcgcgtgctggggcggcccatggaggacgtgcgcgcgacctacactttcggccgcgagctcgggcggggccagttcggggtcacctacctcgtcacgcactcggagaccgggcagcgcttcgcctgcaagtccatcgccacgcggaagctcgtccaccgcgacgacattgaggacgtgcgccgggaggtgcagatcatgcaccacctcacgggccaccgcaacatcgtcgagctccggggagcatacgaggacaggcactcggtcaaccttgttatggagctctgcgagggcggggagctcttcgaccgcatcatagccaagggccactacaccgagcgagccgccgcctcgctctgccgcgagatcgtcgccgtcgtccacagctgccactccatgggggtcttccatcgggatctcaagcccgagaacttcctgttcctcaataacaaggaggactccccgctcaaggccacggacttcggtctctccgtcttcttcaagcacggggagacgtttaaggatcttgtgggaagtgcatattatgttgctcctgaggtactgaaacggaaatatggggcagaggctgacatatggagtgctggggtcattctttacatccttctgtctggtgttcctcctttttgggcagagaatgaggatggcatatttgatgctgtcttgcgcggtcacatcgatttctcttctgacccttggccttcaatatccaatggtgcaaaggatttggttaagaagatgctgcgacaagacccaaaagaacgcctgactgctgctgaaattttgaaccacccatggattagagaggatggagaggccccagataagccacttgacattactgtcattggtagaatgaaacagttcagggcaatgaacaagctcaagaaagttgcattgaaggttgtggctgagaacttatcagatgaagagattatgggcctaaaagaaatgttcagatccctggatacagataacagtgggacaattactcttgaagagctaagatctggtttaccaaaacttggtacaaaaatttctgaatcagaaattaaacaattgatggaggcggctgatgttgatggaaatggtaccattgattatgcggagtttatatcagccacaatgcatttgaatagattggagaaggaagaccacatactcaaagcttttgaatatttcgataaggatcacagcggatacataaccgtagatgagttggaagaagctttgaagaagtatgatatgggagatgacaaaactataaaagaaatcattgctgaagtagatacagatcatgatggaagaattaattaccaggagtttgttgccatgatgaggaacaacagccctgagattgttccaaatcggaggcgcatgttctaa

SEQ ID NO: 2447 - protein, 530 aa, Zea mays
MGNRASRHHRQAAEQQPATPTLPKPQPQIQPPPPPPPTQTQQYQQAPPQSQQKPKPAADVGAVGRVLGRPMEDVRATYTFGRELGRGQFGVTYLVTHSETGQRFACKSIATRKLVHRDDIEDVRREVQIMHHLTGHRNIVELRGAYEDRHSVNLVMELCEGGELFDRIIAKGHYTERAAASLCREIVAVVHSCHSMGVFHRDLKPENFLFLNNKEDSPLKATDFGLSVFFKHGETFKDLVGSAYYVAPEVLKRKYGAEADIWSAGVILYILLSGVPPFWAENEDGIFDAVLRGHIDFSSDPWPSISNGAKDLVKKMLRQDPKERLTAAEILNHPWIREDGEAPDKPLDITVIGRMKQFRAMNKLKKVALKVVAENLSDEEIMGLKEMFRSLDTDNSGTITLEELRSGLPKLGTKISESEIKQLMEAADVDGNGTIDYAEFISATMHLNRLEKEDHILKAFEYFDKDHSGYITVDELEEALKKYDMGDDKTIKEIIAEVDTDHDGRINYQEFVAMMRNNSPEIVPNRRRMF

SEQ ID NO: 2448 - DNA, 1539 bp, Zea mays
  CDS (1)..(1539)
atgggcctctgctcctcctccaccgccgcccgggccgcctccgaccccggcgccgcagccgcgggtgatgccgccgcggcaaagaaggggcgcgggatcgtcgcgtgcgggaagcggaccgacttcggatacgacaaggatttcgaggtgcgctactcgcttgggaagcttttgggccacggccagttcggctacacctttgccgccgtcgatcgcgcctccaccgagcgcgtcgccgtcaagcgcatcgacaagaataagatggtccttcctgttgctgttgaagacgtaaagagagaagttaaaatcttaaaggcattacaagggcacgaaaatgttgtacacttttacaatgcattcgaagatgacaactatgtttatatagtcatggaattatgtgagggtggcgagctacttgatcggatattagccaagaaagatagtcgttacagcgagaaagatgctgcagtagttgtccgacagatgctcaaggttgcagctgagtgccacctgcatggtttggttcatcgggacatgaaacctgagaacttcctattcaaatcaaaaaaggaggactcgccccttaaggctacagattttggtctttcagacttcataaaaccagggaggcaattccgtgacattgttggaagtgcctactacgtagcaccagaagtactcaaacgcaggtcagggccagaatccgatgtttggagtataggtgttataacctatattttgctgtgtggaagacgaccattctgggacaaaacagaagatgggatatttaaagaggtcttaaaaaagaagccagatttccgccgcaagccttggtcaaacattacttcgagtgcaaaagattttgtacaaaaattactagttaaggatccccgtgcaagactaactgctgcacaggcattatcacatgattgggtgagagaaggaggaaaggcatctgaaatacccttggatatatcagtattacataatatgcgtcagtttgtgaaatacagtcgtttcaagcaatttgctttaagggcattagcatctacattaaactcagaagagatgtctgatcttcgtgatcaattcaatgccattgatgttgacaaaaatggaacgattagtcttgaggaactgaagcaggctcttgcaaaggatgttccatggagattaaagggtccacgtgttttagagatcattgaagcgattgacagtaatacagatgggctagttgattttgaggagtttgttgctgcaacactacacgtgcatcagctggtggaacatgatactgagaagtggaaatcattgtctcaagctgcatttgataaatttgatgttgacagagatggctacatcacacctgatgaacttagaatgcatacaggaatgaagggttctattgatcccctcctggaggaggctgacattgacaaagatggcaagataagcctagatgaatttcgccggctcttgaagactgcaagcatgagcgcacgcaatgtacaaactcctaggggtgttcgcaagtcatag

SEQ ID NO: 2449 - protein, 512 aa, Zea mays
MGLCSSSTAARAASDPGAAAAGDAAAAKKGRGIVACGKRTDFGYDKDFEVRYSLGKLLGHGQFGYTFAAVDRASTERVAVKRIDKNKMVLPVAVEDVKREVKILKALQGHENVVHFYNAFEDDNYVYIVMELCEGGELLDRILAKKDSRYSEKDAAVVVRQMLKVAAECHLHGLVHRDMKPENFLFKSKKEDSPLKATDFGLSDFIKPGRQFRDIVGSAYYVAPEVLKRRSGPESDVWSIGVITYILLCGRRPFWDKTEDGIFKEVLKKKPDFRRKPWSNITSSAKDFVQKLLVKDPRARLTAAQALSHDWVREGGKASEIPLDISVLHNMRQFVKYSRFKQFALRALASTLNSEEMSDLRDQFNAIDVDKNGTISLEELKQALAKDVPWRLKGPRVLEIIEAIDSNTDGLVDFEEFVAATLHVHQLVEHDTEKWKSLSQAAFDKFDVDRDGYITPDELRMHTGMKGSIDPLLEEADIDKDGKISLDEFRRLLKTASMSARNVQTPRGVRKS

SEQ ID NO: 2450 - DNA, 1602 bp, Zea mays
  CDS (1)..(1602)
atggggcagtgttgtagcagagctcccgccccggactctggacggggaggcaccaatggttatggctattctaaccaggcaaagccagcgcaaacaccttcgagttacaaccctcctcagcagccggccgaggtgaggtacacgccgccggcgacgaaccctccggtagtcccacctgtgcctgtgcctgtgccaccgaagcccacggcggacacgattcttggcaaacagtacgaggacgtacgctctgtctactccctcggaaaggagcttggccggggccagttcggggtgacatacctctgcacagaggttgcctctggtaagcagtacgcctgcaagtccatctccaagcgcaagcttaccagcaaggcagacagggaggacattcgaagagagatccagatcatgcagcatctgtctggacagccaaacattgttgagttccggggagcatacgaggacaagagcaatgtccatgtggtgatggagctctgcgcaggtggggagctcttcgatcgcatcattgccaaggggcactacacagagcgtgcagctgctacaatctgcagagcagttgtgaatgttgtcaacatttgccacttcatgggtgtgatgcaccgtgacctgaaaccggagaacttcttgcttgcgagcaaggaggagaatgcaatgctcaaggccactgattttgggctttccgtcttcatcgaagaaggaaagatgtacagggacatcgttggaagtgcttattatgttgcgcctgaagtccttaagcggagctatggaaaagagatagatgtttggagcgcaggtgttattttgtacattcttctcagtggtgtgcctccattttgggctgaaactgaaaaggggatatttgatgctattctgcatgaggagattgactttgaaagtcaaccttggccatcaatttctgagagtgctaaagacttggttagaaagatgttgacacgagatccaaagaaaagactgacttcagctcaagttcttcaacattcatggctcagagaaggtggaggtgcatctgataagcctatcgacagtgctgttctttctagaatgaagcagttcagagcaatgaataagctgaaaaagatggccctaaaggttattgcctcaaaccttaacgaggaagagatcaaggggctaaagcaaatgttcatgaacatggacacagacaatagtggcacaatcacgtatgaagaactcaaagcaggactagccaaacttggatcaaagctgtcggaagctgaagtaaagcagttgatggaggctgctgatgttgatgggaatggatccatcgactatgttgagttcatcactgccacaatgcatagacacaagctcgaaagagacgagtatttgtttaaggcattccagtacttcgataaagataacagcggtttcatcacaagagatgagctggagtctgctttgatcgagcatgagatgggtgacacgagtacaataaaggagatcatatcagaagtggacacagacaatgatgggaggattaactatgaggagttctgcgcaatgatgagaggagggatgcagcagccaatgaggctcaagtag

SEQ ID NO: 2451 - protein, 533 aa, Zea mays
MGQCCSRAPAPDSGRGGTNGYGYSNQAKPAQTPSSYNPPQQPAEVRYTPPATNPPVVPPVPVPVPPKPTADTILGKQYEDVRSVYSLGKELGRGQFGVTYLCTEVASGKQYACKSISKRKLTSKADREDIRREIQIMQHLSGQPNIVEFRGAYEDKSNVHVVMELCAGGELFDRIIAKGHYTERAAATICRAVVNVVNICHFMGVMHRDLKPENFLLASKEENAMLKATDFGLSVFIEEGKMYRDIVGSAYYVAPEVLKRSYGKEIDVWSAGVILYILLSGVPPFWAETEKGIFDAILHEEIDFESQPWPSISESAKDLVRKMLTRDPKKRLTSAQVLQHSWLREGGGASDKPIDSAVLSRMKQFRAMNKLKKMALKVIASNLNEEEIKGLKQMFMNMDTDNSGTITYEELKAGLAKLGSKLSEAEVKQLMEAADVDGNGSIDYVEFITATMHRHKLERDEYLFKAFQYFDKDNSGFITRDELESALIEHEMGDTSTIKEIISEVDTDNDGRINYEEFCAMMRGGMQQPMRLK

SEQ ID NO: 2452 - DNA, 1614 bp, Zea mays
  CDS (1)..(1614)
atgggcaactgctgccgctcgccggccgccgtcgcgcgggaggacgtcagctcctcgcacttccccgcatccaacgcgaagaagaagccgcaccaagcgcgcaacggcggcgccggcggcgggcagaagcggctctcggttctgggcgacgaggggtgcgaggtcgtcgggatcgacgacaagtacgtcctggacagggagctcggccgcggggagttcggggtcacgtacctgtgtatggatcgggacaccaaggagctgctcgcctgcaagtccatctccaagcgcaagctgcggacggccgtcgacgtggaggacgtgcgccgggaggtggccatcatgcgccacctgcccaagagccccagcgtcgtgtccctgcgggaggcgtgcgaggacgacggcgccgtccacctcgtcatggagctctgcgagggcggcgagctcttcgaccgcatcgtcgcgcggggccactacaccgagcgcgccgccgccagtgtcacccgcaccatcctcgaggtcgtccagctctgccaccgccacggcgtcatccaccgcgacctcaagccggagaacttcctcttcgccaataagaaggagaactcgccgctcaaggccatcgacttcggtctctccatcttcttcaagcctggtgaaaagttttcagaaattgtgggaagcccctattacatggctcctgaagtattgaagagaaactatgggccagaaatagacatatggagtgcgggagttatcctgtatattttattatgtggagtccctccattttgggctgagactgaacaaggggtggcgcaggctattcttcgtggaaatatcgattttaagcgggaaccctggcctaatgtttcggaaaatgcaaaagatttagttcgacacatgttggagcctgatccaaagctcaggctaactgcaaagcaggttcttgaacatcattggcttcaaaatgcaaagaaggctcctaatgtccctcttggagatattgtaaagtcaaggctcaaacaattttctaggatgaatagattcaaaagaagggctctaagggtcattgctgatcatttgtctgctgaggaagttgaggatataaaggatatgttcaagactatggatactgacaatgatggaattgtatcttatgaagaactgaagactggaatagcaaaacttggttctcatcttgcggaatcagaagtacagatgctcattgaagctgtggacacaaacgggaggggggcactagactacggggaatttctggccgtctcgctccacctgcagaggatggcgaacgacgagcatctccggcgggccttcctgttcttcgacaaggacggcaacggtttcatcgagcccgaggagcttcgagaggctctggtggacgacggggcggccgacagcatcgaggaagtggtgaacgacatactgcaagaagtcgacaccgacaaggacggcaagatcagctacgaggagtttgtggcgatgatgaagaccggcacggactggagaaaggcgtcccggcactactcgagagggaggttcaacagcctcagcatgaagcttataaaggacgggtcggtaaagctgggtgtcgagtga

SEQ ID NO: 2453 - protein, 537 aa, Zea mays
MGNCCRSPAAVAREDVSSSHFPASNAKKKPHQARNGGAGGGQKRLSVLGDEGCEVVGIDDKYVLDRELGRGEFGVTYLCMDRDTKELLACKSISKRKLRTAVDVEDVRREVAIMRHLPKSPSVVSLREACEDDGAVHLVMELCEGGELFDRIVARGHYTERAAASVTRTILEVVQLCHRHGVIHRDLKPENFLFANKKENSPLKAIDFGLSIFFKPGEKFSEIVGSPYYMAPEVLKRNYGPEIDIWSAGVILYILLCGVPPFWAETEQGVAQAILRGNIDFKREPWPNVSENAKDLVRHMLEPDPKLRLTAKQVLEHHWLQNAKKAPNVPLGDIVKSRLKQFSRMNRFKRRALRVIADHLSAEEVEDIKDMFKTMDTDNDGIVSYEELKTGIAKLGSHLAESEVQMLIEAVDTNGRGALDYGEFLAVSLHLQRMANDEHLRRAFLFFDKDGNGFIEPEELREALVDDGAADSIEEVVNDILQEVDTDKDGKISYEEFVAMMKTGTDWRKASRHYSRGRFNSLSMKLIKDGSVKLGVE

SEQ ID NO: 2454 - DNA, 1590 bp, Zea mays
  CDS (1)..(1590)
atgggcaactgctgcgccgcgccgtcgacggagggaagcggcaagacccgccccaagaagcagaaggagaacccctacaacgtcgcgtacaaccgcggggcggcgccggcgcgcccgggcctggtggtgctgcgggacccgacggggcgggacctcggcgcggagtacgagctgggcggcgagctggggcgcggcgagttcggcgtcacgtacctgtgcacggagcccgccacgggggcgcgctacgcgtgcaagtccatatccaagcgcaagctgcgcacgcccgtggacgtggaggacgtgcgccgggaggtggacatcatgcgccacatgccgccgcaccccaacatcgtcagcctccgcgccgcctacgaggaccgagacgccgtgcacctcgtcatggagctctgcgagggaggggagctcttcgacaggatcgtcgcccgcggacactacaccgagcgcgccgccgccgccgtcatgcgaaccatcgttgaggtcgtccagaagtgccacaggcatggcgtcatgcaccgggatcttaaaccagagaactttttatatgcaagcaaggacagttcccctctaaaagcaattgattttggcctgtctgtgttcttcaggcctggtgagcgatttacggaaattgtaggcagtccatactacatggccccagaggttctgaagcgaaactatggccctgaagttgatgtctggagtgctggagtgatactttacatacttctttgtggtgtaccaccattttgggcagaaaccgaacagggagtagcgcaggcaatcatacgatctgtggtagatttcaaaagagaaccatggcccagagtatctgagcctgctaaagatcttgtcaggcgcatgcttgacccaaatccattgacacggtttactgcagcacaagtacttgagcatccatggctacatgactctaaaaacacgccagacgtttctcttggcgatactgtccgagcaagactgcagcaatttgctgcgatgaacaagttaaagaagaaagcactaagggtgattgccgagcatctgtctgcggaggaagtagctgacataaagcaaatgttcgataagatggacgtgaacaagaacggcaagctaacattcgaggaattcaaggccggcctccgtaagctgggaaaccaaatgcatgattcagaccttcagatactgatggatgctgccgacgtcgacagaaacgggaccttagattacgaggaattcgtcacggtgtctgtccacgtgaggaagataggcaacgacgaacacatccagaaggccttcgcatacttcgaccggaataagagtgggtacatagagatcgaggagcttagagaggcactggctgatgaactggatggcagtgatgaagacatcatcggtggcatcatccgggacgtggacacagataaggacgggaagataggctacgacgagttcgcggcgatgatgaaggccggcactgactggaggaaggcctcccggcagtactcgcggcagcggttcagcaacctgagcctgaagctccagaaggacgggtccctcggcgccgacacacggtag

SEQ ID NO: 2455 - protein, 529 aa, Zea mays
MGNCCAAPSTEGSGKTRPKKQKENPYNVAYNRGAAPARPGLVVLRDPTGRDLGAEYELGGELGRGEFGVTYLCTEPATGARYACKSISKRKLRTPVDVEDVRREVDIMRHMPPHPNIVSLRAAYEDRDAVHLVMELCEGGELFDRIVARGHYTERAAAAVMRTIVEVVQKCHRHGVMHRDLKPENFLYASKDSSPLKAIDFGLSVFFRPGERFTEIVGSPYYMAPEVLKRNYGPEVDVWSAGVILYILLCGVPPFWAETEQGVAQAIIRSVVDFKREPWPRVSEPAKDLVRRMLDPNPLTRFTAAQVLEHPWLHDSKNTPDVSLGDTVRARLQQFAAMNKLKKKALRVIAEHLSAEEVADIKQMFDKMDVNKNGKLTFEEFKAGLRKLGNQMHDSDLQILMDAADVDRNGTLDYEEFVTVSVHVRKIGNDEHIQKAFAYFDRNKSGYIEIEELREALADELDGSDEDIIGGIIRDVDTDKDGKIGYDEFAAMMKAGTDWRKASRQYSRQRFSNLSLKLQKDGSLGADTR

SEQ ID NO: 2456 - DNA, 1824 bp, Zea mays
  CDS (1)..(1824)
atggggcagtgctacgggaaggcaggcggcgcgtcgtcgcggcgggcggaccacgacgacgcggtcgcgccgccgtccccgctgccggccaacggcgcgccgacgccgccgcagcagcccgccacgcccgggcgccgcaagtccggatcggccacgccggtgcaccaccaggcggcgacgaccgcctggcccagcccgtaccccgccggcggggccagcccgctccccgcgggcgtgtcgccgtcgcccgccaggtccacgccccgcaggttcttcaagcggcccttcccgccgccctcgcccgccaagcacatcaaggccacgctcgccaagcgcctcggcgggggcaagcccaaggagggcaccataccggaggagggcggcgccggcgtcgccgccgactccgccgaggccgagcgcccgttggacaagacgttcggcttcgccaacaacttcggggccaagtacgacctcgggaaggaggtcgggaggggacactttggccacacctgctccgccctggtcaagaagggcgagtacaagggccatgccgtagccgtcaagatcatctccaaagctaagatgacgacagccatttccattgaagatgttcgtagggaagtcaagattttgaaagctctatcagggcacaataatctcgtcaaattctatgatgcatgtgaggacgccctcaatgtctacattgtcatggaattatgtgaaggtggagagttgctagatagaattttggctagaggcgggagatatacagaagaagatgccaaagctatcgttgtacagattttgagtgtagtgtccttctgtcatcttcagggagtagttcatcgtgatttgaagccagagaattttcttttcgcaacaagagatgaaagtgctcctatgaagttaattgactttggtctgtctgattttattagaccagatgaaaggctcaatgatattgttgggagcgcatattatgtcgctccagaggttctacacagatcgtacagtatggaagcagacatttggagtataggtgtcataacatacattctgctctgtggcagtcggccattttgggcaaggacagaatctgggatctttcggtccgtattaagggctgatcccaactttgacgattcaccatggccttcagtatcggctgaagctaaggattttgtgaagagatttctgaacaaggattaccgtaaaagaatgactgctgtccaagcactgactcacccttggttacgagatgaacaaaggcaaattccattggacatactcgttttcagattagttaagcaatatcttcgtgctactcctcttaaacgtttggcattaaaggcactatctaaggctttaagggaggatgaactgttgtatcttagattgcagtttaagctgctcgagcccagagacgggctcgtatcgctcgacaactttcggacggctctgacgagatacgtaactgatgctatgagagaatcaagggttcttgagtttttgcacgcgttggacccgcttgcgtacagaaagatggacttggaagaattctgtgcggcagcaatcagcccgtaccagctggaggctttggaaagctgggaagaaatcgctggaacggcttttcagcacttcgaacaggagggcaaccgagttatatctgtggaggagttggcgcaggaactaagcctcgccccgactcactactccatcgtgcaagactggatcagaaagtccgacggcaagcttaactttcttgggttcaccaaatttttgcacggtgtcacgatacggggctcaaacacgagacgacactaa

SEQ ID NO: 2457 - protein, 607 aa, Zea mays
MGQCYGKAGGASSRRADHDDAVAPPSPLPANGAPTPPQQPATPGRRKSGSATPVHHQAATTAWPSPYPAGGASPLPAGVSPSPARSTPRRFFKRPFPPPSPAKHIKATLAKRLGGGKPKEGTIPEEGGAGVAADSAEAERPLDKTFGFANNFGAKYDLGKEVGRGHFGHTCSALVKKGEYKGHAVAVKIISKAKMTTAISIEDVRREVKILKALSGHNNLVKFYDACEDALNVYIVMELCEGGELLDRILARGGRYTEEDAKAIVVQILSVVSFCHLQGVVHRDLKPENFLFATRDESAPMKLIDFGLSDFIRPDERLNDIVGSAYYVAPEVLHRSYSMEADIWSIGVITYILLCGSRPFWARTESGIFRSVLRADPNFDDSPWPSVSAEAKDFVKRFLNKDYRKRMTAVQALTHPWLRDEQRQIPLDILVFRLVKQYLRATPLKRLALKALSKALREDELLYLRLQFKLLEPRDGLVSLDNFRTALTRYVTDAMRESRVLEFLHALDPLAYRKMDLEEFCAAAISPYQLEALESWEEIAGTAFQHFEQEGNRVISVEELAQELSLAPTHYSIVQDWIRKSDGKLNFLGFTKFLHGVTIRGSNTRRH

SEQ ID NO: 2458 - DNA, 1575 bp, Zea mays
  CDS (1)..(1575)
atgggcaaccgtgcgtcgcgccaccaccgccacgccaccgagcagcagccagagacgccgacccttcccaagccccagatccagccgccgccgccgccgacgcagacgcagcagtaccagcaggccccgccgccgccgaagccgaagccggcggcggacgcgagggcggtggggcgcgtgctggggcggcccatggaggacgtcaaggcgacctacaccttcggccgcgagctcgggcggggccagttcggggtcacctacctcgtcacgcaccgggagactgggcagcgcttcgcctgcaagtccatagccacgcggaagctcgtccaccgcgacgacatcgaggacgtgcgccgggaggtgcagatcatgcaccacctcaccggccaccggaacatcgtcgagctccggggagcctacgaggacaggcgctcggtcaacctcgctatggagctctgcgagggcggggagctcttcgaccgcatcattgccaggggccactacaccgagcgcgctgccgccgcgctttgccgggagatcgtcgccgtcgtccacagctgccactccatgggggtcttccaccgggacctcaagcccgagaacttcctgttcctcaataacaaggaggactccccgctcaaggccacggacttcggcctctccgtcttcttcaagcccggggacacgtttaaggatcttgtgggaagtgcatattatgttgctcccgaggtattgaagcggcactatggggcagaggctgacatatggagtgctggggttattctttacatccttttatctggtgttcctcctttttgggcagagaatgaggatggcatatttgatgctgtcttgcacagtcacattgatttctcttctgatccttggccttcaatatctaatggtgcaaaagatttggttaagaagatgctgcgacaagacccaaaagaacgcctgactgctgctgaaattttgaaccacccatggattagagaggatggagaggccccagataagccacttgacattacggtcatcagtagaatgaaacagttcagggcaatgaacaagctcaagaaagttgcattgaaggttgtggcagagaacttatcagatgaagagattatgggcctaaaagaaatgttcagatccctggatactgataacagtgggacaattactcttgaagagctaagatctggtttaccaaaacttggtactaaaatttctgaatcagaaatcaaacagttgatggaggcggctgatgttgatggaaatggtaccattgattacgcggagttcatatcagccacaatgcatttgaatagattggagaaggaagaccgtatactcaaagcttttgaatattttgataaggaccatagcgggtacataacagtagatgagttggaagaagctctgaagaagtatgatatgggagatgataaaacaataaaagagatcattgctgaagtagatacagatcatgatggaagaattaattaccaggagtttgttgccatgatgaggaacaatacccctgagattgttccaaaccggagacgcatgttctaa

SEQ ID NO: 2459 - protein, 524 aa, Zea mays
MGNRASRHHRHATEQQPETPTLPKPQIQPPPPPTQTQQYQQAPPPPKPKPAADARAVGRVLGRPMEDVKATYTFGRELGRGQFGVTYLVTHRETGQRFACKSIATRKLVHRDDIEDVRREVQIMHHLTGHRNIVELRGAYEDRRSVNLAMELCEGGELFDRIIARGHYTERAAAALCREIVAVVHSCHSMGVFHRDLKPENFLFLNNKEDSPLKATDFGLSVFFKPGDTFKDLVGSAYYVAPEVLKRHYGAEADIWSAGVILYILLSGVPPFWAENEDGIFDAVLHSHIDFSSDPWPSISNGAKDLVKKMLRQDPKERLTAAEILNHPWIREDGEAPDKPLDITVISRMKQFRAMNKLKKVALKVVAENLSDEEIMGLKEMFRSLDTDNSGTITLEELRSGLPKLGTKISESEIKQLMEAADVDGNGTIDYAEFISATMHLNRLEKEDRILKAFEYFDKDHSGYITVDELEEALKKYDMGDDKTIKEIIAEVDTDHDGRINYQEFVAMMRNNTPEIVPNRRRMF

SEQ ID NO: 2460 - DNA, 1620 bp, Zea mays
  CDS (1)..(1620)
atgggcaactgctgcgtgacgccgaaagcagccgacgacgccggcggcggcaagaagcccaaggagccgaagcagaagaagggtaagaagccgaaccccttctcgatcgagtacaaccgctcggggcaggcgagcgcgccaaagctggtggtgctgcgggatcccacggggcgggacatcgcggcgcggtacgagctcggcgcggagctcgggcgcggcgagttcggggttacctacctctgcacagaccgcgcctcaggggaggcgctggcctgcaagtccatctccaagaagaagctccgcaccgccgtcgacctcgaggacgtgcgccgggaggtcgagatcatgcgccacctccccaagcaccccaacgtcgtcacgctcagggacacgtacgaggacgacaatgccgtgcacctcgtcatggagctctgcgagggcggtgagctcttcgaccgcatcgtggcgcggggacactacactgagcgtgctgccgccttggtcttacgcactatcgttgaggtcgtgcagatgtgccataagcatggagtgatgcacagggatctcaaaccagaaaatttcttgtttgcaaacaagaaagaatcagcggcacttaaggccattgattttggcctgtctgtatttttcacaccaggcgaacggttttctgagattgttggaagtccttattacatggctccagaggtgctaaagagaaactatggcccagaggttgatgtttggagtgcaggagtgattctgtacattcttctttgtggtgtccccccattctgggcagaaacggaacagggtgttgctcaggcaatcattcgatctgtcattgatttcaaaagagatccatggccaagggtgtctgataacgccaaagaccttgtcagaggaatgctgaatccggacccaaaacgacgattgacagctcaccaagtgcttggtcacccatggttgcagaacattaagaaggctccaaatgtcaatttgggtgaaactgttaaggccagactccaacaattctctgtgatgaacaagttcaagaagcatgcacttagggttatagctgagcatctttcggtagaagaggctgctgacataaaggatatgtttgagaagatggatcttaacaaggatcaaatgcttagtttcgaggagctgaagcttggtctgcataagtttggtcaccaaatgcctgatgcagatgttcaaacactaatggaagcggcggatgctgatggaaatgggtccttgaattatggagaatttgttacattatttgttcatctaagaaagattggaaatgatgagcatctgcataaggcatttgcatacttcgaccggaaccagagtggttatattgaaattgatgaactccgtgagtcattagctgatgaccttggacaaaaccgtgaagagattatcaatgccatcatccgtgatgtagacaccgataaggatggcaagataagctacgatgagtttgcgacgatgatgaaggccggaacagactggaggaaagcatccagacagtactcgagagagcggttcacgagcctgagccttaagctgcaaaaggatggatcgctgcagatgacgagtacacggtag

SEQ ID NO: 2461 - protein, 539 aa, Zea mays
MGNCCVTPKAADDAGGGKKPKEPKQKKGKKPNPFSIEYNRSGQASAPKLVVLRDPTGRDIAARYELGAELGRGEFGVTYLCTDRASGEALACKSISKKKLRTAVDLEDVRREVEIMRHLPKHPNVVTLRDTYEDDNAVHLVMELCEGGELFDRIVARGHYTERAAALVLRTIVEVVQMCHKHGVMHRDLKPENFLFANKKESAALKAIDFGLSVFFTPGERFSEIVGSPYYMAPEVLKRNYGPEVDVWSAGVILYILLCGVPPFWAETEQGVAQAIIRSVIDFKRDPWPRVSDNAKDLVRGMLNPDPKRRLTAHQVLGHPWLQNIKKAPNVNLGETVKARLQQFSVMNKFKKHALRVIAEHLSVEEAADIKDMFEKMDLNKDQMLSFEELKLGLHKFGHQMPDADVQTLMEAADADGNGSLNYGEFVTLFVHLRKIGNDEHLHKAFAYFDRNQSGYIEIDELRESLADDLGQNREEIINAIIRDVDTDKDGKISYDEFATMMKAGTDWRKASRQYSRERFTSLSLKLQKDGSLQMTSTR

SEQ ID NO: 2462 - DNA, 1674 bp, Zea mays
  CDS (1)..(1674)
atgggcaacgcatgcggcggcgcccttagatccaagcaccagcacagcttcaagcacgccgcgtcgtcgcagcgccaccacgcctcctccgagtacagcgccagcgccgcggccgacgactcgcccaggaagccgccacagccgcccgccaccacggacgcccacgcgccgccgcccgccaccgccaccgccaccgccgccatgaggcgcggcggggccggcgcgccgccggacctggggtccgtgctcggccaccccacccccaacctccgcgacctctacgcgctcggcaggaagctcgggcaggggcagttcggcaccaccttcctctgcaccgagctcgccacgggggtcgactacgcctgcaagtccatctccaagcgcaagctcatcaccagggaggacgtcgacgacgtgcgccgcgagatccagatcatgcaccacctctccggccacaccaacgtcgtcgccatcaagggcgcctacgaggaccagctctacgtccacatcgtcatggagctctgcgccgggggcgagctcttcgaccggatcatacagcgcggccactacagcgagcgcaaggccgccgagctcaccaggatcatcgtcggcgtcgtcgaggcctgccactccctcggtgtcatgcaccgggacctcaagcccgagaacttcctgctcgtcaacaaggacgacgacctctcgctcaaggccatcgatttcggactctctgtcttcttcaagcctggtcaagttttcaccgatgttgttggtagcccatattatgtagctccagaagttttgttgaaaaattatggaccagcagctgatgtatggacagctggtgtcattctttacattctactaagtggcgtgcctccgttttgggcagaaacacaacaaggaatatttgatgctgtattgaaaggtgtcattgattttgattctgatccgtggcctgtcatatctgatagtgcaaaagatcttataagacggatgctgaatcctcgctctgccgagcgcttaacagcacatgaagttctatgccatccatggattcgtgaccatggagtagctcctgaccgtccactggatccagctgtcttatctcgcattaagcaattctctgcaatgaataagttgaagaaaatggctttgcgagtaatagctgagagcctatcagaagaggaaattgcggggttgaaggaaatgttccagaccatggacactgacaacagtggcgcaattacctacgatgaactaaaagaaggattgagaaaatatggttccacactgaaggacactgagattcgtgatcttatggatgcagctgatatcgacaacaatggaacaattgactacattgaattcattgctgcaactttgcatctcaataagctggagcgcgaagaacatctcgtggcagccttttcatatttcgacaaagatggtagtggctatatcacagtggacgaactacagcaagcttgcaaagagcataacatgccggatgcttttcttgatgatgtcatcaacgaagctgatcaggataacgatggccgcattgactatggagagtttgttgccatgatgaccaagggcaatatgggagttggtcgacggacaatgagaaacagcttgaatatcagcatgagggacgcacctggtgcattctga

SEQ ID NO: 2463 - protein, 557 aa, Zea mays
MGNACGGALRSKHQHSFKHAASSQRHHASSEYSASAAADDSPRKPPQPPATTDAHAPPPATATATAAMRRGGAGAPPDLGSVLGHPTPNLRDLYALGRKLGQGQFGTTFLCTELATGVDYACKSISKRKLITREDVDDVRREIQIMHHLSGHTNVVAIKGAYEDQLYVHIVMELCAGGELFDRIIQRGHYSERKAAELTRIIVGVVEACHSLGVMHRDLKPENFLLVNKDDDLSLKAIDFGLSVFFKPGQVFTDVVGSPYYVAPEVLLKNYGPAADVWTAGVILYILLSGVPPFWAETQQGIFDAVLKGVIDFDSDPWPVISDSAKDLIRRMLNPRSAERLTAHEVLCHPWIRDHGVAPDRPLDPAVLSRIKQFSAMNKLKKMALRVIAESLSEEEIAGLKEMFQTMDTDNSGAITYDELKEGLRKYGSTLKDTEIRDLMDAADIDNNGTIDYIEFIAATLHLNKLEREEHLVAAFSYFDKDGSGYITVDELQQACKEHNMPDAFLDDVINEADQDNDGRIDYGEFVAMMTKGNMGVGRRTMRNSLNISMRDAPGAF

SEQ ID NO: 2464 - DNA, 1608 bp, Zea mays
  CDS (1)..(1608)
atgggcaactgctgcgccacgccgtcgacgacggaggagagcggcaagagccgccagaagaaaccgaagcagaagacgaacccctacaacgtggcgtacaaccgcggggcggcgccggcgccggcgcgcccgggcctggtggtgcttcgggacccgacggggcgggacctcggcgcgcagtacgagctgggcggcgagctgggccgcggcgagttcggcgtcacgtacctgtgcacggagtccgccacgggggcgcgctacgcgtgcaagtccatctccaagcgcaagctgcgcacgcccgtggacgtggaggacgtgcgccgggaggtggacatcatgcgccacatgccgccgcaccccaacatcgtcagcctccgcgccgcctacgaggacgaggacgccgtgcacctcgtcatggagctctgcgagggaggcgagctcttcgacaggatcgtcgcccggggccactacaccgagcgcgccgccgccgccgtcacgcgcaccatcgtcgaggtcgtccagatgtgccacaggcatggcgtcatgcaccgggatcttaaaccagagaactttttatatgcaaacaagaaggagagttcccctctgaaagcaatcgattttgggctgtcagtgttcttcaggcctggtgagcgatttactgaaatcgtaggcagtccatactacatggctccagaggttctaaagcgaaactatggccctgaagttgatgtttggagtgctggagtgatactttacatacttctctgtggtgtaccaccattttgggcagaaactgaacagggagtagcacaggcaattatacgatctgtggtagatttcaaaagagaaccatggcccagagtatctgagcctgctaaagatcttgtcaggcggatgctggacccaaatccattgacacggtttactgcagcacaagtacttgagcatccatggttacatgactctaaaaagatgccagacatttctcttggtgatactgtccgagcaagactgcaacaatttgctgcgatgaacaagttaaagaagaaagcattaagggtgattgccgagcatctgtcagtggaggaagtagctgacataaagcaaatgtttgacaagatggacgtgagcaagaatggcaagctaacattcgaggaattcaaggcgggccttcgtaaactggggaaccaaatgcctgattcagatcttcagataatgatggatgccgctgacatcgataaaaacgggaccctagattacgaggaattcgtcaccgtgtctgttcatgtgagaaaaataggcaacgatgagcacatccaaaaggccttcacatacttcgaccggaacaagagcgggtacatagagatcgaagagcttagagaggcactggctgatgaactggagggaaccgatgaagacatcatcaatggcatcatccgagacgtggacacggataaggacgggaaaataagctacgacgagttcgcggcgatgatgaaggccggcactgactggaggaaggcatcccggcagtactcgaggcagcggttcagcaacctgagcctgaagcttcagaaggacgggtccctcggcgccgagacacggtag

SEQ ID NO: 2465 - protein, 535 aa, Zea mays
MGNCCATPSTTEESGKSRQKKPKQKTNPYNVAYNRGAAPAPARPGLVVLRDPTGRDLGAQYELGGELGRGEFGVTYLCTESATGARYACKSISKRKLRTPVDVEDVRREVDIMRHMPPHPNIVSLRAAYEDEDAVHLVMELCEGGELFDRIVARGHYTERAAAAVTRTIVEVVQMCHRHGVMHRDLKPENFLYANKKESSPLKAIDFGLSVFFRPGERFTEIVGSPYYMAPEVLKRNYGPEVDVWSAGVILYILLCGVPPFWAETEQGVAQAIIRSVVDFKREPWPRVSEPAKDLVRRMLDPNPLTRFTAAQVLEHPWLHDSKKMPDISLGDTVRARLQQFAAMNKLKKKALRVIAEHLSVEEVADIKQMFDKMDVSKNGKLTFEEFKAGLRKLGNQMPDSDLQIMMDAADIDKNGTLDYEEFVTVSVHVRKIGNDEHIQKAFTYFDRNKSGYIEIEELREALADELEGTDEDIINGIIRDVDTDKDGKISYDEFAAMMKAGTDWRKASRQYSRQRFSNLSLKLQKDGSLGAETR

SEQ ID NO: 2466 - DNA, 1635 bp, Zea mays
  CDS (1)..(1635)
atggggaaccaatgcccaaacgggacccttgggagtgactactacaaccgcccgacgtccaggttcgctgatggttgtcttgaggacgatcgctactctgacttgaagaagtttgacaagccatggcctgaggtgaactcgtttaagcccactgctgttggtattttgaagaggggattggatccaacgtcaatcactgtccttgaaaggaagacggccgacataagggaacattatatcattggtcggaggcttggtcaaggccagtttggcacaacattcctctgcaccgagatcagtacagggtgtgagtatgcatgcaagacaatcccaaagcgaaagctcatcaccaaggaggatgttgaggatgtgcgccgtgagatccagataatgcaccatttgtcaggccacaagaatgttgtttccatcaaggatgtatacgaggatgggcaggcggtgtatattgtgatggagctctgcgccggtggggagctctttgatcgaattcaggagaaagggcattatagcgaacagaaggctgcagagctcataagaatcattattagccttgtggctatgtaccattcacttggggttatgcaccgtgatctaaagccagaaaacttcctcctttgggataaagaagatgacctgtcaataaaagcaatcgattttggtctatctgtgttcttcaaaccaggtcaggttttcactgagctggttggaagtccatactacgttgctcctgaggtactacacaaacggtatggaccagaagcggatgtgtggtcagctggagtgatactgtatgttttgcttagtggggtgccacctttttgggcagagacgcaacaaggtatatttgatgctgtcttgaaggggcacattgattttgactcggacccatggcctaagatatctgaaagcgcaaagaatctcataaggaagatgctctgcccttgtccttcagagcgtctgaaagcccatgaagtactacgccatccttggatctgtgaaaatggagtggctactgatcaggctcttgatcccggtgttctctctcgtctcaaacaattctccacaatgaacaaattaaagaagttggctctgagagtgatagctgaacgactttctgaggaggagattgctgggttaagacaaatgttcaaggcagttgacgttcaaaatagaggcgtaattacttttggtgaacttagacaaggtttaaaaagatatggtagcgaattggagaatagagaaattagtgatataatggaagtggctgataatgacaataatgtgaccatcaattatgaagaatttatcgctgcaactgtgcctcttaacaaaatagaacgtgaggagcacctgatggcagcttttacctacttcgacaaagatggaagtggttatatcacagttgacaagctgcaacgagcttgtggagaacatgacatggatgacactttccttgaagagataattttagaagttgaccaaaacaatgacggtcagattgactacgccaaattcgtagccatgatgcaaggcaacaaagttggacttgggtggcaacaaatggaaaccactctgaatgtaaccttgagagatgcacctcaagtacactgtcactga

SEQ ID NO: 2467 - protein, 544 aa, Zea mays
MGNQCPNGTLGSDYYNRPTSRFADGCLEDDRYSDLKKFDKPWPEVNSFKPTAVGILKRGLDPTSITVLERKTADIREHYIIGRRLGQGQFGTTFLCTEISTGCEYACKTIPKRKLITKEDVEDVRREIQIMHHLSGHKNVVSIKDVYEDGQAVYIVMELCAGGELFDRIQEKGHYSEQKAAELIRIIISLVAMYHSLGVMHRDLKPENFLLWDKEDDLSIKAIDFGLSVFFKPGQVFTELVGSPYYVAPEVLHKRYGPEADVWSAGVILYVLLSGVPPFWAETQQGIFDAVLKGHIDFDSDPWPKISESAKNLIRKMLCPCPSERLKAHEVLRHPWICENGVATDQALDPGVLSRLKQFSTMNKLKKLALRVIAERLSEEEIAGLRQMFKAVDVQNRGVITFGELRQGLKRYGSELENREISDIMEVADNDNNVTINYEEFIAATVPLNKIEREEHLMAAFTYFDKDGSGYITVDKLQRACGEHDMDDTFLEEIILEVDQNNDGQIDYAKFVAMMQGNKVGLGWQQMETTLNVTLRDAPQVHCH

SEQ ID NO: 2468 - DNA, 1662 bp, Zea mays
  CDS (1)..(1662)
atgggcaacgcatgcggcggcgcccttagatccaagtaccagcacagcttcaagcacgccgcgtcgtcgcagcgccacgcctcctccgagtacagcgccagcgccgtggccgacgactcgcccaggaagcccacacagccgcccgccaccacggacgcccacgcgccgccaccgccgcccgccaccgccatgaggcgcggcggggccggcgcgccgccggacctggggtccgtgctcggccacccaacccccaacctccgcgacctctacgcgctcggcaggaagctcgggcaggggcagttcggcaccacctacctctgcaccgagctcgccacggggatcgactacgcctgcaagtccatctccaagcgcaagctcatcaccaaggaggacgtcgacgacgtgcgccgcgagatccagatcatgcaccacctctccggccacaagaacgtcgtcgctatcaagggcgcgtacgaggaccaggtctacgtccacatcgtcatggagctctgtgccgggggcgagctcttcgaccggatcatacagcgcggacactacagcgagcgcaaggccgccgcgctcacaaggatcatcgtcggggtcgtcgaggcctgccactcgctcggggtcatgcaccgggacctcaagcccgagaacttcctgctcgccaacagggacgatgacctctcgctcaaggccatcgatttcggactctctgtcttcttcaagcctggtcaagttttcaccgatgtagttggtagcccatattatgtagctccagaagttctgttgaaaagttatggaccagcagctgatgtatggacagccggtgtcattctttacattctactgagtggtgtgcctccattttgggcagaaacacaacaaggaatatttgatgctgtattgaagggtgccattgattttgattctgatccgtggcctgtcatatctgatagtgcaaaagatcttatcagacgaatgctgaatcctcgctctgccgagcgcttaacagcacatgaagttctatgccatccatggattcgtgatcatggagtagctcctgaccgtccactggatccagctgtcttatctcgcattaagcaattctctgcaatgaataagttgaagaaaatggctttacgagtaatagctgagagcctatcagaagaggaaattgcggggttgaaggaaatgttccagaccatggacactgacaacagtggcgcaatcacttatgatgagctaaaagaaggattgagaaaatatggctccacactaaaggacactgagattcgtgatcttatggaagcagctgatattgacaacagtggaacaattgactacatagaattcattgctgcaactttgcatctcaataagctggagcgtgaggaacatctcgtggcagccttttcatatttcgacaaagatggtagtggctatatcacagtggacgaactacagcaagcttgcaaagagcataacatgccggatgcttttcttgatgatgtcatcaacgaagctgatcaggacaatgatggccgcattgactatggagaatttgttgccatgatgaccaagggcaatatgggagtcggtcgaagaacaatgagaaacagcttgaatatcagcatgagggacgcacctggtgcgttctga

SEQ ID NO: 2469 - protein, 553 aa, Zea mays
MGNACGGALRSKYQHSFKHAASSQRHASSEYSASAVADDSPRKPTQPPATTDAHAPPPPPATAMRRGGAGAPPDLGSVLGHPTPNLRDLYALGRKLGQGQFGTTYLCTELATGIDYACKSISKRKLITKEDVDDVRREIQIMHHLSGHKNVVAIKGAYEDQVYVHIVMELCAGGELFDRIIQRGHYSERKAAALTRIIVGVVEACHSLGVMHRDLKPENFLLANRDDDLSLKAIDFGLSVFFKPGQVFTDVVGSPYYVAPEVLLKSYGPAADVWTAGVILYILLSGVPPFWAETQQGIFDAVLKGAIDFDSDPWPVISDSAKDLIRRMLNPRSAERLTAHEVLCHPWIRDHGVAPDRPLDPAVLSRIKQFSAMNKLKKMALRVIAESLSEEEIAGLKEMFQTMDTDNSGAITYDELKEGLRKYGSTLKDTEIRDLMEAADIDNSGTIDYIEFIAATLHLNKLEREEHLVAAFSYFDKDGSGYITVDELQQACKEHNMPDAFLDDVINEADQDNDGRIDYGEFVAMMTKGNMGVGRRTMRNSLNISMRDAPGAF

SEQ ID NO: 2470 - DNA, 1596 bp, Zea mays
  CDS (1)..(1596)
atggggcagtgttacagcagagctacggccccggactctggacggggaggtgccaatggttatggctattctaaccaggcaaagccggcgcaagcacccccgagttacaaccctcctcagcaggcggccgaggtgaggtacacaccatcggcgacgaactcttcggcagtcccacccgtggctgtgccgccgaagccaacggcggacacgattcttggcaagcagtacgaggacgtgcgctctgtctactccctcgggaaggagcttggccggggccagttcggggtgacatacctctgcacagagattgcctctggtaggcagtacgcctgcaagtccatctccaagcgcaagctcgtcagcaaggcagacagggaggacattcgaagggagatccagatcatgcagcacctgtctgggcagccaaacattgttgagttccggggagcatacgaggacaagagcaatgtccatgtggtgatggagctctgcgcaggtggggagctcttcgatcgcatcattgccaaggggcactacacagagcgtgcagctgctacaatctgcagagcagttgtgaatgttgtcaacatttgccacttcatgggtgtgatgcaccgtgacctgaaaccggagaacttcttgcttgcgagcaaggaggagaatgcaatgctcaaggccactgattttgggctttccgtcttcatcgaagaaggaaagatgtacagggacatcgttggaagtgcttattatgttgcgcctgaagtccttaagcggagctatggaaaagagatagatgtttggagcgcaggtgttattttgtacattcttctcagtggtgtgcctccattttgggctgaaactgaaaaggggatatttgatgctattctgcatgaggagattgactttgaaagtcaaccttggccatcaatttctgagagtgctaaagacttggttagaaagatgttgacacgagatccaaagaaaagactgacttcagctcaagttcttcaacattcatggctcagagaaggtggaggtgcatctgataagcctatcgacagtactgttctttctagaatgaagcagttcagagcaatgaataagctgaaaaagatggccctaaaggttattgcctcaaaccttaacgaggaagagatcaaggggctaaagcaaatgttcatgaacatggacacagacaatagtggcacaatcacgtatgaagaactcaaagcaggactagccaaacttggatcaaagctgtcggaagctgaagtaaagcagttgatggaggctgctgatgttgatgggaatggatccatcgactatgttgagttcatcactgccacaatgcatagacacaagctcgaaagagacgagtatttgtttaaggcattccagtacttcgataaagataacagcggtttcatcacaagagatgagctggagtctgctttgatcgagcatgagatgggtgacacgagtacaataaaggagatcatatcagaagtggacacagacaatgatgggaggattaactatgaggagttctgcgcaatgatgagaggagggatgcagcagccaatgaggctcaagtag

SEQ ID NO: 2471 - protein, 531 aa, Zea mays
MGQCYSRATAPDSGRGGANGYGYSNQAKPAQAPPSYNPPQQAAEVRYTPSATNSSAVPPVAVPPKPTADTILGKQYEDVRSVYSLGKELGRGQFGVTYLCTEIASGRQYACKSISKRKLVSKADREDIRREIQIMQHLSGQPNIVEFRGAYEDKSNVHVVMELCAGGELFDRIIAKGHYTERAAATICRAVVNVVNICHFMGVMHRDLKPENFLLASKEENAMLKATDFGLSVFIEEGKMYRDIVGSAYYVAPEVLKRSYGKEIDVWSAGVILYILLSGVPPFWAETEKGIFDAILHEEIDFESQPWPSISESAKDLVRKMLTRDPKKRLTSAQVLQHSWLREGGGASDKPIDSTVLSRMKQFRAMNKLKKMALKVIASNLNEEEIKGLKQMFMNMDTDNSGTITYEELKAGLAKLGSKLSEAEVKQLMEAADVDGNGSIDYVEFITATMHRHKLERDEYLFKAFQYFDKDNSGFITRDELESALIEHEMGDTSTIKEIISEVDTDNDGRINYEEFCAMMRGGMQQPMRLK

SEQ ID NO: 2472 - DNA, 1635 bp, Zea mays
  CDS (1)..(1635)
atggggaaccaatgcccaaacgggacccttgggagtgactactacaaccgcccgacgtccaggttcgctgatggttgtcttgaggacgatcgctactctgacttgaagaagtttgacaagccatggcctgaggtgaactcgtttaagcccactgctgttggtattttgaagaggggattggatccaacgtcaatcactgtccttgaaaggaagacggccgacataagggaacattatatcattggtcggaggcttggtcaaggccagtttggcacaacattcctctgcaccgagatcagtacagggtgtgagtatgcatgcaagacaatcccaaagcgaaagctcatcaccaaggaggatgttgaggatgtgcgccgtgagatccagataatgcaccatttgtcaggccacaagaatgttgtttccatcaaggatgtatacgaggatgggcaggcggtgtatattgtgatggagctctgcgccggtggggagctctttgatcgaattcaggagaaagggcattatagcgaacagaaggctgcagagctcataagaatcattattagccttgtggctatgtgccattcacttggggttatgcaccgtgatctaaagccagaaaacttcctcctttgggataaagaagatgacctgtcaataaaagcaatcgattttggtctatctgtgttcttcaaaccaggtcaggttttcactgagctggttggaagtccatactacgttgctcctgaggtactacacaaacggtatggaccagaagcggatgtgtggtcagctggagtgatactgtatgttttgcttagtggggtgccacctttttgggcagagacgcaacaaggtatatttgatgctgtcttgaaggggcacattgattttgactcggacccatggcctaagatatctgaaagcgcaaagaatctcataaggaagatgctctgcccttgtccttcagagcgtctgaaagcccatgaagtactacgccatccttggatctgtgaaaatggagtggctactgatcaggctcttgatcccggtgttctctctcgtctcaaacaattctccacaatgaacaaattaaagaagttggctctgagagtgatagctgaacgactttctgaggaggagattgctgggttaagacaaatgttcaaggcagttgacgttcaaaatagaggcgtaattacttttggtgaacttagacaaggtttaaaaagatatggtagcgaattggagaatagagaaattagtgatataatggaagtggctgataatgacaataatgtgaccatcaattatgaagaatttatcgctgcaactgtgcctcttaacaaaatagaacgtgaggagcacctgatggcagcttttacctacttcgacaaagatggaagtggttatatcacagttgacaagctgcaacgagcttgtggagaacatgacatggatgacactttccttgaagagataattttagaagttgaccaaaacaatgacggtcagattgactacgccaaattcgtagccatgatgcaaggcagcaaagttggacttgggtggcaacaaatggaaaccactctgaatgtaaccttgagagatgcacctcaagtacactgtcactga

SEQ ID NO: 2473 - protein, 544 aa, Zea mays
MGNQCPNGTLGSDYYNRPTSRFADGCLEDDRYSDLKKFDKPWPEVNSFKPTAVGILKRGLDPTSITVLERKTADIREHYIIGRRLGQGQFGTTFLCTEISTGCEYACKTIPKRKLITKEDVEDVRREIQIMHHLSGHKNVVSIKDVYEDGQAVYIVMELCAGGELFDRIQEKGHYSEQKAAELIRIIISLVAMCHSLGVMHRDLKPENFLLWDKEDDLSIKAIDFGLSVFFKPGQVFTELVGSPYYVAPEVLHKRYGPEADVWSAGVILYVLLSGVPPFWAETQQGIFDAVLKGHIDFDSDPWPKISESAKNLIRKMLCPCPSERLKAHEVLRHPWICENGVATDQALDPGVLSRLKQFSTMNKLKKLALRVIAERLSEEEIAGLRQMFKAVDVQNRGVITFGELRQGLKRYGSELENREISDIMEVADNDNNVTINYEEFIAATVPLNKIEREEHLMAAFTYFDKDGSGYITVDKLQRACGEHDMDDTFLEEIILEVDQNNDGQIDYAKFVAMMQGSKVGLGWQQMETTLNVTLRDAPQVHCH

SEQ ID NO: 2474 - DNA, 1644 bp, Zea mays
  CDS (1)..(1644)
atgggcaacgcatgcagcggcgcccttagatccaagtacctgcacagcttcaagcacgccgcgtcgcagcgccacgactccgagtacagcgccagcgccgacgactcgcccaggaagcccacaccgcccgccaccacggacgcccacgcgccggcgccgcccgccgccgccatgaggcgcggcgcggctggcgcgacgccggacctcgggtccgtgctcggccacccaacccccaacctccgcgacctctacgcgctcggcaggaagctcgggcaggggcagttcggcaccacctacctctgcaccgagctcgccacggggatcgactacgcctgcaagtccatctccaagcgcaagctcatcaccaaggaggacgtcgacgacgtgcgccgcgagatccagatcatgcaccacctatccggccacaagaacgtcgtcgctatcaagggcgcgtacgaggaccaggtctacgtccacatcgtcatggagctctgtgccgggggcgagctcttcgaccggatcatacagcgcggacactacagcgagcgcaaggccgccgcgctcacaaggatcatcgtcggggtcgtcgaggcctgccactcgctcggggtcatgcaccgggacctcaagcccgagaacttcctgctcgccaacagggacgatgacctctcgctcaaggccatcgatttcggtctctctgtcttcttcaagcctggtcaagttttcaccgatgtagttggtagcccatattatgtagctccagaagttctgttgaaaagttatggacccgcagctgatgtatggacagccggtgtcattctttacattctactgagtggtgtgcctccattttgggcagaaacacaacaaggaatatttgatgctgtattgaagggtgccattgattttgattctgatccgtggcctgtcatatctgatagtgcaaaagatcttatcagacgaatgctgaatcctcgctctgccgagcgcttaacagcacatgaagttctatgccatccatggattcgtgatcatggagtagctcctgaccgtccactggatccagctgtcttatctcgcattaagcaattctctgcaatgaataagttgaagaaaatggctttacgagtaatagctgagagcctatcagaagaggaaattgcggggttgaaggaaatgttccagatcatggacactgacaacagtggcgcaatcacttatgatgagctaaaagaaggattgagaaaatatggctccacactaaaggacactgagattcgtgatcttatggaagcagctgatattgacaacagtggaacaattgactacatagaattcattgctgcaactttgcatctcaataagctggagcgtgaggaacatctcgtggcagccttttcatatttcgacaaagatggtagtggctatatcacagtggacgaactacagcaagcttgcaaagagcataacatgccggatgctttttttgatgatgtcatcaacgaagctgatcaggacaatgatggccgcattgactatggagaatttgttgccatgatgaccaagggcaatatgggagtcggtcgaagaacaatgagaaacagcttgaatatcagcatgagggacgcacctggtgcgttttga

SEQ ID NO: 2475 - protein, 547 aa, Zea mays
MGNACSGALRSKYLHSFKHAASQRHDSEYSASADDSPRKPTPPATTDAHAPAPPAAAMRRGAAGATPDLGSVLGHPTPNLRDLYALGRKLGQGQFGTTYLCTELATGIDYACKSISKRKLITKEDVDDVRREIQIMHHLSGHKNVVAIKGAYEDQVYVHIVMELCAGGELFDRIIQRGHYSERKAAALTRIIVGVVEACHSLGVMHRDLKPENFLLANRDDDLSLKAIDFGLSVFFKPGQVFTDVVGSPYYVAPEVLLKSYGPAADVWTAGVILYILLSGVPPFWAETQQGIFDAVLKGAIDFDSDPWPVISDSAKDLIRRMLNPRSAERLTAHEVLCHPWIRDHGVAPDRPLDPAVLSRIKQFSAMNKLKKMALRVIAESLSEEEIAGLKEMFQIMDTDNSGAITYDELKEGLRKYGSTLKDTEIRDLMEAADIDNSGTIDYIEFIAATLHLNKLEREEHLVAAFSYFDKDGSGYITVDELQQACKEHNMPDAFFDDVINEADQDNDGRIDYGEFVAMMTKGNMGVGRRTMRNSLNISMRDAPGAF

SEQ ID NO: 2476 - DNA, 1527 bp, Zea mays
  CDS (1)..(1527)
atgcagccggacccgagcgggaacaccaatgcgaaggcgaagctgccgttgatggctccggcgccgtcgtcggggcgcccggcgtccgtgctgccgtacaagacggagaacgtgcgcgaccactatcgcatcgggaagaagctggggcaggggcagttcggcaccacgtaccagtgcgtgggcaaggcggacggcggcgagtacgcgtgcaagtccatccccaagcgcaagctgctgtgccgcgaggactacgaggacgtgtggcgcgagatccagatcatgcaccacctctccgagcaccccaacgtcgtccgcatccgcggcgcgtacgaggacgcgctcttcgtccacctcgtcatggagctctgcgccggcggcgagctcttcgaccgcatcgtcgccaagggccactacaccgagcgcgccgccgcgcagctcatcaagacgattgttggggtggtgcaggggtgccactcgcttggcgtcatgcaccgggacctgaaaccggagaacttcctcttcgcgagcacccctgaggatgccccgctcaaggccactgattttgggctttccgtgttctacaagcccggtgataaattttctgacgttgttgggagcccctattatgttgcccctgaggtgcttcaaaaatgctatggcccagaatctgatgtatggagtgctggagtgattttgtacattttgctatgtggtgtacccccattttgggcagagagtgaagcagggatcttcaggcagattttgcgaggcaaacttgatttggaatctgaaccatggccaagtatctctgatagtgctaaggatttagtccgtaagatgcttatccgcgatcctacaaagaggttcactgctcatgaggttttatgtcatccatggattgttgatgatgctgtcgcacctgataagcctattgattctgctgttttgtcaaggctgaaaaacttttctgcaatgaacaagctcaagaagatggcattgagggtgattgctgaaagtctatctgaggaggagattgggggtttgaaggagttgttcaaaatgatcgatactgacaacagcgggacgataacttatgatgaactgaaggatggtctgaaaagggttggctcggacctgatggaacctgaaatccaggctttaatggatgcagctgatatcgacaacagcggaaccattgactatggagagttcttggcggctacgttgcacatgaataaactggagagggaggaaagcttggtgtcggcgtttgcgttcttcgataaggacgggagtggcttcataacgatcgacgagctctcacaagcatgcgaacagttcggtctttctgatgtccatctcgaggatatgatcaaagatgtggaccaaaacaatgacggtcagattgattatagtgagtttgccgcgatgatgagaaagggcaatgctggcggagcaggacggcggaccatgaggaacagcttgcatgtgaatcttggcgagctcctgaagcccaccgagacctag

SEQ ID NO: 2477 - protein, 508 aa, Zea mays
MQPDPSGNTNAKAKLPLMAPAPSSGRPASVLPYKTENVRDHYRIGKKLGQGQFGTTYQCVGKADGGEYACKSIPKRKLLCREDYEDVWREIQIMHHLSEHPNVVRIRGAYEDALFVHLVMELCAGGELFDRIVAKGHYTERAAAQLIKTIVGVVQGCHSLGVMHRDLKPENFLFASTPEDAPLKATDFGLSVFYKPGDKFSDVVGSPYYVAPEVLQKCYGPESDVWSAGVILYILLCGVPPFWAESEAGIFRQILRGKLDLESEPWPSISDSAKDLVRKMLIRDPTKRFTAHEVLCHPWIVDDAVAPDKPIDSAVLSRLKNFSAMNKLKKMALRVIAESLSEEEIGGLKELFKMIDTDNSGTITYDELKDGLKRVGSDLMEPEIQALMDAADIDNSGTIDYGEFLAATLHMNKLEREESLVSAFAFFDKDGSGFITIDELSQACEQFGLSDVHLEDMIKDVDQNNDGQIDYSEFAAMMRKGNAGGAGRRTMRNSLHVNLGELLKPTET

SEQ ID NO: 2478 - DNA, 1620 bp, Zea mays
  CDS (1)..(1620)
atgggcaactgctgcgtaacaccgaacggagccgccgacgccggcggcggcaagaagcccaaggagccgaagcagaagaagggcaagaagccgaaccccttctcgatcgagtacaaccgctcgacgccggcgagcgcgccgaggctggtggtgctgcgggagcccacggggcgggacatcgcggagcggtacgagcttggagcggagctcgggcgcggcgagttcggggtcacctatctctgcacggaccgcgcctcaggggaggcgctagcctgcaagtccatctccaagaagaagctccgcacccccgtcgacgtcgaggacgtgcgccgggaggtggagatcatgcgccacctccccaagcaccccaacatcgtcacgctcagggatacctacgaggacgacaatgccgtgcacctcgtcatggagctctgtgagggtggggagctcttcgaccgcatcgtggcgcgggggcactacacggaacgcgctgccgccttggtcacacgcactatcgtcgaggtcgtgcagatgtgccataagcatggagtgatgcacagggatctcaaaccagaaaatttcttgtttgcgaacaaaaaagaatcagcagcccttaaggccattgattttggcctgtctgtatttttcactccaggcgaacggtttacagagattgttgggagtccttattacatggccccagaggtactaaagagaaattatggcccagaggttgatgtttggagtgcaggggtgattctgtacattcttctctgtggtgtccctccattctgggcagaatcggagcaaggtgttgctcaggcaattatccgatctgtcattgatttcaaaagagatccatggccaagggtgtctgataatgccaaagaccttgtaagaggaatgctcaacccagatccaaagcgacgattgacagctcagcaagtgcttgatcacccatggttgcagaacattaagaaggctccaaatgtcaatttgggcgaaactgttaaggccagactccaacaattctctgtgatgaacaagttcaagaagcatgcacttagggtcatagctgagcacctttcagtagaagaggctgctgacataaaggatatgtttgagaagatggatcttaacaaggatcaaatgcttaatttcgatgagctgaagcttggtctgcataaatttggtcaccaaatccctgatgcagatgttcaaatactaatggaagctgcggatgctgatggaaacgggtccttggattatggagaatttgttacactatctgttcatctaagaaagattggaaatgatgagcatcttcataaggcatttgcatactttgaccggaatcagagtggttatattgaaattgatgaactccgtgagtcattagctgatgaccttggacagaatcatgaagaggttatcaatgccattatccgtgacgtagacaccgataaggatggcaagataagctacgatgagtttgcagcgatgatgaaggccggaacagactggaggaaagcgtcgagacagtattcgagagagcggttcaccagcctgagccttaagctgcaaaaggatggatcgttgcagatggagagtacgcagtag

SEQ ID NO: 2479 - protein, 539 aa, Zea mays
MGNCCVTPNGAADAGGGKKPKEPKQKKGKKPNPFSIEYNRSTPASAPRLVVLREPTGRDIAERYELGAELGRGEFGVTYLCTDRASGEALACKSISKKKLRTPVDVEDVRREVEIMRHLPKHPNIVTLRDTYEDDNAVHLVMELCEGGELFDRIVARGHYTERAAALVTRTIVEVVQMCHKHGVMHRDLKPENFLFANKKESAALKAIDFGLSVFFTPGERFTEIVGSPYYMAPEVLKRNYGPEVDVWSAGVILYILLCGVPPFWAESEQGVAQAIIRSVIDFKRDPWPRVSDNAKDLVRGMLNPDPKRRLTAQQVLDHPWLQNIKKAPNVNLGETVKARLQQFSVMNKFKKHALRVIAEHLSVEEAADIKDMFEKMDLNKDQMLNFDELKLGLHKFGHQIPDADVQILMEAADADGNGSLDYGEFVTLSVHLRKIGNDEHLHKAFAYFDRNQSGYIEIDELRESLADDLGQNHEEVINAIIRDVDTDKDGKISYDEFAAMMKAGTDWRKASRQYSRERFTSLSLKLQKDGSLQMESTQ

SEQ ID NO: 2480 - DNA, 20 bp, Artificial sequence
  primer
atgggcaattcttgccgtgg

SEQ ID NO: 2481 - DNA, 27 bp, Artificial sequence
  primer
ctacgcgtctctcatgctaatgtttag

SEQ ID NO: 2482 - protein, 723 aa, Artificial sequence
  consensus sequence
  Variant (3)..(10): Xaa in position 3 to 10 is any amino acid
  Variant (11)..(174): Xaa in position 11 to 174 is any or no amino acid
  Variant (176)..(177): Xaa in position 176 to 177 is any amino acid
  Variant (178)..(236): Xaa in position 178 to 236 is any or no amino acid
  Variant (238)..(239): Xaa in position 238 to 239 is any amino acid
  Variant (241)..(242): Xaa in position 241 to 242 is any amino acid
  Variant (245)..(245): Xaa in position 245 is any amino acid
  Variant (247)..(247): Xaa in position 247 is any amino acid
  Variant (250)..(250): Xaa in position 250 is any amino acid
  Variant (252)..(263): Xaa in position 252 to 263 is any amino acid
  Variant (264)..(266): Xaa in position 264 to 266 is any or no amino acid
  Variant (268)..(268): Xaa in position 268 is any amino acid
  Variant (270)..(270): Xaa in position 270 is any amino acid
  Variant (272)..(272): Xaa in position 272 is any amino acid
  Variant (274)..(274): Xaa in position 274 is any amino acid
  Variant (276)..(282): Xaa in position 276 to 282 is any amino acid
  Variant (283)..(285): Xaa in position 283 to 285 is any or no amino acid
  Variant (289)..(289): Xaa in position 289 is any amino acid
  Variant (292)..(293): Xaa in position 292 to 293 is any amino acid
  Variant (295)..(297): Xaa in position 295 to 297 is any amino acid
  Variant (299)..(302): Xaa in position 299 to 302 is any amino acid
  Variant (303)..(304): Xaa in position 303 to 304 is any or no amino acid
  Variant (306)..(306): Xaa in position 306 is any amino acid
  Variant (307)..(310): Xaa in position 307 to 310 is any or no amino acid
  Variant (312)..(317): Xaa in position 312 to 317 is any amino acid
  Variant (320)..(322): Xaa in position 320 to 322 is any amino acid
  Variant (324)..(325): Xaa in position 324 to 325 is any amino acid
  Variant (331)..(331): Xaa in position 331 is any amino acid
  Variant (336)..(336): Xaa in position 336 is any amino acid
  Variant (340)..(343): Xaa in position 340 to 343 is any amino acid
  Variant (344)..(348): Xaa in position 344 to 348 is any or no amino acid
  Variant (350)..(350): Xaa in position 350 is any amino acid
  Variant (352)..(353): Xaa in position 352 to 353 is any amino acid
  Variant (356)..(360): Xaa in position 356 to 360 is any amino acid
  Variant (362)..(363): Xaa in position 362 to 363 is any amino acid
  Variant (366)..(367): Xaa in position 366 to 367 is any amino acid
  Variant (370)..(371): Xaa in position 370 to 371 is any amino acid
  Variant (374)..(374): Xaa in position 374 is any amino acid
  Variant (385)..(392): Xaa in position 385 to 392 is any amino acid
  Variant (393)..(394): Xaa in position 393 to 394 is any or no amino acid
  Variant (397)..(398): Xaa in position 397 to 398 is any amino acid
  Variant (404)..(404): Xaa in position 404 is any amino acid
  Variant (406)..(408): Xaa in position 406 to 408 is any amino acid
  Variant (410)..(414): Xaa in position 410 to 414 is any amino acid
  Variant (415)..(415): Xaa in position 415 is any or no amino acid
  Variant (419)..(419): Xaa in position 419 is any amino acid
  Variant (422)..(422): Xaa in position 422 is any amino acid
  Variant (428)..(430): Xaa in position 428 to 430 is any amino acid
  Variant (433)..(433): Xaa in position 433 is any amino acid
  Variant (435)..(435): Xaa in position 435 is any amino acid
  Variant (437)..(437): Xaa in position 437 is any amino acid
  Variant (440)..(440): Xaa in position 440 is any amino acid
  Variant (444)..(444): Xaa in position 444 is any amino acid
  Variant (449)..(449): Xaa in position 449 is any amino acid
  Variant (451)..(452): Xaa in position 451 to 452 is any amino acid
  Variant (457)..(458): Xaa in position 457 to 458 is any amino acid
  Variant (459)..(464): Xaa in position 459 to 464 is any or no amino acid
  Variant (466)..(466): Xaa in position 466 is any amino acid
  Variant (470)..(472): Xaa in position 470 to 472 is any amino acid
  Variant (474)..(477): Xaa in position 474 to 477 is any amino acid
  Variant (480)..(482): Xaa in position 480 to 482 is any amino acid
  Variant (486)..(487): Xaa in position 486 to 487 is any amino acid
  Variant (489)..(490): Xaa in position 489 to 490 is any amino acid
  Variant (494)..(498): Xaa in position 494 to 498 is any amino acid
  Variant (500)..(502): Xaa in position 500 to 502 is any amino acid
  Variant (504)..(505): Xaa in position 504 to 505 is any amino acid
  Variant (507)..(507): Xaa in position 507 is any amino acid
  Variant (510)..(512): Xaa in position 510 to 512 is any amino acid
  Variant (514)..(514): Xaa in position 514 is any amino acid
  Variant (518)..(521): Xaa in position 518 to 521 is any amino acid
  Variant (522)..(523): Xaa in position 522 to 523 is any or no amino acid
  Variant (525)..(529): Xaa in position 525 to 529 is any amino acid
  Variant (531)..(532): Xaa in position 531 to 532 is any amino acid
  Variant (534)..(537): Xaa in position 534 to 537 is any amino acid
  Variant (541)..(543): Xaa in position 541 to 543 is any amino acid
  Variant (545)..(546): Xaa in position 545 to 546 is any amino acid
  Variant (549)..(549): Xaa in position 549 is any amino acid
  Variant (552)..(554): Xaa in position 552 to 554 is any amino acid
  Variant (556)..(557): Xaa in position 556 to 557 is any amino acid
  Variant (559)..(560): Xaa in position 559 to 560 is any amino acid
  Variant (563)..(565): Xaa in position 563 to 565 is any amino acid
  Variant (567)..(569): Xaa in position 567 to 569 is any amino acid
  Variant (571)..(573): Xaa in position 571 to 573 is any amino acid
  Variant (575)..(577): Xaa in position 575 to 577 is any amino acid
  Variant (578)..(579): Xaa in position 578 to 579 is any or no amino acid
  Variant (581)..(581): Xaa in position 581 is any amino acid
  Variant (583)..(585): Xaa in position 583 to 585 is any amino acid
  Variant (588)..(589): Xaa in position 588 to 589 is any amino acid
  Variant (590)..(590): Xaa in position 590 is any or no amino acid
  Variant (592)..(608): Xaa in position 592 to 608 is any amino acid
  Variant (609)..(609): Xaa in position 609 is any or no amino acid
  Variant (611)..(611): Xaa in position 611 is any amino acid
  Variant (613)..(615): Xaa in position 613 to 615 is any amino acid
  Variant (616)..(616): Xaa in position 616 is any or no amino acid
  Variant (618)..(619): Xaa in position 618 to 619 is any amino acid
  Variant (621)..(622): Xaa in position 621 to 622 is any amino acid
  Variant (625)..(626): Xaa in position 625 to 626 is any amino acid
  Variant (628)..(633): Xaa in position 628 to 633 is any amino acid
  Variant (634)..(648): Xaa in position 634 to 648 is any or no amino acid
  Variant (651)..(652): Xaa in position 651 to 652 is any amino acid
  Variant (655)..(657): Xaa in position 655 to 657 is any amino acid
  Variant (658)..(658): Xaa in position 658 is any or no amino acid
  Variant (660)..(660): Xaa in position 660 is any amino acid
  Variant (662)..(664): Xaa in position 662 to 664 is any amino acid
  Variant (667)..(670): Xaa in position 667 to 670 is any amino acid
  Variant (671)..(697): Xaa in position 671 to 697 is any or no amino acid
  Variant (699)..(701): Xaa in position 699 to 701 is any amino acid
  Variant (702)..(708): Xaa in position 702 to 708 is any or no amino acid
  Variant (711)..(711): Xaa in position 711 is any amino acid
  Variant (713)..(716): Xaa in position 713 to 716 is any amino acid
  Variant (717)..(722): Xaa in position 717 to 722 is any or no amino acid
MGXXXXXXXXXXXXXXXXXXXXXXXXXXXXXXXXXXXXXXXXXXXXXXXXXXXXXXXXXXXXXXXXXXXXXXXXXXXXXXXXXXXXXXXXXXXXXXXXXXXXXXXXXXXXXXXXXXXXXXXXXXXXXXXXXXXXXXXXXXXXXXXXXXXXXXXXXXXXXXXXXXXXXXXXXXXXLXXXXXXXXXXXXXXXXXXXXXXXXXXXXXXXXXXXXXXXXXXXXXXXXXXXXXXXXXXXXXYXXGXXLGXGXFGXTXXXXXXXXXXXXXXXAXKXIXKXKXXXXXXXXXXEDVXREXXIXXXLXXXXXXNXXXXXVXXXXXXEDXXXVXXVMELCXGGELXDRIXXXXXXXXXYXEXXAAXXXXXIXXVVXXCHXXGVXHRDLKPENFLXXXXXXXXXXLKXXDFGLSXFXXXGXXXXXXVGSXYYXAPEVLXXXYGXEXDXWSXGVIXYILLXGXXPFWAXXXXXXXXEXGIFXXXLXXXXDFXXXPWPXXSXXAKDXXXXXLXXXPXXRXTAXXXLXHPWXXXXXXAXXXXXDXXVXXXXKQFXXXNXXKKXALXXXAXXLXXEEXXXLXXXFXXXDXXXXXGXIXXXELXXXLXXXXXXXXXXXXXXXXXXAXDXXXXGXXDXXEFXXAXXXXXXXXXXXXXXXXXXXXXAFXXFDXXXXGXIXXXELXXXXXXXXXXXXXXXXXXXXXXXXXXXXXXXDXXXXXXXXXXDGXIXXXXXXXXXXF

SEQ ID NO: 2483 - protein, 30 aa, Artificial sequence
  protein pattern
  Variant (4)..(4): Xaa in position 4 is Ala, Pro or Val
  Variant (7)..(7): Xaa in position 7 is Ile, Met or Val
  Variant (13)..(15): Xaa in position 13 to 15 is any amino acid
  Variant (17)..(17): Xaa in position 17 is Gly, Ser or Thr
  Variant (18)..(18): Xaa in position 18 is any amino acid
  Variant (20)..(20): Xaa in position 20 is any amino acid
  Variant (22)..(22): Xaa in position 22 is Ile, Met or Val
  Variant (24)..(24): Xaa in position 24 is Ser or Thr
  Variant (25)..(25): Xaa in position 25 is any amino acid
  Variant (27)..(27): Xaa in position 27 is Ile or Val
  Variant (28)..(28): Xaa in position 28 is Ile or Met
  Variant (29)..(29): Xaa in position 29 is any amino acid
VGSXYYXAPEVLXXXYXXEXDXWXXGXXXY

SEQ ID NO: 2484 - protein, 20 aa, Artificial sequence
  protein pattern
  Variant (3)..(5): Xaa in position 3 to 5 is any amino acid
  Variant (7)..(7): Xaa in position 7 is any amino acid
  Variant (8)..(8): Xaa in position 8 is Ile, Leu or Val
  Variant (14)..(14): Xaa in position 14 is any amino acid
  Variant (19)..(19): Xaa in position 19 is Phe or Leu
EDXXXVXXVMELCXGGELXD

SEQ ID NO: 2485 - protein, 16 aa, Artificial sequence
  protein pattern
  Variant (3)..(3): Xaa in position 3 is Ile, Met or Val
  Variant (14)..(14): Xaa in position 14 is Phe or Leu
  Variant (15)..(15): Xaa in position 15 is any amino acid
  Variant (16)..(16): Xaa in position 16 is Asp, Asn, Ser or Thr
GVXHRDLKPENFLXXX

SEQ ID NO: 2486 - protein, 60 aa, Artificial sequence
  protein pattern
  Variant (2)..(2): Xaa in position 2 is any or no amino acid
  Variant (5)..(5): Xaa in position 5 is Ala, Asp, Gly, Asn or Ser
  Variant (6)..(6): Xaa in position 6 is Asp, Glu, Lys or Arg
  Variant (7)..(7): Xaa in position 7 is any amino acid
  Variant (8)..(8): Xaa in position 8 is Asp, Glu or Gln
  Variant (9)..(9): Xaa in position 9 is any amino acid
  Variant (11)..(11): Xaa in position 11 is Ile or Val
  Variant (12)..(14): Xaa in position 12 to 14 is any amino acid
  Variant (15)..(15): Xaa in position 15 is Ile or Val
  Variant (16)..(16): Xaa in position 16 is Ile, Leu, Met or Val
  Variant (17)..(20): Xaa in position 17 to 20 is any amino acid
  Variant (21)..(21): Xaa in position 21 is Asp, Glu, Asn or Ser
  Variant (23)..(25): Xaa in position 23 to 25 is any amino acid
  Variant (29)..(29): Xaa in position 29 is any amino acid
  Variant (30)..(30): Xaa in position 30 is Ile, Leu or Val
  Variant (32)..(33): Xaa in position 32 to 33 is any amino acid
  Variant (35)..(35): Xaa in position 35 is any amino acid
  Variant (36)..(36): Xaa in position 36 is Asp, Glu, Asn or Ser
  Variant (37)..(37): Xaa in position 37 is Phe, Ile or Leu
  Variant (38)..(38): Xaa in position 38 is Ile, Leu, Met or Val
  Variant (39)..(40): Xaa in position 39 to 40 is any amino acid
  Variant (41)..(41): Xaa in position 41 is Phe, Leu, Met or Val
  Variant (43)..(48): Xaa in position 43 to 48 is any amino acid
  Variant (50)..(53): Xaa in position 50 to 53 is any amino acid
  Variant (54)..(54): Xaa in position 54 is Asp, Glu, Gln or Arg
  Variant (55)..(55): Xaa in position 55 is Ala, Ile or Val
  Variant (56)..(56): Xaa in position 56 is Leu or Met
  Variant (57)..(59): Xaa in position 57 to 59 is any amino acid
PXFWXXXXXGXXXXXXXXXXXFXXXPWPXXSXXAXXXXXXXLXXXXXXRXXXXXXXXXXW

SEQ ID NO: 2487 - protein, 20 aa, Artificial sequence
  protein pattern
  Variant (2)..(2): Xaa in position 2 is any amino acid
  Variant (3)..(3): Xaa in position 3 is any or no amino acid
  Variant (5)..(5): Xaa in position 5 is any or no amino acid
  Variant (7)..(7): Xaa in position 7 is Ile or Val
  Variant (8)..(8): Xaa in position 8 is any amino acid
  Variant (10)..(10): Xaa in position 10 is Leu or Met
  Variant (11)..(12): Xaa in position 11 to 12 is any amino acid
  Variant (14)..(14): Xaa in position 14 is Ala, Pro, Ser or Thr
  Variant (15)..(17): Xaa in position 15 to 17 is any amino acid
  Variant (18)..(18): Xaa in position 18 is Asn or Ser
  Variant (19)..(19): Xaa in position 19 is Ile, Leu or Val
  Variant (20)..(20): Xaa in position 20 is Ala, Ile, Pro or Val
DXXRXEXXIXXXLXXXXXXX

SEQ ID NO: 2488 - protein, 15 aa, Artificial sequence
  protein pattern
  Variant (3)..(3): Xaa in position 3 is Ala, Ser, Thr or Val
  Variant (4)..(4): Xaa in position 4 is any amino acid
  Variant (10)..(10): Xaa in position 10 is any amino acid
  Variant (12)..(14): Xaa in position 12 to 14 is any amino acid
  Variant (15)..(15): Xaa in position 15 is Ala, Asp, Glu, Gly or Asn
LKXXDFGLSXFXXXX

SEQ ID NO: 2489 - protein, 17 aa, Artificial sequence
  protein pattern
  Variant (2)..(3): Xaa in position 2 to 3 is any amino acid
  Variant (6)..(6): Xaa in position 6 is any amino acid
  Variant (7)..(7): Xaa in position 7 is Asp or Asn
  Variant (8)..(8): Xaa in position 8 is any amino acid
  Variant (9)..(9): Xaa in position 9 is Asp, Asn, Ser or Thr
  Variant (11)..(11): Xaa in position 11 is any amino acid
  Variant (13)..(15): Xaa in position 13 to 15 is any amino acid
  Variant (16)..(16): Xaa in position 16 is Glu or Lys
FXXFDXXXXGXIXXXXL

SEQ ID NO: 2490 - protein, 13 aa, Artificial sequence
  protein pattern
  Variant (2)..(2): Xaa in position 2 is any amino acid
  Variant (3)..(3): Xaa in position 3 is Asp or Asn
  Variant (4)..(4): Xaa in position 4 is any amino acid
  Variant (7)..(7): Xaa in position 7 is any amino acid
  Variant (8)..(8): Xaa in position 8 is Ile or Val
  Variant (9)..(9): Xaa in position 9 is Asp, Asn or Ser
  Variant (10)..(10): Xaa in position 10 is Phe or Tyr
  Variant (11)..(11): Xaa in position 11 is any amino acid
DXXXDGXXXXXEF

SEQ ID NO: 2491 - protein, 13 aa, Artificial sequence
  protein pattern
  Variant (2)..(2): Xaa in position 2 is Ser or Thr
  Variant (4)..(5): Xaa in position 4 to 5 is any amino acid
  Variant (8)..(8): Xaa in position 8 is any amino acid
  Variant (9)..(9): Xaa in position 9 is Ile, Leu, Met or Val
  Variant (10)..(10): Xaa in position 10 is any amino acid
  Variant (11)..(11): Xaa in position 11 is Lys or Arg
  Variant (12)..(12): Xaa in position 12 is any amino acid
  Variant (13)..(13): Xaa in position 13 is Ile, Met or Val
YXEXXAAXXXXXX

SEQ ID NO: 2492 - DNA, 387 bp, Arabidopsis thaliana
  CDS (1)..(387)
atggaagacaatgataagtctccccctaaggattactataagattctagaagttgattacgacgcaactgaggaattgatcagactcaattatcggaagcttgcattgaagtggcatcctgataagcacaaaggcgatagtgcagctacagaaaaatttcaagagattaatgaagcttataatgtgctgatggaccctgctaaacgttttgagtatgatttcactggtatatatgagatccacaaatacactttacgggaatatctcgccagatttaagggaatgatactcacttgcaatgggctcggtatcagccaatcctcatcaccatggacacatcaattggctgagaccaccaaacaacagacgagcaaggatactgtataa

SEQ ID NO: 2493 - protein, 128 aa, Arabidopsis thaliana
MEDNDKSPPKDYYKILEVDYDATEELIRLNYRKLALKWHPDKHKGDSAATEKFQEINEAYNVLMDPAKRFEYDFTGIYEIHKYTLREYLARFKGMILTCNGLGISQSSSPWTHQLAETTKQQTSKDTV

SEQ ID NO: 2494 - DNA, 408 bp, Glycine max
  CDS (1)..(408)
atgtattatgtaaaagaagctgcgcatgtcgaccccatgttcgtagctgataacaccaaccccaaggattattacaaagtgctggaggttgaatatgatgcaaccgatgaaaatatcaaattaaattaccgaagactcgcgctgaaatggcatcctgacaagcacggaggagatagtgctgttactgcaaaatttcaagagataaatgaagcttacaatgtattaagtgatcctaccaagcgtttggactatgatttaactgggatatgcgagattgaaaaatatagcttgcaggagtatcttgccagatttaaaagcatgattcttacctgcaatggacttggtatcaatcagacagacagatggtctcagcaattgattgaaaattttgagtccctagataaataa

SEQ ID NO: 2495 - protein, 135 aa, Glycine max
MYYVKEAAHVDPMFVADNTNPKDYYKVLEVEYDATDENIKLNYRRLALKWHPDKHGGDSAVTAKFQEINEAYNVLSDPTKRLDYDLTGICEIEKYSLQEYLARFKSMILTCNGLGINQTDRWSQQLIENFESLDK

SEQ ID NO: 2496 - DNA, 660 bp, Sorghum bicolor
  CDS (152)..(520)
caagaactcctccgatcccacctgtccatcgatcgatcgacttccgttcccctcggaatcgaggcggccccgagaatcccaacgcacgagaagaggaacaagggaaccaggcggagcgaagagagcccggggtgatgaattgttacggtttatggacggagcaagcaaggagcctctccgcaaggactactacaaagttctggaggttgattatgacgcttctgatgacaccatcaagttgagttatagaagattagctttgatgtggcatccagacaagcataagggtgataatgatgtcacagctaaatttcaggagattaatgaagcatacaaggttttaagtgacccagctaagcgactagaatacgatgtttctggttgttatgagattgatcaatatactttgcgtgagtaccttgcaaaatttaagggtatgatacttacctgtaatggccttggcatagatcatccttctagtaaatgggcccgacatttgagggaactgaagccccattgatcgacggcaaattattgtaatattgttgactctcgttggatttactcagcacagtaagacacaattgtgttgtatcacaaacaatgattcccttgtcacttctgggcaataatgcatgtatagtaagggtctattttgtt

SEQ ID NO: 2497 - protein, 122 aa, Sorghum bicolor
MDGASKEPLRKDYYKVLEVDYDASDDTIKLSYRRLALMWHPDKHKGDNDVTAKFQEINEAYKVLSDPAKRLEYDVSGCYEIDQYTLREYLAKFKGMILTCNGLGIDHPSSKWARHLRELKPH

SEQ ID NO: 2498 - DNA, 686 bp, Zea mays
  CDS (209)..(574)
cctcgaggccggccgggccgggaaaacaaaggaaaacagaaaagctgcggaagttgtcaagaactccgacgatcccacatatccgtcaatcgatcgactcccgttcccctcggaatcgaaatggccccgagaattccaacgcacaagaaggggaacaagggaaccaggcatcgcgaagagagcccggggtgatgaattgttacggttcatggacggagcaagcaaggagcctctccgcaaggactactacaaagttctggaggttgactatgacgcatctgatgacaccatcaaattgagttatagaagattagctttgatgtggcatccggacaagcacaagggcaatagcaatgccacaactaaacttcaggagattaatgacgcatacaaagttttgagtgacccaactaagcgactagaatacgatgtttccggttgctacgagatcgaccaatatactttgcgtgagtaccttacaaaatttaagggtatgatacttacctgtaatggccttggcatagaccattcttctaagtgggcccgacatttgagggaactgaaacctcattgatcaacggggtatggatttactgctctatgtaagacacaatgtgctgtatcacaattcacaaacaatggccccctactccccgaaaaaaaaaaaaaaaaaggcccctagggcc

SEQ ID NO: 2499 - protein, 121 aa, Zea mays
MDGASKEPLRKDYYKVLEVDYDASDDTIKLSYRRLALMWHPDKHKGNSNATTKLQEINDAYKVLSDPTKRLEYDVSGCYEIDQYTLREYLTKFKGMILTCNGLGIDHSSKWARHLRELKPH

SEQ ID NO: 2500 - DNA, 372 bp, Zea mays subsp. mays
  CDS (1)..(372)
atggctgccgctgataacaccaacccaaaggattattacaaagtgctggaggttgaatatgatgcaaccgatgaaaatatcaaattaaattaccgaagactcgcgttgaaatggcatcctgacaagcacggaggtgatagtgctgttactgcaaaatttcaagagattattgaagcttacaatgtattaagtgatcctgccaagcgtttggactatgatttaactgggatatgtgagattgaaaaatatagcttgcaggaatatcttgccagatttaaaagcatgattcttacctgcaatggacttggtatcaatcagacagacagatggtcacaacaattgattgaaaattttgagtccctagataaataa

SEQ ID NO: 2501 - protein, 123 aa, Zea mays subsp. mays
MAAADNTNPKDYYKVLEVEYDATDENIKLNYRRLALKWHPDKHGGDSAVTAKFQEIIEAYNVLSDPAKRLDYDLTGICEIEKYSLQEYLARFKSMILTCNGLGINQTDRWSQQLIENFESLDK

SEQ ID NO: 2502 - DNA, 366 bp, Oryza sativa (japonica cultivar-group)
  CDS (1)..(366)
atggacggagcaagcgagaagcctccccacaaggactattacaaagttctggaggttgattacgatgcatccgatgacaccatcaaattgagttatagaagattagctttgatgtggcatccagacaagcataagggggataatgatgtcacagctaaatttcaggagatcaatgaagcctacacagttctaagtgatccagctaagcgccttgaatacgacctttccggatgttatgagttaaatcgatatactttgcgtgagtaccttacaaggtttaagggtatgatacttacctgcaatggtcttggcatagaccattcttcaaaatgggcccggcatttgagggaattggagccccattga

SEQ ID NO: 2503 - protein, 121 aa, Oryza sativa (japonica cultivar-group)
MDGASEKPPHKDYYKVLEVDYDASDDTIKLSYRRLALMWHPDKHKGDNDVTAKFQEINEAYTVLSDPAKRLEYDLSGCYELNRYTLREYLTRFKGMILTCNGLGIDHSSKWARHLRELEPH

SEQ ID NO: 2504 - DNA, 492 bp, Oryza sativa (japonica cultivar-group)
  CDS (1)..(492)
atgtggtgggagtgggaggaggacggcgaggaggcggcgcggccgggggaggaggtccccgtcgacttcgacttcatctccctcctctgcaagcccaaggattactacaagattctggaagtgggatatgatgcgtcggaagaggcgatcaggtcgagctatatacgtcttgcactgaagtggcaccctgacaagaagcagggcgaagaaaatgcaacctccagatttcaggagattaatgaagcataccaagtgctcagtaatccagccaaaaggcgagagtatgacaagaaaggcattctttatgttcaagatcataatgtagtgcacggtcatgcggacctgccacttttgggaggaaatgatgacgctgagttcatcctgtgttttgacaaatggaaagtggtcggaagggaattagggaaaatatcagctgatctgttggtgacactgcttctcccactcaattttcaatgtgtcaaaactcaatag

SEQ ID NO: 2505 - protein, 163 aa, Oryza sativa (japonica cultivar-group)
MWWEWEEDGEEAARPGEEVPVDFDFISLLCKPKDYYKILEVGYDASEEAIRSSYIRLALKWHPDKKQGEENATSRFQEINEAYQVLSNPAKRREYDKKGILYVQDHNVVHGHADLPLLGGNDDAEFILCFDKWKVVGRELGKISADLLVTLLLPLNFQCVKTQ

SEQ ID NO: 2506 - DNA, 441 bp, Arabidopsis thaliana
  CDS (1)..(441)
atggaaggtggcattaggcaaacgtattacgagattctcggtgttgccgttgattcttcggcggagcagatacgacgagcatatcacaagcttgctaagatatggcatcctgaccggtggacgaaagatccttttagatctggagaagctaaacgaagattccagcagattcaagaagcttattcagttttgtcggatgagaggaaacgaagctcgtacgacgttggactctatgattctggagaagatgaggaaaagcaatacagcttggaagagctacagacaatggtcgatgacatggtctatgagttccaatcagaaccattgttccagaaccaatcaatgcaaatgaatttcgacttgaaccaaacgcctgattggcattcacagatgtctctaccgctttcaagctttgagttctattctcaaagcagctactga

SEQ ID NO: 2507 - protein, 146 aa, Arabidopsis thaliana
MEGGIRQTYYEILGVAVDSSAEQIRRAYHKLAKIWHPDRWTKDPFRSGEAKRRFQQIQEAYSVLSDERKRSSYDVGLYDSGEDEEKQYSLEELQTMVDDMVYEFQSEPLFQNQSMQMNFDLNQTPDWHSQMSLPLSSFEFYSQSSY

SEQ ID NO: 2508 - DNA, 360 bp, Arabidopsis thaliana
  CDS (1)..(360)
atgtggtgttccgattggggagacagccatggcttcgattttttcgatttcgaggattacaaggatcactataaagttctggaattgaactgtgacgcttctgatgatgagattcgttccagctttatccgtcttgctctgaaatggcatccggacaaatttaaagaagaggattctgctacgtctaggtttcaagaaatcaacgaggcttatcaagtgttgagcgacccaattgcaaggcaggagtacgataagaaaaggatgcgtcgtatctatgagcacaacacggaactattgaatgagtacaaggagctcatattgacttgcaatggccttggggtgaagcattatctttggtaa

SEQ ID NO: 2509 - protein, 119 aa, Arabidopsis thaliana
MWCSDWGDSHGFDFFDFEDYKDHYKVLELNCDASDDEIRSSFIRLALKWHPDKFKEEDSATSRFQEINEAYQVLSDPIARQEYDKKRMRRIYEHNTELLNEYKELILTCNGLGVKHYLW

SEQ ID NO: 2510 - DNA, 885 bp, Geobacter sulfurreducens PCA
  CDS (1)..(885): transl_table=11
atggcgcagcacgactattacgaaaccctcggcctgaaaaagggggcaaccgaagaggagatcaagaaggcctaccgcaaactggccatcacgtatcacccggacaaaaatcccggcgacgccgcggctgaggaaaaattcaaggagatcaacgaggcctatgctgtcctctccgatccccagaagcgggcccagtacgatcagttcggttccaacggattccaccagcgcttctcccaggaagacattttccgggggttcgacgtgggggacatgttcaaggatatgggggtcggcaccgacgacatcttttcccgcatattcggaggaggattccgtcagggaggcttcagcttcacagggacacggcagcggggtggggattttaccatggagcttcccgtcaccttccgggaggcctacgcgggctgcgaaaagcgggttgcgtaccggcgggacggcatgcgggaggagatctccgtcaaggtcccggccggcgttgaaaccggggcgcgcctgcgggttgcgggcaagggaggggtcggcagcggcggcacgggggacctctacctggttgtgaaggtgggaggcgatccacagttccaccgcgaaggagatgacatcgtggtggaacgggagatcaaattcaccgacgcggcactcggcgcgagccttgatgtgccgaccctggaagggaccaagcgcgtcaaggttcccgccggtatccagtccggcaccaagattcgcctgaagggccttggtttcccccatatggggaaaacagccaagggagatctctacgttcacatcaatgtatcggttccccggtcgctttccgccgaccaaaaggctattctggaaaagctgcgtgaggcggggctgtaa

SEQ ID NO: 2511 - protein, 294 aa, Geobacter sulfurreducens PCA
MAQHDYYETLGLKKGATEEEIKKAYRKLAITYHPDKNPGDAAAEEKFKEINEAYAVLSDPQKRAQYDQFGSNGFHQRFSQEDIFRGFDVGDMFKDMGVGTDDIFSRIFGGGFRQGGFSFTGTRQRGGDFTMELPVTFREAYAGCEKRVAYRRDGMREEISVKVPAGVETGARLRVAGKGGVGSGGTGDLYLVVKVGGDPQFHREGDDIVVEREIKFTDAALGASLDVPTLEGTKRVKVPAGIQSGTKIRLKGLGFPHMGKTAKGDLYVHINVSVPRSLSADQKAILEKLREAGL

SEQ ID NO: 2512 - DNA, 849 bp, Gibberella zeae PH-1
  CDS (1)..(849)
atgacggactcgaaatcagccgacctgctgcaatatgcgcaggaatacgcctccaaaaatgaagacctctacgaacttctcggcgtcgatgccctcacacccaaagaagagatccaccgcgcctggcgaaagcgctccttaaagtaccaccccgataaagcaggcgataaattcgacgcagaagtatgggaaaagttcgaacgcgcccgcgacatcctttccgatcctggggcgcgcggcgcctacgatggcgctatcaaggcagccctcttgcgaaaacaagagtacgaggctagggataaaaagaacaaggctctagttgacgatcttgaagcccgagaaaacgcttggaaggtccagcgtgaggaaaaggagcaacgggagaaggatgaaatagagaaggaaaggtcacgactggtcgagcaaaggcgcttgcgtgaggaggaggaaaagcgtcaagctgctgctgcgcaagaagttgaggatcttgccgaagcaaagagacgcctaaaggaaaagaaggagaagaaaaagcaggatgaggcgagagaaaagttcctgcgcaagtcgcggatggctgccgaggctacagatggcaagccagcgtctggcccagtcaacggtgctatgaacgtgccaggagactactcggtggatttcggcacagaacagaaactttactgggaattggtctgcgacaagttgcgtgctgttcaggccgtcaagaatctacaaaagaatcaagcaacaccggaagagtaccaacaagcagagcaaggcctcctcgaagcaaagacaaggattcaccaggccgaggttcgatttgccgagcaggcatctgcatcatga

SEQ ID NO: 2513 - protein, 282 aa, Gibberella zeae PH-1
MTDSKSADLLQYAQEYASKNEDLYELLGVDALTPKEEIHRAWRKRSLKYHPDKAGDKFDAEVWEKFERARDILSDPGARGAYDGAIKAALLRKQEYEARDKKNKALVDDLEARENAWKVQREEKEQREKDEIEKERSRLVEQRRLREEEEKRQAAAAQEVEDLAEAKRRLKEKKEKKKQDEAREKFLRKSRMAAEATDGKPASGPVNGAMNVPGDYSVDFGTEQKLYWELVCDKLRAVQAVKNLQKNQATPEEYQQAEQGLLEAKTRIHQAEVRFAEQASAS

SEQ ID NO: 2514 - DNA, 969 bp, marine gamma proteobacterium HTCC2207
  CDS (1)..(969): transl_table=11
atggatttccaggactactacaaaatacttttggttgcccctggcgccgacagtgaaaccatcaaaactgcctaccgcaagctagctagaaaataccacccagatgtcagtggacaccatgaggccgaagaaaaattcaaacagatcgccgaagcctacgaggttttaaaagatccgaacaagcgtgctcaatacgaccagttgcgggagtctgctgcgcaggggtacggacagcggcaggcacaggggggaacagcacagcagaattcccaatcaccctttggtcagggtcgtttctcagcattcttctcgtcactttttggtggagccgatcagccagcacagggcgttggcactcatggctcttcgcagcaggatttttcgacttcaaattctgttagaaaaggccaagacattgaaaccgaactacagatatctcttgaagacagattgaccaccactacgaaacggatctcctatagcttttctcaccgcgatggttgggggcgggctagtcaggtcagcaaaatcctcaatgtaaaaattcccgcaggggtagtcgatggcgagcgcattcgccttaaagggcagggcgctcaaggccttggcgatgctcccccgggagacctctacctgcgtattcatctggtgccacactcgctgttcgaggtcgaagcccaggacctgattgtcattgttccccttgcgccctgggaagtcgccctggggaccagtcttgagttaccgactctgtcagggaaagtaaaacttaggattccaagcaacagccaaactggccagcgcctgcgaatcaaaggcaaagggctggttcacaaggacggtcagggtgacctctatgcggtactcaaagtggttatgcccgattcaggctcagaagagatcaagcagtactggcaacaacaggccggggcaacggcctctggttcacgaatggagtggaggggataa

SEQ ID NO: 2515 - protein, 322 aa, marine gamma proteobacterium HTCC2207
MDFQDYYKILLVAPGADSETIKTAYRKLARKYHPDVSGHHEAEEKFKQIAEAYEVLKDPNKRAQYDQLRESAAQGYGQRQAQGGTAQQNSQSPFGQGRFSAFFSSLFGGADQPAQGVGTHGSSQQDFSTSNSVRKGQDIETELQISLEDRLTTTTKRISYSFSHRDGWGRASQVSKILNVKIPAGVVDGERIRLKGQGAQGLGDAPPGDLYLRIHLVPHSLFEVEAQDLIVIVPLAPWEVALGTSLELPTLSGKVKLRIPSNSQTGQRLRIKGKGLVHKDGQGDLYAVLKVVMPDSGSEEIKQYWQQQAGATASGSRMEWRG

SEQ ID NO: 2516 - DNA, 930 bp, Candidatus Desulfococcus oleovorans Hxd3
  CDS (1)..(930): transl_table=11
atggcggaaaccgattactacaagattctgggtgtggagaaaaacgccactgacgaggagattaaaaaggcctatcgaaagctggcgatgaaatatcacccggaccatagcaagggcgataagaaagcggcggaagaaaaatttaaaaagatcagtgaagcctacgccgtgctcaaggataaggaaaagaggaaacagtacgatacatacggcgccaatggttttcatgagcggtactcccaggaggatattttccgggggtttgatttttccgatattctaaaggaattcggttttggcgggggcggtggctttttctccggcggcggccggggaggtggtgcccgcttttctttcgacggtggttctccctttggcggcggcggcccccggcagacggccgcagtaaagggggaggacgtagtgtacgagcttcccgttacgattcaggaggtcgtctccggcaccaccaaggcggtttcccttcgtcatggcggcggcaccgaaactgtcaacgtgaaaattccaaagggtatggtgtccggcaagaagatacggcttgccggaaagggccaacccagccggtttggcggtccttcaggggatatgtatattcaggcaaagctggtcaaggacccggtgttcgaagtggacggctacgacctctatatgaccacaggcgtcaaactcactgacgccttgaagggaacccggatcacggtggccggggtggacggcaaagacctgaacctgcgggtgccgccgggcacccggcacaaaagcaagctgcggcttgccgggcaggggattccccacatgaggggcgcgggccggggcgacctgtacgttgaaattcaggtggagatgccgtccaaattgaccgatcagcagaaacagctggtcgaagcccttgccgaaaccggtctgtaa

SEQ ID NO: 2517 - protein, 309 aa, Candidatus Desulfococcus oleovorans Hxd3
MAETDYYKILGVEKNATDEEIKKAYRKLAMKYHPDHSKGDKKAAEEKFKKISEAYAVLKDKEKRKQYDTYGANGFHERYSQEDIFRGFDFSDILKEFGFGGGGGFFSGGGRGGGARFSFDGGSPFGGGGPRQTAAVKGEDVVYELPVTIQEVVSGTTKAVSLRHGGGTETVNVKIPKGMVSGKKIRLAGKGQPSRFGGPSGDMYIQAKLVKDPVFEVDGYDLYMTTGVKLTDALKGTRITVAGVDGKDLNLRVPPGTRHKSKLRLAGQGIPHMRGAGRGDLYVEIQVEMPSKLTDQQKQLVEALAETGL

SEQ ID NO: 2518 - DNA, 492 bp, Oryza sativa subsp
  CDS (1)..(492)
atgtggtgggagttggaggaggacggcaaggaggcggcgtggccgggggaggaggtccccgtcgacttcgacttcatctccctcctctgcaagcccaaggattactacaagattctggaagtgggatatgatgcgtcggaagaggcgatcaggtcgagctatatacgtcttgcactgaagtggcaccctgacaagaagcagggcgaagaaaatgcaacctccagatttcaggagattaatgaagcataccaagtgctcagtaatccagccaaaaggcgagagtatgacaagaaaggcattctttatgttcaagatcataatgtagtgcacggtcatgcggacctgccacttttgggaggaaatgatgacgctgagttcatcctgtgttttgacaaatggaaagtggtcggaagggaattagggaaaatatcagctgatctgttggtgacactgcttctcccactcaattttcaatgtgtcaaaactcaatag

SEQ ID NO: 2519 - protein, 163 aa, Oryza sativa subsp
MWWELEEDGKEAAWPGEEVPVDFDFISLLCKPKDYYKILEVGYDASEEAIRSSYIRLALKWHPDKKQGEENATSRFQEINEAYQVLSNPAKRREYDKKGILYVQDHNVVHGHADLPLLGGNDDAEFILCFDKWKVVGRELGKISADLLVTLLLPLNFQCVKTQ

SEQ ID NO: 2520 - DNA, 399 bp, Oryza sativa subsp
  CDS (1)..(399)
atgtggtgggagtgggaggaggacggcgaggaggcggcgcggccgggggaggaggtccccgtcgacttcgacttcatctccctcctctgcaagcccaaggattactacaagattctggaagtgggatatgatgcgtcggaagaggcgatcaggtcgagctatatacgtcttgcactgaagtggcaccctgacaagaagcagggcgaagaaaatgcaacctccagatttcaggagattaatgaagcataccaagtgctcagtaatccagccaaaaggcgagagtatgacaagaaaggcattctttatgttcaagatcataatgtagtggactatctgaaccggcacaaaggtttaatccttacttgcaatggccttggcataaggcattcagtatggtga

SEQ ID NO: 2521 - protein, 132 aa, Oryza sativa subsp
MWWEWEEDGEEAARPGEEVPVDFDFISLLCKPKDYYKILEVGYDASEEAIRSSYIRLALKWHPDKKQGEENATSRFQEINEAYQVLSNPAKRREYDKKGILYVQDHNVVDYLNRHKGLILTCNGLGIRHSVW

SEQ ID NO: 2522 - DNA, 360 bp, Arabidopsis thaliana
  CDS (1)..(360)
atgtggtgttccgattggggagacagccatggcttcgattttttcgatttcgacgattacaaggatcactataaagttctggaattgaactgtgacgcttctgatgatgagattcgttccagctttatccgtcttgctctgaaatggcatccggacaaatttaaagaagaggattctgctacgtctaggtttcaagaaatcaacgaggcttatcaagtgttgagcgacccaattgcaaggcaggagtacgataagaaaaggatgcgtcgtatctatgagcacaacacggaactattgaatgagtacaaggagctcatattgacttgcaatggccttggggtgaagcattatctttggtaa

SEQ ID NO: 2523 - protein, 119 aa, Arabidopsis thaliana
MWCSDWGDSHGFDFFDFDDYKDHYKVLELNCDASDDEIRSSFIRLALKWHPDKFKEEDSATSRFQEINEAYQVLSDPIARQEYDKKRMRRIYEHNTELLNEYKELILTCNGLGVKHYLW

SEQ ID NO: 2524 - DNA, 369 bp, Brassica napus
  CDS (1)..(369)
atgtggtgttccggttggggagacggccatggctcttttctcgatttcaatttcgatttcgacaactacaaggatcactataaagtccttgagctgaacagcgacgcctccgatgatgagattcgctctaacttcatccgccttgcactgaaatggcatccggataaacttaaagaagaggattccgctacgtctaggtttcaagaaatcaacgaggcttaccaagtattgagcgacccatttacaagggaggagtacgataagaaaaggatgcgtcgtatctatgagcacaacatggagctattcgaccggtacaaggagctgatatttacttgcaatggccttgggatgaataattttctctggtga

SEQ ID NO: 2525 - protein, 122 aa, Brassica napus
MWCSGWGDGHGSFLDFNFDFDNYKDHYKVLELNSDASDDEIRSNFIRLALKWHPDKLKEEDSATSRFQEINEAYQVLSDPFTREEYDKKRMRRIYEHNMELFDRYKELIFTCNGLGMNNFLW

SEQ ID NO: 2526 - DNA, 408 bp, Glycine max
  CDS (1)..(408)
atgatgtgggaatgggacgattaccaagacaccatccccaaacacgacctaccccaacccgattcccacctcaaattcgatttcttctccgccctctccaggcccaaggattattacaagatactggaagtggattacgacgccacggatgacgctattcgctccaattacattcgcctcgcgctgaagtggcacccggacaagcacaaagaccagaactctgctacctcgcgattccaagacataaacgaagcttatcaggttttgagtgatccagtcaaaaggagggaatatgacataaatgggatgcgttacgaatatgattacaatataattgattatctcaaccgttacaagggccttatattgacgtgcaatggccttggcataaagcattcgatatggtaa

SEQ ID NO: 2527 - protein, 135 aa, Glycine max
MMWEWDDYQDTIPKHDLPQPDSHLKFDFFSALSRPKDYYKILEVDYDATDDAIRSNYIRLALKWHPDKHKDQNSATSRFQDINEAYQVLSDPVKRREYDINGMRYEYDYNIIDYLNRYKGLILTCNGLGIKHSIW

SEQ ID NO: 2528 - DNA, 342 bp, Glycine max
  CDS (1)..(342)
atggctgccgctgataacaccaacccaaaggattattacaaagtgctggaggttgaatatgatgcaaccgatgaaaatatcaaattaaattaccgaagactcgcgttgaaatggcatcctgacaagcacggaggtgatagtgctgttactgcaaaatttcaagagattattgaagcttacaatgtattaagtgatcctgccaagcgtttggactatgatttaactgggatatgtgagattgaaaaatatagcttgcaggaatatcttgccagatttaaaagcatgattcttacctgcaatggacttggtatcaatcagacagacagatggtatttattttga

SEQ ID NO: 2529 - protein, 113 aa, Glycine max
MAAADNTNPKDYYKVLEVEYDATDENIKLNYRRLALKWHPDKHGGDSAVTAKFQEIIEAYNVLSDPAKRLDYDLTGICEIEKYSLQEYLARFKSMILTCNGLGINQTDRWYLF

SEQ ID NO: 2530 - DNA, 366 bp, Zea mays
  CDS (1)..(366)
atggacggagcaagcaaggagcctctccgcaaggactactacaaagttctggaggttgactatgacgcatctgatgacaccatcaaattgagttatagaagattagctttgatgtggcatccggacaagcataagggcaatagcaatgccacaactaaatttcaggagattaatgaagcatacaaagttttgagtgacccagctaagcgactagaatacgatgtttccggttgctacgagatcgaccaatatactttgcgtgagtaccttacaaaatttaagggtatgatacttacctgtaatggccttggcatagaccattcttctaagtgggcccgacatttgagggaactgaaaccccattga

SEQ ID NO: 2531 - protein, 121 aa, Zea mays
MDGASKEPLRKDYYKVLEVDYDASDDTIKLSYRRLALMWHPDKHKGNSNATTKFQEINEAYKVLSDPAKRLEYDVSGCYEIDQYTLREYLTKFKGMILTCNGLGIDHSSKWARHLRELKPH

SEQ ID NO: 2532 - DNA, 513 bp, Linum usitatissimum
  CDS (1)..(513)
atggatcgggaaggaggttcaaacggcgtcgtcggacaatcgtcatactacgctgtcctcgggattcgcaaggacgcctcctcctccgatatccgatccgcttaccgccgcctcgccatgaggtggcatccggacaaatgggcgagaaatccaggggccgtggctgcagacgcgaaacggcggttccagcaaatccaagaggcttattccgttctgtccgacccgggaaagaggtcaatgtacgacgccggcctctacgatcctacggaggaggacgacgaggagttctgcgatttcatgcaagagatgatctcgatgatgaacaatgtgaaagacgagggagacagcttcgaagatctgcagaggatgttcgtggaaatggtgggcgacggaggcggcggcggcggcggcggtggaagctttgaactgaaccagaaaccgacggatgggaagagggcacgtgtgaacacatcgaaaggtaatgctgcgaagcgtagctccactcgatgctga

SEQ ID NO: 2533 - protein, 170 aa, Linum usitatissimum
MDREGGSNGVVGQSSYYAVLGIRKDASSSDIRSAYRRLAMRWHPDKWARNPGAVAADAKRRFQQIQEAYSVLSDPGKRSMYDAGLYDPTEEDDEEFCDFMQEMISMMNNVKDEGDSFEDLQRMFVEMVGDGGGGGGGGGSFELNQKPTDGKRARVNTSKGNAAKRSSTRC

SEQ ID NO: 2534 - DNA, 366 bp, Hordeum vulgare
  CDS (1)..(366)
atggacggagcaagcgaggagccgctccacaaggactattacaaagttctggaggtcgattatgatgcatctgacgacaacatcaaattgagttacagaagactagcgttgaagtggcaccccgacaagcataagggcgaggatgatgttacagctaaatttcaggagatcaacgaggcttacaaaattttaagtgatccagttacacggcttgagtacgacttttctggctgttacgaggtcaatcaatatactgcacgtgagtacctttcaagattcaagggaatgattcttacctgcaatggccttggcatagagcattcttcaaaatgggcgcgacatttgagggaatgggagccccattga

SEQ ID NO: 2535 - protein, 121 aa, Hordeum vulgare
MDGASEEPLHKDYYKVLEVDYDASDDNIKLSYRRLALKWHPDKHKGEDDVTAKFQEINEAYKILSDPVTRLEYDFSGCYEVNQYTAREYLSRFKGMILTCNGLGIEHSSKWARHLREWEPH

SEQ ID NO: 2536 - DNA, 396 bp, Hordeum vulgare
  CDS (1)..(396)
atgttgtgggagtgggatgacggcgacgaggcggcgcggacgggcgacgaggtccccgtcgatttcgacttcttctccttcttcgccaagcccaaggattactacaagatactggaagttgattatgacgcgtcggaggagacaatcaggtcgagctacatccgtctcgcgctgaaatggcaccctgacaagaaacaagatgaagaaaaggcaacctccagatttcaggacattaatgaggcgtaccaagttctcagcaatccagcaaaacggcaggagtatgataagaaaggtgttctgtacgttcaggatcagaatgcagcggattatctgaaccggcacaagggtttaatacttacttgcaatggccttggtgtaaggtactcggtgtggtga

SEQ ID NO: 2537 - protein, 131 aa, Hordeum vulgare
MLWEWDDGDEAARTGDEVPVDFDFFSFFAKPKDYYKILEVDYDASEETIRSSYIRLALKWHPDKKQDEEKATSRFQDINEAYQVLSNPAKRQEYDKKGVLYVQDQNAADYLNRHKGLILTCNGLGVRYSVW

SEQ ID NO: 2538 - DNA, 426 bp, Brassica napus
  CDS (1)..(426)
atggaagataacaattctcccaaggattactataagattctagaagttgattatgatgcaactgaggagatgctcaagctgaattatcggaagcttgcattgaagtggcatcctgataagcacaatggtgatactatggctacttcaaagtttcaggagatcaatgaagcttataacgtgctaatggatcctgatttacgttttgagtatgatttaaccggaatatacgagattcacaagtatactttgcgggagtatctggctaggtttaagggaatgatactcacttgcaatggactaggcatcagtcactcctcatcgccatggacacaacaattggcggaaggcaatatcactacagatgagcaaggtttcgatctggcttctgtatcaactgaaactgaaacagaaacagagcttaagtaa

SEQ ID NO: 2539 - protein, 141 aa, Brassica napus
MEDNNSPKDYYKILEVDYDATEEMLKLNYRKLALKWHPDKHNGDTMATSKFQEINEAYNVLMDPDLRFEYDLTGIYEIHKYTLREYLARFKGMILTCNGLGISHSSSPWTQQLAEGNITTDEQGFDLASVSTETETETELK

SEQ ID NO: 2540 - DNA, 369 bp, Brassica napus
  CDS (1)..(369)
atgtggtgttccggttggggagacggccatggctcttttctcgatttcaatttcgatttcgacaactacaaggatcactacaaagtccttgagctgaacagcgacgcctccgatgatgagattcgctctaacttcatccgccttgcactgaaatggcatccggataaactcaaagaagaggattccgctacgtctaggtttcaagaaatcaacgaggcttaccaagtattgagcgacccatttacaaggcaggagtacgataagaaaaggatgcgtcgtatctatgagcacaacatggagctattcgaccggtacaaggagctgatatttacttgcaatggccttgggatgaagaattttctttggtga

SEQ ID NO: 2541 - protein, 122 aa, Brassica napus
MWCSGWGDGHGSFLDFNFDFDNYKDHYKVLELNSDASDDEIRSNFIRLALKWHPDKLKEEDSATSRFQEINEAYQVLSDPFTRQEYDKKRMRRIYEHNMELFDRYKELIFTCNGLGMKNFLW

SEQ ID NO: 2542 - DNA, 381 bp, Brassica napus
  CDS (1)..(381)
atggaagacaatgataagtctcctccccctaaggattactataagattctagaagttgattacgacgcaactgaggaactgatcagactcaattatcggaagcttgctttgaagtggcatcctgataagcacaaaggagatactgcagctacagaaaaatttatagagataaatgatgcttataacgtgctgatggaccctgatgcacgttttgagtatgacttaaccggtatctatgagatccacaagtatactttgcgggagtaccttgccagatttaagggaatgatactcacttgcaacggactcggcatcagccaatcctcatcactatggacacatcaattgtctgagaccaccaacaaaacaacaacagactag

SEQ ID NO: 2543 - protein, 126 aa, Brassica napus
MEDNDKSPPPKDYYKILEVDYDATEELIRLNYRKLALKWHPDKHKGDTAATEKFIEINDAYNVLMDPDARFEYDLTGIYEIHKYTLREYLARFKGMILTCNGLGISQSSSLWTHQLSETTNKTTTD

SEQ ID NO: 2544 - DNA, 378 bp, Brassica napus
  CDS (1)..(378)
atggaagaccatgataagtctcctcctcccaaggattactataagattctagaagtagattacgacgcaactgaggatttgatcagactcaattatcgcaagcttgctttgaagtggcatcctgataaacacaaaggcgatactgcagctaaagagaaattcatagagataaatgaagcttataacgtgctgattgatcccgcagcacgttttgagtacgatttaaccggcatttacgagatccacaagtatactttacgggaatatctcgccagatttaagggaatgatactcacttgcaatggccttggcatcagccaatcctttgcaccatggacacatcaattgtctgagaccaccaacaaaccaacagactag

SEQ ID NO: 2545 - protein, 125 aa, Brassica napus
MEDHDKSPPPKDYYKILEVDYDATEDLIRLNYRKLALKWHPDKHKGDTAAKEKFIEINEAYNVLIDPAARFEYDLTGIYEIHKYTLREYLARFKGMILTCNGLGISQSFAPWTHQLSETTNKPTD

SEQ ID NO: 2546 - DNA, 399 bp, Zea mays
  CDS (1)..(399)
atgaggtgggagtgggagggcgacggtggtgaggcgccgcgggaggagactcctgtcgacttcgatttcatcgccctcctcgccaagcccaaggattactacaagatactggaagtagattactatgcgtctgaggagacgatcaggtccagctatatccgccttgcactgaaatggcaccctgacaagaagcaggggcagggcgaagagaattcaacctccaaatttcaggaaattaacgaggcataccaagttctgagtaatccagcaaaaaggcaagagtatgacaaaaaaggcattctatatgttcaagatcagaatgtagtggattacctgaaccggcacaaggggctaatacttacgtgcaatggtcttggtataaggtactcagtatggtga

SEQ ID NO: 2547 - protein, 132 aa, Zea mays
MRWEWEGDGGEAPREETPVDFDFIALLAKPKDYYKILEVDYYASEETIRSSYIRLALKWHPDKKQGQGEENSTSKFQEINEAYQVLSNPAKRQEYDKKGILYVQDQNVVDYLNRHKGLILTCNGLGIRYSVW

SEQ ID NO: 2548 - DNA, 20 bp, Artificial sequence
  primer
atggaagacaatgataagtc

SEQ ID NO: 2549 - DNA, 20 bp, Artificial sequence
  primer
ttatacagtatccttgctcg

SEQ ID NO: 2550 - protein, 113 aa, Artificial sequence
  consensus sequence
  Variant (5)..(5): Xaa in position 5 is any amino acid
  Variant (7)..(10): Xaa in position 7 to 10 is any amino acid
  Variant (13)..(16): Xaa in position 13 to 16 is any amino acid
  Variant (18)..(20): Xaa in position 18 to 20 is any amino acid
  Variant (22)..(23): Xaa in position 22 to 23 is any amino acid
  Variant (27)..(27): Xaa in position 27 is any amino acid
  Variant (33)..(41): Xaa in position 33 to 41 is any amino acid
  Variant (42)..(47): Xaa in position 42 to 47 is any or no amino acid
  Variant (49)..(50): Xaa in position 49 to 50 is any amino acid
  Variant (52)..(52): Xaa in position 52 is any amino acid
  Variant (56)..(56): Xaa in position 56 is any amino acid
  Variant (59)..(59): Xaa in position 59 is any amino acid
  Variant (62)..(63): Xaa in position 62 to 63 is any amino acid
  Variant (65)..(66): Xaa in position 65 to 66 is any amino acid
  Variant (69)..(94): Xaa in position 69 to 94 is any amino acid
  Variant (95)..(108): Xaa in position 95 to 108 is any or no amino acid
  Variant (110)..(110): Xaa in position 110 is any amino acid
  Variant (111)..(112): Xaa in position 111 to 112 is any or no amino acid
DYYKXLXXXXDAXXXXIXXXYXXLALXWHPDKXXXXXXXXXXXXXXXFXXIXEAYXVLXDPXXRXXYDXXXXXXXXXXXXXXXXXXXXXXXXXXXXXXXXXXXXXXXXGXXXG

SEQ ID NO: 2551 - protein, 36 aa, Artificial sequence
  protein pattern
  Variant (3)..(3): Xaa in position 3 is Ile or Val
  Variant (5)..(6): Xaa in position 5 to 6 is any or no amino acid
  Variant (8)..(9): Xaa in position 8 to 9 is any amino acid
  Variant (10)..(11): Xaa in position 10 to 11 is any or no amino acid
  Variant (13)..(13): Xaa in position 13 is Ser or Thr
  Variant (14)..(15): Xaa in position 14 to 15 is Asp or Glu
  Variant (16)..(16): Xaa in position 16 is any amino acid
  Variant (17)..(17): Xaa in position 17 is Ile or Leu
  Variant (18)..(18): Xaa in position 18 is Lys or Arg
  Variant (19)..(19): Xaa in position 19 is any amino acid
  Variant (20)..(20): Xaa in position 20 is Ala, Asn or Ser
  Variant (21)..(21): Xaa in position 21 is Phe or Tyr
  Variant (22)..(22): Xaa in position 22 is any amino acid
  Variant (23)..(23): Xaa in position 23 is Lys or Arg
  Variant (26)..(26): Xaa in position 26 is Leu or Met
  Variant (27)..(27): Xaa in position 27 is any amino acid
  Variant (28)..(28): Xaa in position 28 is Trp or Tyr
  Variant (32)..(32): Xaa in position 32 is His or Lys
  Variant (33)..(34): Xaa in position 33 to 34 is any amino acid
  Variant (35)..(35): Xaa in position 35 is Asp, Glu or Gly
  Variant (36)..(36): Xaa in position 36 is Asp, Glu, Asn or Gln
YKXLXXEXXXXAXXXXXXXXXXXLAXXXHPDXXXXX

SEQ ID NO: 2552 - protein, 21 aa, Artificial sequence
  protein pattern
  Variant (2)..(2): Xaa in position 2 is any amino acid
  Variant (3)..(3): Xaa in position 3 is Asp, Glu or Gln
  Variant (5)..(5): Xaa in position 5 is any amino acid
  Variant (6)..(6): Xaa in position 6 is Asp or Glu
  Variant (9)..(9): Xaa in position 9 is any amino acid
  Variant (12)..(12): Xaa in position 12 is any amino acid
  Variant (13)..(13): Xaa in position 13 is Asp or Asn
  Variant (15)..(16): Xaa in position 15 to 16 is any amino acid
  Variant (18)..(19): Xaa in position 18 to 19 is any amino acid
FXXIXXAYXVLXXPXXRXXYD

SEQ ID NO: 2553 - DNA, 1194 bp, Azotobacter vinelandii
  CDS (1)..(1194): transl_table=11
atggctaaggaaaagttcgagcgtaacaagccgcacgtcaacgttggcaccatcggtcacgtggaccatggcaagaccactctgacggccgctctgaccaaggtttgtgccgagacctggggtggcgccgctcgtgccttcgatcagatcgacaacgctccggaagaaaaggcgcgcggtatcaccatcaacacctcgcacgttgaatacgactccgcgacccgtcactacgcgcacgtcgactgtcccggtcatgccgactacgtgaagaacatgatcaccggcgccgcccagatggacggcgcgatcctggtctgctcggccgccgacggccccatgccgcagacccgcgagcacatcctgctgtcccgccaggtaggcgttccctacatcgtcgtgttcctgaacaaggccgacatggtcgacgacgccgaactgctggaactggtcgagatggaagtgcgtgatctgctgtccacctacgacttcccgggcgacgacaccccgatcatcaccggctctgccctgatggcgctggaaggcaaggacgacaacggcatcggcgtctccgccgtgcgtaagctggtggaaaccctggactcctatattccggagccggtgcgtgccgtcgatcagccgttcctgatgccgatcgaggacgtgttctcgatctccggccgcggcaccgtggtgaccggtcgcgtcgagcgcggcatcgtcaaggtcggcgaggaagtggaaatcgtcggtatccgtccgaccaccaagaccacctgcaccggcgtggaaatgttccgtaagctgctcgacgaagggcgtgccggcgagaacatcggcgccctgctgcgcggcaccaagcgtgaggacgtggagcgcggccaggttctggccaagccgggcaccatcaagccgcacaccaagttcgaagccgaagtgtatgtgctgtccaaggaagaaggtggtcgtcacaccccgttcttcaagggctaccgcccgcagttctacttccgtaccaccgacgtgaccggtaacgtcgagctgccggaaggcgtcgagatggtgatgccgggtgacaacatcaagatgaccgtcaccctgatcgctccgatcgccatggaagacggtctgcgtttcgccatccgcgaaggcggtcgtaccgtcggcgccggtgtggtggccaagatcatcgagtaa

SEQ ID NO: 2554 - protein, 397 aa, Azotobacter vinelandii
MAKEKFERNKPHVNVGTIGHVDHGKTTLTAALTKVCAETWGGAARAFDQIDNAPEEKARGITINTSHVEYDSATRHYAHVDCPGHADYVKNMITGAAQMDGAILVCSAADGPMPQTREHILLSRQVGVPYIVVFLNKADMVDDAELLELVEMEVRDLLSTYDFPGDDTPIITGSALMALEGKDDNGIGVSAVRKLVETLDSYIPEPVRAVDQPFLMPIEDVFSISGRGTVVTGRVERGIVKVGEEVEIVGIRPTTKTTCTGVEMFRKLLDEGRAGENIGALLRGTKREDVERGQVLAKPGTIKPHTKFEAEVYVLSKEEGGRHTPFFKGYRPQFYFRTTDVTGNVELPEGVEMVMPGDNIKMTVTLIAPIAMEDGLRFAIREGGRTVGAGVVAKIIE

SEQ ID NO: 2555 - DNA, 1657 bp, Zea mays subsp. mays
  CDS (100)..(1497)
cttctagataagcagcgcaaacccctactctctcgcctctccctatccatccccaaataatccccacctcccgctcatcctccgcctccgccgcccgccatggcctccctcacctcggcctccacctcactcctcttcccgcaggcctcctcatccaggagccgcgtccggctctccacctccctgggcttctccgcgcagccggcgcggctgcggagccgggcggcggcaggagggcagcggcgcgggagcctgctggtggtgcgcgcggcgaggggaaagttcgagcgcaccaagccgcacgtaaacatcggcaccatcggtcacgtcgaccacggcaagaccaccctcaccgccgcgctcaccatggtgctcgcctccgtcggcggcagcgcgcccaagaagtacgacgagatcgatgccgcccccgaggagcgtgcccgcggtatcaccatcaacaccgccaccgtcgagtacgagaccgagacccgccactacgcgcacgtcgactgccccggccacgccgactatgtcaagaacatgatcaccggcgctgcgcagatggacggcgccatcctcgtcgtctctggcgccgacggtcccatgccgcagaccaaagagcacattctcctcgccaagcaggtcggcgttcccaagatcgttgtcttcctcaacaagaaggacatggtcgacgacgaggagctgctcgagctcgtcgagctggaagtccgcgagctgctcagcaactatgagtacgacggcgacgaggtgccaatcgtcgctggctccgccctcaaggcgctcgaggccctcatgggcaaccctaccctgaagcgcggcgacgatgagtgggtggactgcatcttcaagctggttgattctgtggattcctacattccagtgccacagcggcagaccgacctcccgttcttactcgctgttgaagatgtcttctccatcaccggtcgtggtacagttgccactggccgtatcgagcgtggcaccgtcaagattggtgacacagtcgatatcgttggaatccgggacacccggaactgcaccgtgactggcgttgagatgttccagaagaccatggacgatgccatggctggagacaatgtcggactgctgctccgtggtatgcagaaggatgacattgagagaggcatggtgctggcaaagcccggctctatcacaccgcacaccaagtttgaggctgttgtgtatgtgcttaagaaggaagagggtggccggcactcacctttcttccctggttaccgcccgcagttctacatgaggacaaccgatgtgacagggaatgtgactgtgattatgaatgacaaagatgaggaggcgaagatgtgcatgcctggtgaccgtatcaagatggttgttcagctcatccagcctgttgcttgtgagcagggtatgaggtttgctatccgtgagggtggtaagactgttggtgctggtgtcatcaacaaaatcattgagtaaactggatatatcacatccaccacgagaattttccttgtttactcaaagcgaaatgctctgtagttgttattatgtgttgagttttaggggttgttcatgtgaaattgtagtatgacactctttcgccaagtgaatttgcataatttatgacattcacggc

SEQ ID NO: 2556 - protein, 465 aa, Zea mays subsp. mays
MASLTSASTSLLFPQASSSRSRVRLSTSLGFSAQPARLRSRAAAGGQRRGSLLVVRAARGKFERTKPHVNIGTIGHVDHGKTTLTAALTMVLASVGGSAPKKYDEIDAAPEERARGITINTATVEYETETRHYAHVDCPGHADYVKNMITGAAQMDGAILVVSGADGPMPQTKEHILLAKQVGVPKIVVFLNKKDMVDDEELLELVELEVRELLSNYEYDGDEVPIVAGSALKALEALMGNPTLKRGDDEWVDCIFKLVDSVDSYIPVPQRQTDLPFLLAVEDVFSITGRGTVATGRIERGTVKIGDTVDIVGIRDTRNCTVTGVEMFQKTMDDAMAGDNVGLLLRGMQKDDIERGMVLAKPGSITPHTKFEAVVYVLKKEEGGRHSPFFPGYRPQFYMRTTDVTGNVTVIMNDKDEEAKMCMPGDRIKMVVQLIQPVACEQGMRFAIREGGKTVGAGVINKIIE

SEQ ID NO: 2557 - DNA, 1448 bp, Helicobacter pylori
  CDS (118)..(1317): transl_table=11
ctcttgaatggcgataagacaaaaatgtcttaaattttgtggtagcatttaggaatacttaggattttgtttagtataattctaaaatccatttcaaaaaattaaggagaaatacaaatggcaaaagaaaagtttaacagaactaagccgcatgttaatattggaaccattgggcatgtagaccatggtaaaacgactttgagtgcagcgatttcagcggtgctttctttgaaaggtcttgcagaaatgaaagactatgataatattgataacgcccctgaagaaaaagaaagagggatcactatcgctacttctcacattgaatatgagactgaaaacagacactatgcgcatgtggattgcccaggacacgctgactatgtaaaaaacatgatcaccggtgcggcgcaaatggacggagcgattttggttgtttctgcagctgatggccctatgcctcaaactagggagcatatcttattgtctcgtcaagtaggcgtgcctcacatcgttgttttcttaaacaaacaagacatggtagatgaccaagaattgttagaacttgtagaaatggaagtgcgcgaattgttgagcgcgtatgaatttcctggcgatgacactcctatcgtagcgggttcagctttaagagctttagaagaagcaaaggctggtaatgtgggtgaatggggtgaaaaagtgcttaaacttatggctgaagtggatgcctatatccctactccagaaagagacactgaaaaaactttcttgatgccggttgaagatgtgttctctattgcgggtagagggactgtggttacaggtaggattgaaagaggcgtggtgaaagtaggcgatgaagtggaaatcgttggtatcagacctacacaaaaaacgactgtaaccggtgtagaaatgtttaggaaagagttggaaaaaggtgaagccggcgataatgtgggcgtgcttttgagaggaactaaaaaagaagaagtggaacgcggtatggttctatgcaaaccaggttctatcactccgcacaagaaatttgagggagaaatttatgtcctttctaaagaagaaggcgggagacacactccattcttcaccaattaccgcccgcaattctatgtgcgcacaactgatgtgactggctctatcacccttcctgaaggcgtagaaatggttatgcctggcgataatgtgaaaatcactgtagagttgattagccctgttgcgttagagttgggaactaaatttgcgattcgtgaaggcggtaggaccgttggtgctggtgttgtgagcaatattattgaataatattagcaaaaagagagttaccataaagggtcattatgaaagttaaaatagggttgaagtgttctgattgtgaagatatcaattacagcacaaccaagaacgctaaaactaacactgaaaaactggagctt

SEQ ID NO: 2558 - protein, 399 aa, Helicobacter pylori
MAKEKFNRTKPHVNIGTIGHVDHGKTTLSAAISAVLSLKGLAEMKDYDNIDNAPEEKERGITIATSHIEYETENRHYAHVDCPGHADYVKNMITGAAQMDGAILVVSAADGPMPQTREHILLSRQVGVPHIVVFLNKQDMVDDQELLELVEMEVRELLSAYEFPGDDTPIVAGSALRALEEAKAGNVGEWGEKVLKLMAEVDAYIPTPERDTEKTFLMPVEDVFSIAGRGTVVTGRIERGVVKVGDEVEIVGIRPTQKTTVTGVEMFRKELEKGEAGDNVGVLLRGTKKEEVERGMVLCKPGSITPHKKFEGEIYVLSKEEGGRHTPFFTNYRPQFYVRTTDVTGSITLPEGVEMVMPGDNVKITVELISPVALELGTKFAIREGGRTVGAGVVSNIIE

SEQ ID NO: 2559 - DNA, 1194 bp, Clostridium acetobutylicum
  CDS (1)..(1194): transl_table=11
atggcaaaggaaaaatttgaaagaacgaaaccacatgtaaacataggaacaataggacacgtagatcacggtaaaacaacattaacagcagcaataacaacaatattagcaaaagaaggaaaagcaaaagcattcaattacgaagagattgataaagcaccagaggaaaaagaaagaggaataacaatcaacacagcacacgttgagtatgaaacagagaatagacactatgctcacgttgactgcccaggacatgctgactatgtaaagaacatgattacaggagcagcgcaaatggatggagcaatcctagtagtaagtgcagcagatggtccaatgccacaaacaagagagcacatactattggcatcaagagttggtgttgaatatatagtagtattcttaaataaagcagaccaagtagatgatccagaattaatcgacttagtagaaatggaagtaagagagttattaaacgaatatggattcccaggcgatgatacaccaatcgtagtaggaagtgcgttaaaagcattacagaatccagatgatgcagaagcaataaaaccaataaaagacttaatggcagaagtagatgcatacatcccaacaccagaaagaccaacagataaagcattcttaatgccaatcgaagatgtcttcacaataacaggaagaggaacagttgcaacaggaagagttgaaactggaacattaaaagttggagacgaagtagaaatcgttggaatgaaagatgaaataacaaaagtagtagtaacaggcgtagaaatgttcagaaaaatacttgatagtgcattagcaggagataacatcggagcattattaagaggagtacagagagaagacatcgaaagaggtcaggtattagcaaaaccaggttcaataactccacataataaattcgtaggtcaagtatacgtattaaagaaagaagaaggcggaagacatacaccattcttcaatggatatagaccacaattctatttcagaacaacagacgtaacaggatcaatccagttaccagatggagtagaaatggtaatgccaggagaccacatagatatgacagttgaattaataacaaaagtagcaatgggagacaacttaagattcgctatcagagaaggcggaagaacagttggatcaggagttgttactagtataatagagtaa

SEQ ID NO: 2560 - protein, 397 aa, Clostridium acetobutylicum
MAKEKFERTKPHVNIGTIGHVDHGKTTLTAAITTILAKEGKAKAFNYEEIDKAPEEKERGITINTAHVEYETENRHYAHVDCPGHADYVKNMITGAAQMDGAILVVSAADGPMPQTREHILLASRVGVEYIVVFLNKADQVDDPELIDLVEMEVRELLNEYGFPGDDTPIVVGSALKALQNPDDAEAIKPIKDLMAEVDAYIPTPERPTDKAFLMPIEDVFTITGRGTVATGRVETGTLKVGDEVEIVGMKDEITKVVVTGVEMFRKILDSALAGDNIGALLRGVQREDIERGQVLAKPGSITPHNKFVGQVYVLKKEEGGRHTPFFNGYRPQFYFRTTDVTGSIQLPDGVEMVMPGDHIDMTVELITKVAMGDNLRFAIREGGRTVGSGVVTSIIE

SEQ ID NO: 2561 - DNA, 1200 bp, Alloiococcus otitis
  CDS (16)..(1200): transl_table=11
ggaggaaaaataaacatggcaaaagaaaaatttgatcgttccaaagaacacatgaatattggtaccctaggtcacgtcgaccacggtaaaactaccttaactgcagctatcacttacgttttagctaaaaaaggtttggcagaagcttcagcttacgaccaaattgatggtgctgctgaagagcgtgaacgtggtattaccattgcgactgctcacgttgaatactcaaccgaaaaccgtcactatgcccacgttgactgcccaggacacgctgactatgttaaaaacatgattactggtgcggctcaaatggacggtgctatcttagttgtatcagctgcagatggcccaatgccacaaactcgtgagcacatccttcttgctcgtcaagttggtgttccttacttcgttgtattcttgaacaaagttgaccaagtcgacgatgaagaattacttgaactcgttgaacttgaagttcgtgacctcttaactgaatacgacttcccaggtgacgaagttccagttgttgctggttctgcacttcttgctcttcaagatgatgaagaacaaatgaataacatccttaaattaatggatgaagtagacaactacattccagcgccagaacgtgacgctaacaaagacttcttgatgccagttgaagacatcttctctatcactggtcgtggtactgttgcaaccggccgtgtagaacaaggtcaacttaaagttggtgacgaagttgaaatcgttggtattaaagatactgcgactacaactgttactggtgttgaaatgttccgtaaattgttagactacgctgaagctggtgacaacattggtgccttgttacgtggtctttcacgtgacgatgttgaacgtggtcaagttcttgcaactccaggttccatcacccctcactctaaattcaaaggcgaagtttacgtcttgtcaaaagatgaaggtggccgtcacactccattcttctctaactaccgaccacaattcttcttccgtacaactgacgtaactggtgtcgttaacctaccggaaggtactgaaatggttatgccaggcgacaacactgaaatggaagttgaattgattgctccaatcgcagttgaagaaggtaccaaatttaccatccgtgaaggtggccgtactgttggtgctggtgttgtttctgaaattatcgaataa

SEQ ID NO: 2562 - protein, 394 aa, Alloiococcus otitis
MAKEKFDRSKEHMNIGTLGHVDHGKTTLTAAITYVLAKKGLAEASAYDQIDGAAEERERGITIATAHVEYSTENRHYAHVDCPGHADYVKNMITGAAQMDGAILVVSAADGPMPQTREHILLARQVGVPYFVVFLNKVDQVDDEELLELVELEVRDLLTEYDFPGDEVPVVAGSALLALQDDEEQMNNILKLMDEVDNYIPAPERDANKDFLMPVEDIFSITGRGTVATGRVEQGQLKVGDEVEIVGIKDTATTTVTGVEMFRKLLDYAEAGDNIGALLRGLSRDDVERGQVLATPGSITPHSKFKGEVYVLSKDEGGRHTPFFSNYRPQFFFRTTDVTGVVNLPEGTEMVMPGDNTEMEVELIAPIAVEEGTKFTIREGGRTVGAGVVSEIIE

SEQ ID NO: 2563 - DNA, 1194 bp, Coxiella burnetii
  CDS (1)..(1194): transl_table=11
atgtcgaaggaaaaatttgtaagagagaagccgcacgtgaacgtgggtacgattggtcacgtggatcatgggaagacgacgttaacggcggcattgacgaaggtgttgtcggagaaatacggcggagaaaagaaagcctttgaccagattgacaacgcgccggaagagcgcgcgcgagggatcacgatagcgacgtcgcacgtggaataccaaagcgacaagcgccactacgcgcacgtagactgcccaggccacgcggattatgtgaagaacatgatcacgggagcggcgcaaatggacggagcgatattggtggtgagcgcagcggacggcccgatgccgcaaacgcgggaacacattgtattggcgaagcaagtgggtgttccgaacatagtggtttacttgaacaaagcggacatggtggatgacaaagagctgttggaattagtggaaatggaagtgagggatttattgaacagttatgatttccctggggatgagacgccgataatagtggggtcagcgttaaaggcgttagaaggtgacaagagtgaggttggggagccatcgataatcaaattagtggaaacgatggacacgtacttcccgcagccggagcgagcgatagacaaaccgtttttaatgccgatcgaagatgtgttttcgatatcgggccgagggacggtggtgacgggacgcgtagagcgagggatcatcaaagtgggcgacgagatagagattgtggggatcaaggacacgacgaagacgacgtgcacgggcgttgagatgtttcgcaaattattggatgaaggtcaagcgggtgacaacgtaggaattttattgagagggacgaaacgcgaagaagtggagcgtggtcaagtattggcgaaaccgggatcgatcacgccacacaagaaatttgaggcggagatttatgtgttgtcgaaggaagaagggggacgccacacaccgtttttacaaggctatcgaccgcaattttatttccgcacgacggacgtgacgggccagttattgagtttaccggaggggatagagatggtgatgccgggagataacgtgaaagtgacggttgaattgattgcgccggtagcgatggatgaagggctacgatttgcggtacgggaaggtggccgcacggtgggcgccggagtggtaacgaagattattgaataa

SEQ ID NO: 2564 - protein, 397 aa, Coxiella burnetii
MSKEKFVREKPHVNVGTIGHVDHGKTTLTAALTKVLSEKYGGEKKAFDQIDNAPEERARGITIATSHVEYQSDKRHYAHVDCPGHADYVKNMITGAAQMDGAILVVSAADGPMPQTREHIVLAKQVGVPNIVVYLNKADMVDDKELLELVEMEVRDLLNSYDFPGDETPIIVGSALKALEGDKSEVGEPSIIKLVETMDTYFPQPERAIDKPFLMPIEDVFSISGRGTVVTGRVERGIIKVGDEIEIVGIKDTTKTTCTGVEMFRKLLDEGQAGDNVGILLRGTKREEVERGQVLAKPGSITPHKKFEAEIYVLSKEEGGRHTPFLQGYRPQFYFRTTDVTGQLLSLPEGIEMVMPGDNVKVTVELIAPVAMDEGLRFAVREGGRTVGAGVVTKIIE

SEQ ID NO: 2565 - DNA, 1359 bp, Aedes aegypti
  CDS (1)..(1359)
atggtgtccttactcaggacactgtcgaacattcgcattttcacggggcaagtgaaatattgccatgctcaaagggcgagcattgtctatctagcacagcaacgttatcagcctttgggaagaagggccttcgcatcggaagctaaattcgccgaacactgcaacgtcggtacaattggccatgtggaccacgggaagaccacactgacggccgcaatcaccaaagtactgtctcgggatggccgggcgaattatgttccctacgagcagatcgatcgagcaccggaagaaaaagcgcgcggaattacgattaatgctgctcacattggatacagcaccctaaaaaggcattatgcccacacggactgcccgggacatgcagattacgtgaagaatatgatttcgggggcatcgcaaatggatggcgctatactggtggtggccgcaacggatggccagatgccacaaacgagagaacatttgctcttggccagacaagttggagtggagaagattgtgatattcattaacaaagctgatcaggtggaccaggaagtgatcgaactggtagaaattgaacttcgcgaactactgagcgactttggattcgatggcatcaacagtcccgtggtggtcggttcagctctattagcccttcaaggagaccaatctgaattgggagaaccatcgatacatcgccttttggaagctatcgataagtatgtgccaacacccacgagggacatcacgtctcccttccttctacccattgataatgcatttactgtccctggtcgaggaacggttgtggtcggaacacttgcccggggcacagtcaagaaaaacgccgaagctgaacttttgggattcgacgaacaggtcaaaacctccatcggtggcattcaagtcttcaagaaggatgttaatcaagccattgccggggacaatataggcgccctactgaggaacgttaaaattacggcagttcaacggggtatgctactgtgtgctgcgggaagtgaacgagtttcaaatcatttcaatggaaccgtatacttgctggccaagaatgaaggaggtcgctcgaaaccacttacctcgaaatacattcaacagctttttagcaaaacgtggaacgtcccatgtcgagtggatctcgtggggcaggaaatgctcatgccgggagatcacggtgctatccgattgacactgctcaggaaaatggtaatgtcttgcgggcaaacattcactatccgggagaatgggaaaacggtggccaccgggttggtgacggcagttttggactcggtagatttgccccagaaaaagttgatcaaattgcatttggaccagttgtaa

SEQ ID NO: 2566 - protein, 452 aa, Aedes aegypti
MVSLLRTLSNIRIFTGQVKYCHAQRASIVYLAQQRYQPLGRRAFASEAKFAEHCNVGTIGHVDHGKTTLTAAITKVLSRDGRANYVPYEQIDRAPEEKARGITINAAHIGYSTLKRHYAHTDCPGHADYVKNMISGASQMDGAILVVAATDGQMPQTREHLLLARQVGVEKIVIFINKADQVDQEVIELVEIELRELLSDFGFDGINSPVVVGSALLALQGDQSELGEPSIHRLLEAIDKYVPTPTRDITSPFLLPIDNAFTVPGRGTVVVGTLARGTVKKNAEAELLGFDEQVKTSIGGIQVFKKDVNQAIAGDNIGALLRNVKITAVQRGMLLCAAGSERVSNHFNGTVYLLAKNEGGRSKPLTSKYIQQLFSKTWNVPCRVDLVGQEMLMPGDHGAIRLTLLRKMVMSCGQTFTIRENGKTVATGLVTAVLDSVDLPQKKLIKLHLDQL

SEQ ID NO: 2567 - DNA, 1392 bp, Aedes aegypti
  CDS (1)..(1392)
atgtccacctacgtagcgttgcgtgcggttctgaacccagtggctcggaagacactgacccagttcctgttcaacaccggtgtcagctggaacgccgctcgcatcagtcccaccatctgccaaaagcggttctacgccgaaaaggttgtttttaaacgagacaagccccattgcaacgtcggaacgattggccatgtcgatcacggtaagacaaccctgacggccgctatcaccaaagtcctcgccgataaggatctggccgaaagcaagaagtacgctgacattgacaacgccccggaagagaaagcgagaggaatcactattaacgtagctcatattgagtaccagacggagaatcggcactacggtcatacggactgtcccggccatgccgattacattaagaacatgatcaccggaacggcccaaatggacggagctatcctggtggtggcagctactgacggtgctatgccccaaaccagggaacatttgctgctggccaaacagattggggtcaatcacattgtggtcttcattaacaaagtggacgcggccgatcaggaaatggtagatctggtggaaatggaaatccgcgaactgatgtccgaaatgggcttcgatggggacaatgttcccgtcattaagggatcggccttgtgtgctttggagggcaagagtccggaaattggtgccgatgcggtgatgaagctgctagaggaggtggacaaatacgttccgaccccgactcgggatctggataagcctttcttgctgccggtggagtcggtgcacagcatccccggacgaggtaccgttgtgaccggacgtttggagcgcggcgtcgtgaagaagggcatggaatgcgagttcgttggttacaacaaggtcatcaaatcgacaatcaccggcgtcgaaatgttccacaaaattctggaggaagcccaggccggcgatcagctgggcgccctggtgcgtggtatcaaacgtgacgacatcaagcgcggcatggtcatgtgcaagccgggttcggtcaaggccaacgacaacttcgaggcgcaggtttacattctgagcaaggaggaaggcggacgccacaagcccttcaccagcttcatccagctgcagatgttctcgcgcacgtgggattgtgccacccaggtgcaaattcccggcaaggagatggtcatgcccggtgaggatgccaagctgcatctgcgtctgatgaggcccatggtcattgagcagggacaacgtttcacactgcgcgatggacacattacgctgggaaccggtgtcgtcaccaatgtgctctcgccacttagcgaaaaggaacgaatgtcgctggtcgagggcaagaaggcacgagagaaggccaccggaaaggcctaa

SEQ ID NO: 2568 - protein, 463 aa, Aedes aegypti
MSTYVALRAVLNPVARKTLTQFLFNTGVSWNAARISPTICQKRFYAEKVVFKRDKPHCNVGTIGHVDHGKTTLTAAITKVLADKDLAESKKYADIDNAPEEKARGITINVAHIEYQTENRHYGHTDCPGHADYIKNMITGTAQMDGAILVVAATDGAMPQTREHLLLAKQIGVNHIVVFINKVDAADQEMVDLVEMEIRELMSEMGFDGDNVPVIKGSALCALEGKSPEIGADAVMKLLEEVDKYVPTPTRDLDKPFLLPVESVHSIPGRGTVVTGRLERGVVKKGMECEFVGYNKVIKSTITGVEMFHKILEEAQAGDQLGALVRGIKRDDIKRGMVMCKPGSVKANDNFEAQVYILSKEEGGRHKPFTSFIQLQMFSRTWDCATQVQIPGKEMVMPGEDAKLHLRLMRPMVIEQGQRFTLRDGHITLGTGVVTNVLSPLSEKERMSLVEGKKAREKATGKA

SEQ ID NO: 2569 - DNA, 1185 bp, Klebsiella pneumoniae subsp. pneumoniae MGH 78578
  CDS (1)..(1185): transl_table=11
atgtctaaagaaaagtttgaacgtacaaaaccgcacgttaacgtcggtactatcggccacgttgaccatggtaaaacaacgctgaccgctgccatcactaccgtactggctaaaacctacggtggttccgctcgcgcattcgaccagatcgataacgcgccggaagaaaaagctcgtggtatcaccatcaacacctctcacgttgaatatgacaccccgactcgccactacgcgcacgtagactgcccgggccacgccgactatgttaaaaacatgatcaccggtgctgcgcagatggacggcgcgatcctggttgttgctgcgactgacggcccgatgccgcagactcgtgagcacatcctgctgggtcgtcaggtaggcgttccgtacatcatcgtgttcctgaacaaatgcgacatggttgatgacgaagagctgctggaactggttgagatggaagttcgtgaactgctgtctcagtacgatttcccgggcgacgacactccgatcgttcgtggttctgctctgaaagcgctggaaggcgacgcagagtgggaagcgaaaatcatcgaactggctggccacctggatacctatatcccggaaccagagcgtgcgattgacaagccgttcctgctgccgatcgaagacgtattctccatctccggtcgtggtaccgttgttaccggtcgtgtagagcgcggtatcatcaaagtaggtgaagaagttgaaatcgttggtatcaaagaaaccgcgaaaaccacctgtactggcgttgaaatgttccgcaaactgctggacgaaggccgtgctggtgagaacgtaggtgttctgctgcgtggtatcaaacgtgaagaaatcgaacgtggtcaggtactggctaagccgggcaccatcaacccgcacaccaagttcgaatctgaagtgtacatcctgtccaaagacgaaggcggccgtcatactccgttcttcaaaggctaccgtccgcagttctacttccgtactactgacgtgactggcaccatcgaactgccggaaggcgtagagatggtaatgccgggcgacaacatcaaaatggttgttaccctgatccacccgatcgcgatggacgacggtctgcgtttcgcaatccgtgaaggcggtcgtaccgttggcgcgggcgtggttgctaaagttctcggctaa

SEQ ID NO: 2570 - protein, 394 aa, Klebsiella pneumoniae subsp. pneumoniae MGH 78578
MSKEKFERTKPHVNVGTIGHVDHGKTTLTAAITTVLAKTYGGSARAFDQIDNAPEEKARGITINTSHVEYDTPTRHYAHVDCPGHADYVKNMITGAAQMDGAILVVAATDGPMPQTREHILLGRQVGVPYIIVFLNKCDMVDDEELLELVEMEVRELLSQYDFPGDDTPIVRGSALKALEGDAEWEAKIIELAGHLDTYIPEPERAIDKPFLLPIEDVFSISGRGTVVTGRVERGIIKVGEEVEIVGIKETAKTTCTGVEMFRKLLDEGRAGENVGVLLRGIKREEIERGQVLAKPGTINPHTKFESEVYILSKDEGGRHTPFFKGYRPQFYFRTTDVTGTIELPEGVEMVMPGDNIKMVVTLIHPIAMDDGLRFAIREGGRTVGAGVVAKVLG

SEQ ID NO: 2571 - DNA, 1230 bp, Leptosira terrestris
  CDS (1)..(1230)
atggcacgtcaaaagtttgaacgtaaaaaaccacatgttaatattggcacaattggacatgtagatcatggcaaaacaacattaacagctgctattactatggctatggctgctcggggtggcggaaaaggaaaaaagtatgatgatattgattcagcacccgaagaaaaacaaagaggtattacaataaatactgctcatgtagaatatgaaacagaaaaacgccactatgcccacgtagattgcccaggccatgctgattatgtgaagaatatgattacgggtgctgcacaaatggacggtgctattttagttgtttcaggtgctgatggtccaatgcctcaaaccaaggagcacattcttttagcaaagcaagtaggtgttccaaatgttgtagtttttttaaataaagaagaccaggtagatgatgcagaactactagaattagttgaactagaagtgcgtgaaacattagataattatgagtttccaggtgatgaaattccaattgttccaggctctgcactacttgctttgcaagctttaagtgaaaatccagaaatcacaccaggacaaaatccatgggttgataaaatttttaagttaatggatactgtggatgcttatattccaacacctgaacgtgatactgaaaaaccatttttaatggcagtagaagacgttttttctattacaggtcgcggtactgttgcaactggtcgagtagaaagaggtagtgttaaagttggtgaaaccattgaaattgtaggtttgcgcgaaactcgtactactacagtaactggactagaaatgtttcaaaagactttagaagaaagtgttgcaggtgataatgtaggcgttttattacggggtattcaaaaaattgatattcaacgcggtatggttttagccaaacctggaagtattacacctcataccaaatttacagctcaagtatatattttaactcgcgatgaaggaggtcgtcacacaccgttttttgcaggttatagacctcaattctatgtgcgaacaacagatgtaacaggcaaaattgaaacttttcgtactgatgatgatcaaccaacacagatggttatgcctggtgatcgtataaaaatggaggttgaattaattcaacctattgcaattgaaaaaggtatgcgatttgctattcgagaaggcggacgaacagttggagcaggtgttgtatctgctattgttttgtaa

SEQ ID NO: 2572 - protein, 409 aa, Leptosira terrestris
MARQKFERKKPHVNIGTIGHVDHGKTTLTAAITMAMAARGGGKGKKYDDIDSAPEEKQRGITINTAHVEYETEKRHYAHVDCPGHADYVKNMITGAAQMDGAILVVSGADGPMPQTKEHILLAKQVGVPNVVVFLNKEDQVDDAELLELVELEVRETLDNYEFPGDEIPIVPGSALLALQALSENPEITPGQNPWVDKIFKLMDTVDAYIPTPERDTEKPFLMAVEDVFSITGRGTVATGRVERGSVKVGETIEIVGLRETRTTTVTGLEMFQKTLEESVAGDNVGVLLRGIQKIDIQRGMVLAKPGSITPHTKFTAQVYILTRDEGGRHTPFFAGYRPQFYVRTTDVTGKIETFRTDDDQPTQMVMPGDRIKMEVELIQPIAIEKGMRFAIREGGRTVGAGVVSAIVL

SEQ ID NO: 2573 - DNA, 1191 bp, Xanthobacter autotrophicus Py2
  CDS (1)..(1191): transl_table=11
atggccaaagagaagttcaaccgctcgaagccgcactgcaacatcggcacgatcggtcacgtggatcatggcaagacgtcgctgactgcggcgatcacgaagatccttgcggagacgggcggcgcgacgttcacggcgtacgaccagatcgacaaggcgccggaagagaaggcgcgcggcatcacgatctcgaccgctcacgtggaatacgagacccagaaccgccactacgcgcacgtggactgccccgggcacgccgactatgtgaagaacatgatcaccggcgcggcgcagatggacggcgcgatcctggtggtgtcggcggccgacggcccgatgccgcagacccgcgagcacatcctgctcgcccgtcaggtcggcgtgccggcgctggtggtgttcctcaacaagtgcgacatggtcgacgatgaggagctgctggagctggtcgagctggaagtgcgcgagctgctgtccaagtacgacttccccggcgacgacatcccgatcatccgtggctcggcgctggtggcgctggagaacggcgatccgaagctcggccgcgacgcggtgctgaagctgatggaggcggtcgacgcctacatcccgcagcccgagcgtccggtggacctgccgttcctgatgcccatcgaggacgtgttctcgatctcgggccgcggcacggtggtgaccggccgcgtggagcgcggcatcatcaaggtcggtgaggaagtggaaatcgtgggcatccgcccgacgcagaagaccacggtcaccggcgtcgagatgttccgtaagctgctcgaccagggccaggccggtgacaacgtcggcatcctggtgcgcggcaccaagcgtgaggacgtggagcgcggccaggtggtgtgcaagccgggtacggtgaagccacacaccaagttcaaggccgaagcctacatcctgaccaaggaagagggcggccgtcacaccccgttcttcaccaactaccgcccgcagttctacttccggaccacggacgtgaccggcgtgtgcacgctgccggaaggcaccgagatggtgatgccgggcgacaacgtgtccatggacgtggcgctgatcgttccgatcgccatggaagagaagctgcgcttcgccatccgcgagggtggccgcacggtgggcgccggcgtcgtcgcctccatcatcgagtga

SEQ ID NO: 2574 - protein, 396 aa, Xanthobacter autotrophicus Py2
MAKEKFNRSKPHCNIGTIGHVDHGKTSLTAAITKILAETGGATFTAYDQIDKAPEEKARGITISTAHVEYETQNRHYAHVDCPGHADYVKNMITGAAQMDGAILVVSAADGPMPQTREHILLARQVGVPALVVFLNKCDMVDDEELLELVELEVRELLSKYDFPGDDIPIIRGSALVALENGDPKLGRDAVLKLMEAVDAYIPQPERPVDLPFLMPIEDVFSISGRGTVVTGRVERGIIKVGEEVEIVGIRPTQKTTVTGVEMFRKLLDQGQAGDNVGILVRGTKREDVERGQVVCKPGTVKPHTKFKAEAYILTKEEGGRHTPFFTNYRPQFYFRTTDVTGVCTLPEGTEMVMPGDNVSMDVALIVPIAMEEKLRFAIREGGRTVGAGVVASIIE

SEQ ID NO: 2575 - DNA, 1386 bp, Apis mellifera
  CDS (1)..(1386)
atgggtaaagaaaagattcatattaatattgtcgttattggacacgtcgactctggcaagtctaccaccactggtcatttgatctacaaatgtggtggtattgataaacgtaccattgaaaaattcgagaaggaagcccaggaaatgggcaaaggatccttcaaatatgcctgggtattggataagttaaaagctgaacgtgaacgtggtattacgattgatattgctttgtggaaattcgaaacgtcaaaatactatgttactattattgatgctcctggacacagagatttcatcaaaaacatgattactggtacctctcaggctgattgtgctgtattaattgttgctgctggtactggagagttcgaagcaggcatttcaaagaatggacaaactcgtgagcatgctttgctcgcttttactcttggtgtgaaacaattgattgttggtgttaataagatggactccactgaaccaccgtattctgaaacccgatttgaagaaattaaaaaagaagtgtcatcttacattaaaaaaattggttataatccagctgcagttgcatttgtgccaatttctggttggcatggagataatatgttggaagtttcttcaaaaatgccttggtttaagggatggacggttgaacgtaaagaaggaaaagttgaaggaaaatgtctcattgaagcgcttgatgctattcttccacctactagacctacagacaaggctctccgtcttcctcttcaggacgtatataaaatcggtggtattggaacagtaccagttggtcgtgtcgaaactggtgtgttgaaaccaggtatggttgtcacattcgctcctgctggtttgactactgaagtcaaatctgttgaaatgcatcacgaagctttgcaagaggctgttcctggtgataatgttggttttaacgtcaagaacgtatctgtcaaagaattacgtcgtggttatgttgctggtgattcaaagaataatccacctaaaggtgctgctgattttactgcacaagttattgtattgaatcaccctggtcaaatcagcaatggttatacaccagtattggattgtcatactgcacatattgcatgtaaattcgctgatatcaaagagaaatgcgatcgtcgtaatggaaagacaactgaagaaaatccgaaaagcatcaaatctggagatgctgccatcgttatgcttgtgccaagcaagcctatgtgcgctgaggctttccaagaatttccgcctttggggcgtttcgctgttcgtgacatgcgtcaaacggtagctgttggtgttatcaaagctgtaactttcaaggacgctgctggcaaggtcaccaaggctgccgagaaggctcagaaaaagaaataa

SEQ ID NO: 2576 - protein, 461 aa, Apis mellifera
MGKEKIHINIVVIGHVDSGKSTTTGHLIYKCGGIDKRTIEKFEKEAQEMGKGSFKYAWVLDKLKAERERGITIDIALWKFETSKYYVTIIDAPGHRDFIKNMITGTSQADCAVLIVAAGTGEFEAGISKNGQTREHALLAFTLGVKQLIVGVNKMDSTEPPYSETRFEEIKKEVSSYIKKIGYNPAAVAFVPISGWHGDNMLEVSSKMPWFKGWTVERKEGKVEGKCLIEALDAILPPTRPTDKALRLPLQDVYKIGGIGTVPVGRVETGVLKPGMVVTFAPAGLTTEVKSVEMHHEALQEAVPGDNVGFNVKNVSVKELRRGYVAGDSKNNPPKGAADFTAQVIVLNHPGQISNGYTPVLDCHTAHIACKFADIKEKCDRRNGKTTEENPKSIKSGDAAIVMLVPSKPMCAEAFQEFPPLGRFAVRDMRQTVAVGVIKAVTFKDAAGKVTKAAEKAQKKK

SEQ ID NO: 2577 - DNA, 1398 bp, Bombyx mori
  CDS (1)..(1398)
atggcttcaataacatttgtgaaaagtttggttagtccagctgtgaaattagttctgaagcaaagccagtgtgcaaatgtacgaaacacaacagtcctgtcaggattgactccattaagtataatactcaagagacattatgcagaaaaacaaatctttgaacgtacaaagccccattgcaatgttggcacaatcggacatgttgatcacgggaagactacactaacagcagcaataactaaggtattatctgatctcaatctggcacagaaaaaaggttatgcagatattgacaatgcccccgaggagaaggctcgaggtatcactattaatgtggctcatgtcgaataccaaaccgaacagaggcattatggacacactgactgcccaggtcatgctgactacattaagaacatgattacaggcacagcacaaatggatggtgctatattagtagtagctgcaactgatggtgtaatgccacaaacacgcgaacatttactacttgccaaacagattggtattcaacatgtggtggtgttcataaacaaagtggatgccgctgatgaggaaatggtagaactggttgagatggagatcagagagttgatgactgagatgggatatgatggtgacaagatacctgttattaaaggttctgctctctgtgctcttgaaggcaaaagtcctgaaataggggctgatgctatcactaaacttcttaaagaagtggacacattcattccaacacctatccgagagctcgaaaaacctttcctgatgccagttgagtctgttcactcaattcctggacgaggaactgtcattacaggccgtttatacagaggtgtcttgaagaagggtactgattgtgaaattgttggtcatggtaaaacaatgaaaacaaccgtaaccggagttgaaatgttccacaaaaccttggaggaagcacaagccggagatcaacttggagctcttgtgcgttccatcaaaagggaacaaatcaaacgcggtatggtcatggcgaagcccggtactgctaaagcccatgacaacttggaagccgctgtatacatacttagcaaggaggaaggcggtagatcgaaaccgttcacatcatacattcagttacaaatgttttcaatgacctgggactgcgccagtcaagttaccattcctgaaaaggaaatggtaatgcccggcgaggacgctacgttaaaactgaaactcttaaaaccaatggtgtgcgaaacaggccaaagattcacactccgccttggagacattactttaggtactggagtcattactaaaataaacaataatctatctgaggaagaaagaagcaaactaatggaaggcaagaaggcgcgagaaaaggcagccgcaaagaagtaa

SEQ ID NO: 2578 - protein, 465 aa, Bombyx mori
MASITFVKSLVSPAVKLVLKQSQCANVRNTTVLSGLTPLSIILKRHYAEKQIFERTKPHCNVGTIGHVDHGKTTLTAAITKVLSDLNLAQKKGYADIDNAPEEKARGITINVAHVEYQTEQRHYGHTDCPGHADYIKNMITGTAQMDGAILVVAATDGVMPQTREHLLLAKQIGIQHVVVFINKVDAADEEMVELVEMEIRELMTEMGYDGDKIPVIKGSALCALEGKSPEIGADAITKLLKEVDTFIPTPIRELEKPFLMPVESVHSIPGRGTVITGRLYRGVLKKGTDCEIVGHGKTMKTTVTGVEMFHKTLEEAQAGDQLGALVRSIKREQIKRGMVMAKPGTAKAHDNLEAAVYILSKEEGGRSKPFTSYIQLQMFSMTWDCASQVTIPEKEMVMPGEDATLKLKLLKPMVCETGQRFTLRLGDITLGTGVITKINNNLSEEERSKLMEGKKAREKAAAKK

SEQ ID NO: 2579 - DNA, 1971 bp, Oryza sativa (japonica cultivar-group)
  CDS (1)..(1971)
atgccacgcaaggttgtctctgggcctgactacgatgacgagtacgacgatgactatgatgagtatgatgaggactacgatgattacggtgagaccgggcacagtgacgacattcagcaccccgtgaaggaggagaaagagtcatcgaagaagtcctcaagtacggtgcctgtgctttggagatgctccatgtgcatgttcgataatcatgaaagcatggtgtattgtgagatgtgtggggtttttcgagaatcctttatgaaatctgccaaggatggttcaataaaagtccatgggataccaagtgattttgggacaccttcgatgccgaaatctgactgtaccaagatgccagtgaatactcgtactacagactttgatggtgaccctgagataaagaatgctagcatatctcatgagaaagttggttccacgcagtacacatctgctggtagctcatcaggcgctgggaaaaagctgaaggaggaccagagtagtagggctagcagttctgcgcagaatgaggatgtggcccagaaactttcttctgacatacagaagctaggtttagaaaagaatgaagtagatactgcaaaaccttatttacctgaagaatataagcctgagaagtggatgttcgctaatgaggaatcaggagtgctgagccaactaaaccttgcaatagtaggtcatgttgattctggcaagtcaacactctctgggagactgctacatctgttaggaaggatatcgaaaaaagatatgcacaagaatgagaaggaggctaaagaaaaaggaaaaggatcatttgcttatgcgtgggctatggatgaaagcagtgaagaaagagaaagaggcgtgacaatgactgtggccgtggcttatttggagactaagaagtaccgtgtagttttgcttgactctccaggccataaagattttgtaccaaatatgatatctggcgcaacgcaagctgatgcagctattcttgttgttgatgcttgcactggttcatttgaagctggcatggacggtgaaggagggaaaagtgttggccagacaaaagaacatgctcagcttattagaagcttcggcgttgaacagcttattgttgcggtcaacaagatggatgccatcggctactcgaaagaaagatttgagttcatcaaggttcaacttggtagttttctgcggtcatgcaatttcaaagattcatctgttacctggattcctcttagtgctgttgaaaatcagaatttgatcaaaattccttctgatgtccgtttaacttcctggtatcaaggattttgtctcttggatgctatagattccttgcagcttccatctcgggatgtttcaaagcccctcattcttcctatctgtgatgttatcaagtctcagtcaacagggcagtttgcagcctttggaaaattagagactggagctattcgaattggttcaaaggttttaatttcaccttgtggggaagtggcggcagtgaaatccatcgagcgggattcaaattcatgtgacatagcaagagctggtgataatgtagcggttagtttacagggtatcgatgggagtaagctaatactaggtgggattctttgcaaccctggtttcccagtgcctgtctctaacttcttggagctaagggttctagtgttagacgtcaccattcctatccttattggctatcaggtcgaatttcacatacatcatgtgaaggaggctgcgagggttacgaaaatcgtggcattgcttgacaaggctggcaaaccaagcaaaactgcacctcgttttcttaagtcaaagcagaatgcagttgtgcaggttaccttagacgctccggtctgtgttcaagaattctccaaatgccgagctcttggcagggcattcttaaggtcttctggaagcacgatcgctgttggagtcgtaacgcgggtactccggcaagatcagaactga

SEQ ID NO: 2580 - protein, 656 aa, Oryza sativa (japonica cultivar-group)
MPRKVVSGPDYDDEYDDDYDEYDEDYDDYGETGHSDDIQHPVKEEKESSKKSSSTVPVLWRCSMCMFDNHESMVYCEMCGVFRESFMKSAKDGSIKVHGIPSDFGTPSMPKSDCTKMPVNTRTTDFDGDPEIKNASISHEKVGSTQYTSAGSSSGAGKKLKEDQSSRASSSAQNEDVAQKLSSDIQKLGLEKNEVDTAKPYLPEEYKPEKWMFANEESGVLSQLNLAIVGHVDSGKSTLSGRLLHLLGRISKKDMHKNEKEAKEKGKGSFAYAWAMDESSEERERGVTMTVAVAYLETKKYRVVLLDSPGHKDFVPNMISGATQADAAILVVDACTGSFEAGMDGEGGKSVGQTKEHAQLIRSFGVEQLIVAVNKMDAIGYSKERFEFIKVQLGSFLRSCNFKDSSVTWIPLSAVENQNLIKIPSDVRLTSWYQGFCLLDAIDSLQLPSRDVSKPLILPICDVIKSQSTGQFAAFGKLETGAIRIGSKVLISPCGEVAAVKSIERDSNSCDIARAGDNVAVSLQGIDGSKLILGGILCNPGFPVPVSNFLELRVLVLDVTIPILIGYQVEFHIHHVKEAARVTKIVALLDKAGKPSKTAPRFLKSKQNAVVQVTLDAPVCVQEFSKCRALGRAFLRSSGSTIAVGVVTRVLRQDQN

SEQ ID NO: 2581 - DNA, 1599 bp, Arabidopsis thaliana
  CDS (1)..(1599)
atggatcttgaggctgagatccgcgcattacagcttgaatcggcagatgaaaacaatggtgttgtcattccagaagttcataactcacatgaagttgagaatttggataaagcaccggaagacttgaaagatgaagtgcaagaatcaattccagttcctgatgagcaagaagcttctgaggatcatgatgaagtaatgcttcatccagtccataatccagcgaaagctaaagagaaagctgctcaagagaaggctgccaaagaggaagctgaagatgttgcagaagcaaataaaaagagacacttgaatgttgtgttcattgggcatgttgatgctggtaagtccacaattggaggacagattctttttcttagtggtcaggtggatgatcgacaaatccaaaagtatgagaaggaagcaaaagacaaaagtagagaaagctggtatatggcatatataatggatacaaatgaagaagagaggcttaagggcaaaacagttgaagttggaagggctcactttgaaacggagagcactagattcactattttagatgctccggggcacaagagttacgtacccaatatgattagtggagcatctcaagcggacattggtgtgctggtgatttcagctcgaaaaggtgaatttgaaacaggatatgagaggggtgggcagacacgtgaacatgttcaacttgccaaaacattgggtgtctctaaactgattgttgttgtgaacaagatggatgacccaactgtgaactggtcgaaagaaaggtacgatgaaatagaacaaaaaatggtaccgttcctgaaagcctctggctacaacacaaagaaagatgttgtcttcttgcctatatctggtctaatgggcaaaaatatggaccagaggatgggtcaagaaatttgtccttggtggagtggccctagcttttttgaagtacttgattctattgaaattccgccacgcgatcctaatggtccattcaggatgccaattattgataagttcaaggacatgggaactgttgttatgggaaaagtagaatctggcagcattcgggagggtgattccttggttgttatgccgaacaaggaacaagtgaaagttgttgctatatattgcgatgaggataaagttaagcgtgcaggaccgggtgagaatttgagagttcgtattactggcattgaagatgaggacatcctttctggttttgttttatccagcattgtaaaccctgtccctgctgttaccgagtttgttgcccaactacaaatccttgagctgcttgacaacgctatttttacagctggttacaaggcaattctccacatccatgcggttgtcgaggagtgtgagattatcgaattgaaaagccaaattgatctcaagacaaggaaaccaatgaaaaagaaagttttgtttgtgaagaatggtgctgctgttgtgtgccgcatccaggttacgaattcaatttgtattgaaaaattctcagatttccctcaacttggaagattcactctacgaactgaaggaaaaacaattgctgttggaaaggttaccgagctcttaagttctgtctcaagcgcttga

SEQ ID NO: 2582 - protein, 532 aa, Arabidopsis thaliana
MDLEAEIRALQLESADENNGVVIPEVHNSHEVENLDKAPEDLKDEVQESIPVPDEQEASEDHDEVMLHPVHNPAKAKEKAAQEKAAKEEAEDVAEANKKRHLNVVFIGHVDAGKSTIGGQILFLSGQVDDRQIQKYEKEAKDKSRESWYMAYIMDTNEEERLKGKTVEVGRAHFETESTRFTILDAPGHKSYVPNMISGASQADIGVLVISARKGEFETGYERGGQTREHVQLAKTLGVSKLIVVVNKMDDPTVNWSKERYDEIEQKMVPFLKASGYNTKKDVVFLPISGLMGKNMDQRMGQEICPWWSGPSFFEVLDSIEIPPRDPNGPFRMPIIDKFKDMGTVVMGKVESGSIREGDSLVVMPNKEQVKVVAIYCDEDKVKRAGPGENLRVRITGIEDEDILSGFVLSSIVNPVPAVTEFVAQLQILELLDNAIFTAGYKAILHIHAVVEECEIIELKSQIDLKTRKPMKKKVLFVKNGAAVVCRIQVTNSICIEKFSDFPQLGRFTLRTEGKTIAVGKVTELLSSVSSA

SEQ ID NO: 2583 - DNA, 2004 bp, Arabidopsis thaliana
  CDS (1)..(2004)
atgcctcgtaaaggattatccaatttcgatgattatgatgatggttttgatgatgatgacgatgcttttgattatgactatgatgttgatatagatgaacatgaagaagctgctgctgaaccaaaggaagaaattgctaaaacgcaagggctttggcgatgtgctatctgtacatatgacaatgttgagactatgtttgtgtgtgatatctgcggtgttcttcgtcatcctgtcgccggaaatcaaagtatcaataagaatacagcacctttcaagtttgatgctccatcgccagatgatttagtctccaatggactaacatcctcaaaaactggtccaaaaggctcaggtgatgctagcatgagacagaaggagaagcaagatagcgtagaacagaaacctttaaagaaaggaggagatagttcagaaacaagctcccgaggtagacatgataaacttgatgataagggcggtgctggcggcataaaatcaggcaaaagtttgccaaaagcaaaagcagatatgtctaatgagacaagttcgtcctctaaatatatggagacgtcggagagtcttactggtactatgaacaagatgtctttgattggggaaacagaaaactctagcgatattaaaattagaggaccaaaatcacaatctaagcataagccagaggagtggatgcttcttgataaagaatcagatgcactaagccagcttaatcttgccatcgtggggcatgttgattccggtaagtctacactttcgggtagattattgcatcttttgggaagaatatcgcagaagcaaatgcacaagtatgagaaagaagcaaagttgcagggcaaagggtcctttgcatatgcctgggcattggatgagagtgctgaagagagggaacgaggaataacaatgactgtggctgttgcttatttcaattccaaaagacatcatgttgttttgctcgactctcctggacacaaagattttgttccaaacatgatagcaggagcaacacaagcagatgctgcgattcttgtcatagatgcatctgttggtgcttttgaagctggttttgataatttgaaagggcagacaagggagcatgcacgggttctgagaggttttggcgtggagcaagtcatagttgcaatcaacaaaatggatattgttggctactcaaaggaaagatttgatttgattaagcagcacgttggatcttttttgcaatcctgtcgttttaaggattcttctctgacatggattccattaagtgccatggaaaaccaaaacttggtggcagctccctctgataaccgcctatcctcatggtatcaaggtccatgtttattggatgccgtcgactctgtcaagtctcctgatagagacgtctcaaagcctctactcatgcctatatgtgacgctgtaagatcaacttcgcaagggcaggtatctgcatgtggcaaacttgaagctggagctgtccggccaggatctaaggtaatggttatgccatcaggagatcaaggaaccatacgatcactagagcgtgactctcaggcttgcaccattgcaagagctggagataacgtagcgttagcgttgcaagggatcgatgcaaatcaagtaatggcaggagatgtattgtgccatcctgatttccctgtatcagtagcaactcatttggaattgatggtgctcgtcttggaaggcgcaacaccgatcttgctcggttctcagttggagtttcatgtgcatcatgcaaaggaagcagcaacagttgtgaaacttgtggcaatgcttgatcccaaaacagggcagccaacaaagaagtctcctcgttgtctaactgctaaacagagcgcaatgcttgaggttagtctccaaaatccagtatgtgtggagacattttctgagagtagagctcttggaagagtgttccttagatcatcgggaagaactgttgctatgggcaaagttactcggattatccaagactcataa

SEQ ID NO: 2584 - protein, 667 aa, Arabidopsis thaliana
MPRKGLSNFDDYDDGFDDDDDAFDYDYDVDIDEHEEAAAEPKEEIAKTQGLWRCAICTYDNVETMFVCDICGVLRHPVAGNQSINKNTAPFKFDAPSPDDLVSNGLTSSKTGPKGSGDASMRQKEKQDSVEQKPLKKGGDSSETSSRGRHDKLDDKGGAGGIKSGKSLPKAKADMSNETSSSSKYMETSESLTGTMNKMSLIGETENSSDIKIRGPKSQSKHKPEEWMLLDKESDALSQLNLAIVGHVDSGKSTLSGRLLHLLGRISQKQMHKYEKEAKLQGKGSFAYAWALDESAEERERGITMTVAVAYFNSKRHHVVLLDSPGHKDFVPNMIAGATQADAAILVIDASVGAFEAGFDNLKGQTREHARVLRGFGVEQVIVAINKMDIVGYSKERFDLIKQHVGSFLQSCRFKDSSLTWIPLSAMENQNLVAAPSDNRLSSWYQGPCLLDAVDSVKSPDRDVSKPLLMPICDAVRSTSQGQVSACGKLEAGAVRPGSKVMVMPSGDQGTIRSLERDSQACTIARAGDNVALALQGIDANQVMAGDVLCHPDFPVSVATHLELMVLVLEGATPILLGSQLEFHVHHAKEAATVVKLVAMLDPKTGQPTKKSPRCLTAKQSAMLEVSLQNPVCVETFSESRALGRVFLRSSGRTVAMGKVTRIIQDS

SEQ ID NO: 2585 - DNA, 1206 bp, Borrelia burgdorferi B31
  CDS (1)..(1206): transl_table=11
atgaaatttaggaggttagtcatggcaaaagaagtttttcaaagaacaaagccgcacatgaatgttggaacaataggtcatgttgatcatggtaaaacaacactaacagcggctattagtatttattgttcaaaattaaataaagatgcaaaagcattaaagtatgaagatattgataatgcacctgaagagaaagcaagaggaataacaattaatgctaggcatattgagtacgaaacagctaatagacattatgctcatgtagattgtccaggccatgccgattatataaaaaatatgattacaggagcagctcaaatggatgcagcgatacttttagttgctgctgatagtggtgctgagcctcaaacaaaagagcatttgcttcttgctcaaagaatgggaataaagaaaataatagtttttttaaataaattggacttagcagatcctgaacttgttgagcttgttgaagttgaagttttagaacttgttgaaaaatatggcttttcagctgatactccaataatcaaaggttcagcttttggggctatgtcaaatccagaagatcctgaatctacaaaatgcgttaaagaacttcttgaatctatggataattattttgatcttccagaaagagatattgacaagccatttttgcttgctgttgaagatgtattttctatttcaggaagaggcactgttgctactgggcgtattgaaagaggtattattaaagttggtcaagaagttgaaatagttggaattaaagaaaccagaaaaactactgttactggtgttgaaatgttccagaaaattcttgagcaaggtcaagcaggggataatgttggtcttcttttgagaggcgttgataaaaaagacattgagagggggcaagttttgtcagctccaggtacaattactccacacaagaaatttaaagcttcaatttattgtttgactaaagaagaaggcggtaggcacaagccatttttcccagggtatagaccacagttcttttttagaacaaccgatgttactggagttgttgctttagagggcaaagaaatggttatgcctggtgataatgttgatattattgttgagctgatctcttcaatagctatggataagaatgtagaatttgctgttcgagaaggtggaagaaccgttgcttcaggaagaattcttgagatattggaatag

SEQ ID NO: 2586 - protein, 401 aa, Borrelia burgdorferi B31
MKFRRLVMAKEVFQRTKPHMNVGTIGHVDHGKTTLTAAISIYCSKLNKDAKALKYEDIDNAPEEKARGITINARHIEYETANRHYAHVDCPGHADYIKNMITGAAQMDAAILLVAADSGAEPQTKEHLLLAQRMGIKKIIVFLNKLDLADPELVELVEVEVLELVEKYGFSADTPIIKGSAFGAMSNPEDPESTKCVKELLESMDNYFDLPERDIDKPFLLAVEDVFSISGRGTVATGRIERGIIKVGQEVEIVGIKETRKTTVTGVEMFQKILEQGQAGDNVGLLLRGVDKKDIERGQVLSAPGTITPHKKFKASIYCLTKEEGGRHKPFFPGYRPQFFFRTTDVTGVVALEGKEMVMPGDNVDIIVELISSIAMDKNVEFAVREGGRTVASGRILEILE

SEQ ID NO: 2587 - DNA, 1185 bp, Neisseria meningitidis MC58
  CDS (1)..(1185): transl_table=11
atggctaaggaaaaatttgaacgtagcaaaccgcacgtaaacgttggcaccatcggtcacgttgaccatggtaaaaccactctgactgctgctttgactactattttgtctaaaaaattcggtggcgctgcaaaagcttatgaccaaatcgacaacgctcctgaagaaaaagctcgtggtattaccattaatacctcacacgtagaatacgaaactgaaacccgtcactacgcacacgtagactgcccggggcacgccgactacgttaaaaacatgattaccggcgccgcacaaatggacggtgcaatcctggtatgttccgcagccgacggccctatgccgcaaacccgcgaacacatcctgctggcccgccaagtaggcgtaccttacatcatcgtgttcatgaacaaatgcgacatggtcgacgatgccgagctgttggaactggttgaaatggaaatccgcgacctgctgtccagctacgacttccccggcgatgactgcccgattgtacaaggttccgcactgaaagccttggaaggcgatgccgcttacgaagaaaaaatcttcgaactggctgccgcattggacagctacatcccgactcccgagcgagccgtggacaaaccgttcctgctgcctatcgaagacgtgttctccatttccggccgcggtacagtagtaaccggccgtgtagagcgcggtatcatccacgttggtgacgagattgaaatcgtcggtctgaaagaaacccaaaaaaccacttgtaccggtgttgaaatgttccgcaaactgctggacgaaggtcaggcgggcgacaacgtaggcgtattgctgcgcggtaccaaacgtgaagacgtggaacgcggtcaggtattggctaaaccgggtactatcactcctcacaccaaattcaaagcagaagtatacgtactgagcaaagaagagggtggtcgtcacactccgttcttcgccaactaccgtccgcaattctacttccgtaccaccgacgtaaccggcgcggttactttggaagaaggtgtggaaatggtaatgccgggtgaaaacgtaaccatcaccgtagaactgattgcgcctatcgctatggaagaaggcctgcgctttgcgattcgcgaaggcggccgtaccgtgggtgccggcgtggtttcttctgttatcgcttaa

SEQ ID NO: 2588 - protein, 394 aa, Neisseria meningitidis MC58
MAKEKFERSKPHVNVGTIGHVDHGKTTLTAALTTILSKKFGGAAKAYDQIDNAPEEKARGITINTSHVEYETETRHYAHVDCPGHADYVKNMITGAAQMDGAILVCSAADGPMPQTREHILLARQVGVPYIIVFMNKCDMVDDAELLELVEMEIRDLLSSYDFPGDDCPIVQGSALKALEGDAAYEEKIFELAAALDSYIPTPERAVDKPFLLPIEDVFSISGRGTVVTGRVERGIIHVGDEIEIVGLKETQKTTCTGVEMFRKLLDEGQAGDNVGVLLRGTKREDVERGQVLAKPGTITPHTKFKAEVYVLSKEEGGRHTPFFANYRPQFYFRTTDVTGAVTLEEGVEMVMPGENVTITVELIAPIAMEEGLRFAIREGGRTVGAGVVSSVIA

SEQ ID NO: 2589 - DNA, 1185 bp, Escherichia coli O157:H7 EDL933
  CDS (1)..(1185): transl_table=11
  misc_feature (336)..(336): n is a, g, c or t
  misc_feature (353)..(353): n is a, g, c or t
  misc_feature (354)..(354): n is a, g, c or t
  misc_feature (355)..(355): n is a, g, c or t
atgtctaaagaaaagtttgaacgtacaaaaccgcacgttaacgtcggtactatcggccacgttgaccatggtaaaacaacgctgaccgctgcaatcactaccgtactggctaaaacctacggcggtgctgctcgcgcattcgaccagatcgataacgcgccggaagaaaaagctcgtggtatcaccatcaacacttctcacgttgaatacgacaccccgacccgtcactacgcacacgtagactgcccggggcacgccgactatgttaaaaacatgatcaccggtgctgctcagatggacggcgcgatcctggtagttgctgcgactgacgggccnatgccccaaacttgtgnnnacattctgttgggtcgtcaggtaggcgttccgtacatcatcgtgttcctgaacaaatgcgacatggttgatgacgaagagctgctggaactggttgaaatggaagttcgtgaacttctgtctcagtacgacttcccgggcgacgacactccgatcgttcgtggttctgctctgaaagcgctggaaggcgacgcagagtgggaagcgaaaatcctggaactggctggcttcttggattcctacattccggaaccagagcgtgcgattgacaagccgttcctgctgccgatcgaagacgtattctccatctccggtcgtggtaccgttgttaccggtcgtgtagaacgcggtatcatcaaagttggtgaagaagttgaaatcgttggtatcaaagagactcagaagtctacctgtactggcgttgaaatgttccgcaaactgctggacgaaggccgtgctggtgagaacgtaggtgttctgctgcgtggtatcaaacgtgaagaaatcgaacgtggtcaggtactggctaagccgggcaccatcaagccgcacaccaagttcgaatctgaagtgtacattctgtccaaagatgaaggcggccgtcatactccgttcttcaaaggctaccgtccgcagttctacttccgtactactgacgtgactggtaccatcgaactgccggaaggcgtagagatggtaatgccgggcgacaacatcaaaatggttgttaccctgatccacccgatcgcgatggacgacggtctgcgtttcgcaatccgtgaaggcggccgtaccgttggcgcgggcgttgtagcaaaagttctgagctaa

SEQ ID NO: 2590 - protein, 394 aa, Escherichia coli O157:H7 EDL933
  misc_feature (118)..(118): The Xaa at location 118 stands for Ala, Asp, Glu, Gly, or Val.
  misc_feature (119)..(119): The Xaa at location 119 stands for Asn, Asp, His, or Tyr.
MSKEKFERTKPHVNVGTIGHVDHGKTTLTAAITTVLAKTYGGAARAFDQIDNAPEEKARGITINTSHVEYDTPTRHYAHVDCPGHADYVKNMITGAAQMDGAILVVAATDGPMPQTCXXILLGRQVGVPYIIVFLNKCDMVDDEELLELVEMEVRELLSQYDFPGDDTPIVRGSALKALEGDAEWEAKILELAGFLDSYIPEPERAIDKPFLLPIEDVFSISGRGTVVTGRVERGIIKVGEEVEIVGIKETQKSTCTGVEMFRKLLDEGRAGENVGVLLRGIKREEIERGQVLAKPGTIKPHTKFESEVYILSKDEGGRHTPFFKGYRPQFYFRTTDVTGTIELPEGVEMVMPGDNIKMVVTLIHPIAMDDGLRFAIREGGRTVGAGVVAKVLS

SEQ ID NO: 2591 - DNA, 1470 bp, Drosophila melanogaster
  CDS (1)..(1470)
atgtcacatgcatttgccgccgccgtctgccggtccaccgcatccatgtcattggccctgcgctgcagccggcgcgccatgagctctgccagaatgctgcgtatggcgggtgccactgccacctccacggcctgcaaggattggcagagaaacggactacttgctgcgcccagaaccggcaacatgcagcagtacctgcgcgagtacgccaacgagaagaaggtgttcgagcgaaccaagccccattgcaatgtgggcaccattggccatgtggatcacggcaagaccacgctcacggcggccattaccaaggtcctggccgacaagcagctggccgagagcaagaagtacaatgaaatcgacaatgcgcccgaggagaaggctcgtggtattaccatcaatgtagcccacgtggagtaccagacggagacgcgtcactacggccacacagattgtccgggacatgccgattatattaagaacatgatcaccggcacagcccagatggatggcgccattctcgttgtggccgccaccgatggcgccatgccccaaactcgcgagcatatgctgctagccaagcagatcggcattgatcacatcgtggtgttcatcaacaaggtggacgccgccgatgaggagatggtcgacctggtggagatggagatccgagagctgcttaccgagatgggctatgatggtgacaagatccctgtggtaaagggctcggcgctgtgcgccctcgaggacaagagtcccgagatcggcaaggaggcgatcctgaaactgctccaggaggtggatagcttcatccccacgcctgtgcgcgagctggacaagcccttcctgctgcctgttgagaatgtgtattcgattcccggacgcggcaccgtcgtcactggtcgcctggagcgcggagtggtcaagaagggcatggagtgcgagttcgtgggctataacaaggtgctgaagtcgacggtgacgggcgtggagatgttccaccagattctggaggaggcgcaagccggtgatcagctgggagctctggtgcgcggcgttaagcgagatgacatcaagcgcggcatggtcatgtgcaagccgggcagtgtgaaggcactcgatcagctggaggcccaggtgtacatcctgtccaaggatgaaggcggtcgcacaaagcccttcatgtccttcatccaactgcagatgttctcccgcacctgggactgtgccgtgcaggtgcagattcccgataaggagatggtcatgcccggcgaagacaccaagctcattctgcgcctcatccggccaatggtcctggagcagggacaacgcttcacgctgcgtgacggaaacctgaccctgggcactggtgtcgtcaccagcactctgcccccattgactgaatcgcagcgatccgagttgacggagggcaagaaggcgcgcgagaagaaggtggcggctaagaagtag

SEQ ID NO: 2592 - protein, 489 aa, Drosophila melanogaster
MSHAFAAAVCRSTASMSLALRCSRRAMSSARMLRMAGATATSTACKDWQRNGLLAAPRTGNMQQYLREYANEKKVFERTKPHCNVGTIGHVDHGKTTLTAAITKVLADKQLAESKKYNEIDNAPEEKARGITINVAHVEYQTETRHYGHTDCPGHADYIKNMITGTAQMDGAILVVAATDGAMPQTREHMLLAKQIGIDHIVVFINKVDAADEEMVDLVEMEIRELLTEMGYDGDKIPVVKGSALCALEDKSPEIGKEAILKLLQEVDSFIPTPVRELDKPFLLPVENVYSIPGRGTVVTGRLERGVVKKGMECEFVGYNKVLKSTVTGVEMFHQILEEAQAGDQLGALVRGVKRDDIKRGMVMCKPGSVKALDQLEAQVYILSKDEGGRTKPFMSFIQLQMFSRTWDCAVQVQIPDKEMVMPGEDTKLILRLIRPMVLEQGQRFTLRDGNLTLGTGVVTSTLPPLTESQRSELTEGKKAREKKVAAKK

SEQ ID NO: 2593 - DNA, 1221 bp, Brucella melitensis 16M
  CDS (1)..(1221): transl_table=11
ttgtgctggcgcttgagcggttctagaacaaagagaacaacggcgatggcaaagagtaagtttgaacgtacgaagccccatgttaacatcggcacgattggtcacgttgaccatggcaagacgtcgctgacggcggcgatcacgaagtttttcggcgaattcaaggcgtatgaccagatcgacgctgcgcctgaagaacgcgcccgcggcatcacgatctcgacggcacacgtcgagtacgaaaccgcaaaccgtcactatgcgcacgtcgattgccccggccacgccgactatgtgaagaacatgatcaccggcgctgcccagatggatggcgcgatcctggtggtttcggctgctgacggcccgatgccgcagacccgcgagcacattctgcttgcccgtcaggttggcgttccggcgattgtcgtgttcctcaacaagtgcgaccaggttgacgatgcagaactgctcgaactggttgaactggaagtgcgcgaacttctgtcgaagtacgaattccccggcgacgaaatcccgatcatcaagggctcggctcttgctgctctggaagattcttccaaggaactgggcgaagatgccatccgcaacctgatggacgcggttgacagctacattccgaccccggaacgcccgatcgaccagccgttcctgatgccgatcgaagacgtgttctcgatctccggccgtggtacggttgtgacgggtcgcgttgagcgcggtatcgttaaggtcggtgaagaagttgaaatcgtcggcatcaaggcgacgacgaagaccacggttaccggcgttgaaatgttccgcaagctgctcgaccagggccaggctggcgacaacattggcgcgctgatccgcggcgttggccgtgaagacgttgaacgcggccaggttctctgcaagccgggttctgtgaagccgcacaccaagtttaaggcagaagcctatattctgaccaaggatgaaggtggccgtcatacgccgttcttcaccaactaccgtccgcagttctacttccgtacgacggacgtgacgggtgttgtgacgcttccggctggcacggaaatggtcatgcctggcgataacgtcgccatggacgttaccctgatcgtgccgatcgccatggaagagaagcttcgcttcgctatccgtgaaggcggccgcaccgtcggtgccggcatcgtctcgtcgatcatcgagtaa

SEQ ID NO: 2594 - protein, 406 aa, Brucella melitensis 16M
MCWRLSGSRTKRTTAMAKSKFERTKPHVNIGTIGHVDHGKTSLTAAITKFFGEFKAYDQIDAAPEERARGITISTAHVEYETANRHYAHVDCPGHADYVKNMITGAAQMDGAILVVSAADGPMPQTREHILLARQVGVPAIVVFLNKCDQVDDAELLELVELEVRELLSKYEFPGDEIPIIKGSALAALEDSSKELGEDAIRNLMDAVDSYIPTPERPIDQPFLMPIEDVFSISGRGTVVTGRVERGIVKVGEEVEIVGIKATTKTTVTGVEMFRKLLDQGQAGDNIGALIRGVGREDVERGQVLCKPGSVKPHTKFKAEAYILTKDEGGRHTPFFTNYRPQFYFRTTDVTGVVTLPAGTEMVMPGDNVAMDVTLIVPIAMEEKLRFAIREGGRTVGAGIVSSIIE

SEQ ID NO: 2595 - DNA, 1371 bp, Drosophila melanogaster
  CDS (1)..(1371)
atgagcggactccttccgaagttgtggcgccaatgtgaagcggggctagtgcgccgtatcagccaggcactgattggacccggcgccagtcagagccggtggacagggacccgtctcctggccaccagtgcggataaaaatccggccccggggctgcgggagctgccccactgcaatgtgggcaccattggtcacgttgaccatggtaaaacgaccctgaccgccgccattaccagaatccagtcacagaagggtctggcggagtacctgtcctacgaccagattgatcgggcgcccgaggagaaggcgcgtggcataactataaatgcttgccatattgggtattccactacagaacgcacctacgctcacacggattgcccgggtcatgcggactacataaagaacatgatctcgggcgcctcccaaatggatggcgccattctagtggtggctgccaccgatggtcaaatgccccagactcgcgagcaccttcttctggcaaaacaagtgggcatccagcgcatcatagtgtttataaacaaggccgatttggtggaccaggaggtgctggaactggtcgagatcgagatgcgtgagatgctaagtgatttcggctttgatggcgtgaatagcccggtaatttgtggctcagcgctgctggcccttcgcgaagataaatcggagttcggggttccgtcaattgaaaagctacttgagcaatgcgactcttacataccaacgccgcagcgcgatatctcgtccccatttatcctgccaatagacaatgcttttacggtacccggaaggggaaccgtggtcgtgggaaccatcaaaaggggcaccattccccggaacgcggatgcagacctactgggcttcaatcagaacctgaagacaagcatcagcgacatccagatattccggaagagcgtgcctcaggcacaggctggcgagaacgtcggcgcactgctgcgaggtattaagatatccgccgtggagcggggaatgctactgtgcgcaaccggctccgaggatatatccaaccactttgaaggctccatgtatctgctatcgcgggccgagggtggtcgtgtcaagcccatgctctccaagtatatacagcagctcttcagccagacgtggaatgttccagctagaattgacatagttccaagtgaggctatgcttatgccgggtgagcatggccaggtgcgcgtcacgctgctgcggaaaatggtcatgactccgggccaagccttcacaattcgcgagaacggagcgacggtggctaccggtatggtgacgcagcgcctgccgtcccttgacctgcccaagaacaagttatcaaaagtcttcgtggattgttaa

SEQ ID NO: 2596 - protein, 456 aa, Drosophila melanogaster
MSGLLPKLWRQCEAGLVRRISQALIGPGASQSRWTGTRLLATSADKNPAPGLRELPHCNVGTIGHVDHGKTTLTAAITRIQSQKGLAEYLSYDQIDRAPEEKARGITINACHIGYSTTERTYAHTDCPGHADYIKNMISGASQMDGAILVVAATDGQMPQTREHLLLAKQVGIQRIIVFINKADLVDQEVLELVEIEMREMLSDFGFDGVNSPVICGSALLALREDKSEFGVPSIEKLLEQCDSYIPTPQRDISSPFILPIDNAFTVPGRGTVVVGTIKRGTIPRNADADLLGFNQNLKTSISDIQIFRKSVPQAQAGENVGALLRGIKISAVERGMLLCATGSEDISNHFEGSMYLLSRAEGGRVKPMLSKYIQQLFSQTWNVPARIDIVPSEAMLMPGEHGQVRVTLLRKMVMTPGQAFTIRENGATVATGMVTQRLPSLDLPKNKLSKVFVDC

SEQ ID NO: 2597 - DNA, 1230 bp, Thermosynechococcus elongatus BP-1
  CDS (1)..(1230): transl_table=11
atggcacgcgctaaatttgaacgaaccaaaccccacgttaacgttggtaccattggtcacgtcgaccacggtaaaacgacactgactgcagccatcaccatgacactggctgcccaggggaaagctcaggctcgcaaatacgatgagattgatgctgcccctgaagaaaaagcccgtgggattacgatcaacaccgctcacgtggagtatgaaactgagaaacgccactatgcccacgtggattgccccggccacgctgactatgtgaaaaacatgatcacgggtgccgctcaaatggacggtgccattctggtcgtggccgcaacggatggtgcaatgccccaaaccaaagagcacattctcttggcccgtcaggtgggggtgcccagcatcgtcgtcttcctgaacaaagtggatatggtggatgacgaagagctgttggagctggtggaactagaactgcgagaactgcttaatgaatatgaattccccggcgacgaagtgcccatcatccgtggttcgggtctgaaagccctcgaagccatgaccgccaacccgaaaactctgcgcggtgaaaacgagtgggtagataaaatctacgagctcatggatgccgtggataactacattcctacccctgagcgggatgtggataagcccttcctgatggctgtggaagatgttttctccattaccggtcgcggtactgtggcgacgggtcggattgagcgcggtcgcattaaactcaacgaaaccgttgaactcgtgggcctgcgggaaacgcggacaacgacggtcaccggtattgaaatgtttaagaagagcctcgaagaagggattgccggtgacaacgccggtttgctcctgcggggtctaaaaaaagaggatgtggagcgggggatggtgattgctaagcccggctccattacgccccacaccaagtttgagggtgaagtgtacgtgctcactgaaaaagagggcggtcgtaaaactcccttctttgcgggttatcgtcctcagttctatgtgcgtaccactgatgtgactggcacgattacctcctttacgtctgacgatggtagtgccgctgaaatggtgatgcctggtgaccgcatcaaaatgaccgtggaactgatccagcccattgccattgagcaggggatgcgctttgcgatccgtgaaggtggtcgtaccattggggcgggtgtcgtctccaaaatcattgagtag

SEQ ID NO: 2598 - protein, 409 aa, Thermosynechococcus elongatus BP-1
MARAKFERTKPHVNVGTIGHVDHGKTTLTAAITMTLAAQGKAQARKYDEIDAAPEEKARGITINTAHVEYETEKRHYAHVDCPGHADYVKNMITGAAQMDGAILVVAATDGAMPQTKEHILLARQVGVPSIVVFLNKVDMVDDEELLELVELELRELLNEYEFPGDEVPIIRGSGLKALEAMTANPKTLRGENEWVDKIYELMDAVDNYIPTPERDVDKPFLMAVEDVFSITGRGTVATGRIERGRIKLNETVELVGLRETRTTTVTGIEMFKKSLEEGIAGDNAGLLLRGLKKEDVERGMVIAKPGSITPHTKFEGEVYVLTEKEGGRKTPFFAGYRPQFYVRTTDVTGTITSFTSDDGSAAEMVMPGDRIKMTVELIQPIAIEQGMRFAIREGGRTIGAGVVSKIIE

SEQ ID NO: 2599 - DNA, 1221 bp, Chaetosphaeridium globosum
  CDS (1)..(1221): transl_table=11
atgaatatatttcgtgacaaaaaaacccatataaatattgctacaattggacattttaatcatggtaaaacaactttaagcgcagcgatagctatgacattggctaataaaaaatatagattagataaaaagtcaattaaagttactcttgaagagaaaaatcaaggaataggtatttatacacatcatttccaatatgaaacaacactgcgccattattcacatacagattgtccaggtcatactgattatataaataatatgattgcgggtatatcgcaagtcgatagtactattttagttgtatctgctgtagatggttctatgtctcaaacaaaagaacatctcttaattgctaaattattaggaatatctagttttattgtatttataaataaagaagatcaattagatgatgataaatttgtttatttagtacaaaaagaaatttctcaatttttaatgtctcatggttttcaaacgaataaaattcccatagtgtcaggttctgctttattagcacttgaaaccctgattcaacaacctaatgtattgagaggagaaaattattgggtagacaaaatttatacattaattgaattacttgattcatatatacctaaacctaaaagaaaaaaagacaaacattttttaatgtggatagattcggtaaaattcctacctaatataggtcctatagcgatgggtagaatcgaacaaggtacaataaaagttggtgaatttattgatatagtcggcttcagagaaacgagaacggctaaaataattagtttggaattttttaatcaatcgtgtatgcaagttctagcgggtgatgatataggtgtttcaattgaaggtacaaaaaatcataatgatataaaaaaaggaatgattatttcaacaccgggtacaataaaatcatggctagaatttgaggcccaggtttatattctaaaacgtgaagaaggaggacgtactagtcctttttttaaaggttattgccctcaatttttttttaaaactacttgtgtaacaggtagaattgaagctattgaatatactacaggtagtaaaacttggatgattatgcctggtgataaactaaaaatacaagtaaatttggtctatccaataggaatcaaaaaaagaatgagatttttaattagagaaggaggtgttttagttggggtaggtattattagtaatttaataaagtaa

SEQ ID NO: 2600 - protein, 406 aa, Chaetosphaeridium globosum
MNIFRDKKTHINIATIGHFNHGKTTLSAAIAMTLANKKYRLDKKSIKVTLEEKNQGIGIYTHHFQYETTLRHYSHTDCPGHTDYINNMIAGISQVDSTILVVSAVDGSMSQTKEHLLIAKLLGISSFIVFINKEDQLDDDKFVYLVQKEISQFLMSHGFQTNKIPIVSGSALLALETLIQQPNVLRGENYWVDKIYTLIELLDSYIPKPKRKKDKHFLMWIDSVKFLPNIGPIAMGRIEQGTIKVGEFIDIVGFRETRTAKIISLEFFNQSCMQVLAGDDIGVSIEGTKNHNDIKKGMIISTPGTIKSWLEFEAQVYILKREEGGRTSPFFKGYCPQFFFKTTCVTGRIEAIEYTTGSKTWMIMPGDKLKIQVNLVYPIGIKKRMRFLIREGGVLVGVGIISNLIK

SEQ ID NO: 2601 - DNA, 1197 bp, Streptococcus agalactiae 2603V/R
  CDS (1)..(1197): transl_table=11
atggcaaaagaaaaatacgatcgtagtaaaccacacgttaacattggtacaatcggacacgttgaccacggtaaaactactttaacagcagctatcacaactgtattggcacgtcgcttgcctacttcagttaaccaaccaaaagattacgcttctatcgatgctgctccagaagagcgcgaacgcggaatcacaatcaacactgcacacgttgagtacgaaactgaaaaacgtcactatgcccacatcgacgctccaggacacgcggactacgttaaaaacatgatcactggtgctgctcaaatggacggagctatccttgtagttgcttcaactgatggaccaatgccacaaactcgtgagcacatccttctttcacgtcaagttggtgttaaacaccttatcgtattcatgaacaaagttgaccttgttgatgatgaagaattgcttgaattggttgaaatggaaattcgtgaccttctttcagaatacgacttcccaggtgatgaccttccagttatccaaggttcagctcttaaagcacttgaaggcgacgaaaaatacgaagacatcatcatggaattgatgagcactgttgatgagtacattccagaaccagaacgtgatactgacaaacctttacttcttccagttgaagatgtattctcaatcactggacgtggtacagttgcttcaggacgtatcgaccgtggtactgttcgtgtcaacgacgaagttgaaatcgttggtattaaagaagatatccaaaaagcagttgttactggtgttgaaatgttccgtaaacaacttgacgaaggtcttgcaggggacaacgttggtgttcttcttcgtggtgttcaacgtgatgaaatcgaacgtggtcaagttcttgctaaaccaggttcaatcaacccacacactagatttaaaggtgaagtttacatcctttctaaagaagaaggtggacgtcatactccattcttcaacaactaccgtccacaattctacttccgtacaactgacgtaacaggttcaatcgaacttccagcaggaacagaaatggttatgcctggtgataacgttactatcgaagttgaattgattcacccaatcgccgtagaacaaggtactactttctcaatccgtgaaggtggacgtactgttggttcaggtatcgtttcagaaatcgaagcttaa

SEQ ID NO: 2602 - protein, 398 aa, Streptococcus agalactiae 2603V/R
MAKEKYDRSKPHVNIGTIGHVDHGKTTLTAAITTVLARRLPTSVNQPKDYASIDAAPEERERGITINTAHVEYETEKRHYAHIDAPGHADYVKNMITGAAQMDGAILVVASTDGPMPQTREHILLSRQVGVKHLIVFMNKVDLVDDEELLELVEMEIRDLLSEYDFPGDDLPVIQGSALKALEGDEKYEDIIMELMSTVDEYIPEPERDTDKPLLLPVEDVFSITGRGTVASGRIDRGTVRVNDEVEIVGIKEDIQKAVVTGVEMFRKQLDEGLAGDNVGVLLRGVQRDEIERGQVLAKPGSINPHTRFKGEVYILSKEEGGRHTPFFNNYRPQFYFRTTDVTGSIELPAGTEMVMPGDNVTIEVELIHPIAVEQGTTFSIREGGRTVGSGIVSEIEA

SEQ ID NO: 2603 - DNA, 1200 bp, Bifidobacterium longum NCC2705
  CDS (1)..(1200): transl_table=11
atggcaaaggaaaagtacgagcgtactaagccgcacgttaacatcggtaccatcggccacgtcgaccacggtaagactaccctgactgccgccatctccaaggtgctgcacgaggagttcccggatgtcaacccggagtacgacttcaaccagatcgattccgctccggaagaggccgcccgcggtatcaccatcaacatcgcccacatcgagtaccagaccgagaagcgtcactacgctcacgtcgactgcccgggccacgccgacttcgtgaagaacatgattaccggtgctgcccagatggatggcgctatcctcgttgtggccgccaccgacggcccgatggcccagactcgcgagcacgtgctgctcgcccgtcaggttggcgttccgaagatcctcgtcgccctgaacaagtgcgacatggtcgacgatgaagagctcatcgagctcgtcgaagaagaggtccgcgacctcctcgacgagaacggcttcgaccgtgactgcccggtcatccacacctccgcttacggtgctctgcacgacgacgctccggaccacgagaagtgggtccagtccgttaaggacctcatggacgctgtcgacgactacatcccgaccccggttcacgacctggacaagccgttcctgatgccgatcgaggacgtcttcaccatctccggccgtggtaccgttgtcaccggtcgtgtcgagcgtggccagctggccgtcaacaccccggtcgagatcgttggtatccgtccgacccagcagaccaccgtcacctccatcgagaccttccacaagaccatggacgcctgcgaggctggcgacaacaccggtctgcttctgcgtggtctcggccgtgacgatgtcgagcgtggccaggttgtggccaagccgggctccgtcaccccgcacaccaagttcgagggcgaagtctacgtgctgaccaaggacgaaggcggccgtcactcgccgttcttctccaactaccgtccgcagttctacttccgcaccaccgacgtcaccggcgtcatcgagctgccggaaggcgtcgagatggttcagccgggcgaccacgctaccttcaccgttgagctgattcagcccatcgctatggaggaaggcctgaccttcgctgtgcgtgaaggtggccacaccgtcggctccggtcgtgtgaccaagatcctcgcctga

SEQ ID NO: 2604 - protein, 399 aa, Bifidobacterium longum NCC2705
MAKEKYERTKPHVNIGTIGHVDHGKTTLTAAISKVLHEEFPDVNPEYDFNQIDSAPEEAARGITINIAHIEYQTEKRHYAHVDCPGHADFVKNMITGAAQMDGAILVVAATDGPMAQTREHVLLARQVGVPKILVALNKCDMVDDEELIELVEEEVRDLLDENGFDRDCPVIHTSAYGALHDDAPDHEKWVQSVKDLMDAVDDYIPTPVHDLDKPFLMPIEDVFTISGRGTVVTGRVERGQLAVNTPVEIVGIRPTQQTTVTSIETFHKTMDACEAGDNTGLLLRGLGRDDVERGQVVAKPGSVTPHTKFEGEVYVLTKDEGGRHSPFFSNYRPQFYFRTTDVTGVIELPEGVEMVQPGDHATFTVELIQPIAMEEGLTFAVREGGHTVGSGRVTKILA

SEQ ID NO: 2605 - DNA, 1185 bp, Shewanella oneidensis MR-1
  CDS (1)..(1185): transl_table=11
atggctaaagctaaatttgaacgttctaagccccatgtaaacgtgggcaccatcggtcacgttgaccatggtaaaaccactctgactgcagctatctctcacgtactggctaagacctacggtggtgaagctaaagacttctctcaaatcgataacgctccagaagagcgtgagcgcggtattaccatcaatacctctcacatcgaatatgacacgccttcacgccactacgcacacgtagactgcccaggccacgctgactatgttaaaaacatgatcactggtgctgcacagatggacggcgcgatattagtagttgcttctacagacggtccaatgccacaaacgcgtgagcacatcctgctgtctcgccaagtaggcgtaccattcatcatcgtattcatgaacaaatgtgacatggttgacgatgctgagctgttagaattagtcgaaatggaagtacgtgaactgttatcagaatacgacttcccaggtgatgacttacccgtaatccaaggttcagctctgaaagcgctagaaggcgagccagagtgggaagcgaagatccttgagctggcagcagctttagactcttacattccagaaccagagcgtgatatcgataagccattcctgatgccaatcgaagacgtattctcaatctctggccgtggtacagtagtaactggtcgtgttgagcgtggtatcgtacgtgttggtgacgaagtagaaatcgttggtatccgtactacaactaagaccacctgtactggtgttgaaatgttccgtaaactgcttgacgaaggtcgtgcaggtgagaactgtggtattttattacgtggtactaagcgtgatgatgtagaacgtggccaagtattatctaagccaggttcaatcaacccacacaccacttttgaatcagaagtctacgtactgtcaaaagaagaaggtggtcgtcacacgccattcttcaaaggctaccgtccacagttctacttccgtacaactgacgtaaccggtactatcgaactgccagaaggcgtagagatggtaatgccaggcgacaacatcaagatgaaagtgactctgatctgcccaatcgcgatggacgaaggtttacgcttcgcaatccgtgaaggtggccgtacagtaggcgctggtgttgtagcgaagattttcgcttaa

SEQ ID NO: 2606 - protein, 394 aa, Shewanella oneidensis MR-1
MAKAKFERSKPHVNVGTIGHVDHGKTTLTAAISHVLAKTYGGEAKDFSQIDNAPEERERGITINTSHIEYDTPSRHYAHVDCPGHADYVKNMITGAAQMDGAILVVASTDGPMPQTREHILLSRQVGVPFIIVFMNKCDMVDDAELLELVEMEVRELLSEYDFPGDDLPVIQGSALKALEGEPEWEAKILELAAALDSYIPEPERDIDKPFLMPIEDVFSISGRGTVVTGRVERGIVRVGDEVEIVGIRTTTKTTCTGVEMFRKLLDEGRAGENCGILLRGTKRDDVERGQVLSKPGSINPHTTFESEVYVLSKEEGGRHTPFFKGYRPQFYFRTTDVTGTIELPEGVEMVMPGDNIKMKVTLICPIAMDEGLRFAIREGGRTVGAGVVAKIFA

SEQ ID NO: 2607 - DNA, 1185 bp, Shewanella oneidensis MR-1
  CDS (1)..(1185): transl_table=11
gtggcaaaagctaaatttgaacgtagtaagcctcacgtaaacgtgggcaccatcggtcacgttgaccatggtaaaaccactctgactgcagctatctctcacgtactggctaagacctacggtggtgaagctaaagacttctctcaaatcgataacgctccagaagagcgtgagcgcggtattaccatcaatacctctcacatcgaatatgacacgccttcacgccactacgcacacgtagactgcccaggccacgctgactatgttaaaaacatgatcactggtgctgcacagatggacggcgcgatattagtagttgcttctacagacggtccaatgccacaaacgcgtgagcacatcctgctgtctcgccaagtaggcgtaccattcatcatcgtattcatgaacaaatgtgacatggttgacgatgctgagctgttagaattagtcgaaatggaagtacgtgaactgttatcagaatacgacttcccaggtgatgacttacccgtaatccaaggttcagctctgaaagcgctagaaggcgagccagagtgggaagcgaagatccttgagctggcagcagctttagactcttacattccagaaccagagcgtgatatcgataagccattcctgatgccaatcgaagacgtattctcaatctctggccgtggtacagtagtaactggtcgtgttgagcgcggtatcgtacgtgttggtgatgaagtagaaatcgtaggtatccgtactactactaagactacctgtactggtgttgaaatgttccgtaagctgcttgacgaaggtcgtgcaggtgagaactgtggtattttattacgtggtactaagcgtgatgacgtggaacgtggtcaagtattatctaagccaggttcaatcaacccacacaccacttttgaatcagaagtctacgtactgtcaaaagaagaaggtggtcgtcacacgccattcttcaaaggctaccgtccacagttctacttccgtacaactgacgtaaccggtactatcgaactgccagaaggcgtagagatggtaatgcctggtgacaacattaagatggttgtaacgctgatctgcccaatcgcgatggacgaaggtttacgcttcgcaatccgcgaaggtggccgtacagtaggcgctggtgtagtagctaagatcattgcttaa

SEQ ID NO: 2608 - protein, 394 aa, Shewanella oneidensis MR-1
MAKAKFERSKPHVNVGTIGHVDHGKTTLTAAISHVLAKTYGGEAKDFSQIDNAPEERERGITINTSHIEYDTPSRHYAHVDCPGHADYVKNMITGAAQMDGAILVVASTDGPMPQTREHILLSRQVGVPFIIVFMNKCDMVDDAELLELVEMEVRELLSEYDFPGDDLPVIQGSALKALEGEPEWEAKILELAAALDSYIPEPERDIDKPFLMPIEDVFSISGRGTVVTGRVERGIVRVGDEVEIVGIRTTTKTTCTGVEMFRKLLDEGRAGENCGILLRGTKRDDVERGQVLSKPGSINPHTTFESEVYVLSKEEGGRHTPFFKGYRPQFYFRTTDVTGTIELPEGVEMVMPGDNIKMVVTLICPIAMDEGLRFAIREGGRTVGAGVVAKIIA

SEQ ID NO: 2609 - DNA, 1191 bp, Bradyrhizobium japonicum USDA 110
  CDS (1)..(1191): transl_table=11
atggccaaagcaaagtttgaacgtaacaagccgcactgcaacatcggcaccatcggtcacgtcgaccatggcaagacgtcgctgaccgcggcgatcaccaagatcctcgccgagaccggcggtgcgacgttcaccgcgtacgaccagatcgacaaggcgccggaagagaaggcgcgcggcatcacgatctcgaccgcgcacgtcgagtacgagaccaagaaccgccactacgcccacgtcgactgccccggccacgccgactacgtgaagaacatgatcaccggcgccgcccagatggacggcgcgatcctggtcgtgtcggccgctgacggcccgatgccgcagacccgcgagcacatcctgctcgcccgccaggtcggcgtgcccgcgctcgtcgtgttcctcaacaagtgcgacatggtcgacgatcccgagctgctcgagctcgtcgagctcgaagtccgcgagctgctctcgaagtacgaattcccgggcgacaagatcccgatcatcaagggctcggcgctcgccgctctcgaagattcggacaagaagctcggccacgacgccatcctcgaactgatgcgcaacgtcgacgagtacatcccgcagccggagcgtccgatcgaccagccgttcctgatgccggttgaagacgtgttctcgatctcgggccgcggcaccgtggtgaccggccgtgtcgagcgcggcatcgtcaaggtcggcgaggaaatcgagatcgtcggtctgcgtgcgacccagaagaccaccgtcaccggcgtcgaaatgttccgcaagctgctcgatcagggccaggccggcgacaacatcggcgctctgctccgcggcaccaagcgcgaggacgtcgagcgcggccaggtgctggcgaagccgggttcggtcaagccgcacaccaagttcaaggctgaggcctacatcctcaccaaggaagagggcggtcgccacaccccgttcttcaccaactaccgtccgcagttctacttccgcaccaccgacgtgaccggtgtcgtgcatctgccggaaggtaccgagatggtgatgccgggcgacaacatcgcgatggaagtgcacctgatcgtgccgatcgcgatggaagagaagctccgcttcgcgatccgcgagggcggtcgtaccgtcggcgccggcgtcgtcgcctcgatcatcgagtaa

SEQ ID NO: 2610 - protein, 396 aa, Bradyrhizobium japonicum USDA 110
MAKAKFERNKPHCNIGTIGHVDHGKTSLTAAITKILAETGGATFTAYDQIDKAPEEKARGITISTAHVEYETKNRHYAHVDCPGHADYVKNMITGAAQMDGAILVVSAADGPMPQTREHILLARQVGVPALVVFLNKCDMVDDPELLELVELEVRELLSKYEFPGDKIPIIKGSALAALEDSDKKLGHDAILELMRNVDEYIPQPERPIDQPFLMPVEDVFSISGRGTVVTGRVERGIVKVGEEIEIVGLRATQKTTVTGVEMFRKLLDQGQAGDNIGALLRGTKREDVERGQVLAKPGSVKPHTKFKAEAYILTKEEGGRHTPFFTNYRPQFYFRTTDVTGVVHLPEGTEMVMPGDNIAMEVHLIVPIAMEEKLRFAIREGGRTVGAGVVASIIE

SEQ ID NO: 2611 - DNA, 1194 bp, Tropheryma whipplei str. Twist
  CDS (1)..(1194): transl_table=11
atggcaaaggccaagtttgagcggactaaaccccatgtgaatattgggactataggtcatgttgaccacggtaaaaccacactgaccgccgccatatcgagggttttgtccgagaggcttccttcgaatacgaatgtaaagcaggactttgatgcaattgactcggccccggaagagcgccagaggggtattacgatcaatatttcgcatatcgagtacgagacggaaaagaggcactacgcccatgttgatgccccaggacatgccgattacataaagaatatgattactggcgccgctcagatggatggtgcgattcttgttgttgcagcgacagacggtgcaatggcccagacccgtgagcatgtcttgcttgccaagcaggtcggcgtcccctatctccttgtggcactcaataaagccgatatggtgtctgatgaggaaatactcgagcttgttgagcttgaggtgcgcgagctgttgtcaaatcacggctttgacggtgagaatgttcccgttgtacgcgtatctggccttaaagcacttgaaggtgatcaaaagtggggcgatgcggttatggagcttatgaaagccgttgatgagagcattccggaccccgttagagatagggataaaccctttttgatgcccattgaggatgtgttcacaatcactgggcgcggaacggttgttacaggccgtgcagagcgtggtgttcttgcggttaattccgaggttgaaatagtcggtatacgcccgacgcagaaaaccactgtaacgggaattgaaatgtttcgcaagcagttggatgaggcgtgggcaggtgagaactgcggcctgctgcttcgcggcacaaaacgagaggatgtcgagcgtgggcaggttgttgtgaaacctggcagtgttacaccgcatacaaagtttgagggaaaggcgtatattctgtcgaaagatgagggtggaaggcataacccgttctatagtaactatcgcccacagttttacttcaggacaactgacgtgactggcgttataacccttcctgagggaacagaaatggttatgcccggcgataccatctctataacagtcgacttgattcagccaattgctatggaagaaggcttgggttttgcgattcgcgagggtggcagaactgttggcgcaggcactgtagtgaaaattcttgaatag

SEQ ID NO: 2612 - protein, 397 aa, Tropheryma whipplei str. Twist
MAKAKFERTKPHVNIGTIGHVDHGKTTLTAAISRVLSERLPSNTNVKQDFDAIDSAPEERQRGITINISHIEYETEKRHYAHVDAPGHADYIKNMITGAAQMDGAILVVAATDGAMAQTREHVLLAKQVGVPYLLVALNKADMVSDEEILELVELEVRELLSNHGFDGENVPVVRVSGLKALEGDQKWGDAVMELMKAVDESIPDPVRDRDKPFLMPIEDVFTITGRGTVVTGRAERGVLAVNSEVEIVGIRPTQKTTVTGIEMFRKQLDEAWAGENCGLLLRGTKREDVERGQVVVKPGSVTPHTKFEGKAYILSKDEGGRHNPFYSNYRPQFYFRTTDVTGVITLPEGTEMVMPGDTISITVDLIQPIAMEEGLGFAIREGGRTVGAGTVVKILE

SEQ ID NO: 2613 - DNA, 1188 bp, Enterococcus faecalis V583
  CDS (1)..(1188): transl_table=11
atggcaaaagaaaaatttgaccgttctaaatcccatgttaacattggtactatcggacacgttgaccatggtaaaactacattaacagctgcaattgctactgtattatcaaaacacggtggcggggaagcacaaagctacgattctatcgataacgctccagaagaaaaagaacgtggaatcacaatcaacacttctcatatcgaatatgaaactgaaactcgtcactatgcacacgttgactgcccaggacatgcggactacgttaaaaacatgatcactggtgctgctcaaatggacggagctatcttagtagtttctgctgctgatggtcctatgcctcaaacacgtgaacatatcttattatcacgtaacgttggtgtaccatacatcgttgtattcttaaacaaaatggatatggttgatgacgaagaattattagaattagtagaaatggaagttcgtgacttattatcagaatacgatttcccaggcgatgatgttccagttatcgcaggttctgctttgaaagctttagaaggcgacgagtcttatgaagaaaaaatcttagaattaatggctgcagttgacgaatatatcccaactccagaacgtgatactgacaaaccattcatgatgccagtcgaagacgtattctcaatcactggacgtggtactgttgctacaggccgtgttgaacgtggtgaagttcgcgttggtgacgaagttgaaatcgttggtattaaagacgaaacatctaaaacaactgttacaggtgttgaaatgttccgtaaattattagactacgctgaagcaggcgacaacatcggtgctttattacgtggtgtagcacgtgaagatatcgaacgtggacaagtattagctaaaccagctacaatcactccacacacaaaattcaaagctgaagtatacgtattatcaaaagaagaaggcggacgtcacactccattcttcactaactaccgtcctcaattctacttccgtacaacagacgttactggtgttgtagaattgccagaaggtactgaaatggtaatgcctggtgataacgttgctatggacgttgaattaattcacccaatcgctatcgaagacggaactcgtttctctattcgtgaaggcggacgtactgtaggttcaggcgttgttactgaaatcgttaaataa

SEQ ID NO: 2614 - protein, 395 aa, Enterococcus faecalis V583
MAKEKFDRSKSHVNIGTIGHVDHGKTTLTAAIATVLSKHGGGEAQSYDSIDNAPEEKERGITINTSHIEYETETRHYAHVDCPGHADYVKNMITGAAQMDGAILVVSAADGPMPQTREHILLSRNVGVPYIVVFLNKMDMVDDEELLELVEMEVRDLLSEYDFPGDDVPVIAGSALKALEGDESYEEKILELMAAVDEYIPTPERDTDKPFMMPVEDVFSITGRGTVATGRVERGEVRVGDEVEIVGIKDETSKTTVTGVEMFRKLLDYAEAGDNIGALLRGVAREDIERGQVLAKPATITPHTKFKAEVYVLSKEEGGRHTPFFTNYRPQFYFRTTDVTGVVELPEGTEMVMPGDNVAMDVELIHPIAIEDGTRFSIREGGRTVGSGVVTEIVK

SEQ ID NO: 2615 - DNA, 1191 bp, Nitrosomonas europaea ATCC 19718
  CDS (1)..(1191): transl_table=11
atggcgaagagtaaatttgagcgggtgaagccgcatgtgaatgtgggaacgattggtcatgtggatcatggaaagacgacgttgacggcggcgattacgacgatactgacgaagaagtttggtggagaagccaaatcatacgatcagattgactcggcgccggaagagcgtgcacgcggaattactatcaatacatcccatgttgaatacgaaacagacaagcgccattacgcacacgtagattgtcctggtcatgctgactatgtgaagaacatgattaccggagcggcacaaatggatggtgccattctggtggtatcagcagctgatggtccgatgccgcaaacgcgtgagcatattttgctggctcggcaagtgggggtgccctacatcatcgttttcatgaacaaagcggacatggtagacgatgctgaattgcttgaacttgtcgaaatggagatacgcgaactattgtccaactatgattttccgggtgacgacacacctattatcattggttcggcattgaaagcgctggaaggagataagagtgatattggtgaagccgccattctgaaattggcagaggcactggattcgtatataccggagccagaaagggcaattgatggggctttcatcatgcctgtggaagacgtcttctcaatctctgggcgtgggaccgtagtcacggggcgtgtggagcgtgggatagtcaaagtaggtgatgaaatcgaaatcgttggattgaaacccacgatcaagacagtatgtaccggtgtggagatgttccgtaaattgctggatcaggggcaggctggtgataacgtgggtatcctgttaagaggtaccaagcgagaagaagtggagcgtgggcaggtacttgccaaacccggcagcatactgccacacaccaagtttactgcagagatctatgtgttgagcaaagaagagggtggtcgtcatacaccattttttgcgggatatcgcccacagttttatttcagaacaacggatgtgacaggatcgattgagttaccggcaggtgttgagatggtgatgcccggggataatatctcggtcacagtcaatctgattgcgccgattgcaatggatgaagggctgcgttttgcaatccgtgaaggtggacgtaccgtaggcgcaggcgtggtcgctaaagtgatcgaataa

SEQ ID NO: 2616 - protein, 396 aa, Nitrosomonas europaea ATCC 19718
MAKSKFERVKPHVNVGTIGHVDHGKTTLTAAITTILTKKFGGEAKSYDQIDSAPEERARGITINTSHVEYETDKRHYAHVDCPGHADYVKNMITGAAQMDGAILVVSAADGPMPQTREHILLARQVGVPYIIVFMNKADMVDDAELLELVEMEIRELLSNYDFPGDDTPIIIGSALKALEGDKSDIGEAAILKLAEALDSYIPEPERAIDGAFIMPVEDVFSISGRGTVVTGRVERGIVKVGDEIEIVGLKPTIKTVCTGVEMFRKLLDQGQAGDNVGILLRGTKREEVERGQVLAKPGSILPHTKFTAEIYVLSKEEGGRHTPFFAGYRPQFYFRTTDVTGSIELPAGVEMVMPGDNISVTVNLIAPIAMDEGLRFAIREGGRTVGAGVVAKVIE

SEQ ID NO: 2617 - DNA, 1197 bp, Mycoplasma gallisepticum R
  CDS (1)..(1197): transl_table=4
atatttaaaaaaatggcaaaagaaaggttcgatcgtagtaaacctcacgttaatattggaacaatcggtcatattgaccacgggaaaactacattaaccgcagcaatttgtaccgtgttatcaaaagccggtacatctgaagctaaaaaatatgatgaaattgatgctgcaccagaagaaaaagctcgtgggattacaattaacactgcacacgtagaatacgcaactcaaaatcgtcactatgcacacgttgactgtcccggtcacgccgactacgttaaaaacatgattacaggtgctgctcaaatggacggtggtatcttagttgtgtctgcaactgatggtccaatgcctcaaactcgtgaacacatcctattagctcgccaagttggtgttcctaagatggttgtattcttaaacaaatgtgatgtagctgatgatccagaaatgcaagaattagttgaaatggaagttagagatcttcttaaatcttacggatttgatggtgataacactccagtaatcagaggttctgctttaggtgctcttaatggtgaacctgcatgagaagaaaaaattcatgaactaatgaaagcagttgatgaatacatcccaactcctgaccgtgaagttgataaaccatttttattaccaatcgaagatactatgacaattactggtcgtggtactgtagtaactggtagagttgaacgtggtcaacttaaagttggtgaagaagttgaaatcgttggtattactgacactagaaaagtagtagtaactggtattgaaatgttcagaaaagaactagatgctgctatggctggtgacaacgctgggatcttacttcgtggtgtagaccgtaaagatgtacaacgtggtcaagttttagctaaacctggttcaattactccacacaagaaattcagagctgaaatttatgcgcttaagaaggatgaaggtggtcgtcacacagctttcttaaatggttacagacctcaattctacttcagaacaactgacgtaactggttcaatccaattaaaagaaggaactgaaatggttatgcctggtgataacacagaaattatcgttgaattaatttcttcaatcgcttgtgaaaaaggttctaagttctctatccgtgaaggtggtagaactgtaggtgctggtacagttgtagaagtacttgaatag

SEQ ID NO: 2618 - protein, 398 aa, Mycoplasma gallisepticum R
MFKKMAKERFDRSKPHVNIGTIGHIDHGKTTLTAAICTVLSKAGTSEAKKYDEIDAAPEEKARGITINTAHVEYATQNRHYAHVDCPGHADYVKNMITGAAQMDGGILVVSATDGPMPQTREHILLARQVGVPKMVVFLNKCDVADDPEMQELVEMEVRDLLKSYGFDGDNTPVIRGSALGALNGEPAWEEKIHELMKAVDEYIPTPDREVDKPFLLPIEDTMTITGRGTVVTGRVERGQLKVGEEVEIVGITDTRKVVVTGIEMFRKELDAAMAGDNAGILLRGVDRKDVQRGQVLAKPGSITPHKKFRAEIYALKKDEGGRHTAFLNGYRPQFYFRTTDVTGSIQLKEGTEMVMPGDNTEIIVELISSIACEKGSKFSIREGGRTVGAGTVVEVLE

SEQ ID NO: 2619 - DNA, 1200 bp, Helicobacter hepaticus ATCC 51449
  CDS (1)..(1200): transl_table=11
atggcaaaagaaaagtttgtgaaaaacaaacctcacgtaaatgtgggaacaatcgggcatgttgatcatggtaaaacaactttgagtgcagctatttctgctgtgttggcaactaaaggtcttgcagaattgaaagactatgataacattgataacgcaccagaggaaaaggaaagaggtattactatcgcgacttctcatattgaatatgagacagaaaatcgccactacgcgcacgtggattgccccggacacgctgactatgttaaaaatatgattacaggtgcagctcaaatggacggagcaattcttgttgtttctgccgcagatggtcctatgccacaaacacgtgagcatatcttgttgtctcgccaagtaggtgtgcattacatcgttgtatttttaaataaacaagatatggttgatgatgctgaattacttgagcttgtggaaatggaagtgcgtgaattgcttagtcaatatgatttccctggagatgatactcctatcattgcaggttctgctctcaaagcgcttgaagaagcaaaagcaggtaatgtaggtgaatggggtgaaaaagtattaaaattaatggaagaagttgataaatatattccaactccacaacgtgatactgaaaaaacattccttatgcctgtagaagatgtattctcaatcgctggtcgtggaacggttgtaacaggaagagtagaaagaggtgttgtgcaagtaggcgatgaagtagaaatcgtaggaatccgcgacactcaaaaaacaacagttacaggcgttgaaatgtttagaaaagagcttgataaaggtgaggcaggagataatgtcggtattttgttgcgaggaacaaaaaaagaagaagtagaaagaggtatggttctttgtaagcccggctcaattactccacataagaaatttgaaggtgaaatttatgtcctttcaaaagatgaaggtggaagacatacaccatttttcaatggctatcgcccacaattttatgtgcgaactaccgatgttaccggttctattgagcttccaagtggcgtagaaatggttatgcccggtgataatgtaaaaatcacagtggaacttattgctcctgtggcacttgaagatggaactcgttttgcgattcgtgaaggtggtagaacagttggttcaggtgttgtaacaaaaattattgagtaa

SEQ ID NO: 2620 - protein, 399 aa, Helicobacter hepaticus ATCC 51449
MAKEKFVKNKPHVNVGTIGHVDHGKTTLSAAISAVLATKGLAELKDYDNIDNAPEEKERGITIATSHIEYETENRHYAHVDCPGHADYVKNMITGAAQMDGAILVVSAADGPMPQTREHILLSRQVGVHYIVVFLNKQDMVDDAELLELVEMEVRELLSQYDFPGDDTPIIAGSALKALEEAKAGNVGEWGEKVLKLMEEVDKYIPTPQRDTEKTFLMPVEDVFSIAGRGTVVTGRVERGVVQVGDEVEIVGIRDTQKTTVTGVEMFRKELDKGEAGDNVGILLRGTKKEEVERGMVLCKPGSITPHKKFEGEIYVLSKDEGGRHTPFFNGYRPQFYVRTTDVTGSIELPSGVEMVMPGDNVKITVELIAPVALEDGTRFAIREGGRTVGSGVVTKIIE

SEQ ID NO: 2621 - DNA, 1191 bp, Bordetella pertussis Tohama I
  CDS (1)..(1191): transl_table=11
atggcaaaaggcaagtttgaacgtaccaagccgcacgtgaacgtgggtacgattggtcacgttgaccacggcaaaacgacgttgacggcggcgatcacgacggtgctgtcgaacaagttcggcggcgaggctcgcggctacgaccagattgacgcggcgccggaagagaaggcgcgtgggatcacgatcaacacctcgcacgttgagtacgagacggagacgcgtcactacgcgcacgttgattgcccgggtcacgctgactacgtgaagaacatgatcacgggtgctgcgcagatggacggcgcgatcctggtggtgtcggccgcagacggcccgatgccgcagacgcgcgagcacattttgctgtcgcgccaggttggcgtgccgtacatcatcgtgttcctgaacaaggcggacatggttgatgacgcggagctgctcgagctggtggagatggaagtccgcgaactgctgagcaagtacgatttcccgggcgatgacacgccgatcgtgaagggttcggccaagctggcgctggaaggcgacaagggcgaactgggcgagcaggcgattctgtcgctggcgcaagcgctggacacgtacattccgacgccggagcgcgcggtcgacggtgcgttcctgatgccggtggaagacgtgttctcgatctcgggccgtggcacggtggtgactggccgtatcgagcgcggcgtggtgaaggttggcgaggaaatcgaaatcgtgggcatcaagccgacggtgaagacgacctgcacgggcgtggagatgttccgcaagctgctggaccagggccaggcgggcgacaacgtgggtatcttgctgcgcggcaccaagcgtgaagacgtcgagcgtggccaggtgctggccaagccgggttcgatcaacccgcacacggacttcacggccgaggtgtacattctgtccaaggaagagggtggccgtcacacgccgttcttcaacggctatcgtccgcagttctacttccgcacgacggacgtgaccggcacgatcgacctgccggcggacaaggaaatggtgctgccgggcgacaacgtgtcgatgaccgtcaagctgctggccccgatcgccatggaagaaggtctgcgtttcgccatccgtgaaggcggtcgtaccgtcggcgccggcgtcgtcgccaagatcatcaagtaa

SEQ ID NO: 2622 - protein, 396 aa, Bordetella pertussis Tohama I
MAKGKFERTKPHVNVGTIGHVDHGKTTLTAAITTVLSNKFGGEARGYDQIDAAPEEKARGITINTSHVEYETETRHYAHVDCPGHADYVKNMITGAAQMDGAILVVSAADGPMPQTREHILLSRQVGVPYIIVFLNKADMVDDAELLELVEMEVRELLSKYDFPGDDTPIVKGSAKLALEGDKGELGEQAILSLAQALDTYIPTPERAVDGAFLMPVEDVFSISGRGTVVTGRIERGVVKVGEEIEIVGIKPTVKTTCTGVEMFRKLLDQGQAGDNVGILLRGTKREDVERGQVLAKPGSINPHTDFTAEVYILSKEEGGRHTPFFNGYRPQFYFRTTDVTGTIDLPADKEMVLPGDNVSMTVKLLAPIAMEEGLRFAIREGGRTVGAGVVAKIIK

SEQ ID NO: 2623 - DNA, 1200 bp, Prochlorococcus marinus subsp. pastoris str. CCMP1986
  CDS (1)..(1200): transl_table=11
atggctcgcgagaagttcgaaaggaacaaaccacatgtcaacataggtactattggccacgttgatcatggaaaaacaaccctgactgctgctattactaatgttttagctaaaaaaggtcaagcacaagctcaagactatggagacatcgatggtgctccagaagaaagagagcgtggtattacaattaatactgcacacgttgaatacgaaacagccgaaagacattatgcacacgttgactgtccaggtcacgctgattatgtgaaaaacatgatcactggtgcagctcaaatggatggtgcaattttagtttgtgcagcaacagatggtcctatggctcaaacaaaagaacacattcttttagcaaaacaagttggagttcctgctttggttgttgctttgaataaatgtgacatggtagatgatgaagaaatcattgaacttgttgaaatggaaatcagagaacttcttgatagttatgatttccctggtgatgatatacccatcgttcaagtttcaggtctaaaagctttagaaggagattctacttgggaatctaaaattgaagaattaatgactgccgttgatgctagtattcctgaacctgagagagaaatcgacaagccatttttgatggcagttgaagatgtattttctatcacaggtagaggaacagttgccactggaagaatagagagaggaaaagtcaaagtaggggaagaagttgaaatagttggaataagagatacaagattgaccactgtcacgggtgttgaaatgttccgtaaacttcttgatgaaggtatggctggagataatgttggactacttttacgtggtgttcagaaagaagatattgaaagaggtatggttcttgttaaaaaaggttcgattactcctcatacaaaatttgaaggagaagtttatgtccttaagaaagaagagggtggtagacatacacctttctttgctggttacagaccacaattttatataagaacaacagatgtaactggacaaatcactgcattcacagctgatgatggagccaatgttgagatggtaatgccaggtgacaggataaaaatgactggagaattaatttgtccagttgcaattgaacaaggtatgcgctttgctattcgcgaaggaggtcgtactattggagctggtgttgtttctaaaattattgaataa

(The sequence listing continues in the following parts.)

1. A method for producing a transgenic cell with increased gamma-aminobutyric acid (GABA) content as compared to a corresponding non-transformed wild type cell comprising increasing or generating one or more activities selected from the group consisting of: Factor arrest protein, 60S ribosomal protein, ABC transporter permease protein, acetyltransferase, acyl-carrier protein, At4g32480-protein, At5g16650-protein, ATP-binding protein, Autophagy-related protein, auxin response factor, auxin transcription factor, b1003-protein, b1522-protein, b2739-protein, b3646-protein, B4029-protein, Branched-chain amino acid permease, calcium-dependent protein kinase, cytochrome c oxidase subunit VIII, elongation factor Tu, fumarylacetoacetate hydrolase, geranylgeranyl pyrophosphate synthase, glucose dehydrogenase, glycosyl transferase, harpin-induced family protein, homocitrate synthase, hydrolase, isochorismate synthase, MFS-type transporter protein, microsomal beta-keto-reductase, polygalacturonase, protein phosphatase, pyruvate kinase, Sec-independent protein translocase subunit, serine protease, thioredoxin, thioredoxin family protein, transcriptional regulator, ubiquinone biosynthesis monooxygenase, and YHR213W-protein.

2. A method for producing a transgenic cell with increased gamma-aminobutyric acid (GABA) content as compared to a corresponding non-transformed wild type cell comprising:
(i) increasing or generating the activity of a polypeptide comprising a polypeptide, a consensus sequence or at least one polypeptide motif as depicted in column 5 or 7 of table II or of table IV, respectively;
(ii) increasing or generating the activity of an expression product of a nucleic acid molecule comprising a polynucleotide as depicted in column 5 or 7 of table I, and/or
(iii) increasing or generating the activity of a functional equivalent of (i) or (ii).

3. The method of claim 1 wherein the expression of at least one nucleic acid molecule comprising a nucleic acid molecule selected from the group consisting of:
a) a nucleic acid molecule encoding the polypeptide shown in column 5 or 7 of Table II;
b) a nucleic acid molecule shown in column 5 or 7 of Table I;
c) a nucleic acid molecule encoding a polypeptide sequence depicted in column 5 or 7 of Table II and conferring an increased GABA content as compared to a corresponding non-transformed wild type plant cell, plant, or part thereof;
d) a nucleic acid molecule having at least 30% identity with the nucleic acid molecule sequence of a polynucleotide comprising the nucleic acid molecule shown in column 5 or 7 of Table I and conferring an increased GABA content to a plant cell, plant, or part thereof as compared to a corresponding non-transformed wild type plant cell, plant, or part thereof;
e) a nucleic acid molecule encoding a polypeptide having at least 30% identity with the amino acid sequence of the polypeptide encoded by the nucleic acid molecule of (a) to (c) and having the activity of a nucleic acid molecule comprising a polynucleotide as depicted in column 5 of Table I and conferring an increased GABA content to a plant cell, plant, or part thereof as compared to a corresponding non-transformed wild type plant cell, plant, or part thereof;
f) a nucleic acid molecule which hybridizes with a nucleic acid molecule of (a) to (c) under stringent hybridization conditions and confers an increased GABA content to a plant cell, plant, or part thereof as compared to a corresponding non-transformed wild type plant cell, plant, or part thereof;
g) a nucleic acid molecule encoding a polypeptide which can be isolated with the aid of monoclonal or polyclonal antibodies made against a polypeptide encoded by one of the nucleic acid molecules of (a) to (e) and having the activity of the nucleic acid molecule comprising a polynucleotide as depicted in column 5 of Table I;
h) a nucleic acid molecule encoding a polypeptide comprising the consensus sequence or one or more polypeptide motifs as shown in column 7 of Table IV and having the activity of a nucleic acid molecule comprising a polynucleotide as depicted in column 5 of Table II or IV;
i) a nucleic acid molecule encoding a polypeptide having the activity of a protein as depicted in column 5 of Table II and conferring an increased GABA content to a plant cell, plant, or part thereof as compared to a corresponding non-transformed wild type plant cell, plant, or part thereof;
j) a nucleic acid molecule which comprises a polynucleotide, which is obtained by amplifying a cDNA library or a genomic library using the primers in column 7 of Table III and having the activity of a nucleic acid molecule comprising a polynucleotide as depicted in column 5 of Table II or IV; and
k) a nucleic acid molecule which is obtained by screening a suitable nucleic acid library under stringent hybridization conditions with a probe comprising a complementary sequence of a nucleic acid molecule of (a) or (b) or with a fragment thereof, having at least 15 nt of a nucleic acid molecule complementary to a nucleic acid molecule of (a) to (e) and encoding a polypeptide having the activity of a protein comprising a polypeptide as depicted in column 5 of Table II;
is increased or generated.

4. The method of claim 2, wherein the one or more activities increased or generated is: Factor arrest protein,60S ribosomal protein, ABC transporter permease protein, acetyltransferase, acyl-carrier protein, At4g32480-protein, At5g16650-protein, ATP-binding protein, Autophagy-related protein, auxin response factor, auxin transcription factor, b1003-protein, b1522-protein, b2739-protein, b3646-protein, B4029-protein, Branched-chain amino acid permease, calcium-dependent protein kinase, cytochrome c oxidase subunit VIII, elongation factor Tu, fumarylacetoacetate hydrolase, geranylgeranyl pyrophosphate synthase, glucose dehydrogenase, glycosyl transferase, harpin-induced family protein, homocitrate synthase, hydrolase, isochorismate synthase, MFS-type transporter protein, microsomal beta-keto-reductase, polygalacturonase, protein phosphatase, pyruvate kinase, Sec-independent protein translocase subunit, serine protease, thioredoxin, thioredoxin family protein, transcriptional regulator, ubiquinone biosynthesis monooxygenase, or YHR213W-protein, respectively.

5. The method of claim 1, wherein the transgenic cell is a plant cell, or from a transgenic plant or a part thereof, wherein the plant cell, plant, or part thereof has increased gamma-aminobutyric acid (GABA) content as compared to a corresponding non-transformed wild type plant cell, plant, or part thereof.

6. The method of claim 5 wherein the transgenic plant is a monocotyledonous plant, a dicotyledonous plant or a gymnosperm plant, or the plant cell or plant part is from a monocotyledonous plant, a dicotyledonous plant or a gymnosperm plant.

7. The method of claim 5 wherein the transgenic plant is selected from the group consisting of maize, wheat, rye, oat, triticale, rice, barley, soybean, peanut, cotton, oil seed rape, canola, winter oil seed rape, corn, manihot, pepper, sunflower, flax, borage, safflower, linseed, primrose, rapeseed, turnip rape, tagetes, a solanaceous plant, potato, tobacco, eggplant, tomato, Vicia species, pea, alfalfa, coffee, cacao, tea, Salix species, oil palm, coconut, perennial grass, a forage crop and Arabidopsis thaliana.

8. An isolated nucleic acid molecule comprising a nucleic acid molecule selected from the group consisting of:
a. a nucleic acid molecule encoding the polypeptide shown in column 5 or 7 of Table II B;
b. a nucleic acid molecule shown in column 5 or 7 of Table I B;
c. a nucleic acid molecule encoding a polypeptide sequence depicted in column 5 or 7 of Table II and conferring an increased yield under stress conditions as compared to a corresponding non-transformed wild type plant cell, plant, or part thereof;
d. a nucleic acid molecule having at least 30% identity with the nucleic acid molecule sequence of a polynucleotide comprising the nucleic acid molecule shown in column 5 or 7 of Table I and conferring an increased GABA content as compared to a corresponding non-transformed wild type plant cell, plant, or part thereof;
e. a nucleic acid molecule encoding a polypeptide having at least 30% identity with the amino acid sequence of the polypeptide encoded by the nucleic acid molecule of (a) to (c) and having the activity represented by a nucleic acid molecule comprising a polynucleotide as depicted in column 5 of Table I and conferring an increased GABA content to a plant cell, plant, or part thereof as compared to a corresponding non-transformed wild type plant cell, plant, or part thereof;
f. a nucleic acid molecule which hybridizes with a nucleic acid molecule of (a) to (c) under stringent hybridization conditions and confers increased GABA content to a plant cell, plant, or part thereof as compared to a corresponding non-transformed wild type plant cell, plant, or part thereof;
g. a nucleic acid molecule encoding a polypeptide which can be isolated with the aid of monoclonal or polyclonal antibodies made against a polypeptide encoded by one of the nucleic acid molecules of (a) to (e) and having the activity represented by the nucleic acid molecule comprising a polynucleotide as depicted in column 5 of Table I;
h. a nucleic acid molecule encoding a polypeptide comprising the consensus sequence or one or more polypeptide motifs as shown in column 7 of Table IV and preferably having the activity represented by a nucleic acid molecule comprising a polynucleotide as depicted in column 5 of Table II or IV;
i. a nucleic acid molecule encoding a polypeptide having the activity of a protein as depicted in column 5 of Table II and conferring an increased yield under conditions of transient and repetitive abiotic stress as compared to a corresponding non-transformed wild type plant cell, plant, or part thereof;
j. a nucleic acid molecule which comprises a polynucleotide, which is obtained by amplifying a cDNA library or a genomic library using the primers in column 7 of Table III which do not start at their 5′-end with the nucleotides ATA and having the activity of a nucleic acid molecule comprising a polynucleotide as depicted in column 5 of Table II or IV; and
k. a nucleic acid molecule which is obtained by screening a suitable nucleic acid library under stringent hybridization conditions with a probe comprising a complementary sequence of a nucleic acid molecule of (a) or (b) or with a fragment thereof, having at least 15 nt of a nucleic acid molecule complementary to a nucleic acid molecule of (a) to (e) and encoding a polypeptide having the activity of a protein comprising a polypeptide as depicted in column 5 of Table II.

9. The nucleic acid molecule of claim 8, whereby the nucleic acid molecule of (a) to (k) differs in one or more nucleotides from the sequence depicted in column 5 or 7 of table I A and encodes a protein which differs in one or more amino acids from the protein sequences depicted in column 5 or 7 of table II A.

10. A nucleic acid construct which confers the expression of the nucleic acid molecule of claim 8, comprising one or more regulatory elements.

11. A vector comprising the nucleic acid molecule of claim 8 or a nucleic acid construct which confers the expression of said nucleic acid molecule and comprises one or more regulatory elements.

12. A host cell which has been transformed stably or transiently with the nucleic acid molecule of claim 8 or a nucleic acid construct or vector that comprises said nucleic acid molecule, wherein the host cell shows due to the transformation an increased gamma-aminobutyric acid (GABA) content as compared to a corresponding non-transformed wild type host cell.

13. A process for producing a polypeptide, wherein the polypeptide is expressed in the host cell of claim 12, or in the nucleus of said host cell.

14. A polypeptide produced by the process of claim 13 whereby the polypeptide differs from the sequence as shown in table II A by one or more amino acids.

15. An antibody which binds specifically to the polypeptide of claim 14.

16. A transgenic cell nucleus, cell, plant cell nucleus, plant cell, plant tissue, propagation material, pollen, progeny, harvested material, plant, or plant part comprising the nucleic acid molecule of claim 8 or a plant tissue, propagation material, pollen, progeny, harvested material, plant, or plant part comprising a host nucleus or host cell which has been transformed stably or transiently with the nucleic acid molecule of claim 8, wherein the host cell shows due to the transformation an increased gamma-aminobutyric acid (GABA) content as compared to a corresponding non-transformed wild type host cell.

17. The transgenic plant cell nucleus, transgenic plant cell, transgenic plant or transgenic plant part of claim 16, wherein the transgenic plant is a monocotyledonous plant or the transgenic plant cell nucleus, transgenic plant cell, or transgenic pant part is from a monocotyledonous plant.

18. The transgenic plant cell nucleus, transgenic plant cell, transgenic plant or transgenic plant part of claim 16, wherein the transgenic plant is a dicotyledonous plant or the transgenic plant cell nucleus, transgenic plant cell, or transgenic pant part is from a dicotyledonous plant.

19. The transgenic plant cell nucleus, transgenic plant cell, transgenic plant or transgenic plant part of claim 16, wherein the corresponding plant is selected from the group consisting of corn (maize), wheat, rye, oat, triticale, rice, barley, soybean, peanut, cotton, oil seed rape, canola, winter oil seed rape, manihot, pepper, sunflower, flax, borage, safflower, linseed, primrose, rapeseed, turnip rape, tagetes, a solanaceous plant, potato, tobacco, eggplant, tomato, Vicia species, pea, alfalfa, coffee, cacao, tea, Salix species, oil palm, coconut, perennial grass, a forage crop and Arabidopsis thaliana.

20. The transgenic plant cell nucleus, transgenic plant cell, transgenic plant or transgenic plant part of claim 16, wherein the plant is corn, soy, oil seed rape, (canola, winter oil seed rape, cotton, wheat or rice, or the transgenic plant cell nucleus, transgenic plant cell, or transgenic plant part is from corn, soy, oil seed rape, canola, winter oil seed rape, cotton, wheat, or rice.

21. A transgenic plant comprising one or more of a plant cell nucleus, a plant cell, progeny, seed or pollen produced by the transgenic plant of claim 16.

22. A transgenic plant, transgenic plant cell nucleus, transgenic plant cell, plant comprising one or more of said transgenic plant cell nucleus or transgenic plant cell, progeny, seed or pollen derived from or produced by the transgenic plant of claim 16, wherein said transgenic plant, transgenic plant cell nucleus, transgenic plant cell, plant comprising one or more of said transgenic plant cell nucleus or transgenic plant cell, progeny, seed or pollen is genetically homozygous for a transgene conferring increased yield as compared to a corresponding non-transformed wild type plant cell, transgenic plant or part thereof.

23. A process for the identification of a compound conferring an increased gamma-aminobutyric acid (GABA) content to a plant cell, plant, or part thereof as compared to a corresponding non-transformed wild type plant cell, plant, or part thereof, comprising:
a) culturing a plant cell, plant, or part thereof expressing the polypeptide of claim 14 conferring an increased GABA content as compared to a corresponding non-transformed wild type plant cell, plant, or part thereof and a readout system capable of interacting with the polypeptide under suitable conditions which permit the interaction of the polypeptide with said readout system in the presence of a compound or a sample comprising a plurality of compounds and capable of providing a detectable signal in response to the binding of a compound to said polypeptide under conditions which permit the expression of said readout system and of the polypeptide of claim 14 conferring an increased GABA content as compared to a corresponding non-transformed wild type plant cell, plant, or part thereof;
b) identifying if the compound is an effective agonist by detecting the presence or absence or increase of a signal produced by said readout system.

24. A method for the production of an agricultural composition comprising
a) providing the compound identified by the method of claim 23; and
b) formulating the compound identified by the method of claim 23 in a form acceptable for an application in agriculture.

25. A composition comprising
a) the nucleic acid molecule of claim 8,
b) a polypeptide encoded by said nucleic acid molecule, c) a nucleic acid construct or vector comprising said nucleic acid molecule, or
d) an antibody which binds specifically to said polypeptide,
and optionally an agriculturally acceptable carrier.

26. An isolated polypeptide as depicted in table II which is from Escherichia coli, Arabidopsis thaliana, Azotobacter vinelandii, Brassica napus, Physcomitrella patens, Saccharomyces cerevisiae, Synechocystis sp., and/or or Thermus thermophilus.

27. (canceled)

28. A method for selecting a plant or plant cell with increased gamma-aminobutyric acid (GABA) content as compared to a corresponding non-transformed wild type plant or plant cell comprising utilizing as a marker the nucleic acid molecule of claim 8 for selection of a plant or plant cell with increased gamma-aminobutyric acid (GABA) content as compared to a corresponding non-transformed wild type plant or plant cell.
